(19) United States
(12) Patent Application Publication
(10) Pub. No.: US 2026/0216245 A1
(43) Pub. Date: Jul. 30, 2026

(54) THERAPEUTIC BASE EDITING

(71) Applicants: The J. David Gladstone Institute, A Testamentary Trust Established Under the Will of J. David Gladst, San Francisco, CA (US); The Regents of The University of California, Oakland, CA (US)

(72) Inventors: Alexander Marson, San Francisco, CA (US); Carl Ward, San Francisco, CA (US); Ralf Schmidt, Bernsdorf Saxony (DE)

(21) Appl. No.: 19/151,579

(22) PCT Filed: Feb. 7, 2024
(86) PCT No.: PCT/US2024/014756

§ 371 Date: Jul. 28, 2025

Related U.S. Application Data
(60) Provisional application No. 63/443,822, filed on Feb. 7, 2023.
(60) Provisional application No. 63/491,664, filed on Mar. 22, 2023.

(51) Int. Cl. A61K 35/17; A61K 40/11; A61K 40/31; A61K 40/42; A61P 35/00; C07K 14/525; C07K 14/55; C07K 14/57; C12N 5/0783; C12N 9/78; C12N 15/11; C12N 15/86

(52) U.S. Cl. CPC A61K 35/17; A61K 40/11; A61K 40/31; A61K 40/4232; A61K 40/4234; A61K 40/4235; A61P 35/00; C07K 14/525; C07K 14/55; C07K 14/57; C12N 5/0636; C12N 9/78; C12N 15/111; C12N 15/86; C12N 2310/20; C12N 2510/00; C12N 2710/10343; C12N 2710/16043; C12N 2740/10043; C12N 2740/15043; C12N 2750/14143; C12Y 305/04002; C12Y 305/04005

(57) ABSTRACT

A method to screen for base edited genes with modifications in therapeutic targets, cells produced by the method and methods of using the modified cells are provided.

### PRIORITY

[0001] This application claims priority to and the benefit of U.S. Provisional Patent Application No. 63/443,822, filed Feb. 7, 2023, and to U.S. Provisional Patent Application No. 63/491,664, filed Mar. 22, 2023, the entire disclosures of which are incorporated herein by this reference.

### GOVERNMENT FUNDING

[0002] This invention was made with government support under CA245718 awarded by the National Institutes of Health. The government has certain rights in the invention.

### INCORPORATION BY REFERENCE OF SEQUENCE LISTING

[0003] This application contains a Sequence Listing which has been submitted electronically in ST26 format and is hereby incorporated by reference in its entirety. Said ST26 file, created on Feb. 7, 2024, is named “3730222WO1.xml” and is 518,254 bytes in size.

### BACKGROUND

[0004] DNA base-editors encompass two key components: a Cas enzyme for programmable DNA binding and a single-stranded DNA modifying enzyme for targeted nucleotide alteration. Two classes of DNA base-editors have been described: cytosine base-editors and adenine base-editors. Collectively, all four transition mutations (C→T, T→C, A→G, and G→A) can be installed with the available CRISPR/Cas BEs. Two base-editor architectures were described that can efficiently induce targeted C-to-G base transversions. In addition, studies report dual base-editor systems for combinatorial editing in human cells.

### SUMMARY

[0005] A highly efficient method was employed to perform pooled Base Editing screens in primary human T cells. This includes but is not limited to adenine base editors (ABE), cytosine base editors (CBE) and with different types of Cas9 (e.g., Cas9 with NGG PAM, SpG Cas9 with NG PAM, or NG Cas9 with NG PAM or SpRY (NRN>NYN PAMs) disclosed in Walton et al., Science, 368:290 (2020), the disclosure of which is incorporated by reference herein). This approach was used to identify genomic regions (at the amino acid level) in coding regions which can be targeted to alter T cell functionality in multiple contexts. Base editing employs a catalytically impaired Cas protein such as one fused to, for example, a deaminase converting A/T to G/C (adenine base editors although editors for other bases are envisioned, see, e.g., Table 1 in Rees and Liu, Nat.Rev.Genet., 19.770 (2019), the disclosure of which is incorporated by reference herein). The enzyme and sgRNAs may be delivered to cells as isolated protein or isolated nucleic acid, or via one or more vectors such as plasmids or viral or virus like vectors or nanoparticles encoding the enzyme or sgRNA, or other delivery vehicles.

[0006] Importantly, methods and compositions were used to generate base edited T cells with improved functionality that could enhance immunotherapies. The functionality includes direct responses to T cell activation as well as the integration of environmental factors. A set of screens identified causal relationships between about 117,000 mutation sites in the entire coding region of selected genes and their effect on T cell activation and function.

[0007] Therapeutics modulating the function of the immune system can be applied but are not limited to cancer, autoimmunity, infections, rheumatic diseases. Here, a screening approach was used to identify targets that could be used to fine-tune the response of the immune system in all these contexts. For example, the present results can be used to enhance T cell activity against cancer, by precisely activating or inhibiting all or a particular function of specific proteins (e.g., turning off only DNA binding capability of a transcription factor while keeping its ability to form complexes with other TFs or the other way around; alternatively deleting specific binding capabilities of one domain while keeping other domains intact and rewiring the signaling process. This is an advantage over KO or overexpression, due to its precision but also because redundancy loops can't be activated (e.g., there are two kinases doing the same job, one of which is the primary kinase and the other one becomes active when primary kinase is completely knocked out. With base editing, only kinase function would be impaired (or enhanced) while the protein itself would still be expressed and mechanisms activating the alternative kinase would not become active)). Due to the highly multiplexable nature of Base Editing, the identified hits/targets can be readily combined with each other or other genetic perturbations to further increase their potency or integrated into existing therapies.

[0008] The disclosure thus provides for a method for high throughput base editing screens in primary human T cells using a virus such as a lentivirus including an optimized lentiviral transfer plasmid architecture that allows for high titer virus production and consequently delivery to primary human T cells. Also provided is an approach for high throughput screening of protein/gene domains at amino acid level, in primary human T cells. A large set of previously uncharacterized targets that alter T cell function were identified.

[0009] Methods to make base edited T cells with enhanced functionality in the resulting T cells are provided. Those cells allow for the ability to dissect different (including opposing) functional regions within a protein and exploitation for therapeutic or diagnostic purposes.

[0010] As described herein, lentiviral enabled pooled base editor screens can be used in many contexts to understand the function of the 100k+ variants in various model systems. The size of the screening library can be expanded or the targets the screening library can be altered to target and investigate different genes or non-coding genomic regions (e.g., those known to be relevant to the disease/phenotype of interest), thereby facilitating discovery of therapeutically relevant functional sites for T cells. The hits can be used for detailed investigation and tested for biologic activity in specific disease models. Successful candidates are further tested for multiplexed therapeutic strategies. For example, an identified mutation can be introduced into anti-cancer T cells to enhance their potency or to anchor sites that can lead to enhanced potency.

[0011] In one embodiment, the genes in FIGS. 1-4 are modified in cells, e.g., immune cells such as T cells. In one embodiment, sgRNAs having at least 80%, 82%, 85%, 87%, 88%, 89%, 90%, 92%, 94%, 95%, 96%, 97%, 98% or 99% nucleic acid sequence identity to any one of sgRNAs provided herein are used to modify cells, e.g., immune cells. In one embodiment, sites having at least 80%, 82%, 85%, 87%, 88%, 89%, 90%, 92%, 94%, 95%, 96%, 97%, 98% or 99% nucleic acid sequence identity to any one of those disclosed in FIG. 1, 2, 3 or 4 in cells are modified.

[0012] In one embodiment, the genes in FIG. 11 are modified in cells, e.g., immune cells such as T cells. In one embodiment, sgRNAs having at least 80%, 82%, 85%, 87%, 88%, 89%, 90%, 92%, 94%, 95%, 96%, 97%, 98% or 99% nucleic acid sequence identity to any one of sgRNAs provided herein are used to modify cells, e.g., immune cells. In one embodiment, sites having at least 80%, 82%, 85%, 87%, 88%, 89%, 90%, 92%, 94%, 95%, 96%, 97%, 98% or 99% nucleic acid sequence identity to any one of those disclosed in FIG. 11 in cells are modified.

[0013] In some embodiments, the gene is 1. PIK3CD, VAV1, LCP2, PLCG1, DGKZ or having at least 80%, 82%, 85%, 87%, 88%, 89%, 90%, 92%, 94%, 95%, 96%, 97%, 98% or 99% nucleic acid sequence identity thereto. In some embodiments, guides are selected from one or more of PLCG1_pos: TGACCAGAATTTCCTGGCTC; DGKZ_pos: AGGGGCAGGATGGCAACAGG; pos: CTATGAGGACCTCATGCGCT; PIK3CD_pos1 GGGCAGTCCTGCAGAAGGAC; PIK3CD_pos2 GTATGAGCACGAGAAGGACC; PIK3CD_pos3 GGAGCTGTATGAGCACGAGA; PIK3CD_pos4 AGCACGAGAAGGACCTGGTG; PIK3CD_pos5 GAACGCCGACGAGCGGATGA; PIK3CD_pos6 TGGAGCAGCTGAGCTCAGGC; PIK3CD_neg1 GATGGAGGAGGAATGGACCA; PIK3CD_neg2 GGATGAATGGGACACGCTCG; PIK3CD_neg3 TGGAAGGTGAAGCTCTCCTG or having at least 80%, 82%, 85%, 87%, 88%, 89%, 90%, 92%, 94%, 95%, 96%, 97%, 98% or 99% nucleic acid sequence identity thereto.

### BRIEF DESCRIPTION OF THE FIGURES

[0014] FIGS. 1A-1B provide genes modified in a library of T cells infected with a library of sgRNA, the sites of modification and the sgRNAs, using a 3.0 cutoff. A) Genes 1-36 and sites modified and B) sgRNAs.

[0015] FIGS. 2A-2B provide genes modified in a library of T cells infected with a library of sgRNA, the sites of modification and the sgRNAs, using a 2.0 cutoff. A) Genes 37-135 sites modified), and B) sgRNAs.

[0016] FIGS. 3A-3B provide genes modified in a library of T cells infected with a library of sgRNA, the sites of modification and the sgRNAs, using a 1.0 cutoff. A) Genes 136-367 sites modified, and B) sgRNAs.

[0017] FIGS. 4A-4B provide genes modified in a library of T cells infected with a library of sgRNA, the sites of modification and the sgRNAs, using a 0.5 cutoff. A) Genes 368-743 site modified, and B) sgRNAs.

[0018] FIGS. 5A-5D. Base Editor Screens in Primary Human T cells. A) Schematic of the pool screening/sorting approach for base editing in primary T cells. B) Evidence that guides targeting the markers which were sorted for are predominantly depleted—for the markers TNFa, IFNg, CD25 (coding gene IL2RA) and PD1 (coding gene PDCD1)→demonstrates expected effects/controls of the screen. C) Filtering for guides that encode a knockout (splice site edit or new stop codon introduction) demonstrates that positive and negative regulators of cytokine production are enriched/depleted as expected. D) Base editing allows alteration of function that is fundamentally different from knockout—allowing increased cytokine production from modification of positive regulators and vice-versa (i.e., genes which would usually be delirious to cytokine production when knocked out can now be edited to enhance cytokine production and vice versa).

[0019] FIGS. 6A-6C. Lentiviral delivery of Base Editors in primary human T cells. A) Flow cytometry with annotated mutations for CD3, 5, 7 genes (3 sgRNAs per gene). B) Sanger sequencing data showing underlying highly efficient mutations (which can or cannot result in downregulated protein as seen in A). C) quantification of flow cytometry results for all sgRNAs

[0020] FIGS. 7A-7B. Extended Validation of selected perturbations identified by the screen. A) Similar to 3D but for membrane expressed activation markers of T cells. B) Response of perturbed T cells under different strengths of stimulation.

[0021] FIG. 8. Full panel live imaging data over time for all T-cell to cancer cell ratios and all perturbations.

[0022] FIGS. 9A-9G. Validation of selected perturbations identified by the screen. A) Schematic: Mutations were introduced by Base Editor mRNA +sgRNA electroporation in an arrayed format. B) Validation of edits by NGS. C) Flow cytometry plots of selected perturbations showing up or downregulation of target markers, as identified by the screen. D) Quantification of flow cytometry results, presented as Log2Fold Change over control (AAVS1). In red: positive regulators as predicted by the screen. In blue: negative regulators as predicted by the screen. E) Quantification of a broader panel of secreted cytokines (data in ~2 weeks).

[0023] FIGS. 10A-10B provide genes modified in a library of T cells infected with a library of sgRNA, the sites of modification (A) and the sgRNAs (B), gated on a screen log-fold-change of >1.0 or <−3.0 and hits that behave the opposite from a knockout in the screen (i.e., the sign of the LFC is opposite) and have LFC of >0.4.

[0024] FIG. 11 provides genes 1-47 modified in a library of T cells infected with a library of sgRNA, and the sites of modification for those genes.

[0025] FIG. 12 provides the sgRNAs for genes 1-47 of FIG. 11.

[0026] FIG. 13 provides a schematic for therapeutic engineering of human immune cells.

[0027] FIG. 14 provides a schematic for forward genetic discovery of functional alleles with base editors.

[0028] FIG. 15 provides a schematic for base editing enabled multiplexed KO in cells, such as T cells.

[0029] FIG. 16 provides data showing a scalable base editing system in human T cells.

[0030] FIG. 17 provides a schematic of functional protein engineering in primary cells.

[0031] FIG. 18 provides several T cell genes.

[0032] FIG. 19 demonstrates that mutation effects are reproducible between human donors.

[0033] FIG. 20 discloses the power of the disclosed system in the context of discovering mutations that affect protein expression.

[0034] FIG. 21 discloses the power of the disclosed system in the context of being able to demonstrate distinct effects of mutations in the same genes.

[0035] FIGS. 22-24 show that scanning mutations reveal protein residues and domains.

[0036] FIG. 25 shows high resolution base editing with NG PAM Cas9.

[0037] FIG. 26 further demonstrates NG PAM Cas9 base editor screen (58 genes).

[0038] FIGS. 27-29 demonstrate that NG PAM Cas9 screens provide increased resolution.

[0039] FIG. 30 provides a 3D structure demonstrating that scanning mutations reveal protein residues and domains.

[0040] FIG. 31 provides a schematic for targeted knock-ins of candidate variants.

[0041] FIGS. 32 and 33 provide a schematic for CRISPR base editing.

[0042] FIG. 34 demonstrates that mutation effects are reproducible between human donors.

[0043] FIG. 35 provides graphs showing in vitro cancer killing with different target antigens.

[0044] FIG. 36 further demonstrates NG PAM Cas9 base editor screen (54 genes).
[0045] Schmidt et al. Nature. Base-editing mutagenesis maps alleles to tune human T cell functions. Published online 13 Dec. 2023. doi.org/10.1038/s41586-023-06835-6, incorporated herein by reference.

### DETAILED DESCRIPTION

[0046] Base Editing is a method that, guided by CRISPR-Cas9, introduces specific A to G or C to T mutations in the genomic DNA without double-strand breaks. This method has traditionally been used to correct specific pathologic mutations with increased on-target fidelity and minimized translocation risk. More recently, Base Editing was used to introduce loss of-function mutations in primary human T cells to create functional knockouts. While Cytidine base editors (CBE) can directly introduce stop codons by converting amino acid coding triplets into TGA, TAA or TAG, ABE and CBE both can cause functional knockouts by altering splice sites (to induce frame shift) or removing start codons. These approaches have successfully been used to introduce multiplexed knockouts in primary human T cells. It was hypothesized that Base Editing could be used for functional interrogation of proteins at amino acid level resolution.

[0047] For example, one or more target regions in one or more selected gene are identified (e.g., identified by an editing window spanning a portion of the sgRNA length including bases directly upstream of the 5′ end of the sgRNA) that can be modified to alter gene function (e.g., to fine tune in a positive or negative manner). In one embodiment, the selected genes play roles in T cell biology or are members of families of genes involved in T cell/lymphocyte biology. In one embodiment, all available sgRNAs with an NGG PAM sequence with the editing window being (at least in part) in the coding regions of these genes were prepared, thus tiling the entire coding region of 386 genes. Since this was not a traditional CRISPR knockout screen, but a Base Editing screen, the chosen approach allowed us to mutate specific parts of these genes without causing frameshift mutations. Although the 386 genes that were modified are involved in T cell function/biology, at least some of the gene have roles in other immune cells, e.g., lymphocytes. Thus, the identified sgRNAs can be employed to modify any cell that expresses the target gene or to identify functional or targetable regions within the respective protein independent of its cellular expression pattern. More broadly, the screens define a targetable region in these genes other than that for the specific sgRNAs employed because of the absence of control for introduced amino acid changes that occur at a defined pattern (within the editing window, A becomes G or C becomes T). Thus, sgRNAs were used to define gene regions that, when altered, influence gene function (decrease or enhance).

[0048] Further, given the broad variety of sgRNAs, the information provided by the screen allows for the fine tuning of the function of respective gene product (in comparison to traditional knockout where it is an all-or-nothing mutation). Some of the hotspot regions that were identified may be used to introduce the opposite effect a traditional knockout would have (e.g., enhance protein function where knockout). Furthermore, this approach allows targeting of specific functions within the overall functionality the respective protein.

[0049] The sgRNAs may be employed to modify gene/protein function, for example, alter but not eliminate the function(s), in cells including but not limited to Pan T cells, CD4 T cells, CD8 T cells, regulatory T cells, NK cells, B cells or other lymphoid cells to also alter their function in a therapeutic setting (enhance activity or decrease specific activity). The identified protein modification of region allowing for modified protein functionality could be used in any context this gene or protein might be expressed, including other cell types or as a synthetic approach. For example, cells not naturally expressing the protein of interest could be modified by expression of an identified mutant of that protein to alter cellular functions. In another example, the modified protein could be incorporated in other synthetic therapies, e.g., anti-cancer or anti-autoimmune T cells.

[0050] In one embodiment, using a cutoff of 3.0, 36 genes having modifications were identified, e.g., those modifications resulted in a stronger effect/alteration in function. The regions that were modified may be further altered, e.g., substituting one or more amino acids, which may further enhance or may decrease the activity of the resulting variant gene product.

### Exemplary Screening Methods

[0051] Previous CRISPR-enabled screening has primarily focused on whole gene inhibition/knockout or activation, whereas a high-resolution method can identify functionally distinct regions within a gene, which may be of therapeutic relevance. When combined with large scale phenotypic screening approaches, the effects of amino acid level disruption across hundreds of genes involved in T cell activity can rapidly be determined. This high throughput examination enables quick identification of functionally distinct regions—regions that performed better or orthogonally to inhibition/activation of the entire gene—that could also be used for therapeutic applications. For example, genes and coding regions may be identified more finely tuned T cell responses; sgRNA may be identified for base editing mediated knockout, alleviating many concerns with standard CRISPR knockout; or loss/gain of function mutations into specific function regions of a protein may be identified, allowing dissection of different functions of a single protein.

[0052] To optimize this technology for screening in primary human T cells, the efficiency of a variety of base editors on specific genes was tested. Lentiviral transfer plasmids of the second generation were modified to enhance the titer. With these constructs, highly efficient edits were produced with base editor and sgRNA delivered on separated viruses. By adding a combination of blasticidin and puromycin to this constructs, successfully transduced cells were enriched, yielding a pure population of edited cells. Having established the delivery and functionality of the base editor machinery in primary human T cell for pooled screening (it was found that the lentiviral approach was superior to a hybrid sgRNA lentivirus approach+base editor mRNA), an sgRNA library was prepared for the coding region of 385 genes involved in T cell activity. T cells were sorted for their capability to produce the cytokines TNFa and IFNg as well as the activation induced surface markers CD25 and PD1. T cells were also subjected to repeated stimulation to test which sgRNA mediated mutations provide a proliferative advantage compared to control cells. sgRNAs and groups of sgRNAs which mapped to distinct regions within target genes and caused gain-or-loss of T cell activity were identified. Notably, these effects frequently exceeded the effects of knockout/activation or caused the opposite effect of knockout/activation—highlighting the power of base editing to introduction functional changes to genes which are otherwise not possible. sgRNAs were found that mediate negative effects as well as sgRNAs mediating positive effects within the same gene, using a single editing method to cause opposite effects. Consequently, the findings were validated by assessing T cell activation in arrayed format with single sgRNAs targeting representative regions within a selected set of genes. It was also shown that some of the introduced perturbations increased the cancer killing potency of T cells in vitro.

[0053] In summary, a highly efficient method to perform pooled Base Editing screens in primary human T cells was identified. This includes but is not limited to ABE, CBE and with different types of Cas9 (Cas9 with NGG PAM, SpG Cas9 with NG PAM, or NG Cas9 with NG PAM). This approach was used to identify genomic regions (at the amino acid level) in coding regions which can be targeted to alter T cell functionality in multiple contexts. Thus, methods and compositions to generate base edited T cells with improved functionality that could enhance immunotherapies are provided. The functionality includes direct responses to T cell activation as well as the integration of environmental factors. A set of screens identified causal relationships between about 117,000 mutation sites in the entire coding regions of selected genes and their effect on T cell activation and function. Thus, the method provides a discovery platform to identify therapeutic targets.

[0054] In one embodiment, a CBE is employed. In one embodiment, the CBE is a first-generation base-editor (CBE1), one fusing a rat-derived cytosine deaminase Apolipoprotein B MRNA Editing Enzyme Catalytic Subunit 1 (APOBEC1) to the amino terminus of catalytically deficient, or “dead”, Cas9 (dCas9). In a narrow window of the non-targeted strand, CBE1 deaminates cytosine to uracil. Uracil is then recognized by cell replication machinery as a thymine, resulting in a C-G to T-A transition. In one embodiment, the base editor is a second-generation cytosine base-editor (CBE2), e.g., one prepared by fusing an uracil DNA glycosylase inhibitor (LTGI) to the C-terminus of BE1, inhibiting the activity ofUDG. BE3 was developed by restoring histidine at position 840 (H840, HNH catalytic domain) in dCas9 to generate a base-editor that uses Cas9 nickase (nCas9). This variant induces a nick in the G-containing strand of the U-G intermediate (non-edited DNA strand) to bias cellular repair of the intermediate towards a U-A outcome, further converted to T-A during DNA replication. In one embodiment, the base editor is a fourth-generation cytosine base-editor (CBE4), e.g., generated by fusing an additional copy of UGI to the N terminus of nCas9 with an optimized 27 bp linker. YEE-BE3 was developed by screening several mutations previously reported to modulate the catalytic activity of cytosine deaminases in the APOBEC family to generate an improved rAPOBEC1 with a narrower editing window and reduced “bystander editing” compared to CBE3. Gam, a DNA-binding protein from bacteriophage Mui, can form a complex with free-ends of DBSs, thus preventing NHEJ-mediated repair and reducing indel formation. These changes resulted in BE4-Gam, which is characterized by higher base-editing efficiency, increased product purity, and decreased indel frequency. Two nuclear localization signals (NLS) were added to nCas9 and after codon-optimization and ancestral sequence reconstruction on APOBEC, yielding BE4max and ancBE4max. Another base-editing system, Target-AID (activation-induced cytidine deaminase), was developed and composed of nCas9, Petromnyzon marinns cytidine deaminase 1 (pmCDA1), which is similar to rAPOBEC1 in structure and function, The use of alternative cytosine deaminase enzymes yields base editors with alternative sequence motif preference and the ability to efficiently edit methylated cytosines. Most recently, Liu and colleagues used phase assisted continuous evolution (PACE) to evolve CBEs and generate evoAPOBEC1-BE4max, which can efficiently edit cytosine in G/C sequences (a disfavored context for wild-type APOBEC1 deaminase) and evoFERNY-BE4max, a smaller deaminase that edits efficiently in all tested sequence contexts.

[0055] Base-editors incorporating different CRISPR-associated nuclease enzymes are also envisioned for use in the method. CBEs based on SpCas9 are limited by their G/C-rich PAM sequence. In order to expand the scope of base-editing, Li et al. generated a Cpf1-based cytosine deaminase base-editor by fusing catalytically inactive LbCpf1 (dLbCpf1) or dAsCpf1 with rAPOBEC1 and UGI (creating dLbCpf1-BE0 and dAsCpf1-BE0). A variety of engineered Cas9 variants with altered PAM sequences and improved cleavage specificity have been developed and may allow for further expansion of the targeting scope of CRISPR-base-editing reagents.

[0056] Adenine base-editors induce A to G conversions. The ABE-dCas9 fusion binds to a target DNA sequence in a guide RNA-programmed manner, and the deoxyadenosine deaminase domain catalyzes an adenine to inosine transition. In the context of DNA replication, inosine is interpreted as guanine, and the original A-T base pair may be replaced with a G-C base pair at the target site. Escherichia coli tRNA adenosine deaminase, TadA (ecTadA) converts adenine to inosine in the single-stranded anticodon loop of tRNA^{ARG}, and shares sequence similarity with the APOBEC family. The first-generation adenine base-editors (ABE1.2) was generated by fusing the evolved TadA variant (TadA*) to the N-terminus of nCas9 through XTEN (a 16 amino acid linked used in BE3), with the C terminal of nCas9 fused with a nuclear localization signal (TadA*-XTEN-nCas9-NLS). In comparison with cytosine base-editing, adenine base-editing by ABE yields a much cleaner product that has virtually no indels, and there are no reports of significant off-target (A-to-non-G) edits to date.

[0057] To improve ABEs, a single-chain heterodimer was prepared comprised of a wild-type non-catalytic TadA monomer and evolved ecTadA monomer (TadA-TadA*). To improve editing efficiency, further optimization of ABE was performed. Extensive PACE and protein engineering resulted in seventh generation ABEs (ABE7.10), which converted target A-T to G-C efficiently (~50%) in human cells. Only about one-quarter of pathogenic transition mutations encompass an appropriately located NGG PAM site that facilitates SpCas9-mediated base-editing. Unlike CBEs, which have proven to be broadly customizable with many Cas orthologs, ABEs have shown limited compatibility with Cas9 of any origin other than SpCas9. Some homologs such as SaCas9 and circularly permuted Cas9 (CP-Cas9) have been adapted. Phage-assisted continuous and non-continuous evolution (PACE and PANCE) methods were used to enhance the catalytic rate of the deoxyadenosine deaminase enzyme by 590-fold compared to that of ABE7. 10. The next generation of ABEs, designated ABE8e, shows greatly enhanced activity and compatibility with diverse Cas9 homologs. As expected, the targeting scope of ABE8e also increased off-target RNA and DNA editing.

[0058] Exemplary base editors useful in the screening methods include but are not limited to ABE8e, BE1, BE2, HF2-BE2, BE3, HF-BE3, YE1-BE3, EE-B3, YEE-BE3, VQR-BE3, EQR-BE3, VRER-BE3, SaKKHBE3, FNLS-BE3, RA-BE3, A3A-BE3, eA3A-HF1-BE3-2xUGI, eA3A-Hypa-BE3-2xUGI, hA3A-BE3, hA3B-BE3, hA3G-BE3, hAID-BE3, SaCas9-BE3, xCas9-BE3, ScCas9-BE3, SniperCas9-BE3, iSpyMac-BE3, Target-AID, Target-AID-NG, CRISPR-X, TAM, BE-PLUS, BE4, BE4-Gam, BE4-Max, AncBE4-Max, SaCas9-BE4, SaCas9-BE4-Gam, evoBE4max, evoFERNY-BE4max, Cas12a-BE, ABE7.8/9/10, xCas9-ABE7.10, VQR-ABE, Sa(KKH)-ABE, ABEmax, ABE7.10max, ABE8e, PE1, PE2, or PE3.

[0059] In other screens, small molecule drugs targeting one of the identified functional regions can be identified that allow for enhanced or decreased immune activity (in a variety of immune related pathologies including cancer, autoimmunity, and the like).

[0060] The use of the method may provide for identification and targeting of protein sub-functions (e.g., higher resolution than overall loss- or gain-of function methods), tools to identify targetable structures of proteins, and identification of hits and functional regulators for exploitation as therapeutic targets.

[0061] The use of a method for high throughput base editing screens in primary human T cells using lentivirus provides for an approach for high throughput screening of protein/gene domains at amino acid level, in primary human T cells and may result in a large set of previously uncharacterized targets that alter T cell function, base edited T cells with enhanced functionality and the ability to dissect different (including opposing) functional regions within a protein and exploitation for therapeutic or diagnostic purposes.

[0062] The methods and resulting composition provide for rapid discovery, including discovery of variants or mutations that affect cell functions in patients, and therapeutic applicability of targets for immune cell therapies, highly multiplexable and seamless integration with other gain- or loss-of function strategies, loss and gain of protein (sub-) functions, e.g., using a single editing method, multiplexable and/or within a single protein, identification of sgRNAs to mediate functional base editor knockouts of desired genes, and discovery and targeting of protein (e.g. domain or amino acid specific) subfunctions.

### Exemplary Cells for Modification

[0063] In one embodiment, the cells that are modified with sgRNAs or the genome of which is modified to have the modified sites described herein or expresses a protein have one or more of the modifications disclosed herein, are immune cells. In one embodiment, the cells are T cells. In one embodiment, the cells are CD4+ cells. In one embodiment, the cells are CD8+ cells. In one embodiment, the cells are CAR-T cells. In one embodiment, the cells are naive T cells, stem cell memory cells, T _{SCM}; T Central Memory cells, T _{CM}; T effector memory cells, T _{EM}; or T effector cells, T _{EFF}. In one embodiment, the cells are Th (T helper)1, Th2, Th9, Th17, Th22, Treg (regulatory T cells), or Tfh (follicular helper T cells). In one embodiment, the cells are regulatory T cells, NK cells, or B cells.

### Exemplary Therapeutic Uses of Modified Cells

[0064] Ex-vivo or in-vivo genome edited immune cells can be employed for therapeutic purposes. In addition, synthetic constructs that alter immune cell function (e.g., by incorporating or using functional proteins or protein domains that are identified by the screening method) may be employed for therapeutic purposes.

[0065] Immune cells modified as described herein may be employed in a method to prevent, inhibit or treat an autoimmune disease. In one embodiment, cells of a mammal may be obtained and modified as described herein and reintroduced to the mammal to, for example, suppress an immune function in the mammal, thereby alleviating one or more symptoms of the autoimmune disease. Autoimmune diseases within the scope of this disclosure include but are not limited to rheumatoid arthritis, Crohn's disease, multiple sclerosis, systemic lupus erythematosus (SLE), autoimmune encephalomyelitis, myasthenia gravis (MG), Hashimoto's thyroiditis, Goodpasture's syndrome, pemphigus (e.g., pemphigus vulgaris), Grave's disease, autoimmune hemolytic anemia, autoimmune thrombocytopenic purpura, scleroderma with anti-collagen antibodies, mixed connective tissue disease, polymyositis, pernicious anemia, idiopathic Addison's disease, autoimmune-associated infertility, glomerulonephritis (e.g., crescentic glomerulonephritis, proliferative glomerulonephritis), bullous pemphigoid, Sjogren's syndrome, insulin resistance, and autoimmune diabetes mellitus (type 1 diabetes mellitus; insulin-dependent diabetes mellitus). In one embodiment, the autoimmune disease is multiple sclerosis (MS), systemic sclerosis (SSc), type 1 diabetes (T1D), Grave's disease (GD), systemic lupus erythematosus (SLE), aplastic anemia (AA), or vitiligo.

[0066] Immune cells modified as described herein may be employed in a method to prevent, inhibit or treat cancer. In one embodiment, cells of a mammal may be obtained and modified as described herein and reintroduced to the mammal to, for example, augment an immune function in the mammal, thereby alleviating one or more symptoms of the cancer. Cancers within the scope of this disclosure include but are not limited to carcinomas (e.g., squamous-cell carcinomas, adenocarcinomas, hepatocellular carcinomas, and renal cell carcinomas), particularly those of the bladder, bone, bowel, breast, cervix, colon (colorectal), esophagus, head, kidney, liver (hepatocellular), lung, nasopharyngeal, neck, ovary, pancreas, prostate, and stomach; leukemias, such as acute myelogenous leukemia, acute lymphocytic leukemia, acute promyelocytic leukemia (APL), acute T-cell lymphoblastic leukemia, adult T-cell leukemia, basophilic leukemia, eosinophilic leukemia, granulocytic leukemia, hairy cell leukemia, leukopenic leukemia, lymphatic leukemia, lymphoblastic leukemia, lymphocytic leukemia, megakaryocytic leukemia, micromyeloblastic leukemia, monocytic leukemia, neutrophilic leukemia and stem cell leukemia; benign and malignant lymphomas, particularly Burkitt's lymphoma, Non-Hodgkin's lymphoma and B-cell lymphoma; benign and malignant melanomas; myeloproliferative diseases; sarcomas, particularly Ewing's sarcoma, hemangiosarcoma, Kaposi's sarcoma, liposarcoma, myosarcomas, peripheral neuroepithelioma, and synovial sarcoma; tumors of the central nervous system (e.g., gliomas, astrocytomas, oligodendrogliomas, ependymomas, glioblastomas, neuroblastomas, ganglioneuromas, gangliogliomas, medulloblastomas, pineal cell tumors, meningiomas, meningeal sarcomas, neurofibromas, and Schwannomas); germ-line tumors (e.g., bowel cancer, breast cancer, prostate cancer, cervical cancer, uterine cancer, lung cancer (e.g., small cell lung cancer, mixed small cell and non-small cell cancer, pleural mesothelioma, including metastatic pleural mesothelioma small cell lung cancer and non-small cell lung cancer), ovarian cancer, testicular cancer, thyroid cancer, astrocytoma, esophageal cancer, pancreatic cancer, stomach cancer, liver cancer, colon cancer, and melanoma; mixed types of neoplasias, particularly carcinosarcoma and Hodgkin's disease; and tumors of mixed origin, such as Wilms' tumor and teratocarcinomas, among others.

### Definitions

[0067] The term “guide RNA” as used herein refers to either a single guide RNA (sgRNA) or a crRNA (spacer). In some cases, the at least one sgRNA has a sequence with at least 95% sequence identity to any of guide RNAs shown in the Figures. In some cases, at least sgRNA has a sequence such as any of the guide RNAs in the Figures, or a nucleotide sequence with at least 80%, 82%, 84%, 85%, 87%, 89%, 90%, 92%, 94%, 95%, 97%, 98% or 99% nucleic acid sequence identity thereto, or a combination thereof. In some cases, cells can be incubated with one or two or more sgRNAs described herein.

[0068] A “vector” or “delivery” vehicle refers to a macromolecule or association of macromolecules that comprises or associates with a polynucleotide or polypeptide, and which can be used to mediate delivery of the polynucleotide or polypeptide to a cell or intercellular space, either in vitro or in vivo. Illustrative vectors include, for example, plasmids, viral vectors, liposomes, nanoparticles, or microparticles and other delivery vehicles. In one embodiment, a polynucleotide to be delivered, sometimes referred to as a “target polynucleotide” or “transgene,” may comprise a coding sequence of interest in gene therapy (such as a gene encoding a protein of therapeutic interest), a coding sequence of interest and/or a selectable or detectable marker.

[0069] “Transduction,” “transfection,” “transformation” or “transducing” as used herein, are terms referring to a process for the introduction of an exogenous polynucleotide into a host cell leading to expression of the polynucleotide, e.g., the transgene in the cell, and includes the use of recombinant virus to introduce the exogenous polynucleotide to the host cell. Transduction, transfection or transformation of a polynucleotide in a cell may be determined by methods well known to the art including, but not limited to, protein expression (including steady state levels), e.g., by ELISA, flow cytometry and Western blot, measurement of DNA and RNA by hybridization assays, e.g., Northern blots, Southern blots and gel shift mobility assays. Methods used for the introduction of the exogenous polynucleotide include well-known techniques such as viral infection or transfection, lipofection, transformation and electroporation, as well as other non-viral gene delivery techniques. The introduced polynucleotide may be stably or transiently maintained in the host cell.

[0070] “Gene delivery” refers to the introduction of an exogenous polynucleotide into a cell for gene transfer, and may encompass targeting, binding, uptake, transport, localization, replicon integration and expression.

[0071] “Gene transfer” refers to the introduction of an exogenous polynucleotide into a cell which may encompass targeting, binding, uptake, transport, localization and replicon integration, but is distinct from and does not imply subsequent expression of the gene.

[0072] “Gene expression” or “expression” refers to the process of gene transcription, translation, and post-translational modification.

[0073] An “infectious” virus or viral particle is one that comprises a polynucleotide component which is capable of delivering into a cell for which the viral species is trophic. The term does not necessarily imply any replication capacity of the virus.

[0074] The term “polynucleotide” refers to a polymeric form of nucleotides of any length, including deoxyribonucleotides or ribonucleotides, or analogs thereof. A polynucleotide may comprise modified nucleotides, such as methylated or capped nucleotides and nucleotide analogs, and may be interrupted by non-nucleotide components. If present, modifications to the nucleotide structure may be imparted before or after assembly of the polymer. The term polynucleotide, as used herein, refers interchangeably to double- and single-stranded molecules. Unless otherwise specified or required, any embodiment described herein that is a polynucleotide encompasses both the double-stranded form and each of two complementary single-stranded forms known or predicted to make up the double-stranded form.

[0075] A “transcriptional regulatory sequence” refers to a genomic region that controls the transcription of a gene or coding sequence to which it is operably linked. Transcriptional regulatory sequences of use generally include at least one transcriptional promoter and may also include one or more enhancers and/or terminators of transcription.

[0076] “Operably linked” refers to an arrangement of two or more components, wherein the components so described are in a relationship permitting them to function in a coordinated manner. By way of illustration, a transcriptional regulatory sequence or a promoter is operably linked to a coding sequence if the TRS or promoter promotes transcription of the coding sequence. An operably linked TRS is generally joined in cis with the coding sequence, but it is not necessarily directly adjacent to it.

[0077] “Heterologous” means derived from a genotypically distinct entity from the entity to which it is compared. For example, a polynucleotide introduced by genetic engineering techniques into a different cell type is a heterologous polynucleotide (and, when expressed, can encode a heterologous polypeptide). Similarly, a transcriptional regulatory element such as a promoter that is removed from its native coding sequence and operably linked to a different coding sequence is a heterologous transcriptional regulatory element.

[0078] A “terminator” refers to a polynucleotide sequence that tends to diminish or prevent read-through transcription (i.e., it diminishes or prevent transcription originating on one side of the terminator from continuing through to the other side of the terminator). The degree to which transcription is disrupted is typically a function of the base sequence and/or the length of the terminator sequence. In particular, as is well known in numerous molecular biological systems, particular DNA sequences, generally referred to as “transcriptional termination sequences” are specific sequences that tend to disrupt read-through transcription by RNA polymerase, presumably by causing the RNA polymerase molecule to stop and/or disengage from the DNA being transcribed. Typical example of such sequence-specific terminators include polyadenylation (“polyA”) sequences, e.g., SV40 polyA. In addition to or in place of such sequence-specific terminators, insertions of relatively long DNA sequences between a promoter and a coding region also tend to disrupt transcription of the coding region, generally in proportion to the length of the intervening sequence. This effect presumably arises because there is always some tendency for an RNA polymerase molecule to become disengaged from the DNA being transcribed and increasing the length of the sequence to be traversed before reaching the coding region would generally increase the likelihood that disengagement would occur before transcription of the coding region was completed or possibly even initiated. Terminators may thus prevent transcription from only one direction (“uni-directional” terminators) or from both directions (“bi-directional” terminators) and may be comprised of sequence-specific termination sequences or sequence-non-specific terminators or both. A variety of such terminator sequences are known in the art; and illustrative uses of such sequences within the context of the present disclosure are provided below.

[0079] “Host cells,” “cell lines,” “cell cultures,” “packaging cell line” and other such terms denote higher eukaryotic cells, such as mammalian cells including human cells, useful in the present disclosure, e.g., to produce recombinant virus or recombinant polypeptide. These cells include the progeny of the original cell that was transduced. It is understood that the progeny of a single cell may not necessarily be completely identical (in morphology or in genomic complement) to the original parent cell.

[0080] “Recombinant,” as applied to a polynucleotide means that the polynucleotide is the product of various combinations of cloning, restriction and/or ligation steps, and other procedures that result in a construct that is distinct from a polynucleotide found in nature. A recombinant virus is a viral particle comprising a recombinant polynucleotide. The terms respectively include replicates of the original polynucleotide construct and progeny of the original virus construct.

[0081] A “control element” or “control sequence” is a nucleotide sequence involved in an interaction of molecules that contributes to the functional regulation of a polynucleotide, including replication, duplication, transcription, splicing, translation, or degradation of the polynucleotide. The regulation may affect the frequency, speed, or specificity of the process, and may be enhancing or inhibitory in nature. Control elements known in the art include, for example, transcriptional regulatory sequences such as promoters and enhancers. A promoter is a DNA region capable under certain conditions of binding RNA polymerase and initiating transcription of a coding region usually located downstream (in the 3′ direction) from the promoter. Promoters include AAV promoters, e.g., P5, P19, P40 and AAV ITR promoters, as well as heterologous promoters.

[0082] An “expression vector” is a vector comprising a region which encodes a gene product of interest and is used for effecting the expression of the gene product in an intended target cell. An expression vector also comprises control elements operatively linked to the encoding region to facilitate expression of the protein in the target. The combination of control elements and a gene or genes to which they are operably linked for expression is sometimes referred to as an “expression cassette,” a large number of which are known and available in the art or can be readily constructed from components that are available in the art.

[0083] The terms “polypeptide” and “protein” are used interchangeably herein to refer to polymers of amino acids of any length. The terms also encompass an amino acid polymer that has been modified; for example, disulfide bond formation, glycosylation, acetylation, phosphorylation, lipidation, or conjugation with a labeling component.

[0084] An “isolated” polynucleotide, e.g., plasmid, virus, polypeptide or other substance refers to a preparation of the substance devoid of at least some of the other components that may also be present where the substance or a similar substance naturally occurs or is initially prepared from. Thus, for example, an isolated substance may be prepared by using a purification technique to enrich it from a source mixture. Isolated nucleic acid, peptide or polypeptide is present in a form or setting that is different from that in which it is found in nature. For example, a given DNA sequence (e.g., a gene) is found on the host cell chromosome in proximity to neighboring genes; RNA sequences, such as a specific mRNA sequence encoding a specific protein, are found in the cell as a mixture with numerous other mRNAs that encode a multitude of proteins. The isolated nucleic acid molecule may be present in single-stranded or double-stranded form. When an isolated nucleic acid molecule is to be utilized to express a protein, the molecule will contain at a minimum the sense or coding strand (i.e., the molecule may single-stranded), but may contain both the sense and anti-sense strands (i.e., the molecule may be double-stranded). Enrichment can be measured on an absolute basis, such as weight per volume of solution, or it can be measured in relation to a second, potentially interfering substance present in the source mixture. For example, a 2-fold enrichment, 10-fold enrichment, 100-fold enrichment, or a 1000-fold enrichment.

[0085] A “transcriptional regulatory sequence” refers to a genomic region that controls the transcription of a gene or coding sequence to which it is operably linked. Transcriptional regulatory sequences of use generally include at least one transcriptional promoter and may also include one or more enhancers and/or terminators of transcription.

[0086] “Conservative” amino acid substitutions are, for example, aspartic-glutamic as polar acidic amino acids; lysine/arginine/histidine as polar basic amino acids; leucine/isoleucine/methionine/valine/alanine/glycine/proline as non-polar or hydrophobic amino acids; serine/threonine as polar or uncharged hydrophilic amino acids. Conservative amino acid substitution also includes groupings based on side chains. For example, a group of amino acids having aliphatic side chains is glycine, alanine, valine, leucine, and isoleucine; a group of amino acids having aliphatic-hydroxyl side chains is serine and threonine; a group of amino acids having amide-containing side chains is asparagine and glutamine; a group of amino acids having aromatic side chains is phenylalanine, tyrosine, and tryptophan; a group of amino acids having basic side chains is lysine, arginine, and histidine; and a group of amino acids having sulfur-containing side chains is cysteine and methionine. For example, it is reasonable to expect that replacement of a leucine with an isoleucine or valine, an aspartate with a glutamate, a threonine with a serine, or a similar replacement of an amino acid with a structurally related amino acid will not have a major effect on the properties of the resulting polypeptide. Whether an amino acid change results in a functional polypeptide can readily be determined by assaying the specific activity of the polypeptide. Naturally occurring residues are divided into groups based on common side-chain properties: (1) hydrophobic: norleucine, met, ala, val, leu, ile; (2) neutral hydrophilic: cys, ser, thr; (3) acidic: asp, glu; (4) basic: asn, gln, his, lys, arg; (5) residues that influence chain orientation: gly, pro; and (6) aromatic; trp, tyr, phe.

[0087] The disclosure also envisions polypeptides with non-conservative substitutions. Non-conservative substitutions entail exchanging a member of one of the classes described above for another.

[0088] As used herein, “individual” (as in the subject of the treatment) means a mammal. Mammals include, for example, humans; non-human primates, e.g., apes and monkeys; and non-primates, e.g., dogs, cats, rats, mice, cattle, horses, sheep, and goats. Non-mammals include, for example, fish and birds.

[0089] “Substantially” as the term is used herein means completely or almost completely; for example, a composition that is “substantially free” of a component either has none of the component or contains such a trace amount that any relevant functional property of the composition is unaffected by the presence of the trace amount, or a compound is “substantially pure” is there are only negligible traces of impurities present.

[0090] “Treating” or “treatment” within the meaning herein refers to an alleviation of symptoms associated with a disorder or disease, “inhibiting” means inhibition of further progression or worsening of the symptoms associated with the disorder or disease, and “preventing” refers to prevention of the symptoms associated with the disorder or disease.

[0091] As used herein, an “effective amount” or a “therapeutically effective amount” of an agent, refers to an amount of the agent that alleviates, in whole or in part, symptoms associated with the disorder or condition, or halts or slows further progression or worsening of those symptoms, or prevents or provides prophylaxis for the disorder or condition, e.g., an amount that is effective to prevent, inhibit or treat in the individual one or more symptoms.

[0092] In particular, a “therapeutically effective amount” refers to an amount effective, at dosages and for periods of time necessary, to achieve the desired therapeutic result. A therapeutically effective amount is also one in which any toxic or detrimental effects of the agent(s)are outweighed by the therapeutically beneficial effects.

[0093] The term “sequence” refers to a nucleotide sequence of any length, which can be DNA or RNA; can be linear, circular or branched and can be either single-stranded or double stranded. The term “donor sequence” refers to a nucleotide sequence that is inserted into a genome. A donor sequence can be of any length, for example between 2 and 10,000 nucleotides in length (or any integer value therebetween or there above), e.g., between about 100 and 1,000 nucleotides in length (or any integer therebetween), e.g., between about 200 and 500 nucleotides in length.

[0094] For example, an exogenous nucleic acid can comprise an infecting viral genome, a plasmid or episome introduced into a cell, or a chromosome that is not normally present in the cell. Methods for the introduction of exogenous molecules into cells are known to those of skill in the art and include, but are not limited to, lipid-mediated transfer (e.g., liposomes, including neutral and cationic lipids), electroporation, direct injection, cell fusion, particle bombardment, calcium phosphate co-precipitation, DEAE-dextran-mediated transfer and viral vector-mediated transfer. An exogenous molecule can also be the same type of molecule as an endogenous molecule but derived from a different species than the cell is derived from. For example, a human nucleic acid sequence may be introduced into a cell line originally derived from a mouse or hamster.

[0095] The term “exogenous,” when used in relation to a protein, gene, nucleic acid, or polynucleotide in a cell or organism refers to a protein, gene, nucleic acid, or polynucleotide which has been introduced into the cell or organism by artificial or natural means. An exogenous nucleic acid may be from a different organism or cell, or it may be one or more additional copies of a nucleic acid which occurs naturally within the organism or cell. By way of a non-limiting example, an exogenous nucleic acid is in a chromosomal location different from that of natural cells or is otherwise flanked by a different nucleic acid sequence than that found in nature, e.g., an expression cassette which links a promoter from one gene to an open reading frame for a gene product from a different gene.

[0096] “Transformed” or “transgenic” is used herein to include any host cell or cell line, which has been altered or augmented by the presence of at least one recombinant DNA sequence. The host cells are typically produced by transfection with a DNA sequence in a plasmid expression vector, as an isolated linear DNA sequence, or infection with a recombinant viral vector.

[0097] The term “sequence homology” means the proportion of base matches between two nucleic acid sequences or the proportion amino acid matches between two amino acid sequences. When sequence homology is expressed as a percentage, e.g., 50%, the percentage denotes the proportion of matches over the length of a selected sequence that is compared to some other sequence. Gaps (in either of the two sequences) are permitted to maximize matching; gap lengths of 15 bases or less are usually used, or 6 bases or less or 2 bases or less. When using oligonucleotides as probes or treatments, the sequence homology between the target nucleic acid and the oligonucleotide sequence is generally not less than 17 target base matches out of 20 possible oligonucleotide base pair matches (85%); not less than 9 matches out of 10 possible base pair matches (90%), or not less than 19 matches out of 20 possible base pair matches (95%).

[0098] Two amino acid sequences are homologous if there is a partial or complete identity between their sequences. For example, 85% homology means that 85% of the amino acids are identical when the two sequences are aligned for maximum matching. Gaps (in either of the two sequences being matched) are allowed in maximizing matching; gap lengths of 5 or less or 2 or less. Alternatively, two protein sequences (or polypeptide sequences derived from them of at least 30 amino acids in length) are homologous, as this term is used herein, if they have an alignment score of at more than 5 (in standard deviation units) using the program ALIGN with the mutation data matrix and a gap penalty of 6 or greater. The two sequences or parts thereof are more homologous if their amino acids are greater than or equal to 50% identical when optimally aligned using the ALIGN program.

[0099] The term “corresponds to” is used herein to mean that a polynucleotide sequence is structurally related to all or a portion of a reference polynucleotide sequence, or that a polypeptide sequence is structurally related to all or a portion of a reference polypeptide sequence, e.g., they have at least 80%, 82%, 85%, 87%, 90%, 92%, 95%, 97% or more, e.g., 99% or 100%, sequence identity. In contradistinction, the term “complementary to” is used herein to mean that the complementary sequence is homologous to all or a portion of a reference polynucleotide sequence. For illustration, the nucleotide sequence “TATAC” corresponds to a reference sequence “TATAC” and is complementary to a reference sequence “GTATA”.

[0100] The term “sequence identity” means that two polynucleotide sequences are identical (i.e., on a nucleotide-by-nucleotide basis) over the window of comparison. The term “percentage of sequence identity” means that two polynucleotide sequences are identical (i.e., on a nucleotide-by-nucleotide basis) over the window of comparison. The term “percentage of sequence identity” is calculated by comparing two optimally aligned sequences over the window of comparison, determining the number of positions at which the identical nucleic acid base (e.g., A, T, C, G, U, or I) occurs in both sequences to yield the number of matched positions, dividing the number of matched positions by the total number of positions in the window of comparison (i.e., the window size), and multiplying the result by 100 to yield the percentage of sequence identity. The terms “substantial identity” as used herein denote a characteristic of a polynucleotide sequence, wherein the polynucleotide comprises a sequence that has at least 85 percent sequence identity, e.g., at least 90 to 95 percent sequence identity, more usually at least 99 percent sequence identity as compared to a reference sequence over a comparison window of at least 20 nucleotide positions, frequently over a window of at least 20-50 nucleotides, wherein the percentage of sequence identity is calculated by comparing the reference sequence to the polynucleotide sequence which may include deletions or additions which total 20 percent or less of the reference sequence over the window of comparison.

[0101] As used herein, “substantially pure” or “purified” means an object species is the predominant species present (i.e., on a molar basis it is more abundant than any other individual species in the composition), for instance, a substantially purified fraction is a composition wherein the object species comprises at least about 50 percent (on a molar basis) of all macromolecular species present. Generally, a substantially pure composition will comprise more than about 80 percent of all macromolecular species present in the composition, or more than about 85%, about 90%, about 95%, and about 99%. The object species may be purified to essential homogeneity (contaminant species cannot be detected in the composition by conventional detection methods) wherein the composition consists essentially of a single macromolecular species.

### Preparation of Expression Cassettes

[0102] To prepare expression cassettes having sequences encoding a base editor and/or sgRNAs, e.g., disclosed herein (e.g, the Figures), or both, for transformation, the recombinant DNA sequence or segment may be circular or linear, double-stranded or single-stranded. A DNA sequence which encodes an RNA sequence that is substantially complementary to a mRNA sequence encoding a gene product of interest is typically a “sense” DNA sequence cloned into a cassette in the opposite orientation (i.e., 3′ to 5′ rather than 5′ to 3′). Generally, the DNA sequence or segment is in the form of chimeric DNA, such as plasmid DNA, that can also contain coding regions flanked by control sequences which promote the expression of the DNA in a cell. As used herein, “chimeric” means that a vector comprises DNA from at least two different species, or comprises DNA from the same species, which is linked or associated in a manner which does not occur in the “native” or wild type of the species.

[0103] Aside from DNA sequences that serve as transcription units, or portions thereof, a portion of the DNA may be untranscribed, serving a regulatory or a structural function. For example, the DNA may itself comprise a promoter that is active in eukaryotic cells, e.g., mammalian cells, or in certain cell types, or may utilize a promoter already present in the genome that is the transformation target of the lymphotropic virus. Such promoters include the CMV promoter, as well as the SV40 late promoter and retroviral LTRs (long terminal repeat elements), although many other promoter elements well known to the art may be employed, e.g., the MMTV, RSV, MLV or HIV LTR. In one embodiment, expression is inducible.

[0104] In one embodiment, a tissue-specific promoter (or enhancer) is employed,

[0105] Other elements functional in the host cells, such as introns, enhancers, polyadenylation sequences and the like, may also be a part of the recombinant DNA. Such elements may or may not be necessary for the function of the DNA but may provide improved expression of the DNA by affecting transcription, stability of the mRNA, or the like. Such elements may be included in the DNA as desired to obtain the optimal performance of the transforming DNA in the cell.

[0106] The recombinant DNA to be introduced into the cells may contain either a selectable marker gene or a reporter gene or both to facilitate identification and selection of transformed cells from the population of cells sought to be transformed. Alternatively, the selectable marker may be carried on a separate piece of DNA and used in a co-transformation procedure. Both selectable markers and reporter genes may be flanked with appropriate regulatory sequences to enable expression in the host cells. Useful selectable markers are well known in the art and include, for example, antibiotic and herbicide-resistance genes, such as neo, hpt, dhfr, bar, aroA, puro, hyg, dapA and the like. See also, the genes listed on Table 1 of Lundquist et al. (U.S. Pat. No. 5,848,956).

[0107] Reporter genes are used for identifying potentially transformed cells and for evaluating the functionality of regulatory sequences. Reporter genes which encode for easily assayable proteins are well known in the art. In general, a reporter gene is a gene which is not present in or expressed by the recipient organism or tissue and which encodes a protein whose expression is manifested by some easily detectable property, e.g., enzymatic activity. Exemplary reporter 30 genes include the chloramphenicol acetyl transferase gene (cat) from Tn9 of E. coli, the beta-glucuronidase gene (gus) of the uidA locus of E. coli, the green, red, or blue fluorescent protein gene, and the luciferase gene. Expression of the reporter gene is assayed at a suitable time after the DNA has been introduced into the recipient cells.

[0108] The general methods for constructing recombinant DNA which can transform target cells are well known to those skilled in the art, and the same compositions and methods of construction may be utilized to produce the DNA useful herein.

[0109] The recombinant DNA can be readily introduced into the host cells, e.g., mammalian cells, such as immune cells, by transfection with the DNA or the corresponding RNA, or infection with a virus having an expression vector comprising the recombinant DNA, by any procedure useful for the introduction into a particular cell, e.g., physical or biological methods, to yield a transformed (transgenic) cell having the recombinant DNA so that the DNA sequence of interest is expressed by the host cell. In one embodiment, the recombinant DNA is stably integrated into the genome of the cell.

[0110] Physical methods to introduce a recombinant DNA into a host cell include calcium-mediated methods, lipofection, particle bombardment, microinjection, electroporation, and the like. Biological methods to introduce the DNA of interest into a host cell include the use of DNA and RNA viral vectors. Viral vectors, e.g., retroviral or lentiviral vectors, have become a widely used method for inserting genes into eukaryotic cells, such as mammalian, e.g., human cells. Other viral vectors can be derived from poxviruses, e.g., vaccinia viruses, herpes viruses, adenoviruses, adeno-associated viruses, baculoviruses, and the like.

[0111] To confirm the presence of the recombinant DNA sequence in the host cell, a variety of assays may be performed. Such assays include, for example, molecular biological assays well known to those of skill in the art, such as Southern and Northern blotting, RT-PCR and PCR; biochemical assays, such as detecting the presence or absence of a particular gene product, e.g., by immunological means (ELISAs and Western blots) or by other molecular assays.

[0112] To detect and quantitate RNA produced from introduced recombinant DNA segments, RT-PCR may be employed. In this application of PCR, it is first necessary to reverse transcribe RNA into DNA, using enzymes such as reverse transcriptase, and then through the use of conventional PCR techniques amplify the DNA. In most instances PCR techniques, while useful, will not demonstrate integrity of the RNA product. Further information about the nature of the RNA product may be obtained by Northern blotting. This technique demonstrates the presence of an RNA species and gives information about the integrity of that RNA. The presence or absence of an RNA species can also be determined using dot or slot blot Northern hybridizations. These techniques are modifications of Northern blotting and only demonstrate the presence or absence of an RNA species.

[0113] While Southern blotting and PCR may be used to detect the recombinant DNA segment in question, they do not provide information as to whether the recombinant DNA segment is being expressed. Expression may be evaluated by specifically identifying the peptide products of the introduced DNA sequences or evaluating the phenotypic changes brought about by the expression of the introduced DNA segment in the host cell.

### Vectors or Vehicles for Delivery

[0114] Delivery vectors or vehicles include, for example, viral vectors, microparticles, nanoparticles, liposomes and other lipid-containing complexes, and other macromolecular complexes capable of mediating delivery of a gene, sgRNA or a protein to a host cell, e.g., a gene to provide for recombinant expression of a polypeptide encoded by the gene. Vectors or vehicles can also comprise other components or functionalities that further modulate gene delivery and/or gene expression, or that otherwise provide beneficial properties. Such other components include, for example, components that influence binding or targeting to cells (including components that mediate cell-type or tissue-specific binding); components that influence uptake of the vector by the cell; components that influence localization of the transferred gene within the cell after uptake (such as agents mediating nuclear localization); and components that influence expression of the gene. Such components also might include markers, such as detectable and/or selectable markers that can be used to detect or select for cells that have taken up and are expressing the nucleic acid delivered by the vector or have taken up protein delivered by a vehicle. Such components can be provided as a natural feature of the vector (such as the use of certain viral vectors which have components or functionalities mediating binding and uptake), or vectors can be modified to provide such functionalities. Selectable markers can be positive, negative or bifunctional. Positive selectable markers allow selection for cells carrying the marker, whereas negative selectable markers allow cells carrying the marker to be selectively eliminated. A variety of such marker genes have been described, including bifunctional (i.e., positive/negative) markers (see, e.g., WO 92/08796; and WO 94/28143). Such marker genes can provide an added measure of control that can be advantageous in gene therapy contexts. A large variety of such vectors are known in the art and are generally available.

[0115] Vectors or vehicles within the scope of the disclosure include, but are not limited to, isolated nucleic acid, e.g., plasmid-based vectors which may be extra-chromosomally maintained, and viral vectors, e.g., recombinant adenovirus, retrovirus, lentivirus, herpesvirus, poxvirus, papilloma virus, or adeno-associated virus, including viral and non-viral vectors, or proteins which are present in liposomes, e.g., neutral or cationic liposomes, such as DOSPA/DOPE, DOGS/DOPE or DMRIE/DOPE liposomes, and/or associated with other molecules such as DNA-anti-DNA antibody-cationic lipid (DOTMA/DOPE) complexes. Vectors or vehicles may be administered via any route including, but not limited to, intramuscular, buccal, rectal, intravenous or intracoronary administration, and transfer to cells may be enhanced using electroporation and/or iontophoresis. In one embodiment, vectors are locally administered.

[0116] In one embodiment, an isolated polynucleotide or vector having that polynucleotide, encoding a polypeptide or fusion protein that has substantial identity, e.g., at least 80% or more, e.g., 85%, 87%, 90%, 92%, 95%, 97%, 98%, 99% and up to 100%, amino acid sequence identity to a protein encoded by one of the genes disclosed herein, or a portion thereof, is envisioned.

### Retroviral Vectors

[0117] Retroviral vectors exhibit several distinctive features including their ability to stably and precisely integrate into the host genome providing long-term transgene expression. These vectors can be manipulated ex vivo to eliminate infectious gene particles to minimize the risk of systemic infection and patient-to-patient transmission. Pseudotyped retroviral vectors can alter host cell tropism.

### Lentiviruses

[0118] Lentiviruses are derived from a family of retroviruses that include human immunodeficiency virus and feline immunodeficiency virus. However, unlike retroviruses that only infect dividing cells, lentiviruses can infect both dividing and nondividing cells. Although lentiviruses have specific tropisms, pseudotyping the viral envelope with vesicular stomatitis virus yields virus with a broader range (Schnepp et al., Meth. Mol. Med., 69:427 (2002)).

### Adenoviral Vectors

[0119] Adenoviral vectors may be rendered replication-incompetent by deleting the early (E1A and E1B) genes responsible for viral gene expression from the genome and are stably maintained into the host cells in an extrachromosomal form. These vectors have the ability to transfect both replicating and nonreplicating cells and, in particular, these vectors have been shown to efficiently infect cardiac myocytes in vivo, e.g., after direction injection or perfusion. Adenoviral vectors have been shown to result in transient expression of therapeutic genes in vivo, peaking at 7 days and lasting approximately 4 weeks. The duration of transgene expression may be improved in systems utilizing neural specific promoters. In addition, adenoviral vectors can be produced at very high titers, allowing efficient gene transfer with small volumes of virus.

### Adeno-Associated Virus Vectors

[0120] Recombinant adeno-associated viruses (rAAV) are derived from nonpathogenic parvoviruses, evoke essentially no cellular immune response, and produce transgene expression lasting months in most systems. Moreover, like adenovirus, adeno-associated virus vectors also have the capability to infect replicating and nonreplicating cells and are believed to be nonpathogenic to humans.

[0121] AAV vectors include but are not limited to AAV1, AAV2, AAV5, AAV7, AAV8, AAV9 or AAVrh.10.

### Plasmid DNA Vectors

[0122] Plasmid DNA is often referred to as “naked DNA” to indicate the absence of a more elaborate packaging system. Direct injection of plasmid DNA to myocardial cells in vivo has been accomplished. Plasmid-based vectors are relatively nonimmunogenic and nonpathogenic, with the potential to stably integrate in the cellular genome, resulting in long-term gene expression in postmitotic cells in vivo. Plasmid DNA may be delivered to cells as part of a macromolecular complex, e.g., a liposome or DNA-protein complex, and delivery may be enhanced using techniques including electroporation.

### Exemplary Gene Products for Modification

[0123] Once modified gene products with a desirable activity are identified, the genome of other cells may be modified so that the modified gene product is expressed in those cells. For example, modifications of any of the gene products disclosed herein including those exemplified below, that result in altered activity, e.g., in immune cells, may be prepared and employed in methods including methods of treatment.

[0124] In one embodiment, a modification is prepared in a gene encoding T-cell surface glycoprotein CD3 zeta chain isoform 1 precursor (Homo sapiens), for example, one NCBI Reference Sequence: NP_932170.1:

| | |
|---|---|
| 1 | MKWKALFTAA ILQAQLPITE AQSFGLLDPK LCYLLDGILF IYGVILTALF LRVKFSRSAD |
| 61 | APAYQQGQNQ LYNELNLGRR EEYDVLDKRR GRDPEMGGKP QRRKNPQEGL YNELQKDKMA |
| 121 | EAYSEIGMKG ERRRGKGHDG LYQGLSTATK DTYDALHMQA LPPR, |

(SEQ ID NO:), a different isoform of the protein, or a polypeptide having at least 80%, 82%, 85%, 86%, 88%, 90%, 92%, 94%, 95%, 97%, 98% or 99% amino acid sequence identity thereto.

[0125] In one embodiment, a modification such as one in a gene encoding actin, cytoplasmic 1 (Homo sapiens), for example, one having NCBI Reference Sequence: NP_001092.1

| | |
|---|---|
| 1 | MDDDIAALVV DNGSGMCKAG FAGDDAPRAV FPSIVGRPRH QGVMVGMGQK DSYVGDEAQS |
| 61 | KRGILTLKYP IEHGIVINWD DMEKIWHHTF YNELRVAPEE HPVLLTEAPL NPKANREKMT |
| 121 | QIMFETFNTP AMYVAIQAVL SLYASGRTTG IVMDSGDGVT HTVPIYEGYA LPHAILRLDL |
| 181 | AGRDLTDYLM KILTERGYSF TTTAEREIVR DIKEKLCYVA LDFEQEMATA ASSSSLEKSY |
| 241 | ELPDGQVITI GNERFRCPEA LFQPSFLGME SCGIHETTFN SIMKCDVDIR KDLYANTVLS |
| 301 | GGTTMYPGIA DRMQKEITAL APSTMKIKII APPERKYSVW IGGSILASLS TFQQMWISKQ |
| 361 | EYDESGPSIV HRKCF, |

(SEQ ID NO:), a different isoform of the protein, or a polypeptide having at least 80%, 82%, 85%, 86%, 88%, 90%, 92%, 94%, 95%, 97%, 98% or 99% amino acid sequence identity thereto.

[0126] In one embodiment, a modification such as one in a gene encoding interleukin-2 receptor subunit alpha isoform 1 precursor (Homo sapiens), such as one having NCBI Reference Sequence: NP_000408.1:

| | |
|---|---|
| 1 | MDSYLLMWGL LTFIMVPGCQ AELCDDDPPE IPHATFKAMA YKEGTMLNCE CKRGFRRIKS |
| 61 | GSLYMLCTGN SSHSSWDNQC QCTSSATRNT TKQVTPQPEE QKERKTTEMQ SPMQPVDQAS |
| 121 | LPGHCREPPP WENEATERIY HFVVGQMVYY QCVQGYRALH RGPAESVCKM THGKTRWTQP |
| 181 | QLICTGEMET SQFPGEEKPQ ASPEGRPESE TSCLVTTTDF QIQTEMAATM ETSIFTTEYQ |
| 241 | VAVAGCVFLL ISVLLLSGLT WQRRQRKSRR TI |

(SEQ ID NO:), a different isoform of the protein, or a polypeptide having at least 80%, 82%, 85%, 86%, 88%, 90%, 92%, 94%, 95%, 97%, 98% or 99% amino acid sequence identity thereto.

[0127] In one embodiment, a modification such as one in a gene encoding T-cell surface glycoprotein CD3 delta chain isoform A precursor (Homo sapiens), Such as one having NCBI Reference Sequence: NP_000723.1:

| | |
|---|---|
| 1 | MEHSTFLSGL VLATLLSQVS PFKIPIEELE DRVFVNCNTS ITWVEGTVGT LLSDITRLDL |
| 61 | GKRILDPRGI YRCNGTDIYK DKESTVQVHY RMCQSCVELD PATVAGIIVT DVIATLLLAL |
| 121 | GVFCFAGHET GRLSGAADTQ ALLRNDQVYQ PLRDRDDAQY SHLGGNWARN K, |

(SEQ ID NO:), a different isoform of the protein, or a polypeptide having at least 80%, 82%, 85%, 86%, 88%, 90%, 92%, 94%, 95%, 97%, 98% or 99% amino acid sequence identity thereto.

[0128] In one embodiment, a modification such as one in a gene encoding T-cell surface glycoprotein CD3 epsilon chain precursor (Homo sapiens). For example, one having NCBI Reference Sequence: NP_000724.1:

| | |
|---|---|
| 1 | MQSGTHWRVL GLCLLSVGVW GQDGNEEMGG ITQTPYKVSI SGTTVILTCP QYPGSEILWQ |
| 61 | HNDKNIGGDE DDKNIGSDED HLSLKEFSEL EQSGYYVCYP RGSKPEDANF YLYLRARVCE |
| 121 | NCMEMDVMSV ATIVIVDICI TGGLLLLVYY WSKNRKAKAK PVTRGAGAGG RQRGQNKERP |
| 181 | PPVPNPDYEP IRKGQRDLYS GLNQRRI, |

(SEQ ID NO:), a different isoform of the protein, or a polypeptide having at east 80%, 82%, 85%, 86%, 88%, 90%, 92%, 94%, 95%, 97%, 98% or 99% amino acid sequence identity thereto.

[0129] In one embodiment, a modification such as one in a gene encoding T-cell surface glycoprotein CD3 gamma chain precursor (Homo sapiens) having NCBI Reference Sequence: NP_000064.1:

| | |
|---|---|
| 1 | MEQGKGLAVL ILAIILLQGT LAQSIKGNHL VKVYDYQEDG SVLLTCDAEA KNITWFKDGK |
| 61 | MIGFLTEDKK KWNLGSNAKD PRGMYQCKGS QNKSKPLQVY YRMCQNCIEL NAATISGFLF |
| 121 | AEIVSIFVLA VGVYFIAGQD GVRQSRASDK QTLLPNDQLY QPLKDREDDQ YSHLQGNQLR |
| 181 | RN, |

(SEQ ID NO:), a different isoform of the protein, or a polypeptide having at least 80%, 82%, 85%, 86%, 88%, 90%, 92%, 94%, 95%, 97%, 98% or 99% amino acid sequence identity thereto.

[0130] In one embodiment, a modification such as one in a gene encoding T-cell surface glycoprotein CD5 isoform 1 precursor (Homo sapiens). For example, one having NCBI Reference Sequence: NP_055022.2:

| | |
|---|---|
| 1 | MPMGSLQPLA TLYLLGMLVA SCLGRLSWYD PDFQARLTRS NSKCQGQLEV YLKDGWHMVC |
| 61 | SQSWGRSSKQ WEDPSQASKV CQRLNCGVPL SLGPFLVTYT PQSSIICYGQ LGSFSNCSHS |
| 121 | RNDMCHSLGL TCLEPQKTTP PTTRPPPTTT PEPTAPPRLQ LVAQSGGQHC AGVVEFYSGS |
| 181 | LGGTISYEAQ DKTQDLENFL CNNLQCGSFL KHLPETEAGR AQDPGEPREH QPLPIQWKIQ |
| 241 | NSSCTSLEHC FRKIKPQKSG RVLALLCSGF QPKVQSRLVG GSSICEGTVE VRQGAQWAAL |
| 301 | CDSSSARSSL RWEEVCREQQ CGSVNSYRVL DAGDPTSRGL FCPHQKLSQC HELWERNSYC |
| 361 | KKVFVTCQDP NPAGLAAGTV ASIILALVLL VVLLVVCGPL AYKKLVKKER QKKQRQWIGP |
| 421 | TGMNQNMSFH RNHTATVRSH AENPTASHVD NEYSQPPRNS HLSAYPALEG ALHRSSMQPD |
| 481 | NSSDSDYDLH GAQRL, |

(SEQ ID NO:), a different isoform of the protein, or a polypeptide having at least 80%, 82%, 85%, 86%, 88%, 90%, 92%, 94%, 95%, 97%, 98% or 99% amino acid sequence identity thereto.

[0131] In one embodiment, a modification such as one in a gene encoding C-Maf-inducing protein isoform C-Mip (Homo sapiens). For instance, one having NCBI Reference Sequence: NP_938204.2

| | |
|---|---|
| 1 | MDVTSSSGGG GDPRQIEETK PLLGGDVSAP EGTKMGAVPC RRALLLCNGM RYKLLQEGDI |
| 61 | QVCVIRHPRT FLSKILTSKF LRRWEPHHLT LADNSLASAT PTGYMENSVS YSAIEDVQLL |
| 121 | SWENAPKYCL QLTIPGGTVL LQAANSYLRD QWFHSLQWKK KIYKYKKVLS NPSRWEVVLK |
| 181 | EIRTLVDMAL TSPLQDDSIN QAPLEIVSKL LSENTNLTTQ EHENIIVAIA PLLENNHPPP |
| 241 | DLCEFFCKHC RERPRSMVVI EVFTPVVQRI LKHNMDFGKC PRLRLFTQEY ILALNELNAG |
| 301 | MEVVKKFIQS MHGPTGHCPH PRVLPNLVAV CLAAIYSCYE EFINSRDNSP SLKEIRNGCQ |
| 361 | QPCDRKPTLP LRLLHPSPDL VSQEATLSEA RLKSVVVASS EIHVEVERTS TAKPALTASA |
| 421 | GNDSEPNLID CLMVSPACST MSIELGPQAD RTLGCYVEIL KLLSDYDDWR PSLASLLQPI |
| 481 | PFPKEALAHE KFTKELKYVI QRFAEDPRQE VHSCLLSVRA GKDGWFQLYS PGGVACDDDG |
| 541 | ELFASMVHIL MGSCYKTKKF LLSLAENKLG PCMLLALRGN QTMVEILCLM LEYNIIDNND |
| 601 | TQLQIISTLE STDVGKRMYE QLCDRQRELK ELQRKGGPTR LTLPSKSTDA DLARLLSSGS |
| 661 | FGNLENLSLA FTNVTSACAE HLIKLPSLKQ LNLWSTQFGD AGLRLLSEHL TMLQVLNLCE |
| 721 | TPVTDAGLLA LSSMKSLCSL NMNSTKLSAD TYEDLKAKLP NLKEVDVRYT EAW, |

(SEQ ID NO:), a different isoform of the protein, or a polypeptide having at least 80%, 82%, 85%, 86%, 88%, 90%, 92%, 94%, 95%, 97%, 98% or 99% amino acid sequence identity thereto.

[0132] In one embodiment, a modification such as one in a gene encoding capping protein-inhibiting regulator of actin dynamics isoform 1 (Homo sapiens) having NCBI Reference Sequence: NP_001380310.1:

| | |
|---|---|
| 1 | MGTRAFSHDS IFIPDGGAES EQTVQAMSQD NILGKVKTLQ QQLGKNIKFG QRSPNAIPMN |
| 61 | KANSGEASLE EDLFLTSPME IVTQQDIVLS DAENKSSDTP SSLSPLNLPG AGSEMEEKVA |
| 121 | PVKPSRPKRH FSSAGTIESV NLDAIPLAIA RLDNSAAKHK LAVKPKKQRV SKKHRRLAQD |
| 181 | PQHEQGGLES RPCLDQNGHP GEDKPTWHEE EPNPLDSEEE RRRQEDYWRE LEAKCKRQKA |
| 241 | EAAEKRRLEE QRLQALERRL WEENRRQELL EEEGEGQEPP LEAERAPREE QQRSLEAPGW |
| 301 | EDAERREREE RERLEAEEER RRLQAQAQAE ERRRLEEDAR LEERRRQEEE EGRCAEELKR |
| 361 | QEEEEAEGWE ELEQQEAEVQ GPPEALEETG EGRRGAEEED LGEEEEEGQA HLEDWRGQLS |
| 421 | ELLNDFEERL EDQERLKPEG QREHSEEPGI CEEQNPEAER RREQQGRSGD FQGADRPGPE |
| 481 | EKREEGDTEP LLKQEGPVEA AQPPVERKEA AALEQGRKVE ELRWQEVDER QTMPRPYTFQ |
| 541 | VSSGGKQILF PKVNLSPVTP AKDTGLTAAP QEPKAPKASP VQHALPSSLS VPHTAILVTG |
| 601 | AQLCGPAVNL SQIKDTACKS LLGLEEKKHA EAPAGENPPR GPGDARAGSG KAKPRQESPS |
| 661 | SASALAEWAS IRSRILKNAE SDPRSSERDQ LRPGDESTPR GRCDSRGNQR KTPPVNAKFS |
| 721 | IMPAWQKFSD GGTETSKQST EAESIRKRPM LGPSEETAPQ PPPAGVRELG KGPEKSEMHR |
| 781 | EPADTTEGCK FAKDLPSELV PSLPYPPQKV VAHTEFTTSS DSETANGIAK PDPVMPGGEE |
| 841 | KASPFGIKLR RTNYSLRFNC DQQAEQKKKK RHSSTGDSAD AGPPAAGSAR GEKEMEGVAL |
| 901 | KHGPSLPQER KQAPSTRRDS AEPSSSRSVP VAHPGPPPAS SQTPAPEHDK AANKMPLAQK |
| 961 | PALAPKPTSQ TPPASPLSKL SRPYLVELLS RRAGRPDPEP SEPSKEDQES SDRRPPSPPG |
| 1021 | PEERKGQKRD EEEEATERKP ASPPLPATQQ EKPSQTPEAG RKEKPMLQSR HSLDGSKLTE |
| 1081 | KVETAQPLWI TLALQKQKGF REQQATREER KQAREAKQAE KLSKENVSVS VQPGSSSVSR |
| 1141 | AGSLHKSTAL PEEKRPETAV SRLERREQLK KANTLPTSVT VEISDSAPPA PLVKEVTKRF |
| 1201 | STPDAAPVST EPAWLALAKR KAKAWSDCPQ IIK, |

(SEQ ID NO:), a different isoform of the protein, or a polypeptide having at least 80%, 82%, 85%, 86%, 88%, 90%, 92%, 94%, 95%, 97%, 98% or 99% amino acid sequence identity thereto.

[0133] In one embodiment, a modification such as one in a gene encoding elongin-B isoform a (Homo sapiens), including one having NCBI Reference Sequence: NP_009039.1:

| | |
|---|---|
| 1 | MDVFLMIRRH KTTIFTDAKE SSTVFELKRI VEGILKRPPD EQRLYKDDQL LDDGKTLGEC |
| 61 | GFTSQTARPQ APATVGLAFR ADDTFEALCI EPFSSPPELP DVMKPQDSGS SANEQAVQ, |

(SEQ ID NO:), a different isoform of the protein, or a polypeptide having at least 80%, 82%, 85%, 86%, 88%, 90%, 92%, 94%, 95%, 97%, 98% or 99% amino acid sequence identity thereto.

[0134] In one embodiment, a modification such as one described in a gene encoding trans-acting T-cell-specific transcription factor GATA-3 isoform 1 (Homo sapiens), including one having NCBI Reference Sequence: NP_001002295.1:

| | |
|---|---|
| 1 | MEVTADQPRW VSHHHPAVLN GQHPDTHHPG LSHSYMDAAQ YPLPEEVDVL FNIDGQGNHV |
| 61 | PPYYGNSVRA TVQRYPPTHH GSQVCRPPLL HGSLPWLDGG KALGSHHTAS PWNLSPFSKT |
| 121 | SIHHGSPGPL SVYPPASSSS LSGGHASPHL FTFPPTPPKD VSPDPSLSTP GSAGSARQDE |
| 181 | KECLKYQVPL PDSMKLESSH SRGSMTALGG ASSSTHHPIT TYPPYVPEYS SGLFPPSSLL |
| 241 | GGSPTGFGCK SRPKARSSTE GRECVNCGAT STPLWRRDGT GHYLCNACGL YHKMNGQNRP |
| 301 | LIKPKRRLSA ARRAGTSCAN CQTTTTTLWR RNANGDPVCN ACGLYYKLHN INRPLTMKKE |
| 361 | GIQTRNRKMS SKSKKCKKVH DSLEDFPKNS SFNPAALSRH MSSLSHISPF SHSSHMLTTP |
| 421 | TPMHPPSSLS FGPHHPSSMV TAMG, |

(SEQ ID NO:), a different isoform of the protein, or a polypeptide having at least 80%, 82%, 85%, 86%, 88%, 90%, 92%, 94%, 95%, 97%, 98% or 99% amino acid sequence identity thereto.

[0135] In one embodiment, a modification such as one in a gene encoding GRB2-related adapter protein 2 isoform 1 (Homo sapiens), such as one having NCBI Reference Sequence: NP_004801.1:

| | |
|---|---|
| 1 | MEAVAKFDFT ASGEDELSFH TGDVLKILSN QEEWFKAELG SQEGYVPKNF IDIQFPKWFH |
| 61 | EGLSRHQAEN LLMGKEVGFF IIRASQSSPG DFSISVRHED DVQHFKVMRD NKGNYFLWTE |
| 121 | KFPSLNKLVD YYRTNSISRQ KQIFLRDRTR EDQGHRGNSL DRRSQGGPHL SGAVGEEIRP |
| 181 | SMNRKLSDHP PTLPLQQHQH QPQPPQYAPA PQQLQQPPQQ RYLQHHHFHQ ERRGGSLDIN |
| 241 | DGHCGTGLGS EMNAALMHRR HTDPVQLQAA GRVRWARALY DFEALEDDEL GFHSGEVVEV |
| 301 | LDSSNPSWWT GRLHNKLGLF PANYVAPMTR |

(SEQ ID NO:), a different isoform of the protein, or a polypeptide having at least 80%, 82%, 85%, 86%, 88%, 90%, 92%, 94%, 95%, 97%, 98% or 99% amino acid sequence identity thereto.

[0136] In one embodiment, a modification such as one described in a gene encoding growth factor receptor-bound protein 2 isoform 1 (Homo sapiens), such as one having NCBI Reference Sequence: NP_002077.1:

| | |
|---|---|
| 1 | MEAIAKYDFK ATADDELSFK RGDILKVLNE ECDQNWYKAE LNGKDGFIPK NYIEMKPHPW |
| 61 | FFGKIPRAKA EEMLSKQRHD GAFLIRESES APGDFSLSVK FGNDVQHFKV LRDGAGKYFL |
| 121 | WVVKFNSLNE LVDYHRSTSV SRNQQIFLRD IEQVPQQPTY VQALFDFDPQ EDGELGFRRG |
| 181 | DFIHVMDNSD PNWWKGACHG QTGMFPRNYV TPVNRNV |

(SEQ ID NO:), a different isoform of the protein, or a polypeptide having at least 80%, 82%, 85%, 86%, 88%, 90%, 92%, 94%, 95%, 97%, 98% or 99% amino acid sequence identity thereto.

[0137] In one embodiment, a modification such as one in a gene encoding DNA-binding protein Ikaros isoform 1 (Homo sapiens), such as one having NCBI Reference Sequence: NP_006051.1:

| | |
|---|---|
| 1 | MDADEGQDMS QVSGKESPPV SDTPDEGDEP MPIPEDLSTT SGGQQSSKSD RVVASNVKVE |
| 61 | TQSDEENGRA CEMNGEECAE DLRMLDASGE KMNGSHRDQG SSALSGVGGI RLPNGKLKCD |
| 121 | ICGIICIGPN VLMVHKRSHT GERPFQCNQC GASFTQKGNL LRHIKLHSGE KPFKCHLCNY |
| 181 | ACRRRDALTG HLRTHSVGKP HKCGYCGRSY KQRSSLEEHK ERCHNYLESM GLPGTLYPVI |
| 241 | KEETNHSEMA EDLCKIGSER SLVLDRLASN VAKRKSSMPQ KFLGDKGLSD TPYDSSASYE |
| 301 | KENEMMKSHV MDQAINNAIN YLGAESLRPL VQTPPGGSEV VPVISPMYQL HKPLAEGTPR |
| 361 | SNHSAQDSAV ENLLLLSKAK LVPSEREASP SNSCQDSTDT ESNNEEQRSG LIYLTNHIAP |
| 421 | HARNGLSLKE EHRAYDLLRA ASENSQDALR VVSTSGEQMK VYKCEHCRVL FLDHVMYTIH |
| 481 | MGCHGFRDPF ECNMCGYHSQ DRYEFSSHIT RGEHRFHMS |

(SEQ ID NO:), a different isoform of the protein, or a polypeptide having at least 80%, 82%, 85%, 86%, 88%, 90%, 92%, 94%, 95%, 97%, 98% or 99% amino acid sequence identity thereto.

[0138] In one embodiment, a modification such as one in a gene encoding cytokine receptor common subunit gamma precursor (Homo sapiens), such as one having NCBI Reference Sequence: NP_000197.1:

| | |
|---|---|
| 1 | MLKPSLPFTS LLFLQLPLLG VGLNTTILTP NGNEDTTADF FLTTMPTDSL SVSTLPLPEV |
| 61 | QCFVFNVEYM NCTWNSSSEP QPTNLTLHYW YKNSDNDKVQ KCSHYLFSEE ITSGCQLQKK |
| 121 | EIHLYQTFVV QLQDPREPRR QATQMLKLQN LVIPWAPENL TLHKLSESQL ELNWNNRFLN |
| 181 | HCLEHLVQYR TDWDHSWTEQ SVDYRHKFSL PSVDGQKRYT FRVRSRFNPL CGSAQHWSEW |
| 241 | SHPIHWGSNT SKENPFLFAL EAVVISVGSM GLIISLLCVY FWLERTMPRI PTLKNLEDLV |
| 301 | TEYHGNFSAW SGVSKGLAES LQPDYSERLC LVSEIPPKGG ALGEGPGASP CNQHSPYWAP |
| 361 | PCYTLKPET |

(SEQ ID NO:), a different isoform of the protein, or a polypeptide having at least 80%, 82%, 85%, 86%, 88%, 90%, 92%, 94%, 95%, 97%, 98% or 99% amino acid sequence identity thereto.

[0139] In one embodiment, a modification such as one in a gene encoding interferon regulatory factor 4 isoform 1 (Homo sapiens), such as one having NCBI Reference Sequence: NP_002451.2:

| | |
|---|---|
| 1 | MNLEGGGRGG EFGMSAVSCG NGKLRQWLID QIDSGKYPGL VWENEEKSIF RIPWKHAGKQ |
| 61 | DYNREEDAAL FKAWALFKGK FREGIDKPDP PTWKTRLRCA LNKSNDFEEL VERSQLDISD |
| 121 | PYKVYRIVPE GAKKGAKQLT LEDPQMSMSH PYTMTTPYPS LPAQQVHNYM MPPLDRSWRD |
| 181 | YVPDQPHPEI PYQCPMTFGP RGHHWQGPAC ENGCQVTGTF YACAPPESQA PGVPTEPSIR |
| 241 | SAEALAFSDC RLHICLYYRE ILVKELTTSS PEGCRISHGH TYDASNLDQV LFPYPEDNGQ |
| 301 | RKNIEKLLSH LERGVVLWMA PDGLYAKRLC QSRIYWDGPL ALCNDRPNKL ERDQTCKLFD |
| 361 | TQQFLSELQA FAHHGRSLPR FQVTLCFGEE FPDPQRQRKL ITAHVEPLLA RQLYYFAQQN |
| 421 | SGHFLRGYDL PEHISNPEDY HRSIRHSSIQ E |

(SEQ ID NO:), a different isoform of the protein, or a polypeptide having at least 80%, 82%, 85%, 86%, 88%, 90%, 92%, 94%, 95%, 97%, 98% or 99% amino acid sequence identity thereto.

[0140] In one embodiment, a modification such as one in a gene encoding tyrosine-protein kinase ITK/TSK (Homo sapiens), such as one having NCBI Reference Sequence: NP_005537.3:

| | |
|---|---|
| 1 | MNNFILLEEQ LIKKSQQKRR TSPSNFKVRF FVLTKASLAY FEDRHGKKRT LKGSIELSRI |
| 61 | KCVEIVKSDI SIPCHYKYPF QVVHDNYLLY VFAPDRESRQ RWVLALKEET RNNNSLVPKY |
| 121 | HPNFWMDGKW RCCSQLEKLA TGCAQYDPTK NASKKPLPPT PEDNRRPLWE PEETVVIALY |
| 181 | DYQTNDPQEL ALRRNEEYCL LDSSEIHWWR VQDRNGHEGY VPSSYLVEKS PNNLETYEWY |
| 241 | NKSISRDKAE KLLLDTGKEG AFMVRDSRTA GTYTVSVFTK AVVSENNPCI KHYHIKETND |
| 301 | NPKRYYVAEK YVFDSIPLLI NYHQHNGGGL VTRLRYPVCF GRQKAPVTAG LRYGKWVIDP |
| 361 | SELTFVQEIG SGQFGLVHLG YWLNKDKVAI KTIREGAMSE EDFIEEAEVM MKLSHPKLVQ |
| 421 | LYGVCLEQAP ICLVFEFMEH GCLSDYLRTQ RGLFAAETLL GMCLDVCEGM AYLEEACVIH |
| 481 | RDLAARNCLV GENQVIKVSD FGMTRFVLDD QYTSSTGTKF PVKWASPEVF SFSRYSSKSD |
| 541 | VWSFGVLMWE VFSEGKIPYE NRSNSEVVED ISTGFRLYKP RLASTHVYQI MNHCWKERPE |
| 601 | DRPAFSRLLR QLAEIAESGL |

(SEQ ID NO:), a different isoform of the protein, or a polypeptide having at least 80%, 82%, 85%, 86%, 88%, 90%, 92%, 94%, 95%, 97%, 98% or 99% amino acid sequence identity thereto.

[0141] In one embodiment, a modification such as one in a gene encoding tyrosine-protein kinase JAK1 isoform 1 (Homo sapiens), such as one having NCBI Reference Sequence: NP_002218.2:

| | |
|---|---|
| 1 | MQYLNIKEDC NAMAFCAKMR SSKKTEVNLE APEPGVEVIF YLSDREPLRL GSGEYTAEEL |
| 61 | CIRAAQACRI SPLCHNLFAL YDENTKLWYA PNRTITVDDK MSLRLHYRMR FYFTNWHGTN |
| 121 | DNEQSVWRHS PKKQKNGYEK KKIPDATPLL DASSLEYLFA QGQYDLVKCL APIRDPKTEQ |
| 181 | DGHDIENECL GMAVLAISHY AMMKKMQLPE LPKDISYKRY IPETLNKSIR QRNLLTRMRI |
| 241 | NNVFKDFLKE FNNKTICDSS VSTHDLKVKY LATLETLTKH YGAEIFETSM LLISSENEMN |
| 301 | WFHSNDGGNV LYYEVMVTGN LGIQWRHKPN VVSVEKEKNK LKRKKLENKH KKDEEKNKIR |
| 361 | EEWNNFSYFP EITHIVIKES VVSINKQDNK KMELKLSSHE EALSFVSLVD GYFRLTADAH |
| 421 | HYLCTDVAPP LIVHNIQNGC HGPICTEYAI NKLRQEGSEE GMYVLRWSCT DFDNILMTVT |
| 481 | CFEKSEQVQG AQKQFKNFQI EVQKGRYSLH GSDRSFPSLG DLMSHLKKQI LRTDNISFML |
| 541 | KRCCQPKPRE ISNLLVATKK AQEWQPVYPM SQLSFDRILK KDLVQGEHLG RGTRTHIYSG |
| 601 | TLMDYKDDEG TSEEKKIKVI LKVLDPSHRD ISLAFFEAAS MMRQVSHKHI VYLYGVCVRD |
| 661 | VENIMVEEFV EGGPLDLFMH RKSDVLTTPW KFKVAKQLAS ALSYLEDKDL VHGNVCTKNL |
| 721 | LLAREGIDSE CGPFIKLSDP GIPITVLSRQ ECIERIPWIA PECVEDSKNL SVAADKWSFG |
| 781 | TTLWEICYNG EIPLKDKTLI EKERFYESRC RPVTPSCKEL ADLMTRCMNY DPNQRPFFRA |
| 841 | IMRDINKLEE QNPDIVSEKK PATEVDPTHF EKRFLKRIRD LGEGHFGKVE LCRYDPEGDN |
| 901 | TGEQVAVKSL KPESGGNHIA DLKKEIEILR NLYHENIVKY KGICTEDGGN GIKLIMEFLP |
| 961 | SGSLKEYLPK NKNKINLKQQ LKYAVQICKG MDYLGSRQYV HRDLAARNVL VESEHQVKIG |
| 1021 | DFGLTKAIET DKEYYTVKDD RDSPVFWYAP ECLMQSKFYI ASDVWSFGVT LHELLTYCDS |
| 1081 | DSSPMALFLK MIGPTHGQMT VTRLVNTLKE GKRLPCPPNC PDEVYQLMRK CWEFQPSNRT |
| 1141 | SFQNLIEGFE ALLK |

(SEQ ID NO:), a different isoform of the protein, or a polypeptide having at least 80%, 82%, 85%, 86%, 88%, 90%, 92%, 94%, 95%, 97%, 98% or 99% amino acid sequence identity thereto.

[0142] In one embodiment, a modification such as one in a gene encoding Krueppel-like factor 2 (Homo sapiens), such as one having NCBI Reference Sequence: NP_057354.1:

| | |
|---|---|
| 1 | MALSEPILPS FSTFASPCRE RGLQERWPRA EPESGGTDDD LNSVLDFILS MGLDGLGAEA |
| 61 | APEPPPPPPP PAFYYPEPGA PPPYSAPAGG LVSELLRPEL DAPLGPALHG RFLLAPPGRL |
| 121 | VKAEPPEADG GGGYGCAPGL TRGPRGLKRE GAPGPAASCM RGPGGRPPPP PDTPPLSPDG |
| 181 | PARLPAPGPR ASFPPPFGGP GFGAPGPGLH YAPPAPPAFG LFDDAAAAAA ALGLAPPAAR |
| 241 | GLLTPPASPL ELLEAKPKRG RRSWPRKRTA THTCSYAGCG KTYTKSSHLK AHLRTHTGEK |
| 301 | PYHCNWDGCG WKFARSDELT RHYRKHTGHR PFQCHLCDRA FSRSDHLALH MKRHM |

(SEQ ID NO:), a different isoform of the protein, or a polypeptide having at least 80%, 82%, 85%, 86%, 88%, 90%, 92%, 94%, 95%, 97%, 98% or 99% amino acid sequence identity thereto.

[0143] In one embodiment, a modification such as one in a gene encoding linker for activation of T-cells family member 1 isoform b (Homo sapiens), such as one having NCBI Reference Sequence: NP_001014987.1:

| | |
|---|---|
| 1 | MEEAILVPCV LGLLLLPILA MLMALCVHCH RLPGSYDSTS SDSLYPRGIQ FKRPHTVAPW |
| 61 | PPAYPPVTSY PPLSQPDLLP IPRSPQPLGG SHRTPSSRRD SDGANSVASY ENEEPACEDA |
| 121 | DEDEDDYHNP GYLVVLPDST PATSTAAPSA PALSTPGIRD SAFSMESIDD YVNVPESGES |
| 181 | AEASLDGSRE YVNVSQELHP GAAKTEPAAL SSQEAEEVEE EGAPDYENLQ ELN |

(SEQ ID NO:), a different isoform of the protein, or a polypeptide having at least 80%, 82%, 85%, 86%, 88%, 90%, 92%, 94%, 95%, 97%, 98% or 99% amino acid sequence identity thereto.

[0144] In one embodiment, a modification such as one in a gene encoding tyrosine-protein kinase Lck isoform a (Homo sapiens), such as one having NCBI Reference Sequence: NP_005347.3:

| | |
|---|---|
| 1 | MGCGCSSHPE DDWMENIDVC ENCHYPIVPL DGKGTLLIRN GSEVRDPLVT YEGSNPPASP |
| 61 | LQDNLVIALH SYEPSHDGDL GFEKGEQLRI LEQSGEWWKA QSLTTGQEGF IPFNFVAKAN |
| 121 | SLEPEPWFFK NLSRKDAERQ LLAPGNTHGS FLIRESESTA GSFSLSVRDF DQNQGEVVKH |
| 181 | YKIRNLDNGG FYISPRITFP GLHELVRHYT NASDGLCTRL SRPCQTQKPQ KPWWEDEWEV |
| 241 | PRETLKLVER LGAGQFGEVW MGYYNGHTKV AVKSLKQGSM SPDAFLAEAN LMKQLQHQRL |
| 301 | VRLYAVVTQE PIYIITEYME NGSLVDFLKT PSGIKLTINK LLDMAAQIAE GMAFIEERNY |
| 361 | IHRDLRAANI LVSDTLSCKI ADFGLARLIE DNEYTAREGA KFPIKWTAPE AINYGTFTIK |
| 421 | SDVWSFGILL TEIVTHGRIP YPGMTNPEVI QNLERGYRMV RPDNCPEELY QLMRLCWKER |
| 481 | PEDRPTFDYL RSVLEDFFTA TEGQYQPQP |

(SEQ ID NO:), a different isoform of the protein, or a polypeptide having at least 80%, 82%, 85%, 86%, 88%, 90%, 92%, 94%, 95%, 97%, 98% or 99% amino acid sequence identity thereto.

[0145] In one embodiment, a modification such as in a gene encoding lymphocyte cytosolic protein 2 (Homo sapiens), such as one having NCBI Reference Sequence: NP_005556.1:

| | |
|---|---|
| 1 | MALRNVPFRS EVLGWDPDSL ADYFKKLNYK DCEKAVKKYH IDGARFLNLT ENDIQKFPKL |
| 61 | RVPILSKLSQ EINKNEERRS IFTRKPQVPR FPEETESHEE DNGGWSSFEE DDYESPNDDQ |
| 121 | DGEDDGDYES PNEEEEAPVE DDADYEPPPS NDEEALQNSI LPAKPFPNSN SMYIDRPPSG |
| 181 | KTPQQPPVPP QRPMAALPPP PAGRNHSPLP PPQTNHEEPS RSRNHKTAKL PAPSIDRSTK |
| 241 | PPLDRSLAPF DREPFTLGKK PPFSDKPSIP AGRSLGEHLP KIQKPPLPPT TERHERSSPL |
| 301 | PGKKPPVPKH GWGPDRREND EDDVHQRPLP QPALLPMSSN TFPSRSTKPS PMNPLPSSHM |
| 361 | PGAFSESNSS FPQSASLPPY FSQGPSNRPP IRAEGRNFPL PLPNKPRPPS PAEEENSLNE |
| 421 | EWYVSYITRP EAEAALRKIN QDGTFLVRDS SKKTTTNPYV LMVLYKDKVY NIQIRYQKES |
| 481 | QVYLLGTGLR GKEDFLSVSD IIDYFRKMPL LLIDGKNRGS RYQCTLTHAA GYP |

(SEQ ID NO:), a different isoform of the protein, or a polypeptide having at least 80%, 82%, 85%, 86%, 88%, 90%, 92%, 94%, 95%, 97%, 98% or 99% amino acid sequence identity thereto.

[0146] In one embodiment, a modification such as one in a gene encoding mucosa-associated lymphoid tissue lymphoma translocation protein 1 isoform a (Homo sapiens), such as one having NCBI Reference Sequence: NP_006776.1:

| | |
|---|---|
| 1 | MSLLGDPLQA LPPSAAPTGP LLAPPAGATL NRLREPLLRR LSELLDQAPE GRGWRRLAEL |
| 61 | AGSRGRLRLS CLDLEQCSLK VLEPEGSPSL CLLKLMGEKG CTVTELSDFL QAMEHTEVLQ |
| 121 | LLSPPGIKIT VNPESKAVLA GQFVKLCCRA TGHPFVQYQW FKMNKEIPNG NTSELIFNAV |
| 181 | HVKDAGFYVC RVNNNFTFEF SQWSQLDVCD IPESFQRSVD GVSESKLQIC VEPTSQKLMP |
| 241 | GSTLVLQCVA VGSPIPHYQW FKNELPLTHE TKKLYMVPYV DLEHQGTYWC HVYNDRDSQD |
| 301 | SKKVEIIIGR TDEAVECTED ELNNLGHPDN KEQTTDQPLA KDKVALLIGN MNYREHPKLK |
| 361 | APLVDVYELT NLLRQLDFKV VSLLDLTEYE MRNAVDEFLL LLDKGVYGLL YYAGHGYENF |
| 421 | GNSFMVPVDA PNPYRSENCL CVQNILKLMQ EKETGLNVFL LDMCRKRNDY DDTIPILDAL |
| 481 | KVTANIVFGY ATCQGAEAFE IQHSGLANGI FMKFLKDRLL EDKKITVLLD EVAEDMGKCH |
| 541 | LTKGKQALEI RSSLSEKRAL TDPIQGTEYS AESLVRNLQW AKAHELPESM CLKFDCGVQI |
| 601 | QLGFAAEFSN VMIIYTSIVY KPPEIIMCDA YVTDFPLDLD IDPKDANKGT PEETGSYLVS |
| 661 | KDLPKHCLYT RLSSLQKLKE HLVFTVCLSY QYSGLEDTVE DKQEVNVGKP LIAKLDMHRG |
| 721 | LGRKTCFQTC LMSNGPYQSS AATSGGAGHY HSLQDPFHGV YHSHPGNPSN VTPADSCHCS |
| 781 | RTPDAFISSF AHHASCHFSR SNVPVETTDE IPFSFSDRLR ISEK |

(SEQ ID NO:), a different isoform of the protein, or a polypeptide having at least 80%, 82%, 85%, 86%, 88%, 90%, 92%, 94%, 95%, 97%, 98% or 99% amino acid sequence identity thereto.

[0147] In one embodiment, a modification such as one in a gene encoding serine/threonine-protein kinase mTOR isoform 1 (Homo sapiens), such as one having NCBI Reference Sequence NP_004949.1:

| | |
|---|---|
| 1 | MLGTGPAAAT TAATTSSNVS VLQQFASGLK SRNEETRAKA AKELQHYVTM ELREMSQEES |
| 61 | TRFYDQLNHH IFELVSSSDA NERKGGILAI ASLIGVEGGN ATRIGRFANY LRNLLPSNDP |
| 121 | VVMEMASKAI GRLAMAGDTF TAEYVEFEVK RALEWLGADR NEGRRHAAVL VLRELAISVP |
| 181 | TFFFQQVQPF FDNIFVAVWD PKQAIREGAV AALRACLILT TQREPKEMQK PQWYRHTFEE |
| 241 | AEKGFDETLA KEKGMNRDDR IHGALLILNE LVRISSMEGE RLREEMEEIT QQQLVHDKYC |
| 301 | KDLMGFGTKP RHITPFTSFQ AVQPQQSNAL VGLLGYSSHQ GLMGFGTSPS PAKSTLVESR |
| 361 | CCRDLMEEKF DQVCQWVLKC RNSKNSLIQM TILNLLPRLA AFRPSAFTDT QYLQDTMNHV |
| 421 | LSCVKKEKER TAAFQALGLL SVAVRSEFKV YLPRVLDIIR AALPPKDFAH KRQKAMQVDA |
| 481 | TVFTCISMLA RAMGPGIQQD IKELLEPMLA VGLSPALTAV LYDLSRQIPQ LKKDIQDGLL |
| 541 | KMLSLVLMHK PLRHPGMPKG LAHQLASPGL TTLPEASDVG SITLALRTLG SFEFEGHSLT |
| 601 | QFVRHCADHF LNSEHKEIRM EAARTCSRLL TPSIHLISGH AHVVSQTAVQ VVADVLSKLL |
| 661 | VVGITDPDPD IRYCVLASLD ERFDAHLAQA ENLQALFVAL NDQVFEIREL AICTVGRLSS |
| 721 | MNPAFVMPFL RKMLIQILTE LEHSGIGRIK EQSARMLGHL VSNAPRLIRP YMEPILKALI |
| 781 | LKLKDPDPDP NPGVINNVLA TIGELAQVSG LEMRKWVDEL FIIIMDMLQD SSLLAKRQVA |
| 841 | LWTLGQLVAS TGYVVEPYRK YPTLLEVLLN FLKTEQNQGT RREAIRVLGL LGALDPYKHK |
| 901 | VNIGMIDQSR DASAVSLSES KSSQDSSDYS TSEMLVNMGN LPLDEFYPAV SMVALMRIFR |
| 961 | DQSLSHHHTM VVQAITFIFK SLGLKCVQFL PQVMPTFLNV IRVCDGAIRE FLFQQLGMLV |
| 1021 | SFVKSHIRPY MDEIVTLMRE FWVMNTSIQS TIILLIEQIV VALGGEFKLY LPQLIPHMLR |
| 1081 | VFMHDNSPGR IVSIKLLAAI QLFGANLDDY LHLLLPPIVK LFDAPEAPLP SRKAALETVD |
| 1141 | RLTESLDFTD YASRIIHPIV RTLDQSPELR STAMDTLSSL VFQLGKKYQI FIPMVNKVLV |
| 1201 | RHRINHQRYD VLICRIVKGY TLADEEEDPL IYQHRMLRSG QGDALASGPV ETGPMKKLHV |
| 1261 | STINLQKAWG AARRVSKDDW LEWLRRLSLE LLKDSSSPSL RSCWALAQAY NPMARDLFNA |
| 1321 | AFVSCWSELN EDQQDELIRS IELALTSQDI AEVTQTLLNL AEFMEHSDKG PLPLRDDNGI |
| 1381 | VLLGERAAKC RAYAKALHYK ELEFQKGPTP AILESLISIN NKLQQPEAAA GVLEYAMKHF |
| 1441 | GELEIQATWY EKLHEWEDAL VAYDKKMDTN KDDPELMLGR MRCLEALGEW GQLHQQCCEK |
| 1501 | WTLVNDETQA KMARMAAAAA WGLGQWDSME EYTCMIPRDT HDGAFYRAVL ALHQDLFSLA |
| 1561 | QQCIDKARDL LDAELTAMAG ESYSRAYGAM VSCHMLSELE EVIQYKLVPE RREIIRQIWW |
| 1621 | ERLQGCQRIV EDWQKILMVR SLVVSPHEDM RTWLKYASLC GKSGRLALAH KTLVLLLGVD |
| 1681 | PSRQLDHPLP TVHPQVTYAY MKNMWKSARK IDAFQHMQHF VQTMQQQAQH AIATEDQQHK |
| 1741 | QELHKLMARC FLKLGEWQLN LQGINESTIP KVLQYYSAAT EHDRSWYKAW HAWAVMNFEA |
| 1801 | VLHYKHQNQA RDEKKKLRHA SGANITNATT AATTAATATT TASTEGSNSE SEAESTENSP |
| 1861 | TPSPLQKKVT EDLSKTLLMY TVPAVQGFFR SISLSRGNNL QDTLRVLTLW FDYGHWPDVN |
| 1921 | EALVEGVKAI QIDTWLQVIP QLIARIDTPR PLVGRLIHQL LTDIGRYHPQ ALIYPLTVAS |
| 1981 | KSTTTARHNA ANKILKNMCE HSNTLVQQAM MVSEELIRVA ILWHEMWHEG LEEASRLYFG |
| 2041 | ERNVKGMFEV LEPLHAMMER GPQTLKETSF NQAYGRDLME AQEWCRKYMK SGNVKDLTQA |
| 2101 | WDLYYHVFRR ISKQLPQLTS LELQYVSPKL LMCRDLELAV PGTYDPNQPI IRIQSIAPSL |
| 2161 | QVITSKQRPR KLTLMGSNGH EFVFLLKGHE DLRQDERVMQ LFGLVNTLLA NDPTSLRKNL |
| 2221 | SIQRYAVIPL STNSGLIGWV PHCDTLHALI RDYREKKKIL LNIEHRIMLR MAPDYDHLTL |
| 2281 | MQKVEVFEHA VNNTAGDDLA KLLWLKSPSS EVWFDRRTNY TRSLAVMSMV GYILGLGDRH |
| 2341 | PSNLMLDRLS GKILHIDFGD CFEVAMTREK FPEKIPFRLT RMLTNAMEVT GLDGNYRITC |
| 2401 | HTVMEVLREH KDSVMAVLEA FVYDPLLNWR LMDTNTKGNK RSRTRTDSYS AGQSVEILDG |
| 2461 | VELGEPAHKK TGTTVPESIH SFIGDGLVKP EALNKKAIQI INRVRDKLTG RDFSHDDTLD |
| 2521 | VPTQVELLIK QATSHENLCQ CYIGWCPFW |

(SEQ ID NO:), a different isoform of the protein, or a polypeptide having at least 80%, 82%, 85%, 86%, 88%, 90%, 92%, 94%, 95%, 97%, 98% or 99% amino acid sequence identity thereto.

[0148] In one embodiment, a modification such as one in a gene encoding NF-kappa-B inhibitor alpha (Homo sapiens), such as one having NCBI Reference Sequence: NP_065390.1:

| | |
|---|---|
| 1 | MFQAAERPQE WAMEGPRDGL KKERLLDDRH DSGLDSMKDE EYEQMVKELQ EIRLEPQEVP |
| 61 | RGSEPWKQQL TEDGDSFLHL AIIHEEKALT MEVIRQVKGD LAFLNFQNNL QQTPLHLAVI |
| 121 | TNQPEIAEAL LGAGCDPELR DFRGNTPLHL ACEQGCLASV GVLTQSCTTP HLHSILKATN |
| 181 | YNGHTCLHLA SIHGYLGIVE LLVSLGADVN AQEPCNGRTA LHLAVDLQNP DLVSLLLKCG |
| 241 | ADVNRVTYQG YSPYQLTWGR PSTRIQQQLG QLTLENLQML PESEDEESYD TESEFTEFTE |
| 301 | DELPYDDCVF GGQRLTL |

(SEQ ID NO:), a different isoform of the protein, or a polypeptide having at least 80%, 82%, 85%, 86%, 88%, 90%, 92%, 94%, 95%, 97%, 98% or 99% amino acid sequence identity thereto.

[0149] In one embodiment, a modification such as one in a gene encoding programmed cell death protein 1 precursor (Homo sapiens), such as one having NCBI Reference Sequence: NP_005009.2:

| | |
|---|---|
| 1 | MQIPQAPWPV VWAVLQLGWR PGWFLDSPDR PWNPPTFSPA LLVVTEGDNA TFTCSFSNTS |
| 61 | ESFVLNWYRM SPSNQTDKLA AFPEDRSQPG QDCRFRVTQL PNGRDFHMSV VRARRNDSGT |
| 121 | YLCGAISLAP KAQIKESLRA ELRVTERRAE VPTAHPSPSP RPAGQFQTLV VGVVGGLLGS |
| 181 | LVLLVWVLAV ICSRAARGTI GARRTGQPLK EDPSAVPVFS VDYGELDFQW REKTPEPPVP |
| 241 | CVPEQTEYAT IVFPSGMGTS SPARRGSADG PRSAQPLRPE DGHCSWPL |

(SEQ ID NO:), a different isoform of the protein, or a polypeptide having at least 80%, 82%, 85%, 86%, 88%, 90%, 92%, 94%, 95%, 97%, 98% or 99% amino acid sequence identity thereto.

[0150] In one embodiment, a modification such as in a gene encoding 1-phosphatidylinositol 4,5-bisphosphate phosphodiesterase gamma-1 isoform a (Homo sapiens), such as one having NCBI Reference Sequence: NP_002651.2:

| | |
|---|---|
| 1 | MAGAASPCAN GCGPGAPSDA EVLHLCRSLE VGTVMTLFYS KKSQRPERKT FQVKLETRQI |
| 61 | TWSRGADKIE GAIDIREIKE IRPGKTSRDF DRYQEDPAFR PDQSHCFVIL YGMEFRLKTL |
| 121 | SLQATSEDEV NMWIKGLTWL MEDTLQAPTP LQIERWLRKQ FYSVDRNRED RISAKDLKNM |
| 181 | LSQVNYRVPN MRFLRERLTD LEQRSGDITY GQFAQLYRSL MYSAQKTMDL PFLEASTLRA |
| 241 | GERPELCRVS LPEFQQFLLD YQGELWAVDR LQVQEFMLSF LRDPLREIEE PYFFLDEFVT |
| 301 | FLFSKENSVW NSQLDAVCPD TMNNPLSHYW ISSSHNTYLT GDQFSSESSL EAYARCLRMG |
| 361 | CRCIELDCWD GPDGMPVIYH GHTLTTKIKF SDVLHTIKEH AFVASEYPVI LSIEDHCSIA |
| 421 | QQRNMAQYFK KVLGDTLLTK PVEISADGLP SPNQLKRKIL IKHKKLAEGS AYEEVPTSMM |
| 481 | YSENDISNSI KNGILYLEDP VNHEWYPHYF VLTSSKIYYS EETSSDQGNE DEEEPKEVSS |
| 541 | STELHSNEKW FHGKLGAGRD GRHIAERLLT EYCIETGAPD GSFLVRESET FVGDYTLSFW |
| 601 | RNGKVQHCRI HSRQDAGTPK FFLTDNLVFD SLYDLITHYQ QVPLRCNEFE MRLSEPVPQT |
| 661 | NAHESKEWYH ASLTRAQAEH MLMRVPRDGA FLVRKRNEPN SYAISFRAEG KIKHCRVQQE |
| 721 | GQTVMLGNSE FDSLVDLISY YEKHPLYRKM KLRYPINEEA LEKIGTAEPD YGALYEGRNP |
| 781 | GFYVEANPMP TFKCAVKALF DYKAQREDEL TFIKSAIIQN VEKQEGGWWR GDYGGKKQLW |
| 841 | FPSNYVEEMV NPVALEPERE HLDENSPLGD LLRGVLDVPA CQIAIRPEGK NNRLFVFSIS |
| 901 | MASVAHWSLD VAADSQEELQ DWVKKIREVA QTADARLTEG KIMERRKKIA LELSELVVYC |
| 961 | RPVPFDEEKI GTERACYRDM SSFPETKAEK YVNKAKGKKF LQYNRLQLSR IYPKGQRLDS |
| 1021 | SNYDPLPMWI CGSQLVALNF QTPDKPMQMN QALFMTGRHC GYVLQPSTMR DEAFDPFDKS |
| 1081 | SLRGLEPCAI SIEVLGARHL PKNGRGIVCP FVEIEVAGAE YDSTKQKTEF VVDNGLNPVW |
| 1141 | PAKPFHFQIS NPEFAFLRFV VYEEDMFSDQ NFLAQATFPV KGLKTGYRAV PLKNNYSEDL |
| 1201 | ELASLLIKID IFPAKQENGD LSPFSGTSLR ERGSDASGQL FHGRAREGSF ESRYQQPFED |
| 1261 | FRISQEHLAD HFDSRERRAP RRTRVNGDNR L |

(SEQ ID NO:), a different isoform of the protein, or a polypeptide having at least 80%, 82%, 85%, 86%, 88%, 90%, 92%, 94%, 95%, 97%, 98% or 99% amino acid sequence identity thereto.

[0151] In one embodiment, a modification such as one in a gene encoding PR domain zinc finger protein 1 isoform 1 (Homo sapiens), such as one having NCBI Reference Sequence: NP_001189.2:

| | |
|---|---|
| 1 | MLDICLEKRV GTTLAAPKCN SSTVRFQGLA EGTKGTMKMD MEDADMTLWT EAEFEEKCTY |
| 61 | IVNDHPWDSG ADGGTSVQAE ASLPRNLLFK YATNSEEVIG VMSKEYIPKG TRFGPLIGEI |
| 121 | YTNDTVPKNA NRKYFWRIYS RGELHHFIDG FNEEKSNWMR YVNPAHSPRE QNLAACQNGM |
| 181 | NIYFYTIKPI PANQELLVWY CRDFAERLHY PYPGELTMMN LTQTQSSLKQ PSTEKNELCP |
| 241 | KNVPKREYSV KEILKLDSNP SKGKDLYRSN ISPLTSEKDL DDFRRRGSPE MPFYPRVVYP |
| 301 | IRAPLPEDFL KASLAYGIER PTYITRSPIP SSTTPSPSAR SSPDQSLKSS SPHSSPGNTV |
| 361 | SPVGPGSQEH RDSYAYLNAS YGTEGLGSYP GYAPLPHLPP AFIPSYNAHY PKFLLPPYGM |
| 421 | NCNGLSAVSS MNGINNFGLF PRLCPVYSNL LGGGSLPHPM LNPTSLPSSL PSDGARRLLQ |
| 481 | PEHPREVLVP APHSAFSFTG AAASMKDKAC SPTSGSPTAG TAATAEHVVQ PKATSAAMAA |
| 541 | PSSDEAMNLI KNKRNMTGYK TLPYPLKKQN GKIKYECNVC AKTFGQLSNL KVHLRVHSGE |
| 601 | RPFKCQTCNK GFTQLAHLQK HYLVHTGEKP HECQVCHKRF SSTSNLKTHL RLHSGEKPYQ |
| 661 | CKVCPAKFTQ FVHLKLHKRL HTRERPHKCS QCHKNYIHLC SLKVHLKGNC AAAPAPGLPL |
| 721 | EDLTRINEEI EKFDISDNAD RLEDVEDDIS VISVVEKEIL AVVRKEKEET GLKVSLQRNM |
| 781 | GNGLLSSGCS LYESSDLPLM KLPPSNPLPL VPVKVKQETV EPMDP |

(SEQ ID NO:), a different isoform of the protein, or a polypeptide having at least 80%, 82%, 85%, 86%, 88%, 90%, 92%, 94%, 95%, 97%, 98% or 99% amino acid sequence identity thereto.

[0152] In one embodiment, a modification such as one in a gene encoding receptor-type tyrosine-protein phosphatase C isoform 1 precursor (Homo sapiens), such as one having NCBI Reference Sequence NP_002829.3:

| | |
|---|---|
| 1 | MTMYLWLKLL AFGFAFLDTE VFVTGQSPTP SPTGLTTAKM PSVPLSSDPL PTHTTAFSPA |
| 61 | STFERENDFS ETTTSLSPDN TSTQVSPDSL DNASAFNTTG VSSVQTPHLP THADSQTPSA |
| 121 | GTDTQTFSGS AANAKLNPTP GSNAISDVPG ERSTASTFPT DPVSPLTTTL SLAHHSSAAL |
| 181 | PARTSNTTIT ANTSDAYLNA SETTTLSPSG SAVISTTTIA TTPSKPTCDE KYANITVDYL |
| 241 | YNKETKLFTA KLNVNENVEC GNNTCTNNEV HNLTECKNAS VSISHNSCTA PDKTLILDVP |
| 301 | PGVEKFQLHD CTQVEKADTT ICLKWKNIET FTCDTQNITY RFQCGNMIFD NKEIKLENLE |
| 361 | PEHEYKCDSE ILYNNHKFTN ASKIIKTDFG SPGEPQIIFC RSEAAHQGVI TWNPPQRSFH |
| 421 | NFTLCYIKET EKDCLNLDKN LIKYDLQNLK PYTKYVLSLH AYIIAKVQRN GSAAMCHFTT |
| 481 | KSAPPSQVWN MTVSMTSDNS MHVKCRPPRD RNGPHERYHL EVEAGNTLVR NESHKNCDFR |
| 541 | VKDLQYSTDY TFKAYFHNGD YPGEPFILHH STSYNSKALI AFLAFLIIVT SIALLVVLYK |
| 601 | IYDLHKKRSC NLDEQQELVE RDDEKQLMNV EPIHADILLE TYKRKIADEG RLFLAEFQSI |
| 661 | PRVFSKFPIK EARKPFNQNK NRYVDILPYD YNRVELSEIN GDAGSNYINA SYIDGFKEPR |
| 721 | KYIAAQGPRD ETVDDFWRMI WEQKATVIVM VTRCEEGNRN KCAEYWPSME EGTRAFGDVV |
| 781 | VKINQHKRCP DYIIQKLNIV NKKEKATGRE VTHIQFTSWP DHGVPEDPHL LLKLRRRVNA |
| 841 | FSNFFSGPIV VHCSAGVGRT GTYIGIDAML EGLEAENKVD VYGYVVKLRR QRCLMVQVEA |
| 901 | QYILIHQALV EYNQFGETEV NLSELHPYLH NMKKRDPPSE PSPLEAEFQR LPSYRSWRTQ |
| 961 | HIGNQEENKS KNRNSNVIPY DYNRVPLKHE LEMSKESEHD SDESSDDDSD SEEPSKYINA |
| 1021 | SFIMSYWKPE VMIAAQGPLK ETIGDFWQMI FQRKVKVIVM LTELKHGDQE ICAQYWGEGK |
| 1081 | QTYGDIEVDL KDTDKSSTYT LRVFELRHSK RKDSRTVYQY QYTNWSVEQL PAEPKELISM |
| 1141 | IQVVKQKLPQ KNSSEGNKHH KSTPLLIHCR DGSQQTGIFC ALLNLLESAE TEEVVDIFQV |
| 1201 | VKALRKARPG MVSTFEQYQF LYDVIASTYP AQNGQVKKNN HQEDKIEFDN EVDKVKQDAN |
| 1261 | CVNPLGAPEK LPEAKEQAEG SEPTSGTEGP EHSVNGPASP ALNQGS |

(SEQ ID NO:), a different isoform of the protein, or a polypeptide having at least 80%, 82%, 85%, 86%, 88%, 90%, 92%, 94%, 95%, 97%, 98% or 99% amino acid sequence identity thereto.

[0153] In one embodiment, a modification such as one in a gene encoding ras-related C3 botulinum toxin substrate 2 (Homo sapiens), such as one having NCBI Reference Sequence: NP_002863.1:

| | |
|---|---|
| 1 | MQAIKCVVVG DGAVGKTCLL ISYTTNAFPG EYIPTVFDNY SANVMVDSKP VNLGLWDTAG |
| 61 | QEDYDRLRPL SYPQTDVFLI CFSLVSPASY ENVRAKWFPE VRHHCPSTPI ILVGTKLDLR |
| 121 | DDKDTIEKLK EKKLAPITYP QGLALAKEID SVKYLECSAL TQRGLKTVFD EAIRAVLCPQ |
| 181 | PTRQQKRACS LL |

(SEQ ID NO:), a different isoform of the protein, or a polypeptide having at least 80%, 82%, 85%, 86%, 88%, 90%, 92%, 94%, 95%, 97%, 98% or 99% amino acid sequence identity thereto.

[0154] In one embodiment, a modification such as one in a gene encoding signal transducer and activator of transcription 3 isoform 1 (Homo sapiens), such as one having NCBI Reference Sequence: NP_644805.1:

| | |
|---|---|
| 1 | MAQWNQLQQL DTRYLEQLHQ LYSDSFPMEL RQFLAPWIES QDWAYAASKE SHATLVFHNL |
| 61 | LGEIDQQYSR FLQESNVLYQ HNLRRIKQFL QSRYLEKPME IARIVARCLW EESRLLQTAA |
| 121 | TAAQQGGQAN HPTAAVVTEK QQMLEQHLQD VRKRVQDLEQ KMKVVENLQD DFDFNYKTLK |
| 181 | SQGDMQDLNG NNQSVTRQKM QQLEQMLTAL DQMRRSIVSE LAGLLSAMEY VQKTLTDEEL |
| 241 | ADWKRRQQIA CIGGPPNICL DRLENWITSL AESQLQTRQQ IKKLEELQQK VSYKGDPIVQ |
| 301 | HRPMLEERIV ELFRNLMKSA FVVERQPCMP MHPDRPLVIK TGVQFTTKVR LLVKFPELNY |
| 361 | QLKIKVCIDK DSGDVAALRG SRKFNILGTN TKVMNMEESN NGSLSAEFKH LTLREQRCGN |
| 421 | GGRANCDASL IVTEELHLIT FETEVYHQGL KIDLETHSLP VVVISNICQM PNAWASILWY |
| 481 | NMLTNNPKNV NFFTKPPIGT WDQVAEVLSW QFSSTTKRGL SIEQLTTLAE KLLGPGVNYS |
| 541 | GCQITWAKFC KENMAGKGFS FWVWLDNIID LVKKYILALW NEGYIMGFIS KERERAILST |
| 601 | KPPGTFLLRF SESSKEGGVT FTWVEKDISG KTQIQSVEPY TKQQLNNMSF AEIIMGYKIM |
| 661 | DATNILVSPL VYLYPDIPKE EAFGKYCRPE SQEHPEADPG SAAPYLKTKF ICVTPTTCSN |
| 721 | TIDLPMSPRT LDSLMQFGNN GEGAEPSAGG QFESLTFDME LTSECATSPM |

(SEQ ID NO:), a different isoform of the protein, or a polypeptide having at least 80%, 82%, 85%, 86%, 88%, 90%, 92%, 94%, 95%, 97%, 98% or 99% amino acid sequence identity thereto.

[0155] In one embodiment, a modification such as one in a gene encoding proto-oncogene vav isoform 1 (Homo sapiens), such as one having NCBI Reference Sequence NP_005419.2:

| | |
|---|---|
| 1 | MELWRQCTHW LIQCRVLPPS HRVTWDGAQV CELAQALRDG VLLCQLLNNL LPHAINLREV |
| 61 | NLRPQMSQFL CLKNIRTFLS TCCEKFGLKR SELFEAFDLF DVQDFGKVIY TLSALSWTPI |
| 121 | AQNRGIMPFP TEEESVGDED IYSGLSDQID DTVEEDEDLY DCVENEEAEG DEIYEDLMRS |
| 181 | EPVSMPPKMT EYDKRCCCLR EIQQTEEKYT DTLGSIQQHF LKPLQRFLKP QDIEIIFINI |
| 241 | EDLLRVHTHF LKEMKEALGT PGAANLYQVF IKYKERFLVY GRYCSQVESA SKHLDRVAAA |
| 301 | REDVQMKLEE CSQRANNGRF TLRDLLMVPM QRVLKYHLLL QELVKHTQEA MEKENLRLAL |
| 361 | DAMRDLAQCV NEVKRDNETL RQITNFQLSI ENLDQSLAHY GRPKIDGELK ITSVERRSKM |
| 421 | DRYAFLLDKA LLICKRRGDS YDLKDFVNLH SFQVRDDSSG DRDNKKWSHM FLLIEDQGAQ |
| 481 | GYELFFKTRE LKKKWMEQFE MAISNIYPEN ATANGHDFQM FSFEETTSCK ACQMLLRGTF |
| 541 | YQGYRCHRCR ASAHKECLGR VPPCGRHGQD FPGTMKKDKL HRRAQDKKRN ELGLPKMEVF |
| 601 | QEYYGLPPPP GAIGPFLRLN PGDIVELTKA EAEQNWWEGR NTSTNEIGWF PCNRVKPYVH |
| 661 | GPPQDLSVHL WYAGPMERAG AESILANRSD GTFLVRQRVK DAAEFAISIK YNVEVKHIKI |
| 721 | MTAEGLYRIT EKKAFRGLTE LVEFYQQNSL KDCFKSLDTT LQFPFKEPEK RTISRPAVGS |
| 781 | TKYFGTAKAR YDFCARDRSE LSLKEGDIIK ILNKKGQQGW WRGEIYGRVG WFPANYVEED |
| 841 | YSEYC |

(SEQ ID NO:), a different isoform of the protein, or a polypeptide having at least 80%, 82%, 85%, 86%, 88%, 90%, 92%, 94%, 95%, 97%, 98% or 99% amino acid sequence identity thereto.

[0156] In one embodiment, a modification such as one in a gene encoding tyrosine-protein kinase ZAP-70 isoform 1 (Homo sapiens), such as one having NCBI Reference Sequence: NP 001070.2:

| | |
|---|---|
| 1 | MPDPAAHLPF FYGSISRAEA EEHLKLAGMA DGLFLLRQCL RSLGGYVLSL VHDVRFHHFP |
| 61 | IERQLNGTYA IAGGKAHCGP AELCEFYSRD PDGLPCNLRK PCNRPSGLEP QPGVFDCLRD |
| 121 | AMVRDYVRQT WKLEGEALEQ AIISQAPQVE KLIATTAHER MPWYHSSLTR EEAERKLYSG |
| 181 | AQTDGKFLLR PRKEQGTYAL SLIYGKTVYH YLISQDKAGK YCIPEGTKFD TLWQLVEYLK |
| 241 | LKADGLIYCL KEACPNSSAS NASGAAAPTL PAHPSTLTHP QRRIDTLNSD GYTPEPARIT |
| 301 | SPDKPRPMPM DTSVYESPYS DPEELKDKKL FLKRDNLLIA DIELGCGNFG SVRQGVYRMR |
| 361 | KKQIDVAIKV LKQGTEKADT EEMMREAQIM HQLDNPYIVR LIGVCQAEAL MLVMEMAGGG |
| 421 | PLHKFLVGKR EEIPVSNVAE LLHQVSMGMK YLEEKNFVHR DLAARNVLLV NRHYAKISDF |
| 481 | GLSKALGADD SYYTARSAGK WPLKWYAPEC INFRKFSSRS DVWSYGVTMW EALSYGQKPY |
| 541 | KKMKGPEVMA FIEQGKRMEC PPECPPELYA LMSDCWIYKW EDRPDFLTVE QRMRACYYSL |
| 601 | ASKVEGPPGS TQKAEAACA |

(SEQ ID NO:), a different isoform of the protein, or a polypeptide having at least 80%, 82%, 85%, 86%, 88%, 90%, 92%, 94%, 95%, 97%, 98% or 99% amino acid sequence identity thereto.

[0157] In one embodiment, a modification such as one in a gene encoding tumor necrosis factor receptor superfamily member 10A (Homo sapiens), such as one having NCBI Reference Sequence: NP_003835.3:

| | |
|---|---|
| 1 | MAPPPARVHL GAFLAVTPNP GSAASGTEAA AATPSKVWGS SAGRIEPRGG GRGALPTSMG |
| 61 | QHGPSARARA GRAPGPRPAR EASPRLRVHK TFKFVVVGVL LQVVPSSAAT IKLHDQSIGT |
| 121 | QQWEHSPLGE LCPPGSHRSE HPGACNRCTE GVGYTNASNN LFACLPCTAC KSDEEERSPC |
| 181 | TTTRNTACQC KPGTFRNDNS AEMCRKCSRG CPRGMVKVKD CTPWSDIECV HKESGNGHNI |
| 241 | WVILVVTLVV PLLLVAVLIV CCCIGSGCGG DPKCMDRVCF WRLGLLRGPG AEDNAHNEIL |
| 301 | SNADSLSTFV SEQQMESQEP ADLTGVTVQS PGEAQCLLGP AEAEGSQRRR LLVPANGADP |
| 361 | TETLMLFFDK FANIVPFDSW DQLMRQLDLT KNEIDVVRAG TAGPGDALYA MLMKWVNKTG |
| 421 | RNASIHTLLD ALERMEERHA REKIQDLLVD SGKFIYLEDG TGSAVSLE |

(SEQ ID NO:), a different isoform of the protein, or a polypeptide having at least 80%, 82%, 85%, 86%, 88%, 90%, 92%, 94%, 95%, 97%, 98% or 99% amino acid sequence identity thereto.

[0158] In one embodiment, a modification such as one in a gene encoding signal transducer and activator of transcription 5B (Homo sapiens), such as one having NCBI Reference Sequence: NP_036580.2:

| | |
|---|---|
| 1 | MAVWIQAQQL QGEALHQMQA LYGQHFPIEV RHYLSQWIES QAWDSVDLDN PQENIKATQL |
| 61 | LEGLVQELQK KAEHQVGEDG FLLKIKLGHY ATQLQNTYDR CPMELVRCIR HILYNEQRLV |
| 121 | REANNGSSPA GSLADAMSQK HLQINQTFEE LRLVTQDTEN ELKKLQQTQE YFIIQYQESL |
| 181 | RIQAQFGPLA QLSPQERLSR ETALQQKQVS LEAWLQREAQ TLQQYRVELA EKHQKTLQLL |
| 241 | RKQQTIILDD ELIQWKRRQQ LAGNGGPPEG SLDVLQSWCE KLAEIIWQNR QQIRRAEHLC |
| 301 | QQLPIPGPVE EMLAEVNATI TDIISALVTS TFIIEKQPPQ VLKTQTKFAA TVRLLVGGKL |
| 361 | NVHMNPPQVK ATIISEQQAK SLLKNENTRN DYSGEILNNC CVMEYHQATG TLSAHFRNMS |
| 421 | LKRIKRSDRR GAESVTEEKF TILFESQFSV GGNELVFQVK TLSLPVVVIV HGSQDNNATA |
| 481 | TVLWDNAFAE PGRVPFAVPD KVLWPQLCEA LNMKFKAEVQ SNRGLTKENL VFLAQKLFNN |
| 541 | SSSHLEDYSG LSVSWSQFNR ENLPGRNYTF WQWFDGVMEV LKKHLKPHWN DGAILGFVNK |
| 601 | QQAHDLLINK PDGTFLLRFS DSEIGGITIA WKFDSQERMF WNLMPFTTRD FSIRSLADRL |
| 661 | GDLNYLIYVF PDRPKDEVYS KYYTPVPCES ATAKAVDGYV KPQIKQVVPE FVNASADAGG |
| 721 | GSATYMDQAP SPAVCPQAHY NMYPQNPDSV LDTDGDFDLE DTMDVARRVE ELLGRPMDSQ |
| 781 | WIPHAQS |

(SEQ ID NO:), a different isoform of the protein, or a polypeptide having at least 80%, 82%, 85%, 86%, 88%, 90%, 92%, 94%, 95%, 97%, 98% or 99% amino acid sequence identity thereto.

[0159] In one embodiment, a modification such as one in a gene encoding cytokine receptor common subunit gamma precursor (Homo sapiens), for instance NCBI Reference Sequence. NP_00197.1:

| | |
|---|---|
| 1 | MLKPSLPFTS LLFLQLPLLG VGLNTTILTP NGNEDTTADF FLTTMPTDSL SVSTLPLPEV |
| 61 | QCFVFNVEYM NCTWNSSSEP QPTNLTLHYW YKNSDNDKVQ KCSHYLFSEE ITSGCQLQKK |
| 121 | EIHLYQTFVV QLQDPREPRR QATQMLKLQN LVIPWAPENL TLHKLSESQL ELNWNNRFLN |
| 181 | HCLEHLVQYR TDWDHSWTEQ SVDYRHKFSL PSVDGQKRYT FRVRSRFNPL CGSAQHWSEW |
| 241 | SHPIHWGSNT SKENPFLFAL EAVVISVGSM GLIISLLCVY FWLERTMPRI PTLKNLEDLV |
| 301 | TEYHGNFSAW SGVSKGLAES LQPDYSERLC LVSEIPPKGG ALGEGPGASP CNQHSPYWAP |
| 361 | PCYTLKPET |

(SEQ ID NO:), a different isoform of the protein, or a polypeptide having at least 80%, 82%, 85%, 86%, 88%, 90%, 92%, 94%, 95%, 97%, 98% or 99% amino acid sequence identity thereto.

[0160] In one embodiment, a modification such as one in a gene encoding phosphatidylinositol 4,5-bisphosphate 3-kinase catalytic subunit gamma isoform (Homo sapiens), for example, NCBI Reference Sequence: NP_001269355.1:

| | |
|---|---|
| 1 | MELENYKQPV VLREDNCRRR RRMKPRSAAA SLSSMELIPI EFVLPTSQRK CKSPETALLH |
| 61 | VAGHGNVEQM KAQVWLRALE TSVAADFYHR LGPHHFLLLY QKKGQWYEIY DKYQVVQTLD |
| 121 | CLRYWKATHR SPGQIHLVQR HPPSEESQAF QRQLTALIGY DVTDVSNVHD DELEFTRRGL |
| 181 | VTPRMAEVAS RDPKLYAMHP WVTSKPLPEY LWKKIANNCI FIVIHRSTTS QTIKVSPDDT |
| 241 | PGAILQSFFT KMAKKKSLMD IPESQSEQDF VLRVCGRDEY LVGETPIKNF QWVRHCLKNG |
| 301 | EEIHVVLDTP PDPALDEVRK EEWPLVDDCT GVTGYHEQLT IHGKDHESVF TVSLWDCDRK |
| 361 | FRVKIRGIDI PVLPRNTDLT VFVEANIQHG QQVLCQRRTS PKPFTEEVLW NVWLEFSIKI |
| 421 | KDLPKGALLN LQIYCGKAPA LSSKASAESP SSESKGKVQL LYYVNLLLID HRFLLRRGEY |
| 481 | VLHMWQISGK GEDQGSFNAD KLTSATNPDK ENSMSISILL DNYCHPIALP KHQPTPDPEG |
| 541 | DRVRAEMPNQ LRKQLEAIIA TDPLNPLTAE DKELLWHFRY ESLKHPKAYP KLFSSVKWGQ |
| 601 | QEIVAKTYQL LARREVWDQS ALDVGLTMQL LDCNFSDENV RAIAVQKLES LEDDDVLHYL |
| 661 | LQLVQAVKFE PYHDSALARF LLKRGLRNKR IGHFLFWFLR SEIAQSRHYQ QRFAVILEAY |
| 721 | LRGCGTAMLH DFTQQVQVIE MLQKVTLDIK SLSAEKYDVS SQVISQLKQK LENLQNSQLP |
| 781 | ESFRVPYDPG LKAGALAIEK CKVMASKKKP LWLEFKCADP TALSNETIGI IFKHGDDLRQ |
| 841 | DMLILQILRI MESIWETESL DLCLLPYGCI STGDKIGMIE IVKDATTIAK IQQSTVGNTG |
| 901 | AFKDEVLNHW LKEKSPTEEK FQAAVERFVY SCAGYCVATF VLGIGDRHND NIMITETGNL |
| 961 | FHIDFGHILG NYKSFLGINK ERVPFVLTPD FLFVMGTSGK KTSPHFQKFQ DICVKAYLAL |
| 1021 | RHHTNLLIIL FSMMLMTGMP QLTSKEDIEY IRDALTVGKN EEDAKKYFLD QIEVCRDKGW |
| 1081 | TVQFNWFLHL VLGIKQGEKH SA |

(SEQ ID NO:), a different isoform of the protein, or a polypeptide having at least 80%, 82%, 85%, 86%, 88%, 90%, 92%, 94%, 95%, 97%, 98% or 99% amino acid sequence identity thereto.

[0161] In one embodiment, a modification such as one in a gene encoding phosphatidylinositol 4,5-bisphosphate 3-kinase catalytic subunit delta isoform (Homo sapiens), for example, NCBI Reference Sequence: NP_005017:

| | |
|---|---|
| 1 | MPPGVDCPME FWTKEENQSV VVDFLLPTGV YLNFPVSRNA NLSTIKQLLW HRAQYEPLFH |
| 61 | MLSGPEAYVF TCINQTAEQQ ELEDEQRRLC DVQPFLPVLR LVAREGDRVK KLINSQISLL |
| 121 | IGKGLHEFDS LCDPEVNDFR AKMCQFCEEA AARRQQLGWE AWLQYSFPLQ LEPSAQTWGP |
| 181 | GTLRLPNRAL LVNVKFEGSE ESFTFQVSTK DVPLALMACA LRKKATVFRQ PLVEQPEDYT |
| 241 | LQVNGRHEYL YGSYPLCQFQ YICSCLHSGL TPHLTMVHSS SILAMRDEQS NPAPQVQKPR |
| 301 | AKPPPIPAKK PSSVSLWSLE QPFRIELIQG SKVNADERMK LVVQAGLFHG NEMLCKTVSS |
| 361 | SEVSVCSEPV WKQRLEFDIN ICDLPRMARL CFALYAVIEK AKKARSTKKK SKKADCPIAW |
| 421 | ANLMLFDYKD QLKTGERCLY MWPSVPDEKG ELLNPTGTVR SNPNTDSAAA LLICLPEVAP |
| 481 | HPVYYPALEK ILELGRHSEC VHVTEEEQLQ LREILERRGS GELYEHEKDL VWKLRHEVQE |
| 541 | HFPEALARLL LVTKWNKHED VAQMLYLLCS WPELPVLSAL ELLDFSFPDC HVGSFAIKSL |
| 601 | RKLTDDELFQ YLLQLVQVLK YESYLDCELT KFLLDRALAN RKIGHFLFWH LRSEMHVPSV |
| 661 | ALRFGLILEA YCRGSTHHMK VLMKQGEALS KLKALNDFVK LSSQKTPKPQ TKELMHLCMR |
| 721 | QEAYLEALSH LQSPLDPSTL LAEVCVEQCT FMDSKMKPLW IMYSNEEAGS GGSVGIIFKN |
| 781 | GDDLRQDMLT LQMIQLMDVL WKQEGLDLRM TPYGCLPTGD RTGLIEVVLR SDTIANIQLN |
| 841 | KSNMAATAAF NKDALLNWLK SKNPGEALDR AIEEFTLSCA GYCVATYVLG IGDRHSDNIM |
| 901 | IRESGQLFHI DFGHFLGNFK TKFGINRERV PFILTYDFVH VIQQGKTNNS EKFERFRGYC |
| 961 | ERAYTILRRH GLLFLHLFAL MRAAGLPELS CSKDIQYLKD SLALGKTEEE ALKHFRVKFN |
| 1021 | EALRESWKTK VNWLAHNVSK DNRQ |

(SEQ ID NO:), a different isoform of the protein, or a polypeptide having at least 80%, 82%, 85%, 86%, 88%, 90%, 92%, 94%, 95%, 97%, 98% or 99% amino acid sequence identity thereto.

[0162] In one embodiment, a modification such as one in a gene encoding proto-oncogen vav (Homo sapiens), for example, NCBI Reference Sequence: NP_05419:

| | |
|---|---|
| 1 | MELWRQCTHW LIQCRVLPPS HRVTWDGAQV CELAQALRDG VLLCQLLNNL LPHAINLREV |
| 61 | NLRPQMSQFL CLKNIRTFLS TCCEKFGLKR SELFEAFDLF DVQDFGKVIY TLSALSWTPI |
| 121 | AQNRGIMPFP TEEESVGDED IYSGLSDQID DTVEEDEDLY DCVENEEAEG DEIYEDLMRS |
| 181 | EPVSMPPKMT EYDKRCCCLR EIQQTEEKYT DTLGSIQQHF LKPLQRFLKP QDIEIIFINI |
| 241 | EDLLRVHTHF LKEMKEALGT PGAANLYQVF IKYKERFLVY GRYCSQVESA SKHLDRVAAA |
| 301 | REDVQMKLEE CSQRANNGRF TLRDLLMVPM QRVLKYHLLL QELVKHTQEA MEKENLRLAL |
| 361 | DAMRDLAQCV NEVKRDNETL RQITNFQLSI ENLDQSLAHY GRPKIDGELK ITSVERRSKM |
| 421 | DRYAFLLDKA LLICKRRGDS YDLKDFVNLH SFQVRDDSSG DRDNKKWSHM FLLIEDQGAQ |
| 481 | GYELFFKTRE LKKKWMEQFE MAISNIYPEN ATANGHDFQM FSFEETTSCK ACQMLLRGTF |
| 541 | YQGYRCHRCR ASAHKECLGR VPPCGRHGQD FPGTMKKDKL HRRAQDKKRN ELGLPKMEVF |
| 601 | QEYYGLPPPP GAIGPFLRLN PGDIVELTKA EAEQNWWEGR NTSTNEIGWF PCNRVKPYVH |
| 661 | GPPQDLSVHL WYAGPMERAG AESILANRSD GTFLVRQRVK DAAEFAISIK YNVEVKHIKI |
| 721 | MTAEGLYRIT EKKAFRGLTE LVEFYQQNSL KDCFKSLDTT LQFPFKEPEK RTISRPAVGS |
| 781 | TKYFGTAKAR YDFCARDRSE LSLKEGDIIK ILNKKGQQGW WRGEIYGRVG WFPANYVEED |
| 841 | YSEYC |

(SEQ ID NO:), a different isoform of the protein, or a polypeptide having at least 80%, 82%, 85%, 86%, 88%, 90%, 92%, 94%, 95%, 97%, 98% or 99% amino acid sequence identity thereto.

[0163] In one embodiment, a modification such as one in a gene encoding Lymphocyte cytosolic protein 2 (Homo sapiens), for example, NCBI Reference Sequence. NP_005556:

| | |
|---|---|
| 1 | MALRNVPFRS EVLGWDPDSL ADYFKKLNYK DCEKAVKKYH IDGARFLNLT ENDIQKFPKL |
| 61 | RVPILSKLSQ EINKNEERRS IFTRKPQVPR FPEETESHEE DNGGWSSFEE DDYESPNDDQ |
| 121 | DGEDDGDYES PNEEEEAPVE DDADYEPPPS NDEEALQNSI LPAKPFPNSN SMYIDRPPSG |
| 181 | KTPQQPPVPP QRPMAALPPP PAGRNHSPLP PPQTNHEEPS RSRNHKTAKL PAPSIDRSTK |
| 241 | PPLDRSLAPF DREPFTLGKK PPFSDKPSIP AGRSLGEHLP KIQKPPLPPT TERHERSSPL |
| 301 | PGKKPPVPKH GWGPDRREND EDDVHQRPLP QPALLPMSSN TFPSRSTKPS PMNPLPSSHM |
| 361 | PGAFSESNSS FPQSASLPPY FSQGPSNRPP IRAEGRNFPL PLPNKPRPPS PAEEENSLNE |
| 421 | EWYVSYITRP EAEAALRKIN QDGTFLVRDS SKKTTTNPYV LMVLYKDKVY NIQIRYQKES |
| 481 | QVYLLGTGLR GKEDFLSVSD IIDYFRKMPL LLIDGKNRGS RYQCTLTHAA GYP |

(SEQ ID NO:), a different isoform of the protein, or a polypeptide having at least 80%, 82%, 85%, 86%, 88%, 90%, 92%, 94%, 95%, 97%, 98% or 99% amino acid sequence identity thereto.

[0164] In one embodiment, a modification such as one in a gene encoding Phospholipase C, gamma 1, also known as PLCG1 (Homo sapiens), for example, NCBI Reference Sequence: NP_002651:

| | |
|---|---|
| 1 | MAGAASPCAN GCGPGAPSDA EVLHLCRSLE VGTVMTLFYS KKSQRPERKT FQVKLETRQI |
| 61 | TWSRGADKIE GAIDIREIKE IRPGKTSRDF DRYQEDPAFR PDQSHCFVIL YGMEFRLKTL |
| 121 | SLQATSEDEV NMWIKGLTWL MEDTLQAPTP LQIERWLRKQ FYSVDRNRED RISAKDLKNM |
| 181 | LSQVNYRVPN MRFLRERLTD LEQRSGDITY GQFAQLYRSL MYSAQKTMDL PFLEASTLRA |
| 241 | GERPELCRVS LPEFQQFLLD YQGELWAVDR LQVQEFMLSF LRDPLREIEE PYFFLDEFVT |
| 301 | FLFSKENSVW NSQLDAVCPD TMNNPLSHYW ISSSHNTYLT GDQFSSESSL EAYARCLRMG |
| 361 | CRCIELDCWD GPDGMPVIYH GHTLTTKIKF SDVLHTIKEH AFVASEYPVI LSIEDHCSIA |
| 421 | QQRNMAQYFK KVLGDTLLTK PVEISADGLP SPNQLKRKIL IKHKKLAEGS AYEEVPTSMM |
| 481 | YSENDISNSI KNGILYLEDP VNHEWYPHYF VLTSSKIYYS EETSSDQGNE DEEEPKEVSS |
| 541 | STELHSNEKW FHGKLGAGRD GRHIAERLLT EYCIETGAPD GSFLVRESET FVGDYTLSFW |
| 601 | RNGKVQHCRI HSRQDAGTPK FFLTDNLVFD SLYDLITHYQ QVPLRCNEFE MRLSEPVPQT |
| 661 | NAHESKEWYH ASLTRAQAEH MLMRVPRDGA FLVRKRNEPN SYAISFRAEG KIKHCRVQQE |
| 721 | GQTVMLGNSE FDSLVDLISY YEKHPLYRKM KLRYPINEEA LEKIGTAEPD YGALYEGRNP |
| 781 | GFYVEANPMP TFKCAVKALF DYKAQREDEL TFIKSAIIQN VEKQEGGWWR GDYGGKKQLW |
| 841 | FPSNYVEEMV NPVALEPERE HLDENSPLGD LLRGVLDVPA CQIAIRPEGK NNRLFVFSIS |
| 901 | MASVAHWSLD VAADSQEELQ DWVKKIREVA QTADARLTEG KIMERRKKIA LELSELVVYC |
| 961 | RPVPFDEEKI GTERACYRDM SSFPETKAEK YVNKAKGKKF LQYNRLQLSR IYPKGQRLDS |
| 1021 | SNYDPLPMWI CGSQLVALNF QTPDKPMQMN QALFMTGRHC GYVLQPSTMR DEAFDPFDKS |
| 1081 | SLRGLEPCAI SIEVLGARHL PKNGRGIVCP FVEIEVAGAE YDSTKQKTEF VVDNGLNPVW |
| 1141 | PAKPFHFQIS NPEFAFLRFV VYEEDMFSDQ NFLAQATFPV KGLKTGYRAV PLKNNYSEDL |
| 1201 | ELASLLIKID IFPAKQENGD LSPFSGTSLR ERGSDASGQL FHGRAREGSF ESRYQQPFED |
| 1261 | FRISQEHLAD HFDSRERRAP RRTRVNGDNR L |

(SEQ ID NO:), a different isoform of the protein, or a polypeptide having at least 80%, 82%, 85%, 86%, 88%, 90%, 92%, 94%, 95%, 97%, 98% or 99% amino acid sequence identity thereto.

### Formulations and Dosages

[0165] The modified immune cells can be formulated as pharmaceutical compositions and administered to a mammalian host, such as a human patient in a variety of forms adapted to the chosen route of administration, e.g., orally or parenterally, by intravenous, intramuscular, topical or subcutaneous routes.

[0166] In one embodiment, the immune cells may be administered by infusion or injection. Solutions of the immune cells can be prepared in water, optionally mixed with a nontoxic surfactant. Dispersions can also be prepared in glycerol, liquid polyethylene glycols, triacetin, and mixtures thereof and in oils. Under ordinary conditions of storage and use, these preparations contain a preservative to prevent the growth of microorganisms.

[0167] The pharmaceutical dosage forms suitable for injection or infusion may include sterile aqueous solutions or dispersions or sterile powders comprising the active ingredient which are adapted for the extemporaneous preparation of sterile injectable or infusible solutions or dispersions, optionally encapsulated in liposomes. In all cases, the ultimate dosage form should be sterile, fluid and stable under the conditions of manufacture and storage. The liquid carrier or vehicle can be a solvent or liquid dispersion medium comprising, for example, water, ethanol, a polyol (for example, glycerol, propylene glycol, liquid polyethylene glycols, and the like), vegetable oils, nontoxic glyceryl esters, and suitable mixtures thereof. The proper fluidity can be maintained, for example, by the formation of liposomes, by the maintenance of the required particle size in the case of dispersions or by the use of surfactants. The prevention of the action of microorganisms can be brought about by various antibacterial and antifungal agents, for example, parabens, chlorobutanol, phenol, sorbic acid, thimerosal, and the like. In many cases, it may be preferable to include isotonic agents, for example, sugars, buffers or sodium chloride. Prolonged absorption of the injectable compositions can be brought about by the use in the compositions of agents delaying absorption, for example, aluminum monostearate and gelatin.

[0168] Sterile injectable solutions are prepared by incorporating the active agent in the required amount in the appropriate solvent with various of the other ingredients enumerated above, as required, followed by filter sterilization. In the case of sterile powders for the preparation of sterile injectable solutions, the methods of preparation include vacuum drying and the freeze-drying techniques, which yield a powder of the active ingredient plus any additional desired ingredient present in the previously sterile-filtered solutions.

[0169] Useful solid carriers may include finely divided solids such as talc, clay, microcrystalline cellulose, silica, alumina and the like. Useful liquid carriers include water, alcohols or glycols or water-alcohol/glycol blends, in which the present compounds can be dissolved or dispersed at effective levels, optionally with the aid of non-toxic surfactants. Adjuvants such as antimicrobial agents can be added to optimize the properties for a given use. Thickeners such as synthetic polymers, fatty acids, fatty acid salts and esters, fatty alcohols, modified celluloses or modified mineral materials can also be employed with liquid carriers to form spreadable pastes, gels, ointments, soaps, and the like, for application directly to the skin of the user.

[0170] Useful dosages of the cells may be from 1×10⁴ to 1×10⁶, 1×10⁵ to 1×10⁷, 1×10⁶ to 1×10⁸, 1×10⁷ to 1×10⁹, 1×10⁸ to 1×10¹⁰, 1×10¹⁰ to 1×10¹², or 1×10¹¹ to 1×10¹⁵ cells.

[0171] The amount of for use alone or with other agents will vary with the route of administration, the nature of the condition being treated and the age and condition of the patient and will be ultimately at the discretion of the attendant physician or clinician.

[0172] The invention will be described by the following non-limiting example.

### Example

### Methods

### Lentiviral Plasmids and Cloning for ABE and CBE Base Editors.

[0173] The lentiviral transfer plasmids containing base editors were generated using pZR071 (Addgene 180264) as a backbone. The pZR071 plasmid was digested with EcoRI and KpnI, followed by ligation of a cassette composed of the EF1a promoter, base editor coding sequence, and a P2A-Blasticidin resistance element. For the plenti-CR033 transfer plasmid, the ABE8e(V106W) coding sequence was obtained from ABE8e(TadA-8e-V106W) (Addgene 138495). For the plenti-CR029 transfer plasmid, the evoCDA1-BE4max sequence was derived from pBT277_evoCDA1-BE4max-in-mammalian-cells (Addgene 122608). For the plenti-CR102 transfer plasmid, the nCas9 from plenti-CR033 was replaced with SpG, which was sourced from pCAG-CBE-4max-SpG-P2A-EGFP (RTW4552) (Addgene 139998).

### Library Cloning

[0174] A combination of literature review, gene ontology annotations and hits from previous CRISPR screens in T cells led to a list of 385 genes implicated in regulation of T cell activation, differentiation and function. For each gene we choose the longest annotated isoform and selected all NGG PAM guides which: (1) overlapped with the coding sequence plus 2&bp on the side of each exon to include splice sites; and (2) contained an editable base (A or C) in the expected editing window (position 3-8 for ABE and 1-13 for CBE). The addition of 1,000 non-targeting sgRNAs derived from the Brunello library resulted in a list of 117,249 unique sgRNAs. We added type II restriction sites and sequences for amplification, as previously described. The oligonucleotide pool was obtained from Agilent and amplified with KAPA HiFi HotStart (Roche 07958935001). The PCR product was purified and ligated into LentiGuide-Puro plasmid (Addgene 52963) backbone with the New England Biolabs NEB Golden Gate Assembly Kit (BsmBI-HF v2) (New England Biolabs, E1602L) per the manufacturer's instructions. Ligation product was transfected into Lucigen Endura electrocompetent cells (LGC, 60242-2) per the manufacturer's instructions. Cells were expanded at 30&C for 18&h and plasmid was extracted using the QIAGEN Plasmid Plus Mega Kit (Qiagen, 12981). Total amount of transfected cells was calculated by counting colonies of separate ampicillin plates at 1/10,000,000 and 1/100,000,000 dilution. We proceeded with next generation sequencing of the plasmid pool at coverage of >1,000×, confirming representation and distribution of sgRNAs. The plasmid pool was then used for lentivirus production as described under ‘Lentivirus production’. For screens using SpG nCas9, 57 gene hits from the NGG screen and CBLB were selected based on the effect of knockout guides. Guides were selected for the coding regions of these genes in an identical manner to the NGG library, only for NG PAM guides, an oligonucleotide pool containing 45,941 oligonucleotides was ordered similarly to the first screen using NGG nCas9. Library preparation and quality control was performed as described for the NGG library; read counts for quality control sequencing of the libraries were used.

### RNA Production

[0175] For experiments with base editor mRNA, an in!vitro transcription (IVT) plasmid containing ABE8e(V106W) with a mutated T7 promoter was designed and cloned as previously described. The IVT templates were produced by PCR of ABE8e(V106W) with the forward primer correcting the T7 mutation and reverse primer appending the polyA tail, thus the final PCR product contained WT T7 promoter, 5′ untranslated region including Kozak sequence, the codon-optimized ABE8e(V106W) coding sequence, 3′ untranslated region, and a 145-bp polyA tail. The PCR product was purified and stored at −20° C. until further use. IVT reactions were performed with the HiScribe T7 High Yield RNA Synthesis Kit (New England Biolabs, E2040S) under full substitution of UTP and in presence of 4&mM CleanCap (TriLink Biotechnologies, N-7113-5), as described. Transcribed mRNA was purified with lithium chloride and eluted in RNA storage solution (Fisher Scientific, AM7000). After quantification on a Nanodrop spectrophotometer and normalization to 1 μgμl⁻¹, mRNA product was assessed on an Agilent 4200 Tapestation system and subsequently stored at −80° C.

Lentivirus Production Lentiviral particles were produced as previously described. In brief, for a T75 flask, 12×10⁶ Lenti-X HEK 293T cells were seeded in 15&ml complete Opti-MEM. The next morning, cells were transfected with 12 μg transfer plasmid, 12 μg psPAX2 (Addgene 12260) and 5 μg pMD2.G (Addgene 12259) with 56 μl p3000 and 65 μl Lipofectamine 3000 (Fisher Scientific, L3000075). Six hours after transfection, medium was replaced with fresh cOpti-MEM supplemented with 1× viral boost (Alstem, VB100). Another 18 h later, virus containing supernatant was collected and spun down at 500 g for 5 min at 4° C. to pellet cell debris. Lentivirus-containing medium was moved to a new vessel and subsequently concentrated 100-fold using Lenti-X Concentrator (Takara Bio, 631232) per the manufacturer's instructions. Viral particles were stored at −80° C. until further use.

### T Cell Isolation and Culture

[0176] Human peripheral blood Leukopaks enriched for PBMCs were sourced from Stemcell Technologies (200-0092). The donors were chosen without regard to sex, gender, ethnicity or race. Donors for the screens were <60 years old and non-smokers. T!cells were isolated with the EasySep Human T cell isolation kit (100-069) or EasySep Human CD4+ T Cell Isolation Kit (Stemcell Technologies, 100-0696) per the manufacturer's instructions. Immediately after isolation, T cells were either frozen or used directly for in vitro experiments. Fresh T cells were seeded at 1×10⁶ cells per ml and subsequently used for experiments. When frozen, T cells were counted, spun down, and resuspended in Bambanker freezing medium at a concentration of 50×10⁶ cells per ml. T cells were stored at −80° C. for up to 2 months or in liquid nitrogen for longer periods. When needed, T cells were thawed and seeded at 1×10⁶ cells per ml, similar to fresh T cells. Unless otherwise indicated, T cells were cultured in complete X-VIVO 15 (cX-VIVO) consisting of X-VIVO 15 (Lonza Bioscience, 04-418Q) supplemented with 5% FCS (R&D systems, lot M19187), 4 mM N-acetyl-cysteine (VWR, VWRV0108-25G) and 55 μM 2-mercaptoethanol (Fisher Scientific, 21985023).

### Cell Lines

[0177] Lenti-X HEK 293T cells (Takara Bio, 632180) were cultured in complete DMEM consisting of high glucose DMEM (Fisher Scientific, 10566024) supplemented with 10% FCS (R&D systems, LOT M19187), 1× MEM Non-Essential Amino Acids Solution (Fisher Scientific, 11140050), 1 mM sodium pyruvate (Fisher Scientific, 11360070), 10&mM HEPES (Sigma Aldrich, H0887-100ML), 1,000&U&ml-1 penicillin-streptomycin (Fisher Scientific, 15140122). Lenti-X HEK 293T cells were subcultured every 2-3 days and maintained at a confluence of <70% for a maximum of 15 passages. A375-nRFP (a gift from A. Ashworth) cells were cultured in complete RPMI (cRPMI) consisting of RPMI (Fisher Scientific, 21870092) with 10% FCS, 55 μM 2-mercaptoethanol, 2&mM+-Glutamine (Fisher Scientific, 25030081), 1,000Uml⁻¹ penicillin-streptomycin, 1× MEM non-essential amino acids solution, 1 mM sodium pyruvate and 10 mM HEPES (Sigma Aldrich, H0887-100ML) and subcultured every 2-3 days to keep them at a confluency of <70%. Cell lines were tested negative for mycoplasma contamination.

Arrayed Base Editing with Lentivirus

[0178] Frozen human Pan CD3+ T!cells were thawed and activated with anti-CD3/anti-CD28 Dynabeads (Life Technologies, 40203D) in presence of 200IUml-1 IL-2. The next morning, plenti-CR029 or plenti-CR033 lentivirus was added to the cells at 2% v/v. The following day cells were subcultured 1/1 and IL-2 was replenished. Additionally, lentiguide-Puro with CD3-, CD5- and CD7-targeting sgRNAs were added. One day later, cells were split again 1:1 with half of the cells receiving blasticidin treatment at 10 μgml⁻¹ and all cells receiving puromycin treatment at 2 μgml⁻¹. Cells were subcultured and IL-2 was refreshed every two days and assessed by flow cytometry and Sanger sequencing seven days after initial T cell activation.

[0179] For testing our ABE SpG lentiviral base editing approach, we followed a similar strategy with viral particles produced from plenti-CR102.

### NGG Screen

[0180] CD4+ T cells from 3 human donors were isolated as described under ‘T cell isolation and culture’. For ABE screens, 150&×&10⁶ cells per donor were used for subsequent activation in cX-VIVO 15 at a concentration of 1×10⁶ cells per ml. For CBE screens, 225×10⁶ cells per donor were seeded under similar culture conditions. CD4+ T cell purity was confirmed by flow cytometry (>95%). Cells were subsequently activated with anti-CD3/anti-CD28 Dynabeads (Life Technologies, 40203D) at a 1:1 bead-to-cell ratio and with 200IUml⁻¹ IL-2 (R&D systems, 202-GMP-01M). Next morning, 2% v/v plenti-CR033 or 2.2% plenti-CR029 lentivirus was added for ABE and CBE screens, respectively. Two days later, 50% of the original culture volume cX-VIVO was added and IL-2 was supplemented for a final concentration of 200IUml⁻¹. 1CR005 library lentivirus was added at 1.3% v/v (corresponding to a multiplicity of infection (MOI)~0.3) and cells were mixed. Next day, cells were counted and fresh medium was added to keep the culture at 1×10⁶ cells per ml. IL-2 was supplemented to a final concentration of 200IUml⁻¹, puromycin and blasticidin were added to 2.5 μgml⁻¹ and 20 μgml⁻¹ final concentrations, respectively. Cells were subcultured and expanded every 2 days and kept at ~1×10⁶ per ml and 200IUml⁻¹ IL-2. Five days after addition of blasticidin and puromycin, cells from each screen were collected, pooled, and counted. Fresh medium without supplements was added to bring T cells to 2×10⁶ cells per ml. Next morning, T cells were restimulated with 6.25 μlml⁻¹ anti-CD3/anti-CD28/anti-CD2 Immunocult (Stemcell Technologies, 10990). For cytokine screens, Protein Transport Inhibitor (Becton Dickinson, 555029) was added at a 1/1,000 dilution 1&h after stimulation, followed by 9&h incubation. Cytokine screen cells were collected 10 h after stimulation and fixed and stained for FACS using the Cytofix/Cytoperm Fixation/Permeabilization Solution Kit (Becton Dickinson, 554714). For PD-1 and CD25 screens, cells were collected one day after activation, stained for Live/Dead and surface protein expression facs sorting and fixed in 4% paraformaldehyde for 30&min at 4&C. T cells were subsequently sorted into TNF, IFN-%, CD25 or PD-1 high and low bins. Over the whole course of the screen from initial activation and expansion to sorting, we maintained a coverage of >1,000× (cells/sgRNA) to ensure consistent representation of the library. After staining and fixation, T cells for all screens were washed twice in EasySep (1×PBS with 2% FCS and 1&mM EDTA) and sorted into the respective bin. Sorted T cells were spun down, and cell pellets were stored at −80° C. until further use.

### NG Screen

[0181] Fifty million human Pan CD3+ T cells from each two human donors were isolated as described under ‘T cell isolation and culture’. Subsequently, T cells were stimulated with anti-CD3/anti-CD28 Dynabeads at a 1:1 bead-to-cell ratio and 200&IU&ml-1 IL-2. Next day, plenti-CR102 ABE8e(V106W)-SpG base editor lentivirus was added at 2% v/v. One day later, T cells were infected with 1.5% v/v (corresponding to an MOI of ~0.6) of the NG base editor library lentivirus followed by selection with blasticidin and puromycin as described before. T cells were subcultured and expanded with fresh medium and IL-2 every 2-3 days and further processed as described under ‘NGG screen’. Over the whole course of the screen from initial T cell activation to sorting, a coverage of >1,000× (cells!per!sgRNA) was maintained to ensure representation of the library. Finally, human Pan CD3+ T cells were sub-sorted into CD4+ TNF-low and TNF-high as well as CD8+ TNF-low and TNF-high T cells. Extraction of genomic DNA and quantification of sgRNAs in each population was performed as described under ‘Genomic DNA extraction, library preparation and NGS for base editing screens’.

### Genomic DNA Extraction, Library Preparation and NGS for Base Editing Screens

[0182] Genomic DNA of sorted T!cell pellets was performed as described. For 5×10⁶ T cells, pellets were thawed and incubated overnight at 65° C. in 400 μl lysis buffer (Chip composition) and 16 μl of 5M NaCl. Next day, 32 μl RNase A (10mgml⁻¹ stock concentration) was added and incubated at 37° C. for 2 h followed by a 2 h 55° C. incubation after adding 16 μl (20mgml⁻¹) proteinase K. Genomic DNA was then separated with phenol:chloroform:isoamyl alcohol and precipitated with sodium acetate and washed with 70% ethanol. DNA was eluted in water and quantified on a Nanodrop Spectrophotometer. PCR for NGS was performed with KAPA HiFi HotStart polymerase, using previously established primers and PCR protocol with annealing temperature at 63° C. PCR products were purified by solid-phase reversible immobilization and further gel purified, diluted to 10&nM and submitted for NGS on a NovaSeq Instrument (Illumina) at the UCSF Center for Advanced Technologies. Targeted sequencing depth was 1,000× of sgRNA counts per sample.

Real-Time qPCR

[0183] T cells from four independent human donors were treated as described under ‘Arrayed base editing with mRNA’. One day after restimulation, RNA for expression analyses with qPCR was isolated with the Quick-RNA MicroPrep and RNA Clean and Concentrator-5 Kits (Zymo Research, R1051 and R1016) using TURBO DNase and 10× TURBO DNase Buffer (Invitrogen, AM2239). Real-time qPCR was performed using the Prime-Time One-Step RT-qPCR Master Mix (10007065) with pre-designed primer-probe pairs for PIK3CD, IL2RA and B2M (housekeeping) following the manufacturer's instructions. Expression relative to B2M was calculated with the 2-ΔΔC_{T} method.

Arrayed Base Editing with mRNA

[0184] For arrayed base editing experiments with ABE mRNA, fresh or previously frozen human Pan T cells were activated with a 1:1 bead-to-cell ratio with anti-CD3/CD28 Dynabeads (Thermo Fisher, 40203D) in the presence of 500IUml⁻¹ IL-2 at 1×10⁶ cells per ml. Two days after stimulation, T cells were magnetically de-beaded and taken up in P3 buffer with supplement (Lonza Bioscience, V4SP-3096) at 37.5×10⁶ cells per ml. Two micrograms of ABE mRNA mixed with 1.5 μg synthetic modified sgRNA (Synthego) was added per 20 μl cells, not exceeding 25 μl total per reaction. Cells were subsequently electroporated on a Lonza 4D Nucleofector using the electroporation code DS137. Immediately after electroporation, 100 μl warm complete X-VIVO15 was added to each electroporation well and cells were incubated for 15 min in a CO₂ incubator at 37° C. followed by distribution of each electroporation reaction into three wells of a 96-well flat bottom plate. Each 96 flat bottom well was brought to 200 μl cXVIVO15 and 100IUml⁻¹ IL-2. Cells were subcultured and expanded by addition of fresh medium and IL-2 every 2-3 days. Ten days after electroporation, cells were counted and normalized to 2×10⁶ live cells per ml through complete medium change and without the addition of IL-2. The next morning, cells were re-stimulated with indicated doses of anti-CD3/anti-CD28/anti-CD2 Immunocult (Stemcell Technologies, 10990). Cell pellets saved for genomic DNA analysis were spun down at 300 g for 5&min and resuspended in QuickExtract (VWR, 76081-766) following the manufacturer's recommended protocol. Next, cells were treated as described under ‘NGG screen’ for cytokine and surface marker flow cytometry and gated for CD4+ and CD8+ cells. sgRNA sequences used in arrayed experiments are provided.

### Cytotoxicity Assays

[0185] For in-vitro cytotoxicity assays, fresh or frozen T cells were stimulated as described under ‘NGG screen’. One day after stimulation, cells were infected with 1% v/v 100× concentrated lentivirus carrying an open reading frame element encoding the 1G4 T cell receptor that can recognize the NYESO1 cancer antigen in an HLA-A0201 context. One day later, cells were electroporated and cultured as described under ‘Arrayed base editing with mRNA’. Ten days after electroporation, 300 RFP-expressing A375 melanoma cells were seeded in 50& μl cRPMI per well in a 384 well plate. The outer two positions of the 384 well plate were filled with water and not used for analyses. The next morning, T cells were counted and 1G4 T!cell receptor expression was assessed by flow cytometry. TCR positive cells were used for normalization and added to A375 cells according to the indicated E:T ratios. The final volume for one well of a 384-well plate was 901. After adding the T cells on top of A375 cells, the plate was moved to an Incucyte live-cell imaging system (Sartorius) with assessment cycles every 6 h. A375 cells were automatically counted by the Incucyte instrument based on RFP expression and cell counts were exported for plotting.

### HDR-Mediated Knockins

[0186] Fresh pan T cells were isolated and activated as described above. Two days after activation, cells were electroporated in presence of Cas9 RNPs and HDR templates consisting of 100-bp single stranded oligonucleotides synthesized by IDT, as described58. Next, cells were expanded and restimulated for cytokine staining as described above and subsequently assessed for cytokine production and activation marker expression, similar to the description in ‘Arrayed base editing with mRNA’. Genomic DNA was isolated from cells and prepared for NGS as described above.

### Sorting and Flow Cytometry

[0187] FACS was performed on BD FACSAria Fusion cell sorters equipped with 70 μm nozzles at the Gladstone Flow Core. For each sorting bin, a cell-to-guide RNA ratio of >500 was targeted. Flow cytometry analyses were done using an Attune Nxt machine with plate reader function.

### Secreted Cytokine Analyses

[0188] For cytokine analyses in culture medium, cell culture plates were spun down at 500 g for 5 min and half of the supernatant was removed and stored at −80° C. All samples were analysed by Eve Technologies using Luminex xMAP technology. First, a titration series was run to determine optimal dilution factors and to avoid assay saturation. IL-6, IL-8 and IL17A were run at a twofold dilution. All other cytokines were analyzed at a 200-fold dilution.

### Base-Editing Screen Analyses

[0189] After sequencing, fastq files were analyzed with MAGeCK59. Samples with poor genomic DNA recovery after sorting (<100× coverage) were excluded from further analysis. First, the command MAGeCK count was used to assess fastq files, representing each sorting bin, for the presence of guideRNA sequences and count them. Next, MAGeCK test was run to assess the distribution of guideRNAs and comparisons across different sorting bins relative to distribution of non-targeting controls. The low bins were used as MAGeCK control input and high bins as treatment input for the NGG screen. The low bins were used as MAGeCK treatment input and high bins as control input for the NG screen. For plotting of the NG screen, log 2FC values were inverted. Therefore, a negative log 2FC or negative hit indicates enrichment in the low bins while positive hits are enriched in the high bins. For downstream analysis the bottom 2.5 percentile of guides were discarded. As coding regions were selected inclusively based on longest isoforms, for ease of interpretation and analysis, predicted amino-acid-level edit locations were mapped by pairwise alignment to the canonical sequence in UniProt for each protein and the canonical sequence positions used in all further analysis. For correlation of editing effects with BLOSUM62 substitution penalty, the highest penalty mutation was used for guides with multiple predicted mutations and the relative frequencies in calculated based on the single highest penalty mutation as well.

sgRNA Off-Target Analyses

[0190] To assess off target potential, each guide was searched against the human genome for off target sites with up to five mismatches using Cas-OFFinder. Afterwards, scoring of target sites was performed with the CFD algorithm. Guides were filtered out in off target analysis if there existed >5 off-target sites with a CFD score of 1.012.

### Evaluation of Base-Level Effects

[0191] To estimate the base-resolution effects in the screen analyses, we first listed all editable bases in the expected editing windows for each guide RNA (A in position 3-8 for ABE, or 3-9 for expanded window analysis and C in position 1-13 for CBE). Next, the effect of each guide RNA in every sample was quantified by dividing the normalized count in the high bin by the normalized count in the low bin. Normalized counts were obtained from the output file of the MAGeCK analysis, as described above. Following this, we log-normalized the effects of all guide RNAs pertaining to each gene and performed a regression analysis based on the presence of editable bases, using a multiple linear regression model. This allowed us to estimate base-level effect sizes as well as statistical significance (two-sided Wald test) for each base in each screen. (Supplementary Tables!6-8) In instances where two bases were covered by the same combination of guide RNAs and thus could not be distinguished, they were assigned identical effect sizes. For residue-level statistics, we averaged log 2FC (obtained from MAGeCK) from all non-terminating guides spanning a residue that induces a non-synonymous change, and combined the P!values (also from MAGeCK) using Fisher's method.

[0192] To test whether disease-causing human genetic variants were enriched among functional bases in our screening results, we compared our results with the variants in ClinVar. We downloaded the VCF file for variant functions from ClinVar on May 8, 2023. Our focus was on variants categorized as ‘pathogenic’, ‘likely-pathogenic’ or ‘benign’ in ClinVar. We restricted our comparison to non-synonymous variants that overlapped with the editing windows of our guide RNAs and had reference/alternative alleles matching our editing (A to G or T to C for ABE, and C to T or G to A for CBE). The overlap between ClinVar variants and variants in our screen filtered to a defined significance threshold was compared with the overlap between ClinVar variants and the remaining variants in the screening using Fisher's two-sided exact tests.

### Statistical and Reproducibility

[0193] Screen analysis was done with MAGeCK59 as described in the respective screen section. All other statistical analyses (correlation and significance testing) were done with the scipy.stats package.

### Nucleotide-Resolution Decoding of Human Immune Cell Gene Programs

[0194] Human T cells are critical effectors of immune protection from infections, autoimmune pathology, and cancer. In order to understand the genetic sequences that control immune cells in health and disease and discover sequences that can be re-written to enhance the next generation of adoptive cell therapies for complex human diseases ranging from cancer to autoimmune disorders, a broad range of CRISPR technologies—including CRISPR knockout (Shifrut et al., Cell, 2018) and knock-in (Roth et al., Cell, 2020), and CRISPR activation and CRISPR interference (Schmidt et al., Science, 2022) have been employed to identify key genes and pathways that govern T cell function. As described herein base editing technology was used to achieve nucleotide-resolution understanding of immune cell genetics and to fine-tune engineered cellular therapies.

### Create Nucleotide-Resolution Genetic Maps to Explore T Cell Functions and Inform Cell Engineering.

[0195] A base editor screening platform was developed in primary human T cells for comprehensive analysis of gene variants and programs that control T cell functions. As nucleotide-resolution maps in human T cells were generated, specific genetic sites were found that could be targeted in engineered cell therapies to confer and tune desired phenotypes.

### Dissect the Genetic Architecture of Autoimmune Disorders.

[0196] Despite widespread genome/exome sequencing of patients, genetic causes of complex autoimmune diseases remain elusive largely due to a lack of functional testing for each mutation, especially in non-coding genome elements. The base editing technology in human T cells can be used to test large numbers of variants introduced into endogenous disease loci for systematic assignment of variant causality. Dense sampling in disease-relevant regions allows for refined understanding of genome-wide association studies (GWAS) of complex diseases with the opportunity to nominate variants that enhance T cell functions for next-generation adoptive cellular therapies.

### Design and Manufacture Multiplexed Products to Fine-Tune T Cells for Adoptive Cell Therapies.

[0197] Today, clinical base editing efforts focus largely on correcting monogenic mutations or knocking out genes. Specific base edits can be designed to enhance immune cell functions to treat complex diseases. For example, cell therapies for viral targets and autoimmune diseases are developed in addition to immunotherapies for cancer.

### Base Editor Screening Platform in Primary Human T Cells.

[0198] Systematic discovery with nucleotide resolution of T cell gene programs allows for exploration of T cell phenotypes in depth, examine coding and non-coding regions of key loci, and defining functional domains and motifs of immune proteins.

### Advantages.

[0199] In addition to the nucleotide resolution afforded by base editing, an additional major advantage is the ability to multiplex gene modifications. Without the need to introduce double-strand breaks, base editing allows for safe and efficient multiplex genetic modifications to enhance T cell phenotypes. For example, gain-of-function and/or loss-of-function variants of different genes in one system or combining a synthetic knock-in construct at one locus with a knockout of a target gene at another can be accomplished. Base editing also allows for the identification and incorporation of variants that affect only one phenotype among the many phenotypes associated with pleiotropic immune proteins. That is, introduction of single nucleotide variants allows for synthetic separation of functions, thereby allowing precise modulation of T cell phenotypes without undesirable side effects of general gene up- or down-regulation. This level of specificity enables the detailed dissection of functional and structural modifications across an entire coding sequence—with implications for our understanding of basic immune biology—as well as for its relevance to synthetic immunology and the design of improved cellular therapies for a wide range of diseases.

Dissect Genetic Regulation of T Cell Function with Nucleotide Resolution Using Base Editing.

[0200] CRISPR activation (CRISPRa) and CRISPR interference (CRISPRi) are powerful tools for efficient perturbation of non-coding elements, with the potential to discover factors both necessary for and synthetically sufficient to modulate cellular phenotypes. Importantly, hits identified by these screens highlight both positive and negative regulators that can be incorporated into synthetic circuits to tune cytokine responses in cellular immunotherapies. However, these traditional CRISPR approaches lack the resolution to determine the consequences of individual nucleotide changes on gene and cellular function.

[0201] DNA base editors, such as cytosine base editors (CBEs) or adenine base editors (ABEs), are powerful tools to introduce point mutations with high efficiency. Thus far, base editing in human T cells has been used for knockout purposes to demonstrate therapeutic applicability via an mRNA delivery approach (Webber et al., Nat Comm, 2019 and Gaudelli et al., Nat Biotech, 2020). However, the ability to introduce single variants systematically is a powerful, untapped discovery tool. To this end, a base editor screening platform was prepared using lentiviral delivery of both CBE and ABE in primary human T cells. A sgRNA library tiling the coding regions of about 400 genes important for T cell activation was used to perform base edits with CBE or ABE within a defined 12 base pair or 5 base pair window, respectively. The unbiased nature of the library design allowed for nonsynonymous and synonymous editing, nonsense mutations as well as non-editing sgRNAs. A preliminary base editor screen of a T cell activation gene panel screened for cytokine production (IFN-gamma, IL-2, TNFa) and cell surface makers (PD-1, CD25). Variants were identified with significant effects on T cell activation that nominated functional hotspots of protein function. These screens revealed functional residues, domains, and motifs whose alteration had clear effects on T cell phenotype.

[0202] Interestingly, distinct hotspots in individual genes were identified that, when mutated, resulted in both loss-of-function and gain-of-function phenotypes, with potential to act as functional switches to tune gene expression in therapeutic settings. This approach may be extended to additional panels of genes with relevance to various T cell functions and to genes associated with immune-mediated disease to enhance and improve next-generation adoptive cellular therapies. Base editing technology allows for the exploration of T cell phenotypes in depth, examination of coding and non-coding regions of key loci, and definition of functional domains and motifs of immune proteins. Many proteins have multiple independently and post-translationally regulated functions, such as signaling, scaffolding, protein-protein interactions, or localization, which cannot be dissected with whole-gene or up/down gene regulation approaches. Variants modifying key T cell phenotypes—including cell surface protein expression, cytokine production, and proliferation—may further interrogated using Perturbseq (Dixit et al., Cell, 2016; Adamson et al., Cell, 2016; Jaitin et al., Cell, 2016) to understand the overall effect of these variants on downstream cell state and nominate promising candidates that rewire immune cell states in advantageous directions.

### Employ Base Editing to Dissect the Genetic Architecture of Autoimmune Disease Variants.

[0203] T cell-specific and stimulus-responsive programs are governed by gene regulatory circuits composed of trans-regulators (transcription factors and epigenetic regulators) and networks of cis-regulatory elements and target genes. Core T cell gene regulatory programs are disrupted in autoimmune diseases. The majority of common genetic variants linked to human autoimmune diseases map to putative cis-regulatory elements active in human T cells (Farh et al., Nature, 2015). Putative enhancers across a range of human immune cell populations have been identified, uncovering stimulation responsive elements containing human autoimmunity-associated variants (Calderon et al., Nat Genet, 2019). CRISPR, CRISPRa, and CRISPRi have been used to functionally map and characterize enhancers, including enhancers harboring common autoimmunity variants (Simeonov et al., Nature, 2017; Mowery et al., Nat Genet, Under Review; Simeonov et al., BioRxiv). Together, these studies point to elements critical for T cell function. Application of the base editor screens in primary human T cells provide an unparalleled opportunity to identify causal nucleotide variants in autoimmune disorders.

### Next Generation Cellular Immunotherapies.

[0204] The power of gene editing technologies may be used to decode and rewrite the human immune system. Human immune cells, especially T cells, can be genetically engineered to target various cancers as well as to provide suppressive cues in the setting of autoimmunity. Despite their utility for the treatment of hematological malignancies, chimeric antigen receptor (CAR) T cells have significant limitations, which are especially clear in the context of solid tumors. Mounting evidence suggests that for many clinical applications, engineering the T cell to recognize the target cancer cells may not be sufficient to cure disease. Major challenges to the utility of immunotherapy in cancer include ensuring infiltration of the immune cells into the tumor, overcoming immunosuppressive tumor environment, and maintaining the therapeutic cells' functionality in the tumor over time. Next-generation cellular immunotherapies employ genetic engineering to produce the enhanced functionality necessary to overcome these challenges. Using the gene targets and variants identified by the discovery-based screens, a dictionary of genetic modifications can be prepared that can be rewritten into cells to precisely control their function, whether that be trafficking, cytokine production, killing capacity, persistence in patients, and/or influence on the local tissue microenvironments.

[0205] FIGS. 1-4 provide genes/sites/guides counts for decreasing stringency (maximum log 2 fold change for each guide (increasing cutoffs of 0.5, 1.0, 2.0, 3.0)). FIGS. 1A-4A have the genes that were modified and the modified sites and FIGS. 1B-4B have the guide sequences. For example, FIGS. 1A-1B list 36 genes, 1827 sites and 587 sgRNAs (cutoff 3.0); FIGS. 2A-2B list 98 genes, 4892 sites, and 1774 sgRNAs (cutoff 2.0); FIGS. 3A-3B list 231 genes, 15571 sites, and 5855 sgRNAs (cutoff 1.0); and FIGS. 4A-4B: list 375 genes, 40905 sites, and 15058 sgRNAs.

[0206] All publications, patent applications, patents and other references mentioned herein are expressly incorporated by reference in their entirety, to the same extent as if each were incorporated by reference individually. In case of conflict, the present specification, including definitions, will control.

[0207] The following statements provide a summary of some aspects of the inventive nucleic acids, proteins and methods described herein.

### Statements:

[0208] 1. A method comprising:
   [0209] contacting T cells with one or more sgRNAs targeted to one or more coding regions in one or more genes and a base editor or nucleic acid encoding the base editor; and
   [0210] selecting one or more T cells that have an altered immune cell activity profile and optionally sorting the T cells based on the profile (or with single cell readouts (e.g., single cell RNA seq with capture of the sgRNA or base edit mutation) without selection).
[0211] 2. The method of claim 1 wherein the cells are human cells.
[0212] 3. The method of statement 1 or 2 wherein the human immune cells are contacted with a library of sgRNAs targeted to the one or more coding regions in a plurality of genes.
[0213] 4. The method of any one of statements 1 to 3 wherein a library of viruses expresses the one or more sgRNAs.
[0214] 5. The method of any one of statements 1 to 4 wherein a virus encodes the base editor.
[0215] 6. The method of any one of statements 1 to 5 wherein the sgRNA and the nucleic acid encoding the base editor are on the same nucleic acid molecule.
[0216] 7. The method of statement 4, 5 or 6 wherein the virus is a lentivirus, retrovirus, adenovirus, herpesvirus or adeno-associated virus.
[0217] 8. The method of any one of statements 1 to 7 wherein the base editor comprises ABE.
[0218] 9. The method of any one of statements 1 to 8 wherein the base editor comprises CBE.
[0219] 10. The method of any one of statements 1 to 6 wherein the cells are selected for expression of TNFalpha, IL2 or IFNgamma, or any combination thereof.
[0220] 11. The method of any one of statements 1 to 10 wherein the cells are sorted to separate cells that express TNFalpha, IL2 or IFNgamma, or any combination thereof, from cells that do not express TNFalpha, IL2 or IFNgamma, or any combination thereof.
[0221] 12. The method of any one of statements 1 to 1 wherein the cells are selected for expression, including altered expression, of CD25 or PD1, or both (for example, sgRNA to base edit PD1 to lead to loss of protein expression).
[0222] 13. The method of any one of statements 1 to 12 wherein the cells are sorted to separate cells that express CD25 or PD1, or both, from cells that do not express CD25 and/or PD1.
[0223] 14. The method of any one of statements 1 to 13 wherein the sgRNAs comprise a plurality of the sequences in FIG. 1, 2, 3, 4 or 8 or a sequence with at least 85% nucleic acid sequence identity thereto.
[0224] 15. The method of any one of statements 1 to 14 wherein the one or more coding regions that are altered are in a plurality of the genes in FIG. 1, 2, 3, 4 or 7 have or are modified at a site having one of the sequences in FIG. 1, 2, 3, 4 or 7 or a sequence with at least 85% nucleic acid sequence identity thereto.
[0225] 16. A population of cells obtained by the method of any one of statements 1 to 15.
[0226] 17. An isolated human cell selected by the method of any one of statements 1 to 15.
[0227] 18. An isolated cell having a base edited gene in FIG. 7 which alters one or more activities of the cell.
[0228] 19. The isolated cell of statement 18 which has increased T cell activity relative to a corresponding cell that lacks the base edited gene.
[0229] 20. The isolated cell of statement 18 which has decreased T cell activity relative to a corresponding cell that lacks the base edited gene.
[0230] 21. A method to introduce the altered genes described herein into cell therapies including viral transduction and variant knock-in (either to endogenous site or heterologous site).

1. A method comprising:
contacting human immune cells with one or more sgRNAs targeted to one or more coding regions in one or more genes and a base editor or nucleic acid encoding the base editor; and
selecting one or more human immune cells that have an altered immune cell activity and optionally sorting the immune cells based on the profile.

2. The method of claim 1, wherein the cells are T cells.

3. The method of claim 1 wherein the human immune cells are contacted with a library of sgRNAs targeted to the one or more coding regions in a plurality of genes.

4. The method of claim 1, wherein a library of viruses expresses the one or more sgRNAs.

5. The method of claim 1, wherein a virus encodes the base editor.

6. The method of claim 1, wherein the sgRNA and the nucleic acid encoding the base editor are on a different nucleic acid molecule.

7. The method of claim 4, wherein the virus is a lentivirus, retrovirus, adenovirus, herpesvirus or adeno-associated virus.

8. The method of claim 1, wherein the base editor comprises ABE or CBE.

9. (canceled)

10. The method of claim 1, wherein the cells are selected for altered expression of TNFalpha, IL2 or IFNgamma, or any combination thereof.

11. The method of claim 1, wherein the cells are sorted to separate cells that have altered expression of TNFalpha, IL2 or IFNgamma, or any combination thereof.

12. The method of claim 1, wherein the cells are selected for altered expression of CD25 or PD1, or both.

13. The method of claim 1, wherein the cells are sorted to separate cells that have altered expression of CD25 or PD1, or both, from cells that do not express CD25 and/or PDL.

14. The method of claim 1, wherein the sgRNAs comprise a plurality of the sequences in FIG. 1B, 2B, 3B, 4B or 8 or a sequence with at least 85% nucleic acid sequence identity thereto.

15. The method of claim 1, wherein the one or more coding regions that are altered are in one or more of the genes in FIG. 1A, 2A, 3A, 4A or 7 or have or are modified at a site in FIG. 1A, 2A, 3A, 4A, or 7 or a sequence with at least 85% nucleic acid sequence identity thereto.

16. (canceled)

17. An isolated human cell selected by the method of claim 1.

18. An isolated cell having a base edited gene in FIG. 1, 2, 3, 4 or 7 which alters one or more activities of the cell.

19. The isolated cell of claim 18 which has increased T cell activity relative to a corresponding cell that lacks the base edited gene.

20. The isolated cell of claim 18 which has decreased T cell activity relative to a corresponding cell that lacks the base edited gene.

21. (canceled)

22. The isolated cell of claim 18 which is modified at a site in FIG. 1A, 2A, 3A, 4A or 7 or a sequence with at least 85% nucleic acid sequence identity thereto.

23. A method to prevent, inhibit or treat cancer is a mammal, comprising administering to the mammal a composition having a plurality of the isolated cells of claim 18.

24.-26. (canceled)

27. The method of claim 23, wherein the cancer is a sarcoma, lymphoma, melanoma, or carcinoma, or is lung cancer, breast cancer, prostate cancer, pancreatic cancer or ovarian cancer.

28. The method of claim 23, wherein the cell is a CAR-T cell.

29.-30. (canceled)

31. A method to prevent, inhibit or treat an autoimmune disease is a mammal, comprising administering to the mammal a composition having a plurality of the isolated cell of claim 18.

32.-33. (canceled)

34. The method of claim 31, wherein the autoimmune disease is multiple sclerosis.

35.-36. (canceled)

The application's sequence listing, which the Patent Office published only in electronic form, follows.

SEQUENCE LISTING (62178 sequences)

SEQ ID NO: 1 - DNA, 20 bp, synthetic construct
  source 1..20: mol_type = other DNA
ccgcctagaagcatttgcgg

SEQ ID NO: 2 - DNA, 20 bp, synthetic construct
  source 1..20: mol_type = other DNA
gctgatccacatctgctgga

SEQ ID NO: 3 - DNA, 20 bp, synthetic construct
  source 1..20: mol_type = other DNA
actcacccaggaaggaaggc

SEQ ID NO: 4 - DNA, 20 bp, synthetic construct
  source 1..20: mol_type = other DNA
cccaccatcacgccctggga

SEQ ID NO: 5 - DNA, 20 bp, synthetic construct
  source 1..20: mol_type = other DNA
gatggagccgccgatccaca

SEQ ID NO: 6 - DNA, 20 bp, synthetic construct
  source 1..20: mol_type = other DNA
gagtgaaggtgggtaccact

SEQ ID NO: 7 - DNA, 20 bp, synthetic construct
  source 1..20: mol_type = other DNA
tcccaaactctgctacctgc

SEQ ID NO: 8 - DNA, 20 bp, synthetic construct
  source 1..20: mol_type = other DNA
tctgtgccaagagataaagc

SEQ ID NO: 9 - DNA, 20 bp, synthetic construct
  source 1..20: mol_type = other DNA
tgaagaggattccatccagc

SEQ ID NO: 10 - DNA, 20 bp, synthetic construct
  source 1..20: mol_type = other DNA
agcagagtttgggatccagc

SEQ ID NO: 11 - DNA, 20 bp, synthetic construct
  source 1..20: mol_type = other DNA
caccttcactctcaggaaca

SEQ ID NO: 12 - DNA, 20 bp, synthetic construct
  source 1..20: mol_type = other DNA
acagttgccgattacaggta

SEQ ID NO: 13 - DNA, 20 bp, synthetic construct
  source 1..20: mol_type = other DNA
ggcacagaggcacagagctt

SEQ ID NO: 14 - DNA, 20 bp, synthetic construct
  source 1..20: mol_type = other DNA
cacagttgccgattacaggt

SEQ ID NO: 15 - DNA, 20 bp, synthetic construct
  source 1..20: mol_type = other DNA
tctggcacactgtgggggaa

SEQ ID NO: 16 - DNA, 20 bp, synthetic construct
  source 1..20: mol_type = other DNA
cctctataggtatcttgaag

SEQ ID NO: 17 - DNA, 20 bp, synthetic construct
  source 1..20: mol_type = other DNA
ttacacctatatattcctcg

SEQ ID NO: 18 - DNA, 20 bp, synthetic construct
  source 1..20: mol_type = other DNA
ttcctctataggtatcttga

SEQ ID NO: 19 - DNA, 20 bp, synthetic construct
  source 1..20: mol_type = other DNA
cacagctctggcacactgtg

SEQ ID NO: 20 - DNA, 20 bp, synthetic construct
  source 1..20: mol_type = other DNA
acacagctctggcacactgt

SEQ ID NO: 21 - DNA, 20 bp, synthetic construct
  source 1..20: mol_type = other DNA
cacagtgtgccagagctgtg

SEQ ID NO: 22 - DNA, 20 bp, synthetic construct
  source 1..20: mol_type = other DNA
tacacctatatattcctcgt

SEQ ID NO: 23 - DNA, 20 bp, synthetic construct
  source 1..20: mol_type = other DNA
acttcgataatgaacttgca

SEQ ID NO: 24 - DNA, 20 bp, synthetic construct
  source 1..20: mol_type = other DNA
acagctctggcacactgtgg

SEQ ID NO: 25 - DNA, 20 bp, synthetic construct
  source 1..20: mol_type = other DNA
agagaagggtagccagtacc

SEQ ID NO: 26 - DNA, 20 bp, synthetic construct
  source 1..20: mol_type = other DNA
tcctctataggtatcttgaa

SEQ ID NO: 27 - DNA, 20 bp, synthetic construct
  source 1..20: mol_type = other DNA
cacacagctctggcacactg

SEQ ID NO: 28 - DNA, 20 bp, synthetic construct
  source 1..20: mol_type = other DNA
cttgaaggggctcactaaag

SEQ ID NO: 29 - DNA, 20 bp, synthetic construct
  source 1..20: mol_type = other DNA
tcttgaaggggctcactaaa

SEQ ID NO: 30 - DNA, 20 bp, synthetic construct
  source 1..20: mol_type = other DNA
ctctggcacactgtggggga

SEQ ID NO: 31 - DNA, 20 bp, synthetic construct
  source 1..20: mol_type = other DNA
ggcacactgtgggggaaggg

SEQ ID NO: 32 - DNA, 20 bp, synthetic construct
  source 1..20: mol_type = other DNA
actcacctgataagaggcag

SEQ ID NO: 33 - DNA, 20 bp, synthetic construct
  source 1..20: mol_type = other DNA
caacacaatgataaaaacat

SEQ ID NO: 34 - DNA, 20 bp, synthetic construct
  source 1..20: mol_type = other DNA
catgcagttctcacacactg

SEQ ID NO: 35 - DNA, 20 bp, synthetic construct
  source 1..20: mol_type = other DNA
tttcagatccaggatactga

SEQ ID NO: 36 - DNA, 20 bp, synthetic construct
  source 1..20: mol_type = other DNA
tattatgtctgctaccccag

SEQ ID NO: 37 - DNA, 20 bp, synthetic construct
  source 1..20: mol_type = other DNA
ctggattacctcttgccctc

SEQ ID NO: 38 - DNA, 20 bp, synthetic construct
  source 1..20: mol_type = other DNA
agtggacatctgcatcactg

SEQ ID NO: 39 - DNA, 20 bp, synthetic construct
  source 1..20: mol_type = other DNA
agggcatgtcaatattactg

SEQ ID NO: 40 - DNA, 20 bp, synthetic construct
  source 1..20: mol_type = other DNA
cacagtgtgtgagaactgca

SEQ ID NO: 41 - DNA, 20 bp, synthetic construct
  source 1..20: mol_type = other DNA
tgccatagtatttcagatcc

SEQ ID NO: 42 - DNA, 20 bp, synthetic construct
  source 1..20: mol_type = other DNA
agatgcagtcgggcactcac

SEQ ID NO: 43 - DNA, 20 bp, synthetic construct
  source 1..20: mol_type = other DNA
agatggagactttatatgct

SEQ ID NO: 44 - DNA, 20 bp, synthetic construct
  source 1..20: mol_type = other DNA
gatggagactttatatgctg

SEQ ID NO: 45 - DNA, 20 bp, synthetic construct
  source 1..20: mol_type = other DNA
gtggacatctgcatcactgg

SEQ ID NO: 46 - DNA, 20 bp, synthetic construct
  source 1..20: mol_type = other DNA
tcctgaaatgagaaaagccg

SEQ ID NO: 47 - DNA, 20 bp, synthetic construct
  source 1..20: mol_type = other DNA
gactgacatggaacagggga

SEQ ID NO: 48 - DNA, 20 bp, synthetic construct
  source 1..20: mol_type = other DNA
cttctgtaatacacttggag

SEQ ID NO: 49 - DNA, 20 bp, synthetic construct
  source 1..20: mol_type = other DNA
tacactgatacatccctcga

SEQ ID NO: 50 - DNA, 20 bp, synthetic construct
  source 1..20: mol_type = other DNA
ttacactgatacatccctcg

SEQ ID NO: 51 - DNA, 20 bp, synthetic construct
  source 1..20: mol_type = other DNA
actgacatggaacaggggaa

SEQ ID NO: 52 - DNA, 20 bp, synthetic construct
  source 1..20: mol_type = other DNA
tctctgggcctgacctgctt

SEQ ID NO: 53 - DNA, 20 bp, synthetic construct
  source 1..20: mol_type = other DNA
agacgttcagctgctgtcct

SEQ ID NO: 54 - DNA, 20 bp, synthetic construct
  source 1..20: mol_type = other DNA
tctcttcgccgctcggcctc

SEQ ID NO: 55 - DNA, 20 bp, synthetic construct
  source 1..20: mol_type = other DNA
cgagcagcggctgtacaagg

SEQ ID NO: 56 - DNA, 20 bp, synthetic construct
  source 1..20: mol_type = other DNA
cttcagttcgaacaccgtgc

SEQ ID NO: 57 - DNA, 20 bp, synthetic construct
  source 1..20: mol_type = other DNA
gctgtacaaggtgggtcccg

SEQ ID NO: 58 - DNA, 20 bp, synthetic construct
  source 1..20: mol_type = other DNA
ctgtacaaggtgggtcccgc

SEQ ID NO: 59 - DNA, 20 bp, synthetic construct
  source 1..20: mol_type = other DNA
gaactgaagcgcatcgtcga

SEQ ID NO: 60 - DNA, 20 bp, synthetic construct
  source 1..20: mol_type = other DNA
ttgtacagccgctgctcgtc

SEQ ID NO: 61 - DNA, 20 bp, synthetic construct
  source 1..20: mol_type = other DNA
tcctcaggatgaccaactct

SEQ ID NO: 62 - DNA, 20 bp, synthetic construct
  source 1..20: mol_type = other DNA
tacagccgctgctcgtcagg

SEQ ID NO: 63 - DNA, 20 bp, synthetic construct
  source 1..20: mol_type = other DNA
gagcagcggctgtacaaggt

SEQ ID NO: 64 - DNA, 20 bp, synthetic construct
  source 1..20: mol_type = other DNA
cctccagagtgtggttgtgg

SEQ ID NO: 65 - DNA, 20 bp, synthetic construct
  source 1..20: mol_type = other DNA
gaacttaccagccttcgctt

SEQ ID NO: 66 - DNA, 20 bp, synthetic construct
  source 1..20: mol_type = other DNA
ctggaggaggaatgccaatg

SEQ ID NO: 67 - DNA, 20 bp, synthetic construct
  source 1..20: mol_type = other DNA
gcccacaggcattgcagaca

SEQ ID NO: 68 - DNA, 20 bp, synthetic construct
  source 1..20: mol_type = other DNA
cctccaccacctccccgctg

SEQ ID NO: 69 - DNA, 20 bp, synthetic construct
  source 1..20: mol_type = other DNA
cgagctggggttccacagcg

SEQ ID NO: 70 - DNA, 20 bp, synthetic construct
  source 1..20: mol_type = other DNA
ccaggcagagaacttactca

SEQ ID NO: 71 - DNA, 20 bp, synthetic construct
  source 1..20: mol_type = other DNA
cagatacctggtggaaatgg

SEQ ID NO: 72 - DNA, 20 bp, synthetic construct
  source 1..20: mol_type = other DNA
ccccacagatggtttcacga

SEQ ID NO: 73 - DNA, 20 bp, synthetic construct
  source 1..20: mol_type = other DNA
caggcagagaacttactcat

SEQ ID NO: 74 - DNA, 20 bp, synthetic construct
  source 1..20: mol_type = other DNA
acagagatggagaagtcccc

SEQ ID NO: 75 - DNA, 20 bp, synthetic construct
  source 1..20: mol_type = other DNA
gccggtccaccaggatgggt

SEQ ID NO: 76 - DNA, 20 bp, synthetic construct
  source 1..20: mol_type = other DNA
cagagatggagaagtcccct

SEQ ID NO: 77 - DNA, 20 bp, synthetic construct
  source 1..20: mol_type = other DNA
agagatggagaagtcccctg

SEQ ID NO: 78 - DNA, 20 bp, synthetic construct
  source 1..20: mol_type = other DNA
agaagtcccctggggagctc

SEQ ID NO: 79 - DNA, 20 bp, synthetic construct
  source 1..20: mol_type = other DNA
ccccagctcgtcatcctcca

SEQ ID NO: 80 - DNA, 20 bp, synthetic construct
  source 1..20: mol_type = other DNA
ccatgagtaagttctctgcc

SEQ ID NO: 81 - DNA, 20 bp, synthetic construct
  source 1..20: mol_type = other DNA
cccaccgcactcgctgttgg

SEQ ID NO: 82 - DNA, 20 bp, synthetic construct
  source 1..20: mol_type = other DNA
cctcttccctgccaactacg

SEQ ID NO: 83 - DNA, 20 bp, synthetic construct
  source 1..20: mol_type = other DNA
acagagagggagaagtcccc

SEQ ID NO: 84 - DNA, 20 bp, synthetic construct
  source 1..20: mol_type = other DNA
cagtgagggcgtccctccgg

SEQ ID NO: 85 - DNA, 20 bp, synthetic construct
  source 1..20: mol_type = other DNA
ggccacctgaggacgcactc

SEQ ID NO: 86 - DNA, 20 bp, synthetic construct
  source 1..20: mol_type = other DNA
ggcaggcgtagttgcagagg

SEQ ID NO: 87 - DNA, 20 bp, synthetic construct
  source 1..20: mol_type = other DNA
tctcggaggcggcgcgcagc

SEQ ID NO: 88 - DNA, 20 bp, synthetic construct
  source 1..20: mol_type = other DNA
ccgcactgattgcactggaa

SEQ ID NO: 89 - DNA, 20 bp, synthetic construct
  source 1..20: mol_type = other DNA
cgtcctcaggtggccagtga

SEQ ID NO: 90 - DNA, 20 bp, synthetic construct
  source 1..20: mol_type = other DNA
gcatttgaagggcttctccc

SEQ ID NO: 91 - DNA, 20 bp, synthetic construct
  source 1..20: mol_type = other DNA
cccgcactgattgcactgga

SEQ ID NO: 92 - DNA, 20 bp, synthetic construct
  source 1..20: mol_type = other DNA
ggcggcaggcgtagttgcag

SEQ ID NO: 93 - DNA, 20 bp, synthetic construct
  source 1..20: mol_type = other DNA
acctgttgttgtgacgaggc

SEQ ID NO: 94 - DNA, 20 bp, synthetic construct
  source 1..20: mol_type = other DNA
cccttacctgcctggcagcc

SEQ ID NO: 95 - DNA, 20 bp, synthetic construct
  source 1..20: mol_type = other DNA
tgagcagtccccacatcagc

SEQ ID NO: 96 - DNA, 20 bp, synthetic construct
  source 1..20: mol_type = other DNA
gatcagcaggaaaacacagc

SEQ ID NO: 97 - DNA, 20 bp, synthetic construct
  source 1..20: mol_type = other DNA
cagagcttgtgcattgacat

SEQ ID NO: 98 - DNA, 20 bp, synthetic construct
  source 1..20: mol_type = other DNA
cccaggtgaagagaagcctc

SEQ ID NO: 99 - DNA, 20 bp, synthetic construct
  source 1..20: mol_type = other DNA
gtaggccatggctttgaatg

SEQ ID NO: 100 - DNA, 20 bp, synthetic construct
  source 1..20: mol_type = other DNA
cttgcattcacagttcaaca

SEQ ID NO: 101 - DNA, 20 bp, synthetic construct
  source 1..20: mol_type = other DNA
gacagaaatggctgcaacca

SEQ ID NO: 102 - DNA, 20 bp, synthetic construct
  source 1..20: mol_type = other DNA
attttgcagacgctctcagc

SEQ ID NO: 103 - DNA, 20 bp, synthetic construct
  source 1..20: mol_type = other DNA
caatgtcaatgcacaagctc

SEQ ID NO: 104 - DNA, 20 bp, synthetic construct
  source 1..20: mol_type = other DNA
ggccactgtcaatagagaga

SEQ ID NO: 105 - DNA, 20 bp, synthetic construct
  source 1..20: mol_type = other DNA
ggttccttccttgtaggcca

SEQ ID NO: 106 - DNA, 20 bp, synthetic construct
  source 1..20: mol_type = other DNA
cagtaagtgtggcatcacca

SEQ ID NO: 107 - DNA, 20 bp, synthetic construct
  source 1..20: mol_type = other DNA
aggtgagcccactcaggagg

SEQ ID NO: 108 - DNA, 20 bp, synthetic construct
  source 1..20: mol_type = other DNA
ggaggaggacgctgatcagc

SEQ ID NO: 109 - DNA, 20 bp, synthetic construct
  source 1..20: mol_type = other DNA
tcactctatatgctctgtac

SEQ ID NO: 110 - DNA, 20 bp, synthetic construct
  source 1..20: mol_type = other DNA
gcgtctgcaaaatgacccac

SEQ ID NO: 111 - DNA, 20 bp, synthetic construct
  source 1..20: mol_type = other DNA
tgtgcatatgagctggggct

SEQ ID NO: 112 - DNA, 20 bp, synthetic construct
  source 1..20: mol_type = other DNA
ccgcacctgttgttgtgacg

SEQ ID NO: 113 - DNA, 20 bp, synthetic construct
  source 1..20: mol_type = other DNA
gaatccatcttcctgaccct

SEQ ID NO: 114 - DNA, 20 bp, synthetic construct
  source 1..20: mol_type = other DNA
gcagtgacctggaagatgga

SEQ ID NO: 115 - DNA, 20 bp, synthetic construct
  source 1..20: mol_type = other DNA
acacgccacattcaaagcca

SEQ ID NO: 116 - DNA, 20 bp, synthetic construct
  source 1..20: mol_type = other DNA
cctcgtcacaacaacaggtg

SEQ ID NO: 117 - DNA, 20 bp, synthetic construct
  source 1..20: mol_type = other DNA
ggatacagggctctacacag

SEQ ID NO: 118 - DNA, 20 bp, synthetic construct
  source 1..20: mol_type = other DNA
gggtccaccttgtcttcccg

SEQ ID NO: 119 - DNA, 20 bp, synthetic construct
  source 1..20: mol_type = other DNA
ggtccaccttgtcttcccgt

SEQ ID NO: 120 - DNA, 20 bp, synthetic construct
  source 1..20: mol_type = other DNA
aatccatcttcctgaccctt

SEQ ID NO: 121 - DNA, 20 bp, synthetic construct
  source 1..20: mol_type = other DNA
attggttgtcccaggacgag

SEQ ID NO: 122 - DNA, 20 bp, synthetic construct
  source 1..20: mol_type = other DNA
ggcagcggagacagtaagtg

SEQ ID NO: 123 - DNA, 20 bp, synthetic construct
  source 1..20: mol_type = other DNA
gccaggtgagcccactcagg

SEQ ID NO: 124 - DNA, 20 bp, synthetic construct
  source 1..20: mol_type = other DNA
ctcgtcacaacaacaggtgc

SEQ ID NO: 125 - DNA, 20 bp, synthetic construct
  source 1..20: mol_type = other DNA
cagccccagctcatatgcac

SEQ ID NO: 126 - DNA, 20 bp, synthetic construct
  source 1..20: mol_type = other DNA
ctgtgcatatgagctggggc

SEQ ID NO: 127 - DNA, 20 bp, synthetic construct
  source 1..20: mol_type = other DNA
gcattgacattggttgtccc

SEQ ID NO: 128 - DNA, 20 bp, synthetic construct
  source 1..20: mol_type = other DNA
gaatttatcatttcgtggtg

SEQ ID NO: 129 - DNA, 20 bp, synthetic construct
  source 1..20: mol_type = other DNA
ccaggcaggtaagggcctgt

SEQ ID NO: 130 - DNA, 20 bp, synthetic construct
  source 1..20: mol_type = other DNA
agcgtctgcaaaatgaccca

SEQ ID NO: 131 - DNA, 20 bp, synthetic construct
  source 1..20: mol_type = other DNA
ccctgcagtgacctggaaga

SEQ ID NO: 132 - DNA, 20 bp, synthetic construct
  source 1..20: mol_type = other DNA
caccctacctggaaactgac

SEQ ID NO: 133 - DNA, 20 bp, synthetic construct
  source 1..20: mol_type = other DNA
ctgcagttttagcatctgtg

SEQ ID NO: 134 - DNA, 20 bp, synthetic construct
  source 1..20: mol_type = other DNA
tgggagatccggcagccctc

SEQ ID NO: 135 - DNA, 20 bp, synthetic construct
  source 1..20: mol_type = other DNA
taaacagtgcccaagcctgg

SEQ ID NO: 136 - DNA, 20 bp, synthetic construct
  source 1..20: mol_type = other DNA
gggagatccggcagccctcg

SEQ ID NO: 137 - DNA, 20 bp, synthetic construct
  source 1..20: mol_type = other DNA
ccgcaggcgcgtcttccagg

SEQ ID NO: 138 - DNA, 20 bp, synthetic construct
  source 1..20: mol_type = other DNA
atgggagatccggcagccct

SEQ ID NO: 139 - DNA, 20 bp, synthetic construct
  source 1..20: mol_type = other DNA
cgtcccagtagatcctgctc

SEQ ID NO: 140 - DNA, 20 bp, synthetic construct
  source 1..20: mol_type = other DNA
agtacaggcagatgtgcagc

SEQ ID NO: 141 - DNA, 20 bp, synthetic construct
  source 1..20: mol_type = other DNA
tccagcagtgattcataatc

SEQ ID NO: 142 - DNA, 20 bp, synthetic construct
  source 1..20: mol_type = other DNA
gcttacctcctccattatgt

SEQ ID NO: 143 - DNA, 20 bp, synthetic construct
  source 1..20: mol_type = other DNA
aaagtatgccaggctggctt

SEQ ID NO: 144 - DNA, 20 bp, synthetic construct
  source 1..20: mol_type = other DNA
ggctgccagaaattgtttgg

SEQ ID NO: 145 - DNA, 20 bp, synthetic construct
  source 1..20: mol_type = other DNA
gcatactttgaagatcgtca

SEQ ID NO: 146 - DNA, 20 bp, synthetic construct
  source 1..20: mol_type = other DNA
tgatgagctgttcttccagg

SEQ ID NO: 147 - DNA, 20 bp, synthetic construct
  source 1..20: mol_type = other DNA
ggaggtaagctctagagcag

SEQ ID NO: 148 - DNA, 20 bp, synthetic construct
  source 1..20: mol_type = other DNA
tatcaccaacataatggagg

SEQ ID NO: 149 - DNA, 20 bp, synthetic construct
  source 1..20: mol_type = other DNA
tcactcaccctgttgtcttc

SEQ ID NO: 150 - DNA, 20 bp, synthetic construct
  source 1..20: mol_type = other DNA
aggaggtaagctctagagca

SEQ ID NO: 151 - DNA, 20 bp, synthetic construct
  source 1..20: mol_type = other DNA
agacttggtatgagcatgca

SEQ ID NO: 152 - DNA, 20 bp, synthetic construct
  source 1..20: mol_type = other DNA
catactttgaagatcgtcat

SEQ ID NO: 153 - DNA, 20 bp, synthetic construct
  source 1..20: mol_type = other DNA
gaggaggtaagctctagagc

SEQ ID NO: 154 - DNA, 20 bp, synthetic construct
  source 1..20: mol_type = other DNA
cgcagcagtctggagaaggc

SEQ ID NO: 155 - DNA, 20 bp, synthetic construct
  source 1..20: mol_type = other DNA
tcttgtaggtgtgctgatgt

SEQ ID NO: 156 - DNA, 20 bp, synthetic construct
  source 1..20: mol_type = other DNA
gagacttggtatgagcatgc

SEQ ID NO: 157 - DNA, 20 bp, synthetic construct
  source 1..20: mol_type = other DNA
gggccagcacccagcgctgc

SEQ ID NO: 158 - DNA, 20 bp, synthetic construct
  source 1..20: mol_type = other DNA
ctatcaaaaccattcgggaa

SEQ ID NO: 159 - DNA, 20 bp, synthetic construct
  source 1..20: mol_type = other DNA
ctctccagagaccagaagat

SEQ ID NO: 160 - DNA, 20 bp, synthetic construct
  source 1..20: mol_type = other DNA
tcagccagctccttacatga

SEQ ID NO: 161 - DNA, 20 bp, synthetic construct
  source 1..20: mol_type = other DNA
gatggcactggaatggccgg

SEQ ID NO: 162 - DNA, 20 bp, synthetic construct
  source 1..20: mol_type = other DNA
cgccactaccgaaagcacac

SEQ ID NO: 163 - DNA, 20 bp, synthetic construct
  source 1..20: mol_type = other DNA
tcgcacagatggcactggaa

SEQ ID NO: 164 - DNA, 20 bp, synthetic construct
  source 1..20: mol_type = other DNA
cgcagccgtcccagttgcag

SEQ ID NO: 165 - DNA, 20 bp, synthetic construct
  source 1..20: mol_type = other DNA
gcgccactaccgaaagcaca

SEQ ID NO: 166 - DNA, 20 bp, synthetic construct
  source 1..20: mol_type = other DNA
accctgaaaggaagtgaaaa

SEQ ID NO: 167 - DNA, 20 bp, synthetic construct
  source 1..20: mol_type = other DNA
cagcacgcaggggaccagga

SEQ ID NO: 168 - DNA, 20 bp, synthetic construct
  source 1..20: mol_type = other DNA
ctactcacgggatggggagc

SEQ ID NO: 169 - DNA, 20 bp, synthetic construct
  source 1..20: mol_type = other DNA
cctcagacacggttgccccc

SEQ ID NO: 170 - DNA, 20 bp, synthetic construct
  source 1..20: mol_type = other DNA
cacacacagtgccatcaaca

SEQ ID NO: 171 - DNA, 20 bp, synthetic construct
  source 1..20: mol_type = other DNA
gtgtcccaggaactgcatcc

SEQ ID NO: 172 - DNA, 20 bp, synthetic construct
  source 1..20: mol_type = other DNA
ccagggggcaaccgtgtctg

SEQ ID NO: 173 - DNA, 20 bp, synthetic construct
  source 1..20: mol_type = other DNA
agcaggagccccagcacgca

SEQ ID NO: 174 - DNA, 20 bp, synthetic construct
  source 1..20: mol_type = other DNA
cagcaggagccccagcacgc

SEQ ID NO: 175 - DNA, 20 bp, synthetic construct
  source 1..20: mol_type = other DNA
cctccatctgcaggggagct

SEQ ID NO: 176 - DNA, 20 bp, synthetic construct
  source 1..20: mol_type = other DNA
actcacgaggccgtttgaac

SEQ ID NO: 177 - DNA, 20 bp, synthetic construct
  source 1..20: mol_type = other DNA
gcttcaaagagagggtgaga

SEQ ID NO: 178 - DNA, 20 bp, synthetic construct
  source 1..20: mol_type = other DNA
atggcctcctccatctgcag

SEQ ID NO: 179 - DNA, 20 bp, synthetic construct
  source 1..20: mol_type = other DNA
gcaggagccccagcacgcag

SEQ ID NO: 180 - DNA, 20 bp, synthetic construct
  source 1..20: mol_type = other DNA
cccactcacctggcagtctg

SEQ ID NO: 181 - DNA, 20 bp, synthetic construct
  source 1..20: mol_type = other DNA
gcagatggaggaggccatcc

SEQ ID NO: 182 - DNA, 20 bp, synthetic construct
  source 1..20: mol_type = other DNA
tggccaggatgggcagcagc

SEQ ID NO: 183 - DNA, 20 bp, synthetic construct
  source 1..20: mol_type = other DNA
gctacctgtgagtggccagg

SEQ ID NO: 184 - DNA, 20 bp, synthetic construct
  source 1..20: mol_type = other DNA
cgggagagcgagagcaccgc

SEQ ID NO: 185 - DNA, 20 bp, synthetic construct
  source 1..20: mol_type = other DNA
gcatggcattcattgaagag

SEQ ID NO: 186 - DNA, 20 bp, synthetic construct
  source 1..20: mol_type = other DNA
cctgcagattgcagaaggca

SEQ ID NO: 187 - DNA, 20 bp, synthetic construct
  source 1..20: mol_type = other DNA
gttctgaatcacctccgggt

SEQ ID NO: 188 - DNA, 20 bp, synthetic construct
  source 1..20: mol_type = other DNA
cgtagggatgaccaacccgg

SEQ ID NO: 189 - DNA, 20 bp, synthetic construct
  source 1..20: mol_type = other DNA
ggtcatccctacgggttgat

SEQ ID NO: 190 - DNA, 20 bp, synthetic construct
  source 1..20: mol_type = other DNA
gaagccccagaagccgtggt

SEQ ID NO: 191 - DNA, 20 bp, synthetic construct
  source 1..20: mol_type = other DNA
ggcgcaggagcggcgagtgg

SEQ ID NO: 192 - DNA, 20 bp, synthetic construct
  source 1..20: mol_type = other DNA
tcctcgcagatgcttcagat

SEQ ID NO: 193 - DNA, 20 bp, synthetic construct
  source 1..20: mol_type = other DNA
ccgggagagcgagagcaccg

SEQ ID NO: 194 - DNA, 20 bp, synthetic construct
  source 1..20: mol_type = other DNA
tgggtaagggatgcggccgt

SEQ ID NO: 195 - DNA, 20 bp, synthetic construct
  source 1..20: mol_type = other DNA
cttacccaggttagagccaa

SEQ ID NO: 196 - DNA, 20 bp, synthetic construct
  source 1..20: mol_type = other DNA
tccaggttctgaatcacctc

SEQ ID NO: 197 - DNA, 20 bp, synthetic construct
  source 1..20: mol_type = other DNA
gcgccctgacaactgtccag

SEQ ID NO: 198 - DNA, 20 bp, synthetic construct
  source 1..20: mol_type = other DNA
cccagaagccccagaagccg

SEQ ID NO: 199 - DNA, 20 bp, synthetic construct
  source 1..20: mol_type = other DNA
tcaccttgcagtggggaagc

SEQ ID NO: 200 - DNA, 20 bp, synthetic construct
  source 1..20: mol_type = other DNA
gcccatggtccctgagggaa

SEQ ID NO: 201 - DNA, 20 bp, synthetic construct
  source 1..20: mol_type = other DNA
ttacttgggctgccatgtcc

SEQ ID NO: 202 - DNA, 20 bp, synthetic construct
  source 1..20: mol_type = other DNA
tgtactcgttgtcctcaatg

SEQ ID NO: 203 - DNA, 20 bp, synthetic construct
  source 1..20: mol_type = other DNA
cctacgggttgatgggtgaa

SEQ ID NO: 204 - DNA, 20 bp, synthetic construct
  source 1..20: mol_type = other DNA
ccacagcccatggtccctga

SEQ ID NO: 205 - DNA, 20 bp, synthetic construct
  source 1..20: mol_type = other DNA
gcctcggccaggaaggcgtc

SEQ ID NO: 206 - DNA, 20 bp, synthetic construct
  source 1..20: mol_type = other DNA
aaggagccgtgagtgttccc

SEQ ID NO: 207 - DNA, 20 bp, synthetic construct
  source 1..20: mol_type = other DNA
tctaacctgggtaagggatg

SEQ ID NO: 208 - DNA, 20 bp, synthetic construct
  source 1..20: mol_type = other DNA
ggcggtgaagagcctgaagc

SEQ ID NO: 209 - DNA, 20 bp, synthetic construct
  source 1..20: mol_type = other DNA
cgtagagccgaaccagccgc

SEQ ID NO: 210 - DNA, 20 bp, synthetic construct
  source 1..20: mol_type = other DNA
catgtccaggagtttgttga

SEQ ID NO: 211 - DNA, 20 bp, synthetic construct
  source 1..20: mol_type = other DNA
cctggggtcaccttgcagtg

SEQ ID NO: 212 - DNA, 20 bp, synthetic construct
  source 1..20: mol_type = other DNA
ggtgttgcagctgcttcatg

SEQ ID NO: 213 - DNA, 20 bp, synthetic construct
  source 1..20: mol_type = other DNA
tccagcacagcctcatgagt

SEQ ID NO: 214 - DNA, 20 bp, synthetic construct
  source 1..20: mol_type = other DNA
cctcggccaggaaggcgtcc

SEQ ID NO: 215 - DNA, 20 bp, synthetic construct
  source 1..20: mol_type = other DNA
ctgcgcaggtagtcaaaggt

SEQ ID NO: 216 - DNA, 20 bp, synthetic construct
  source 1..20: mol_type = other DNA
ttgcagctgcttcatgaggt

SEQ ID NO: 217 - DNA, 20 bp, synthetic construct
  source 1..20: mol_type = other DNA
ccgacccagggtactacaac

SEQ ID NO: 218 - DNA, 20 bp, synthetic construct
  source 1..20: mol_type = other DNA
ctcggccaggaaggcgtccg

SEQ ID NO: 219 - DNA, 20 bp, synthetic construct
  source 1..20: mol_type = other DNA
ccagaatgttggcagcccga

SEQ ID NO: 220 - DNA, 20 bp, synthetic construct
  source 1..20: mol_type = other DNA
tgaagcagctgcaacaccag

SEQ ID NO: 221 - DNA, 20 bp, synthetic construct
  source 1..20: mol_type = other DNA
ggactcactgctccaggatg

SEQ ID NO: 222 - DNA, 20 bp, synthetic construct
  source 1..20: mol_type = other DNA
cgggctcactggtgtaatgg

SEQ ID NO: 223 - DNA, 20 bp, synthetic construct
  source 1..20: mol_type = other DNA
tgagctgcagccacagccca

SEQ ID NO: 224 - DNA, 20 bp, synthetic construct
  source 1..20: mol_type = other DNA
gtactacaacgggcacacga

SEQ ID NO: 225 - DNA, 20 bp, synthetic construct
  source 1..20: mol_type = other DNA
tcatgaggttggcctcggcc

SEQ ID NO: 226 - DNA, 20 bp, synthetic construct
  source 1..20: mol_type = other DNA
gccacagcccatggtccctg

SEQ ID NO: 227 - DNA, 20 bp, synthetic construct
  source 1..20: mol_type = other DNA
cactcgccgctcctgcgcca

SEQ ID NO: 228 - DNA, 20 bp, synthetic construct
  source 1..20: mol_type = other DNA
caaggtgaccccaggcagca

SEQ ID NO: 229 - DNA, 20 bp, synthetic construct
  source 1..20: mol_type = other DNA
ccgaaatggctctgaggtgc

SEQ ID NO: 230 - DNA, 20 bp, synthetic construct
  source 1..20: mol_type = other DNA
gcggtgaagagcctgaagca

SEQ ID NO: 231 - DNA, 20 bp, synthetic construct
  source 1..20: mol_type = other DNA
tgaagcatctgcgaggacga

SEQ ID NO: 232 - DNA, 20 bp, synthetic construct
  source 1..20: mol_type = other DNA
aggttgtctgtaaagacaag

SEQ ID NO: 233 - DNA, 20 bp, synthetic construct
  source 1..20: mol_type = other DNA
cttacggcacccggagcttg

SEQ ID NO: 234 - DNA, 20 bp, synthetic construct
  source 1..20: mol_type = other DNA
cttaccttgtcagaaaatgg

SEQ ID NO: 235 - DNA, 20 bp, synthetic construct
  source 1..20: mol_type = other DNA
ttaccttcccgctggaatcg

SEQ ID NO: 236 - DNA, 20 bp, synthetic construct
  source 1..20: mol_type = other DNA
aaaccttgagagaagtatgg

SEQ ID NO: 237 - DNA, 20 bp, synthetic construct
  source 1..20: mol_type = other DNA
cgttaatgtgcactggtatc

SEQ ID NO: 238 - DNA, 20 bp, synthetic construct
  source 1..20: mol_type = other DNA
cgggcccttaccgatgtaca

SEQ ID NO: 239 - DNA, 20 bp, synthetic construct
  source 1..20: mol_type = other DNA
tcttcgtggctttctgtgga

SEQ ID NO: 240 - DNA, 20 bp, synthetic construct
  source 1..20: mol_type = other DNA
tacttacggcacccggagct

SEQ ID NO: 241 - DNA, 20 bp, synthetic construct
  source 1..20: mol_type = other DNA
taccttcccgctggaatcga

SEQ ID NO: 242 - DNA, 20 bp, synthetic construct
  source 1..20: mol_type = other DNA
ccttcccaggatgaagatga

SEQ ID NO: 243 - DNA, 20 bp, synthetic construct
  source 1..20: mol_type = other DNA
acttacggcacccggagctt

SEQ ID NO: 244 - DNA, 20 bp, synthetic construct
  source 1..20: mol_type = other DNA
tagttgagctgcaaagagaa

SEQ ID NO: 245 - DNA, 20 bp, synthetic construct
  source 1..20: mol_type = other DNA
aacctttctgagaatgctcc

SEQ ID NO: 246 - DNA, 20 bp, synthetic construct
  source 1..20: mol_type = other DNA
ttgagagaagtatggtggca

SEQ ID NO: 247 - DNA, 20 bp, synthetic construct
  source 1..20: mol_type = other DNA
ttctgtctattgaaggagca

SEQ ID NO: 248 - DNA, 20 bp, synthetic construct
  source 1..20: mol_type = other DNA
atcatacccacctagtgtga

SEQ ID NO: 249 - DNA, 20 bp, synthetic construct
  source 1..20: mol_type = other DNA
agagacaggtaaagctctca

SEQ ID NO: 250 - DNA, 20 bp, synthetic construct
  source 1..20: mol_type = other DNA
tcatacccacctagtgtgaa

SEQ ID NO: 251 - DNA, 20 bp, synthetic construct
  source 1..20: mol_type = other DNA
atgtacatggagttggagtt

SEQ ID NO: 252 - DNA, 20 bp, synthetic construct
  source 1..20: mol_type = other DNA
agaagcgagccccatcgatg

SEQ ID NO: 253 - DNA, 20 bp, synthetic construct
  source 1..20: mol_type = other DNA
catcatcttcatcctgggaa

SEQ ID NO: 254 - DNA, 20 bp, synthetic construct
  source 1..20: mol_type = other DNA
cttaccgatgtacatggagt

SEQ ID NO: 255 - DNA, 20 bp, synthetic construct
  source 1..20: mol_type = other DNA
tgctcttagaaagataaacc

SEQ ID NO: 256 - DNA, 20 bp, synthetic construct
  source 1..20: mol_type = other DNA
agttgagctgcaaagagaag

SEQ ID NO: 257 - DNA, 20 bp, synthetic construct
  source 1..20: mol_type = other DNA
gcccaggacctctgagcgaa

SEQ ID NO: 258 - DNA, 20 bp, synthetic construct
  source 1..20: mol_type = other DNA
ctgtctcttcaggaaaccgc

SEQ ID NO: 259 - DNA, 20 bp, synthetic construct
  source 1..20: mol_type = other DNA
ccagaagttccccaagctcc

SEQ ID NO: 260 - DNA, 20 bp, synthetic construct
  source 1..20: mol_type = other DNA
ctccaggcatgtgagaggat

SEQ ID NO: 261 - DNA, 20 bp, synthetic construct
  source 1..20: mol_type = other DNA
tgtacatggagttggagttg

SEQ ID NO: 262 - DNA, 20 bp, synthetic construct
  source 1..20: mol_type = other DNA
atagttgagctgcaaagaga

SEQ ID NO: 263 - DNA, 20 bp, synthetic construct
  source 1..20: mol_type = other DNA
tccagaagttccccaagctc

SEQ ID NO: 264 - DNA, 20 bp, synthetic construct
  source 1..20: mol_type = other DNA
gcctaccgagtgattccggc

SEQ ID NO: 265 - DNA, 20 bp, synthetic construct
  source 1..20: mol_type = other DNA
cttgcagccctcgattccag

SEQ ID NO: 266 - DNA, 20 bp, synthetic construct
  source 1..20: mol_type = other DNA
cctgtctcttcaggaaaccg

SEQ ID NO: 267 - DNA, 20 bp, synthetic construct
  source 1..20: mol_type = other DNA
tacaacaccatgaggacata

SEQ ID NO: 268 - DNA, 20 bp, synthetic construct
  source 1..20: mol_type = other DNA
gatgtacatggagttggagt

SEQ ID NO: 269 - DNA, 20 bp, synthetic construct
  source 1..20: mol_type = other DNA
ctctcttacctcttcctccg

SEQ ID NO: 270 - DNA, 20 bp, synthetic construct
  source 1..20: mol_type = other DNA
ccttcttgaaatagtcagca

SEQ ID NO: 271 - DNA, 20 bp, synthetic construct
  source 1..20: mol_type = other DNA
cttcctgcccacacagtgat

SEQ ID NO: 272 - DNA, 20 bp, synthetic construct
  source 1..20: mol_type = other DNA
ccttgctgactatttcaaga

SEQ ID NO: 273 - DNA, 20 bp, synthetic construct
  source 1..20: mol_type = other DNA
tcttacctcttcctccgcgg

SEQ ID NO: 274 - DNA, 20 bp, synthetic construct
  source 1..20: mol_type = other DNA
ggccggtctgtggaaacaca

SEQ ID NO: 275 - DNA, 20 bp, synthetic construct
  source 1..20: mol_type = other DNA
agtgccatggctgctctccc

SEQ ID NO: 276 - DNA, 20 bp, synthetic construct
  source 1..20: mol_type = other DNA
ctcttacctcttcctccgcg

SEQ ID NO: 277 - DNA, 20 bp, synthetic construct
  source 1..20: mol_type = other DNA
gtcctgaaagagtcaagata

SEQ ID NO: 278 - DNA, 20 bp, synthetic construct
  source 1..20: mol_type = other DNA
cttctgtctattgaaggagc

SEQ ID NO: 279 - DNA, 20 bp, synthetic construct
  source 1..20: mol_type = other DNA
gtcctcttcgtggctttctg

SEQ ID NO: 280 - DNA, 20 bp, synthetic construct
  source 1..20: mol_type = other DNA
ttgcagccctcgattccagc

SEQ ID NO: 281 - DNA, 20 bp, synthetic construct
  source 1..20: mol_type = other DNA
tacaaaccttgagagaagta

SEQ ID NO: 282 - DNA, 20 bp, synthetic construct
  source 1..20: mol_type = other DNA
tctattgaaggagcagggac

SEQ ID NO: 283 - DNA, 20 bp, synthetic construct
  source 1..20: mol_type = other DNA
caccatgaggacatatggat

SEQ ID NO: 284 - DNA, 20 bp, synthetic construct
  source 1..20: mol_type = other DNA
ttcctgcccacacagtgata

SEQ ID NO: 285 - DNA, 20 bp, synthetic construct
  source 1..20: mol_type = other DNA
cttgagagaagtatggtggc

SEQ ID NO: 286 - DNA, 20 bp, synthetic construct
  source 1..20: mol_type = other DNA
cacacgcaagtgagtgcggc

SEQ ID NO: 287 - DNA, 20 bp, synthetic construct
  source 1..20: mol_type = other DNA
agtcctgaaagagtcaagat

SEQ ID NO: 288 - DNA, 20 bp, synthetic construct
  source 1..20: mol_type = other DNA
ccgccagtctcctccagccc

SEQ ID NO: 289 - DNA, 20 bp, synthetic construct
  source 1..20: mol_type = other DNA
agacgtcccaccaagggtct

SEQ ID NO: 290 - DNA, 20 bp, synthetic construct
  source 1..20: mol_type = other DNA
tggagtccaggccgctgtcg

SEQ ID NO: 291 - DNA, 20 bp, synthetic construct
  source 1..20: mol_type = other DNA
accgcccagacgactggcca

SEQ ID NO: 292 - DNA, 20 bp, synthetic construct
  source 1..20: mol_type = other DNA
cacgaagctctccgatgtgt

SEQ ID NO: 293 - DNA, 20 bp, synthetic construct
  source 1..20: mol_type = other DNA
gcagatcaaagagagcctgc

SEQ ID NO: 294 - DNA, 20 bp, synthetic construct
  source 1..20: mol_type = other DNA
agagctcagggtgacaggtg

SEQ ID NO: 295 - DNA, 20 bp, synthetic construct
  source 1..20: mol_type = other DNA
gcagggctggggagaaggtg

SEQ ID NO: 296 - DNA, 20 bp, synthetic construct
  source 1..20: mol_type = other DNA
gagcagggctggggagaagg

SEQ ID NO: 297 - DNA, 20 bp, synthetic construct
  source 1..20: mol_type = other DNA
catgtggaagtcacgcccgt

SEQ ID NO: 298 - DNA, 20 bp, synthetic construct
  source 1..20: mol_type = other DNA
tgtagcaccgcccagacgac

SEQ ID NO: 299 - DNA, 20 bp, synthetic construct
  source 1..20: mol_type = other DNA
gccctgctcgtggtgaccga

SEQ ID NO: 300 - DNA, 20 bp, synthetic construct
  source 1..20: mol_type = other DNA
tgcagatcccacaggcgccc

SEQ ID NO: 301 - DNA, 20 bp, synthetic construct
  source 1..20: mol_type = other DNA
agcagggctggggagaaggt

SEQ ID NO: 302 - DNA, 20 bp, synthetic construct
  source 1..20: mol_type = other DNA
gggcggtgctacaactgggc

SEQ ID NO: 303 - DNA, 20 bp, synthetic construct
  source 1..20: mol_type = other DNA
ggagatggccccacagaggt

SEQ ID NO: 304 - DNA, 20 bp, synthetic construct
  source 1..20: mol_type = other DNA
ggccaggatggttcttaggt

SEQ ID NO: 305 - DNA, 20 bp, synthetic construct
  source 1..20: mol_type = other DNA
agccggccagttccaaaccc

SEQ ID NO: 306 - DNA, 20 bp, synthetic construct
  source 1..20: mol_type = other DNA
gacgttacctcgtgcggccc

SEQ ID NO: 307 - DNA, 20 bp, synthetic construct
  source 1..20: mol_type = other DNA
tccaggcatgcagatcccac

SEQ ID NO: 308 - DNA, 20 bp, synthetic construct
  source 1..20: mol_type = other DNA
acgactggccagggcgcctg

SEQ ID NO: 309 - DNA, 20 bp, synthetic construct
  source 1..20: mol_type = other DNA
cttccacatgagcgtggtca

SEQ ID NO: 310 - DNA, 20 bp, synthetic construct
  source 1..20: mol_type = other DNA
ggtgacaggtgcggcctcgg

SEQ ID NO: 311 - DNA, 20 bp, synthetic construct
  source 1..20: mol_type = other DNA
cccttcggtcaccacgagca

SEQ ID NO: 312 - DNA, 20 bp, synthetic construct
  source 1..20: mol_type = other DNA
tgacgttacctcgtgcggcc

SEQ ID NO: 313 - DNA, 20 bp, synthetic construct
  source 1..20: mol_type = other DNA
tcaccctgagctctgcccgc

SEQ ID NO: 314 - DNA, 20 bp, synthetic construct
  source 1..20: mol_type = other DNA
ccccttcggtcaccacgagc

SEQ ID NO: 315 - DNA, 20 bp, synthetic construct
  source 1..20: mol_type = other DNA
cggccagttccaaaccctgg

SEQ ID NO: 316 - DNA, 20 bp, synthetic construct
  source 1..20: mol_type = other DNA
tctggaagggcacaaaggtc

SEQ ID NO: 317 - DNA, 20 bp, synthetic construct
  source 1..20: mol_type = other DNA
cgcagatcaaagagagcctg

SEQ ID NO: 318 - DNA, 20 bp, synthetic construct
  source 1..20: mol_type = other DNA
cacctacctaagaaccatcc

SEQ ID NO: 319 - DNA, 20 bp, synthetic construct
  source 1..20: mol_type = other DNA
cctgcagagaaacacacttg

SEQ ID NO: 320 - DNA, 20 bp, synthetic construct
  source 1..20: mol_type = other DNA
ccagggagatggccccacag

SEQ ID NO: 321 - DNA, 20 bp, synthetic construct
  source 1..20: mol_type = other DNA
cgactggccagggcgcctgt

SEQ ID NO: 322 - DNA, 20 bp, synthetic construct
  source 1..20: mol_type = other DNA
ggatggttcttaggtaggtg

SEQ ID NO: 323 - DNA, 20 bp, synthetic construct
  source 1..20: mol_type = other DNA
cacgagcagggctggggaga

SEQ ID NO: 324 - DNA, 20 bp, synthetic construct
  source 1..20: mol_type = other DNA
atgtggaagtcacgcccgtt

SEQ ID NO: 325 - DNA, 20 bp, synthetic construct
  source 1..20: mol_type = other DNA
aactgggctggcggccagga

SEQ ID NO: 326 - DNA, 20 bp, synthetic construct
  source 1..20: mol_type = other DNA
gggcagtcctgcagaaggac

SEQ ID NO: 327 - DNA, 20 bp, synthetic construct
  source 1..20: mol_type = other DNA
ggcagtcctgcagaaggaca

SEQ ID NO: 328 - DNA, 20 bp, synthetic construct
  source 1..20: mol_type = other DNA
cgcacgaggaaggagccgtc

SEQ ID NO: 329 - DNA, 20 bp, synthetic construct
  source 1..20: mol_type = other DNA
gtcaggtacctggataggca

SEQ ID NO: 330 - DNA, 20 bp, synthetic construct
  source 1..20: mol_type = other DNA
cctatccaggtacctgaccg

SEQ ID NO: 331 - DNA, 20 bp, synthetic construct
  source 1..20: mol_type = other DNA
cgcgccagatcacgtggagc

SEQ ID NO: 332 - DNA, 20 bp, synthetic construct
  source 1..20: mol_type = other DNA
caggatgactgggtacctgc

SEQ ID NO: 333 - DNA, 20 bp, synthetic construct
  source 1..20: mol_type = other DNA
gtcatccttcccggaaacca

SEQ ID NO: 334 - DNA, 20 bp, synthetic construct
  source 1..20: mol_type = other DNA
tgcagcgacagcccatccgc

SEQ ID NO: 335 - DNA, 20 bp, synthetic construct
  source 1..20: mol_type = other DNA
gtttccaggagcctgactac

SEQ ID NO: 336 - DNA, 20 bp, synthetic construct
  source 1..20: mol_type = other DNA
gcgaggaggagatccagtag

SEQ ID NO: 337 - DNA, 20 bp, synthetic construct
  source 1..20: mol_type = other DNA
tttccaggagcctgactacg

SEQ ID NO: 338 - DNA, 20 bp, synthetic construct
  source 1..20: mol_type = other DNA
ccacctcgaggctgcggcag

SEQ ID NO: 339 - DNA, 20 bp, synthetic construct
  source 1..20: mol_type = other DNA
cgagagagtgagaccttcgt

SEQ ID NO: 340 - DNA, 20 bp, synthetic construct
  source 1..20: mol_type = other DNA
cctcccagccatccgtcctg

SEQ ID NO: 341 - DNA, 20 bp, synthetic construct
  source 1..20: mol_type = other DNA
cgccagatcacgtggagccg

SEQ ID NO: 342 - DNA, 20 bp, synthetic construct
  source 1..20: mol_type = other DNA
caggacctggagcagcgcag

SEQ ID NO: 343 - DNA, 20 bp, synthetic construct
  source 1..20: mol_type = other DNA
gactcactctgaggccacaa

SEQ ID NO: 344 - DNA, 20 bp, synthetic construct
  source 1..20: mol_type = other DNA
aagggaagataatggaacgg

SEQ ID NO: 345 - DNA, 20 bp, synthetic construct
  source 1..20: mol_type = other DNA
tcatgacggtgcccacctcg

SEQ ID NO: 346 - DNA, 20 bp, synthetic construct
  source 1..20: mol_type = other DNA
agcactgccgtatccactcc

SEQ ID NO: 347 - DNA, 20 bp, synthetic construct
  source 1..20: mol_type = other DNA
agctcaccaatctgacaagc

SEQ ID NO: 348 - DNA, 20 bp, synthetic construct
  source 1..20: mol_type = other DNA
gtacctggataggcaaggag

SEQ ID NO: 349 - DNA, 20 bp, synthetic construct
  source 1..20: mol_type = other DNA
ctctgaggtttggtttggag

SEQ ID NO: 350 - DNA, 20 bp, synthetic construct
  source 1..20: mol_type = other DNA
acaggatgactgggtacctg

SEQ ID NO: 351 - DNA, 20 bp, synthetic construct
  source 1..20: mol_type = other DNA
gacaagttcagagagctcca

SEQ ID NO: 352 - DNA, 20 bp, synthetic construct
  source 1..20: mol_type = other DNA
ctgaacttgtcgtctactgc

SEQ ID NO: 353 - DNA, 20 bp, synthetic construct
  source 1..20: mol_type = other DNA
ctcagatgtggctgtgagca

SEQ ID NO: 354 - DNA, 20 bp, synthetic construct
  source 1..20: mol_type = other DNA
agttggaggaatccagtcgc

SEQ ID NO: 355 - DNA, 20 bp, synthetic construct
  source 1..20: mol_type = other DNA
gccctcaacttccagacccc

SEQ ID NO: 356 - DNA, 20 bp, synthetic construct
  source 1..20: mol_type = other DNA
gacctggaaggtcttccgct

SEQ ID NO: 357 - DNA, 20 bp, synthetic construct
  source 1..20: mol_type = other DNA
aggaggactcactggagaac

SEQ ID NO: 358 - DNA, 20 bp, synthetic construct
  source 1..20: mol_type = other DNA
gtgctctggtcaggctcgcg

SEQ ID NO: 359 - DNA, 20 bp, synthetic construct
  source 1..20: mol_type = other DNA
gctgcagtcgattgtactga

SEQ ID NO: 360 - DNA, 20 bp, synthetic construct
  source 1..20: mol_type = other DNA
gtcgggcccccagcacctgt

SEQ ID NO: 361 - DNA, 20 bp, synthetic construct
  source 1..20: mol_type = other DNA
cggtgcccacctcgaggctg

SEQ ID NO: 362 - DNA, 20 bp, synthetic construct
  source 1..20: mol_type = other DNA
aatccagtcgctggcccttg

SEQ ID NO: 363 - DNA, 20 bp, synthetic construct
  source 1..20: mol_type = other DNA
cctcgcacaacacgtgagtg

SEQ ID NO: 364 - DNA, 20 bp, synthetic construct
  source 1..20: mol_type = other DNA
tgcagtggtcctcaatggac

SEQ ID NO: 365 - DNA, 20 bp, synthetic construct
  source 1..20: mol_type = other DNA
ggtcctgcatggtatagagc

SEQ ID NO: 366 - DNA, 20 bp, synthetic construct
  source 1..20: mol_type = other DNA
tgtttccaggagcctgacta

SEQ ID NO: 367 - DNA, 20 bp, synthetic construct
  source 1..20: mol_type = other DNA
gtctgtcaagaagaacttgg

SEQ ID NO: 368 - DNA, 20 bp, synthetic construct
  source 1..20: mol_type = other DNA
ctctcccgcatctaccccaa

SEQ ID NO: 369 - DNA, 20 bp, synthetic construct
  source 1..20: mol_type = other DNA
cttctccatcagcatggcgt

SEQ ID NO: 370 - DNA, 20 bp, synthetic construct
  source 1..20: mol_type = other DNA
gcacgaggaaggagccgtca

SEQ ID NO: 371 - DNA, 20 bp, synthetic construct
  source 1..20: mol_type = other DNA
ctcctggaaacaggacacaa

SEQ ID NO: 372 - DNA, 20 bp, synthetic construct
  source 1..20: mol_type = other DNA
cctttgcccatgtggatctg

SEQ ID NO: 373 - DNA, 20 bp, synthetic construct
  source 1..20: mol_type = other DNA
ctgcagctcctcctgtgagt

SEQ ID NO: 374 - DNA, 20 bp, synthetic construct
  source 1..20: mol_type = other DNA
cacgaggaaggagccgtcag

SEQ ID NO: 375 - DNA, 20 bp, synthetic construct
  source 1..20: mol_type = other DNA
ggaatccagtcgctggccct

SEQ ID NO: 376 - DNA, 20 bp, synthetic construct
  source 1..20: mol_type = other DNA
ggcccagacagcagacgcca

SEQ ID NO: 377 - DNA, 20 bp, synthetic construct
  source 1..20: mol_type = other DNA
caaccctggcttctatgtag

SEQ ID NO: 378 - DNA, 20 bp, synthetic construct
  source 1..20: mol_type = other DNA
ctctgccgcagcctcgaggt

SEQ ID NO: 379 - DNA, 20 bp, synthetic construct
  source 1..20: mol_type = other DNA
ttaccgtcagccgctctcgg

SEQ ID NO: 380 - DNA, 20 bp, synthetic construct
  source 1..20: mol_type = other DNA
acggaggaagaagattgccc

SEQ ID NO: 381 - DNA, 20 bp, synthetic construct
  source 1..20: mol_type = other DNA
agaccccttacgagagatcg

SEQ ID NO: 382 - DNA, 20 bp, synthetic construct
  source 1..20: mol_type = other DNA
ccgggaaggatgacatgtcc

SEQ ID NO: 383 - DNA, 20 bp, synthetic construct
  source 1..20: mol_type = other DNA
gcccttactctcttcatcaa

SEQ ID NO: 384 - DNA, 20 bp, synthetic construct
  source 1..20: mol_type = other DNA
tcagcagggaggccaactcc

SEQ ID NO: 385 - DNA, 20 bp, synthetic construct
  source 1..20: mol_type = other DNA
gcagcgagcataggcttcca

SEQ ID NO: 386 - DNA, 20 bp, synthetic construct
  source 1..20: mol_type = other DNA
agcgcagaaaggcaaattca

SEQ ID NO: 387 - DNA, 20 bp, synthetic construct
  source 1..20: mol_type = other DNA
tcttacctctcaatctgcag

SEQ ID NO: 388 - DNA, 20 bp, synthetic construct
  source 1..20: mol_type = other DNA
gtgagctggtgacacacaca

SEQ ID NO: 389 - DNA, 20 bp, synthetic construct
  source 1..20: mol_type = other DNA
catccgcaggcagcgagcat

SEQ ID NO: 390 - DNA, 20 bp, synthetic construct
  source 1..20: mol_type = other DNA
tgactgccacagatccacat

SEQ ID NO: 391 - DNA, 20 bp, synthetic construct
  source 1..20: mol_type = other DNA
agaagtcgcagcgacccgag

SEQ ID NO: 392 - DNA, 20 bp, synthetic construct
  source 1..20: mol_type = other DNA
tggagaactggtccccggtc

SEQ ID NO: 393 - DNA, 20 bp, synthetic construct
  source 1..20: mol_type = other DNA
acctggaaggtcttccgctc

SEQ ID NO: 394 - DNA, 20 bp, synthetic construct
  source 1..20: mol_type = other DNA
cagcacaagaagctggctga

SEQ ID NO: 395 - DNA, 20 bp, synthetic construct
  source 1..20: mol_type = other DNA
gaatccagtcgctggccctt

SEQ ID NO: 396 - DNA, 20 bp, synthetic construct
  source 1..20: mol_type = other DNA
tgtaccttgaaagttggcat

SEQ ID NO: 397 - DNA, 20 bp, synthetic construct
  source 1..20: mol_type = other DNA
gcggcagaggtgcagcacct

SEQ ID NO: 398 - DNA, 20 bp, synthetic construct
  source 1..20: mol_type = other DNA
gtaccttgaaagttggcata

SEQ ID NO: 399 - DNA, 20 bp, synthetic construct
  source 1..20: mol_type = other DNA
acagcacaagaagctggctg

SEQ ID NO: 400 - DNA, 20 bp, synthetic construct
  source 1..20: mol_type = other DNA
cttcgtcttctccatcagca

SEQ ID NO: 401 - DNA, 20 bp, synthetic construct
  source 1..20: mol_type = other DNA
cgaggaggagatccagtagt

SEQ ID NO: 402 - DNA, 20 bp, synthetic construct
  source 1..20: mol_type = other DNA
agatccagtagtgggaaaga

SEQ ID NO: 403 - DNA, 20 bp, synthetic construct
  source 1..20: mol_type = other DNA
ctaccttcagattggagagc

SEQ ID NO: 404 - DNA, 20 bp, synthetic construct
  source 1..20: mol_type = other DNA
ctgcgcacctggcattcatg

SEQ ID NO: 405 - DNA, 20 bp, synthetic construct
  source 1..20: mol_type = other DNA
gtccacctgagagtgcacag

SEQ ID NO: 406 - DNA, 20 bp, synthetic construct
  source 1..20: mol_type = other DNA
aaacactacctggtacacac

SEQ ID NO: 407 - DNA, 20 bp, synthetic construct
  source 1..20: mol_type = other DNA
ttgcaagtctgacatttgaa

SEQ ID NO: 408 - DNA, 20 bp, synthetic construct
  source 1..20: mol_type = other DNA
gaaacactacctggtacaca

SEQ ID NO: 409 - DNA, 20 bp, synthetic construct
  source 1..20: mol_type = other DNA
gccagaccacggggtgcctg

SEQ ID NO: 410 - DNA, 20 bp, synthetic construct
  source 1..20: mol_type = other DNA
ggccatcaagtgtgtggtgg

SEQ ID NO: 411 - DNA, 20 bp, synthetic construct
  source 1..20: mol_type = other DNA
gccatcaagtgtgtggtggt

SEQ ID NO: 412 - DNA, 20 bp, synthetic construct
  source 1..20: mol_type = other DNA
tcaggtatggggcagcgcct

SEQ ID NO: 413 - DNA, 20 bp, synthetic construct
  source 1..20: mol_type = other DNA
gcaccaggccctccaggagc

SEQ ID NO: 414 - DNA, 20 bp, synthetic construct
  source 1..20: mol_type = other DNA
tctcatagatcagaacatcc

SEQ ID NO: 415 - DNA, 20 bp, synthetic construct
  source 1..20: mol_type = other DNA
gaccagtctctggctcacta

SEQ ID NO: 416 - DNA, 20 bp, synthetic construct
  source 1..20: mol_type = other DNA
ttgcaggtacgcaggcccca

SEQ ID NO: 417 - DNA, 20 bp, synthetic construct
  source 1..20: mol_type = other DNA
tcttcatcaaatacaaggag

SEQ ID NO: 418 - DNA, 20 bp, synthetic construct
  source 1..20: mol_type = other DNA
tgttctcagagagccaacaa

SEQ ID NO: 419 - DNA, 20 bp, synthetic construct
  source 1..20: mol_type = other DNA
cgcccagccaccgcgtgacc

SEQ ID NO: 420 - DNA, 20 bp, synthetic construct
  source 1..20: mol_type = other DNA
cagaaggacaccatcccgga

SEQ ID NO: 421 - DNA, 20 bp, synthetic construct
  source 1..20: mol_type = other DNA
ggctcacctgggacatctgg

SEQ ID NO: 422 - DNA, 20 bp, synthetic construct
  source 1..20: mol_type = other DNA
ccgcctcaccaggttctcaa

SEQ ID NO: 423 - DNA, 20 bp, synthetic construct
  source 1..20: mol_type = other DNA
cctgggacatctgggggcgc

SEQ ID NO: 424 - DNA, 20 bp, synthetic construct
  source 1..20: mol_type = other DNA
agggctcacctgggacatct

SEQ ID NO: 425 - DNA, 20 bp, synthetic construct
  source 1..20: mol_type = other DNA
acgcactgagccaggtcctg

SEQ ID NO: 426 - DNA, 20 bp, synthetic construct
  source 1..20: mol_type = other DNA
gatgacctgtgacggggcag

SEQ ID NO: 427 - DNA, 20 bp, synthetic construct
  source 1..20: mol_type = other DNA
tgtggcgccaatgcacccac

SEQ ID NO: 428 - DNA, 20 bp, synthetic construct
  source 1..20: mol_type = other DNA
tgagtagagctttgtcgagc

SEQ ID NO: 429 - DNA, 20 bp, synthetic construct
  source 1..20: mol_type = other DNA
caccatcagcaggtcccgca

SEQ ID NO: 430 - DNA, 20 bp, synthetic construct
  source 1..20: mol_type = other DNA
tcccaggtcacgcggtggct

SEQ ID NO: 431 - DNA, 20 bp, synthetic construct
  source 1..20: mol_type = other DNA
agatgaacagacaggtcctg

SEQ ID NO: 432 - DNA, 20 bp, synthetic construct
  source 1..20: mol_type = other DNA
cccggcactggatgagccag

SEQ ID NO: 433 - DNA, 20 bp, synthetic construct
  source 1..20: mol_type = other DNA
ccggcactggatgagccagt

SEQ ID NO: 434 - DNA, 20 bp, synthetic construct
  source 1..20: mol_type = other DNA
gagcactcactcgatctggt

SEQ ID NO: 435 - DNA, 20 bp, synthetic construct
  source 1..20: mol_type = other DNA
cctacctgctggcctgctga

SEQ ID NO: 436 - DNA, 20 bp, synthetic construct
  source 1..20: mol_type = other DNA
ctctactcatctgtaagcgc

SEQ ID NO: 437 - DNA, 20 bp, synthetic construct
  source 1..20: mol_type = other DNA
tcacgcaccggcatggacac

SEQ ID NO: 438 - DNA, 20 bp, synthetic construct
  source 1..20: mol_type = other DNA
gagggctcacctgggacatc

SEQ ID NO: 439 - DNA, 20 bp, synthetic construct
  source 1..20: mol_type = other DNA
actgagccaggtcctgggga

SEQ ID NO: 440 - DNA, 20 bp, synthetic construct
  source 1..20: mol_type = other DNA
gttccctgccaactacgtgg

SEQ ID NO: 441 - DNA, 20 bp, synthetic construct
  source 1..20: mol_type = other DNA
ctggaagtcatgcccgttgg

SEQ ID NO: 442 - DNA, 20 bp, synthetic construct
  source 1..20: mol_type = other DNA
cacacaaggagtgtctgggg

SEQ ID NO: 443 - DNA, 20 bp, synthetic construct
  source 1..20: mol_type = other DNA
accgagacaacaagaaggtg

SEQ ID NO: 444 - DNA, 20 bp, synthetic construct
  source 1..20: mol_type = other DNA
ccctgtaggttcctcgtcta

SEQ ID NO: 445 - DNA, 20 bp, synthetic construct
  source 1..20: mol_type = other DNA
gcagggctcaggacaaaaag

SEQ ID NO: 446 - DNA, 20 bp, synthetic construct
  source 1..20: mol_type = other DNA
gtcacgcaccggcatggaca

SEQ ID NO: 447 - DNA, 20 bp, synthetic construct
  source 1..20: mol_type = other DNA
gatgaagacctggtagagat

SEQ ID NO: 448 - DNA, 20 bp, synthetic construct
  source 1..20: mol_type = other DNA
tctgcacacaaggagtgtct

SEQ ID NO: 449 - DNA, 20 bp, synthetic construct
  source 1..20: mol_type = other DNA
gttccccgtcgatcttgggc

SEQ ID NO: 450 - DNA, 20 bp, synthetic construct
  source 1..20: mol_type = other DNA
tggttccagatataacgtcg

SEQ ID NO: 451 - DNA, 20 bp, synthetic construct
  source 1..20: mol_type = other DNA
ctccaccagctcctagaagg

SEQ ID NO: 452 - DNA, 20 bp, synthetic construct
  source 1..20: mol_type = other DNA
gtagagattggctgcgccag

SEQ ID NO: 453 - DNA, 20 bp, synthetic construct
  source 1..20: mol_type = other DNA
ctcactcgatctggtcggac

SEQ ID NO: 454 - DNA, 20 bp, synthetic construct
  source 1..20: mol_type = other DNA
tgggcggcagcacccggcac

SEQ ID NO: 455 - DNA, 20 bp, synthetic construct
  source 1..20: mol_type = other DNA
ccccaggcccttccccaccg

SEQ ID NO: 456 - DNA, 20 bp, synthetic construct
  source 1..20: mol_type = other DNA
ccatggctaccgcctgccca

SEQ ID NO: 457 - DNA, 20 bp, synthetic construct
  source 1..20: mol_type = other DNA
caggtcctactcggagggaa

SEQ ID NO: 458 - DNA, 20 bp, synthetic construct
  source 1..20: mol_type = other DNA
gcattggcgccacagctcca

SEQ ID NO: 459 - DNA, 20 bp, synthetic construct
  source 1..20: mol_type = other DNA
ggatgagccagtgggtgcat

SEQ ID NO: 460 - DNA, 20 bp, synthetic construct
  source 1..20: mol_type = other DNA
ccactggctcatccagtgcc

SEQ ID NO: 461 - DNA, 20 bp, synthetic construct
  source 1..20: mol_type = other DNA
ggtccaggacagagcagaca

SEQ ID NO: 462 - DNA, 20 bp, synthetic construct
  source 1..20: mol_type = other DNA
actcaccctcatggcatcca

SEQ ID NO: 463 - DNA, 20 bp, synthetic construct
  source 1..20: mol_type = other DNA
caagagaattgaagaagaag

SEQ ID NO: 464 - DNA, 20 bp, synthetic construct
  source 1..20: mol_type = other DNA
ctgagccaggtcctggggag

SEQ ID NO: 465 - DNA, 20 bp, synthetic construct
  source 1..20: mol_type = other DNA
tgggcaaggtacgagtggga

SEQ ID NO: 466 - DNA, 20 bp, synthetic construct
  source 1..20: mol_type = other DNA
aacccacagcgacacggtgg

SEQ ID NO: 467 - DNA, 20 bp, synthetic construct
  source 1..20: mol_type = other DNA
ttcctgggaaatctacggga

SEQ ID NO: 468 - DNA, 20 bp, synthetic construct
  source 1..20: mol_type = other DNA
ccaagaaagtcccgtccgag

SEQ ID NO: 469 - DNA, 20 bp, synthetic construct
  source 1..20: mol_type = other DNA
cacgcaggaggcgatggaga

SEQ ID NO: 470 - DNA, 20 bp, synthetic construct
  source 1..20: mol_type = other DNA
cactcgtaccttgcccatgt

SEQ ID NO: 471 - DNA, 20 bp, synthetic construct
  source 1..20: mol_type = other DNA
aggacctgtctgttcatctc

SEQ ID NO: 472 - DNA, 20 bp, synthetic construct
  source 1..20: mol_type = other DNA
ggagaagtacactgacacgc

SEQ ID NO: 473 - DNA, 20 bp, synthetic construct
  source 1..20: mol_type = other DNA
tccaggtctgcccaagatgg

SEQ ID NO: 474 - DNA, 20 bp, synthetic construct
  source 1..20: mol_type = other DNA
atcagggctaccgctgccat

SEQ ID NO: 475 - DNA, 20 bp, synthetic construct
  source 1..20: mol_type = other DNA
cgaagagctcgctccgcttg

SEQ ID NO: 476 - DNA, 20 bp, synthetic construct
  source 1..20: mol_type = other DNA
caggtcacgcggtggctggg

SEQ ID NO: 477 - DNA, 20 bp, synthetic construct
  source 1..20: mol_type = other DNA
ccgtctgctggatctcccgc

SEQ ID NO: 478 - DNA, 20 bp, synthetic construct
  source 1..20: mol_type = other DNA
tgaagaacagctcatagccc

SEQ ID NO: 479 - DNA, 20 bp, synthetic construct
  source 1..20: mol_type = other DNA
acagaaggacaccatcccgg

SEQ ID NO: 480 - DNA, 20 bp, synthetic construct
  source 1..20: mol_type = other DNA
gaaggtacctctgagatgca

SEQ ID NO: 481 - DNA, 20 bp, synthetic construct
  source 1..20: mol_type = other DNA
ctcagagagccaacaacggg

SEQ ID NO: 482 - DNA, 20 bp, synthetic construct
  source 1..20: mol_type = other DNA
gaccgagacaacaagaaggt

SEQ ID NO: 483 - DNA, 20 bp, synthetic construct
  source 1..20: mol_type = other DNA
cgaagcaggtcctactcgga

SEQ ID NO: 484 - DNA, 20 bp, synthetic construct
  source 1..20: mol_type = other DNA
gcaggatgtggtctcctcaa

SEQ ID NO: 485 - DNA, 20 bp, synthetic construct
  source 1..20: mol_type = other DNA
cctcgatcaggaggaacatg

SEQ ID NO: 486 - DNA, 20 bp, synthetic construct
  source 1..20: mol_type = other DNA
tgtacttctcctccgtctgc

SEQ ID NO: 487 - DNA, 20 bp, synthetic construct
  source 1..20: mol_type = other DNA
gaggtttcaggaaccgttgc

SEQ ID NO: 488 - DNA, 20 bp, synthetic construct
  source 1..20: mol_type = other DNA
ccatgccatcaacctgcgtg

SEQ ID NO: 489 - DNA, 20 bp, synthetic construct
  source 1..20: mol_type = other DNA
gcccagccaccgcgtgacct

SEQ ID NO: 490 - DNA, 20 bp, synthetic construct
  source 1..20: mol_type = other DNA
tggccggcccaagatcgacg

SEQ ID NO: 491 - DNA, 20 bp, synthetic construct
  source 1..20: mol_type = other DNA
gcaggtttacaaagtccttg

SEQ ID NO: 492 - DNA, 20 bp, synthetic construct
  source 1..20: mol_type = other DNA
agaaggtggggctttgacgc

SEQ ID NO: 493 - DNA, 20 bp, synthetic construct
  source 1..20: mol_type = other DNA
gacacagaaggacaccatcc

SEQ ID NO: 494 - DNA, 20 bp, synthetic construct
  source 1..20: mol_type = other DNA
gagaagtacactgacacgct

SEQ ID NO: 495 - DNA, 20 bp, synthetic construct
  source 1..20: mol_type = other DNA
tgcagtagcggccatagacg

SEQ ID NO: 496 - DNA, 20 bp, synthetic construct
  source 1..20: mol_type = other DNA
ccacagcgacacggtggagg

SEQ ID NO: 497 - DNA, 20 bp, synthetic construct
  source 1..20: mol_type = other DNA
tgacccttaccgtaagcccc

SEQ ID NO: 498 - DNA, 20 bp, synthetic construct
  source 1..20: mol_type = other DNA
tccatggctaccgcctgccc

SEQ ID NO: 499 - DNA, 20 bp, synthetic construct
  source 1..20: mol_type = other DNA
ctgcacacaaggagtgtctg

SEQ ID NO: 500 - DNA, 20 bp, synthetic construct
  source 1..20: mol_type = other DNA
gaagaacagctcatagccct

SEQ ID NO: 501 - DNA, 20 bp, synthetic construct
  source 1..20: mol_type = other DNA
gggctcacctgggacatctg

SEQ ID NO: 502 - DNA, 20 bp, synthetic construct
  source 1..20: mol_type = other DNA
acgaagcaggtcctactcgg

SEQ ID NO: 503 - DNA, 20 bp, synthetic construct
  source 1..20: mol_type = other DNA
cactcaccctcatggcatcc

SEQ ID NO: 504 - DNA, 20 bp, synthetic construct
  source 1..20: mol_type = other DNA
gcaggtcctactcggaggga

SEQ ID NO: 505 - DNA, 20 bp, synthetic construct
  source 1..20: mol_type = other DNA
aggtttcaggaaccgttgca

SEQ ID NO: 506 - DNA, 20 bp, synthetic construct
  source 1..20: mol_type = other DNA
caaatatcacctccttctcc

SEQ ID NO: 507 - RNA, 20 nt, synthetic construct
  source 1..20: mol_type = other RNA
gccgaacttctcacagcagg

SEQ ID NO: 508 - DNA, 20 bp, synthetic construct
  source 1..20: mol_type = other DNA
ggtttcaggaaccgttgcag

SEQ ID NO: 509 - DNA, 20 bp, synthetic construct
  source 1..20: mol_type = other DNA
tccaggacaaactacatcgc

SEQ ID NO: 510 - DNA, 20 bp, synthetic construct
  source 1..20: mol_type = other DNA
gcaggtaggaggtctcagac

SEQ ID NO: 511 - DNA, 20 bp, synthetic construct
  source 1..20: mol_type = other DNA
aaggagaggtgagacccagc

SEQ ID NO: 512 - DNA, 20 bp, synthetic construct
  source 1..20: mol_type = other DNA
cttcatctgcacgtcctccc

SEQ ID NO: 513 - DNA, 20 bp, synthetic construct
  source 1..20: mol_type = other DNA
gtcgagcaggaaggcatacc

SEQ ID NO: 514 - DNA, 20 bp, synthetic construct
  source 1..20: mol_type = other DNA
agcaggaaggcatacctgga

SEQ ID NO: 515 - DNA, 20 bp, synthetic construct
  source 1..20: mol_type = other DNA
tcctccaggtctgcccaaga

SEQ ID NO: 516 - DNA, 20 bp, synthetic construct
  source 1..20: mol_type = other DNA
ccacatgttcctcctgatcg

SEQ ID NO: 517 - DNA, 20 bp, synthetic construct
  source 1..20: mol_type = other DNA
ctcagaggtaccttctatca

SEQ ID NO: 518 - DNA, 20 bp, synthetic construct
  source 1..20: mol_type = other DNA
tcacgcactgagccaggtcc

SEQ ID NO: 519 - DNA, 20 bp, synthetic construct
  source 1..20: mol_type = other DNA
ctcaccagagatgaacagac

SEQ ID NO: 520 - DNA, 20 bp, synthetic construct
  source 1..20: mol_type = other DNA
tggcatccagggccagccgc

SEQ ID NO: 521 - DNA, 20 bp, synthetic construct
  source 1..20: mol_type = other DNA
ctgacaggccttgcaggatg

SEQ ID NO: 522 - DNA, 20 bp, synthetic construct
  source 1..20: mol_type = other DNA
ggaactcaagatcacctcgg

SEQ ID NO: 523 - DNA, 20 bp, synthetic construct
  source 1..20: mol_type = other DNA
tcgggtgcgtaccacttgag

SEQ ID NO: 524 - DNA, 20 bp, synthetic construct
  source 1..20: mol_type = other DNA
atctacaagtgagtgccagt

SEQ ID NO: 525 - DNA, 20 bp, synthetic construct
  source 1..20: mol_type = other DNA
tgagcagaagatgaaagggc

SEQ ID NO: 526 - DNA, 20 bp, synthetic construct
  source 1..20: mol_type = other DNA
agaagggcaggtgcgccgcg

SEQ ID NO: 527 - DNA, 20 bp, synthetic construct
  source 1..20: mol_type = other DNA
gcaagaggtgagcaccgggt

SEQ ID NO: 528 - DNA, 20 bp, synthetic construct
  source 1..20: mol_type = other DNA
ccaggtgagcgggcagaggt

SEQ ID NO: 529 - DNA, 20 bp, synthetic construct
  source 1..20: mol_type = other DNA
gccgtcacctgaggcgttgc

SEQ ID NO: 530 - DNA, 20 bp, synthetic construct
  source 1..20: mol_type = other DNA
ccaactcacatgagtcaacg

SEQ ID NO: 531 - DNA, 20 bp, synthetic construct
  source 1..20: mol_type = other DNA
tgctgcaccaggtgtccatg

SEQ ID NO: 532 - DNA, 20 bp, synthetic construct
  source 1..20: mol_type = other DNA
aagaagggcaggtgcgccgc

SEQ ID NO: 533 - DNA, 20 bp, synthetic construct
  source 1..20: mol_type = other DNA
gcaccaagtttgacacgctc

SEQ ID NO: 534 - DNA, 20 bp, synthetic construct
  source 1..20: mol_type = other DNA
ctccaggtacttcatcccca

SEQ ID NO: 535 - DNA, 20 bp, synthetic construct
  source 1..20: mol_type = other DNA
tacagtgtagtagctgtcgt

SEQ ID NO: 536 - DNA, 20 bp, synthetic construct
  source 1..20: mol_type = other DNA
ctccccaggcccgctcagca

SEQ ID NO: 537 - DNA, 20 bp, synthetic construct
  source 1..20: mol_type = other DNA
tacagttcgggtggacactc

SEQ ID NO: 538 - DNA, 20 bp, synthetic construct
  source 1..20: mol_type = other DNA
tgctgccgtagaagaagggc

SEQ ID NO: 539 - DNA, 20 bp, synthetic construct
  source 1..20: mol_type = other DNA
cggcacccagtgctttggag

SEQ ID NO: 540 - DNA, 20 bp, synthetic construct
  source 1..20: mol_type = other DNA
cggcccacgagcggatgccc

SEQ ID NO: 541 - DNA, 20 bp, synthetic construct
  source 1..20: mol_type = other DNA
ccgaccaggaacttgtgcag

SEQ ID NO: 542 - DNA, 20 bp, synthetic construct
  source 1..20: mol_type = other DNA
catagctccagacatcgctg

SEQ ID NO: 543 - DNA, 20 bp, synthetic construct
  source 1..20: mol_type = other DNA
ggtaccagggcatccgctcg

SEQ ID NO: 544 - DNA, 20 bp, synthetic construct
  source 1..20: mol_type = other DNA
ggcaagtactgcattcccga

SEQ ID NO: 545 - DNA, 20 bp, synthetic construct
  source 1..20: mol_type = other DNA
aatgagcttctccacctgcg

SEQ ID NO: 546 - DNA, 20 bp, synthetic construct
  source 1..20: mol_type = other DNA
cgggctcatctactgcctga

SEQ ID NO: 547 - DNA, 20 bp, synthetic construct
  source 1..20: mol_type = other DNA
cagggaagtggccgctcaag

SEQ ID NO: 548 - DNA, 20 bp, synthetic construct
  source 1..20: mol_type = other DNA
gtaggacaaggcctcccaca

SEQ ID NO: 549 - DNA, 20 bp, synthetic construct
  source 1..20: mol_type = other DNA
cgctgatcttggcgtagtgc

SEQ ID NO: 550 - DNA, 20 bp, synthetic construct
  source 1..20: mol_type = other DNA
tgccaggctgaggccgcgga

SEQ ID NO: 551 - DNA, 20 bp, synthetic construct
  source 1..20: mol_type = other DNA
ctacctcatcagccaagaca

SEQ ID NO: 552 - DNA, 20 bp, synthetic construct
  source 1..20: mol_type = other DNA
catagccgcccagcgagcgc

SEQ ID NO: 553 - DNA, 20 bp, synthetic construct
  source 1..20: mol_type = other DNA
caggttgcagggcagcccgt

SEQ ID NO: 554 - DNA, 20 bp, synthetic construct
  source 1..20: mol_type = other DNA
tcagatactccaccagctgc

SEQ ID NO: 555 - DNA, 20 bp, synthetic construct
  source 1..20: mol_type = other DNA
gatctacaagtgagtgccag

SEQ ID NO: 556 - DNA, 20 bp, synthetic construct
  source 1..20: mol_type = other DNA
ggagctatggggtcaccatg

SEQ ID NO: 557 - DNA, 20 bp, synthetic construct
  source 1..20: mol_type = other DNA
cacatacaggaacttgccgt

SEQ ID NO: 558 - DNA, 20 bp, synthetic construct
  source 1..20: mol_type = other DNA
cgcccagcgagcgcaggcac

SEQ ID NO: 559 - DNA, 20 bp, synthetic construct
  source 1..20: mol_type = other DNA
cggccacttccctgctgagc

SEQ ID NO: 560 - DNA, 20 bp, synthetic construct
  source 1..20: mol_type = other DNA
ggcctcagcctggcagggga

SEQ ID NO: 561 - DNA, 20 bp, synthetic construct
  source 1..20: mol_type = other DNA
cttgtagggcttctggccgt

SEQ ID NO: 562 - DNA, 20 bp, synthetic construct
  source 1..20: mol_type = other DNA
gagctatggggtcaccatgt

SEQ ID NO: 563 - DNA, 20 bp, synthetic construct
  source 1..20: mol_type = other DNA
ctgaggccgcggaaggagca

SEQ ID NO: 564 - DNA, 20 bp, synthetic construct
  source 1..20: mol_type = other DNA
ctgcccgctcacctggctca

SEQ ID NO: 565 - DNA, 20 bp, synthetic construct
  source 1..20: mol_type = other DNA
ctcatgagtgcgtacagttc

SEQ ID NO: 566 - DNA, 20 bp, synthetic construct
  source 1..20: mol_type = other DNA
gctccagacatcgctgcggc

SEQ ID NO: 567 - DNA, 20 bp, synthetic construct
  source 1..20: mol_type = other DNA
cagatactccaccagctgca

SEQ ID NO: 568 - DNA, 20 bp, synthetic construct
  source 1..20: mol_type = other DNA
gcggccacttccctgctgag

SEQ ID NO: 569 - DNA, 20 bp, synthetic construct
  source 1..20: mol_type = other DNA
ccgctgcacaagttcctggt

SEQ ID NO: 570 - DNA, 20 bp, synthetic construct
  source 1..20: mol_type = other DNA
actcatgagtgcgtacagtt

SEQ ID NO: 571 - DNA, 20 bp, synthetic construct
  source 1..20: mol_type = other DNA
gctccacggtcaggaagtcg

SEQ ID NO: 572 - DNA, 20 bp, synthetic construct
  source 1..20: mol_type = other DNA
gggcaggaagcagatcgacg

SEQ ID NO: 573 - DNA, 20 bp, synthetic construct
  source 1..20: mol_type = other DNA
aagccctacaaggcaggcgc

SEQ ID NO: 574 - DNA, 20 bp, synthetic construct
  source 1..20: mol_type = other DNA
catctccatgaccagcatga

SEQ ID NO: 575 - DNA, 20 bp, synthetic construct
  source 1..20: mol_type = other DNA
cgctgcggctggagaacttg

SEQ ID NO: 576 - DNA, 20 bp, synthetic construct
  source 1..20: mol_type = other DNA
ttcatcttctgctcaagccg

SEQ ID NO: 577 - DNA, 20 bp, synthetic construct
  source 1..20: mol_type = other DNA
gtccctcatctatgggaaga

SEQ ID NO: 578 - DNA, 20 bp, synthetic construct
  source 1..20: mol_type = other DNA
gggcgatcctcccacctgtg

SEQ ID NO: 579 - DNA, 20 bp, synthetic construct
  source 1..20: mol_type = other DNA
gtaccagggcatccgctcgt

SEQ ID NO: 580 - DNA, 20 bp, synthetic construct
  source 1..20: mol_type = other DNA
gccatcaaggtgctgaagca

SEQ ID NO: 581 - DNA, 20 bp, synthetic construct
  source 1..20: mol_type = other DNA
tcgccccgacttcctgaccg

SEQ ID NO: 582 - DNA, 20 bp, synthetic construct
  source 1..20: mol_type = other DNA
ggccagaagccctacaaggc

SEQ ID NO: 583 - DNA, 20 bp, synthetic construct
  source 1..20: mol_type = other DNA
gctgaggccgcggaaggagc

SEQ ID NO: 584 - DNA, 20 bp, synthetic construct
  source 1..20: mol_type = other DNA
gggcaagtactgcattcccg

SEQ ID NO: 585 - DNA, 20 bp, synthetic construct
  source 1..20: mol_type = other DNA
catggggatgaagtacctgg

SEQ ID NO: 586 - DNA, 20 bp, synthetic construct
  source 1..20: mol_type = other DNA
gcctcagcctggcaggggaa

SEQ ID NO: 587 - DNA, 20 bp, synthetic construct
  source 1..20: mol_type = other DNA
gaagaagggcaggtgcgccg

SEQ ID NO: 588 - DNA, 20 bp, synthetic construct
  source 1..20: mol_type = other DNA
tctcatagatcagaacatcc

SEQ ID NO: 589 - DNA, 20 bp, synthetic construct
  source 1..20: mol_type = other DNA
tctcggaggcggcgcgcagc

SEQ ID NO: 590 - DNA, 20 bp, synthetic construct
  source 1..20: mol_type = other DNA
tctctgggcctgacctgctt

SEQ ID NO: 591 - DNA, 20 bp, synthetic construct
  source 1..20: mol_type = other DNA
gagcagcggctgtacaaggt

SEQ ID NO: 592 - DNA, 20 bp, synthetic construct
  source 1..20: mol_type = other DNA
agacgttcagctgctgtcct

SEQ ID NO: 593 - DNA, 20 bp, synthetic construct
  source 1..20: mol_type = other DNA
cgagcagcggctgtacaagg

SEQ ID NO: 594 - DNA, 20 bp, synthetic construct
  source 1..20: mol_type = other DNA
cgcagccgtcccagttgcag

SEQ ID NO: 595 - DNA, 20 bp, synthetic construct
  source 1..20: mol_type = other DNA
gctgtacaaggtgggtcccg

SEQ ID NO: 596 - DNA, 20 bp, synthetic construct
  source 1..20: mol_type = other DNA
gggcagtcctgcagaaggac

SEQ ID NO: 597 - DNA, 20 bp, synthetic construct
  source 1..20: mol_type = other DNA
gcgccactaccgaaagcaca

SEQ ID NO: 598 - DNA, 20 bp, synthetic construct
  source 1..20: mol_type = other DNA
tcgcacagatggcactggaa

SEQ ID NO: 599 - DNA, 20 bp, synthetic construct
  source 1..20: mol_type = other DNA
ctgtacaaggtgggtcccgc

SEQ ID NO: 600 - DNA, 20 bp, synthetic construct
  source 1..20: mol_type = other DNA
tctcttcgccgctcggcctc

SEQ ID NO: 601 - DNA, 20 bp, synthetic construct
  source 1..20: mol_type = other DNA
cttcagttcgaacaccgtgc

SEQ ID NO: 602 - DNA, 20 bp, synthetic construct
  source 1..20: mol_type = other DNA
tacagccgctgctcgtcagg

SEQ ID NO: 603 - DNA, 20 bp, synthetic construct
  source 1..20: mol_type = other DNA
gatggcactggaatggccgg

SEQ ID NO: 604 - DNA, 20 bp, synthetic construct
  source 1..20: mol_type = other DNA
ttgtacagccgctgctcgtc

SEQ ID NO: 605 - DNA, 20 bp, synthetic construct
  source 1..20: mol_type = other DNA
ggcagtcctgcagaaggaca

SEQ ID NO: 606 - DNA, 20 bp, synthetic construct
  source 1..20: mol_type = other DNA
cgccactaccgaaagcacac

SEQ ID NO: 607 - DNA, 20 bp, synthetic construct
  source 1..20: mol_type = other DNA
agacgtcccaccaagggtct

SEQ ID NO: 608 - DNA, 20 bp, synthetic construct
  source 1..20: mol_type = other DNA
tcctcaggatgaccaactct

SEQ ID NO: 609 - DNA, 20 bp, synthetic construct
  source 1..20: mol_type = other DNA
gaactgaagcgcatcgtcga

SEQ ID NO: 610 - DNA, 20 bp, synthetic construct
  source 1..20: mol_type = other DNA
ccgccagtctcctccagccc

SEQ ID NO: 611 - DNA, 20 bp, synthetic construct
  source 1..20: mol_type = other DNA
ggcggtgaagagcctgaagc

SEQ ID NO: 612 - DNA, 20 bp, synthetic construct
  source 1..20: mol_type = other DNA
gagtgaaggtgggtaccact

SEQ ID NO: 613 - DNA, 20 bp, synthetic construct
  source 1..20: mol_type = other DNA
cggccacttccctgctgagc

SEQ ID NO: 614 - DNA, 20 bp, synthetic construct
  source 1..20: mol_type = other DNA
gagcactcactcgatctggt

SEQ ID NO: 615 - DNA, 20 bp, synthetic construct
  source 1..20: mol_type = other DNA
ctcagatgtggctgtgagca

SEQ ID NO: 616 - DNA, 20 bp, synthetic construct
  source 1..20: mol_type = other DNA
gttctgaatcacctccgggt

SEQ ID NO: 617 - DNA, 20 bp, synthetic construct
  source 1..20: mol_type = other DNA
gccatcaagtgtgtggtggt

SEQ ID NO: 618 - DNA, 20 bp, synthetic construct
  source 1..20: mol_type = other DNA
gggccagcacccagcgctgc

SEQ ID NO: 619 - DNA, 20 bp, synthetic construct
  source 1..20: mol_type = other DNA
ctcggccaggaaggcgtccg

SEQ ID NO: 620 - DNA, 20 bp, synthetic construct
  source 1..20: mol_type = other DNA
ccaggcaggtaagggcctgt

SEQ ID NO: 621 - DNA, 20 bp, synthetic construct
  source 1..20: mol_type = other DNA
cggcacccagtgctttggag

SEQ ID NO: 622 - DNA, 20 bp, synthetic construct
  source 1..20: mol_type = other DNA
caagagaattgaagaagaag

SEQ ID NO: 623 - DNA, 20 bp, synthetic construct
  source 1..20: mol_type = other DNA
ctgcgcacctggcattcatg

SEQ ID NO: 624 - DNA, 20 bp, synthetic construct
  source 1..20: mol_type = other DNA
tcactcaccctgttgtcttc

SEQ ID NO: 625 - DNA, 20 bp, synthetic construct
  source 1..20: mol_type = other DNA
gaggtttcaggaaccgttgc

SEQ ID NO: 626 - DNA, 20 bp, synthetic construct
  source 1..20: mol_type = other DNA
gctgatccacatctgctgga

SEQ ID NO: 627 - DNA, 20 bp, synthetic construct
  source 1..20: mol_type = other DNA
ccgaaatggctctgaggtgc

SEQ ID NO: 628 - DNA, 20 bp, synthetic construct
  source 1..20: mol_type = other DNA
catagccgcccagcgagcgc

SEQ ID NO: 629 - DNA, 20 bp, synthetic construct
  source 1..20: mol_type = other DNA
ctcagagagccaacaacggg

SEQ ID NO: 630 - DNA, 20 bp, synthetic construct
  source 1..20: mol_type = other DNA
gtagagattggctgcgccag

SEQ ID NO: 631 - DNA, 20 bp, synthetic construct
  source 1..20: mol_type = other DNA
ggccatcaagtgtgtggtgg

SEQ ID NO: 632 - DNA, 20 bp, synthetic construct
  source 1..20: mol_type = other DNA
cctcggccaggaaggcgtcc

SEQ ID NO: 633 - DNA, 20 bp, synthetic construct
  source 1..20: mol_type = other DNA
tcccaaactctgctacctgc

SEQ ID NO: 634 - DNA, 20 bp, synthetic construct
  source 1..20: mol_type = other DNA
ggtcatccctacgggttgat

SEQ ID NO: 635 - DNA, 20 bp, synthetic construct
  source 1..20: mol_type = other DNA
gcttacctcctccattatgt

SEQ ID NO: 636 - DNA, 20 bp, synthetic construct
  source 1..20: mol_type = other DNA
accctgaaaggaagtgaaaa

SEQ ID NO: 637 - DNA, 20 bp, synthetic construct
  source 1..20: mol_type = other DNA
cctcttccctgccaactacg

SEQ ID NO: 638 - DNA, 20 bp, synthetic construct
  source 1..20: mol_type = other DNA
tctggaagggcacaaaggtc

SEQ ID NO: 639 - DNA, 20 bp, synthetic construct
  source 1..20: mol_type = other DNA
ttcatcttctgctcaagccg

SEQ ID NO: 640 - DNA, 20 bp, synthetic construct
  source 1..20: mol_type = other DNA
gatgaagacctggtagagat

SEQ ID NO: 641 - DNA, 20 bp, synthetic construct
  source 1..20: mol_type = other DNA
tcctgaaatgagaaaagccg

SEQ ID NO: 642 - DNA, 20 bp, synthetic construct
  source 1..20: mol_type = other DNA
tgaagcatctgcgaggacga

SEQ ID NO: 643 - DNA, 20 bp, synthetic construct
  source 1..20: mol_type = other DNA
cttcgtcttctccatcagca

SEQ ID NO: 644 - DNA, 20 bp, synthetic construct
  source 1..20: mol_type = other DNA
cctggggtcaccttgcagtg

SEQ ID NO: 645 - DNA, 20 bp, synthetic construct
  source 1..20: mol_type = other DNA
gcagcgagcataggcttcca

SEQ ID NO: 646 - DNA, 20 bp, synthetic construct
  source 1..20: mol_type = other DNA
cccaccgcactcgctgttgg

SEQ ID NO: 647 - DNA, 20 bp, synthetic construct
  source 1..20: mol_type = other DNA
agatgaacagacaggtcctg

SEQ ID NO: 648 - DNA, 20 bp, synthetic construct
  source 1..20: mol_type = other DNA
agcactgccgtatccactcc

SEQ ID NO: 649 - DNA, 20 bp, synthetic construct
  source 1..20: mol_type = other DNA
gtgctctggtcaggctcgcg

SEQ ID NO: 650 - DNA, 20 bp, synthetic construct
  source 1..20: mol_type = other DNA
gtgagctggtgacacacaca

SEQ ID NO: 651 - DNA, 20 bp, synthetic construct
  source 1..20: mol_type = other DNA
cggccagttccaaaccctgg

SEQ ID NO: 652 - DNA, 20 bp, synthetic construct
  source 1..20: mol_type = other DNA
catgcagttctcacacactg

SEQ ID NO: 653 - DNA, 20 bp, synthetic construct
  source 1..20: mol_type = other DNA
caacacaatgataaaaacat

SEQ ID NO: 654 - DNA, 20 bp, synthetic construct
  source 1..20: mol_type = other DNA
agacttggtatgagcatgca

SEQ ID NO: 655 - DNA, 20 bp, synthetic construct
  source 1..20: mol_type = other DNA
tgcagatcccacaggcgccc

SEQ ID NO: 656 - DNA, 20 bp, synthetic construct
  source 1..20: mol_type = other DNA
cgtcccagtagatcctgctc

SEQ ID NO: 657 - DNA, 20 bp, synthetic construct
  source 1..20: mol_type = other DNA
ccctgtaggttcctcgtcta

SEQ ID NO: 658 - DNA, 20 bp, synthetic construct
  source 1..20: mol_type = other DNA
taaacagtgcccaagcctgg

SEQ ID NO: 659 - DNA, 20 bp, synthetic construct
  source 1..20: mol_type = other DNA
ccccacagatggtttcacga

SEQ ID NO: 660 - DNA, 20 bp, synthetic construct
  source 1..20: mol_type = other DNA
ttacttgggctgccatgtcc

SEQ ID NO: 661 - DNA, 20 bp, synthetic construct
  source 1..20: mol_type = other DNA
ctctcccgcatctaccccaa

SEQ ID NO: 662 - DNA, 20 bp, synthetic construct
  source 1..20: mol_type = other DNA
cttgagagaagtatggtggc

SEQ ID NO: 663 - DNA, 20 bp, synthetic construct
  source 1..20: mol_type = other DNA
aaagtatgccaggctggctt

SEQ ID NO: 664 - DNA, 20 bp, synthetic construct
  source 1..20: mol_type = other DNA
agaaggtggggctttgacgc

SEQ ID NO: 665 - DNA, 20 bp, synthetic construct
  source 1..20: mol_type = other DNA
tgatgagctgttcttccagg

SEQ ID NO: 666 - DNA, 20 bp, synthetic construct
  source 1..20: mol_type = other DNA
cccagaagccccagaagccg

SEQ ID NO: 667 - DNA, 20 bp, synthetic construct
  source 1..20: mol_type = other DNA
cgttaatgtgcactggtatc

SEQ ID NO: 668 - DNA, 20 bp, synthetic construct
  source 1..20: mol_type = other DNA
gcatggcattcattgaagag

SEQ ID NO: 669 - DNA, 20 bp, synthetic construct
  source 1..20: mol_type = other DNA
acagttgccgattacaggta

SEQ ID NO: 670 - DNA, 20 bp, synthetic construct
  source 1..20: mol_type = other DNA
cgggcccttaccgatgtaca

SEQ ID NO: 671 - DNA, 20 bp, synthetic construct
  source 1..20: mol_type = other DNA
tacagtgtagtagctgtcgt

SEQ ID NO: 672 - DNA, 20 bp, synthetic construct
  source 1..20: mol_type = other DNA
tgacccttaccgtaagcccc

SEQ ID NO: 673 - DNA, 20 bp, synthetic construct
  source 1..20: mol_type = other DNA
gatgtacatggagttggagt

SEQ ID NO: 674 - DNA, 20 bp, synthetic construct
  source 1..20: mol_type = other DNA
gatctacaagtgagtgccag

SEQ ID NO: 675 - DNA, 20 bp, synthetic construct
  source 1..20: mol_type = other DNA
ccgcctagaagcatttgcgg

SEQ ID NO: 676 - DNA, 20 bp, synthetic construct
  source 1..20: mol_type = other DNA
tatcaccaacataatggagg

SEQ ID NO: 677 - DNA, 20 bp, synthetic construct
  source 1..20: mol_type = other DNA
cacgaagctctccgatgtgt

SEQ ID NO: 678 - DNA, 20 bp, synthetic construct
  source 1..20: mol_type = other DNA
tcagccagctccttacatga

SEQ ID NO: 679 - DNA, 20 bp, synthetic construct
  source 1..20: mol_type = other DNA
attggttgtcccaggacgag

SEQ ID NO: 680 - DNA, 20 bp, synthetic construct
  source 1..20: mol_type = other DNA
cgctgcggctggagaacttg

SEQ ID NO: 681 - DNA, 20 bp, synthetic construct
  source 1..20: mol_type = other DNA
caccttcactctcaggaaca

SEQ ID NO: 682 - DNA, 20 bp, synthetic construct
  source 1..20: mol_type = other DNA
gggcgatcctcccacctgtg

SEQ ID NO: 683 - DNA, 20 bp, synthetic construct
  source 1..20: mol_type = other DNA
ccgacccagggtactacaac

SEQ ID NO: 684 - DNA, 20 bp, synthetic construct
  source 1..20: mol_type = other DNA
agccggccagttccaaaccc

SEQ ID NO: 685 - DNA, 20 bp, synthetic construct
  source 1..20: mol_type = other DNA
atggcctcctccatctgcag

SEQ ID NO: 686 - DNA, 20 bp, synthetic construct
  source 1..20: mol_type = other DNA
aaggagccgtgagtgttccc

SEQ ID NO: 687 - DNA, 20 bp, synthetic construct
  source 1..20: mol_type = other DNA
ggctgccagaaattgtttgg

SEQ ID NO: 688 - DNA, 20 bp, synthetic construct
  source 1..20: mol_type = other DNA
ctgcagctcctcctgtgagt

SEQ ID NO: 689 - DNA, 20 bp, synthetic construct
  source 1..20: mol_type = other DNA
caaatatcacctccttctcc

SEQ ID NO: 690 - DNA, 20 bp, synthetic construct
  source 1..20: mol_type = other DNA
tgctgccgtagaagaagggc

SEQ ID NO: 691 - DNA, 20 bp, synthetic construct
  source 1..20: mol_type = other DNA
tcagatactccaccagctgc

SEQ ID NO: 692 - DNA, 20 bp, synthetic construct
  source 1..20: mol_type = other DNA
gaggaggtaagctctagagc

SEQ ID NO: 693 - DNA, 20 bp, synthetic construct
  source 1..20: mol_type = other DNA
atcatacccacctagtgtga

SEQ ID NO: 694 - DNA, 20 bp, synthetic construct
  source 1..20: mol_type = other DNA
atgtacatggagttggagtt

SEQ ID NO: 695 - DNA, 20 bp, synthetic construct
  source 1..20: mol_type = other DNA
agaagtcccctggggagctc

SEQ ID NO: 696 - DNA, 20 bp, synthetic construct
  source 1..20: mol_type = other DNA
attttgcagacgctctcagc

SEQ ID NO: 697 - DNA, 20 bp, synthetic construct
  source 1..20: mol_type = other DNA
ccagaatgttggcagcccga

SEQ ID NO: 698 - DNA, 20 bp, synthetic construct
  source 1..20: mol_type = other DNA
tcatacccacctagtgtgaa

SEQ ID NO: 699 - DNA, 20 bp, synthetic construct
  source 1..20: mol_type = other DNA
ggaatccagtcgctggccct

SEQ ID NO: 700 - DNA, 20 bp, synthetic construct
  source 1..20: mol_type = other DNA
gcaccaggccctccaggagc

SEQ ID NO: 701 - DNA, 20 bp, synthetic construct
  source 1..20: mol_type = other DNA
catctccatgaccagcatga

SEQ ID NO: 702 - DNA, 20 bp, synthetic construct
  source 1..20: mol_type = other DNA
cagatactccaccagctgca

SEQ ID NO: 703 - DNA, 20 bp, synthetic construct
  source 1..20: mol_type = other DNA
cccgcactgattgcactgga

SEQ ID NO: 704 - DNA, 20 bp, synthetic construct
  source 1..20: mol_type = other DNA
tcaggtatggggcagcgcct

SEQ ID NO: 705 - DNA, 20 bp, synthetic construct
  source 1..20: mol_type = other DNA
gcctcggccaggaaggcgtc

SEQ ID NO: 706 - DNA, 20 bp, synthetic construct
  source 1..20: mol_type = other DNA
atgggagatccggcagccct

SEQ ID NO: 707 - DNA, 20 bp, synthetic construct
  source 1..20: mol_type = other DNA
cgagctggggttccacagcg

SEQ ID NO: 708 - DNA, 20 bp, synthetic construct
  source 1..20: mol_type = other DNA
gcaagaggtgagcaccgggt

SEQ ID NO: 709 - DNA, 20 bp, synthetic construct
  source 1..20: mol_type = other DNA
ggcccagacagcagacgcca

SEQ ID NO: 710 - DNA, 20 bp, synthetic construct
  source 1..20: mol_type = other DNA
tggccggcccaagatcgacg

SEQ ID NO: 711 - DNA, 20 bp, synthetic construct
  source 1..20: mol_type = other DNA
cactcgtaccttgcccatgt

SEQ ID NO: 712 - DNA, 20 bp, synthetic construct
  source 1..20: mol_type = other DNA
gcccaggacctctgagcgaa

SEQ ID NO: 713 - DNA, 20 bp, synthetic construct
  source 1..20: mol_type = other DNA
gcatttgaagggcttctccc

SEQ ID NO: 714 - DNA, 20 bp, synthetic construct
  source 1..20: mol_type = other DNA
cttctccatcagcatggcgt

SEQ ID NO: 715 - DNA, 20 bp, synthetic construct
  source 1..20: mol_type = other DNA
catactttgaagatcgtcat

SEQ ID NO: 716 - DNA, 20 bp, synthetic construct
  source 1..20: mol_type = other DNA
ggtcctgcatggtatagagc

SEQ ID NO: 717 - DNA, 20 bp, synthetic construct
  source 1..20: mol_type = other DNA
catgtccaggagtttgttga

SEQ ID NO: 718 - DNA, 20 bp, synthetic construct
  source 1..20: mol_type = other DNA
caaggtgaccccaggcagca

SEQ ID NO: 719 - DNA, 20 bp, synthetic construct
  source 1..20: mol_type = other DNA
cagggaagtggccgctcaag

SEQ ID NO: 720 - DNA, 20 bp, synthetic construct
  source 1..20: mol_type = other DNA
cgcacgaggaaggagccgtc

SEQ ID NO: 721 - DNA, 20 bp, synthetic construct
  source 1..20: mol_type = other DNA
tgtacttctcctccgtctgc

SEQ ID NO: 722 - DNA, 20 bp, synthetic construct
  source 1..20: mol_type = other DNA
cctttgcccatgtggatctg

SEQ ID NO: 723 - DNA, 20 bp, synthetic construct
  source 1..20: mol_type = other DNA
tgtggcgccaatgcacccac

SEQ ID NO: 724 - DNA, 20 bp, synthetic construct
  source 1..20: mol_type = other DNA
ggaggtaagctctagagcag

SEQ ID NO: 725 - DNA, 20 bp, synthetic construct
  source 1..20: mol_type = other DNA
caaccctggcttctatgtag

SEQ ID NO: 726 - DNA, 20 bp, synthetic construct
  source 1..20: mol_type = other DNA
caggatgactgggtacctgc

SEQ ID NO: 727 - DNA, 20 bp, synthetic construct
  source 1..20: mol_type = other DNA
agaccccttacgagagatcg

SEQ ID NO: 728 - DNA, 20 bp, synthetic construct
  source 1..20: mol_type = other DNA
cgcccagccaccgcgtgacc

SEQ ID NO: 729 - DNA, 20 bp, synthetic construct
  source 1..20: mol_type = other DNA
tccaggacaaactacatcgc

SEQ ID NO: 730 - DNA, 20 bp, synthetic construct
  source 1..20: mol_type = other DNA
gcttcaaagagagggtgaga

SEQ ID NO: 731 - DNA, 20 bp, synthetic construct
  source 1..20: mol_type = other DNA
gtgtcccaggaactgcatcc

SEQ ID NO: 732 - DNA, 20 bp, synthetic construct
  source 1..20: mol_type = other DNA
ccccagctcgtcatcctcca

SEQ ID NO: 733 - DNA, 20 bp, synthetic construct
  source 1..20: mol_type = other DNA
cagagatggagaagtcccct

SEQ ID NO: 734 - DNA, 20 bp, synthetic construct
  source 1..20: mol_type = other DNA
gcagggctcaggacaaaaag

SEQ ID NO: 735 - DNA, 20 bp, synthetic construct
  source 1..20: mol_type = other DNA
ctctgaggtttggtttggag

SEQ ID NO: 736 - DNA, 20 bp, synthetic construct
  source 1..20: mol_type = other DNA
ctccaggcatgtgagaggat

SEQ ID NO: 737 - DNA, 20 bp, synthetic construct
  source 1..20: mol_type = other DNA
cagcacgcaggggaccagga

SEQ ID NO: 738 - DNA, 20 bp, synthetic construct
  source 1..20: mol_type = other DNA
tcactctatatgctctgtac

SEQ ID NO: 739 - DNA, 20 bp, synthetic construct
  source 1..20: mol_type = other DNA
ctacctcatcagccaagaca

SEQ ID NO: 740 - DNA, 20 bp, synthetic construct
  source 1..20: mol_type = other DNA
gcaggtttacaaagtccttg

SEQ ID NO: 741 - DNA, 20 bp, synthetic construct
  source 1..20: mol_type = other DNA
ccgggagagcgagagcaccg

SEQ ID NO: 742 - DNA, 20 bp, synthetic construct
  source 1..20: mol_type = other DNA
cccaccatcacgccctggga

SEQ ID NO: 743 - DNA, 20 bp, synthetic construct
  source 1..20: mol_type = other DNA
ctctactcatctgtaagcgc

SEQ ID NO: 744 - DNA, 20 bp, synthetic construct
  source 1..20: mol_type = other DNA
tacaaaccttgagagaagta

SEQ ID NO: 745 - DNA, 20 bp, synthetic construct
  source 1..20: mol_type = other DNA
cctacgggttgatgggtgaa

SEQ ID NO: 746 - DNA, 20 bp, synthetic construct
  source 1..20: mol_type = other DNA
tgctcttagaaagataaacc

SEQ ID NO: 747 - DNA, 20 bp, synthetic construct
  source 1..20: mol_type = other DNA
ggcaagtactgcattcccga

SEQ ID NO: 748 - DNA, 20 bp, synthetic construct
  source 1..20: mol_type = other DNA
catggggatgaagtacctgg

SEQ ID NO: 749 - DNA, 20 bp, synthetic construct
  source 1..20: mol_type = other DNA
tgccatagtatttcagatcc

SEQ ID NO: 750 - DNA, 20 bp, synthetic construct
  source 1..20: mol_type = other DNA
gcccttactctcttcatcaa

SEQ ID NO: 751 - DNA, 20 bp, synthetic construct
  source 1..20: mol_type = other DNA
aactgggctggcggccagga

SEQ ID NO: 752 - DNA, 20 bp, synthetic construct
  source 1..20: mol_type = other DNA
tcttgtaggtgtgctgatgt

SEQ ID NO: 753 - DNA, 20 bp, synthetic construct
  source 1..20: mol_type = other DNA
ccttcccaggatgaagatga

SEQ ID NO: 754 - DNA, 20 bp, synthetic construct
  source 1..20: mol_type = other DNA
gggagatccggcagccctcg

SEQ ID NO: 755 - DNA, 20 bp, synthetic construct
  source 1..20: mol_type = other DNA
ctggaggaggaatgccaatg

SEQ ID NO: 756 - DNA, 20 bp, synthetic construct
  source 1..20: mol_type = other DNA
ctaccttcagattggagagc

SEQ ID NO: 757 - DNA, 20 bp, synthetic construct
  source 1..20: mol_type = other DNA
gctacctgtgagtggccagg

SEQ ID NO: 758 - DNA, 20 bp, synthetic construct
  source 1..20: mol_type = other DNA
ttcctgggaaatctacggga

SEQ ID NO: 759 - DNA, 20 bp, synthetic construct
  source 1..20: mol_type = other DNA
actcacgaggccgtttgaac

SEQ ID NO: 760 - DNA, 20 bp, synthetic construct
  source 1..20: mol_type = other DNA
acacgccacattcaaagcca

SEQ ID NO: 761 - DNA, 20 bp, synthetic construct
  source 1..20: mol_type = other DNA
ccttgctgactatttcaaga

SEQ ID NO: 762 - DNA, 20 bp, synthetic construct
  source 1..20: mol_type = other DNA
tctaacctgggtaagggatg

SEQ ID NO: 763 - DNA, 20 bp, synthetic construct
  source 1..20: mol_type = other DNA
gaccagtctctggctcacta

SEQ ID NO: 764 - DNA, 20 bp, synthetic construct
  source 1..20: mol_type = other DNA
tccaggttctgaatcacctc

SEQ ID NO: 765 - DNA, 20 bp, synthetic construct
  source 1..20: mol_type = other DNA
cttctgtaatacacttggag

SEQ ID NO: 766 - DNA, 20 bp, synthetic construct
  source 1..20: mol_type = other DNA
ccaactcacatgagtcaacg

SEQ ID NO: 767 - DNA, 20 bp, synthetic construct
  source 1..20: mol_type = other DNA
ggatggttcttaggtaggtg

SEQ ID NO: 768 - DNA, 20 bp, synthetic construct
  source 1..20: mol_type = other DNA
tccagcagtgattcataatc

SEQ ID NO: 769 - DNA, 20 bp, synthetic construct
  source 1..20: mol_type = other DNA
cctgtctcttcaggaaaccg

SEQ ID NO: 770 - DNA, 20 bp, synthetic construct
  source 1..20: mol_type = other DNA
tctattgaaggagcagggac

SEQ ID NO: 771 - DNA, 20 bp, synthetic construct
  source 1..20: mol_type = other DNA
cgggctcatctactgcctga

SEQ ID NO: 772 - DNA, 20 bp, synthetic construct
  source 1..20: mol_type = other DNA
cgggagagcgagagcaccgc

SEQ ID NO: 773 - DNA, 20 bp, synthetic construct
  source 1..20: mol_type = other DNA
cttcatctgcacgtcctccc

SEQ ID NO: 774 - DNA, 20 bp, synthetic construct
  source 1..20: mol_type = other DNA
ggagaagtacactgacacgc

SEQ ID NO: 775 - DNA, 20 bp, synthetic construct
  source 1..20: mol_type = other DNA
gcccagccaccgcgtgacct

SEQ ID NO: 776 - DNA, 20 bp, synthetic construct
  source 1..20: mol_type = other DNA
caggcagagaacttactcat

SEQ ID NO: 777 - DNA, 20 bp, synthetic construct
  source 1..20: mol_type = other DNA
gagacttggtatgagcatgc

SEQ ID NO: 778 - DNA, 20 bp, synthetic construct
  source 1..20: mol_type = other DNA
gtcgggcccccagcacctgt

SEQ ID NO: 779 - DNA, 20 bp, synthetic construct
  source 1..20: mol_type = other DNA
ttgcaagtctgacatttgaa

SEQ ID NO: 780 - DNA, 20 bp, synthetic construct
  source 1..20: mol_type = other DNA
tgagtagagctttgtcgagc

SEQ ID NO: 781 - DNA, 20 bp, synthetic construct
  source 1..20: mol_type = other DNA
ggactcactgctccaggatg

SEQ ID NO: 782 - DNA, 20 bp, synthetic construct
  source 1..20: mol_type = other DNA
ccagggggcaaccgtgtctg

SEQ ID NO: 783 - DNA, 20 bp, synthetic construct
  source 1..20: mol_type = other DNA
ccgcaggcgcgtcttccagg

SEQ ID NO: 784 - DNA, 20 bp, synthetic construct
  source 1..20: mol_type = other DNA
atctacaagtgagtgccagt

SEQ ID NO: 785 - DNA, 20 bp, synthetic construct
  source 1..20: mol_type = other DNA
cgccagatcacgtggagccg

SEQ ID NO: 786 - DNA, 20 bp, synthetic construct
  source 1..20: mol_type = other DNA
ctcctggaaacaggacacaa

SEQ ID NO: 787 - DNA, 20 bp, synthetic construct
  source 1..20: mol_type = other DNA
tcctcgcagatgcttcagat

SEQ ID NO: 788 - DNA, 20 bp, synthetic construct
  source 1..20: mol_type = other DNA
tggcatccagggccagccgc

SEQ ID NO: 789 - DNA, 20 bp, synthetic construct
  source 1..20: mol_type = other DNA
cagagcttgtgcattgacat

SEQ ID NO: 790 - DNA, 20 bp, synthetic construct
  source 1..20: mol_type = other DNA
tttcagatccaggatactga

SEQ ID NO: 791 - DNA, 20 bp, synthetic construct
  source 1..20: mol_type = other DNA
cctcgatcaggaggaacatg

SEQ ID NO: 792 - DNA, 20 bp, synthetic construct
  source 1..20: mol_type = other DNA
ggtccaggacagagcagaca

SEQ ID NO: 793 - DNA, 20 bp, synthetic construct
  source 1..20: mol_type = other DNA
gagggctcacctgggacatc

SEQ ID NO: 794 - DNA, 20 bp, synthetic construct
  source 1..20: mol_type = other DNA
ctatcaaaaccattcgggaa

SEQ ID NO: 795 - DNA, 20 bp, synthetic construct
  source 1..20: mol_type = other DNA
tgtactcgttgtcctcaatg

SEQ ID NO: 796 - DNA, 20 bp, synthetic construct
  source 1..20: mol_type = other DNA
gcgtctgcaaaatgacccac

SEQ ID NO: 797 - DNA, 20 bp, synthetic construct
  source 1..20: mol_type = other DNA
gccctcaacttccagacccc

SEQ ID NO: 798 - DNA, 20 bp, synthetic construct
  source 1..20: mol_type = other DNA
ccaggcagagaacttactca

SEQ ID NO: 799 - DNA, 20 bp, synthetic construct
  source 1..20: mol_type = other DNA
gcatactttgaagatcgtca

SEQ ID NO: 800 - DNA, 20 bp, synthetic construct
  source 1..20: mol_type = other DNA
agggctcacctgggacatct

SEQ ID NO: 801 - DNA, 20 bp, synthetic construct
  source 1..20: mol_type = other DNA
tcttcgtggctttctgtgga

SEQ ID NO: 802 - DNA, 20 bp, synthetic construct
  source 1..20: mol_type = other DNA
tgttctcagagagccaacaa

SEQ ID NO: 803 - DNA, 20 bp, synthetic construct
  source 1..20: mol_type = other DNA
ctctccagagaccagaagat

SEQ ID NO: 804 - DNA, 20 bp, synthetic construct
  source 1..20: mol_type = other DNA
cttacccaggttagagccaa

SEQ ID NO: 805 - DNA, 20 bp, synthetic construct
  source 1..20: mol_type = other DNA
cctcccagccatccgtcctg

SEQ ID NO: 806 - DNA, 20 bp, synthetic construct
  source 1..20: mol_type = other DNA
tagttgagctgcaaagagaa

SEQ ID NO: 807 - DNA, 20 bp, synthetic construct
  source 1..20: mol_type = other DNA
ccatgagtaagttctctgcc

SEQ ID NO: 808 - DNA, 20 bp, synthetic construct
  source 1..20: mol_type = other DNA
cctgcagagaaacacacttg

SEQ ID NO: 809 - DNA, 20 bp, synthetic construct
  source 1..20: mol_type = other DNA
cggtgcccacctcgaggctg

SEQ ID NO: 810 - DNA, 20 bp, synthetic construct
  source 1..20: mol_type = other DNA
ttgcagctgcttcatgaggt

SEQ ID NO: 811 - DNA, 20 bp, synthetic construct
  source 1..20: mol_type = other DNA
gaaggtacctctgagatgca

SEQ ID NO: 812 - DNA, 20 bp, synthetic construct
  source 1..20: mol_type = other DNA
cagccccagctcatatgcac

SEQ ID NO: 813 - DNA, 20 bp, synthetic construct
  source 1..20: mol_type = other DNA
gtccctcatctatgggaaga

SEQ ID NO: 814 - DNA, 20 bp, synthetic construct
  source 1..20: mol_type = other DNA
atcagggctaccgctgccat

SEQ ID NO: 815 - DNA, 20 bp, synthetic construct
  source 1..20: mol_type = other DNA
gccagaccacggggtgcctg

SEQ ID NO: 816 - DNA, 20 bp, synthetic construct
  source 1..20: mol_type = other DNA
acttacggcacccggagctt

SEQ ID NO: 817 - DNA, 20 bp, synthetic construct
  source 1..20: mol_type = other DNA
cgtagggatgaccaacccgg

SEQ ID NO: 818 - DNA, 20 bp, synthetic construct
  source 1..20: mol_type = other DNA
cacgcaggaggcgatggaga

SEQ ID NO: 819 - DNA, 20 bp, synthetic construct
  source 1..20: mol_type = other DNA
ctgcagttttagcatctgtg

SEQ ID NO: 820 - DNA, 20 bp, synthetic construct
  source 1..20: mol_type = other DNA
tacactgatacatccctcga

SEQ ID NO: 821 - DNA, 20 bp, synthetic construct
  source 1..20: mol_type = other DNA
catcatcttcatcctgggaa

SEQ ID NO: 822 - DNA, 20 bp, synthetic construct
  source 1..20: mol_type = other DNA
cccttacctgcctggcagcc

SEQ ID NO: 823 - DNA, 20 bp, synthetic construct
  source 1..20: mol_type = other DNA
tacagttcgggtggacactc

SEQ ID NO: 824 - DNA, 20 bp, synthetic construct
  source 1..20: mol_type = other DNA
cctccatctgcaggggagct

SEQ ID NO: 825 - DNA, 20 bp, synthetic construct
  source 1..20: mol_type = other DNA
cttcctgcccacacagtgat

SEQ ID NO: 826 - DNA, 20 bp, synthetic construct
  source 1..20: mol_type = other DNA
ctcatgagtgcgtacagttc

SEQ ID NO: 827 - DNA, 20 bp, synthetic construct
  source 1..20: mol_type = other DNA
tgactgccacagatccacat

SEQ ID NO: 828 - DNA, 20 bp, synthetic construct
  source 1..20: mol_type = other DNA
ccgctgcacaagttcctggt

SEQ ID NO: 829 - DNA, 20 bp, synthetic construct
  source 1..20: mol_type = other DNA
ttcctgcccacacagtgata

SEQ ID NO: 830 - DNA, 20 bp, synthetic construct
  source 1..20: mol_type = other DNA
gaagccccagaagccgtggt

SEQ ID NO: 831 - DNA, 20 bp, synthetic construct
  source 1..20: mol_type = other DNA
gcaggtaggaggtctcagac

SEQ ID NO: 832 - DNA, 20 bp, synthetic construct
  source 1..20: mol_type = other DNA
cgtagagccgaaccagccgc

SEQ ID NO: 833 - DNA, 20 bp, synthetic construct
  source 1..20: mol_type = other DNA
cttgtagggcttctggccgt

SEQ ID NO: 834 - DNA, 20 bp, synthetic construct
  source 1..20: mol_type = other DNA
aagccctacaaggcaggcgc

SEQ ID NO: 835 - DNA, 20 bp, synthetic construct
  source 1..20: mol_type = other DNA
cactcaccctcatggcatcc

SEQ ID NO: 836 - DNA, 20 bp, synthetic construct
  source 1..20: mol_type = other DNA
cgcagatcaaagagagcctg

SEQ ID NO: 837 - DNA, 20 bp, synthetic construct
  source 1..20: mol_type = other DNA
gggcaagtactgcattcccg

SEQ ID NO: 838 - DNA, 20 bp, synthetic construct
  source 1..20: mol_type = other DNA
actcatgagtgcgtacagtt

SEQ ID NO: 839 - DNA, 20 bp, synthetic construct
  source 1..20: mol_type = other DNA
gcaggtcctactcggaggga

SEQ ID NO: 840 - DNA, 20 bp, synthetic construct
  source 1..20: mol_type = other DNA
atgtggaagtcacgcccgtt

SEQ ID NO: 841 - DNA, 20 bp, synthetic construct
  source 1..20: mol_type = other DNA
atagttgagctgcaaagaga

SEQ ID NO: 842 - DNA, 20 bp, synthetic construct
  source 1..20: mol_type = other DNA
ttgagagaagtatggtggca

SEQ ID NO: 843 - DNA, 20 bp, synthetic construct
  source 1..20: mol_type = other DNA
ctgagccaggtcctggggag

SEQ ID NO: 844 - DNA, 20 bp, synthetic construct
  source 1..20: mol_type = other DNA
gccctgctcgtggtgaccga

SEQ ID NO: 845 - DNA, 20 bp, synthetic construct
  source 1..20: mol_type = other DNA
gttccctgccaactacgtgg

SEQ ID NO: 846 - DNA, 20 bp, synthetic construct
  source 1..20: mol_type = other DNA
ccagaagttccccaagctcc

SEQ ID NO: 847 - DNA, 20 bp, synthetic construct
  source 1..20: mol_type = other DNA
tctgtgccaagagataaagc

SEQ ID NO: 848 - DNA, 20 bp, synthetic construct
  source 1..20: mol_type = other DNA
agcgtctgcaaaatgaccca

SEQ ID NO: 849 - DNA, 20 bp, synthetic construct
  source 1..20: mol_type = other DNA
tgaagcagctgcaacaccag

SEQ ID NO: 850 - DNA, 20 bp, synthetic construct
  source 1..20: mol_type = other DNA
ccatgccatcaacctgcgtg

SEQ ID NO: 851 - DNA, 20 bp, synthetic construct
  source 1..20: mol_type = other DNA
ggccggtctgtggaaacaca

SEQ ID NO: 852 - DNA, 20 bp, synthetic construct
  source 1..20: mol_type = other DNA
gccacagcccatggtccctg

SEQ ID NO: 853 - DNA, 20 bp, synthetic construct
  source 1..20: mol_type = other DNA
ctgcccgctcacctggctca

SEQ ID NO: 854 - DNA, 20 bp, synthetic construct
  source 1..20: mol_type = other DNA
aggacctgtctgttcatctc

SEQ ID NO: 855 - DNA, 20 bp, synthetic construct
  source 1..20: mol_type = other DNA
gcgccctgacaactgtccag

SEQ ID NO: 856 - DNA, 20 bp, synthetic construct
  source 1..20: mol_type = other DNA
tgggagatccggcagccctc

SEQ ID NO: 857 - DNA, 20 bp, synthetic construct
  source 1..20: mol_type = other DNA
tgtacatggagttggagttg

SEQ ID NO: 858 - DNA, 20 bp, synthetic construct
  source 1..20: mol_type = other DNA
cagtgagggcgtccctccgg

SEQ ID NO: 859 - DNA, 20 bp, synthetic construct
  source 1..20: mol_type = other DNA
gctccagacatcgctgcggc

SEQ ID NO: 860 - DNA, 20 bp, synthetic construct
  source 1..20: mol_type = other DNA
aagggaagataatggaacgg

SEQ ID NO: 861 - DNA, 20 bp, synthetic construct
  source 1..20: mol_type = other DNA
cgcgccagatcacgtggagc

SEQ ID NO: 862 - DNA, 20 bp, synthetic construct
  source 1..20: mol_type = other DNA
tgagctgcagccacagccca

SEQ ID NO: 863 - DNA, 20 bp, synthetic construct
  source 1..20: mol_type = other DNA
actcacccaggaaggaaggc

SEQ ID NO: 864 - DNA, 20 bp, synthetic construct
  source 1..20: mol_type = other DNA
gaatttatcatttcgtggtg

SEQ ID NO: 865 - DNA, 20 bp, synthetic construct
  source 1..20: mol_type = other DNA
ggttccttccttgtaggcca

SEQ ID NO: 866 - DNA, 20 bp, synthetic construct
  source 1..20: mol_type = other DNA
accgagacaacaagaaggtg

SEQ ID NO: 867 - DNA, 20 bp, synthetic construct
  source 1..20: mol_type = other DNA
agatggagactttatatgct

SEQ ID NO: 868 - DNA, 20 bp, synthetic construct
  source 1..20: mol_type = other DNA
ggcagcggagacagtaagtg

SEQ ID NO: 869 - DNA, 20 bp, synthetic construct
  source 1..20: mol_type = other DNA
gatggagccgccgatccaca

SEQ ID NO: 870 - DNA, 20 bp, synthetic construct
  source 1..20: mol_type = other DNA
ctccaccagctcctagaagg

SEQ ID NO: 871 - DNA, 20 bp, synthetic construct
  source 1..20: mol_type = other DNA
cagatacctggtggaaatgg

SEQ ID NO: 872 - DNA, 20 bp, synthetic construct
  source 1..20: mol_type = other DNA
caggtcctactcggagggaa

SEQ ID NO: 873 - DNA, 20 bp, synthetic construct
  source 1..20: mol_type = other DNA
caggttgcagggcagcccgt

SEQ ID NO: 874 - DNA, 20 bp, synthetic construct
  source 1..20: mol_type = other DNA
gtaggacaaggcctcccaca

SEQ ID NO: 875 - DNA, 20 bp, synthetic construct
  source 1..20: mol_type = other DNA
gactgacatggaacagggga

SEQ ID NO: 876 - DNA, 20 bp, synthetic construct
  source 1..20: mol_type = other DNA
tcttacctctcaatctgcag

SEQ ID NO: 877 - DNA, 20 bp, synthetic construct
  source 1..20: mol_type = other DNA
aaaccttgagagaagtatgg

SEQ ID NO: 878 - DNA, 20 bp, synthetic construct
  source 1..20: mol_type = other DNA
tacttacggcacccggagct

SEQ ID NO: 879 - DNA, 20 bp, synthetic construct
  source 1..20: mol_type = other DNA
ctctggcacactgtggggga

SEQ ID NO: 880 - DNA, 20 bp, synthetic construct
  source 1..20: mol_type = other DNA
agctcaccaatctgacaagc

SEQ ID NO: 881 - DNA, 20 bp, synthetic construct
  source 1..20: mol_type = other DNA
agaagggcaggtgcgccgcg

SEQ ID NO: 882 - DNA, 20 bp, synthetic construct
  source 1..20: mol_type = other DNA
tcatgaggttggcctcggcc

SEQ ID NO: 883 - DNA, 20 bp, synthetic construct
  source 1..20: mol_type = other DNA
acggaggaagaagattgccc

SEQ ID NO: 884 - DNA, 20 bp, synthetic construct
  source 1..20: mol_type = other DNA
aggaggtaagctctagagca

SEQ ID NO: 885 - DNA, 20 bp, synthetic construct
  source 1..20: mol_type = other DNA
actgacatggaacaggggaa

SEQ ID NO: 886 - DNA, 20 bp, synthetic construct
  source 1..20: mol_type = other DNA
tcttcatcaaatacaaggag

SEQ ID NO: 887 - DNA, 20 bp, synthetic construct
  source 1..20: mol_type = other DNA
cgctgatcttggcgtagtgc

SEQ ID NO: 888 - DNA, 20 bp, synthetic construct
  source 1..20: mol_type = other DNA
ccacagcccatggtccctga

SEQ ID NO: 889 - DNA, 20 bp, synthetic construct
  source 1..20: mol_type = other DNA
tcaccttgcagtggggaagc

SEQ ID NO: 890 - DNA, 20 bp, synthetic construct
  source 1..20: mol_type = other DNA
ggcaggcgtagttgcagagg

SEQ ID NO: 891 - DNA, 20 bp, synthetic construct
  source 1..20: mol_type = other DNA
gtctgtcaagaagaacttgg

SEQ ID NO: 892 - DNA, 20 bp, synthetic construct
  source 1..20: mol_type = other DNA
ccgcctcaccaggttctcaa

SEQ ID NO: 893 - DNA, 20 bp, synthetic construct
  source 1..20: mol_type = other DNA
gcggcagaggtgcagcacct

SEQ ID NO: 894 - DNA, 20 bp, synthetic construct
  source 1..20: mol_type = other DNA
ctctgccgcagcctcgaggt

SEQ ID NO: 895 - DNA, 20 bp, synthetic construct
  source 1..20: mol_type = other DNA
gaatccagtcgctggccctt

SEQ ID NO: 896 - DNA, 20 bp, synthetic construct
  source 1..20: mol_type = other DNA
gcccacaggcattgcagaca

SEQ ID NO: 897 - DNA, 20 bp, synthetic construct
  source 1..20: mol_type = other DNA
gacagaaatggctgcaacca

SEQ ID NO: 898 - DNA, 20 bp, synthetic construct
  source 1..20: mol_type = other DNA
agcgcagaaaggcaaattca

SEQ ID NO: 899 - DNA, 20 bp, synthetic construct
  source 1..20: mol_type = other DNA
caggtcacgcggtggctggg

SEQ ID NO: 900 - DNA, 20 bp, synthetic construct
  source 1..20: mol_type = other DNA
gcggccacttccctgctgag

SEQ ID NO: 901 - DNA, 20 bp, synthetic construct
  source 1..20: mol_type = other DNA
gtactacaacgggcacacga

SEQ ID NO: 902 - DNA, 20 bp, synthetic construct
  source 1..20: mol_type = other DNA
ctcgtcacaacaacaggtgc

SEQ ID NO: 903 - DNA, 20 bp, synthetic construct
  source 1..20: mol_type = other DNA
ttgcagccctcgattccagc

SEQ ID NO: 904 - DNA, 20 bp, synthetic construct
  source 1..20: mol_type = other DNA
actgagccaggtcctgggga

SEQ ID NO: 905 - DNA, 20 bp, synthetic construct
  source 1..20: mol_type = other DNA
agatccagtagtgggaaaga

SEQ ID NO: 906 - DNA, 20 bp, synthetic construct
  source 1..20: mol_type = other DNA
ctgaacttgtcgtctactgc

SEQ ID NO: 907 - DNA, 20 bp, synthetic construct
  source 1..20: mol_type = other DNA
cactcgccgctcctgcgcca

SEQ ID NO: 908 - DNA, 20 bp, synthetic construct
  source 1..20: mol_type = other DNA
ggagctatggggtcaccatg

SEQ ID NO: 909 - DNA, 20 bp, synthetic construct
  source 1..20: mol_type = other DNA
cgagagagtgagaccttcgt

SEQ ID NO: 910 - DNA, 20 bp, synthetic construct
  source 1..20: mol_type = other DNA
tacaacaccatgaggacata

SEQ ID NO: 911 - DNA, 20 bp, synthetic construct
  source 1..20: mol_type = other DNA
tgaagaacagctcatagccc

SEQ ID NO: 912 - DNA, 20 bp, synthetic construct
  source 1..20: mol_type = other DNA
cgcagcagtctggagaaggc

SEQ ID NO: 913 - DNA, 20 bp, synthetic construct
  source 1..20: mol_type = other DNA
tcttgaaggggctcactaaa

SEQ ID NO: 914 - DNA, 20 bp, synthetic construct
  source 1..20: mol_type = other DNA
ctggaagtcatgcccgttgg

SEQ ID NO: 915 - DNA, 20 bp, synthetic construct
  source 1..20: mol_type = other DNA
cctatccaggtacctgaccg

SEQ ID NO: 916 - DNA, 20 bp, synthetic construct
  source 1..20: mol_type = other DNA
ttctgtctattgaaggagca

SEQ ID NO: 917 - DNA, 20 bp, synthetic construct
  source 1..20: mol_type = other DNA
ccgtctgctggatctcccgc

SEQ ID NO: 918 - DNA, 20 bp, synthetic construct
  source 1..20: mol_type = other DNA
ccaggtgagcgggcagaggt

SEQ ID NO: 919 - DNA, 20 bp, synthetic construct
  source 1..20: mol_type = other DNA
acagcacaagaagctggctg

SEQ ID NO: 920 - DNA, 20 bp, synthetic construct
  source 1..20: mol_type = other DNA
cgaggaggagatccagtagt

SEQ ID NO: 921 - DNA, 20 bp, synthetic construct
  source 1..20: mol_type = other DNA
gaccgagacaacaagaaggt

SEQ ID NO: 922 - DNA, 20 bp, synthetic construct
  source 1..20: mol_type = other DNA
ggccagaagccctacaaggc

SEQ ID NO: 923 - DNA, 20 bp, synthetic construct
  source 1..20: mol_type = other DNA
ggcggcaggcgtagttgcag

SEQ ID NO: 924 - DNA, 20 bp, synthetic construct
  source 1..20: mol_type = other DNA
cctcgtcacaacaacaggtg

SEQ ID NO: 925 - DNA, 20 bp, synthetic construct
  source 1..20: mol_type = other DNA
caccatgaggacatatggat

SEQ ID NO: 926 - DNA, 20 bp, synthetic construct
  source 1..20: mol_type = other DNA
ttacactgatacatccctcg

SEQ ID NO: 927 - DNA, 20 bp, synthetic construct
  source 1..20: mol_type = other DNA
ggccacctgaggacgcactc

SEQ ID NO: 928 - DNA, 20 bp, synthetic construct
  source 1..20: mol_type = other DNA
tccagaagttccccaagctc

SEQ ID NO: 929 - DNA, 20 bp, synthetic construct
  source 1..20: mol_type = other DNA
cctccaccacctccccgctg

SEQ ID NO: 930 - DNA, 20 bp, synthetic construct
  source 1..20: mol_type = other DNA
tccatggctaccgcctgccc

SEQ ID NO: 931 - DNA, 20 bp, synthetic construct
  source 1..20: mol_type = other DNA
ccactggctcatccagtgcc

SEQ ID NO: 932 - DNA, 20 bp, synthetic construct
  source 1..20: mol_type = other DNA
tggagtccaggccgctgtcg

SEQ ID NO: 933 - DNA, 20 bp, synthetic construct
  source 1..20: mol_type = other DNA
catccgcaggcagcgagcat

SEQ ID NO: 934 - DNA, 20 bp, synthetic construct
  source 1..20: mol_type = other DNA
ggcacagaggcacagagctt

SEQ ID NO: 935 - DNA, 20 bp, synthetic construct
  source 1..20: mol_type = other DNA
ttcctctataggtatcttga

SEQ ID NO: 936 - DNA, 20 bp, synthetic construct
  source 1..20: mol_type = other DNA
caccatcagcaggtcccgca

SEQ ID NO: 937 - DNA, 20 bp, synthetic construct
  source 1..20: mol_type = other DNA
aatgagcttctccacctgcg

SEQ ID NO: 938 - DNA, 20 bp, synthetic construct
  source 1..20: mol_type = other DNA
gaacttaccagccttcgctt

SEQ ID NO: 939 - DNA, 20 bp, synthetic construct
  source 1..20: mol_type = other DNA
ggccactgtcaatagagaga

SEQ ID NO: 940 - DNA, 20 bp, synthetic construct
  source 1..20: mol_type = other DNA
tacacctatatattcctcgt

SEQ ID NO: 941 - DNA, 20 bp, synthetic construct
  source 1..20: mol_type = other DNA
gagcagggctggggagaagg

SEQ ID NO: 942 - DNA, 20 bp, synthetic construct
  source 1..20: mol_type = other DNA
ccacatgttcctcctgatcg

SEQ ID NO: 943 - DNA, 20 bp, synthetic construct
  source 1..20: mol_type = other DNA
gctccacggtcaggaagtcg

SEQ ID NO: 944 - DNA, 20 bp, synthetic construct
  source 1..20: mol_type = other DNA
gcaccaagtttgacacgctc

SEQ ID NO: 945 - DNA, 20 bp, synthetic construct
  source 1..20: mol_type = other DNA
agttggaggaatccagtcgc

SEQ ID NO: 946 - DNA, 20 bp, synthetic construct
  source 1..20: mol_type = other DNA
cttccacatgagcgtggtca

SEQ ID NO: 947 - DNA, 20 bp, synthetic construct
  source 1..20: mol_type = other DNA
ctcttacctcttcctccgcg

SEQ ID NO: 948 - DNA, 20 bp, synthetic construct
  source 1..20: mol_type = other DNA
tcctctataggtatcttgaa

SEQ ID NO: 949 - DNA, 20 bp, synthetic construct
  source 1..20: mol_type = other DNA
ggtgttgcagctgcttcatg

SEQ ID NO: 950 - DNA, 20 bp, synthetic construct
  source 1..20: mol_type = other DNA
tctgcacacaaggagtgtct

SEQ ID NO: 951 - DNA, 20 bp, synthetic construct
  source 1..20: mol_type = other DNA
accgcccagacgactggcca

SEQ ID NO: 952 - DNA, 20 bp, synthetic construct
  source 1..20: mol_type = other DNA
agcagagtttgggatccagc

SEQ ID NO: 953 - DNA, 20 bp, synthetic construct
  source 1..20: mol_type = other DNA
ctcactcgatctggtcggac

SEQ ID NO: 954 - DNA, 20 bp, synthetic construct
  source 1..20: mol_type = other DNA
gagaagtacactgacacgct

SEQ ID NO: 955 - DNA, 20 bp, synthetic construct
  source 1..20: mol_type = other DNA
ggtaccagggcatccgctcg

SEQ ID NO: 956 - DNA, 20 bp, synthetic construct
  source 1..20: mol_type = other DNA
acagagagggagaagtcccc

SEQ ID NO: 957 - DNA, 20 bp, synthetic construct
  source 1..20: mol_type = other DNA
gagctatggggtcaccatgt

SEQ ID NO: 958 - DNA, 20 bp, synthetic construct
  source 1..20: mol_type = other DNA
gcattgacattggttgtccc

SEQ ID NO: 959 - DNA, 20 bp, synthetic construct
  source 1..20: mol_type = other DNA
tgggcaaggtacgagtggga

SEQ ID NO: 960 - DNA, 20 bp, synthetic construct
  source 1..20: mol_type = other DNA
tcctccaggtctgcccaaga

SEQ ID NO: 961 - DNA, 20 bp, synthetic construct
  source 1..20: mol_type = other DNA
acagagatggagaagtcccc

SEQ ID NO: 962 - DNA, 20 bp, synthetic construct
  source 1..20: mol_type = other DNA
acctggaaggtcttccgctc

SEQ ID NO: 963 - DNA, 20 bp, synthetic construct
  source 1..20: mol_type = other DNA
agagatggagaagtcccctg

SEQ ID NO: 964 - DNA, 20 bp, synthetic construct
  source 1..20: mol_type = other DNA
cttacggcacccggagcttg

SEQ ID NO: 965 - DNA, 20 bp, synthetic construct
  source 1..20: mol_type = other DNA
actcacctgataagaggcag

SEQ ID NO: 966 - DNA, 20 bp, synthetic construct
  source 1..20: mol_type = other DNA
ccatggctaccgcctgccca

SEQ ID NO: 967 - DNA, 20 bp, synthetic construct
  source 1..20: mol_type = other DNA
gccggtccaccaggatgggt

SEQ ID NO: 968 - DNA, 20 bp, synthetic construct
  source 1..20: mol_type = other DNA
agttgagctgcaaagagaag

SEQ ID NO: 969 - DNA, 20 bp, synthetic construct
  source 1..20: mol_type = other DNA
gcccatggtccctgagggaa

SEQ ID NO: 970 - DNA, 20 bp, synthetic construct
  source 1..20: mol_type = other DNA
cacagttgccgattacaggt

SEQ ID NO: 971 - DNA, 20 bp, synthetic construct
  source 1..20: mol_type = other DNA
gcagggctggggagaaggtg

SEQ ID NO: 972 - DNA, 20 bp, synthetic construct
  source 1..20: mol_type = other DNA
agtgccatggctgctctccc

SEQ ID NO: 973 - DNA, 20 bp, synthetic construct
  source 1..20: mol_type = other DNA
tcacgcactgagccaggtcc

SEQ ID NO: 974 - DNA, 20 bp, synthetic construct
  source 1..20: mol_type = other DNA
agaagtcgcagcgacccgag

SEQ ID NO: 975 - DNA, 20 bp, synthetic construct
  source 1..20: mol_type = other DNA
tgctgcaccaggtgtccatg

SEQ ID NO: 976 - DNA, 20 bp, synthetic construct
  source 1..20: mol_type = other DNA
tcagcagggaggccaactcc

SEQ ID NO: 977 - DNA, 20 bp, synthetic construct
  source 1..20: mol_type = other DNA
cctccagagtgtggttgtgg

SEQ ID NO: 978 - DNA, 20 bp, synthetic construct
  source 1..20: mol_type = other DNA
gcgaggaggagatccagtag

SEQ ID NO: 979 - DNA, 20 bp, synthetic construct
  source 1..20: mol_type = other DNA
gacctggaaggtcttccgct

SEQ ID NO: 980 - DNA, 20 bp, synthetic construct
  source 1..20: mol_type = other DNA
tgggtaagggatgcggccgt

SEQ ID NO: 981 - DNA, 20 bp, synthetic construct
  source 1..20: mol_type = other DNA
caggacctggagcagcgcag

SEQ ID NO: 982 - DNA, 20 bp, synthetic construct
  source 1..20: mol_type = other DNA
cacacaaggagtgtctgggg

SEQ ID NO: 983 - DNA, 20 bp, synthetic construct
  source 1..20: mol_type = other DNA
ctgtctcttcaggaaaccgc

SEQ ID NO: 984 - DNA, 20 bp, synthetic construct
  source 1..20: mol_type = other DNA
caatgtcaatgcacaagctc

SEQ ID NO: 985 - DNA, 20 bp, synthetic construct
  source 1..20: mol_type = other DNA
aacctttctgagaatgctcc

SEQ ID NO: 986 - DNA, 20 bp, synthetic construct
  source 1..20: mol_type = other DNA
ccgaccaggaacttgtgcag

SEQ ID NO: 987 - DNA, 20 bp, synthetic construct
  source 1..20: mol_type = other DNA
tccagcacagcctcatgagt

SEQ ID NO: 988 - DNA, 20 bp, synthetic construct
  source 1..20: mol_type = other DNA
gtcacgcaccggcatggaca

SEQ ID NO: 989 - DNA, 20 bp, synthetic construct
  source 1..20: mol_type = other DNA
cccttcggtcaccacgagca

SEQ ID NO: 990 - DNA, 20 bp, synthetic construct
  source 1..20: mol_type = other DNA
cctgggacatctgggggcgc

SEQ ID NO: 991 - DNA, 20 bp, synthetic construct
  source 1..20: mol_type = other DNA
cgaagagctcgctccgcttg

SEQ ID NO: 992 - DNA, 20 bp, synthetic construct
  source 1..20: mol_type = other DNA
tgccaggctgaggccgcgga

SEQ ID NO: 993 - DNA, 20 bp, synthetic construct
  source 1..20: mol_type = other DNA
ttacacctatatattcctcg

SEQ ID NO: 994 - DNA, 20 bp, synthetic construct
  source 1..20: mol_type = other DNA
aatccagtcgctggcccttg

SEQ ID NO: 995 - DNA, 20 bp, synthetic construct
  source 1..20: mol_type = other DNA
cggcccacgagcggatgccc

SEQ ID NO: 996 - DNA, 20 bp, synthetic construct
  source 1..20: mol_type = other DNA
agcaggaaggcatacctgga

SEQ ID NO: 997 - DNA, 20 bp, synthetic construct
  source 1..20: mol_type = other DNA
ctcaccagagatgaacagac

SEQ ID NO: 998 - DNA, 20 bp, synthetic construct
  source 1..20: mol_type = other DNA
ctggattacctcttgccctc

SEQ ID NO: 999 - DNA, 20 bp, synthetic construct
  source 1..20: mol_type = other DNA
cctgcagattgcagaaggca

SEQ ID NO: 1000 - DNA, 20 bp, synthetic construct
  source 1..20: mol_type = other DNA
ctgcgcaggtagtcaaaggt

SEQ ID NO: 1001 - DNA, 20 bp, synthetic construct
  source 1..20: mol_type = other DNA
agatgcagtcgggcactcac

SEQ ID NO: 1002 - DNA, 20 bp, synthetic construct
  source 1..20: mol_type = other DNA
gggcggtgctacaactgggc

SEQ ID NO: 1003 - DNA, 20 bp, synthetic construct
  source 1..20: mol_type = other DNA
gctgcagtcgattgtactga

SEQ ID NO: 1004 - DNA, 20 bp, synthetic construct
  source 1..20: mol_type = other DNA
gaagaagggcaggtgcgccg

SEQ ID NO: 1005 - DNA, 20 bp, synthetic construct
  source 1..20: mol_type = other DNA
tgcagcgacagcccatccgc

SEQ ID NO: 1006 - DNA, 20 bp, synthetic construct
  source 1..20: mol_type = other DNA
tgcagtggtcctcaatggac

SEQ ID NO: 1007 - DNA, 20 bp, synthetic construct
  source 1..20: mol_type = other DNA
gccgtcacctgaggcgttgc

SEQ ID NO: 1008 - DNA, 20 bp, synthetic construct
  source 1..20: mol_type = other DNA
acctgttgttgtgacgaggc

SEQ ID NO: 1009 - DNA, 20 bp, synthetic construct
  source 1..20: mol_type = other DNA
acaggatgactgggtacctg

SEQ ID NO: 1010 - DNA, 20 bp, synthetic construct
  source 1..20: mol_type = other DNA
ccgcactgattgcactggaa

SEQ ID NO: 1011 - DNA, 20 bp, synthetic construct
  source 1..20: mol_type = other DNA
cctcagacacggttgccccc

SEQ ID NO: 1012 - DNA, 20 bp, synthetic construct
  source 1..20: mol_type = other DNA
tcccaggtcacgcggtggct

SEQ ID NO: 1013 - DNA, 20 bp, synthetic construct
  source 1..20: mol_type = other DNA
ctactcacgggatggggagc

SEQ ID NO: 1014 - DNA, 20 bp, synthetic construct
  source 1..20: mol_type = other DNA
acgactggccagggcgcctg

SEQ ID NO: 1015 - DNA, 20 bp, synthetic construct
  source 1..20: mol_type = other DNA
ctcagaggtaccttctatca

SEQ ID NO: 1016 - DNA, 20 bp, synthetic construct
  source 1..20: mol_type = other DNA
acgcactgagccaggtcctg

SEQ ID NO: 1017 - DNA, 20 bp, synthetic construct
  source 1..20: mol_type = other DNA
gtcctcttcgtggctttctg

SEQ ID NO: 1018 - DNA, 20 bp, synthetic construct
  source 1..20: mol_type = other DNA
tcgccccgacttcctgaccg

SEQ ID NO: 1019 - DNA, 20 bp, synthetic construct
  source 1..20: mol_type = other DNA
gatgacctgtgacggggcag

SEQ ID NO: 1020 - DNA, 20 bp, synthetic construct
  source 1..20: mol_type = other DNA
gtaccagggcatccgctcgt

SEQ ID NO: 1021 - DNA, 20 bp, synthetic construct
  source 1..20: mol_type = other DNA
gcacgaggaaggagccgtca

SEQ ID NO: 1022 - DNA, 20 bp, synthetic construct
  source 1..20: mol_type = other DNA
aggttgtctgtaaagacaag

SEQ ID NO: 1023 - DNA, 20 bp, synthetic construct
  source 1..20: mol_type = other DNA
tgaagaggattccatccagc

SEQ ID NO: 1024 - DNA, 20 bp, synthetic construct
  source 1..20: mol_type = other DNA
acagctctggcacactgtgg

SEQ ID NO: 1025 - DNA, 20 bp, synthetic construct
  source 1..20: mol_type = other DNA
ccccttcggtcaccacgagc

SEQ ID NO: 1026 - DNA, 20 bp, synthetic construct
  source 1..20: mol_type = other DNA
gggcaggaagcagatcgacg

SEQ ID NO: 1027 - DNA, 20 bp, synthetic construct
  source 1..20: mol_type = other DNA
cagtaagtgtggcatcacca

SEQ ID NO: 1028 - DNA, 20 bp, synthetic construct
  source 1..20: mol_type = other DNA
cttaccttgtcagaaaatgg

SEQ ID NO: 1029 - DNA, 20 bp, synthetic construct
  source 1..20: mol_type = other DNA
gccgaacttctcacagcagg

SEQ ID NO: 1030 - DNA, 20 bp, synthetic construct
  source 1..20: mol_type = other DNA
tgcagtagcggccatagacg

SEQ ID NO: 1031 - DNA, 20 bp, synthetic construct
  source 1..20: mol_type = other DNA
ctgacaggccttgcaggatg

SEQ ID NO: 1032 - DNA, 20 bp, synthetic construct
  source 1..20: mol_type = other DNA
aggtttcaggaaccgttgca

SEQ ID NO: 1033 - DNA, 20 bp, synthetic construct
  source 1..20: mol_type = other DNA
gactcactctgaggccacaa

SEQ ID NO: 1034 - DNA, 20 bp, synthetic construct
  source 1..20: mol_type = other DNA
cgtcctcaggtggccagtga

SEQ ID NO: 1035 - DNA, 20 bp, synthetic construct
  source 1..20: mol_type = other DNA
catgtggaagtcacgcccgt

SEQ ID NO: 1036 - DNA, 20 bp, synthetic construct
  source 1..20: mol_type = other DNA
cgggctcactggtgtaatgg

SEQ ID NO: 1037 - DNA, 20 bp, synthetic construct
  source 1..20: mol_type = other DNA
ttaccgtcagccgctctcgg

SEQ ID NO: 1038 - DNA, 20 bp, synthetic construct
  source 1..20: mol_type = other DNA
tcgggtgcgtaccacttgag

SEQ ID NO: 1039 - DNA, 20 bp, synthetic construct
  source 1..20: mol_type = other DNA
ctgcacacaaggagtgtctg

SEQ ID NO: 1040 - DNA, 20 bp, synthetic construct
  source 1..20: mol_type = other DNA
gttccccgtcgatcttgggc

SEQ ID NO: 1041 - DNA, 20 bp, synthetic construct
  source 1..20: mol_type = other DNA
gcagatcaaagagagcctgc

SEQ ID NO: 1042 - DNA, 20 bp, synthetic construct
  source 1..20: mol_type = other DNA
ggaggaggacgctgatcagc

SEQ ID NO: 1043 - DNA, 20 bp, synthetic construct
  source 1..20: mol_type = other DNA
gtcctgaaagagtcaagata

SEQ ID NO: 1044 - DNA, 20 bp, synthetic construct
  source 1..20: mol_type = other DNA
tttccaggagcctgactacg

SEQ ID NO: 1045 - DNA, 20 bp, synthetic construct
  source 1..20: mol_type = other DNA
aagaagggcaggtgcgccgc

SEQ ID NO: 1046 - DNA, 20 bp, synthetic construct
  source 1..20: mol_type = other DNA
ggctcacctgggacatctgg

SEQ ID NO: 1047 - DNA, 20 bp, synthetic construct
  source 1..20: mol_type = other DNA
cttgcagccctcgattccag

SEQ ID NO: 1048 - DNA, 20 bp, synthetic construct
  source 1..20: mol_type = other DNA
tcacgcaccggcatggacac

SEQ ID NO: 1049 - DNA, 20 bp, synthetic construct
  source 1..20: mol_type = other DNA
cacagtgtgtgagaactgca

SEQ ID NO: 1050 - DNA, 20 bp, synthetic construct
  source 1..20: mol_type = other DNA
gtcgagcaggaaggcatacc

SEQ ID NO: 1051 - DNA, 20 bp, synthetic construct
  source 1..20: mol_type = other DNA
cacacgcaagtgagtgcggc

SEQ ID NO: 1052 - DNA, 20 bp, synthetic construct
  source 1..20: mol_type = other DNA
ctccaggtacttcatcccca

SEQ ID NO: 1053 - DNA, 20 bp, synthetic construct
  source 1..20: mol_type = other DNA
ctccccaggcccgctcagca

SEQ ID NO: 1054 - DNA, 20 bp, synthetic construct
  source 1..20: mol_type = other DNA
cttaccgatgtacatggagt

SEQ ID NO: 1055 - DNA, 20 bp, synthetic construct
  source 1..20: mol_type = other DNA
cctcgcacaacacgtgagtg

SEQ ID NO: 1056 - DNA, 20 bp, synthetic construct
  source 1..20: mol_type = other DNA
ggtttcaggaaccgttgcag

SEQ ID NO: 1057 - DNA, 20 bp, synthetic construct
  source 1..20: mol_type = other DNA
cccggcactggatgagccag

SEQ ID NO: 1058 - DNA, 20 bp, synthetic construct
  source 1..20: mol_type = other DNA
gaaacactacctggtacaca

SEQ ID NO: 1059 - DNA, 20 bp, synthetic construct
  source 1..20: mol_type = other DNA
ttaccttcccgctggaatcg

SEQ ID NO: 1060 - DNA, 20 bp, synthetic construct
  source 1..20: mol_type = other DNA
catagctccagacatcgctg

SEQ ID NO: 1061 - DNA, 20 bp, synthetic construct
  source 1..20: mol_type = other DNA
tggttccagatataacgtcg

SEQ ID NO: 1062 - DNA, 20 bp, synthetic construct
  source 1..20: mol_type = other DNA
agagctcagggtgacaggtg

SEQ ID NO: 1063 - DNA, 20 bp, synthetic construct
  source 1..20: mol_type = other DNA
gacaagttcagagagctcca

SEQ ID NO: 1064 - DNA, 20 bp, synthetic construct
  source 1..20: mol_type = other DNA
cagcacaagaagctggctga

SEQ ID NO: 1065 - DNA, 20 bp, synthetic construct
  source 1..20: mol_type = other DNA
ttgcaggtacgcaggcccca

SEQ ID NO: 1066 - DNA, 20 bp, synthetic construct
  source 1..20: mol_type = other DNA
gtaccttgaaagttggcata

SEQ ID NO: 1067 - DNA, 20 bp, synthetic construct
  source 1..20: mol_type = other DNA
cttgaaggggctcactaaag

SEQ ID NO: 1068 - DNA, 20 bp, synthetic construct
  source 1..20: mol_type = other DNA
ccacctcgaggctgcggcag

SEQ ID NO: 1069 - DNA, 20 bp, synthetic construct
  source 1..20: mol_type = other DNA
agaagcgagccccatcgatg

SEQ ID NO: 1070 - DNA, 20 bp, synthetic construct
  source 1..20: mol_type = other DNA
aggaggactcactggagaac

SEQ ID NO: 1071 - DNA, 20 bp, synthetic construct
  source 1..20: mol_type = other DNA
gtcatccttcccggaaacca

SEQ ID NO: 1072 - DNA, 20 bp, synthetic construct
  source 1..20: mol_type = other DNA
gctgaggccgcggaaggagc

SEQ ID NO: 1073 - DNA, 20 bp, synthetic construct
  source 1..20: mol_type = other DNA
ggcgcaggagcggcgagtgg

SEQ ID NO: 1074 - DNA, 20 bp, synthetic construct
  source 1..20: mol_type = other DNA
gtaggccatggctttgaatg

SEQ ID NO: 1075 - DNA, 20 bp, synthetic construct
  source 1..20: mol_type = other DNA
gatggagactttatatgctg

SEQ ID NO: 1076 - DNA, 20 bp, synthetic construct
  source 1..20: mol_type = other DNA
aacccacagcgacacggtgg

SEQ ID NO: 1077 - DNA, 20 bp, synthetic construct
  source 1..20: mol_type = other DNA
ggccaggatggttcttaggt

SEQ ID NO: 1078 - DNA, 20 bp, synthetic construct
  source 1..20: mol_type = other DNA
acgaagcaggtcctactcgg

SEQ ID NO: 1079 - DNA, 20 bp, synthetic construct
  source 1..20: mol_type = other DNA
cacgaggaaggagccgtcag

SEQ ID NO: 1080 - DNA, 20 bp, synthetic construct
  source 1..20: mol_type = other DNA
ccttcttgaaatagtcagca

SEQ ID NO: 1081 - DNA, 20 bp, synthetic construct
  source 1..20: mol_type = other DNA
ccggcactggatgagccagt

SEQ ID NO: 1082 - DNA, 20 bp, synthetic construct
  source 1..20: mol_type = other DNA
agggcatgtcaatattactg

SEQ ID NO: 1083 - DNA, 20 bp, synthetic construct
  source 1..20: mol_type = other DNA
cttctgtctattgaaggagc

SEQ ID NO: 1084 - DNA, 20 bp, synthetic construct
  source 1..20: mol_type = other DNA
agtcctgaaagagtcaagat

SEQ ID NO: 1085 - DNA, 20 bp, synthetic construct
  source 1..20: mol_type = other DNA
ctctcttacctcttcctccg

SEQ ID NO: 1086 - DNA, 20 bp, synthetic construct
  source 1..20: mol_type = other DNA
aaacactacctggtacacac

SEQ ID NO: 1087 - DNA, 20 bp, synthetic construct
  source 1..20: mol_type = other DNA
cctctataggtatcttgaag

SEQ ID NO: 1088 - DNA, 20 bp, synthetic construct
  source 1..20: mol_type = other DNA
gcattggcgccacagctcca

SEQ ID NO: 1089 - DNA, 20 bp, synthetic construct
  source 1..20: mol_type = other DNA
gtttccaggagcctgactac

SEQ ID NO: 1090 - DNA, 20 bp, synthetic construct
  source 1..20: mol_type = other DNA
cacatacaggaacttgccgt

SEQ ID NO: 1091 - DNA, 20 bp, synthetic construct
  source 1..20: mol_type = other DNA
gcaggatgtggtctcctcaa

SEQ ID NO: 1092 - DNA, 20 bp, synthetic construct
  source 1..20: mol_type = other DNA
gcagatggaggaggccatcc

SEQ ID NO: 1093 - DNA, 20 bp, synthetic construct
  source 1..20: mol_type = other DNA
ggaactcaagatcacctcgg

SEQ ID NO: 1094 - DNA, 20 bp, synthetic construct
  source 1..20: mol_type = other DNA
tgtaccttgaaagttggcat

SEQ ID NO: 1095 - DNA, 20 bp, synthetic construct
  source 1..20: mol_type = other DNA
tccaggtctgcccaagatgg

SEQ ID NO: 1096 - DNA, 20 bp, synthetic construct
  source 1..20: mol_type = other DNA
gcggtgaagagcctgaagca

SEQ ID NO: 1097 - DNA, 20 bp, synthetic construct
  source 1..20: mol_type = other DNA
tattatgtctgctaccccag

SEQ ID NO: 1098 - DNA, 20 bp, synthetic construct
  source 1..20: mol_type = other DNA
agagacaggtaaagctctca

SEQ ID NO: 1099 - DNA, 20 bp, synthetic construct
  source 1..20: mol_type = other DNA
ccacagcgacacggtggagg

SEQ ID NO: 1100 - DNA, 20 bp, synthetic construct
  source 1..20: mol_type = other DNA
agagaagggtagccagtacc

SEQ ID NO: 1101 - DNA, 20 bp, synthetic construct
  source 1..20: mol_type = other DNA
tgacgttacctcgtgcggcc

SEQ ID NO: 1102 - DNA, 20 bp, synthetic construct
  source 1..20: mol_type = other DNA
cgactggccagggcgcctgt

SEQ ID NO: 1103 - DNA, 20 bp, synthetic construct
  source 1..20: mol_type = other DNA
gacacagaaggacaccatcc

SEQ ID NO: 1104 - DNA, 20 bp, synthetic construct
  source 1..20: mol_type = other DNA
cacacagctctggcacactg

SEQ ID NO: 1105 - DNA, 20 bp, synthetic construct
  source 1..20: mol_type = other DNA
ggcctcagcctggcagggga

SEQ ID NO: 1106 - DNA, 20 bp, synthetic construct
  source 1..20: mol_type = other DNA
aaggagaggtgagacccagc

SEQ ID NO: 1107 - DNA, 20 bp, synthetic construct
  source 1..20: mol_type = other DNA
cacagctctggcacactgtg

SEQ ID NO: 1108 - DNA, 20 bp, synthetic construct
  source 1..20: mol_type = other DNA
acagaaggacaccatcccgg

SEQ ID NO: 1109 - DNA, 20 bp, synthetic construct
  source 1..20: mol_type = other DNA
cacagtgtgccagagctgtg

SEQ ID NO: 1110 - DNA, 20 bp, synthetic construct
  source 1..20: mol_type = other DNA
gaagaacagctcatagccct

SEQ ID NO: 1111 - DNA, 20 bp, synthetic construct
  source 1..20: mol_type = other DNA
cagaaggacaccatcccgga

SEQ ID NO: 1112 - DNA, 20 bp, synthetic construct
  source 1..20: mol_type = other DNA
ggatgagccagtgggtgcat

SEQ ID NO: 1113 - DNA, 20 bp, synthetic construct
  source 1..20: mol_type = other DNA
ccaagaaagtcccgtccgag

SEQ ID NO: 1114 - DNA, 20 bp, synthetic construct
  source 1..20: mol_type = other DNA
ccgggaaggatgacatgtcc

SEQ ID NO: 1115 - DNA, 20 bp, synthetic construct
  source 1..20: mol_type = other DNA
agcaggagccccagcacgca

SEQ ID NO: 1116 - DNA, 20 bp, synthetic construct
  source 1..20: mol_type = other DNA
cccactcacctggcagtctg

SEQ ID NO: 1117 - DNA, 20 bp, synthetic construct
  source 1..20: mol_type = other DNA
cgaagcaggtcctactcgga

SEQ ID NO: 1118 - DNA, 20 bp, synthetic construct
  source 1..20: mol_type = other DNA
gccatcaaggtgctgaagca

SEQ ID NO: 1119 - DNA, 20 bp, synthetic construct
  source 1..20: mol_type = other DNA
tctggcacactgtgggggaa

SEQ ID NO: 1120 - DNA, 20 bp, synthetic construct
  source 1..20: mol_type = other DNA
actcaccctcatggcatcca

SEQ ID NO: 1121 - DNA, 20 bp, synthetic construct
  source 1..20: mol_type = other DNA
ctgaggccgcggaaggagca

SEQ ID NO: 1122 - DNA, 20 bp, synthetic construct
  source 1..20: mol_type = other DNA
tgtttccaggagcctgacta

SEQ ID NO: 1123 - DNA, 20 bp, synthetic construct
  source 1..20: mol_type = other DNA
aggtgagcccactcaggagg

SEQ ID NO: 1124 - DNA, 20 bp, synthetic construct
  source 1..20: mol_type = other DNA
cctacctgctggcctgctga

SEQ ID NO: 1125 - DNA, 20 bp, synthetic construct
  source 1..20: mol_type = other DNA
tcttacctcttcctccgcgg

SEQ ID NO: 1126 - DNA, 20 bp, synthetic construct
  source 1..20: mol_type = other DNA
gtccacctgagagtgcacag

SEQ ID NO: 1127 - DNA, 20 bp, synthetic construct
  source 1..20: mol_type = other DNA
tcatgacggtgcccacctcg

SEQ ID NO: 1128 - DNA, 20 bp, synthetic construct
  source 1..20: mol_type = other DNA
gtcaggtacctggataggca

SEQ ID NO: 1129 - DNA, 20 bp, synthetic construct
  source 1..20: mol_type = other DNA
taccttcccgctggaatcga

SEQ ID NO: 1130 - DNA, 20 bp, synthetic construct
  source 1..20: mol_type = other DNA
acacagctctggcacactgt

SEQ ID NO: 1131 - DNA, 20 bp, synthetic construct
  source 1..20: mol_type = other DNA
gcaggagccccagcacgcag

SEQ ID NO: 1132 - DNA, 20 bp, synthetic construct
  source 1..20: mol_type = other DNA
gggctcacctgggacatctg

SEQ ID NO: 1133 - DNA, 20 bp, synthetic construct
  source 1..20: mol_type = other DNA
tgggcggcagcacccggcac

SEQ ID NO: 1134 - DNA, 20 bp, synthetic construct
  source 1..20: mol_type = other DNA
cacacacagtgccatcaaca

SEQ ID NO: 1135 - DNA, 20 bp, synthetic construct
  source 1..20: mol_type = other DNA
agtggacatctgcatcactg

SEQ ID NO: 1136 - DNA, 20 bp, synthetic construct
  source 1..20: mol_type = other DNA
gtggacatctgcatcactgg

SEQ ID NO: 1137 - DNA, 20 bp, synthetic construct
  source 1..20: mol_type = other DNA
ccccaggcccttccccaccg

SEQ ID NO: 1138 - DNA, 20 bp, synthetic construct
  source 1..20: mol_type = other DNA
cgcccagcgagcgcaggcac

SEQ ID NO: 1139 - DNA, 20 bp, synthetic construct
  source 1..20: mol_type = other DNA
acttcgataatgaacttgca

SEQ ID NO: 1140 - DNA, 20 bp, synthetic construct
  source 1..20: mol_type = other DNA
gcctcagcctggcaggggaa

SEQ ID NO: 1141 - DNA, 20 bp, synthetic construct
  source 1..20: mol_type = other DNA
gcctaccgagtgattccggc

SEQ ID NO: 1142 - DNA, 20 bp, synthetic construct
  source 1..20: mol_type = other DNA
tggccaggatgggcagcagc

SEQ ID NO: 1143 - DNA, 20 bp, synthetic construct
  source 1..20: mol_type = other DNA
cagcaggagccccagcacgc

SEQ ID NO: 1144 - DNA, 20 bp, synthetic construct
  source 1..20: mol_type = other DNA
agcagggctggggagaaggt

SEQ ID NO: 1145 - DNA, 20 bp, synthetic construct
  source 1..20: mol_type = other DNA
tgagcagaagatgaaagggc

SEQ ID NO: 1146 - DNA, 20 bp, synthetic construct
  source 1..20: mol_type = other DNA
ctgtgcatatgagctggggc

SEQ ID NO: 1147 - DNA, 20 bp, synthetic construct
  source 1..20: mol_type = other DNA
gaatccatcttcctgaccct

SEQ ID NO: 1148 - DNA, 20 bp, synthetic construct
  source 1..20: mol_type = other DNA
gtacctggataggcaaggag

SEQ ID NO: 1149 - DNA, 20 bp, synthetic construct
  source 1..20: mol_type = other DNA
ggcacactgtgggggaaggg

SEQ ID NO: 1150 - DNA, 20 bp, synthetic construct
  source 1..20: mol_type = other DNA
caccctacctggaaactgac

SEQ ID NO: 1151 - DNA, 20 bp, synthetic construct
  source 1..20: mol_type = other DNA
cacgagcagggctggggaga

SEQ ID NO: 1152 - DNA, 20 bp, synthetic construct
  source 1..20: mol_type = other DNA
agtacaggcagatgtgcagc

SEQ ID NO: 1153 - DNA, 20 bp, synthetic construct
  source 1..20: mol_type = other DNA
gacgttacctcgtgcggccc

SEQ ID NO: 1154 - DNA, 20 bp, synthetic construct
  source 1..20: mol_type = other DNA
tggagaactggtccccggtc

SEQ ID NO: 1155 - DNA, 20 bp, synthetic construct
  source 1..20: mol_type = other DNA
aatccatcttcctgaccctt

SEQ ID NO: 1156 - DNA, 20 bp, synthetic construct
  source 1..20: mol_type = other DNA
tgagcagtccccacatcagc

SEQ ID NO: 1157 - DNA, 20 bp, synthetic construct
  source 1..20: mol_type = other DNA
ccagggagatggccccacag

SEQ ID NO: 1158 - DNA, 20 bp, synthetic construct
  source 1..20: mol_type = other DNA
ggtgacaggtgcggcctcgg

SEQ ID NO: 1159 - DNA, 20 bp, synthetic construct
  source 1..20: mol_type = other DNA
tgtagcaccgcccagacgac

SEQ ID NO: 1160 - DNA, 20 bp, synthetic construct
  source 1..20: mol_type = other DNA
tccaggcatgcagatcccac

SEQ ID NO: 1161 - DNA, 20 bp, synthetic construct
  source 1..20: mol_type = other DNA
tgtgcatatgagctggggct

SEQ ID NO: 1162 - DNA, 20 bp, synthetic construct
  source 1..20: mol_type = other DNA
cttgcattcacagttcaaca

SEQ ID NO: 1163 - DNA, 20 bp, synthetic construct
  source 1..20: mol_type = other DNA
ggatacagggctctacacag

SEQ ID NO: 1164 - DNA, 20 bp, synthetic construct
  source 1..20: mol_type = other DNA
ggtccaccttgtcttcccgt

SEQ ID NO: 1165 - DNA, 20 bp, synthetic construct
  source 1..20: mol_type = other DNA
gatcagcaggaaaacacagc

SEQ ID NO: 1166 - DNA, 20 bp, synthetic construct
  source 1..20: mol_type = other DNA
gggtccaccttgtcttcccg

SEQ ID NO: 1167 - DNA, 20 bp, synthetic construct
  source 1..20: mol_type = other DNA
cacctacctaagaaccatcc

SEQ ID NO: 1168 - DNA, 20 bp, synthetic construct
  source 1..20: mol_type = other DNA
ggagatggccccacagaggt

SEQ ID NO: 1169 - DNA, 20 bp, synthetic construct
  source 1..20: mol_type = other DNA
cccaggtgaagagaagcctc

SEQ ID NO: 1170 - DNA, 20 bp, synthetic construct
  source 1..20: mol_type = other DNA
gccaggtgagcccactcagg

SEQ ID NO: 1171 - DNA, 20 bp, synthetic construct
  source 1..20: mol_type = other DNA
tcaccctgagctctgcccgc

SEQ ID NO: 1172 - DNA, 20 bp, synthetic construct
  source 1..20: mol_type = other DNA
ccgcacctgttgttgtgacg

SEQ ID NO: 1173 - DNA, 20 bp, synthetic construct
  source 1..20: mol_type = other DNA
gcagtgacctggaagatgga

SEQ ID NO: 1174 - DNA, 20 bp, synthetic construct
  source 1..20: mol_type = other DNA
ccctgcagtgacctggaaga

SEQ ID NO: 1175 - DNA, 20 bp, synthetic construct
  source 1..20: mol_type = other DNA
gaagccggccttgcacatgc

SEQ ID NO: 1176 - DNA, 20 bp, synthetic construct
  source 1..20: mol_type = other DNA
gccgttgtcgacgacgagcg

SEQ ID NO: 1177 - DNA, 20 bp, synthetic construct
  source 1..20: mol_type = other DNA
gctgatccacatctgctgga

SEQ ID NO: 1178 - DNA, 20 bp, synthetic construct
  source 1..20: mol_type = other DNA
tcacctgggtcatcttctcg

SEQ ID NO: 1179 - DNA, 20 bp, synthetic construct
  source 1..20: mol_type = other DNA
ggaggggaagacggcccggg

SEQ ID NO: 1180 - DNA, 20 bp, synthetic construct
  source 1..20: mol_type = other DNA
ctctcaggcatggagtcctg

SEQ ID NO: 1181 - DNA, 20 bp, synthetic construct
  source 1..20: mol_type = other DNA
actcacccaggaaggaaggc

SEQ ID NO: 1182 - DNA, 20 bp, synthetic construct
  source 1..20: mol_type = other DNA
cccaccatcacgccctggga

SEQ ID NO: 1183 - DNA, 20 bp, synthetic construct
  source 1..20: mol_type = other DNA
cggctacagcttcaccacca

SEQ ID NO: 1184 - DNA, 20 bp, synthetic construct
  source 1..20: mol_type = other DNA
cctgagagggaaatgagggc

SEQ ID NO: 1185 - DNA, 20 bp, synthetic construct
  source 1..20: mol_type = other DNA
gccgccagacagcactgtgt

SEQ ID NO: 1186 - DNA, 20 bp, synthetic construct
  source 1..20: mol_type = other DNA
cagcagcacggggtgctcct

SEQ ID NO: 1187 - DNA, 20 bp, synthetic construct
  source 1..20: mol_type = other DNA
ctcgtagatgggcacagtgt

SEQ ID NO: 1188 - DNA, 20 bp, synthetic construct
  source 1..20: mol_type = other DNA
tgaggatgcctctcttgctc

SEQ ID NO: 1189 - DNA, 20 bp, synthetic construct
  source 1..20: mol_type = other DNA
cctcgtagatgggcacagtg

SEQ ID NO: 1190 - DNA, 20 bp, synthetic construct
  source 1..20: mol_type = other DNA
ccgcctagaagcatttgcgg

SEQ ID NO: 1191 - DNA, 20 bp, synthetic construct
  source 1..20: mol_type = other DNA
gaggatgcctctcttgctct

SEQ ID NO: 1192 - DNA, 20 bp, synthetic construct
  source 1..20: mol_type = other DNA
gaagcatttgcggtggacga

SEQ ID NO: 1193 - DNA, 20 bp, synthetic construct
  source 1..20: mol_type = other DNA
ggaagagtgcctcagggcag

SEQ ID NO: 1194 - DNA, 20 bp, synthetic construct
  source 1..20: mol_type = other DNA
accttgatcttcattgtgct

SEQ ID NO: 1195 - DNA, 20 bp, synthetic construct
  source 1..20: mol_type = other DNA
ctccactcacccaggaagga

SEQ ID NO: 1196 - DNA, 20 bp, synthetic construct
  source 1..20: mol_type = other DNA
gatccacatctgctggaagg

SEQ ID NO: 1197 - DNA, 20 bp, synthetic construct
  source 1..20: mol_type = other DNA
catttgcggtggacgatgga

SEQ ID NO: 1198 - DNA, 20 bp, synthetic construct
  source 1..20: mol_type = other DNA
ggtctcaaacatgatctgta

SEQ ID NO: 1199 - DNA, 20 bp, synthetic construct
  source 1..20: mol_type = other DNA
gatggagccgccgatccaca

SEQ ID NO: 1200 - DNA, 20 bp, synthetic construct
  source 1..20: mol_type = other DNA
ctcgtagatgggcaccgtgt

SEQ ID NO: 1201 - DNA, 20 bp, synthetic construct
  source 1..20: mol_type = other DNA
aatccacatctgctggaagg

SEQ ID NO: 1202 - DNA, 20 bp, synthetic construct
  source 1..20: mol_type = other DNA
tgacaggcttcgaatggtat

SEQ ID NO: 1203 - DNA, 20 bp, synthetic construct
  source 1..20: mol_type = other DNA
tgtaggagtccgtccaggac

SEQ ID NO: 1204 - DNA, 20 bp, synthetic construct
  source 1..20: mol_type = other DNA
tctcctggcatgtctcagca

SEQ ID NO: 1205 - DNA, 20 bp, synthetic construct
  source 1..20: mol_type = other DNA
cagaagtctgtgcagaacag

SEQ ID NO: 1206 - DNA, 20 bp, synthetic construct
  source 1..20: mol_type = other DNA
tgggacactgaggagacaga

SEQ ID NO: 1207 - DNA, 20 bp, synthetic construct
  source 1..20: mol_type = other DNA
gggacactgaggagacagaa

SEQ ID NO: 1208 - DNA, 20 bp, synthetic construct
  source 1..20: mol_type = other DNA
tcgccgaatagattcaacaa

SEQ ID NO: 1209 - DNA, 20 bp, synthetic construct
  source 1..20: mol_type = other DNA
aggtgagcaggtcagggtcg

SEQ ID NO: 1210 - DNA, 20 bp, synthetic construct
  source 1..20: mol_type = other DNA
gaccctgacctgctcacctg

SEQ ID NO: 1211 - DNA, 20 bp, synthetic construct
  source 1..20: mol_type = other DNA
gacgcacgggcagatcggca

SEQ ID NO: 1212 - DNA, 20 bp, synthetic construct
  source 1..20: mol_type = other DNA
cgcgccacatgaagacgcac

SEQ ID NO: 1213 - DNA, 20 bp, synthetic construct
  source 1..20: mol_type = other DNA
caggtgagcaggtcagggtc

SEQ ID NO: 1214 - DNA, 20 bp, synthetic construct
  source 1..20: mol_type = other DNA
gcaggagaacattgcaggta

SEQ ID NO: 1215 - DNA, 20 bp, synthetic construct
  source 1..20: mol_type = other DNA
ggccacaggtgagcaggtca

SEQ ID NO: 1216 - DNA, 20 bp, synthetic construct
  source 1..20: mol_type = other DNA
gagcacaaaaggaagcagtg

SEQ ID NO: 1217 - DNA, 20 bp, synthetic construct
  source 1..20: mol_type = other DNA
tgtcaaatgaacttcccctt

SEQ ID NO: 1218 - DNA, 20 bp, synthetic construct
  source 1..20: mol_type = other DNA
acctgcaatgttctcctgct

SEQ ID NO: 1219 - DNA, 20 bp, synthetic construct
  source 1..20: mol_type = other DNA
acaggtgagcaggtcagggt

SEQ ID NO: 1220 - DNA, 20 bp, synthetic construct
  source 1..20: mol_type = other DNA
aggggaagttcatttgacac

SEQ ID NO: 1221 - DNA, 20 bp, synthetic construct
  source 1..20: mol_type = other DNA
gacactggccacaggtgagc

SEQ ID NO: 1222 - DNA, 20 bp, synthetic construct
  source 1..20: mol_type = other DNA
cacaaaaggaagcagtgtgg

SEQ ID NO: 1223 - DNA, 20 bp, synthetic construct
  source 1..20: mol_type = other DNA
cctgcaatgttctcctgctt

SEQ ID NO: 1224 - DNA, 20 bp, synthetic construct
  source 1..20: mol_type = other DNA
caggagaacattgcaggtat

SEQ ID NO: 1225 - DNA, 20 bp, synthetic construct
  source 1..20: mol_type = other DNA
tcaaatgaacttccccttgg

SEQ ID NO: 1226 - DNA, 20 bp, synthetic construct
  source 1..20: mol_type = other DNA
acccgcagcacttgtcccag

SEQ ID NO: 1227 - DNA, 20 bp, synthetic construct
  source 1..20: mol_type = other DNA
tctcctctgccccagggggc

SEQ ID NO: 1228 - DNA, 20 bp, synthetic construct
  source 1..20: mol_type = other DNA
tggacattctacataccaag

SEQ ID NO: 1229 - DNA, 20 bp, synthetic construct
  source 1..20: mol_type = other DNA
gaggacagccaaggggcacg

SEQ ID NO: 1230 - DNA, 20 bp, synthetic construct
  source 1..20: mol_type = other DNA
agcactgcctgctggaggct

SEQ ID NO: 1231 - DNA, 20 bp, synthetic construct
  source 1..20: mol_type = other DNA
gcgggagcgggaccaggtac

SEQ ID NO: 1232 - DNA, 20 bp, synthetic construct
  source 1..20: mol_type = other DNA
agcgggtccgcatcatctcg

SEQ ID NO: 1233 - DNA, 20 bp, synthetic construct
  source 1..20: mol_type = other DNA
cggtgaggccagaatcaggg

SEQ ID NO: 1234 - DNA, 20 bp, synthetic construct
  source 1..20: mol_type = other DNA
agatcgatcagctaaagcac

SEQ ID NO: 1235 - DNA, 20 bp, synthetic construct
  source 1..20: mol_type = other DNA
ctggaaaggtaccccagtga

SEQ ID NO: 1236 - DNA, 20 bp, synthetic construct
  source 1..20: mol_type = other DNA
tggaggaggtggagcgggag

SEQ ID NO: 1237 - DNA, 20 bp, synthetic construct
  source 1..20: mol_type = other DNA
caccagcgtcttggccagca

SEQ ID NO: 1238 - DNA, 20 bp, synthetic construct
  source 1..20: mol_type = other DNA
ccatccaagatcaaccgagc

SEQ ID NO: 1239 - DNA, 20 bp, synthetic construct
  source 1..20: mol_type = other DNA
cttcctccactgtggagagg

SEQ ID NO: 1240 - DNA, 20 bp, synthetic construct
  source 1..20: mol_type = other DNA
cgggagtggaaggcctgcca

SEQ ID NO: 1241 - DNA, 20 bp, synthetic construct
  source 1..20: mol_type = other DNA
acacgaccgcaaggaggccc

SEQ ID NO: 1242 - DNA, 20 bp, synthetic construct
  source 1..20: mol_type = other DNA
agcaggcagtgcttgttctg

SEQ ID NO: 1243 - DNA, 20 bp, synthetic construct
  source 1..20: mol_type = other DNA
gttacctgctcggttgatct

SEQ ID NO: 1244 - DNA, 20 bp, synthetic construct
  source 1..20: mol_type = other DNA
cttggaacacgaccgcaagg

SEQ ID NO: 1245 - DNA, 20 bp, synthetic construct
  source 1..20: mol_type = other DNA
cacagtggaggaaggccacg

SEQ ID NO: 1246 - DNA, 20 bp, synthetic construct
  source 1..20: mol_type = other DNA
gcagctcaccatcttggtga

SEQ ID NO: 1247 - DNA, 20 bp, synthetic construct
  source 1..20: mol_type = other DNA
gcaggcagtgcttgttctgc

SEQ ID NO: 1248 - DNA, 20 bp, synthetic construct
  source 1..20: mol_type = other DNA
ccttcctccactgtggagag

SEQ ID NO: 1249 - DNA, 20 bp, synthetic construct
  source 1..20: mol_type = other DNA
cgttcatcaggaagtgcgtg

SEQ ID NO: 1250 - DNA, 20 bp, synthetic construct
  source 1..20: mol_type = other DNA
ggtagggcgtgagcttggca

SEQ ID NO: 1251 - DNA, 20 bp, synthetic construct
  source 1..20: mol_type = other DNA
ttggacattctacataccaa

SEQ ID NO: 1252 - DNA, 20 bp, synthetic construct
  source 1..20: mol_type = other DNA
gacgatggagtcgtttcccg

SEQ ID NO: 1253 - DNA, 20 bp, synthetic construct
  source 1..20: mol_type = other DNA
gcagcgcaagaccatctggg

SEQ ID NO: 1254 - DNA, 20 bp, synthetic construct
  source 1..20: mol_type = other DNA
cccggatgaagagcacgatg

SEQ ID NO: 1255 - DNA, 20 bp, synthetic construct
  source 1..20: mol_type = other DNA
ttcacagtacctggaggaga

SEQ ID NO: 1256 - DNA, 20 bp, synthetic construct
  source 1..20: mol_type = other DNA
gtgacaccatgtaccaggac

SEQ ID NO: 1257 - DNA, 20 bp, synthetic construct
  source 1..20: mol_type = other DNA
tatagcggctgagcatgtgc

SEQ ID NO: 1258 - DNA, 20 bp, synthetic construct
  source 1..20: mol_type = other DNA
tgtcctccagggcctccttg

SEQ ID NO: 1259 - DNA, 20 bp, synthetic construct
  source 1..20: mol_type = other DNA
ggagcagcgcaagaccatct

SEQ ID NO: 1260 - DNA, 20 bp, synthetic construct
  source 1..20: mol_type = other DNA
cctgccacccacctgcgatg

SEQ ID NO: 1261 - DNA, 20 bp, synthetic construct
  source 1..20: mol_type = other DNA
ggaaaggtaccccagtgaag

SEQ ID NO: 1262 - DNA, 20 bp, synthetic construct
  source 1..20: mol_type = other DNA
caatgaccttacactgacgc

SEQ ID NO: 1263 - DNA, 20 bp, synthetic construct
  source 1..20: mol_type = other DNA
actgagctgtgcgtagcgca

SEQ ID NO: 1264 - DNA, 20 bp, synthetic construct
  source 1..20: mol_type = other DNA
cctgctcggttgatcttgga

SEQ ID NO: 1265 - DNA, 20 bp, synthetic construct
  source 1..20: mol_type = other DNA
aatgtccaacagccggccta

SEQ ID NO: 1266 - DNA, 20 bp, synthetic construct
  source 1..20: mol_type = other DNA
atcctccagctgccgcaacc

SEQ ID NO: 1267 - DNA, 20 bp, synthetic construct
  source 1..20: mol_type = other DNA
tatgtagaatgtccaacagc

SEQ ID NO: 1268 - DNA, 20 bp, synthetic construct
  source 1..20: mol_type = other DNA
gtgttccaagatgtccagga

SEQ ID NO: 1269 - DNA, 20 bp, synthetic construct
  source 1..20: mol_type = other DNA
tgattgacatgatgctgctg

SEQ ID NO: 1270 - DNA, 20 bp, synthetic construct
  source 1..20: mol_type = other DNA
tcaccggctgtagctgggta

SEQ ID NO: 1271 - DNA, 20 bp, synthetic construct
  source 1..20: mol_type = other DNA
atgtccaacagccggcctag

SEQ ID NO: 1272 - DNA, 20 bp, synthetic construct
  source 1..20: mol_type = other DNA
ggaggagctgctgggctctg

SEQ ID NO: 1273 - DNA, 20 bp, synthetic construct
  source 1..20: mol_type = other DNA
ggctgtaggggatgaggctg

SEQ ID NO: 1274 - DNA, 20 bp, synthetic construct
  source 1..20: mol_type = other DNA
acgcaggtagggcgtgagct

SEQ ID NO: 1275 - DNA, 20 bp, synthetic construct
  source 1..20: mol_type = other DNA
gttggacattctacatacca

SEQ ID NO: 1276 - DNA, 20 bp, synthetic construct
  source 1..20: mol_type = other DNA
cttgcagatggtgaactcca

SEQ ID NO: 1277 - DNA, 20 bp, synthetic construct
  source 1..20: mol_type = other DNA
gagcacgatggggtagatgt

SEQ ID NO: 1278 - DNA, 20 bp, synthetic construct
  source 1..20: mol_type = other DNA
ttgatcttggatggcagcat

SEQ ID NO: 1279 - DNA, 20 bp, synthetic construct
  source 1..20: mol_type = other DNA
gccgacttacgatttccgag

SEQ ID NO: 1280 - DNA, 20 bp, synthetic construct
  source 1..20: mol_type = other DNA
ccagcatgtggctgaagatg

SEQ ID NO: 1281 - DNA, 20 bp, synthetic construct
  source 1..20: mol_type = other DNA
cctcatcttcagccacatgc

SEQ ID NO: 1282 - DNA, 20 bp, synthetic construct
  source 1..20: mol_type = other DNA
tctcgaagtgtgggaggtac

SEQ ID NO: 1283 - DNA, 20 bp, synthetic construct
  source 1..20: mol_type = other DNA
cttgtagatatcctgatcat

SEQ ID NO: 1284 - DNA, 20 bp, synthetic construct
  source 1..20: mol_type = other DNA
tcccaaactctgctacctgc

SEQ ID NO: 1285 - DNA, 20 bp, synthetic construct
  source 1..20: mol_type = other DNA
ggaactgcagaaagataaga

SEQ ID NO: 1286 - DNA, 20 bp, synthetic construct
  source 1..20: mol_type = other DNA
tctgtgccaagagataaagc

SEQ ID NO: 1287 - DNA, 20 bp, synthetic construct
  source 1..20: mol_type = other DNA
accagcgccggaggggcaag

SEQ ID NO: 1288 - DNA, 20 bp, synthetic construct
  source 1..20: mol_type = other DNA
agcagagtttgggatccagc

SEQ ID NO: 1289 - DNA, 20 bp, synthetic construct
  source 1..20: mol_type = other DNA
aaccagcgccggaggggcaa

SEQ ID NO: 1290 - DNA, 20 bp, synthetic construct
  source 1..20: mol_type = other DNA
gagtgaaggtgggtaccact

SEQ ID NO: 1291 - DNA, 20 bp, synthetic construct
  source 1..20: mol_type = other DNA
caaccagcgccggaggggca

SEQ ID NO: 1292 - DNA, 20 bp, synthetic construct
  source 1..20: mol_type = other DNA
caggcacagttgccgattac

SEQ ID NO: 1293 - DNA, 20 bp, synthetic construct
  source 1..20: mol_type = other DNA
gccccctcgctaacagccag

SEQ ID NO: 1294 - DNA, 20 bp, synthetic construct
  source 1..20: mol_type = other DNA
ctgttataggagctcaatct

SEQ ID NO: 1295 - DNA, 20 bp, synthetic construct
  source 1..20: mol_type = other DNA
ttacgttatagagctggttc

SEQ ID NO: 1296 - DNA, 20 bp, synthetic construct
  source 1..20: mol_type = other DNA
acagttgccgattacaggta

SEQ ID NO: 1297 - DNA, 20 bp, synthetic construct
  source 1..20: mol_type = other DNA
ccggctttccccccatctca

SEQ ID NO: 1298 - DNA, 20 bp, synthetic construct
  source 1..20: mol_type = other DNA
cacagttgccgattacaggt

SEQ ID NO: 1299 - DNA, 20 bp, synthetic construct
  source 1..20: mol_type = other DNA
tgaagaggattccatccagc

SEQ ID NO: 1300 - DNA, 20 bp, synthetic construct
  source 1..20: mol_type = other DNA
tccagcaggtagcagagttt

SEQ ID NO: 1301 - DNA, 20 bp, synthetic construct
  source 1..20: mol_type = other DNA
caccttcactctcaggaaca

SEQ ID NO: 1302 - DNA, 20 bp, synthetic construct
  source 1..20: mol_type = other DNA
ggcacagaggcacagagctt

SEQ ID NO: 1303 - DNA, 20 bp, synthetic construct
  source 1..20: mol_type = other DNA
actgcagaaagataagatgg

SEQ ID NO: 1304 - DNA, 20 bp, synthetic construct
  source 1..20: mol_type = other DNA
gcagaaagataagatggcgg

SEQ ID NO: 1305 - DNA, 20 bp, synthetic construct
  source 1..20: mol_type = other DNA
tctcccttggatggtcggcg

SEQ ID NO: 1306 - DNA, 20 bp, synthetic construct
  source 1..20: mol_type = other DNA
tcctgcaggtgaggagtaag

SEQ ID NO: 1307 - DNA, 20 bp, synthetic construct
  source 1..20: mol_type = other DNA
ggaaccattatccatgtgaa

SEQ ID NO: 1308 - DNA, 20 bp, synthetic construct
  source 1..20: mol_type = other DNA
tcttacccagaaaataataa

SEQ ID NO: 1309 - DNA, 20 bp, synthetic construct
  source 1..20: mol_type = other DNA
tgcagaagtaaatatctgtt

SEQ ID NO: 1310 - DNA, 20 bp, synthetic construct
  source 1..20: mol_type = other DNA
caaggtaaggctactccagg

SEQ ID NO: 1311 - DNA, 20 bp, synthetic construct
  source 1..20: mol_type = other DNA
tacacctatatattcctcgt

SEQ ID NO: 1312 - DNA, 20 bp, synthetic construct
  source 1..20: mol_type = other DNA
tcctctataggtatcttgaa

SEQ ID NO: 1313 - DNA, 20 bp, synthetic construct
  source 1..20: mol_type = other DNA
gtgccagagctgtgtggagc

SEQ ID NO: 1314 - DNA, 20 bp, synthetic construct
  source 1..20: mol_type = other DNA
tcgcaaggtaaggctactcc

SEQ ID NO: 1315 - DNA, 20 bp, synthetic construct
  source 1..20: mol_type = other DNA
cctctataggtatcttgaag

SEQ ID NO: 1316 - DNA, 20 bp, synthetic construct
  source 1..20: mol_type = other DNA
acttcgataatgaacttgca

SEQ ID NO: 1317 - DNA, 20 bp, synthetic construct
  source 1..20: mol_type = other DNA
agagaagggtagccagtacc

SEQ ID NO: 1318 - DNA, 20 bp, synthetic construct
  source 1..20: mol_type = other DNA
cgaggaatatataggtgtaa

SEQ ID NO: 1319 - DNA, 20 bp, synthetic construct
  source 1..20: mol_type = other DNA
tcccaaagcaaggagcagag

SEQ ID NO: 1320 - DNA, 20 bp, synthetic construct
  source 1..20: mol_type = other DNA
ctctggcacactgtggggga

SEQ ID NO: 1321 - DNA, 20 bp, synthetic construct
  source 1..20: mol_type = other DNA
ttacacctatatattcctcg

SEQ ID NO: 1322 - DNA, 20 bp, synthetic construct
  source 1..20: mol_type = other DNA
ttcctctataggtatcttga

SEQ ID NO: 1323 - DNA, 20 bp, synthetic construct
  source 1..20: mol_type = other DNA
acacagctctggcacactgt

SEQ ID NO: 1324 - DNA, 20 bp, synthetic construct
  source 1..20: mol_type = other DNA
cacagtgtgccagagctgtg

SEQ ID NO: 1325 - DNA, 20 bp, synthetic construct
  source 1..20: mol_type = other DNA
ctgtcctcaagttcctctat

SEQ ID NO: 1326 - DNA, 20 bp, synthetic construct
  source 1..20: mol_type = other DNA
gatccagctccacacagctc

SEQ ID NO: 1327 - DNA, 20 bp, synthetic construct
  source 1..20: mol_type = other DNA
ggagctggatccagccaccg

SEQ ID NO: 1328 - DNA, 20 bp, synthetic construct
  source 1..20: mol_type = other DNA
agccttaccttgcgagagaa

SEQ ID NO: 1329 - DNA, 20 bp, synthetic construct
  source 1..20: mol_type = other DNA
tctggcacactgtgggggaa

SEQ ID NO: 1330 - DNA, 20 bp, synthetic construct
  source 1..20: mol_type = other DNA
cacagctctggcacactgtg

SEQ ID NO: 1331 - DNA, 20 bp, synthetic construct
  source 1..20: mol_type = other DNA
tgctatgttccatctcccag

SEQ ID NO: 1332 - DNA, 20 bp, synthetic construct
  source 1..20: mol_type = other DNA
acagctctggcacactgtgg

SEQ ID NO: 1333 - DNA, 20 bp, synthetic construct
  source 1..20: mol_type = other DNA
atcttgaaggggctcactaa

SEQ ID NO: 1334 - DNA, 20 bp, synthetic construct
  source 1..20: mol_type = other DNA
cacacagctctggcacactg

SEQ ID NO: 1335 - DNA, 20 bp, synthetic construct
  source 1..20: mol_type = other DNA
cttgaaggggctcactaaag

SEQ ID NO: 1336 - DNA, 20 bp, synthetic construct
  source 1..20: mol_type = other DNA
tcttgaaggggctcactaaa

SEQ ID NO: 1337 - DNA, 20 bp, synthetic construct
  source 1..20: mol_type = other DNA
ggcacactgtgggggaaggg

SEQ ID NO: 1338 - DNA, 20 bp, synthetic construct
  source 1..20: mol_type = other DNA
atgcagttctcacacactgt

SEQ ID NO: 1339 - DNA, 20 bp, synthetic construct
  source 1..20: mol_type = other DNA
gatgtccactatgacaattg

SEQ ID NO: 1340 - DNA, 20 bp, synthetic construct
  source 1..20: mol_type = other DNA
tgccatagtatttcagatcc

SEQ ID NO: 1341 - DNA, 20 bp, synthetic construct
  source 1..20: mol_type = other DNA
catcctactcacctgataag

SEQ ID NO: 1342 - DNA, 20 bp, synthetic construct
  source 1..20: mol_type = other DNA
gtggacatctgcatcactgg

SEQ ID NO: 1343 - DNA, 20 bp, synthetic construct
  source 1..20: mol_type = other DNA
caacacaatgataaaaacat

SEQ ID NO: 1344 - DNA, 20 bp, synthetic construct
  source 1..20: mol_type = other DNA
ctgagggcaagaggtaatcc

SEQ ID NO: 1345 - DNA, 20 bp, synthetic construct
  source 1..20: mol_type = other DNA
agggcatgtcaatattactg

SEQ ID NO: 1346 - DNA, 20 bp, synthetic construct
  source 1..20: mol_type = other DNA
agatggagactttatatgct

SEQ ID NO: 1347 - DNA, 20 bp, synthetic construct
  source 1..20: mol_type = other DNA
catgcagttctcacacactg

SEQ ID NO: 1348 - DNA, 20 bp, synthetic construct
  source 1..20: mol_type = other DNA
tttcagatccaggatactga

SEQ ID NO: 1349 - DNA, 20 bp, synthetic construct
  source 1..20: mol_type = other DNA
ctggattacctcttgccctc

SEQ ID NO: 1350 - DNA, 20 bp, synthetic construct
  source 1..20: mol_type = other DNA
tgcagttctcacacactgtg

SEQ ID NO: 1351 - DNA, 20 bp, synthetic construct
  source 1..20: mol_type = other DNA
gcatataaagtctccatctc

SEQ ID NO: 1352 - DNA, 20 bp, synthetic construct
  source 1..20: mol_type = other DNA
tagtggacatctgcatcact

SEQ ID NO: 1353 - DNA, 20 bp, synthetic construct
  source 1..20: mol_type = other DNA
atttcagatccaggatactg

SEQ ID NO: 1354 - DNA, 20 bp, synthetic construct
  source 1..20: mol_type = other DNA
catggagatggatgtgatgt

SEQ ID NO: 1355 - DNA, 20 bp, synthetic construct
  source 1..20: mol_type = other DNA
gcagttctcacacactgtgg

SEQ ID NO: 1356 - DNA, 20 bp, synthetic construct
  source 1..20: mol_type = other DNA
agatgcagtcgggcactcac

SEQ ID NO: 1357 - DNA, 20 bp, synthetic construct
  source 1..20: mol_type = other DNA
cacagtgtgtgagaactgca

SEQ ID NO: 1358 - DNA, 20 bp, synthetic construct
  source 1..20: mol_type = other DNA
actcacctgataagaggcag

SEQ ID NO: 1359 - DNA, 20 bp, synthetic construct
  source 1..20: mol_type = other DNA
tattatgtctgctaccccag

SEQ ID NO: 1360 - DNA, 20 bp, synthetic construct
  source 1..20: mol_type = other DNA
agtggacatctgcatcactg

SEQ ID NO: 1361 - DNA, 20 bp, synthetic construct
  source 1..20: mol_type = other DNA
gagatggagactttatatgc

SEQ ID NO: 1362 - DNA, 20 bp, synthetic construct
  source 1..20: mol_type = other DNA
gatggagactttatatgctg

SEQ ID NO: 1363 - DNA, 20 bp, synthetic construct
  source 1..20: mol_type = other DNA
ccatgtcagtctctgtcctc

SEQ ID NO: 1364 - DNA, 20 bp, synthetic construct
  source 1..20: mol_type = other DNA
aaagagaaagccagatatgg

SEQ ID NO: 1365 - DNA, 20 bp, synthetic construct
  source 1..20: mol_type = other DNA
tcctgaaatgagaaaagccg

SEQ ID NO: 1366 - DNA, 20 bp, synthetic construct
  source 1..20: mol_type = other DNA
gactgacatggaacagggga

SEQ ID NO: 1367 - DNA, 20 bp, synthetic construct
  source 1..20: mol_type = other DNA
cttctgtaatacacttggag

SEQ ID NO: 1368 - DNA, 20 bp, synthetic construct
  source 1..20: mol_type = other DNA
tcaaggtaagggcctactag

SEQ ID NO: 1369 - DNA, 20 bp, synthetic construct
  source 1..20: mol_type = other DNA
ttcaggaaaccacttggtta

SEQ ID NO: 1370 - DNA, 20 bp, synthetic construct
  source 1..20: mol_type = other DNA
tacactgatacatccctcga

SEQ ID NO: 1371 - DNA, 20 bp, synthetic construct
  source 1..20: mol_type = other DNA
ttacactgatacatccctcg

SEQ ID NO: 1372 - DNA, 20 bp, synthetic construct
  source 1..20: mol_type = other DNA
acatacttctgtaatacact

SEQ ID NO: 1373 - DNA, 20 bp, synthetic construct
  source 1..20: mol_type = other DNA
actgacatggaacaggggaa

SEQ ID NO: 1374 - DNA, 20 bp, synthetic construct
  source 1..20: mol_type = other DNA
agcaaagagaaagccagata

SEQ ID NO: 1375 - DNA, 20 bp, synthetic construct
  source 1..20: mol_type = other DNA
tctctgggcctgacctgctt

SEQ ID NO: 1376 - DNA, 20 bp, synthetic construct
  source 1..20: mol_type = other DNA
ctggcacttcgagttggaac

SEQ ID NO: 1377 - DNA, 20 bp, synthetic construct
  source 1..20: mol_type = other DNA
catccccagcaggtacaagg

SEQ ID NO: 1378 - DNA, 20 bp, synthetic construct
  source 1..20: mol_type = other DNA
cacactggaggttgttgcag

SEQ ID NO: 1379 - DNA, 20 bp, synthetic construct
  source 1..20: mol_type = other DNA
ctggaggtctacctcaagga

SEQ ID NO: 1380 - DNA, 20 bp, synthetic construct
  source 1..20: mol_type = other DNA
tctcccaaagttcgtggcac

SEQ ID NO: 1381 - DNA, 20 bp, synthetic construct
  source 1..20: mol_type = other DNA
gggaggtacagcttgagttc

SEQ ID NO: 1382 - DNA, 20 bp, synthetic construct
  source 1..20: mol_type = other DNA
tagcagatgattgagctctg

SEQ ID NO: 1383 - DNA, 20 bp, synthetic construct
  source 1..20: mol_type = other DNA
actcacccagcatccccagc

SEQ ID NO: 1384 - DNA, 20 bp, synthetic construct
  source 1..20: mol_type = other DNA
tgttgcagaggaagttctcc

SEQ ID NO: 1385 - DNA, 20 bp, synthetic construct
  source 1..20: mol_type = other DNA
gttctacagcggcagcctgg

SEQ ID NO: 1386 - DNA, 20 bp, synthetic construct
  source 1..20: mol_type = other DNA
cactgggacagcttctgatg

SEQ ID NO: 1387 - DNA, 20 bp, synthetic construct
  source 1..20: mol_type = other DNA
ccttgaggtagacctccagc

SEQ ID NO: 1388 - DNA, 20 bp, synthetic construct
  source 1..20: mol_type = other DNA
gctgcagcctgggaggagct

SEQ ID NO: 1389 - DNA, 20 bp, synthetic construct
  source 1..20: mol_type = other DNA
tccattggattggcaagggc

SEQ ID NO: 1390 - DNA, 20 bp, synthetic construct
  source 1..20: mol_type = other DNA
atcttccattggattggcaa

SEQ ID NO: 1391 - DNA, 20 bp, synthetic construct
  source 1..20: mol_type = other DNA
agaggaagttctccaggtcc

SEQ ID NO: 1392 - DNA, 20 bp, synthetic construct
  source 1..20: mol_type = other DNA
tctctcggcggaagtcgctc

SEQ ID NO: 1393 - DNA, 20 bp, synthetic construct
  source 1..20: mol_type = other DNA
ctggctcacctgaccacgtt

SEQ ID NO: 1394 - DNA, 20 bp, synthetic construct
  source 1..20: mol_type = other DNA
agacgcgctcaaactccgtc

SEQ ID NO: 1395 - DNA, 20 bp, synthetic construct
  source 1..20: mol_type = other DNA
agacgttcagctgctgtcct

SEQ ID NO: 1396 - DNA, 20 bp, synthetic construct
  source 1..20: mol_type = other DNA
tctcttcgccgctcggcctc

SEQ ID NO: 1397 - DNA, 20 bp, synthetic construct
  source 1..20: mol_type = other DNA
cgtatcctcctgcctagcgc

SEQ ID NO: 1398 - DNA, 20 bp, synthetic construct
  source 1..20: mol_type = other DNA
ggtcagctgctgcacagtgt

SEQ ID NO: 1399 - DNA, 20 bp, synthetic construct
  source 1..20: mol_type = other DNA
tctcaggctccgattattca

SEQ ID NO: 1400 - DNA, 20 bp, synthetic construct
  source 1..20: mol_type = other DNA
gtagttgttgaagacatcca

SEQ ID NO: 1401 - DNA, 20 bp, synthetic construct
  source 1..20: mol_type = other DNA
tgttcaggaaaacaacacac

SEQ ID NO: 1402 - DNA, 20 bp, synthetic construct
  source 1..20: mol_type = other DNA
cgtgaggctgcaagcttgca

SEQ ID NO: 1403 - DNA, 20 bp, synthetic construct
  source 1..20: mol_type = other DNA
aggggcaggatggcaacagg

SEQ ID NO: 1404 - DNA, 20 bp, synthetic construct
  source 1..20: mol_type = other DNA
tctcctgcacagccagaata

SEQ ID NO: 1405 - DNA, 20 bp, synthetic construct
  source 1..20: mol_type = other DNA
cttcagttcgaacaccgtgc

SEQ ID NO: 1406 - DNA, 20 bp, synthetic construct
  source 1..20: mol_type = other DNA
gctgtacaaggtgggtcccg

SEQ ID NO: 1407 - DNA, 20 bp, synthetic construct
  source 1..20: mol_type = other DNA
atcatgaggaacacgtcctg

SEQ ID NO: 1408 - DNA, 20 bp, synthetic construct
  source 1..20: mol_type = other DNA
ccgtgaagatggtggtcttg

SEQ ID NO: 1409 - DNA, 20 bp, synthetic construct
  source 1..20: mol_type = other DNA
gatcatgaggaacacgtcct

SEQ ID NO: 1410 - DNA, 20 bp, synthetic construct
  source 1..20: mol_type = other DNA
tccaagagttggtcatcctg

SEQ ID NO: 1411 - DNA, 20 bp, synthetic construct
  source 1..20: mol_type = other DNA
gagcagcggctgtacaaggt

SEQ ID NO: 1412 - DNA, 20 bp, synthetic construct
  source 1..20: mol_type = other DNA
cgcgatggtgagcgggcgtg

SEQ ID NO: 1413 - DNA, 20 bp, synthetic construct
  source 1..20: mol_type = other DNA
ttgtacagccgctgctcgtc

SEQ ID NO: 1414 - DNA, 20 bp, synthetic construct
  source 1..20: mol_type = other DNA
tacagccgctgctcgtcagg

SEQ ID NO: 1415 - DNA, 20 bp, synthetic construct
  source 1..20: mol_type = other DNA
gcgatggtgagcgggcgtgg

SEQ ID NO: 1416 - DNA, 20 bp, synthetic construct
  source 1..20: mol_type = other DNA
gccgcgatggtgagcgggcg

SEQ ID NO: 1417 - DNA, 20 bp, synthetic construct
  source 1..20: mol_type = other DNA
aggccagccccactgtggct

SEQ ID NO: 1418 - DNA, 20 bp, synthetic construct
  source 1..20: mol_type = other DNA
gaactgaagcgcatcgtcga

SEQ ID NO: 1419 - DNA, 20 bp, synthetic construct
  source 1..20: mol_type = other DNA
ccgcgatggtgagcgggcgt

SEQ ID NO: 1420 - DNA, 20 bp, synthetic construct
  source 1..20: mol_type = other DNA
tcctcaggatgaccaactct

SEQ ID NO: 1421 - DNA, 20 bp, synthetic construct
  source 1..20: mol_type = other DNA
agcggcctcctgacgagcag

SEQ ID NO: 1422 - DNA, 20 bp, synthetic construct
  source 1..20: mol_type = other DNA
cgagcagcggctgtacaagg

SEQ ID NO: 1423 - DNA, 20 bp, synthetic construct
  source 1..20: mol_type = other DNA
tcatgaggaacacgtcctgg

SEQ ID NO: 1424 - DNA, 20 bp, synthetic construct
  source 1..20: mol_type = other DNA
ctgtacaaggtgggtcccgc

SEQ ID NO: 1425 - DNA, 20 bp, synthetic construct
  source 1..20: mol_type = other DNA
ggcaagacactgggcgagtg

SEQ ID NO: 1426 - DNA, 20 bp, synthetic construct
  source 1..20: mol_type = other DNA
ctccacagatgacacctttg

SEQ ID NO: 1427 - DNA, 20 bp, synthetic construct
  source 1..20: mol_type = other DNA
tgaggaacacgtcctggggg

SEQ ID NO: 1428 - DNA, 20 bp, synthetic construct
  source 1..20: mol_type = other DNA
ccggaaggccagccccactg

SEQ ID NO: 1429 - DNA, 20 bp, synthetic construct
  source 1..20: mol_type = other DNA
catcacccagtcccgaacat

SEQ ID NO: 1430 - DNA, 20 bp, synthetic construct
  source 1..20: mol_type = other DNA
cttactaatgaagtaatccg

SEQ ID NO: 1431 - DNA, 20 bp, synthetic construct
  source 1..20: mol_type = other DNA
tgtccactgccgggggtctg

SEQ ID NO: 1432 - DNA, 20 bp, synthetic construct
  source 1..20: mol_type = other DNA
tctccaactttaaatcctgt

SEQ ID NO: 1433 - DNA, 20 bp, synthetic construct
  source 1..20: mol_type = other DNA
agcccacaggcattgcagac

SEQ ID NO: 1434 - DNA, 20 bp, synthetic construct
  source 1..20: mol_type = other DNA
actcaccgtggtgggtcgga

SEQ ID NO: 1435 - DNA, 20 bp, synthetic construct
  source 1..20: mol_type = other DNA
ggcgcagtacccgctgccgg

SEQ ID NO: 1436 - DNA, 20 bp, synthetic construct
  source 1..20: mol_type = other DNA
cagacccctgactatgaaga

SEQ ID NO: 1437 - DNA, 20 bp, synthetic construct
  source 1..20: mol_type = other DNA
ccaccacaaccacactctgg

SEQ ID NO: 1438 - DNA, 20 bp, synthetic construct
  source 1..20: mol_type = other DNA
cctgtggggcaacggggaaa

SEQ ID NO: 1439 - DNA, 20 bp, synthetic construct
  source 1..20: mol_type = other DNA
acaggacgtccctgctctcc

SEQ ID NO: 1440 - DNA, 20 bp, synthetic construct
  source 1..20: mol_type = other DNA
cctccagagtgtggttgtgg

SEQ ID NO: 1441 - DNA, 20 bp, synthetic construct
  source 1..20: mol_type = other DNA
ccacaaccacactctggagg

SEQ ID NO: 1442 - DNA, 20 bp, synthetic construct
  source 1..20: mol_type = other DNA
agaccaccacaaccacactc

SEQ ID NO: 1443 - DNA, 20 bp, synthetic construct
  source 1..20: mol_type = other DNA
ggcagggagtgtgtgaactg

SEQ ID NO: 1444 - DNA, 20 bp, synthetic construct
  source 1..20: mol_type = other DNA
cccctgactatgaagaagga

SEQ ID NO: 1445 - DNA, 20 bp, synthetic construct
  source 1..20: mol_type = other DNA
ccctgtggggcaacggggaa

SEQ ID NO: 1446 - DNA, 20 bp, synthetic construct
  source 1..20: mol_type = other DNA
agaacttaccagccttcgct

SEQ ID NO: 1447 - DNA, 20 bp, synthetic construct
  source 1..20: mol_type = other DNA
gcgcactcaccgtggtgggt

SEQ ID NO: 1448 - DNA, 20 bp, synthetic construct
  source 1..20: mol_type = other DNA
ctggaggaggaatgccaatg

SEQ ID NO: 1449 - DNA, 20 bp, synthetic construct
  source 1..20: mol_type = other DNA
gaacttaccagccttcgctt

SEQ ID NO: 1450 - DNA, 20 bp, synthetic construct
  source 1..20: mol_type = other DNA
ggtggtctgacagttcgcac

SEQ ID NO: 1451 - DNA, 20 bp, synthetic construct
  source 1..20: mol_type = other DNA
cactcaccgtggtgggtcgg

SEQ ID NO: 1452 - DNA, 20 bp, synthetic construct
  source 1..20: mol_type = other DNA
gcagtacccgctgccggagg

SEQ ID NO: 1453 - DNA, 20 bp, synthetic construct
  source 1..20: mol_type = other DNA
attgcagacagggtccccat

SEQ ID NO: 1454 - DNA, 20 bp, synthetic construct
  source 1..20: mol_type = other DNA
cgcggcgcagtacccgctgc

SEQ ID NO: 1455 - DNA, 20 bp, synthetic construct
  source 1..20: mol_type = other DNA
agagcccgcaggcgttgcac

SEQ ID NO: 1456 - DNA, 20 bp, synthetic construct
  source 1..20: mol_type = other DNA
cctcctccagagtgtggttg

SEQ ID NO: 1457 - DNA, 20 bp, synthetic construct
  source 1..20: mol_type = other DNA
ctctggaggaggaatgccaa

SEQ ID NO: 1458 - DNA, 20 bp, synthetic construct
  source 1..20: mol_type = other DNA
tcgccgccacagtggggtcg

SEQ ID NO: 1459 - DNA, 20 bp, synthetic construct
  source 1..20: mol_type = other DNA
gcccacaggcattgcagaca

SEQ ID NO: 1460 - DNA, 20 bp, synthetic construct
  source 1..20: mol_type = other DNA
cctccaccacctccccgctg

SEQ ID NO: 1461 - DNA, 20 bp, synthetic construct
  source 1..20: mol_type = other DNA
ccaggcagagaacttactca

SEQ ID NO: 1462 - DNA, 20 bp, synthetic construct
  source 1..20: mol_type = other DNA
cagatacctggtggaaatgg

SEQ ID NO: 1463 - DNA, 20 bp, synthetic construct
  source 1..20: mol_type = other DNA
ccccacagatggtttcacga

SEQ ID NO: 1464 - DNA, 20 bp, synthetic construct
  source 1..20: mol_type = other DNA
ggcccagcttgttgtgcagg

SEQ ID NO: 1465 - DNA, 20 bp, synthetic construct
  source 1..20: mol_type = other DNA
acagagatggagaagtcccc

SEQ ID NO: 1466 - DNA, 20 bp, synthetic construct
  source 1..20: mol_type = other DNA
gccggtccaccaggatgggt

SEQ ID NO: 1467 - DNA, 20 bp, synthetic construct
  source 1..20: mol_type = other DNA
cagtgcagctccaggcggca

SEQ ID NO: 1468 - DNA, 20 bp, synthetic construct
  source 1..20: mol_type = other DNA
gtgcaggcggccggtccacc

SEQ ID NO: 1469 - DNA, 20 bp, synthetic construct
  source 1..20: mol_type = other DNA
ccccagctcgtcatcctcca

SEQ ID NO: 1470 - DNA, 20 bp, synthetic construct
  source 1..20: mol_type = other DNA
cccaccgcactcgctgttgg

SEQ ID NO: 1471 - DNA, 20 bp, synthetic construct
  source 1..20: mol_type = other DNA
accccagctcgtcatcctcc

SEQ ID NO: 1472 - DNA, 20 bp, synthetic construct
  source 1..20: mol_type = other DNA
agaggcccagcttgttgtgc

SEQ ID NO: 1473 - DNA, 20 bp, synthetic construct
  source 1..20: mol_type = other DNA
cgggccagccagagctcccc

SEQ ID NO: 1474 - DNA, 20 bp, synthetic construct
  source 1..20: mol_type = other DNA
tggtcagtacctgacagaga

SEQ ID NO: 1475 - DNA, 20 bp, synthetic construct
  source 1..20: mol_type = other DNA
ccaagaggagtggtttaagg

SEQ ID NO: 1476 - DNA, 20 bp, synthetic construct
  source 1..20: mol_type = other DNA
agaagtcccctggggagctc

SEQ ID NO: 1477 - DNA, 20 bp, synthetic construct
  source 1..20: mol_type = other DNA
cagatacttacttgggaaac

SEQ ID NO: 1478 - DNA, 20 bp, synthetic construct
  source 1..20: mol_type = other DNA
ccaccaggtatctggaaaga

SEQ ID NO: 1479 - DNA, 20 bp, synthetic construct
  source 1..20: mol_type = other DNA
ccatgagtaagttctctgcc

SEQ ID NO: 1480 - DNA, 20 bp, synthetic construct
  source 1..20: mol_type = other DNA
gcagcaccaccatttccacc

SEQ ID NO: 1481 - DNA, 20 bp, synthetic construct
  source 1..20: mol_type = other DNA
taaaatctacatggaagaaa

SEQ ID NO: 1482 - DNA, 20 bp, synthetic construct
  source 1..20: mol_type = other DNA
tctaccagcttatttaggga

SEQ ID NO: 1483 - DNA, 20 bp, synthetic construct
  source 1..20: mol_type = other DNA
cggggaggtggtggaggtcc

SEQ ID NO: 1484 - DNA, 20 bp, synthetic construct
  source 1..20: mol_type = other DNA
gacgagctggggttccacag

SEQ ID NO: 1485 - DNA, 20 bp, synthetic construct
  source 1..20: mol_type = other DNA
ggcggccggtccaccaggat

SEQ ID NO: 1486 - DNA, 20 bp, synthetic construct
  source 1..20: mol_type = other DNA
gcccaccgcactcgctgttg

SEQ ID NO: 1487 - DNA, 20 bp, synthetic construct
  source 1..20: mol_type = other DNA
ccctggaggatgacgagctg

SEQ ID NO: 1488 - DNA, 20 bp, synthetic construct
  source 1..20: mol_type = other DNA
ggcccaccgcactcgctgtt

SEQ ID NO: 1489 - DNA, 20 bp, synthetic construct
  source 1..20: mol_type = other DNA
cagagatggagaagtcccct

SEQ ID NO: 1490 - DNA, 20 bp, synthetic construct
  source 1..20: mol_type = other DNA
agagatggagaagtcccctg

SEQ ID NO: 1491 - DNA, 20 bp, synthetic construct
  source 1..20: mol_type = other DNA
aaggaagatctgcttctgtc

SEQ ID NO: 1492 - DNA, 20 bp, synthetic construct
  source 1..20: mol_type = other DNA
cttcgtgaaaccatctgtgg

SEQ ID NO: 1493 - DNA, 20 bp, synthetic construct
  source 1..20: mol_type = other DNA
agtgcagctccaggcggcag

SEQ ID NO: 1494 - DNA, 20 bp, synthetic construct
  source 1..20: mol_type = other DNA
cctcttccctgccaactacg

SEQ ID NO: 1495 - DNA, 20 bp, synthetic construct
  source 1..20: mol_type = other DNA
cgagctggggttccacagcg

SEQ ID NO: 1496 - DNA, 20 bp, synthetic construct
  source 1..20: mol_type = other DNA
tgtttctaggaacgccgagg

SEQ ID NO: 1497 - DNA, 20 bp, synthetic construct
  source 1..20: mol_type = other DNA
caggcagagaacttactcat

SEQ ID NO: 1498 - DNA, 20 bp, synthetic construct
  source 1..20: mol_type = other DNA
gccctggaggatgacgagct

SEQ ID NO: 1499 - DNA, 20 bp, synthetic construct
  source 1..20: mol_type = other DNA
ggagcatacctggtcttctc

SEQ ID NO: 1500 - DNA, 20 bp, synthetic construct
  source 1..20: mol_type = other DNA
tccatgctgtaacgtgaagc

SEQ ID NO: 1501 - DNA, 20 bp, synthetic construct
  source 1..20: mol_type = other DNA
ttactcatgggcaaggaggt

SEQ ID NO: 1502 - DNA, 20 bp, synthetic construct
  source 1..20: mol_type = other DNA
ttttgaaggtaggtgacctg

SEQ ID NO: 1503 - DNA, 20 bp, synthetic construct
  source 1..20: mol_type = other DNA
acagagagggagaagtcccc

SEQ ID NO: 1504 - DNA, 20 bp, synthetic construct
  source 1..20: mol_type = other DNA
ctaaaggcggggcattgccc

SEQ ID NO: 1505 - DNA, 20 bp, synthetic construct
  source 1..20: mol_type = other DNA
ccccgagcaaggacgtcacc

SEQ ID NO: 1506 - DNA, 20 bp, synthetic construct
  source 1..20: mol_type = other DNA
ctcctgcagctccccgagca

SEQ ID NO: 1507 - DNA, 20 bp, synthetic construct
  source 1..20: mol_type = other DNA
ccaggcggatatctacaagg

SEQ ID NO: 1508 - DNA, 20 bp, synthetic construct
  source 1..20: mol_type = other DNA
ctcacctgggccttcagcac

SEQ ID NO: 1509 - DNA, 20 bp, synthetic construct
  source 1..20: mol_type = other DNA
ctgcagggtgtccatatcag

SEQ ID NO: 1510 - DNA, 20 bp, synthetic construct
  source 1..20: mol_type = other DNA
tctgcagggtgtccatatca

SEQ ID NO: 1511 - DNA, 20 bp, synthetic construct
  source 1..20: mol_type = other DNA
ttgggacagcagaagtcagg

SEQ ID NO: 1512 - DNA, 20 bp, synthetic construct
  source 1..20: mol_type = other DNA
cccgagcaaggacgtcacct

SEQ ID NO: 1513 - DNA, 20 bp, synthetic construct
  source 1..20: mol_type = other DNA
gcacatcaagctgcattccg

SEQ ID NO: 1514 - DNA, 20 bp, synthetic construct
  source 1..20: mol_type = other DNA
gcgtcctcaggtggccagtg

SEQ ID NO: 1515 - DNA, 20 bp, synthetic construct
  source 1..20: mol_type = other DNA
gcatttgaagggcttctccc

SEQ ID NO: 1516 - DNA, 20 bp, synthetic construct
  source 1..20: mol_type = other DNA
caactacgcctgccgccgga

SEQ ID NO: 1517 - DNA, 20 bp, synthetic construct
  source 1..20: mol_type = other DNA
cccttccagtgcaatcagtg

SEQ ID NO: 1518 - DNA, 20 bp, synthetic construct
  source 1..20: mol_type = other DNA
cgtcctcaggtggccagtga

SEQ ID NO: 1519 - DNA, 20 bp, synthetic construct
  source 1..20: mol_type = other DNA
cccgcactgattgcactgga

SEQ ID NO: 1520 - DNA, 20 bp, synthetic construct
  source 1..20: mol_type = other DNA
cttccagtgcaatcagtgcg

SEQ ID NO: 1521 - DNA, 20 bp, synthetic construct
  source 1..20: mol_type = other DNA
acctaccggagtgcgtcctc

SEQ ID NO: 1522 - DNA, 20 bp, synthetic construct
  source 1..20: mol_type = other DNA
ggcggcaggcgtagttgcag

SEQ ID NO: 1523 - DNA, 20 bp, synthetic construct
  source 1..20: mol_type = other DNA
ggccacctgaggacgcactc

SEQ ID NO: 1524 - DNA, 20 bp, synthetic construct
  source 1..20: mol_type = other DNA
tgtgcgacgagaactcgtac

SEQ ID NO: 1525 - DNA, 20 bp, synthetic construct
  source 1..20: mol_type = other DNA
tctcggaggcggcgcgcagc

SEQ ID NO: 1526 - DNA, 20 bp, synthetic construct
  source 1..20: mol_type = other DNA
ccgcactgattgcactggaa

SEQ ID NO: 1527 - DNA, 20 bp, synthetic construct
  source 1..20: mol_type = other DNA
actggaagggccgttctcct

SEQ ID NO: 1528 - DNA, 20 bp, synthetic construct
  source 1..20: mol_type = other DNA
gttcacaaaagaagccacac

SEQ ID NO: 1529 - DNA, 20 bp, synthetic construct
  source 1..20: mol_type = other DNA
cagtgagggcgtccctccgg

SEQ ID NO: 1530 - DNA, 20 bp, synthetic construct
  source 1..20: mol_type = other DNA
ccttccagtgcaatcagtgc

SEQ ID NO: 1531 - DNA, 20 bp, synthetic construct
  source 1..20: mol_type = other DNA
acgagaactcgtaccggtcc

SEQ ID NO: 1532 - DNA, 20 bp, synthetic construct
  source 1..20: mol_type = other DNA
ggcaggcgtagttgcagagg

SEQ ID NO: 1533 - DNA, 20 bp, synthetic construct
  source 1..20: mol_type = other DNA
gcaactacgcctgccgccgg

SEQ ID NO: 1534 - DNA, 20 bp, synthetic construct
  source 1..20: mol_type = other DNA
tgttgcactcaaaaggatca

SEQ ID NO: 1535 - DNA, 20 bp, synthetic construct
  source 1..20: mol_type = other DNA
aggccccgcactgattgcac

SEQ ID NO: 1536 - DNA, 20 bp, synthetic construct
  source 1..20: mol_type = other DNA
acgcactccggtaggtcccc

SEQ ID NO: 1537 - DNA, 20 bp, synthetic construct
  source 1..20: mol_type = other DNA
taccggagtgcgtcctcagg

SEQ ID NO: 1538 - DNA, 20 bp, synthetic construct
  source 1..20: mol_type = other DNA
ccattccagtgtaatcagtg

SEQ ID NO: 1539 - DNA, 20 bp, synthetic construct
  source 1..20: mol_type = other DNA
acctgttgttgtgacgaggc

SEQ ID NO: 1540 - DNA, 20 bp, synthetic construct
  source 1..20: mol_type = other DNA
tcacctgtgcatatgagctg

SEQ ID NO: 1541 - DNA, 20 bp, synthetic construct
  source 1..20: mol_type = other DNA
tttcacctgtgcatatgagc

SEQ ID NO: 1542 - DNA, 20 bp, synthetic construct
  source 1..20: mol_type = other DNA
tcctgcctcgtcacaacaac

SEQ ID NO: 1543 - DNA, 20 bp, synthetic construct
  source 1..20: mol_type = other DNA
cccttacctgcctggcagcc

SEQ ID NO: 1544 - DNA, 20 bp, synthetic construct
  source 1..20: mol_type = other DNA
ggtttattatcagtgcgtcc

SEQ ID NO: 1545 - DNA, 20 bp, synthetic construct
  source 1..20: mol_type = other DNA
gctgccaggtgagcccactc

SEQ ID NO: 1546 - DNA, 20 bp, synthetic construct
  source 1..20: mol_type = other DNA
tgagcagtccccacatcagc

SEQ ID NO: 1547 - DNA, 20 bp, synthetic construct
  source 1..20: mol_type = other DNA
gagtggctagaaaatataga

SEQ ID NO: 1548 - DNA, 20 bp, synthetic construct
  source 1..20: mol_type = other DNA
ttctactcttcctcctgtag

SEQ ID NO: 1549 - DNA, 20 bp, synthetic construct
  source 1..20: mol_type = other DNA
agaccagtcagtttccaggt

SEQ ID NO: 1550 - DNA, 20 bp, synthetic construct
  source 1..20: mol_type = other DNA
taccaggtagcaggtgagtg

SEQ ID NO: 1551 - DNA, 20 bp, synthetic construct
  source 1..20: mol_type = other DNA
gatcagcaggaaaacacagc

SEQ ID NO: 1552 - DNA, 20 bp, synthetic construct
  source 1..20: mol_type = other DNA
gtttccgcagaataaaaagc

SEQ ID NO: 1553 - DNA, 20 bp, synthetic construct
  source 1..20: mol_type = other DNA
cacttactgtctccgctgcc

SEQ ID NO: 1554 - DNA, 20 bp, synthetic construct
  source 1..20: mol_type = other DNA
cagagcttgtgcattgacat

SEQ ID NO: 1555 - DNA, 20 bp, synthetic construct
  source 1..20: mol_type = other DNA
cctggctgccaggcaggtaa

SEQ ID NO: 1556 - DNA, 20 bp, synthetic construct
  source 1..20: mol_type = other DNA
cccaggtgaagagaagcctc

SEQ ID NO: 1557 - DNA, 20 bp, synthetic construct
  source 1..20: mol_type = other DNA
gtaccaggtagcaggtgagt

SEQ ID NO: 1558 - DNA, 20 bp, synthetic construct
  source 1..20: mol_type = other DNA
gtaggccatggctttgaatg

SEQ ID NO: 1559 - DNA, 20 bp, synthetic construct
  source 1..20: mol_type = other DNA
gaccagtcagtttccaggta

SEQ ID NO: 1560 - DNA, 20 bp, synthetic construct
  source 1..20: mol_type = other DNA
cttgcattcacagttcaaca

SEQ ID NO: 1561 - DNA, 20 bp, synthetic construct
  source 1..20: mol_type = other DNA
gacagaaatggctgcaacca

SEQ ID NO: 1562 - DNA, 20 bp, synthetic construct
  source 1..20: mol_type = other DNA
attttgcagacgctctcagc

SEQ ID NO: 1563 - DNA, 20 bp, synthetic construct
  source 1..20: mol_type = other DNA
caatgtcaatgcacaagctc

SEQ ID NO: 1564 - DNA, 20 bp, synthetic construct
  source 1..20: mol_type = other DNA
ggccactgtcaatagagaga

SEQ ID NO: 1565 - DNA, 20 bp, synthetic construct
  source 1..20: mol_type = other DNA
ggttccttccttgtaggcca

SEQ ID NO: 1566 - DNA, 20 bp, synthetic construct
  source 1..20: mol_type = other DNA
cagtaagtgtggcatcacca

SEQ ID NO: 1567 - DNA, 20 bp, synthetic construct
  source 1..20: mol_type = other DNA
gcaaagtccaatgcagccag

SEQ ID NO: 1568 - DNA, 20 bp, synthetic construct
  source 1..20: mol_type = other DNA
ggaggaggacgctgatcagc

SEQ ID NO: 1569 - DNA, 20 bp, synthetic construct
  source 1..20: mol_type = other DNA
aggtgagcccactcaggagg

SEQ ID NO: 1570 - DNA, 20 bp, synthetic construct
  source 1..20: mol_type = other DNA
ggtttccgcagaataaaaag

SEQ ID NO: 1571 - DNA, 20 bp, synthetic construct
  source 1..20: mol_type = other DNA
tcactctatatgctctgtac

SEQ ID NO: 1572 - DNA, 20 bp, synthetic construct
  source 1..20: mol_type = other DNA
tctgtggcttcattttccca

SEQ ID NO: 1573 - DNA, 20 bp, synthetic construct
  source 1..20: mol_type = other DNA
gtttattatcagtgcgtcca

SEQ ID NO: 1574 - DNA, 20 bp, synthetic construct
  source 1..20: mol_type = other DNA
gcgtctgcaaaatgacccac

SEQ ID NO: 1575 - DNA, 20 bp, synthetic construct
  source 1..20: mol_type = other DNA
gaatccatcttcctgaccct

SEQ ID NO: 1576 - DNA, 20 bp, synthetic construct
  source 1..20: mol_type = other DNA
gcagtgacctggaagatgga

SEQ ID NO: 1577 - DNA, 20 bp, synthetic construct
  source 1..20: mol_type = other DNA
acacgccacattcaaagcca

SEQ ID NO: 1578 - DNA, 20 bp, synthetic construct
  source 1..20: mol_type = other DNA
tgtgcatatgagctggggct

SEQ ID NO: 1579 - DNA, 20 bp, synthetic construct
  source 1..20: mol_type = other DNA
aagcctcaggcaagccccga

SEQ ID NO: 1580 - DNA, 20 bp, synthetic construct
  source 1..20: mol_type = other DNA
ccgcacctgttgttgtgacg

SEQ ID NO: 1581 - DNA, 20 bp, synthetic construct
  source 1..20: mol_type = other DNA
cctcgtcacaacaacaggtg

SEQ ID NO: 1582 - DNA, 20 bp, synthetic construct
  source 1..20: mol_type = other DNA
ctcacgttcatcatggtgcc

SEQ ID NO: 1583 - DNA, 20 bp, synthetic construct
  source 1..20: mol_type = other DNA
ggatacagggctctacacag

SEQ ID NO: 1584 - DNA, 20 bp, synthetic construct
  source 1..20: mol_type = other DNA
ttcacctgtgcatatgagct

SEQ ID NO: 1585 - DNA, 20 bp, synthetic construct
  source 1..20: mol_type = other DNA
gggtccaccttgtcttcccg

SEQ ID NO: 1586 - DNA, 20 bp, synthetic construct
  source 1..20: mol_type = other DNA
ggtccaccttgtcttcccgt

SEQ ID NO: 1587 - DNA, 20 bp, synthetic construct
  source 1..20: mol_type = other DNA
aatccatcttcctgaccctt

SEQ ID NO: 1588 - DNA, 20 bp, synthetic construct
  source 1..20: mol_type = other DNA
attggttgtcccaggacgag

SEQ ID NO: 1589 - DNA, 20 bp, synthetic construct
  source 1..20: mol_type = other DNA
ggcagcggagacagtaagtg

SEQ ID NO: 1590 - DNA, 20 bp, synthetic construct
  source 1..20: mol_type = other DNA
gccaggtgagcccactcagg

SEQ ID NO: 1591 - DNA, 20 bp, synthetic construct
  source 1..20: mol_type = other DNA
gagaatttatcatttcgtgg

SEQ ID NO: 1592 - DNA, 20 bp, synthetic construct
  source 1..20: mol_type = other DNA
ctcgtcacaacaacaggtgc

SEQ ID NO: 1593 - DNA, 20 bp, synthetic construct
  source 1..20: mol_type = other DNA
gtggcttcattttcccatgg

SEQ ID NO: 1594 - DNA, 20 bp, synthetic construct
  source 1..20: mol_type = other DNA
cagccccagctcatatgcac

SEQ ID NO: 1595 - DNA, 20 bp, synthetic construct
  source 1..20: mol_type = other DNA
agaatttatcatttcgtggt

SEQ ID NO: 1596 - DNA, 20 bp, synthetic construct
  source 1..20: mol_type = other DNA
ctgtgcatatgagctggggc

SEQ ID NO: 1597 - DNA, 20 bp, synthetic construct
  source 1..20: mol_type = other DNA
gcttcattttcccatggtgg

SEQ ID NO: 1598 - DNA, 20 bp, synthetic construct
  source 1..20: mol_type = other DNA
gcattgacattggttgtccc

SEQ ID NO: 1599 - DNA, 20 bp, synthetic construct
  source 1..20: mol_type = other DNA
cggccactgtcaatagagag

SEQ ID NO: 1600 - DNA, 20 bp, synthetic construct
  source 1..20: mol_type = other DNA
tcagtgcgtccagggataca

SEQ ID NO: 1601 - DNA, 20 bp, synthetic construct
  source 1..20: mol_type = other DNA
gaatttatcatttcgtggtg

SEQ ID NO: 1602 - DNA, 20 bp, synthetic construct
  source 1..20: mol_type = other DNA
ccaggcaggtaagggcctgt

SEQ ID NO: 1603 - DNA, 20 bp, synthetic construct
  source 1..20: mol_type = other DNA
agcgtctgcaaaatgaccca

SEQ ID NO: 1604 - DNA, 20 bp, synthetic construct
  source 1..20: mol_type = other DNA
cagtcagtttccaggtaggg

SEQ ID NO: 1605 - DNA, 20 bp, synthetic construct
  source 1..20: mol_type = other DNA
ccctgcagtgacctggaaga

SEQ ID NO: 1606 - DNA, 20 bp, synthetic construct
  source 1..20: mol_type = other DNA
ggaggttccctgcagtgacc

SEQ ID NO: 1607 - DNA, 20 bp, synthetic construct
  source 1..20: mol_type = other DNA
ctgcagggaacctccaccat

SEQ ID NO: 1608 - DNA, 20 bp, synthetic construct
  source 1..20: mol_type = other DNA
caccctacctggaaactgac

SEQ ID NO: 1609 - DNA, 20 bp, synthetic construct
  source 1..20: mol_type = other DNA
ggtcagtttctgagactgca

SEQ ID NO: 1610 - DNA, 20 bp, synthetic construct
  source 1..20: mol_type = other DNA
gtcagtttctgagactgcaa

SEQ ID NO: 1611 - DNA, 20 bp, synthetic construct
  source 1..20: mol_type = other DNA
gctccagacacaggagatgt

SEQ ID NO: 1612 - DNA, 20 bp, synthetic construct
  source 1..20: mol_type = other DNA
ccagcttatgttgcatctgt

SEQ ID NO: 1613 - DNA, 20 bp, synthetic construct
  source 1..20: mol_type = other DNA
ctcccagcaggggcagctgc

SEQ ID NO: 1614 - DNA, 20 bp, synthetic construct
  source 1..20: mol_type = other DNA
ttctcaccgaaaagttcccg

SEQ ID NO: 1615 - DNA, 20 bp, synthetic construct
  source 1..20: mol_type = other DNA
cagctggactgtgagtgact

SEQ ID NO: 1616 - DNA, 20 bp, synthetic construct
  source 1..20: mol_type = other DNA
aatggagccacccaatccac

SEQ ID NO: 1617 - DNA, 20 bp, synthetic construct
  source 1..20: mol_type = other DNA
tcgagtacatgaattgcact

SEQ ID NO: 1618 - DNA, 20 bp, synthetic construct
  source 1..20: mol_type = other DNA
agctggactgtgagtgacta

SEQ ID NO: 1619 - DNA, 20 bp, synthetic construct
  source 1..20: mol_type = other DNA
agtcactcacagtccagctg

SEQ ID NO: 1620 - DNA, 20 bp, synthetic construct
  source 1..20: mol_type = other DNA
caaaacactgaacctctggg

SEQ ID NO: 1621 - DNA, 20 bp, synthetic construct
  source 1..20: mol_type = other DNA
aggaataagagggatgtgaa

SEQ ID NO: 1622 - DNA, 20 bp, synthetic construct
  source 1..20: mol_type = other DNA
ccaataatgcagagtgaggt

SEQ ID NO: 1623 - DNA, 20 bp, synthetic construct
  source 1..20: mol_type = other DNA
ctgcagttttagcatctgtg

SEQ ID NO: 1624 - DNA, 20 bp, synthetic construct
  source 1..20: mol_type = other DNA
gttaggttctctggagccca

SEQ ID NO: 1625 - DNA, 20 bp, synthetic construct
  source 1..20: mol_type = other DNA
ggggcagctgcaggaataag

SEQ ID NO: 1626 - DNA, 20 bp, synthetic construct
  source 1..20: mol_type = other DNA
tggagccacccaatccactg

SEQ ID NO: 1627 - DNA, 20 bp, synthetic construct
  source 1..20: mol_type = other DNA
tgctcccccagtggattggg

SEQ ID NO: 1628 - DNA, 20 bp, synthetic construct
  source 1..20: mol_type = other DNA
aaacactgaacctctgggag

SEQ ID NO: 1629 - DNA, 20 bp, synthetic construct
  source 1..20: mol_type = other DNA
taatgcagagtgaggttggt

SEQ ID NO: 1630 - DNA, 20 bp, synthetic construct
  source 1..20: mol_type = other DNA
aaaacactgaacctctggga

SEQ ID NO: 1631 - DNA, 20 bp, synthetic construct
  source 1..20: mol_type = other DNA
cataccaataatgcagagtg

SEQ ID NO: 1632 - DNA, 20 bp, synthetic construct
  source 1..20: mol_type = other DNA
gggcagctgcaggaataaga

SEQ ID NO: 1633 - DNA, 20 bp, synthetic construct
  source 1..20: mol_type = other DNA
tctctcctggcctcagcgac

SEQ ID NO: 1634 - DNA, 20 bp, synthetic construct
  source 1..20: mol_type = other DNA
catagagtcacctggaatct

SEQ ID NO: 1635 - DNA, 20 bp, synthetic construct
  source 1..20: mol_type = other DNA
aggggaacaggacctggtcc

SEQ ID NO: 1636 - DNA, 20 bp, synthetic construct
  source 1..20: mol_type = other DNA
gcaggactacaaccgcgagg

SEQ ID NO: 1637 - DNA, 20 bp, synthetic construct
  source 1..20: mol_type = other DNA
taaacagtgcccaagcctgg

SEQ ID NO: 1638 - DNA, 20 bp, synthetic construct
  source 1..20: mol_type = other DNA
ccgcaggcgcgtcttccagg

SEQ ID NO: 1639 - DNA, 20 bp, synthetic construct
  source 1..20: mol_type = other DNA
agtacaggcagatgtgcagc

SEQ ID NO: 1640 - DNA, 20 bp, synthetic construct
  source 1..20: mol_type = other DNA
cgttctcccacaccagcccg

SEQ ID NO: 1641 - DNA, 20 bp, synthetic construct
  source 1..20: mol_type = other DNA
tcttgttcaaagcgcaccgc

SEQ ID NO: 1642 - DNA, 20 bp, synthetic construct
  source 1..20: mol_type = other DNA
aaacagtgcccaagcctggt

SEQ ID NO: 1643 - DNA, 20 bp, synthetic construct
  source 1..20: mol_type = other DNA
acgtggtcagctccttcacg

SEQ ID NO: 1644 - DNA, 20 bp, synthetic construct
  source 1..20: mol_type = other DNA
tgggagatccggcagccctc

SEQ ID NO: 1645 - DNA, 20 bp, synthetic construct
  source 1..20: mol_type = other DNA
gggagatccggcagccctcg

SEQ ID NO: 1646 - DNA, 20 bp, synthetic construct
  source 1..20: mol_type = other DNA
atgggagatccggcagccct

SEQ ID NO: 1647 - DNA, 20 bp, synthetic construct
  source 1..20: mol_type = other DNA
gtgtacaggattgttcctga

SEQ ID NO: 1648 - DNA, 20 bp, synthetic construct
  source 1..20: mol_type = other DNA
cgtcccagtagatcctgctc

SEQ ID NO: 1649 - DNA, 20 bp, synthetic construct
  source 1..20: mol_type = other DNA
ctaccgggaaatcctcgtga

SEQ ID NO: 1650 - DNA, 20 bp, synthetic construct
  source 1..20: mol_type = other DNA
cgcaggcgcgtcttccaggt

SEQ ID NO: 1651 - DNA, 20 bp, synthetic construct
  source 1..20: mol_type = other DNA
caagcaggactacaaccgcg

SEQ ID NO: 1652 - DNA, 20 bp, synthetic construct
  source 1..20: mol_type = other DNA
ctgcaagcgtttgctcacca

SEQ ID NO: 1653 - DNA, 20 bp, synthetic construct
  source 1..20: mol_type = other DNA
gccggagaccttgaagagcg

SEQ ID NO: 1654 - DNA, 20 bp, synthetic construct
  source 1..20: mol_type = other DNA
gctgccagaaattgtttggt

SEQ ID NO: 1655 - DNA, 20 bp, synthetic construct
  source 1..20: mol_type = other DNA
tccagcagtgattcataatc

SEQ ID NO: 1656 - DNA, 20 bp, synthetic construct
  source 1..20: mol_type = other DNA
ctcaccaaatgaccacacat

SEQ ID NO: 1657 - DNA, 20 bp, synthetic construct
  source 1..20: mol_type = other DNA
gctatcaaaaccattcggga

SEQ ID NO: 1658 - DNA, 20 bp, synthetic construct
  source 1..20: mol_type = other DNA
ttcctggaggaaaaagacaa

SEQ ID NO: 1659 - DNA, 20 bp, synthetic construct
  source 1..20: mol_type = other DNA
catttggtgagtgtcatgct

SEQ ID NO: 1660 - DNA, 20 bp, synthetic construct
  source 1..20: mol_type = other DNA
tccataccttacaacagcct

SEQ ID NO: 1661 - DNA, 20 bp, synthetic construct
  source 1..20: mol_type = other DNA
tttgattcgggagagctcaa

SEQ ID NO: 1662 - DNA, 20 bp, synthetic construct
  source 1..20: mol_type = other DNA
actgaaagagaaaacctctg

SEQ ID NO: 1663 - DNA, 20 bp, synthetic construct
  source 1..20: mol_type = other DNA
gctccttctttgccctggaa

SEQ ID NO: 1664 - DNA, 20 bp, synthetic construct
  source 1..20: mol_type = other DNA
tcctggaggaaaaagacaag

SEQ ID NO: 1665 - DNA, 20 bp, synthetic construct
  source 1..20: mol_type = other DNA
aactatcaccaacataatgg

SEQ ID NO: 1666 - DNA, 20 bp, synthetic construct
  source 1..20: mol_type = other DNA
accagattatgaatcactgc

SEQ ID NO: 1667 - DNA, 20 bp, synthetic construct
  source 1..20: mol_type = other DNA
gcttacctcctccattatgt

SEQ ID NO: 1668 - DNA, 20 bp, synthetic construct
  source 1..20: mol_type = other DNA
gataccggagtcgagtcacc

SEQ ID NO: 1669 - DNA, 20 bp, synthetic construct
  source 1..20: mol_type = other DNA
aaagtatgccaggctggctt

SEQ ID NO: 1670 - DNA, 20 bp, synthetic construct
  source 1..20: mol_type = other DNA
tataaagcattatcacatca

SEQ ID NO: 1671 - DNA, 20 bp, synthetic construct
  source 1..20: mol_type = other DNA
gcatactttgaagatcgtca

SEQ ID NO: 1672 - DNA, 20 bp, synthetic construct
  source 1..20: mol_type = other DNA
ggctgccagaaattgtttgg

SEQ ID NO: 1673 - DNA, 20 bp, synthetic construct
  source 1..20: mol_type = other DNA
tgatgagctgttcttccagg

SEQ ID NO: 1674 - DNA, 20 bp, synthetic construct
  source 1..20: mol_type = other DNA
tgaaggctccttctttgccc

SEQ ID NO: 1675 - DNA, 20 bp, synthetic construct
  source 1..20: mol_type = other DNA
gatcagtacaccagttccac

SEQ ID NO: 1676 - DNA, 20 bp, synthetic construct
  source 1..20: mol_type = other DNA
ttcttgtaggtgtgctgatg

SEQ ID NO: 1677 - DNA, 20 bp, synthetic construct
  source 1..20: mol_type = other DNA
ttcaggtaagtccatcaggt

SEQ ID NO: 1678 - DNA, 20 bp, synthetic construct
  source 1..20: mol_type = other DNA
ttgacgcagcagtctggaga

SEQ ID NO: 1679 - DNA, 20 bp, synthetic construct
  source 1..20: mol_type = other DNA
gaagctgaaaagagaaaaac

SEQ ID NO: 1680 - DNA, 20 bp, synthetic construct
  source 1..20: mol_type = other DNA
aagcggactttaaagttcga

SEQ ID NO: 1681 - DNA, 20 bp, synthetic construct
  source 1..20: mol_type = other DNA
cctggaatcccttaccatga

SEQ ID NO: 1682 - DNA, 20 bp, synthetic construct
  source 1..20: mol_type = other DNA
tatcaccaacataatggagg

SEQ ID NO: 1683 - DNA, 20 bp, synthetic construct
  source 1..20: mol_type = other DNA
ggaggtaagctctagagcag

SEQ ID NO: 1684 - DNA, 20 bp, synthetic construct
  source 1..20: mol_type = other DNA
agtctcttaccattcttggt

SEQ ID NO: 1685 - DNA, 20 bp, synthetic construct
  source 1..20: mol_type = other DNA
tcactcaccctgttgtcttc

SEQ ID NO: 1686 - DNA, 20 bp, synthetic construct
  source 1..20: mol_type = other DNA
catccagacacatgcccagc

SEQ ID NO: 1687 - DNA, 20 bp, synthetic construct
  source 1..20: mol_type = other DNA
agacttggtatgagcatgca

SEQ ID NO: 1688 - DNA, 20 bp, synthetic construct
  source 1..20: mol_type = other DNA
gatttcggttgtacaagccc

SEQ ID NO: 1689 - DNA, 20 bp, synthetic construct
  source 1..20: mol_type = other DNA
aggaggtaagctctagagca

SEQ ID NO: 1690 - DNA, 20 bp, synthetic construct
  source 1..20: mol_type = other DNA
cagctggagaagcttgcaac

SEQ ID NO: 1691 - DNA, 20 bp, synthetic construct
  source 1..20: mol_type = other DNA
ctttggttaacacaaagaag

SEQ ID NO: 1692 - DNA, 20 bp, synthetic construct
  source 1..20: mol_type = other DNA
catactttgaagatcgtcat

SEQ ID NO: 1693 - DNA, 20 bp, synthetic construct
  source 1..20: mol_type = other DNA
gaggaggtaagctctagagc

SEQ ID NO: 1694 - DNA, 20 bp, synthetic construct
  source 1..20: mol_type = other DNA
tattgtaccacctgaaagca

SEQ ID NO: 1695 - DNA, 20 bp, synthetic construct
  source 1..20: mol_type = other DNA
tgtctgactttgggatgaca

SEQ ID NO: 1696 - DNA, 20 bp, synthetic construct
  source 1..20: mol_type = other DNA
agccagttgacgcagcagtc

SEQ ID NO: 1697 - DNA, 20 bp, synthetic construct
  source 1..20: mol_type = other DNA
cgcagcagtctggagaaggc

SEQ ID NO: 1698 - DNA, 20 bp, synthetic construct
  source 1..20: mol_type = other DNA
atccagacacatgcccagca

SEQ ID NO: 1699 - DNA, 20 bp, synthetic construct
  source 1..20: mol_type = other DNA
gaagcggactttaaagttcg

SEQ ID NO: 1700 - DNA, 20 bp, synthetic construct
  source 1..20: mol_type = other DNA
gggtgcgtagataatctgac

SEQ ID NO: 1701 - DNA, 20 bp, synthetic construct
  source 1..20: mol_type = other DNA
tcttgtaggtgtgctgatgt

SEQ ID NO: 1702 - DNA, 20 bp, synthetic construct
  source 1..20: mol_type = other DNA
gagacttggtatgagcatgc

SEQ ID NO: 1703 - DNA, 20 bp, synthetic construct
  source 1..20: mol_type = other DNA
gacaaggtaaaagagggatg

SEQ ID NO: 1704 - DNA, 20 bp, synthetic construct
  source 1..20: mol_type = other DNA
caccgtgtctgttttcacca

SEQ ID NO: 1705 - DNA, 20 bp, synthetic construct
  source 1..20: mol_type = other DNA
tcggttgtacaagccccggc

SEQ ID NO: 1706 - DNA, 20 bp, synthetic construct
  source 1..20: mol_type = other DNA
cctgaaacgggtatttatag

SEQ ID NO: 1707 - DNA, 20 bp, synthetic construct
  source 1..20: mol_type = other DNA
gggccagcacccagcgctgc

SEQ ID NO: 1708 - DNA, 20 bp, synthetic construct
  source 1..20: mol_type = other DNA
caatttctggcagcctggag

SEQ ID NO: 1709 - DNA, 20 bp, synthetic construct
  source 1..20: mol_type = other DNA
ctatcaaaaccattcgggaa

SEQ ID NO: 1710 - DNA, 20 bp, synthetic construct
  source 1..20: mol_type = other DNA
atcagcacacctacaagaaa

SEQ ID NO: 1711 - DNA, 20 bp, synthetic construct
  source 1..20: mol_type = other DNA
accctgttgtcttcaggagt

SEQ ID NO: 1712 - DNA, 20 bp, synthetic construct
  source 1..20: mol_type = other DNA
tttcaggtaagtccatcagg

SEQ ID NO: 1713 - DNA, 20 bp, synthetic construct
  source 1..20: mol_type = other DNA
tcttgatgagctgttcttcc

SEQ ID NO: 1714 - DNA, 20 bp, synthetic construct
  source 1..20: mol_type = other DNA
ttcatgatccagttcttgaa

SEQ ID NO: 1715 - DNA, 20 bp, synthetic construct
  source 1..20: mol_type = other DNA
aaaccgaagcaactcagagg

SEQ ID NO: 1716 - DNA, 20 bp, synthetic construct
  source 1..20: mol_type = other DNA
ttgctccagatcgtgagagc

SEQ ID NO: 1717 - DNA, 20 bp, synthetic construct
  source 1..20: mol_type = other DNA
tgaaaaccgaagcaactcag

SEQ ID NO: 1718 - DNA, 20 bp, synthetic construct
  source 1..20: mol_type = other DNA
ctctccagagaccagaagat

SEQ ID NO: 1719 - DNA, 20 bp, synthetic construct
  source 1..20: mol_type = other DNA
tcagccagctccttacatga

SEQ ID NO: 1720 - DNA, 20 bp, synthetic construct
  source 1..20: mol_type = other DNA
atgacgagaacaccaagctc

SEQ ID NO: 1721 - DNA, 20 bp, synthetic construct
  source 1..20: mol_type = other DNA
ttcatcaagctcagtgaccc

SEQ ID NO: 1722 - DNA, 20 bp, synthetic construct
  source 1..20: mol_type = other DNA
gacagccattctgtatgttg

SEQ ID NO: 1723 - DNA, 20 bp, synthetic construct
  source 1..20: mol_type = other DNA
catgaggatgttgtcaaagt

SEQ ID NO: 1724 - DNA, 20 bp, synthetic construct
  source 1..20: mol_type = other DNA
cggaagaaaggcctctgatt

SEQ ID NO: 1725 - DNA, 20 bp, synthetic construct
  source 1..20: mol_type = other DNA
tcccatacctcatccggtag

SEQ ID NO: 1726 - DNA, 20 bp, synthetic construct
  source 1..20: mol_type = other DNA
tcacttccacccctggctca

SEQ ID NO: 1727 - DNA, 20 bp, synthetic construct
  source 1..20: mol_type = other DNA
tcccaaggtgctcgccctga

SEQ ID NO: 1728 - DNA, 20 bp, synthetic construct
  source 1..20: mol_type = other DNA
tccactaccggatgaggtat

SEQ ID NO: 1729 - DNA, 20 bp, synthetic construct
  source 1..20: mol_type = other DNA
gacggtatgttatgcaaggc

SEQ ID NO: 1730 - DNA, 20 bp, synthetic construct
  source 1..20: mol_type = other DNA
catccggtagtggagccgga

SEQ ID NO: 1731 - DNA, 20 bp, synthetic construct
  source 1..20: mol_type = other DNA
cggtgcatgaagagatccag

SEQ ID NO: 1732 - DNA, 20 bp, synthetic construct
  source 1..20: mol_type = other DNA
cagcaggttggagatttctg

SEQ ID NO: 1733 - DNA, 20 bp, synthetic construct
  source 1..20: mol_type = other DNA
ggcagccagcatgatgagac

SEQ ID NO: 1734 - DNA, 20 bp, synthetic construct
  source 1..20: mol_type = other DNA
tctccttgatgccagctcac

SEQ ID NO: 1735 - DNA, 20 bp, synthetic construct
  source 1..20: mol_type = other DNA
gtcggtgcagaggtaatgat

SEQ ID NO: 1736 - DNA, 20 bp, synthetic construct
  source 1..20: mol_type = other DNA
ctccactaccggatgaggta

SEQ ID NO: 1737 - DNA, 20 bp, synthetic construct
  source 1..20: mol_type = other DNA
acggtatgttatgcaaggct

SEQ ID NO: 1738 - DNA, 20 bp, synthetic construct
  source 1..20: mol_type = other DNA
cggtatgttatgcaaggctg

SEQ ID NO: 1739 - DNA, 20 bp, synthetic construct
  source 1..20: mol_type = other DNA
tcggaagaaaggcctctgat

SEQ ID NO: 1740 - DNA, 20 bp, synthetic construct
  source 1..20: mol_type = other DNA
tctccaaagaagcagaaaaa

SEQ ID NO: 1741 - DNA, 20 bp, synthetic construct
  source 1..20: mol_type = other DNA
gaggataaagacctggtcca

SEQ ID NO: 1742 - DNA, 20 bp, synthetic construct
  source 1..20: mol_type = other DNA
gtagcagatttcccagagcg

SEQ ID NO: 1743 - DNA, 20 bp, synthetic construct
  source 1..20: mol_type = other DNA
ttgggaaggttgagctctgc

SEQ ID NO: 1744 - DNA, 20 bp, synthetic construct
  source 1..20: mol_type = other DNA
ctcatgatggctcggaagaa

SEQ ID NO: 1745 - DNA, 20 bp, synthetic construct
  source 1..20: mol_type = other DNA
taatgtctctcatgatggct

SEQ ID NO: 1746 - DNA, 20 bp, synthetic construct
  source 1..20: mol_type = other DNA
aagagagattctatgaaagc

SEQ ID NO: 1747 - DNA, 20 bp, synthetic construct
  source 1..20: mol_type = other DNA
ggagcagccccagcccgtcg

SEQ ID NO: 1748 - DNA, 20 bp, synthetic construct
  source 1..20: mol_type = other DNA
ccagcacttcttctgcaagg

SEQ ID NO: 1749 - DNA, 20 bp, synthetic construct
  source 1..20: mol_type = other DNA
cctcacctcctgttctccct

SEQ ID NO: 1750 - DNA, 20 bp, synthetic construct
  source 1..20: mol_type = other DNA
ccagcaggacaggtcctccg

SEQ ID NO: 1751 - DNA, 20 bp, synthetic construct
  source 1..20: mol_type = other DNA
atcaggtcgcgcaggcttgg

SEQ ID NO: 1752 - DNA, 20 bp, synthetic construct
  source 1..20: mol_type = other DNA
tggatcaggtcgcgcaggct

SEQ ID NO: 1753 - DNA, 20 bp, synthetic construct
  source 1..20: mol_type = other DNA
catgagctcgtgaacctgag

SEQ ID NO: 1754 - DNA, 20 bp, synthetic construct
  source 1..20: mol_type = other DNA
ggaatagagaaggaggcggc

SEQ ID NO: 1755 - DNA, 20 bp, synthetic construct
  source 1..20: mol_type = other DNA
cctggagcacctctttgccc

SEQ ID NO: 1756 - DNA, 20 bp, synthetic construct
  source 1..20: mol_type = other DNA
gtaccactccctctttgctc

SEQ ID NO: 1757 - DNA, 20 bp, synthetic construct
  source 1..20: mol_type = other DNA
ggccacccaggggatcctgt

SEQ ID NO: 1758 - DNA, 20 bp, synthetic construct
  source 1..20: mol_type = other DNA
cgcgcaagcagccgctgggc

SEQ ID NO: 1759 - DNA, 20 bp, synthetic construct
  source 1..20: mol_type = other DNA
catgcactgttgaatcagca

SEQ ID NO: 1760 - DNA, 20 bp, synthetic construct
  source 1..20: mol_type = other DNA
gcaaagaggtgctccaggac

SEQ ID NO: 1761 - DNA, 20 bp, synthetic construct
  source 1..20: mol_type = other DNA
cgaatgacggctcggaagga

SEQ ID NO: 1762 - DNA, 20 bp, synthetic construct
  source 1..20: mol_type = other DNA
ttcatcaagctgagtgaccc

SEQ ID NO: 1763 - DNA, 20 bp, synthetic construct
  source 1..20: mol_type = other DNA
gcacttcttctgcaaggagg

SEQ ID NO: 1764 - DNA, 20 bp, synthetic construct
  source 1..20: mol_type = other DNA
gggccagctctgtccacttg

SEQ ID NO: 1765 - DNA, 20 bp, synthetic construct
  source 1..20: mol_type = other DNA
tcaggttggacttttctatg

SEQ ID NO: 1766 - DNA, 20 bp, synthetic construct
  source 1..20: mol_type = other DNA
ggcgctcacctcagcagggc

SEQ ID NO: 1767 - DNA, 20 bp, synthetic construct
  source 1..20: mol_type = other DNA
caccagatagttgagggcgt

SEQ ID NO: 1768 - DNA, 20 bp, synthetic construct
  source 1..20: mol_type = other DNA
ggccagctctgtccacttgg

SEQ ID NO: 1769 - DNA, 20 bp, synthetic construct
  source 1..20: mol_type = other DNA
ctccatgccctgcgggcggg

SEQ ID NO: 1770 - DNA, 20 bp, synthetic construct
  source 1..20: mol_type = other DNA
agcgggcagcagcacatgca

SEQ ID NO: 1771 - DNA, 20 bp, synthetic construct
  source 1..20: mol_type = other DNA
gtacagcaggacttgggtgc

SEQ ID NO: 1772 - DNA, 20 bp, synthetic construct
  source 1..20: mol_type = other DNA
gccatgagtgcaacttgcct

SEQ ID NO: 1773 - DNA, 20 bp, synthetic construct
  source 1..20: mol_type = other DNA
gtcacgaatgacggctcgga

SEQ ID NO: 1774 - DNA, 20 bp, synthetic construct
  source 1..20: mol_type = other DNA
ggcaggccttgtagctgcag

SEQ ID NO: 1775 - DNA, 20 bp, synthetic construct
  source 1..20: mol_type = other DNA
gatcaggtcgcgcaggcttg

SEQ ID NO: 1776 - DNA, 20 bp, synthetic construct
  source 1..20: mol_type = other DNA
gctccaggactggcaggtca

SEQ ID NO: 1777 - DNA, 20 bp, synthetic construct
  source 1..20: mol_type = other DNA
ggatcaggtcgcgcaggctt

SEQ ID NO: 1778 - DNA, 20 bp, synthetic construct
  source 1..20: mol_type = other DNA
ccagctgtgagatgtacttg

SEQ ID NO: 1779 - DNA, 20 bp, synthetic construct
  source 1..20: mol_type = other DNA
gcttccagctggctggcacc

SEQ ID NO: 1780 - DNA, 20 bp, synthetic construct
  source 1..20: mol_type = other DNA
agcgggcacctgaagagatg

SEQ ID NO: 1781 - DNA, 20 bp, synthetic construct
  source 1..20: mol_type = other DNA
ccatgagtgcaacttgcctg

SEQ ID NO: 1782 - DNA, 20 bp, synthetic construct
  source 1..20: mol_type = other DNA
agacgcccccgggcccagcc

SEQ ID NO: 1783 - DNA, 20 bp, synthetic construct
  source 1..20: mol_type = other DNA
tctcttcctagtctctcaca

SEQ ID NO: 1784 - DNA, 20 bp, synthetic construct
  source 1..20: mol_type = other DNA
cgccactaccgaaagcacac

SEQ ID NO: 1785 - DNA, 20 bp, synthetic construct
  source 1..20: mol_type = other DNA
gatggcactggaatggccgg

SEQ ID NO: 1786 - DNA, 20 bp, synthetic construct
  source 1..20: mol_type = other DNA
gcgcatctgcgcacgcacac

SEQ ID NO: 1787 - DNA, 20 bp, synthetic construct
  source 1..20: mol_type = other DNA
ccgtcccagttgcagtggta

SEQ ID NO: 1788 - DNA, 20 bp, synthetic construct
  source 1..20: mol_type = other DNA
cgcagccgtcccagttgcag

SEQ ID NO: 1789 - DNA, 20 bp, synthetic construct
  source 1..20: mol_type = other DNA
tcgcacagatggcactggaa

SEQ ID NO: 1790 - DNA, 20 bp, synthetic construct
  source 1..20: mol_type = other DNA
acagatggcactggaatggc

SEQ ID NO: 1791 - DNA, 20 bp, synthetic construct
  source 1..20: mol_type = other DNA
agaaggcacgatcgcacaga

SEQ ID NO: 1792 - DNA, 20 bp, synthetic construct
  source 1..20: mol_type = other DNA
gtagctgcaggtgtgagtgg

SEQ ID NO: 1793 - DNA, 20 bp, synthetic construct
  source 1..20: mol_type = other DNA
gcgccactaccgaaagcaca

SEQ ID NO: 1794 - DNA, 20 bp, synthetic construct
  source 1..20: mol_type = other DNA
ccgccgccctcacctcctgc

SEQ ID NO: 1795 - DNA, 20 bp, synthetic construct
  source 1..20: mol_type = other DNA
agcgccatggccgggacccg

SEQ ID NO: 1796 - DNA, 20 bp, synthetic construct
  source 1..20: mol_type = other DNA
tctcgacacagcaggtcaag

SEQ ID NO: 1797 - DNA, 20 bp, synthetic construct
  source 1..20: mol_type = other DNA
tctctgctccttttggtgac

SEQ ID NO: 1798 - DNA, 20 bp, synthetic construct
  source 1..20: mol_type = other DNA
cagcacgcaggggaccagga

SEQ ID NO: 1799 - DNA, 20 bp, synthetic construct
  source 1..20: mol_type = other DNA
gccatcaacatggccaggat

SEQ ID NO: 1800 - DNA, 20 bp, synthetic construct
  source 1..20: mol_type = other DNA
gtgtcccaggaactgcatcc

SEQ ID NO: 1801 - DNA, 20 bp, synthetic construct
  source 1..20: mol_type = other DNA
ccagggggcaaccgtgtctg

SEQ ID NO: 1802 - DNA, 20 bp, synthetic construct
  source 1..20: mol_type = other DNA
ggcttcaaagagagggtgag

SEQ ID NO: 1803 - DNA, 20 bp, synthetic construct
  source 1..20: mol_type = other DNA
actcacgaggccgtttgaac

SEQ ID NO: 1804 - DNA, 20 bp, synthetic construct
  source 1..20: mol_type = other DNA
gatggcctcctccatctgca

SEQ ID NO: 1805 - DNA, 20 bp, synthetic construct
  source 1..20: mol_type = other DNA
ccaggtgagtgggaaactgg

SEQ ID NO: 1806 - DNA, 20 bp, synthetic construct
  source 1..20: mol_type = other DNA
tactcccggctgccatctgt

SEQ ID NO: 1807 - DNA, 20 bp, synthetic construct
  source 1..20: mol_type = other DNA
accctgaaaggaagtgaaaa

SEQ ID NO: 1808 - DNA, 20 bp, synthetic construct
  source 1..20: mol_type = other DNA
gtaggagcctgggaaagaga

SEQ ID NO: 1809 - DNA, 20 bp, synthetic construct
  source 1..20: mol_type = other DNA
cctcagacacggttgccccc

SEQ ID NO: 1810 - DNA, 20 bp, synthetic construct
  source 1..20: mol_type = other DNA
cagcaggagccccagcacgc

SEQ ID NO: 1811 - DNA, 20 bp, synthetic construct
  source 1..20: mol_type = other DNA
cactggagaaggcactgtct

SEQ ID NO: 1812 - DNA, 20 bp, synthetic construct
  source 1..20: mol_type = other DNA
cctccatctgcaggggagct

SEQ ID NO: 1813 - DNA, 20 bp, synthetic construct
  source 1..20: mol_type = other DNA
atggcctcctccatctgcag

SEQ ID NO: 1814 - DNA, 20 bp, synthetic construct
  source 1..20: mol_type = other DNA
tctgcaggggagctcggagc

SEQ ID NO: 1815 - DNA, 20 bp, synthetic construct
  source 1..20: mol_type = other DNA
gccccagcacgcaggggacc

SEQ ID NO: 1816 - DNA, 20 bp, synthetic construct
  source 1..20: mol_type = other DNA
taccaccatcagaatcccgc

SEQ ID NO: 1817 - DNA, 20 bp, synthetic construct
  source 1..20: mol_type = other DNA
ctacctgtgagtggccaggt

SEQ ID NO: 1818 - DNA, 20 bp, synthetic construct
  source 1..20: mol_type = other DNA
gctacctgtgagtggccagg

SEQ ID NO: 1819 - DNA, 20 bp, synthetic construct
  source 1..20: mol_type = other DNA
ctactcacgggatggggagc

SEQ ID NO: 1820 - DNA, 20 bp, synthetic construct
  source 1..20: mol_type = other DNA
cacacacagtgccatcaaca

SEQ ID NO: 1821 - DNA, 20 bp, synthetic construct
  source 1..20: mol_type = other DNA
cggcctcgtgagtacaagga

SEQ ID NO: 1822 - DNA, 20 bp, synthetic construct
  source 1..20: mol_type = other DNA
caccctgaaaggaagtgaaa

SEQ ID NO: 1823 - DNA, 20 bp, synthetic construct
  source 1..20: mol_type = other DNA
cacgggatggggagcaggtc

SEQ ID NO: 1824 - DNA, 20 bp, synthetic construct
  source 1..20: mol_type = other DNA
gcaggagccccagcacgcag

SEQ ID NO: 1825 - DNA, 20 bp, synthetic construct
  source 1..20: mol_type = other DNA
tggccaggatgggcagcagc

SEQ ID NO: 1826 - DNA, 20 bp, synthetic construct
  source 1..20: mol_type = other DNA
agcaggagccccagcacgca

SEQ ID NO: 1827 - DNA, 20 bp, synthetic construct
  source 1..20: mol_type = other DNA
gcttcaaagagagggtgaga

SEQ ID NO: 1828 - DNA, 20 bp, synthetic construct
  source 1..20: mol_type = other DNA
acggcctcgtgagtacaagg

SEQ ID NO: 1829 - DNA, 20 bp, synthetic construct
  source 1..20: mol_type = other DNA
cccactcacctggcagtctg

SEQ ID NO: 1830 - DNA, 20 bp, synthetic construct
  source 1..20: mol_type = other DNA
ccaggaggcagaggaagtgg

SEQ ID NO: 1831 - DNA, 20 bp, synthetic construct
  source 1..20: mol_type = other DNA
gcagatggaggaggccatcc

SEQ ID NO: 1832 - DNA, 20 bp, synthetic construct
  source 1..20: mol_type = other DNA
accaccatcagaatcccgcc

SEQ ID NO: 1833 - DNA, 20 bp, synthetic construct
  source 1..20: mol_type = other DNA
gctcctgcactcagcacccc

SEQ ID NO: 1834 - DNA, 20 bp, synthetic construct
  source 1..20: mol_type = other DNA
agacgaggaggacggggaac

SEQ ID NO: 1835 - DNA, 20 bp, synthetic construct
  source 1..20: mol_type = other DNA
gcacggtaagaggcgagaca

SEQ ID NO: 1836 - DNA, 20 bp, synthetic construct
  source 1..20: mol_type = other DNA
cgggagagcgagagcaccgc

SEQ ID NO: 1837 - DNA, 20 bp, synthetic construct
  source 1..20: mol_type = other DNA
gtgattcagaacctggagcg

SEQ ID NO: 1838 - DNA, 20 bp, synthetic construct
  source 1..20: mol_type = other DNA
cctgcagattgcagaaggca

SEQ ID NO: 1839 - DNA, 20 bp, synthetic construct
  source 1..20: mol_type = other DNA
cgtagggatgaccaacccgg

SEQ ID NO: 1840 - DNA, 20 bp, synthetic construct
  source 1..20: mol_type = other DNA
ggtcatccctacgggttgat

SEQ ID NO: 1841 - DNA, 20 bp, synthetic construct
  source 1..20: mol_type = other DNA
atgagttggtacagctcctc

SEQ ID NO: 1842 - DNA, 20 bp, synthetic construct
  source 1..20: mol_type = other DNA
gaagaaccagctgtgcaggg

SEQ ID NO: 1843 - DNA, 20 bp, synthetic construct
  source 1..20: mol_type = other DNA
ccaggttctgaatcacctcc

SEQ ID NO: 1844 - DNA, 20 bp, synthetic construct
  source 1..20: mol_type = other DNA
cgtcgggctcactggtgtaa

SEQ ID NO: 1845 - DNA, 20 bp, synthetic construct
  source 1..20: mol_type = other DNA
ccgggagagcgagagcaccg

SEQ ID NO: 1846 - DNA, 20 bp, synthetic construct
  source 1..20: mol_type = other DNA
agcatctgcgaggacgaggg

SEQ ID NO: 1847 - DNA, 20 bp, synthetic construct
  source 1..20: mol_type = other DNA
tccaggttctgaatcacctc

SEQ ID NO: 1848 - DNA, 20 bp, synthetic construct
  source 1..20: mol_type = other DNA
gcgccctgacaactgtccag

SEQ ID NO: 1849 - DNA, 20 bp, synthetic construct
  source 1..20: mol_type = other DNA
ccctcagggaccatgggctg

SEQ ID NO: 1850 - DNA, 20 bp, synthetic construct
  source 1..20: mol_type = other DNA
tgagccgcaaggacgcggag

SEQ ID NO: 1851 - DNA, 20 bp, synthetic construct
  source 1..20: mol_type = other DNA
tcaccttgcagtggggaagc

SEQ ID NO: 1852 - DNA, 20 bp, synthetic construct
  source 1..20: mol_type = other DNA
tcctcccaccacggcttctg

SEQ ID NO: 1853 - DNA, 20 bp, synthetic construct
  source 1..20: mol_type = other DNA
ttacttgggctgccatgtcc

SEQ ID NO: 1854 - DNA, 20 bp, synthetic construct
  source 1..20: mol_type = other DNA
tgtactcgttgtcctcaatg

SEQ ID NO: 1855 - DNA, 20 bp, synthetic construct
  source 1..20: mol_type = other DNA
gcctcggccaggaaggcgtc

SEQ ID NO: 1856 - DNA, 20 bp, synthetic construct
  source 1..20: mol_type = other DNA
agcggcagctcctggcgccc

SEQ ID NO: 1857 - DNA, 20 bp, synthetic construct
  source 1..20: mol_type = other DNA
ccgggacttcgaccagaacc

SEQ ID NO: 1858 - DNA, 20 bp, synthetic construct
  source 1..20: mol_type = other DNA
ctgaagcatctgcgaggacg

SEQ ID NO: 1859 - DNA, 20 bp, synthetic construct
  source 1..20: mol_type = other DNA
ggcggtgaagagcctgaagc

SEQ ID NO: 1860 - DNA, 20 bp, synthetic construct
  source 1..20: mol_type = other DNA
accaactcatgaggctgtgc

SEQ ID NO: 1861 - DNA, 20 bp, synthetic construct
  source 1..20: mol_type = other DNA
tccagcacagcctcatgagt

SEQ ID NO: 1862 - DNA, 20 bp, synthetic construct
  source 1..20: mol_type = other DNA
catctgcgaggacgagggag

SEQ ID NO: 1863 - DNA, 20 bp, synthetic construct
  source 1..20: mol_type = other DNA
ctgaatacatggagaatggt

SEQ ID NO: 1864 - DNA, 20 bp, synthetic construct
  source 1..20: mol_type = other DNA
ttgcagctgcttcatgaggt

SEQ ID NO: 1865 - DNA, 20 bp, synthetic construct
  source 1..20: mol_type = other DNA
tggtcatccctacgggttga

SEQ ID NO: 1866 - DNA, 20 bp, synthetic construct
  source 1..20: mol_type = other DNA
gcatctgcgaggacgaggga

SEQ ID NO: 1867 - DNA, 20 bp, synthetic construct
  source 1..20: mol_type = other DNA
ccgtgcccttgccatccagt

SEQ ID NO: 1868 - DNA, 20 bp, synthetic construct
  source 1..20: mol_type = other DNA
ggacgagtgggaggttccca

SEQ ID NO: 1869 - DNA, 20 bp, synthetic construct
  source 1..20: mol_type = other DNA
tgagctgcagccacagccca

SEQ ID NO: 1870 - DNA, 20 bp, synthetic construct
  source 1..20: mol_type = other DNA
ccgctcctgcgccacggagg

SEQ ID NO: 1871 - DNA, 20 bp, synthetic construct
  source 1..20: mol_type = other DNA
tcatgaggttggcctcggcc

SEQ ID NO: 1872 - DNA, 20 bp, synthetic construct
  source 1..20: mol_type = other DNA
gcagctgcaacaccagcggc

SEQ ID NO: 1873 - DNA, 20 bp, synthetic construct
  source 1..20: mol_type = other DNA
cactcgccgctcctgcgcca

SEQ ID NO: 1874 - DNA, 20 bp, synthetic construct
  source 1..20: mol_type = other DNA
ccgaaatggctctgaggtgc

SEQ ID NO: 1875 - DNA, 20 bp, synthetic construct
  source 1..20: mol_type = other DNA
cagcccaagtaaggagactg

SEQ ID NO: 1876 - DNA, 20 bp, synthetic construct
  source 1..20: mol_type = other DNA
tgaagcatctgcgaggacga

SEQ ID NO: 1877 - DNA, 20 bp, synthetic construct
  source 1..20: mol_type = other DNA
gcatggcattcattgaagag

SEQ ID NO: 1878 - DNA, 20 bp, synthetic construct
  source 1..20: mol_type = other DNA
cttgaagaaccagctgtgca

SEQ ID NO: 1879 - DNA, 20 bp, synthetic construct
  source 1..20: mol_type = other DNA
atcctgaatgaatgaatgga

SEQ ID NO: 1880 - DNA, 20 bp, synthetic construct
  source 1..20: mol_type = other DNA
gcctgcggatccctggctgt

SEQ ID NO: 1881 - DNA, 20 bp, synthetic construct
  source 1..20: mol_type = other DNA
gaagccccagaagccgtggt

SEQ ID NO: 1882 - DNA, 20 bp, synthetic construct
  source 1..20: mol_type = other DNA
tgatgatgtagatgggctcc

SEQ ID NO: 1883 - DNA, 20 bp, synthetic construct
  source 1..20: mol_type = other DNA
ccgtaagtggggacccgtcg

SEQ ID NO: 1884 - DNA, 20 bp, synthetic construct
  source 1..20: mol_type = other DNA
accgtgcccttgccatccag

SEQ ID NO: 1885 - DNA, 20 bp, synthetic construct
  source 1..20: mol_type = other DNA
cgggacttcgaccagaacca

SEQ ID NO: 1886 - DNA, 20 bp, synthetic construct
  source 1..20: mol_type = other DNA
cccgttgtagtaccctgggt

SEQ ID NO: 1887 - DNA, 20 bp, synthetic construct
  source 1..20: mol_type = other DNA
gatgagcagctgtggagtgg

SEQ ID NO: 1888 - DNA, 20 bp, synthetic construct
  source 1..20: mol_type = other DNA
cctacgggttgatgggtgaa

SEQ ID NO: 1889 - DNA, 20 bp, synthetic construct
  source 1..20: mol_type = other DNA
gctccgcgtccttgcggctc

SEQ ID NO: 1890 - DNA, 20 bp, synthetic construct
  source 1..20: mol_type = other DNA
ccacagcccatggtccctga

SEQ ID NO: 1891 - DNA, 20 bp, synthetic construct
  source 1..20: mol_type = other DNA
gccccagaagccgtggtggg

SEQ ID NO: 1892 - DNA, 20 bp, synthetic construct
  source 1..20: mol_type = other DNA
tctaacctgggtaagggatg

SEQ ID NO: 1893 - DNA, 20 bp, synthetic construct
  source 1..20: mol_type = other DNA
aaggagccgtgagtgttccc

SEQ ID NO: 1894 - DNA, 20 bp, synthetic construct
  source 1..20: mol_type = other DNA
gtctgcaatcttgcagctca

SEQ ID NO: 1895 - DNA, 20 bp, synthetic construct
  source 1..20: mol_type = other DNA
tgtaaagacaaggggcatca

SEQ ID NO: 1896 - DNA, 20 bp, synthetic construct
  source 1..20: mol_type = other DNA
gtagtaccctgggtcgggga

SEQ ID NO: 1897 - DNA, 20 bp, synthetic construct
  source 1..20: mol_type = other DNA
caggttgtctgtaaagacaa

SEQ ID NO: 1898 - DNA, 20 bp, synthetic construct
  source 1..20: mol_type = other DNA
ccatgccttctgcaatctgc

SEQ ID NO: 1899 - DNA, 20 bp, synthetic construct
  source 1..20: mol_type = other DNA
cctcggccaggaaggcgtcc

SEQ ID NO: 1900 - DNA, 20 bp, synthetic construct
  source 1..20: mol_type = other DNA
ccgacccagggtactacaac

SEQ ID NO: 1901 - DNA, 20 bp, synthetic construct
  source 1..20: mol_type = other DNA
ccccactgcaaggtgacccc

SEQ ID NO: 1902 - DNA, 20 bp, synthetic construct
  source 1..20: mol_type = other DNA
caaggtgaccccaggcagca

SEQ ID NO: 1903 - DNA, 20 bp, synthetic construct
  source 1..20: mol_type = other DNA
caaaggtgggccggtcctct

SEQ ID NO: 1904 - DNA, 20 bp, synthetic construct
  source 1..20: mol_type = other DNA
tcaaaggtgggccggtcctc

SEQ ID NO: 1905 - DNA, 20 bp, synthetic construct
  source 1..20: mol_type = other DNA
agaccacacatctgacttga

SEQ ID NO: 1906 - DNA, 20 bp, synthetic construct
  source 1..20: mol_type = other DNA
ctgaagctggtggagcggct

SEQ ID NO: 1907 - DNA, 20 bp, synthetic construct
  source 1..20: mol_type = other DNA
ggtgtcagacaccagaatgt

SEQ ID NO: 1908 - DNA, 20 bp, synthetic construct
  source 1..20: mol_type = other DNA
ccatgcggtagcctcgctcc

SEQ ID NO: 1909 - DNA, 20 bp, synthetic construct
  source 1..20: mol_type = other DNA
ggcgcaggagcggcgagtgg

SEQ ID NO: 1910 - DNA, 20 bp, synthetic construct
  source 1..20: mol_type = other DNA
caggagcggcgagtggtgga

SEQ ID NO: 1911 - DNA, 20 bp, synthetic construct
  source 1..20: mol_type = other DNA
tcctcgcagatgcttcagat

SEQ ID NO: 1912 - DNA, 20 bp, synthetic construct
  source 1..20: mol_type = other DNA
gcagcagggcctgaaagaca

SEQ ID NO: 1913 - DNA, 20 bp, synthetic construct
  source 1..20: mol_type = other DNA
agttgtcagggcgcaccatg

SEQ ID NO: 1914 - DNA, 20 bp, synthetic construct
  source 1..20: mol_type = other DNA
ttcaggatcgttttcactgt

SEQ ID NO: 1915 - DNA, 20 bp, synthetic construct
  source 1..20: mol_type = other DNA
ccacagctgctcatccgaaa

SEQ ID NO: 1916 - DNA, 20 bp, synthetic construct
  source 1..20: mol_type = other DNA
aggagctgtaccaactcatg

SEQ ID NO: 1917 - DNA, 20 bp, synthetic construct
  source 1..20: mol_type = other DNA
tcccactcgtcctcccacca

SEQ ID NO: 1918 - DNA, 20 bp, synthetic construct
  source 1..20: mol_type = other DNA
gcccatggtccctgagggaa

SEQ ID NO: 1919 - DNA, 20 bp, synthetic construct
  source 1..20: mol_type = other DNA
ctcgctctcccggatgagga

SEQ ID NO: 1920 - DNA, 20 bp, synthetic construct
  source 1..20: mol_type = other DNA
cccggaggtgattcagaacc

SEQ ID NO: 1921 - DNA, 20 bp, synthetic construct
  source 1..20: mol_type = other DNA
gtattcagtgatgatgtaga

SEQ ID NO: 1922 - DNA, 20 bp, synthetic construct
  source 1..20: mol_type = other DNA
gctggttcggctctacgctg

SEQ ID NO: 1923 - DNA, 20 bp, synthetic construct
  source 1..20: mol_type = other DNA
caacgagtacacagccaggg

SEQ ID NO: 1924 - DNA, 20 bp, synthetic construct
  source 1..20: mol_type = other DNA
cgtagagccgaaccagccgc

SEQ ID NO: 1925 - DNA, 20 bp, synthetic construct
  source 1..20: mol_type = other DNA
caagtaaggagactggggag

SEQ ID NO: 1926 - DNA, 20 bp, synthetic construct
  source 1..20: mol_type = other DNA
catgtccaggagtttgttga

SEQ ID NO: 1927 - DNA, 20 bp, synthetic construct
  source 1..20: mol_type = other DNA
cctggggtcaccttgcagtg

SEQ ID NO: 1928 - DNA, 20 bp, synthetic construct
  source 1..20: mol_type = other DNA
cgccagaagccattaactac

SEQ ID NO: 1929 - DNA, 20 bp, synthetic construct
  source 1..20: mol_type = other DNA
ctccgggttggtcatcccta

SEQ ID NO: 1930 - DNA, 20 bp, synthetic construct
  source 1..20: mol_type = other DNA
gatgatgtagatgggctcct

SEQ ID NO: 1931 - DNA, 20 bp, synthetic construct
  source 1..20: mol_type = other DNA
ctcggccaggaaggcgtccg

SEQ ID NO: 1932 - DNA, 20 bp, synthetic construct
  source 1..20: mol_type = other DNA
tgaagcagctgcaacaccag

SEQ ID NO: 1933 - DNA, 20 bp, synthetic construct
  source 1..20: mol_type = other DNA
ggcagcccaagtaaggagac

SEQ ID NO: 1934 - DNA, 20 bp, synthetic construct
  source 1..20: mol_type = other DNA
gtactacaacgggcacacga

SEQ ID NO: 1935 - DNA, 20 bp, synthetic construct
  source 1..20: mol_type = other DNA
gccacagcccatggtccctg

SEQ ID NO: 1936 - DNA, 20 bp, synthetic construct
  source 1..20: mol_type = other DNA
tgcaacaccagcggctggtt

SEQ ID NO: 1937 - DNA, 20 bp, synthetic construct
  source 1..20: mol_type = other DNA
actgaatacatggagaatgg

SEQ ID NO: 1938 - DNA, 20 bp, synthetic construct
  source 1..20: mol_type = other DNA
tgtccacttaatgggaaact

SEQ ID NO: 1939 - DNA, 20 bp, synthetic construct
  source 1..20: mol_type = other DNA
aggttgtctgtaaagacaag

SEQ ID NO: 1940 - DNA, 20 bp, synthetic construct
  source 1..20: mol_type = other DNA
gccgggaaaagtgattcgag

SEQ ID NO: 1941 - DNA, 20 bp, synthetic construct
  source 1..20: mol_type = other DNA
tagtaccctgggtcggggaa

SEQ ID NO: 1942 - DNA, 20 bp, synthetic construct
  source 1..20: mol_type = other DNA
gttctgaatcacctccgggt

SEQ ID NO: 1943 - DNA, 20 bp, synthetic construct
  source 1..20: mol_type = other DNA
gggaaacttggcccctaagg

SEQ ID NO: 1944 - DNA, 20 bp, synthetic construct
  source 1..20: mol_type = other DNA
cgttgtagtaccctgggtcg

SEQ ID NO: 1945 - DNA, 20 bp, synthetic construct
  source 1..20: mol_type = other DNA
ctggacagttcggggaggtg

SEQ ID NO: 1946 - DNA, 20 bp, synthetic construct
  source 1..20: mol_type = other DNA
aacgagtacacagccaggga

SEQ ID NO: 1947 - DNA, 20 bp, synthetic construct
  source 1..20: mol_type = other DNA
tgggtaagggatgcggccgt

SEQ ID NO: 1948 - DNA, 20 bp, synthetic construct
  source 1..20: mol_type = other DNA
gaggttggcctcggccagga

SEQ ID NO: 1949 - DNA, 20 bp, synthetic construct
  source 1..20: mol_type = other DNA
agaagccccagaagccgtgg

SEQ ID NO: 1950 - DNA, 20 bp, synthetic construct
  source 1..20: mol_type = other DNA
cttacccaggttagagccaa

SEQ ID NO: 1951 - DNA, 20 bp, synthetic construct
  source 1..20: mol_type = other DNA
cccagaagccccagaagccg

SEQ ID NO: 1952 - DNA, 20 bp, synthetic construct
  source 1..20: mol_type = other DNA
gctctacgctgtggtcaccc

SEQ ID NO: 1953 - DNA, 20 bp, synthetic construct
  source 1..20: mol_type = other DNA
tcaccatcaagtcagatgtg

SEQ ID NO: 1954 - DNA, 20 bp, synthetic construct
  source 1..20: mol_type = other DNA
gaagcagggcagcatgtccc

SEQ ID NO: 1955 - DNA, 20 bp, synthetic construct
  source 1..20: mol_type = other DNA
tccgaaatggctctgaggtg

SEQ ID NO: 1956 - DNA, 20 bp, synthetic construct
  source 1..20: mol_type = other DNA
ccaggttgtctgtaaagaca

SEQ ID NO: 1957 - DNA, 20 bp, synthetic construct
  source 1..20: mol_type = other DNA
ggtgttgcagctgcttcatg

SEQ ID NO: 1958 - DNA, 20 bp, synthetic construct
  source 1..20: mol_type = other DNA
ggtgaatgtcccgtagttaa

SEQ ID NO: 1959 - DNA, 20 bp, synthetic construct
  source 1..20: mol_type = other DNA
gcctggggtcaccttgcagt

SEQ ID NO: 1960 - DNA, 20 bp, synthetic construct
  source 1..20: mol_type = other DNA
gtcttttgggatcctgctga

SEQ ID NO: 1961 - DNA, 20 bp, synthetic construct
  source 1..20: mol_type = other DNA
ctgcgcaggtagtcaaaggt

SEQ ID NO: 1962 - DNA, 20 bp, synthetic construct
  source 1..20: mol_type = other DNA
agtcctccagcacactgcgc

SEQ ID NO: 1963 - DNA, 20 bp, synthetic construct
  source 1..20: mol_type = other DNA
ggtcaacttgatgcctgaag

SEQ ID NO: 1964 - DNA, 20 bp, synthetic construct
  source 1..20: mol_type = other DNA
ccagaatgttggcagcccga

SEQ ID NO: 1965 - DNA, 20 bp, synthetic construct
  source 1..20: mol_type = other DNA
ggactcactgctccaggatg

SEQ ID NO: 1966 - DNA, 20 bp, synthetic construct
  source 1..20: mol_type = other DNA
cgggctcactggtgtaatgg

SEQ ID NO: 1967 - DNA, 20 bp, synthetic construct
  source 1..20: mol_type = other DNA
ctgtaaagacaaggggcatc

SEQ ID NO: 1968 - DNA, 20 bp, synthetic construct
  source 1..20: mol_type = other DNA
cgctcctgcgccacggaggt

SEQ ID NO: 1969 - DNA, 20 bp, synthetic construct
  source 1..20: mol_type = other DNA
gaaggagccgtgagtgttcc

SEQ ID NO: 1970 - DNA, 20 bp, synthetic construct
  source 1..20: mol_type = other DNA
gcggtgaagagcctgaagca

SEQ ID NO: 1971 - DNA, 20 bp, synthetic construct
  source 1..20: mol_type = other DNA
cttacggcacccggagcttg

SEQ ID NO: 1972 - DNA, 20 bp, synthetic construct
  source 1..20: mol_type = other DNA
gccgccaccctccaatgacg

SEQ ID NO: 1973 - DNA, 20 bp, synthetic construct
  source 1..20: mol_type = other DNA
ccctttcgctcagaggtcct

SEQ ID NO: 1974 - DNA, 20 bp, synthetic construct
  source 1..20: mol_type = other DNA
gacaattactttggcacagg

SEQ ID NO: 1975 - DNA, 20 bp, synthetic construct
  source 1..20: mol_type = other DNA
ccttcccaggatgaagatga

SEQ ID NO: 1976 - DNA, 20 bp, synthetic construct
  source 1..20: mol_type = other DNA
acttacggcacccggagctt

SEQ ID NO: 1977 - DNA, 20 bp, synthetic construct
  source 1..20: mol_type = other DNA
tttgcagaccccaagtcccg

SEQ ID NO: 1978 - DNA, 20 bp, synthetic construct
  source 1..20: mol_type = other DNA
ttgagagaagtatggtggca

SEQ ID NO: 1979 - DNA, 20 bp, synthetic construct
  source 1..20: mol_type = other DNA
atcatacccacctagtgtga

SEQ ID NO: 1980 - DNA, 20 bp, synthetic construct
  source 1..20: mol_type = other DNA
tcatacccacctagtgtgaa

SEQ ID NO: 1981 - DNA, 20 bp, synthetic construct
  source 1..20: mol_type = other DNA
agaagcgagccccatcgatg

SEQ ID NO: 1982 - DNA, 20 bp, synthetic construct
  source 1..20: mol_type = other DNA
tcaggaaaccgcgggacttg

SEQ ID NO: 1983 - DNA, 20 bp, synthetic construct
  source 1..20: mol_type = other DNA
agttgagctgcaaagagaag

SEQ ID NO: 1984 - DNA, 20 bp, synthetic construct
  source 1..20: mol_type = other DNA
taatccgcgtcatcttccac

SEQ ID NO: 1985 - DNA, 20 bp, synthetic construct
  source 1..20: mol_type = other DNA
ctctcttacctcttcctccg

SEQ ID NO: 1986 - DNA, 20 bp, synthetic construct
  source 1..20: mol_type = other DNA
tcttacctcttcctccgcgg

SEQ ID NO: 1987 - DNA, 20 bp, synthetic construct
  source 1..20: mol_type = other DNA
agtgccatggctgctctccc

SEQ ID NO: 1988 - DNA, 20 bp, synthetic construct
  source 1..20: mol_type = other DNA
cttctgtctattgaaggagc

SEQ ID NO: 1989 - DNA, 20 bp, synthetic construct
  source 1..20: mol_type = other DNA
ttcgtgcttctgtctattga

SEQ ID NO: 1990 - DNA, 20 bp, synthetic construct
  source 1..20: mol_type = other DNA
gtcctcttcgtggctttctg

SEQ ID NO: 1991 - DNA, 20 bp, synthetic construct
  source 1..20: mol_type = other DNA
ttgcagccctcgattccagc

SEQ ID NO: 1992 - DNA, 20 bp, synthetic construct
  source 1..20: mol_type = other DNA
ttcctgcccacacagtgata

SEQ ID NO: 1993 - DNA, 20 bp, synthetic construct
  source 1..20: mol_type = other DNA
cttgagagaagtatggtggc

SEQ ID NO: 1994 - DNA, 20 bp, synthetic construct
  source 1..20: mol_type = other DNA
cttacattctctcttctgtc

SEQ ID NO: 1995 - DNA, 20 bp, synthetic construct
  source 1..20: mol_type = other DNA
cgggcccttaccgatgtaca

SEQ ID NO: 1996 - DNA, 20 bp, synthetic construct
  source 1..20: mol_type = other DNA
tcttcacacgcaagtgagtg

SEQ ID NO: 1997 - DNA, 20 bp, synthetic construct
  source 1..20: mol_type = other DNA
ccatcatcttcatcctggga

SEQ ID NO: 1998 - DNA, 20 bp, synthetic construct
  source 1..20: mol_type = other DNA
tacttacggcacccggagct

SEQ ID NO: 1999 - DNA, 20 bp, synthetic construct
  source 1..20: mol_type = other DNA
tcgctcagaggtcctgggct

SEQ ID NO: 2000 - DNA, 20 bp, synthetic construct
  source 1..20: mol_type = other DNA
gaagaagtaccacatcgatg

SEQ ID NO: 2001 - DNA, 20 bp, synthetic construct
  source 1..20: mol_type = other DNA
gaaggagcagggactggaag

SEQ ID NO: 2002 - DNA, 20 bp, synthetic construct
  source 1..20: mol_type = other DNA
ttctgtctattgaaggagca

SEQ ID NO: 2003 - DNA, 20 bp, synthetic construct
  source 1..20: mol_type = other DNA
cagtgccatggctgctctcc

SEQ ID NO: 2004 - DNA, 20 bp, synthetic construct
  source 1..20: mol_type = other DNA
catcatcttcatcctgggaa

SEQ ID NO: 2005 - DNA, 20 bp, synthetic construct
  source 1..20: mol_type = other DNA
tgtacatggagttggagttg

SEQ ID NO: 2006 - DNA, 20 bp, synthetic construct
  source 1..20: mol_type = other DNA
acataccatcatcttcatcc

SEQ ID NO: 2007 - DNA, 20 bp, synthetic construct
  source 1..20: mol_type = other DNA
gatgtacatggagttggagt

SEQ ID NO: 2008 - DNA, 20 bp, synthetic construct
  source 1..20: mol_type = other DNA
tgaaggagcagggactggaa

SEQ ID NO: 2009 - DNA, 20 bp, synthetic construct
  source 1..20: mol_type = other DNA
ctcttacctcttcctccgcg

SEQ ID NO: 2010 - DNA, 20 bp, synthetic construct
  source 1..20: mol_type = other DNA
gtcctgaaagagtcaagata

SEQ ID NO: 2011 - DNA, 20 bp, synthetic construct
  source 1..20: mol_type = other DNA
tacaaaccttgagagaagta

SEQ ID NO: 2012 - DNA, 20 bp, synthetic construct
  source 1..20: mol_type = other DNA
tctattgaaggagcagggac

SEQ ID NO: 2013 - DNA, 20 bp, synthetic construct
  source 1..20: mol_type = other DNA
agtcctgaaagagtcaagat

SEQ ID NO: 2014 - DNA, 20 bp, synthetic construct
  source 1..20: mol_type = other DNA
cttaccttgtcagaaaatgg

SEQ ID NO: 2015 - DNA, 20 bp, synthetic construct
  source 1..20: mol_type = other DNA
aaaccttgagagaagtatgg

SEQ ID NO: 2016 - DNA, 20 bp, synthetic construct
  source 1..20: mol_type = other DNA
ttctgaaatgaagacacata

SEQ ID NO: 2017 - DNA, 20 bp, synthetic construct
  source 1..20: mol_type = other DNA
ttcccatcaatgagcagaag

SEQ ID NO: 2018 - DNA, 20 bp, synthetic construct
  source 1..20: mol_type = other DNA
tagttgagctgcaaagagaa

SEQ ID NO: 2019 - DNA, 20 bp, synthetic construct
  source 1..20: mol_type = other DNA
tgcactggtatctggaacct

SEQ ID NO: 2020 - DNA, 20 bp, synthetic construct
  source 1..20: mol_type = other DNA
agagacaggtaaagctctca

SEQ ID NO: 2021 - DNA, 20 bp, synthetic construct
  source 1..20: mol_type = other DNA
aacggcaaagcgtgagtaca

SEQ ID NO: 2022 - DNA, 20 bp, synthetic construct
  source 1..20: mol_type = other DNA
cttaccgatgtacatggagt

SEQ ID NO: 2023 - DNA, 20 bp, synthetic construct
  source 1..20: mol_type = other DNA
ttctctcaaggtttgtactc

SEQ ID NO: 2024 - DNA, 20 bp, synthetic construct
  source 1..20: mol_type = other DNA
tgctcttagaaagataaacc

SEQ ID NO: 2025 - DNA, 20 bp, synthetic construct
  source 1..20: mol_type = other DNA
gattctcagtaagttaagtc

SEQ ID NO: 2026 - DNA, 20 bp, synthetic construct
  source 1..20: mol_type = other DNA
gcccaggacctctgagcgaa

SEQ ID NO: 2027 - DNA, 20 bp, synthetic construct
  source 1..20: mol_type = other DNA
ccagaagttccccaagctcc

SEQ ID NO: 2028 - DNA, 20 bp, synthetic construct
  source 1..20: mol_type = other DNA
gcctaccgagtgattccggc

SEQ ID NO: 2029 - DNA, 20 bp, synthetic construct
  source 1..20: mol_type = other DNA
tccagaagttccccaagctc

SEQ ID NO: 2030 - DNA, 20 bp, synthetic construct
  source 1..20: mol_type = other DNA
cttgcagccctcgattccag

SEQ ID NO: 2031 - DNA, 20 bp, synthetic construct
  source 1..20: mol_type = other DNA
cctgtctcttcaggaaaccg

SEQ ID NO: 2032 - DNA, 20 bp, synthetic construct
  source 1..20: mol_type = other DNA
gccctttcgctcagaggtcc

SEQ ID NO: 2033 - DNA, 20 bp, synthetic construct
  source 1..20: mol_type = other DNA
catccagatccgttatcaga

SEQ ID NO: 2034 - DNA, 20 bp, synthetic construct
  source 1..20: mol_type = other DNA
caactataaggactgtgaga

SEQ ID NO: 2035 - DNA, 20 bp, synthetic construct
  source 1..20: mol_type = other DNA
cacacgcaagtgagtgcggc

SEQ ID NO: 2036 - DNA, 20 bp, synthetic construct
  source 1..20: mol_type = other DNA
cccaggacctctgagcgaaa

SEQ ID NO: 2037 - DNA, 20 bp, synthetic construct
  source 1..20: mol_type = other DNA
tgtgcccccccagagaccga

SEQ ID NO: 2038 - DNA, 20 bp, synthetic construct
  source 1..20: mol_type = other DNA
agcagcttctgcctctggtc

SEQ ID NO: 2039 - DNA, 20 bp, synthetic construct
  source 1..20: mol_type = other DNA
ttaccttcccgctggaatcg

SEQ ID NO: 2040 - DNA, 20 bp, synthetic construct
  source 1..20: mol_type = other DNA
cataccatcatcttcatcct

SEQ ID NO: 2041 - DNA, 20 bp, synthetic construct
  source 1..20: mol_type = other DNA
cgttaatgtgcactggtatc

SEQ ID NO: 2042 - DNA, 20 bp, synthetic construct
  source 1..20: mol_type = other DNA
tcttcgtggctttctgtgga

SEQ ID NO: 2043 - DNA, 20 bp, synthetic construct
  source 1..20: mol_type = other DNA
taccttcccgctggaatcga

SEQ ID NO: 2044 - DNA, 20 bp, synthetic construct
  source 1..20: mol_type = other DNA
aacctttctgagaatgctcc

SEQ ID NO: 2045 - DNA, 20 bp, synthetic construct
  source 1..20: mol_type = other DNA
atgtacatggagttggagtt

SEQ ID NO: 2046 - DNA, 20 bp, synthetic construct
  source 1..20: mol_type = other DNA
actcacgctttgccgttttg

SEQ ID NO: 2047 - DNA, 20 bp, synthetic construct
  source 1..20: mol_type = other DNA
ctgtctcttcaggaaaccgc

SEQ ID NO: 2048 - DNA, 20 bp, synthetic construct
  source 1..20: mol_type = other DNA
ctccaggcatgtgagaggat

SEQ ID NO: 2049 - DNA, 20 bp, synthetic construct
  source 1..20: mol_type = other DNA
atagttgagctgcaaagaga

SEQ ID NO: 2050 - DNA, 20 bp, synthetic construct
  source 1..20: mol_type = other DNA
tccacagaccggcccccctc

SEQ ID NO: 2051 - DNA, 20 bp, synthetic construct
  source 1..20: mol_type = other DNA
tacaacaccatgaggacata

SEQ ID NO: 2052 - DNA, 20 bp, synthetic construct
  source 1..20: mol_type = other DNA
ccttcttgaaatagtcagca

SEQ ID NO: 2053 - DNA, 20 bp, synthetic construct
  source 1..20: mol_type = other DNA
ttgaaggagcagggactgga

SEQ ID NO: 2054 - DNA, 20 bp, synthetic construct
  source 1..20: mol_type = other DNA
cttcctgcccacacagtgat

SEQ ID NO: 2055 - DNA, 20 bp, synthetic construct
  source 1..20: mol_type = other DNA
ccttgctgactatttcaaga

SEQ ID NO: 2056 - DNA, 20 bp, synthetic construct
  source 1..20: mol_type = other DNA
ggccggtctgtggaaacaca

SEQ ID NO: 2057 - DNA, 20 bp, synthetic construct
  source 1..20: mol_type = other DNA
gctccaggcatgtgagagga

SEQ ID NO: 2058 - DNA, 20 bp, synthetic construct
  source 1..20: mol_type = other DNA
ggaggcctaccgagtgattc

SEQ ID NO: 2059 - DNA, 20 bp, synthetic construct
  source 1..20: mol_type = other DNA
caccatgaggacatatggat

SEQ ID NO: 2060 - DNA, 20 bp, synthetic construct
  source 1..20: mol_type = other DNA
tctccaggctggtgcgcgag

SEQ ID NO: 2061 - DNA, 20 bp, synthetic construct
  source 1..20: mol_type = other DNA
tctccgccgaggaggtgaca

SEQ ID NO: 2062 - DNA, 20 bp, synthetic construct
  source 1..20: mol_type = other DNA
ctcctggatcaggcgcccga

SEQ ID NO: 2063 - DNA, 20 bp, synthetic construct
  source 1..20: mol_type = other DNA
tccgcagcagcggctcccgc

SEQ ID NO: 2064 - DNA, 20 bp, synthetic construct
  source 1..20: mol_type = other DNA
tcgctgagcctccgcagcag

SEQ ID NO: 2065 - DNA, 20 bp, synthetic construct
  source 1..20: mol_type = other DNA
gcagtgttctcttaaggtac

SEQ ID NO: 2066 - DNA, 20 bp, synthetic construct
  source 1..20: mol_type = other DNA
cacaggctggggcttccttc

SEQ ID NO: 2067 - DNA, 20 bp, synthetic construct
  source 1..20: mol_type = other DNA
aatataataaccctgaaaag

SEQ ID NO: 2068 - DNA, 20 bp, synthetic construct
  source 1..20: mol_type = other DNA
tggatcaggcgcccgagggc

SEQ ID NO: 2069 - DNA, 20 bp, synthetic construct
  source 1..20: mol_type = other DNA
gcagcagcggctcccgcagg

SEQ ID NO: 2070 - DNA, 20 bp, synthetic construct
  source 1..20: mol_type = other DNA
cttaaggtactggagcctga

SEQ ID NO: 2071 - DNA, 20 bp, synthetic construct
  source 1..20: mol_type = other DNA
acttcagcagacacaggctg

SEQ ID NO: 2072 - DNA, 20 bp, synthetic construct
  source 1..20: mol_type = other DNA
gctcctggatcaggcgcccg

SEQ ID NO: 2073 - DNA, 20 bp, synthetic construct
  source 1..20: mol_type = other DNA
ctcctccagccccggccctc

SEQ ID NO: 2074 - DNA, 20 bp, synthetic construct
  source 1..20: mol_type = other DNA
aacttcagcagacacaggct

SEQ ID NO: 2075 - DNA, 20 bp, synthetic construct
  source 1..20: mol_type = other DNA
tgaccactggctgaattcaa

SEQ ID NO: 2076 - DNA, 20 bp, synthetic construct
  source 1..20: mol_type = other DNA
ctggaggagactggcggagc

SEQ ID NO: 2077 - DNA, 20 bp, synthetic construct
  source 1..20: mol_type = other DNA
ccattaacttcagcagacac

SEQ ID NO: 2078 - DNA, 20 bp, synthetic construct
  source 1..20: mol_type = other DNA
ccgccagtctcctccagccc

SEQ ID NO: 2079 - DNA, 20 bp, synthetic construct
  source 1..20: mol_type = other DNA
tctcaggtgtgcgaagtccc

SEQ ID NO: 2080 - DNA, 20 bp, synthetic construct
  source 1..20: mol_type = other DNA
tctcagctcctgtagcagct

SEQ ID NO: 2081 - DNA, 20 bp, synthetic construct
  source 1..20: mol_type = other DNA
tctcataggatcccccggct

SEQ ID NO: 2082 - DNA, 20 bp, synthetic construct
  source 1..20: mol_type = other DNA
agacgtcccaccaagggtct

SEQ ID NO: 2083 - DNA, 20 bp, synthetic construct
  source 1..20: mol_type = other DNA
tctctgaaattacaaagtaa

SEQ ID NO: 2084 - DNA, 20 bp, synthetic construct
  source 1..20: mol_type = other DNA
ggagacacgtaggcaacaga

SEQ ID NO: 2085 - DNA, 20 bp, synthetic construct
  source 1..20: mol_type = other DNA
ggatacagtcctaaggatgc

SEQ ID NO: 2086 - DNA, 20 bp, synthetic construct
  source 1..20: mol_type = other DNA
tgcacctagccatcatccac

SEQ ID NO: 2087 - DNA, 20 bp, synthetic construct
  source 1..20: mol_type = other DNA
ctgcacctagccatcatcca

SEQ ID NO: 2088 - DNA, 20 bp, synthetic construct
  source 1..20: mol_type = other DNA
tggagtccaggccgctgtcg

SEQ ID NO: 2089 - DNA, 20 bp, synthetic construct
  source 1..20: mol_type = other DNA
agtccaggccgctgtcgtgg

SEQ ID NO: 2090 - DNA, 20 bp, synthetic construct
  source 1..20: mol_type = other DNA
tctctgggttctgaagttct

SEQ ID NO: 2091 - DNA, 20 bp, synthetic construct
  source 1..20: mol_type = other DNA
tctctttctgaaggagacac

SEQ ID NO: 2092 - DNA, 20 bp, synthetic construct
  source 1..20: mol_type = other DNA
atctgctcccgggccgcacg

SEQ ID NO: 2093 - DNA, 20 bp, synthetic construct
  source 1..20: mol_type = other DNA
cagcggcacctacctctgtg

SEQ ID NO: 2094 - DNA, 20 bp, synthetic construct
  source 1..20: mol_type = other DNA
cacgaagctctccgatgtgt

SEQ ID NO: 2095 - DNA, 20 bp, synthetic construct
  source 1..20: mol_type = other DNA
gcagggctggggagaaggtg

SEQ ID NO: 2096 - DNA, 20 bp, synthetic construct
  source 1..20: mol_type = other DNA
tgcagatcccacaggcgccc

SEQ ID NO: 2097 - DNA, 20 bp, synthetic construct
  source 1..20: mol_type = other DNA
tctggttgctggggctcatg

SEQ ID NO: 2098 - DNA, 20 bp, synthetic construct
  source 1..20: mol_type = other DNA
ggagatggccccacagaggt

SEQ ID NO: 2099 - DNA, 20 bp, synthetic construct
  source 1..20: mol_type = other DNA
gacgttacctcgtgcggccc

SEQ ID NO: 2100 - DNA, 20 bp, synthetic construct
  source 1..20: mol_type = other DNA
ccccttcggtcaccacgagc

SEQ ID NO: 2101 - DNA, 20 bp, synthetic construct
  source 1..20: mol_type = other DNA
cgcccacgacaccaaccacc

SEQ ID NO: 2102 - DNA, 20 bp, synthetic construct
  source 1..20: mol_type = other DNA
ggttcttaggtaggtggggt

SEQ ID NO: 2103 - DNA, 20 bp, synthetic construct
  source 1..20: mol_type = other DNA
cctgcagagaaacacacttg

SEQ ID NO: 2104 - DNA, 20 bp, synthetic construct
  source 1..20: mol_type = other DNA
cctggccgtcatctgctccc

SEQ ID NO: 2105 - DNA, 20 bp, synthetic construct
  source 1..20: mol_type = other DNA
ttctctctggaagggcacaa

SEQ ID NO: 2106 - DNA, 20 bp, synthetic construct
  source 1..20: mol_type = other DNA
ggatggttcttaggtaggtg

SEQ ID NO: 2107 - DNA, 20 bp, synthetic construct
  source 1..20: mol_type = other DNA
aactgggctggcggccagga

SEQ ID NO: 2108 - DNA, 20 bp, synthetic construct
  source 1..20: mol_type = other DNA
gcagatcaaagagagcctgc

SEQ ID NO: 2109 - DNA, 20 bp, synthetic construct
  source 1..20: mol_type = other DNA
acggaagcggcagtcctggc

SEQ ID NO: 2110 - DNA, 20 bp, synthetic construct
  source 1..20: mol_type = other DNA
gccctgctcgtggtgaccga

SEQ ID NO: 2111 - DNA, 20 bp, synthetic construct
  source 1..20: mol_type = other DNA
cggaagcggcagtcctggcc

SEQ ID NO: 2112 - DNA, 20 bp, synthetic construct
  source 1..20: mol_type = other DNA
ggccaggatggttcttaggt

SEQ ID NO: 2113 - DNA, 20 bp, synthetic construct
  source 1..20: mol_type = other DNA
tcttaggtaggtggggtcgg

SEQ ID NO: 2114 - DNA, 20 bp, synthetic construct
  source 1..20: mol_type = other DNA
agccggccagttccaaaccc

SEQ ID NO: 2115 - DNA, 20 bp, synthetic construct
  source 1..20: mol_type = other DNA
cggtgctacaactgggctgg

SEQ ID NO: 2116 - DNA, 20 bp, synthetic construct
  source 1..20: mol_type = other DNA
tgacacggaagcggcagtcc

SEQ ID NO: 2117 - DNA, 20 bp, synthetic construct
  source 1..20: mol_type = other DNA
aggcgccctggccagtcgtc

SEQ ID NO: 2118 - DNA, 20 bp, synthetic construct
  source 1..20: mol_type = other DNA
cggccagttccaaaccctgg

SEQ ID NO: 2119 - DNA, 20 bp, synthetic construct
  source 1..20: mol_type = other DNA
cctgctcgtggtgaccgaag

SEQ ID NO: 2120 - DNA, 20 bp, synthetic construct
  source 1..20: mol_type = other DNA
tcggtcaccacgagcagggc

SEQ ID NO: 2121 - DNA, 20 bp, synthetic construct
  source 1..20: mol_type = other DNA
aggatggttcttaggtaggt

SEQ ID NO: 2122 - DNA, 20 bp, synthetic construct
  source 1..20: mol_type = other DNA
gcagttgtgtgacacggaag

SEQ ID NO: 2123 - DNA, 20 bp, synthetic construct
  source 1..20: mol_type = other DNA
ccctgctcgtggtgaccgaa

SEQ ID NO: 2124 - DNA, 20 bp, synthetic construct
  source 1..20: mol_type = other DNA
cagttccaaaccctggtggt

SEQ ID NO: 2125 - DNA, 20 bp, synthetic construct
  source 1..20: mol_type = other DNA
acagcggcacctacctctgt

SEQ ID NO: 2126 - DNA, 20 bp, synthetic construct
  source 1..20: mol_type = other DNA
gagcagggctggggagaagg

SEQ ID NO: 2127 - DNA, 20 bp, synthetic construct
  source 1..20: mol_type = other DNA
gttggagaagctgcaggtga

SEQ ID NO: 2128 - DNA, 20 bp, synthetic construct
  source 1..20: mol_type = other DNA
ctggaagggcacaaaggtca

SEQ ID NO: 2129 - DNA, 20 bp, synthetic construct
  source 1..20: mol_type = other DNA
catgtggaagtcacgcccgt

SEQ ID NO: 2130 - DNA, 20 bp, synthetic construct
  source 1..20: mol_type = other DNA
gggcggtgctacaactgggc

SEQ ID NO: 2131 - DNA, 20 bp, synthetic construct
  source 1..20: mol_type = other DNA
tccaggcatgcagatcccac

SEQ ID NO: 2132 - DNA, 20 bp, synthetic construct
  source 1..20: mol_type = other DNA
acgactggccagggcgcctg

SEQ ID NO: 2133 - DNA, 20 bp, synthetic construct
  source 1..20: mol_type = other DNA
aggtgccgctgtcattgcgc

SEQ ID NO: 2134 - DNA, 20 bp, synthetic construct
  source 1..20: mol_type = other DNA
cttccacatgagcgtggtca

SEQ ID NO: 2135 - DNA, 20 bp, synthetic construct
  source 1..20: mol_type = other DNA
cccttcggtcaccacgagca

SEQ ID NO: 2136 - DNA, 20 bp, synthetic construct
  source 1..20: mol_type = other DNA
tgacgttacctcgtgcggcc

SEQ ID NO: 2137 - DNA, 20 bp, synthetic construct
  source 1..20: mol_type = other DNA
tcaccctgagctctgcccgc

SEQ ID NO: 2138 - DNA, 20 bp, synthetic construct
  source 1..20: mol_type = other DNA
tctggaagggcacaaaggtc

SEQ ID NO: 2139 - DNA, 20 bp, synthetic construct
  source 1..20: mol_type = other DNA
cgcagatcaaagagagcctg

SEQ ID NO: 2140 - DNA, 20 bp, synthetic construct
  source 1..20: mol_type = other DNA
cacctacctaagaaccatcc

SEQ ID NO: 2141 - DNA, 20 bp, synthetic construct
  source 1..20: mol_type = other DNA
tcctggccgtcatctgctcc

SEQ ID NO: 2142 - DNA, 20 bp, synthetic construct
  source 1..20: mol_type = other DNA
cacgagcagggctggggaga

SEQ ID NO: 2143 - DNA, 20 bp, synthetic construct
  source 1..20: mol_type = other DNA
atgtggaagtcacgcccgtt

SEQ ID NO: 2144 - DNA, 20 bp, synthetic construct
  source 1..20: mol_type = other DNA
ggagtctgagagatggagag

SEQ ID NO: 2145 - DNA, 20 bp, synthetic construct
  source 1..20: mol_type = other DNA
accgcccagacgactggcca

SEQ ID NO: 2146 - DNA, 20 bp, synthetic construct
  source 1..20: mol_type = other DNA
agagctcagggtgacaggtg

SEQ ID NO: 2147 - DNA, 20 bp, synthetic construct
  source 1..20: mol_type = other DNA
caggatggttcttaggtagg

SEQ ID NO: 2148 - DNA, 20 bp, synthetic construct
  source 1..20: mol_type = other DNA
tgtagcaccgcccagacgac

SEQ ID NO: 2149 - DNA, 20 bp, synthetic construct
  source 1..20: mol_type = other DNA
tctctttgatctgcgccttg

SEQ ID NO: 2150 - DNA, 20 bp, synthetic construct
  source 1..20: mol_type = other DNA
agcagggctggggagaaggt

SEQ ID NO: 2151 - DNA, 20 bp, synthetic construct
  source 1..20: mol_type = other DNA
gtctgggcggtgctacaact

SEQ ID NO: 2152 - DNA, 20 bp, synthetic construct
  source 1..20: mol_type = other DNA
cttctccccagccctgctcg

SEQ ID NO: 2153 - DNA, 20 bp, synthetic construct
  source 1..20: mol_type = other DNA
cggtcaccacgagcagggct

SEQ ID NO: 2154 - DNA, 20 bp, synthetic construct
  source 1..20: mol_type = other DNA
gacagcggcacctacctctg

SEQ ID NO: 2155 - DNA, 20 bp, synthetic construct
  source 1..20: mol_type = other DNA
ctacaactgggctggcggcc

SEQ ID NO: 2156 - DNA, 20 bp, synthetic construct
  source 1..20: mol_type = other DNA
cgtgtcacacaactgcccaa

SEQ ID NO: 2157 - DNA, 20 bp, synthetic construct
  source 1..20: mol_type = other DNA
ggtgacaggtgcggcctcgg

SEQ ID NO: 2158 - DNA, 20 bp, synthetic construct
  source 1..20: mol_type = other DNA
cgatgtgttggagaagctgc

SEQ ID NO: 2159 - DNA, 20 bp, synthetic construct
  source 1..20: mol_type = other DNA
ctgcagcttctccaacacat

SEQ ID NO: 2160 - DNA, 20 bp, synthetic construct
  source 1..20: mol_type = other DNA
tggcggccaggatggttctt

SEQ ID NO: 2161 - DNA, 20 bp, synthetic construct
  source 1..20: mol_type = other DNA
gagaaggtgggggggttcca

SEQ ID NO: 2162 - DNA, 20 bp, synthetic construct
  source 1..20: mol_type = other DNA
cagggctggggagaaggtgg

SEQ ID NO: 2163 - DNA, 20 bp, synthetic construct
  source 1..20: mol_type = other DNA
ccagggagatggccccacag

SEQ ID NO: 2164 - DNA, 20 bp, synthetic construct
  source 1..20: mol_type = other DNA
ggtcaccacgagcagggctg

SEQ ID NO: 2165 - DNA, 20 bp, synthetic construct
  source 1..20: mol_type = other DNA
cgactggccagggcgcctgt

SEQ ID NO: 2166 - DNA, 20 bp, synthetic construct
  source 1..20: mol_type = other DNA
tccctgcagagaaacacact

SEQ ID NO: 2167 - DNA, 20 bp, synthetic construct
  source 1..20: mol_type = other DNA
tgtctggggagtctgagaga

SEQ ID NO: 2168 - DNA, 20 bp, synthetic construct
  source 1..20: mol_type = other DNA
ccctgcagagaaacacactt

SEQ ID NO: 2169 - DNA, 20 bp, synthetic construct
  source 1..20: mol_type = other DNA
ggagaagctgcaggtgaagg

SEQ ID NO: 2170 - DNA, 20 bp, synthetic construct
  source 1..20: mol_type = other DNA
ggcagtcctgcagaaggaca

SEQ ID NO: 2171 - DNA, 20 bp, synthetic construct
  source 1..20: mol_type = other DNA
ctcgggcaggcagatgagca

SEQ ID NO: 2172 - DNA, 20 bp, synthetic construct
  source 1..20: mol_type = other DNA
tgcatcagctccttggtctg

SEQ ID NO: 2173 - DNA, 20 bp, synthetic construct
  source 1..20: mol_type = other DNA
gtatgagcacgagaaggacc

SEQ ID NO: 2174 - DNA, 20 bp, synthetic construct
  source 1..20: mol_type = other DNA
gggcagtcctgcagaaggac

SEQ ID NO: 2175 - DNA, 20 bp, synthetic construct
  source 1..20: mol_type = other DNA
cagctccagggcgctcagga

SEQ ID NO: 2176 - DNA, 20 bp, synthetic construct
  source 1..20: mol_type = other DNA
catgaggttggcccaggcaa

SEQ ID NO: 2177 - DNA, 20 bp, synthetic construct
  source 1..20: mol_type = other DNA
acaatagccagcacaggaga

SEQ ID NO: 2178 - DNA, 20 bp, synthetic construct
  source 1..20: mol_type = other DNA
tggggactgcaggtgggaga

SEQ ID NO: 2179 - DNA, 20 bp, synthetic construct
  source 1..20: mol_type = other DNA
ggagctgtatgagcacgaga

SEQ ID NO: 2180 - DNA, 20 bp, synthetic construct
  source 1..20: mol_type = other DNA
tttctcagctggataaggtc

SEQ ID NO: 2181 - DNA, 20 bp, synthetic construct
  source 1..20: mol_type = other DNA
tctctctgttgtccgaggcc

SEQ ID NO: 2182 - DNA, 20 bp, synthetic construct
  source 1..20: mol_type = other DNA
tctcgctccaatgtcgacac

SEQ ID NO: 2183 - DNA, 20 bp, synthetic construct
  source 1..20: mol_type = other DNA
gccagcttcttgtgctgtag

SEQ ID NO: 2184 - DNA, 20 bp, synthetic construct
  source 1..20: mol_type = other DNA
gttcacttcatcctcagatg

SEQ ID NO: 2185 - DNA, 20 bp, synthetic construct
  source 1..20: mol_type = other DNA
tgctgtcccaggtcaactac

SEQ ID NO: 2186 - DNA, 20 bp, synthetic construct
  source 1..20: mol_type = other DNA
aggccctcttcatgacgggc

SEQ ID NO: 2187 - DNA, 20 bp, synthetic construct
  source 1..20: mol_type = other DNA
ctctcggaggaagcgcatgt

SEQ ID NO: 2188 - DNA, 20 bp, synthetic construct
  source 1..20: mol_type = other DNA
gcgagagagtgagaccttcg

SEQ ID NO: 2189 - DNA, 20 bp, synthetic construct
  source 1..20: mol_type = other DNA
gtttccaggagcctgactac

SEQ ID NO: 2190 - DNA, 20 bp, synthetic construct
  source 1..20: mol_type = other DNA
ccgccatggctccgacgctg

SEQ ID NO: 2191 - DNA, 20 bp, synthetic construct
  source 1..20: mol_type = other DNA
cgagagagtgagaccttcgt

SEQ ID NO: 2192 - DNA, 20 bp, synthetic construct
  source 1..20: mol_type = other DNA
cctcccagccatccgtcctg

SEQ ID NO: 2193 - DNA, 20 bp, synthetic construct
  source 1..20: mol_type = other DNA
cgccacctgtgggagccaca

SEQ ID NO: 2194 - DNA, 20 bp, synthetic construct
  source 1..20: mol_type = other DNA
cgccagatcacgtggagccg

SEQ ID NO: 2195 - DNA, 20 bp, synthetic construct
  source 1..20: mol_type = other DNA
caggacctggagcagcgcag

SEQ ID NO: 2196 - DNA, 20 bp, synthetic construct
  source 1..20: mol_type = other DNA
agtggactgctgggacggcc

SEQ ID NO: 2197 - DNA, 20 bp, synthetic construct
  source 1..20: mol_type = other DNA
catctgcaggaaacagaacc

SEQ ID NO: 2198 - DNA, 20 bp, synthetic construct
  source 1..20: mol_type = other DNA
agcactgccgtatccactcc

SEQ ID NO: 2199 - DNA, 20 bp, synthetic construct
  source 1..20: mol_type = other DNA
ccggggcgccgacaagatcg

SEQ ID NO: 2200 - DNA, 20 bp, synthetic construct
  source 1..20: mol_type = other DNA
tgaccagggcaacgaggatg

SEQ ID NO: 2201 - DNA, 20 bp, synthetic construct
  source 1..20: mol_type = other DNA
cattgccgtgtccagcaaga

SEQ ID NO: 2202 - DNA, 20 bp, synthetic construct
  source 1..20: mol_type = other DNA
cggtgcccacctcgaggctg

SEQ ID NO: 2203 - DNA, 20 bp, synthetic construct
  source 1..20: mol_type = other DNA
aggtcagctcgtcctccctc

SEQ ID NO: 2204 - DNA, 20 bp, synthetic construct
  source 1..20: mol_type = other DNA
ccagaatgtggagaagcaag

SEQ ID NO: 2205 - DNA, 20 bp, synthetic construct
  source 1..20: mol_type = other DNA
ctctcccgcatctaccccaa

SEQ ID NO: 2206 - DNA, 20 bp, synthetic construct
  source 1..20: mol_type = other DNA
caacttccagacccctggtg

SEQ ID NO: 2207 - DNA, 20 bp, synthetic construct
  source 1..20: mol_type = other DNA
cctttgcccatgtggatctg

SEQ ID NO: 2208 - DNA, 20 bp, synthetic construct
  source 1..20: mol_type = other DNA
aaccaggccctcttcatgac

SEQ ID NO: 2209 - DNA, 20 bp, synthetic construct
  source 1..20: mol_type = other DNA
ggcccagacagcagacgcca

SEQ ID NO: 2210 - DNA, 20 bp, synthetic construct
  source 1..20: mol_type = other DNA
ctctgccgcagcctcgaggt

SEQ ID NO: 2211 - DNA, 20 bp, synthetic construct
  source 1..20: mol_type = other DNA
ccacagatccacatgggcaa

SEQ ID NO: 2212 - DNA, 20 bp, synthetic construct
  source 1..20: mol_type = other DNA
ggtggcgaggggactacgga

SEQ ID NO: 2213 - DNA, 20 bp, synthetic construct
  source 1..20: mol_type = other DNA
ctccctgcagggctggggag

SEQ ID NO: 2214 - DNA, 20 bp, synthetic construct
  source 1..20: mol_type = other DNA
gcagcgagcataggcttcca

SEQ ID NO: 2215 - DNA, 20 bp, synthetic construct
  source 1..20: mol_type = other DNA
ttcttacctctcaatctgca

SEQ ID NO: 2216 - DNA, 20 bp, synthetic construct
  source 1..20: mol_type = other DNA
gtgagctggtgacacacaca

SEQ ID NO: 2217 - DNA, 20 bp, synthetic construct
  source 1..20: mol_type = other DNA
cccacagctcctgatggggt

SEQ ID NO: 2218 - DNA, 20 bp, synthetic construct
  source 1..20: mol_type = other DNA
gcattgccgtgtccagcaag

SEQ ID NO: 2219 - DNA, 20 bp, synthetic construct
  source 1..20: mol_type = other DNA
tgactgccacagatccacat

SEQ ID NO: 2220 - DNA, 20 bp, synthetic construct
  source 1..20: mol_type = other DNA
agaagtcgcagcgacccgag

SEQ ID NO: 2221 - DNA, 20 bp, synthetic construct
  source 1..20: mol_type = other DNA
acagcccacagctcctgatg

SEQ ID NO: 2222 - DNA, 20 bp, synthetic construct
  source 1..20: mol_type = other DNA
tgctgcagccaagcaccatg

SEQ ID NO: 2223 - DNA, 20 bp, synthetic construct
  source 1..20: mol_type = other DNA
cagctgagcaaactgcccgt

SEQ ID NO: 2224 - DNA, 20 bp, synthetic construct
  source 1..20: mol_type = other DNA
caactaggaaggtagcaaag

SEQ ID NO: 2225 - DNA, 20 bp, synthetic construct
  source 1..20: mol_type = other DNA
cagcacaagaagctggctga

SEQ ID NO: 2226 - DNA, 20 bp, synthetic construct
  source 1..20: mol_type = other DNA
acctgtaggcagacaaagaa

SEQ ID NO: 2227 - DNA, 20 bp, synthetic construct
  source 1..20: mol_type = other DNA
tgtaccttgaaagttggcat

SEQ ID NO: 2228 - DNA, 20 bp, synthetic construct
  source 1..20: mol_type = other DNA
caagcagaagacagagtttg

SEQ ID NO: 2229 - DNA, 20 bp, synthetic construct
  source 1..20: mol_type = other DNA
cacactcctcaccaagcccg

SEQ ID NO: 2230 - DNA, 20 bp, synthetic construct
  source 1..20: mol_type = other DNA
cgccccggctccacgtgatc

SEQ ID NO: 2231 - DNA, 20 bp, synthetic construct
  source 1..20: mol_type = other DNA
gtaccttgaaagttggcata

SEQ ID NO: 2232 - DNA, 20 bp, synthetic construct
  source 1..20: mol_type = other DNA
ctgaagggaagataatggaa

SEQ ID NO: 2233 - DNA, 20 bp, synthetic construct
  source 1..20: mol_type = other DNA
gtcaggtacctggataggca

SEQ ID NO: 2234 - DNA, 20 bp, synthetic construct
  source 1..20: mol_type = other DNA
ccaggaaggccccatcacga

SEQ ID NO: 2235 - DNA, 20 bp, synthetic construct
  source 1..20: mol_type = other DNA
ccccggtcaggtacctggat

SEQ ID NO: 2236 - DNA, 20 bp, synthetic construct
  source 1..20: mol_type = other DNA
ctgtggaagacacagagtga

SEQ ID NO: 2237 - DNA, 20 bp, synthetic construct
  source 1..20: mol_type = other DNA
gagggccagacagtgatgct

SEQ ID NO: 2238 - DNA, 20 bp, synthetic construct
  source 1..20: mol_type = other DNA
cactcacgtgttgtgcgagg

SEQ ID NO: 2239 - DNA, 20 bp, synthetic construct
  source 1..20: mol_type = other DNA
caatacttcaagaaggtgct

SEQ ID NO: 2240 - DNA, 20 bp, synthetic construct
  source 1..20: mol_type = other DNA
ctgcagggctggggagcggc

SEQ ID NO: 2241 - DNA, 20 bp, synthetic construct
  source 1..20: mol_type = other DNA
caggatgactgggtacctgc

SEQ ID NO: 2242 - DNA, 20 bp, synthetic construct
  source 1..20: mol_type = other DNA
ctggtcagaacaaagtagtg

SEQ ID NO: 2243 - DNA, 20 bp, synthetic construct
  source 1..20: mol_type = other DNA
tgcagcgacagcccatccgc

SEQ ID NO: 2244 - DNA, 20 bp, synthetic construct
  source 1..20: mol_type = other DNA
tttccaggagcctgactacg

SEQ ID NO: 2245 - DNA, 20 bp, synthetic construct
  source 1..20: mol_type = other DNA
gaaccaggccctcttcatga

SEQ ID NO: 2246 - DNA, 20 bp, synthetic construct
  source 1..20: mol_type = other DNA
gccgtcccagcagtccactg

SEQ ID NO: 2247 - DNA, 20 bp, synthetic construct
  source 1..20: mol_type = other DNA
ccacagctcctgatggggta

SEQ ID NO: 2248 - DNA, 20 bp, synthetic construct
  source 1..20: mol_type = other DNA
gactcactctgaggccacaa

SEQ ID NO: 2249 - DNA, 20 bp, synthetic construct
  source 1..20: mol_type = other DNA
agctcaccaatctgacaagc

SEQ ID NO: 2250 - DNA, 20 bp, synthetic construct
  source 1..20: mol_type = other DNA
gtacctggataggcaaggag

SEQ ID NO: 2251 - DNA, 20 bp, synthetic construct
  source 1..20: mol_type = other DNA
ctctgaggtttggtttggag

SEQ ID NO: 2252 - DNA, 20 bp, synthetic construct
  source 1..20: mol_type = other DNA
agttggaggaatccagtcgc

SEQ ID NO: 2253 - DNA, 20 bp, synthetic construct
  source 1..20: mol_type = other DNA
ctcagatgtggctgtgagca

SEQ ID NO: 2254 - DNA, 20 bp, synthetic construct
  source 1..20: mol_type = other DNA
gccctcaacttccagacccc

SEQ ID NO: 2255 - DNA, 20 bp, synthetic construct
  source 1..20: mol_type = other DNA
gtcgggcccccagcacctgt

SEQ ID NO: 2256 - DNA, 20 bp, synthetic construct
  source 1..20: mol_type = other DNA
gacctggaaggtcttccgct

SEQ ID NO: 2257 - DNA, 20 bp, synthetic construct
  source 1..20: mol_type = other DNA
aggaggactcactggagaac

SEQ ID NO: 2258 - DNA, 20 bp, synthetic construct
  source 1..20: mol_type = other DNA
acaaactgtccagaaacatg

SEQ ID NO: 2259 - DNA, 20 bp, synthetic construct
  source 1..20: mol_type = other DNA
agggccagacagtgatgcta

SEQ ID NO: 2260 - DNA, 20 bp, synthetic construct
  source 1..20: mol_type = other DNA
cctcgcacaacacgtgagtg

SEQ ID NO: 2261 - DNA, 20 bp, synthetic construct
  source 1..20: mol_type = other DNA
ggtcctgcatggtatagagc

SEQ ID NO: 2262 - DNA, 20 bp, synthetic construct
  source 1..20: mol_type = other DNA
actggccccctcgatcttgt

SEQ ID NO: 2263 - DNA, 20 bp, synthetic construct
  source 1..20: mol_type = other DNA
cagttccttcttgactacca

SEQ ID NO: 2264 - DNA, 20 bp, synthetic construct
  source 1..20: mol_type = other DNA
caaaccaaacctcagagtac

SEQ ID NO: 2265 - DNA, 20 bp, synthetic construct
  source 1..20: mol_type = other DNA
agaaggaactgctggaactc

SEQ ID NO: 2266 - DNA, 20 bp, synthetic construct
  source 1..20: mol_type = other DNA
actggggagcaacatcacca

SEQ ID NO: 2267 - DNA, 20 bp, synthetic construct
  source 1..20: mol_type = other DNA
tgactacaaggcccagaggg

SEQ ID NO: 2268 - DNA, 20 bp, synthetic construct
  source 1..20: mol_type = other DNA
caaccctggcttctatgtag

SEQ ID NO: 2269 - DNA, 20 bp, synthetic construct
  source 1..20: mol_type = other DNA
cccttactctcttcatcaaa

SEQ ID NO: 2270 - DNA, 20 bp, synthetic construct
  source 1..20: mol_type = other DNA
cctgaagaacatgctgtccc

SEQ ID NO: 2271 - DNA, 20 bp, synthetic construct
  source 1..20: mol_type = other DNA
tctgaggtttggtttggagt

SEQ ID NO: 2272 - DNA, 20 bp, synthetic construct
  source 1..20: mol_type = other DNA
agaccccttacgagagatcg

SEQ ID NO: 2273 - DNA, 20 bp, synthetic construct
  source 1..20: mol_type = other DNA
aagcagaagacagagtttgt

SEQ ID NO: 2274 - DNA, 20 bp, synthetic construct
  source 1..20: mol_type = other DNA
ctgcaaggtgggagttaagg

SEQ ID NO: 2275 - DNA, 20 bp, synthetic construct
  source 1..20: mol_type = other DNA
gaactgctggaactcaggaa

SEQ ID NO: 2276 - DNA, 20 bp, synthetic construct
  source 1..20: mol_type = other DNA
gctgatatactgagaaaaca

SEQ ID NO: 2277 - DNA, 20 bp, synthetic construct
  source 1..20: mol_type = other DNA
gatgaagagagtaagggcca

SEQ ID NO: 2278 - DNA, 20 bp, synthetic construct
  source 1..20: mol_type = other DNA
ctggataggcaaggagaggc

SEQ ID NO: 2279 - DNA, 20 bp, synthetic construct
  source 1..20: mol_type = other DNA
gtagtcaggctcctggaaac

SEQ ID NO: 2280 - DNA, 20 bp, synthetic construct
  source 1..20: mol_type = other DNA
gaatccagtcgctggccctt

SEQ ID NO: 2281 - DNA, 20 bp, synthetic construct
  source 1..20: mol_type = other DNA
ggctgatatactgagaaaac

SEQ ID NO: 2282 - DNA, 20 bp, synthetic construct
  source 1..20: mol_type = other DNA
ggtcagctcgtcctccctct

SEQ ID NO: 2283 - DNA, 20 bp, synthetic construct
  source 1..20: mol_type = other DNA
aagcctatgctcgctgcctg

SEQ ID NO: 2284 - DNA, 20 bp, synthetic construct
  source 1..20: mol_type = other DNA
acagcacaagaagctggctg

SEQ ID NO: 2285 - DNA, 20 bp, synthetic construct
  source 1..20: mol_type = other DNA
cgaggaggagatccagtagt

SEQ ID NO: 2286 - DNA, 20 bp, synthetic construct
  source 1..20: mol_type = other DNA
agatccagtagtgggaaaga

SEQ ID NO: 2287 - DNA, 20 bp, synthetic construct
  source 1..20: mol_type = other DNA
cgcacgaggaaggagccgtc

SEQ ID NO: 2288 - DNA, 20 bp, synthetic construct
  source 1..20: mol_type = other DNA
cctatccaggtacctgaccg

SEQ ID NO: 2289 - DNA, 20 bp, synthetic construct
  source 1..20: mol_type = other DNA
accaggggtctggaagttga

SEQ ID NO: 2290 - DNA, 20 bp, synthetic construct
  source 1..20: mol_type = other DNA
cctcaatggacaggatgact

SEQ ID NO: 2291 - DNA, 20 bp, synthetic construct
  source 1..20: mol_type = other DNA
tgaccagaatttcctggctc

SEQ ID NO: 2292 - DNA, 20 bp, synthetic construct
  source 1..20: mol_type = other DNA
cacctgtaggcagacaaaga

SEQ ID NO: 2293 - DNA, 20 bp, synthetic construct
  source 1..20: mol_type = other DNA
ctgactgccacagatccaca

SEQ ID NO: 2294 - DNA, 20 bp, synthetic construct
  source 1..20: mol_type = other DNA
gagatccagtagtgggaaag

SEQ ID NO: 2295 - DNA, 20 bp, synthetic construct
  source 1..20: mol_type = other DNA
ctccatcagcatggcgtcgg

SEQ ID NO: 2296 - DNA, 20 bp, synthetic construct
  source 1..20: mol_type = other DNA
ccacctcgaggctgcggcag

SEQ ID NO: 2297 - DNA, 20 bp, synthetic construct
  source 1..20: mol_type = other DNA
cctctgccgcagcctcgagg

SEQ ID NO: 2298 - DNA, 20 bp, synthetic construct
  source 1..20: mol_type = other DNA
caccaggggtctggaagttg

SEQ ID NO: 2299 - DNA, 20 bp, synthetic construct
  source 1..20: mol_type = other DNA
ccaatacttcaagaaggtgc

SEQ ID NO: 2300 - DNA, 20 bp, synthetic construct
  source 1..20: mol_type = other DNA
ggaactgctggaactcagga

SEQ ID NO: 2301 - DNA, 20 bp, synthetic construct
  source 1..20: mol_type = other DNA
tcatgacggtgcccacctcg

SEQ ID NO: 2302 - DNA, 20 bp, synthetic construct
  source 1..20: mol_type = other DNA
cctcatcacgcactaccagc

SEQ ID NO: 2303 - DNA, 20 bp, synthetic construct
  source 1..20: mol_type = other DNA
ctgaacttgtcgtctactgc

SEQ ID NO: 2304 - DNA, 20 bp, synthetic construct
  source 1..20: mol_type = other DNA
gctctcccgcatctacccca

SEQ ID NO: 2305 - DNA, 20 bp, synthetic construct
  source 1..20: mol_type = other DNA
acaggatgactgggtacctg

SEQ ID NO: 2306 - DNA, 20 bp, synthetic construct
  source 1..20: mol_type = other DNA
catctgccaaagaatggccg

SEQ ID NO: 2307 - DNA, 20 bp, synthetic construct
  source 1..20: mol_type = other DNA
gtgctctggtcaggctcgcg

SEQ ID NO: 2308 - DNA, 20 bp, synthetic construct
  source 1..20: mol_type = other DNA
tgtctgtcaagaagaacttg

SEQ ID NO: 2309 - DNA, 20 bp, synthetic construct
  source 1..20: mol_type = other DNA
ctcccagccatccgtcctga

SEQ ID NO: 2310 - DNA, 20 bp, synthetic construct
  source 1..20: mol_type = other DNA
caaggtacagctcaggcctc

SEQ ID NO: 2311 - DNA, 20 bp, synthetic construct
  source 1..20: mol_type = other DNA
ctgagctgtaccttgaaagt

SEQ ID NO: 2312 - DNA, 20 bp, synthetic construct
  source 1..20: mol_type = other DNA
gcacgaggaaggagccgtca

SEQ ID NO: 2313 - DNA, 20 bp, synthetic construct
  source 1..20: mol_type = other DNA
cgccatggctccgacgctgg

SEQ ID NO: 2314 - DNA, 20 bp, synthetic construct
  source 1..20: mol_type = other DNA
actgtccagaaacatgtgga

SEQ ID NO: 2315 - DNA, 20 bp, synthetic construct
  source 1..20: mol_type = other DNA
ccacacccctgcagattgag

SEQ ID NO: 2316 - DNA, 20 bp, synthetic construct
  source 1..20: mol_type = other DNA
ctgtccagaaacatgtggaa

SEQ ID NO: 2317 - DNA, 20 bp, synthetic construct
  source 1..20: mol_type = other DNA
ttaccgtcagccgctctcgg

SEQ ID NO: 2318 - DNA, 20 bp, synthetic construct
  source 1..20: mol_type = other DNA
ccgggaaggatgacatgtcc

SEQ ID NO: 2319 - DNA, 20 bp, synthetic construct
  source 1..20: mol_type = other DNA
gcccttactctcttcatcaa

SEQ ID NO: 2320 - DNA, 20 bp, synthetic construct
  source 1..20: mol_type = other DNA
tcagcagggaggccaactcc

SEQ ID NO: 2321 - DNA, 20 bp, synthetic construct
  source 1..20: mol_type = other DNA
agcgcagaaaggcaaattca

SEQ ID NO: 2322 - DNA, 20 bp, synthetic construct
  source 1..20: mol_type = other DNA
ctaccccaagggccagcgac

SEQ ID NO: 2323 - DNA, 20 bp, synthetic construct
  source 1..20: mol_type = other DNA
ttgagtgtgcgtggggtcca

SEQ ID NO: 2324 - DNA, 20 bp, synthetic construct
  source 1..20: mol_type = other DNA
tcttacctctcaatctgcag

SEQ ID NO: 2325 - DNA, 20 bp, synthetic construct
  source 1..20: mol_type = other DNA
tcgccacctgtgggagccac

SEQ ID NO: 2326 - DNA, 20 bp, synthetic construct
  source 1..20: mol_type = other DNA
acctggaaggtcttccgctc

SEQ ID NO: 2327 - DNA, 20 bp, synthetic construct
  source 1..20: mol_type = other DNA
cattgcccagcagagaaaca

SEQ ID NO: 2328 - DNA, 20 bp, synthetic construct
  source 1..20: mol_type = other DNA
gcacctctgccgcagcctcg

SEQ ID NO: 2329 - DNA, 20 bp, synthetic construct
  source 1..20: mol_type = other DNA
ctgaggtttggtttggagtg

SEQ ID NO: 2330 - DNA, 20 bp, synthetic construct
  source 1..20: mol_type = other DNA
ctcggaggaagcgcatgttg

SEQ ID NO: 2331 - DNA, 20 bp, synthetic construct
  source 1..20: mol_type = other DNA
aagggaagataatggaacgg

SEQ ID NO: 2332 - DNA, 20 bp, synthetic construct
  source 1..20: mol_type = other DNA
ggccgtcccagcagtccact

SEQ ID NO: 2333 - DNA, 20 bp, synthetic construct
  source 1..20: mol_type = other DNA
tcttaagctggttgggtgag

SEQ ID NO: 2334 - DNA, 20 bp, synthetic construct
  source 1..20: mol_type = other DNA
cgcgccagatcacgtggagc

SEQ ID NO: 2335 - DNA, 20 bp, synthetic construct
  source 1..20: mol_type = other DNA
gtcatccttcccggaaacca

SEQ ID NO: 2336 - DNA, 20 bp, synthetic construct
  source 1..20: mol_type = other DNA
gctgcagccaagcaccatgc

SEQ ID NO: 2337 - DNA, 20 bp, synthetic construct
  source 1..20: mol_type = other DNA
gcgaggaggagatccagtag

SEQ ID NO: 2338 - DNA, 20 bp, synthetic construct
  source 1..20: mol_type = other DNA
catggcccaatacttcaaga

SEQ ID NO: 2339 - DNA, 20 bp, synthetic construct
  source 1..20: mol_type = other DNA
tacctccctctccggctcca

SEQ ID NO: 2340 - DNA, 20 bp, synthetic construct
  source 1..20: mol_type = other DNA
tggcccagacagcagacgcc

SEQ ID NO: 2341 - DNA, 20 bp, synthetic construct
  source 1..20: mol_type = other DNA
cacaggaggagctgcaggac

SEQ ID NO: 2342 - DNA, 20 bp, synthetic construct
  source 1..20: mol_type = other DNA
gacaagttcagagagctcca

SEQ ID NO: 2343 - DNA, 20 bp, synthetic construct
  source 1..20: mol_type = other DNA
ccgggacatgtcatccttcc

SEQ ID NO: 2344 - DNA, 20 bp, synthetic construct
  source 1..20: mol_type = other DNA
ctcactctctcgcacgagga

SEQ ID NO: 2345 - DNA, 20 bp, synthetic construct
  source 1..20: mol_type = other DNA
tcatacagggccccgtagtc

SEQ ID NO: 2346 - DNA, 20 bp, synthetic construct
  source 1..20: mol_type = other DNA
gctgcagtcgattgtactga

SEQ ID NO: 2347 - DNA, 20 bp, synthetic construct
  source 1..20: mol_type = other DNA
ctatgctcgctgcctgcgga

SEQ ID NO: 2348 - DNA, 20 bp, synthetic construct
  source 1..20: mol_type = other DNA
aatccagtcgctggcccttg

SEQ ID NO: 2349 - DNA, 20 bp, synthetic construct
  source 1..20: mol_type = other DNA
tgcagtggtcctcaatggac

SEQ ID NO: 2350 - DNA, 20 bp, synthetic construct
  source 1..20: mol_type = other DNA
tgtttccaggagcctgacta

SEQ ID NO: 2351 - DNA, 20 bp, synthetic construct
  source 1..20: mol_type = other DNA
gtctgtcaagaagaacttgg

SEQ ID NO: 2352 - DNA, 20 bp, synthetic construct
  source 1..20: mol_type = other DNA
cagcagtgaccagggcaacg

SEQ ID NO: 2353 - DNA, 20 bp, synthetic construct
  source 1..20: mol_type = other DNA
cttctccatcagcatggcgt

SEQ ID NO: 2354 - DNA, 20 bp, synthetic construct
  source 1..20: mol_type = other DNA
ccctttgatgaagagagtaa

SEQ ID NO: 2355 - DNA, 20 bp, synthetic construct
  source 1..20: mol_type = other DNA
gcgccagatcacgtggagcc

SEQ ID NO: 2356 - DNA, 20 bp, synthetic construct
  source 1..20: mol_type = other DNA
ctgcagctcctcctgtgagt

SEQ ID NO: 2357 - DNA, 20 bp, synthetic construct
  source 1..20: mol_type = other DNA
cacgaggaaggagccgtcag

SEQ ID NO: 2358 - DNA, 20 bp, synthetic construct
  source 1..20: mol_type = other DNA
ggaatccagtcgctggccct

SEQ ID NO: 2359 - DNA, 20 bp, synthetic construct
  source 1..20: mol_type = other DNA
gcccgacatctgccaaagaa

SEQ ID NO: 2360 - DNA, 20 bp, synthetic construct
  source 1..20: mol_type = other DNA
cctgtggaagacacagagtg

SEQ ID NO: 2361 - DNA, 20 bp, synthetic construct
  source 1..20: mol_type = other DNA
ttcctggaacagaccaaaga

SEQ ID NO: 2362 - DNA, 20 bp, synthetic construct
  source 1..20: mol_type = other DNA
gctcagcctgtgctctggtc

SEQ ID NO: 2363 - DNA, 20 bp, synthetic construct
  source 1..20: mol_type = other DNA
cggggcgccgacaagatcga

SEQ ID NO: 2364 - DNA, 20 bp, synthetic construct
  source 1..20: mol_type = other DNA
gctggtcagaacaaagtagt

SEQ ID NO: 2365 - DNA, 20 bp, synthetic construct
  source 1..20: mol_type = other DNA
accaggaaggccccatcacg

SEQ ID NO: 2366 - DNA, 20 bp, synthetic construct
  source 1..20: mol_type = other DNA
acggaggaagaagattgccc

SEQ ID NO: 2367 - DNA, 20 bp, synthetic construct
  source 1..20: mol_type = other DNA
gtcgaaggcctcatcccgca

SEQ ID NO: 2368 - DNA, 20 bp, synthetic construct
  source 1..20: mol_type = other DNA
ctgtaggggcaaccagaaca

SEQ ID NO: 2369 - DNA, 20 bp, synthetic construct
  source 1..20: mol_type = other DNA
ttgcctctacatagaagcca

SEQ ID NO: 2370 - DNA, 20 bp, synthetic construct
  source 1..20: mol_type = other DNA
attcctggaacagaccaaag

SEQ ID NO: 2371 - DNA, 20 bp, synthetic construct
  source 1..20: mol_type = other DNA
gagtccattgtccactgtga

SEQ ID NO: 2372 - DNA, 20 bp, synthetic construct
  source 1..20: mol_type = other DNA
acgccagggtgagattctgc

SEQ ID NO: 2373 - DNA, 20 bp, synthetic construct
  source 1..20: mol_type = other DNA
tacagcgcaggggcacctgc

SEQ ID NO: 2374 - DNA, 20 bp, synthetic construct
  source 1..20: mol_type = other DNA
catccgcaggcagcgagcat

SEQ ID NO: 2375 - DNA, 20 bp, synthetic construct
  source 1..20: mol_type = other DNA
tggagaactggtccccggtc

SEQ ID NO: 2376 - DNA, 20 bp, synthetic construct
  source 1..20: mol_type = other DNA
cagaatgtggagaagcaaga

SEQ ID NO: 2377 - DNA, 20 bp, synthetic construct
  source 1..20: mol_type = other DNA
gcggcagaggtgcagcacct

SEQ ID NO: 2378 - DNA, 20 bp, synthetic construct
  source 1..20: mol_type = other DNA
ctctcttcatcaaagggaac

SEQ ID NO: 2379 - DNA, 20 bp, synthetic construct
  source 1..20: mol_type = other DNA
cttcgtcttctccatcagca

SEQ ID NO: 2380 - DNA, 20 bp, synthetic construct
  source 1..20: mol_type = other DNA
ctcctggaaacaggacacaa

SEQ ID NO: 2381 - DNA, 20 bp, synthetic construct
  source 1..20: mol_type = other DNA
tggacagatctattccagag

SEQ ID NO: 2382 - DNA, 20 bp, synthetic construct
  source 1..20: mol_type = other DNA
cagctctccaatctgaaggt

SEQ ID NO: 2383 - DNA, 20 bp, synthetic construct
  source 1..20: mol_type = other DNA
tgagagtgcacagtggagaa

SEQ ID NO: 2384 - DNA, 20 bp, synthetic construct
  source 1..20: mol_type = other DNA
aaacactacctggtacacac

SEQ ID NO: 2385 - DNA, 20 bp, synthetic construct
  source 1..20: mol_type = other DNA
tgtggcagacctacagtgta

SEQ ID NO: 2386 - DNA, 20 bp, synthetic construct
  source 1..20: mol_type = other DNA
ttgcaagtctgacatttgaa

SEQ ID NO: 2387 - DNA, 20 bp, synthetic construct
  source 1..20: mol_type = other DNA
gaaacactacctggtacaca

SEQ ID NO: 2388 - DNA, 20 bp, synthetic construct
  source 1..20: mol_type = other DNA
tttggacagatctattccag

SEQ ID NO: 2389 - DNA, 20 bp, synthetic construct
  source 1..20: mol_type = other DNA
caggtgggtcttgagattgc

SEQ ID NO: 2390 - DNA, 20 bp, synthetic construct
  source 1..20: mol_type = other DNA
ccacctgcagaaacactacc

SEQ ID NO: 2391 - DNA, 20 bp, synthetic construct
  source 1..20: mol_type = other DNA
gaggcttacctcttcactgt

SEQ ID NO: 2392 - DNA, 20 bp, synthetic construct
  source 1..20: mol_type = other DNA
ctgcgcacctggcattcatg

SEQ ID NO: 2393 - DNA, 20 bp, synthetic construct
  source 1..20: mol_type = other DNA
gcttacctcttcactgttgg

SEQ ID NO: 2394 - DNA, 20 bp, synthetic construct
  source 1..20: mol_type = other DNA
ctaccttcagattggagagc

SEQ ID NO: 2395 - DNA, 20 bp, synthetic construct
  source 1..20: mol_type = other DNA
gtccacctgagagtgcacag

SEQ ID NO: 2396 - DNA, 20 bp, synthetic construct
  source 1..20: mol_type = other DNA
aaatgtcagacttgcaacaa

SEQ ID NO: 2397 - DNA, 20 bp, synthetic construct
  source 1..20: mol_type = other DNA
acccacctgcgactccattc

SEQ ID NO: 2398 - DNA, 20 bp, synthetic construct
  source 1..20: mol_type = other DNA
gtgctgaaataaagaaaaag

SEQ ID NO: 2399 - DNA, 20 bp, synthetic construct
  source 1..20: mol_type = other DNA
gtggcagacctacagtgtag

SEQ ID NO: 2400 - DNA, 20 bp, synthetic construct
  source 1..20: mol_type = other DNA
ttggacagatctattccaga

SEQ ID NO: 2401 - DNA, 20 bp, synthetic construct
  source 1..20: mol_type = other DNA
ttgtggcagacctacagtgt

SEQ ID NO: 2402 - DNA, 20 bp, synthetic construct
  source 1..20: mol_type = other DNA
aatcccatagcaataatgtt

SEQ ID NO: 2403 - DNA, 20 bp, synthetic construct
  source 1..20: mol_type = other DNA
ccacaaactgaggatctgca

SEQ ID NO: 2404 - DNA, 20 bp, synthetic construct
  source 1..20: mol_type = other DNA
tgggaatagttactccctgg

SEQ ID NO: 2405 - DNA, 20 bp, synthetic construct
  source 1..20: mol_type = other DNA
cacacacaggtaacggctga

SEQ ID NO: 2406 - DNA, 20 bp, synthetic construct
  source 1..20: mol_type = other DNA
gttctagctgtggtgggtta

SEQ ID NO: 2407 - DNA, 20 bp, synthetic construct
  source 1..20: mol_type = other DNA
gtacttcacaaaaacagtag

SEQ ID NO: 2408 - DNA, 20 bp, synthetic construct
  source 1..20: mol_type = other DNA
tacacatagcgcctctgact

SEQ ID NO: 2409 - DNA, 20 bp, synthetic construct
  source 1..20: mol_type = other DNA
ccacacacaggtaacggctg

SEQ ID NO: 2410 - DNA, 20 bp, synthetic construct
  source 1..20: mol_type = other DNA
atacacatagcgcctctgac

SEQ ID NO: 2411 - DNA, 20 bp, synthetic construct
  source 1..20: mol_type = other DNA
aaaaggagatatcaagagga

SEQ ID NO: 2412 - DNA, 20 bp, synthetic construct
  source 1..20: mol_type = other DNA
aaacaaaaggagatatcaag

SEQ ID NO: 2413 - DNA, 20 bp, synthetic construct
  source 1..20: mol_type = other DNA
atatcaccacacacaggtaa

SEQ ID NO: 2414 - DNA, 20 bp, synthetic construct
  source 1..20: mol_type = other DNA
aattcactgtaaagctggaa

SEQ ID NO: 2415 - DNA, 20 bp, synthetic construct
  source 1..20: mol_type = other DNA
attcactgtaaagctggaaa

SEQ ID NO: 2416 - DNA, 20 bp, synthetic construct
  source 1..20: mol_type = other DNA
ggtttgataagttctagctg

SEQ ID NO: 2417 - DNA, 20 bp, synthetic construct
  source 1..20: mol_type = other DNA
gactgggaatagttactccc

SEQ ID NO: 2418 - DNA, 20 bp, synthetic construct
  source 1..20: mol_type = other DNA
acctctgcaattaaatttgg

SEQ ID NO: 2419 - DNA, 20 bp, synthetic construct
  source 1..20: mol_type = other DNA
ttgacctgtatccatttctg

SEQ ID NO: 2420 - DNA, 20 bp, synthetic construct
  source 1..20: mol_type = other DNA
cctcagccgttacctgtgtg

SEQ ID NO: 2421 - DNA, 20 bp, synthetic construct
  source 1..20: mol_type = other DNA
tctcacaggtgacgcagcca

SEQ ID NO: 2422 - DNA, 20 bp, synthetic construct
  source 1..20: mol_type = other DNA
gccagaccacggggtgcctg

SEQ ID NO: 2423 - DNA, 20 bp, synthetic construct
  source 1..20: mol_type = other DNA
ggtatttcaccgagtctggt

SEQ ID NO: 2424 - DNA, 20 bp, synthetic construct
  source 1..20: mol_type = other DNA
tccccaccgtgtgagttcct

SEQ ID NO: 2425 - DNA, 20 bp, synthetic construct
  source 1..20: mol_type = other DNA
acggtggggatgtactctcc

SEQ ID NO: 2426 - DNA, 20 bp, synthetic construct
  source 1..20: mol_type = other DNA
gcagatgaggaagacgtcct

SEQ ID NO: 2427 - DNA, 20 bp, synthetic construct
  source 1..20: mol_type = other DNA
tcccaccaccacacacttga

SEQ ID NO: 2428 - DNA, 20 bp, synthetic construct
  source 1..20: mol_type = other DNA
gcgccaaggtgagctggaca

SEQ ID NO: 2429 - DNA, 20 bp, synthetic construct
  source 1..20: mol_type = other DNA
caccaggatgatgggtgtgc

SEQ ID NO: 2430 - DNA, 20 bp, synthetic construct
  source 1..20: mol_type = other DNA
accactgggcaggtgggtgg

SEQ ID NO: 2431 - DNA, 20 bp, synthetic construct
  source 1..20: mol_type = other DNA
gggcaccaagctggacctgc

SEQ ID NO: 2432 - DNA, 20 bp, synthetic construct
  source 1..20: mol_type = other DNA
gccatcaagtgtgtggtggt

SEQ ID NO: 2433 - DNA, 20 bp, synthetic construct
  source 1..20: mol_type = other DNA
gctggacctgcgggacgaca

SEQ ID NO: 2434 - DNA, 20 bp, synthetic construct
  source 1..20: mol_type = other DNA
ttggccagtgccaggccctg

SEQ ID NO: 2435 - DNA, 20 bp, synthetic construct
  source 1..20: mol_type = other DNA
tcccacagccccaggttcac

SEQ ID NO: 2436 - DNA, 20 bp, synthetic construct
  source 1..20: mol_type = other DNA
gcaggccatcaagtgtgtgg

SEQ ID NO: 2437 - DNA, 20 bp, synthetic construct
  source 1..20: mol_type = other DNA
atccccaccgtgtgagttcc

SEQ ID NO: 2438 - DNA, 20 bp, synthetic construct
  source 1..20: mol_type = other DNA
gagaaggcaggtcttgccca

SEQ ID NO: 2439 - DNA, 20 bp, synthetic construct
  source 1..20: mol_type = other DNA
tgcccacggccctgaaagac

SEQ ID NO: 2440 - DNA, 20 bp, synthetic construct
  source 1..20: mol_type = other DNA
ataagaggctgggctgacga

SEQ ID NO: 2441 - DNA, 20 bp, synthetic construct
  source 1..20: mol_type = other DNA
ttacccctagaggaggctgc

SEQ ID NO: 2442 - DNA, 20 bp, synthetic construct
  source 1..20: mol_type = other DNA
ccccaccgtgtgagttcctg

SEQ ID NO: 2443 - DNA, 20 bp, synthetic construct
  source 1..20: mol_type = other DNA
ggaaccactgggcaggtggg

SEQ ID NO: 2444 - DNA, 20 bp, synthetic construct
  source 1..20: mol_type = other DNA
tggccagtgccaggccctgc

SEQ ID NO: 2445 - DNA, 20 bp, synthetic construct
  source 1..20: mol_type = other DNA
cccagtggttcccagaagtg

SEQ ID NO: 2446 - DNA, 20 bp, synthetic construct
  source 1..20: mol_type = other DNA
caaggtgagctggacagggt

SEQ ID NO: 2447 - DNA, 20 bp, synthetic construct
  source 1..20: mol_type = other DNA
ggccatcaagtgtgtggtgg

SEQ ID NO: 2448 - DNA, 20 bp, synthetic construct
  source 1..20: mol_type = other DNA
agcagatgaggaagacgtcc

SEQ ID NO: 2449 - DNA, 20 bp, synthetic construct
  source 1..20: mol_type = other DNA
gcagcacaccgtctgtggat

SEQ ID NO: 2450 - DNA, 20 bp, synthetic construct
  source 1..20: mol_type = other DNA
cagtgccaggccctgcgggt

SEQ ID NO: 2451 - DNA, 20 bp, synthetic construct
  source 1..20: mol_type = other DNA
tgacgagggagaagcagatg

SEQ ID NO: 2452 - DNA, 20 bp, synthetic construct
  source 1..20: mol_type = other DNA
tccaggtatttcaccgagtc

SEQ ID NO: 2453 - DNA, 20 bp, synthetic construct
  source 1..20: mol_type = other DNA
gtgggacactgctgggcagg

SEQ ID NO: 2454 - DNA, 20 bp, synthetic construct
  source 1..20: mol_type = other DNA
cagatgaggaagacgtcctg

SEQ ID NO: 2455 - DNA, 20 bp, synthetic construct
  source 1..20: mol_type = other DNA
gataggagagcggccggaga

SEQ ID NO: 2456 - DNA, 20 bp, synthetic construct
  source 1..20: mol_type = other DNA
agggcacagcacggcccgga

SEQ ID NO: 2457 - DNA, 20 bp, synthetic construct
  source 1..20: mol_type = other DNA
cccttaccaggcttgatgag

SEQ ID NO: 2458 - DNA, 20 bp, synthetic construct
  source 1..20: mol_type = other DNA
ggtgcagcagcagtcgtaca

SEQ ID NO: 2459 - DNA, 20 bp, synthetic construct
  source 1..20: mol_type = other DNA
tctcacctaggaaaacatct

SEQ ID NO: 2460 - DNA, 20 bp, synthetic construct
  source 1..20: mol_type = other DNA
agcacagccagtggccgctc

SEQ ID NO: 2461 - DNA, 20 bp, synthetic construct
  source 1..20: mol_type = other DNA
tctcccggcaaacctcgccc

SEQ ID NO: 2462 - DNA, 20 bp, synthetic construct
  source 1..20: mol_type = other DNA
gctgaccttgatggtggggt

SEQ ID NO: 2463 - DNA, 20 bp, synthetic construct
  source 1..20: mol_type = other DNA
cagtgctgaccttgatggtg

SEQ ID NO: 2464 - DNA, 20 bp, synthetic construct
  source 1..20: mol_type = other DNA
ggcaggtactggaattccat

SEQ ID NO: 2465 - DNA, 20 bp, synthetic construct
  source 1..20: mol_type = other DNA
tggcaggtactggaattcca

SEQ ID NO: 2466 - DNA, 20 bp, synthetic construct
  source 1..20: mol_type = other DNA
agacgatcgtcaccggattg

SEQ ID NO: 2467 - DNA, 20 bp, synthetic construct
  source 1..20: mol_type = other DNA
gtccatggccggggtcccgg

SEQ ID NO: 2468 - DNA, 20 bp, synthetic construct
  source 1..20: mol_type = other DNA
ggacagatcaatggctacac

SEQ ID NO: 2469 - DNA, 20 bp, synthetic construct
  source 1..20: mol_type = other DNA
gacctcacctgtggatgcag

SEQ ID NO: 2470 - DNA, 20 bp, synthetic construct
  source 1..20: mol_type = other DNA
ggaagatctcatccccaccg

SEQ ID NO: 2471 - DNA, 20 bp, synthetic construct
  source 1..20: mol_type = other DNA
gcgctcagtttccagaacct

SEQ ID NO: 2472 - DNA, 20 bp, synthetic construct
  source 1..20: mol_type = other DNA
gcagaaaggtatacatcagg

SEQ ID NO: 2473 - DNA, 20 bp, synthetic construct
  source 1..20: mol_type = other DNA
cgtccatggccggggtcccg

SEQ ID NO: 2474 - DNA, 20 bp, synthetic construct
  source 1..20: mol_type = other DNA
tgctgaccttgatggtgggg

SEQ ID NO: 2475 - DNA, 20 bp, synthetic construct
  source 1..20: mol_type = other DNA
caccacgtctgcctgctggt

SEQ ID NO: 2476 - DNA, 20 bp, synthetic construct
  source 1..20: mol_type = other DNA
tgtggggaaaacctctctgt

SEQ ID NO: 2477 - DNA, 20 bp, synthetic construct
  source 1..20: mol_type = other DNA
cacagtgtacgagaacacag

SEQ ID NO: 2478 - DNA, 20 bp, synthetic construct
  source 1..20: mol_type = other DNA
cccttccatggcattgacgc

SEQ ID NO: 2479 - DNA, 20 bp, synthetic construct
  source 1..20: mol_type = other DNA
tcagcaccacgtctgcctgc

SEQ ID NO: 2480 - DNA, 20 bp, synthetic construct
  source 1..20: mol_type = other DNA
tggccacccagactgaccag

SEQ ID NO: 2481 - DNA, 20 bp, synthetic construct
  source 1..20: mol_type = other DNA
ggccacccagactgaccagc

SEQ ID NO: 2482 - DNA, 20 bp, synthetic construct
  source 1..20: mol_type = other DNA
tgagcactccaggtagccct

SEQ ID NO: 2483 - DNA, 20 bp, synthetic construct
  source 1..20: mol_type = other DNA
ccacagtgtacgagaacaca

SEQ ID NO: 2484 - DNA, 20 bp, synthetic construct
  source 1..20: mol_type = other DNA
gcccaggatgtcagagccaa

SEQ ID NO: 2485 - DNA, 20 bp, synthetic construct
  source 1..20: mol_type = other DNA
gtcctaccagcaggcagacg

SEQ ID NO: 2486 - DNA, 20 bp, synthetic construct
  source 1..20: mol_type = other DNA
accaccagcacaggggtaca

SEQ ID NO: 2487 - DNA, 20 bp, synthetic construct
  source 1..20: mol_type = other DNA
cgtctgcctgctggtaggac

SEQ ID NO: 2488 - DNA, 20 bp, synthetic construct
  source 1..20: mol_type = other DNA
ggtgaagcgcaccaacagag

SEQ ID NO: 2489 - DNA, 20 bp, synthetic construct
  source 1..20: mol_type = other DNA
gggtggccaccaccagcaca

SEQ ID NO: 2490 - DNA, 20 bp, synthetic construct
  source 1..20: mol_type = other DNA
ttgacgcaggaggccctgtg

SEQ ID NO: 2491 - DNA, 20 bp, synthetic construct
  source 1..20: mol_type = other DNA
ggcccaggatgtcagagcca

SEQ ID NO: 2492 - DNA, 20 bp, synthetic construct
  source 1..20: mol_type = other DNA
tgctcagcccttagcaatcg

SEQ ID NO: 2493 - DNA, 20 bp, synthetic construct
  source 1..20: mol_type = other DNA
caccaccagcacaggggtac

SEQ ID NO: 2494 - DNA, 20 bp, synthetic construct
  source 1..20: mol_type = other DNA
gtctgcctgctggtaggaca

SEQ ID NO: 2495 - DNA, 20 bp, synthetic construct
  source 1..20: mol_type = other DNA
gcccaccaacacgcacttga

SEQ ID NO: 2496 - DNA, 20 bp, synthetic construct
  source 1..20: mol_type = other DNA
cattgccggctgtgtcccag

SEQ ID NO: 2497 - DNA, 20 bp, synthetic construct
  source 1..20: mol_type = other DNA
tccacttgttcttcaagttc

SEQ ID NO: 2498 - DNA, 20 bp, synthetic construct
  source 1..20: mol_type = other DNA
ccagactgaccagcgggaga

SEQ ID NO: 2499 - DNA, 20 bp, synthetic construct
  source 1..20: mol_type = other DNA
ccggcccctgtcctaccagc

SEQ ID NO: 2500 - DNA, 20 bp, synthetic construct
  source 1..20: mol_type = other DNA
cccacagtgtacgagaacac

SEQ ID NO: 2501 - DNA, 20 bp, synthetic construct
  source 1..20: mol_type = other DNA
ggtggccaccaccagcacag

SEQ ID NO: 2502 - DNA, 20 bp, synthetic construct
  source 1..20: mol_type = other DNA
tctgcctgctggtaggacag

SEQ ID NO: 2503 - DNA, 20 bp, synthetic construct
  source 1..20: mol_type = other DNA
ggccagtttcttcccttcca

SEQ ID NO: 2504 - DNA, 20 bp, synthetic construct
  source 1..20: mol_type = other DNA
gttcaggaatgagttatggt

SEQ ID NO: 2505 - DNA, 20 bp, synthetic construct
  source 1..20: mol_type = other DNA
tccatcaagtgcgtgttggt

SEQ ID NO: 2506 - DNA, 20 bp, synthetic construct
  source 1..20: mol_type = other DNA
tgctgctcctgagctgagac

SEQ ID NO: 2507 - DNA, 20 bp, synthetic construct
  source 1..20: mol_type = other DNA
tctcagtgaaagtgccaatc

SEQ ID NO: 2508 - DNA, 20 bp, synthetic construct
  source 1..20: mol_type = other DNA
gcagaggaagttggggctgt

SEQ ID NO: 2509 - DNA, 20 bp, synthetic construct
  source 1..20: mol_type = other DNA
tctcggagtgcacaggccga

SEQ ID NO: 2510 - DNA, 20 bp, synthetic construct
  source 1..20: mol_type = other DNA
tctcgtggtggtaataaggg

SEQ ID NO: 2511 - DNA, 20 bp, synthetic construct
  source 1..20: mol_type = other DNA
ggccatcctgctaaaatcag

SEQ ID NO: 2512 - DNA, 20 bp, synthetic construct
  source 1..20: mol_type = other DNA
tttcctcagtgcctttgtgg

SEQ ID NO: 2513 - DNA, 20 bp, synthetic construct
  source 1..20: mol_type = other DNA
acttgcctccttgactcttg

SEQ ID NO: 2514 - DNA, 20 bp, synthetic construct
  source 1..20: mol_type = other DNA
tctgtcagatgccaaatgcc

SEQ ID NO: 2515 - DNA, 20 bp, synthetic construct
  source 1..20: mol_type = other DNA
gagcagagatgtgggaatgg

SEQ ID NO: 2516 - DNA, 20 bp, synthetic construct
  source 1..20: mol_type = other DNA
ggagatcaccacaactggca

SEQ ID NO: 2517 - DNA, 20 bp, synthetic construct
  source 1..20: mol_type = other DNA
tatcagtaaggagcgggagc

SEQ ID NO: 2518 - DNA, 20 bp, synthetic construct
  source 1..20: mol_type = other DNA
aggcgtcactttcacttggg

SEQ ID NO: 2519 - DNA, 20 bp, synthetic construct
  source 1..20: mol_type = other DNA
cactttcacttgggtggaga

SEQ ID NO: 2520 - DNA, 20 bp, synthetic construct
  source 1..20: mol_type = other DNA
ttcaggtatggggcagcgcc

SEQ ID NO: 2521 - DNA, 20 bp, synthetic construct
  source 1..20: mol_type = other DNA
ggaacagatgctcactgcgc

SEQ ID NO: 2522 - DNA, 20 bp, synthetic construct
  source 1..20: mol_type = other DNA
cggtgtcacacagataaact

SEQ ID NO: 2523 - DNA, 20 bp, synthetic construct
  source 1..20: mol_type = other DNA
tcaggtatggggcagcgcct

SEQ ID NO: 2524 - DNA, 20 bp, synthetic construct
  source 1..20: mol_type = other DNA
accagttttctagccgatct

SEQ ID NO: 2525 - DNA, 20 bp, synthetic construct
  source 1..20: mol_type = other DNA
atgcccttactctccgcatc

SEQ ID NO: 2526 - DNA, 20 bp, synthetic construct
  source 1..20: mol_type = other DNA
ttcagtgaaagcagcaaaga

SEQ ID NO: 2527 - DNA, 20 bp, synthetic construct
  source 1..20: mol_type = other DNA
caacagattgcctgcattgg

SEQ ID NO: 2528 - DNA, 20 bp, synthetic construct
  source 1..20: mol_type = other DNA
aatcttagcaggaaggtgcc

SEQ ID NO: 2529 - DNA, 20 bp, synthetic construct
  source 1..20: mol_type = other DNA
gagaaggacatcagcggtaa

SEQ ID NO: 2530 - DNA, 20 bp, synthetic construct
  source 1..20: mol_type = other DNA
agtgaaagcagcaaagaagg

SEQ ID NO: 2531 - DNA, 20 bp, synthetic construct
  source 1..20: mol_type = other DNA
ggagaaggacatcagcggta

SEQ ID NO: 2532 - DNA, 20 bp, synthetic construct
  source 1..20: mol_type = other DNA
caatcttgactctcaatcca

SEQ ID NO: 2533 - DNA, 20 bp, synthetic construct
  source 1..20: mol_type = other DNA
ggaccagatgcggagagtaa

SEQ ID NO: 2534 - DNA, 20 bp, synthetic construct
  source 1..20: mol_type = other DNA
ccagagcatcgtgagtgagc

SEQ ID NO: 2535 - DNA, 20 bp, synthetic construct
  source 1..20: mol_type = other DNA
cttagcaggaaggtgcctgg

SEQ ID NO: 2536 - DNA, 20 bp, synthetic construct
  source 1..20: mol_type = other DNA
tttctccaggaaaacatggc

SEQ ID NO: 2537 - DNA, 20 bp, synthetic construct
  source 1..20: mol_type = other DNA
cttgcctccttgactcttga

SEQ ID NO: 2538 - DNA, 20 bp, synthetic construct
  source 1..20: mol_type = other DNA
ctgtcagatgccaaatgcct

SEQ ID NO: 2539 - DNA, 20 bp, synthetic construct
  source 1..20: mol_type = other DNA
ttgtgtatggttccacggac

SEQ ID NO: 2540 - DNA, 20 bp, synthetic construct
  source 1..20: mol_type = other DNA
ttcactgaatcttagcagga

SEQ ID NO: 2541 - DNA, 20 bp, synthetic construct
  source 1..20: mol_type = other DNA
cggcaacagattgcctgcat

SEQ ID NO: 2542 - DNA, 20 bp, synthetic construct
  source 1..20: mol_type = other DNA
gggacgttgcagctctcaga

SEQ ID NO: 2543 - DNA, 20 bp, synthetic construct
  source 1..20: mol_type = other DNA
ccctgagggagcagagatgt

SEQ ID NO: 2544 - DNA, 20 bp, synthetic construct
  source 1..20: mol_type = other DNA
tgatcccaggttccaattgg

SEQ ID NO: 2545 - DNA, 20 bp, synthetic construct
  source 1..20: mol_type = other DNA
gtaccacaggatggacgccc

SEQ ID NO: 2546 - DNA, 20 bp, synthetic construct
  source 1..20: mol_type = other DNA
tggttccacggactggatct

SEQ ID NO: 2547 - DNA, 20 bp, synthetic construct
  source 1..20: mol_type = other DNA
gcatcacctgcactctcttc

SEQ ID NO: 2548 - DNA, 20 bp, synthetic construct
  source 1..20: mol_type = other DNA
tcttacctgtcacaggacat

SEQ ID NO: 2549 - DNA, 20 bp, synthetic construct
  source 1..20: mol_type = other DNA
gtacgtgcagaaaactctca

SEQ ID NO: 2550 - DNA, 20 bp, synthetic construct
  source 1..20: mol_type = other DNA
gcagcttgacacacggtacc

SEQ ID NO: 2551 - DNA, 20 bp, synthetic construct
  source 1..20: mol_type = other DNA
ttccgggatctgaatcacag

SEQ ID NO: 2552 - DNA, 20 bp, synthetic construct
  source 1..20: mol_type = other DNA
cctcaccatgttcctgaagt

SEQ ID NO: 2553 - DNA, 20 bp, synthetic construct
  source 1..20: mol_type = other DNA
tcctcaccatgttcctgaag

SEQ ID NO: 2554 - DNA, 20 bp, synthetic construct
  source 1..20: mol_type = other DNA
ggaccagctccatggggcag

SEQ ID NO: 2555 - DNA, 20 bp, synthetic construct
  source 1..20: mol_type = other DNA
caggccctccaggagctggg

SEQ ID NO: 2556 - DNA, 20 bp, synthetic construct
  source 1..20: mol_type = other DNA
agtctcccaagcggtcggct

SEQ ID NO: 2557 - DNA, 20 bp, synthetic construct
  source 1..20: mol_type = other DNA
caccaggccctccaggagct

SEQ ID NO: 2558 - DNA, 20 bp, synthetic construct
  source 1..20: mol_type = other DNA
gccagctcctgagggaaggg

SEQ ID NO: 2559 - DNA, 20 bp, synthetic construct
  source 1..20: mol_type = other DNA
ggggtcacgattgtgcgtgc

SEQ ID NO: 2560 - DNA, 20 bp, synthetic construct
  source 1..20: mol_type = other DNA
tcggccagctcctgagggaa

SEQ ID NO: 2561 - DNA, 20 bp, synthetic construct
  source 1..20: mol_type = other DNA
tgtggccacagcactttgtc

SEQ ID NO: 2562 - DNA, 20 bp, synthetic construct
  source 1..20: mol_type = other DNA
ccacagcactttgtcaggca

SEQ ID NO: 2563 - DNA, 20 bp, synthetic construct
  source 1..20: mol_type = other DNA
gccgaagtgcagagcaaccg

SEQ ID NO: 2564 - DNA, 20 bp, synthetic construct
  source 1..20: mol_type = other DNA
ctcggccagctcctgaggga

SEQ ID NO: 2565 - DNA, 20 bp, synthetic construct
  source 1..20: mol_type = other DNA
tcccagggtagctctccagc

SEQ ID NO: 2566 - DNA, 20 bp, synthetic construct
  source 1..20: mol_type = other DNA
acacgaggttctccttggtc

SEQ ID NO: 2567 - DNA, 20 bp, synthetic construct
  source 1..20: mol_type = other DNA
ttgagcgcctcacacagctg

SEQ ID NO: 2568 - DNA, 20 bp, synthetic construct
  source 1..20: mol_type = other DNA
tcctcaggctctcctggtac

SEQ ID NO: 2569 - DNA, 20 bp, synthetic construct
  source 1..20: mol_type = other DNA
ggtgcaggagctgcagaaga

SEQ ID NO: 2570 - DNA, 20 bp, synthetic construct
  source 1..20: mol_type = other DNA
tccctgagtaagtgtccagg

SEQ ID NO: 2571 - DNA, 20 bp, synthetic construct
  source 1..20: mol_type = other DNA
acacctgcacgagagcccca

SEQ ID NO: 2572 - DNA, 20 bp, synthetic construct
  source 1..20: mol_type = other DNA
tccagtaccaggagagcctg

SEQ ID NO: 2573 - DNA, 20 bp, synthetic construct
  source 1..20: mol_type = other DNA
gggaccacttgcttgatctg

SEQ ID NO: 2574 - DNA, 20 bp, synthetic construct
  source 1..20: mol_type = other DNA
gcaccaggccctccaggagc

SEQ ID NO: 2575 - DNA, 20 bp, synthetic construct
  source 1..20: mol_type = other DNA
tcttccctcaggaactgcaa

SEQ ID NO: 2576 - DNA, 20 bp, synthetic construct
  source 1..20: mol_type = other DNA
catgcagactctgctcagct

SEQ ID NO: 2577 - DNA, 20 bp, synthetic construct
  source 1..20: mol_type = other DNA
tctcttaaggcaggctgctt

SEQ ID NO: 2578 - DNA, 20 bp, synthetic construct
  source 1..20: mol_type = other DNA
tctcatagatcagaacatcc

SEQ ID NO: 2579 - DNA, 20 bp, synthetic construct
  source 1..20: mol_type = other DNA
tctctgcaaggcaaaaggat

SEQ ID NO: 2580 - DNA, 20 bp, synthetic construct
  source 1..20: mol_type = other DNA
tctccaggacctggaagcgc

SEQ ID NO: 2581 - DNA, 20 bp, synthetic construct
  source 1..20: mol_type = other DNA
tctctcaggtactcagacaa

SEQ ID NO: 2582 - DNA, 20 bp, synthetic construct
  source 1..20: mol_type = other DNA
tctcacagtagacactctcc

SEQ ID NO: 2583 - DNA, 20 bp, synthetic construct
  source 1..20: mol_type = other DNA
gcgggagatccagcagacgg

SEQ ID NO: 2584 - DNA, 20 bp, synthetic construct
  source 1..20: mol_type = other DNA
ggtagagattggctgcgcca

SEQ ID NO: 2585 - DNA, 20 bp, synthetic construct
  source 1..20: mol_type = other DNA
gaccagtctctggctcacta

SEQ ID NO: 2586 - DNA, 20 bp, synthetic construct
  source 1..20: mol_type = other DNA
acacaaggagtgtctgggga

SEQ ID NO: 2587 - DNA, 20 bp, synthetic construct
  source 1..20: mol_type = other DNA
ttgcaggtacgcaggcccca

SEQ ID NO: 2588 - DNA, 20 bp, synthetic construct
  source 1..20: mol_type = other DNA
ctgcacgtcctcccgggctg

SEQ ID NO: 2589 - DNA, 20 bp, synthetic construct
  source 1..20: mol_type = other DNA
tcttcatcaaatacaaggag

SEQ ID NO: 2590 - DNA, 20 bp, synthetic construct
  source 1..20: mol_type = other DNA
tgttctcagagagccaacaa

SEQ ID NO: 2591 - DNA, 20 bp, synthetic construct
  source 1..20: mol_type = other DNA
cgcccagccaccgcgtgacc

SEQ ID NO: 2592 - DNA, 20 bp, synthetic construct
  source 1..20: mol_type = other DNA
cagaaggacaccatcccgga

SEQ ID NO: 2593 - DNA, 20 bp, synthetic construct
  source 1..20: mol_type = other DNA
ggctggccctggatgccatg

SEQ ID NO: 2594 - DNA, 20 bp, synthetic construct
  source 1..20: mol_type = other DNA
gcgctccaagatggacaggt

SEQ ID NO: 2595 - DNA, 20 bp, synthetic construct
  source 1..20: mol_type = other DNA
ggctcacctgggacatctgg

SEQ ID NO: 2596 - DNA, 20 bp, synthetic construct
  source 1..20: mol_type = other DNA
ccgcctcaccaggttctcaa

SEQ ID NO: 2597 - DNA, 20 bp, synthetic construct
  source 1..20: mol_type = other DNA
cctgggacatctgggggcgc

SEQ ID NO: 2598 - DNA, 20 bp, synthetic construct
  source 1..20: mol_type = other DNA
tgagccaggtcctggggagg

SEQ ID NO: 2599 - DNA, 20 bp, synthetic construct
  source 1..20: mol_type = other DNA
ctggtcctatgcagtaggca

SEQ ID NO: 2600 - DNA, 20 bp, synthetic construct
  source 1..20: mol_type = other DNA
gtacctgcaaagagacacca

SEQ ID NO: 2601 - DNA, 20 bp, synthetic construct
  source 1..20: mol_type = other DNA
acagcaaggctggtggcgag

SEQ ID NO: 2602 - DNA, 20 bp, synthetic construct
  source 1..20: mol_type = other DNA
agggctcacctgggacatct

SEQ ID NO: 2603 - DNA, 20 bp, synthetic construct
  source 1..20: mol_type = other DNA
acgcactgagccaggtcctg

SEQ ID NO: 2604 - DNA, 20 bp, synthetic construct
  source 1..20: mol_type = other DNA
tcacctaagcagcatctgac

SEQ ID NO: 2605 - DNA, 20 bp, synthetic construct
  source 1..20: mol_type = other DNA
gatgacctgtgacggggcag

SEQ ID NO: 2606 - DNA, 20 bp, synthetic construct
  source 1..20: mol_type = other DNA
tgtggcgccaatgcacccac

SEQ ID NO: 2607 - DNA, 20 bp, synthetic construct
  source 1..20: mol_type = other DNA
aggcctgtcagatgctgctt

SEQ ID NO: 2608 - DNA, 20 bp, synthetic construct
  source 1..20: mol_type = other DNA
tctcaatgtcttgaggtttc

SEQ ID NO: 2609 - DNA, 20 bp, synthetic construct
  source 1..20: mol_type = other DNA
tctggaaccagatggtcacc

SEQ ID NO: 2610 - DNA, 20 bp, synthetic construct
  source 1..20: mol_type = other DNA
ccaggtcttcatcaaataca

SEQ ID NO: 2611 - DNA, 20 bp, synthetic construct
  source 1..20: mol_type = other DNA
tgagtagagctttgtcgagc

SEQ ID NO: 2612 - DNA, 20 bp, synthetic construct
  source 1..20: mol_type = other DNA
cagggtgaacctcccgttgt

SEQ ID NO: 2613 - DNA, 20 bp, synthetic construct
  source 1..20: mol_type = other DNA
caccatcagcaggtcccgca

SEQ ID NO: 2614 - DNA, 20 bp, synthetic construct
  source 1..20: mol_type = other DNA
tagagctttgtcgagcagga

SEQ ID NO: 2615 - DNA, 20 bp, synthetic construct
  source 1..20: mol_type = other DNA
tcccaggtcacgcggtggct

SEQ ID NO: 2616 - DNA, 20 bp, synthetic construct
  source 1..20: mol_type = other DNA
agatgaacagacaggtcctg

SEQ ID NO: 2617 - DNA, 20 bp, synthetic construct
  source 1..20: mol_type = other DNA
catctggaagtcatgcccgt

SEQ ID NO: 2618 - DNA, 20 bp, synthetic construct
  source 1..20: mol_type = other DNA
ccatgagggtgagtgggtgt

SEQ ID NO: 2619 - DNA, 20 bp, synthetic construct
  source 1..20: mol_type = other DNA
gaggccgaacttctcacagc

SEQ ID NO: 2620 - DNA, 20 bp, synthetic construct
  source 1..20: mol_type = other DNA
cccggcactggatgagccag

SEQ ID NO: 2621 - DNA, 20 bp, synthetic construct
  source 1..20: mol_type = other DNA
ccggcactggatgagccagt

SEQ ID NO: 2622 - DNA, 20 bp, synthetic construct
  source 1..20: mol_type = other DNA
gagcactcactcgatctggt

SEQ ID NO: 2623 - DNA, 20 bp, synthetic construct
  source 1..20: mol_type = other DNA
cctacctgctggcctgctga

SEQ ID NO: 2624 - DNA, 20 bp, synthetic construct
  source 1..20: mol_type = other DNA
ctctactcatctgtaagcgc

SEQ ID NO: 2625 - DNA, 20 bp, synthetic construct
  source 1..20: mol_type = other DNA
agagactggtcctatgcagt

SEQ ID NO: 2626 - DNA, 20 bp, synthetic construct
  source 1..20: mol_type = other DNA
tcacgcaccggcatggacac

SEQ ID NO: 2627 - DNA, 20 bp, synthetic construct
  source 1..20: mol_type = other DNA
ctcctagaaggcggaccaca

SEQ ID NO: 2628 - DNA, 20 bp, synthetic construct
  source 1..20: mol_type = other DNA
gcagcggtagccctgataga

SEQ ID NO: 2629 - DNA, 20 bp, synthetic construct
  source 1..20: mol_type = other DNA
gagggctcacctgggacatc

SEQ ID NO: 2630 - DNA, 20 bp, synthetic construct
  source 1..20: mol_type = other DNA
gagccgtagaaagggtccaa

SEQ ID NO: 2631 - DNA, 20 bp, synthetic construct
  source 1..20: mol_type = other DNA
actgagccaggtcctgggga

SEQ ID NO: 2632 - DNA, 20 bp, synthetic construct
  source 1..20: mol_type = other DNA
gttccctgccaactacgtgg

SEQ ID NO: 2633 - DNA, 20 bp, synthetic construct
  source 1..20: mol_type = other DNA
gtccctccatgtggccgaca

SEQ ID NO: 2634 - DNA, 20 bp, synthetic construct
  source 1..20: mol_type = other DNA
accccgatcgcccagaacag

SEQ ID NO: 2635 - DNA, 20 bp, synthetic construct
  source 1..20: mol_type = other DNA
ctggaagtcatgcccgttgg

SEQ ID NO: 2636 - DNA, 20 bp, synthetic construct
  source 1..20: mol_type = other DNA
ggaaggcatacctggaagga

SEQ ID NO: 2637 - DNA, 20 bp, synthetic construct
  source 1..20: mol_type = other DNA
accgagacaacaagaaggtg

SEQ ID NO: 2638 - DNA, 20 bp, synthetic construct
  source 1..20: mol_type = other DNA
cacacaaggagtgtctgggg

SEQ ID NO: 2639 - DNA, 20 bp, synthetic construct
  source 1..20: mol_type = other DNA
ggaacatgtggctccactgc

SEQ ID NO: 2640 - DNA, 20 bp, synthetic construct
  source 1..20: mol_type = other DNA
ctggttccctgccaactacg

SEQ ID NO: 2641 - DNA, 20 bp, synthetic construct
  source 1..20: mol_type = other DNA
tcaggtgtgtgaactggccc

SEQ ID NO: 2642 - DNA, 20 bp, synthetic construct
  source 1..20: mol_type = other DNA
gtgcagatgaagctggaggt

SEQ ID NO: 2643 - DNA, 20 bp, synthetic construct
  source 1..20: mol_type = other DNA
ttaccagcagaactctctaa

SEQ ID NO: 2644 - DNA, 20 bp, synthetic construct
  source 1..20: mol_type = other DNA
agaattgaagaagaagtgga

SEQ ID NO: 2645 - DNA, 20 bp, synthetic construct
  source 1..20: mol_type = other DNA
gctctctgagaacattcctg

SEQ ID NO: 2646 - DNA, 20 bp, synthetic construct
  source 1..20: mol_type = other DNA
gacagcaaggctggtggcga

SEQ ID NO: 2647 - DNA, 20 bp, synthetic construct
  source 1..20: mol_type = other DNA
atcgaggaccaaggtgccca

SEQ ID NO: 2648 - DNA, 20 bp, synthetic construct
  source 1..20: mol_type = other DNA
ccctgtaggttcctcgtcta

SEQ ID NO: 2649 - DNA, 20 bp, synthetic construct
  source 1..20: mol_type = other DNA
gggtccaggacagagcagac

SEQ ID NO: 2650 - DNA, 20 bp, synthetic construct
  source 1..20: mol_type = other DNA
gcagggctcaggacaaaaag

SEQ ID NO: 2651 - DNA, 20 bp, synthetic construct
  source 1..20: mol_type = other DNA
ctactcatctgtaagcgcag

SEQ ID NO: 2652 - DNA, 20 bp, synthetic construct
  source 1..20: mol_type = other DNA
gtcacgcaccggcatggaca

SEQ ID NO: 2653 - DNA, 20 bp, synthetic construct
  source 1..20: mol_type = other DNA
gatgaagacctggtagagat

SEQ ID NO: 2654 - DNA, 20 bp, synthetic construct
  source 1..20: mol_type = other DNA
tctgcacacaaggagtgtct

SEQ ID NO: 2655 - DNA, 20 bp, synthetic construct
  source 1..20: mol_type = other DNA
accagatcgagtgagtgctc

SEQ ID NO: 2656 - DNA, 20 bp, synthetic construct
  source 1..20: mol_type = other DNA
gttccccgtcgatcttgggc

SEQ ID NO: 2657 - DNA, 20 bp, synthetic construct
  source 1..20: mol_type = other DNA
tgaggcactcacatggacat

SEQ ID NO: 2658 - DNA, 20 bp, synthetic construct
  source 1..20: mol_type = other DNA
tggttccagatataacgtcg

SEQ ID NO: 2659 - DNA, 20 bp, synthetic construct
  source 1..20: mol_type = other DNA
ctccaccagctcctagaagg

SEQ ID NO: 2660 - DNA, 20 bp, synthetic construct
  source 1..20: mol_type = other DNA
gtagagattggctgcgccag

SEQ ID NO: 2661 - DNA, 20 bp, synthetic construct
  source 1..20: mol_type = other DNA
cctgcgcccccagatgtccc

SEQ ID NO: 2662 - DNA, 20 bp, synthetic construct
  source 1..20: mol_type = other DNA
ctcactcgatctggtcggac

SEQ ID NO: 2663 - DNA, 20 bp, synthetic construct
  source 1..20: mol_type = other DNA
tgggcggcagcacccggcac

SEQ ID NO: 2664 - DNA, 20 bp, synthetic construct
  source 1..20: mol_type = other DNA
ccccaggcccttccccaccg

SEQ ID NO: 2665 - DNA, 20 bp, synthetic construct
  source 1..20: mol_type = other DNA
acaccctgtctgctctgtcc

SEQ ID NO: 2666 - DNA, 20 bp, synthetic construct
  source 1..20: mol_type = other DNA
gtgaactggcccaggccctc

SEQ ID NO: 2667 - DNA, 20 bp, synthetic construct
  source 1..20: mol_type = other DNA
ccatggctaccgcctgccca

SEQ ID NO: 2668 - DNA, 20 bp, synthetic construct
  source 1..20: mol_type = other DNA
caggtcctactcggagggaa

SEQ ID NO: 2669 - DNA, 20 bp, synthetic construct
  source 1..20: mol_type = other DNA
gccatagacgaggaacctac

SEQ ID NO: 2670 - DNA, 20 bp, synthetic construct
  source 1..20: mol_type = other DNA
ccaggacaaactacatcgca

SEQ ID NO: 2671 - DNA, 20 bp, synthetic construct
  source 1..20: mol_type = other DNA
gcattggcgccacagctcca

SEQ ID NO: 2672 - DNA, 20 bp, synthetic construct
  source 1..20: mol_type = other DNA
cttaaggcacaggaactgtg

SEQ ID NO: 2673 - DNA, 20 bp, synthetic construct
  source 1..20: mol_type = other DNA
cactgagccaggtcctgggg

SEQ ID NO: 2674 - DNA, 20 bp, synthetic construct
  source 1..20: mol_type = other DNA
gaggcactcacatggacata

SEQ ID NO: 2675 - DNA, 20 bp, synthetic construct
  source 1..20: mol_type = other DNA
gttgacctcacgcaggttga

SEQ ID NO: 2676 - DNA, 20 bp, synthetic construct
  source 1..20: mol_type = other DNA
ggatgagccagtgggtgcat

SEQ ID NO: 2677 - DNA, 20 bp, synthetic construct
  source 1..20: mol_type = other DNA
ccactggctcatccagtgcc

SEQ ID NO: 2678 - DNA, 20 bp, synthetic construct
  source 1..20: mol_type = other DNA
ggtccaggacagagcagaca

SEQ ID NO: 2679 - DNA, 20 bp, synthetic construct
  source 1..20: mol_type = other DNA
ggtcctatgcagtaggcagg

SEQ ID NO: 2680 - DNA, 20 bp, synthetic construct
  source 1..20: mol_type = other DNA
cgacagctctgatcggtctc

SEQ ID NO: 2681 - DNA, 20 bp, synthetic construct
  source 1..20: mol_type = other DNA
gctggccctggatgccatga

SEQ ID NO: 2682 - DNA, 20 bp, synthetic construct
  source 1..20: mol_type = other DNA
ccagctgtccattgagaacc

SEQ ID NO: 2683 - DNA, 20 bp, synthetic construct
  source 1..20: mol_type = other DNA
actcaccctcatggcatcca

SEQ ID NO: 2684 - DNA, 20 bp, synthetic construct
  source 1..20: mol_type = other DNA
caagagaattgaagaagaag

SEQ ID NO: 2685 - DNA, 20 bp, synthetic construct
  source 1..20: mol_type = other DNA
gacatgggcaaggtacgagt

SEQ ID NO: 2686 - DNA, 20 bp, synthetic construct
  source 1..20: mol_type = other DNA
ctgagccaggtcctggggag

SEQ ID NO: 2687 - DNA, 20 bp, synthetic construct
  source 1..20: mol_type = other DNA
agccaacctggaaacagacg

SEQ ID NO: 2688 - DNA, 20 bp, synthetic construct
  source 1..20: mol_type = other DNA
tgggcaaggtacgagtggga

SEQ ID NO: 2689 - DNA, 20 bp, synthetic construct
  source 1..20: mol_type = other DNA
aacccacagcgacacggtgg

SEQ ID NO: 2690 - DNA, 20 bp, synthetic construct
  source 1..20: mol_type = other DNA
gaccccgatcgcccagaaca

SEQ ID NO: 2691 - DNA, 20 bp, synthetic construct
  source 1..20: mol_type = other DNA
tgttcatactcacttcctaa

SEQ ID NO: 2692 - DNA, 20 bp, synthetic construct
  source 1..20: mol_type = other DNA
cgacatgggcaaggtacgag

SEQ ID NO: 2693 - DNA, 20 bp, synthetic construct
  source 1..20: mol_type = other DNA
ttcctgggaaatctacggga

SEQ ID NO: 2694 - DNA, 20 bp, synthetic construct
  source 1..20: mol_type = other DNA
ccaagaaagtcccgtccgag

SEQ ID NO: 2695 - DNA, 20 bp, synthetic construct
  source 1..20: mol_type = other DNA
gtcccaggtgagccctccgc

SEQ ID NO: 2696 - DNA, 20 bp, synthetic construct
  source 1..20: mol_type = other DNA
gatcgaggaccaaggtgccc

SEQ ID NO: 2697 - DNA, 20 bp, synthetic construct
  source 1..20: mol_type = other DNA
cacgcaggaggcgatggaga

SEQ ID NO: 2698 - DNA, 20 bp, synthetic construct
  source 1..20: mol_type = other DNA
cactcgtaccttgcccatgt

SEQ ID NO: 2699 - DNA, 20 bp, synthetic construct
  source 1..20: mol_type = other DNA
ccccgatcgcccagaacagg

SEQ ID NO: 2700 - DNA, 20 bp, synthetic construct
  source 1..20: mol_type = other DNA
ggaccccgatcgcccagaac

SEQ ID NO: 2701 - DNA, 20 bp, synthetic construct
  source 1..20: mol_type = other DNA
cttgaaggggaactgcaagg

SEQ ID NO: 2702 - DNA, 20 bp, synthetic construct
  source 1..20: mol_type = other DNA
gcttcatctgcacgtcctcc

SEQ ID NO: 2703 - DNA, 20 bp, synthetic construct
  source 1..20: mol_type = other DNA
gaacatgtggctccactgca

SEQ ID NO: 2704 - DNA, 20 bp, synthetic construct
  source 1..20: mol_type = other DNA
aggacctgtctgttcatctc

SEQ ID NO: 2705 - DNA, 20 bp, synthetic construct
  source 1..20: mol_type = other DNA
ggagaagtacactgacacgc

SEQ ID NO: 2706 - DNA, 20 bp, synthetic construct
  source 1..20: mol_type = other DNA
tgagctccacaatgtctcca

SEQ ID NO: 2707 - DNA, 20 bp, synthetic construct
  source 1..20: mol_type = other DNA
tccaggtctgcccaagatgg

SEQ ID NO: 2708 - DNA, 20 bp, synthetic construct
  source 1..20: mol_type = other DNA
tgaactggcccaggccctcc

SEQ ID NO: 2709 - DNA, 20 bp, synthetic construct
  source 1..20: mol_type = other DNA
gctaccgctgccatcggtgc

SEQ ID NO: 2710 - DNA, 20 bp, synthetic construct
  source 1..20: mol_type = other DNA
caacgggaggttcaccctgc

SEQ ID NO: 2711 - DNA, 20 bp, synthetic construct
  source 1..20: mol_type = other DNA
cgaagagctcgctccgcttg

SEQ ID NO: 2712 - DNA, 20 bp, synthetic construct
  source 1..20: mol_type = other DNA
atcagggctaccgctgccat

SEQ ID NO: 2713 - DNA, 20 bp, synthetic construct
  source 1..20: mol_type = other DNA
caggtcacgcggtggctggg

SEQ ID NO: 2714 - DNA, 20 bp, synthetic construct
  source 1..20: mol_type = other DNA
ggacgtgcagatgaagctgg

SEQ ID NO: 2715 - DNA, 20 bp, synthetic construct
  source 1..20: mol_type = other DNA
agaaggtacctctgagatgc

SEQ ID NO: 2716 - DNA, 20 bp, synthetic construct
  source 1..20: mol_type = other DNA
cgggtgaggcaggcagggct

SEQ ID NO: 2717 - DNA, 20 bp, synthetic construct
  source 1..20: mol_type = other DNA
ccgtctgctggatctcccgc

SEQ ID NO: 2718 - DNA, 20 bp, synthetic construct
  source 1..20: mol_type = other DNA
cctcccgggctgcggccaca

SEQ ID NO: 2719 - DNA, 20 bp, synthetic construct
  source 1..20: mol_type = other DNA
gagccccatcccaggtcacg

SEQ ID NO: 2720 - DNA, 20 bp, synthetic construct
  source 1..20: mol_type = other DNA
gtgagaagttcggcctcaag

SEQ ID NO: 2721 - DNA, 20 bp, synthetic construct
  source 1..20: mol_type = other DNA
tgaagaacagctcatagccc

SEQ ID NO: 2722 - DNA, 20 bp, synthetic construct
  source 1..20: mol_type = other DNA
acagaaggacaccatcccgg

SEQ ID NO: 2723 - DNA, 20 bp, synthetic construct
  source 1..20: mol_type = other DNA
aaggagatgaaggaagccct

SEQ ID NO: 2724 - DNA, 20 bp, synthetic construct
  source 1..20: mol_type = other DNA
tgtcccaggtgagccctccg

SEQ ID NO: 2725 - DNA, 20 bp, synthetic construct
  source 1..20: mol_type = other DNA
tctactcatctgtaagcgca

SEQ ID NO: 2726 - DNA, 20 bp, synthetic construct
  source 1..20: mol_type = other DNA
gaaggtacctctgagatgca

SEQ ID NO: 2727 - DNA, 20 bp, synthetic construct
  source 1..20: mol_type = other DNA
ccgatcagagctgtcgctca

SEQ ID NO: 2728 - DNA, 20 bp, synthetic construct
  source 1..20: mol_type = other DNA
ctcagagagccaacaacggg

SEQ ID NO: 2729 - DNA, 20 bp, synthetic construct
  source 1..20: mol_type = other DNA
gaccgagacaacaagaaggt

SEQ ID NO: 2730 - DNA, 20 bp, synthetic construct
  source 1..20: mol_type = other DNA
cgaagcaggtcctactcgga

SEQ ID NO: 2731 - DNA, 20 bp, synthetic construct
  source 1..20: mol_type = other DNA
gcaggatgtggtctcctcaa

SEQ ID NO: 2732 - DNA, 20 bp, synthetic construct
  source 1..20: mol_type = other DNA
tgttaagcagctgacacaga

SEQ ID NO: 2733 - DNA, 20 bp, synthetic construct
  source 1..20: mol_type = other DNA
cctcgatcaggaggaacatg

SEQ ID NO: 2734 - DNA, 20 bp, synthetic construct
  source 1..20: mol_type = other DNA
tgtacttctcctccgtctgc

SEQ ID NO: 2735 - DNA, 20 bp, synthetic construct
  source 1..20: mol_type = other DNA
ggaaggttctaatgttctta

SEQ ID NO: 2736 - DNA, 20 bp, synthetic construct
  source 1..20: mol_type = other DNA
gaggtttcaggaaccgttgc

SEQ ID NO: 2737 - DNA, 20 bp, synthetic construct
  source 1..20: mol_type = other DNA
ggcgcaggttgacctcacgc

SEQ ID NO: 2738 - DNA, 20 bp, synthetic construct
  source 1..20: mol_type = other DNA
ccatgccatcaacctgcgtg

SEQ ID NO: 2739 - DNA, 20 bp, synthetic construct
  source 1..20: mol_type = other DNA
gcccagccaccgcgtgacct

SEQ ID NO: 2740 - DNA, 20 bp, synthetic construct
  source 1..20: mol_type = other DNA
gccaccgcgtgacctgggat

SEQ ID NO: 2741 - DNA, 20 bp, synthetic construct
  source 1..20: mol_type = other DNA
gggtgtagatgacctgtgac

SEQ ID NO: 2742 - DNA, 20 bp, synthetic construct
  source 1..20: mol_type = other DNA
ccatagacgaggaacctaca

SEQ ID NO: 2743 - DNA, 20 bp, synthetic construct
  source 1..20: mol_type = other DNA
tggccggcccaagatcgacg

SEQ ID NO: 2744 - DNA, 20 bp, synthetic construct
  source 1..20: mol_type = other DNA
gcaggtttacaaagtccttg

SEQ ID NO: 2745 - DNA, 20 bp, synthetic construct
  source 1..20: mol_type = other DNA
tggtcctatgcagtaggcag

SEQ ID NO: 2746 - DNA, 20 bp, synthetic construct
  source 1..20: mol_type = other DNA
agccaccgcgtgacctggga

SEQ ID NO: 2747 - DNA, 20 bp, synthetic construct
  source 1..20: mol_type = other DNA
agaaggtggggctttgacgc

SEQ ID NO: 2748 - DNA, 20 bp, synthetic construct
  source 1..20: mol_type = other DNA
gacacagaaggacaccatcc

SEQ ID NO: 2749 - DNA, 20 bp, synthetic construct
  source 1..20: mol_type = other DNA
gagaagtacactgacacgct

SEQ ID NO: 2750 - DNA, 20 bp, synthetic construct
  source 1..20: mol_type = other DNA
ggacagcaaggctggtggcg

SEQ ID NO: 2751 - DNA, 20 bp, synthetic construct
  source 1..20: mol_type = other DNA
tgcagtagcggccatagacg

SEQ ID NO: 2752 - DNA, 20 bp, synthetic construct
  source 1..20: mol_type = other DNA
tggccgctactgcagccagg

SEQ ID NO: 2753 - DNA, 20 bp, synthetic construct
  source 1..20: mol_type = other DNA
ccacagcgacacggtggagg

SEQ ID NO: 2754 - DNA, 20 bp, synthetic construct
  source 1..20: mol_type = other DNA
tgacccttaccgtaagcccc

SEQ ID NO: 2755 - DNA, 20 bp, synthetic construct
  source 1..20: mol_type = other DNA
tccatggctaccgcctgccc

SEQ ID NO: 2756 - DNA, 20 bp, synthetic construct
  source 1..20: mol_type = other DNA
cagcaaacacctggaccgtg

SEQ ID NO: 2757 - DNA, 20 bp, synthetic construct
  source 1..20: mol_type = other DNA
ggaaatctacgggagggtaa

SEQ ID NO: 2758 - DNA, 20 bp, synthetic construct
  source 1..20: mol_type = other DNA
cctggctcagtgcgtgaacg

SEQ ID NO: 2759 - DNA, 20 bp, synthetic construct
  source 1..20: mol_type = other DNA
gaagaacagctcatagccct

SEQ ID NO: 2760 - DNA, 20 bp, synthetic construct
  source 1..20: mol_type = other DNA
ctgcacacaaggagtgtctg

SEQ ID NO: 2761 - DNA, 20 bp, synthetic construct
  source 1..20: mol_type = other DNA
ggctctctgagaacattcct

SEQ ID NO: 2762 - DNA, 20 bp, synthetic construct
  source 1..20: mol_type = other DNA
acagaactggtgggaggtac

SEQ ID NO: 2763 - DNA, 20 bp, synthetic construct
  source 1..20: mol_type = other DNA
ccggagaatgccaccgccaa

SEQ ID NO: 2764 - DNA, 20 bp, synthetic construct
  source 1..20: mol_type = other DNA
gggctcacctgggacatctg

SEQ ID NO: 2765 - DNA, 20 bp, synthetic construct
  source 1..20: mol_type = other DNA
cctgcgggagatccagcaga

SEQ ID NO: 2766 - DNA, 20 bp, synthetic construct
  source 1..20: mol_type = other DNA
acgaagcaggtcctactcgg

SEQ ID NO: 2767 - DNA, 20 bp, synthetic construct
  source 1..20: mol_type = other DNA
cactcaccctcatggcatcc

SEQ ID NO: 2768 - DNA, 20 bp, synthetic construct
  source 1..20: mol_type = other DNA
cacgcactgagccaggtcct

SEQ ID NO: 2769 - DNA, 20 bp, synthetic construct
  source 1..20: mol_type = other DNA
gcaggtcctactcggaggga

SEQ ID NO: 2770 - DNA, 20 bp, synthetic construct
  source 1..20: mol_type = other DNA
aggtttcaggaaccgttgca

SEQ ID NO: 2771 - DNA, 20 bp, synthetic construct
  source 1..20: mol_type = other DNA
agaccgagacaacaagaagg

SEQ ID NO: 2772 - DNA, 20 bp, synthetic construct
  source 1..20: mol_type = other DNA
caaatatcacctccttctcc

SEQ ID NO: 2773 - DNA, 20 bp, synthetic construct
  source 1..20: mol_type = other DNA
gccgaacttctcacagcagg

SEQ ID NO: 2774 - DNA, 20 bp, synthetic construct
  source 1..20: mol_type = other DNA
ggtttcaggaaccgttgcag

SEQ ID NO: 2775 - DNA, 20 bp, synthetic construct
  source 1..20: mol_type = other DNA
actccacctggctgcagtag

SEQ ID NO: 2776 - DNA, 20 bp, synthetic construct
  source 1..20: mol_type = other DNA
atgcccggcaccgatggcag

SEQ ID NO: 2777 - DNA, 20 bp, synthetic construct
  source 1..20: mol_type = other DNA
tccaggacaaactacatcgc

SEQ ID NO: 2778 - DNA, 20 bp, synthetic construct
  source 1..20: mol_type = other DNA
gcaggtaggaggtctcagac

SEQ ID NO: 2779 - DNA, 20 bp, synthetic construct
  source 1..20: mol_type = other DNA
cttcatctgcacgtcctccc

SEQ ID NO: 2780 - DNA, 20 bp, synthetic construct
  source 1..20: mol_type = other DNA
caggtaggaggtctcagact

SEQ ID NO: 2781 - DNA, 20 bp, synthetic construct
  source 1..20: mol_type = other DNA
aaggagaggtgagacccagc

SEQ ID NO: 2782 - DNA, 20 bp, synthetic construct
  source 1..20: mol_type = other DNA
cgctgtgggttgtgaggtca

SEQ ID NO: 2783 - DNA, 20 bp, synthetic construct
  source 1..20: mol_type = other DNA
tcaagaaatgctgcggggaa

SEQ ID NO: 2784 - DNA, 20 bp, synthetic construct
  source 1..20: mol_type = other DNA
ggtgtagatgacctgtgacg

SEQ ID NO: 2785 - DNA, 20 bp, synthetic construct
  source 1..20: mol_type = other DNA
tcacttcctaaaggagatga

SEQ ID NO: 2786 - DNA, 20 bp, synthetic construct
  source 1..20: mol_type = other DNA
gtcgagcaggaaggcatacc

SEQ ID NO: 2787 - DNA, 20 bp, synthetic construct
  source 1..20: mol_type = other DNA
tccctccatgtggccgacat

SEQ ID NO: 2788 - DNA, 20 bp, synthetic construct
  source 1..20: mol_type = other DNA
tatttctgccctaaacaccc

SEQ ID NO: 2789 - DNA, 20 bp, synthetic construct
  source 1..20: mol_type = other DNA
ccccatcccaggtcacgcgg

SEQ ID NO: 2790 - DNA, 20 bp, synthetic construct
  source 1..20: mol_type = other DNA
ggcattctccggatagatgt

SEQ ID NO: 2791 - DNA, 20 bp, synthetic construct
  source 1..20: mol_type = other DNA
gcgacagctctgatcggtct

SEQ ID NO: 2792 - DNA, 20 bp, synthetic construct
  source 1..20: mol_type = other DNA
agcaggaaggcatacctgga

SEQ ID NO: 2793 - DNA, 20 bp, synthetic construct
  source 1..20: mol_type = other DNA
tcctccaggtctgcccaaga

SEQ ID NO: 2794 - DNA, 20 bp, synthetic construct
  source 1..20: mol_type = other DNA
ggcgaggggagatctatggc

SEQ ID NO: 2795 - DNA, 20 bp, synthetic construct
  source 1..20: mol_type = other DNA
gcagaagtcatagcgggctt

SEQ ID NO: 2796 - DNA, 20 bp, synthetic construct
  source 1..20: mol_type = other DNA
aagaaggtaagactttcccg

SEQ ID NO: 2797 - DNA, 20 bp, synthetic construct
  source 1..20: mol_type = other DNA
atgaagctggaggtgggcgc

SEQ ID NO: 2798 - DNA, 20 bp, synthetic construct
  source 1..20: mol_type = other DNA
ccacatgttcctcctgatcg

SEQ ID NO: 2799 - DNA, 20 bp, synthetic construct
  source 1..20: mol_type = other DNA
ctcagaggtaccttctatca

SEQ ID NO: 2800 - DNA, 20 bp, synthetic construct
  source 1..20: mol_type = other DNA
tcacgcactgagccaggtcc

SEQ ID NO: 2801 - DNA, 20 bp, synthetic construct
  source 1..20: mol_type = other DNA
ctcaccagagatgaacagac

SEQ ID NO: 2802 - DNA, 20 bp, synthetic construct
  source 1..20: mol_type = other DNA
cttcctccacgtagttggca

SEQ ID NO: 2803 - DNA, 20 bp, synthetic construct
  source 1..20: mol_type = other DNA
tggcatccagggccagccgc

SEQ ID NO: 2804 - DNA, 20 bp, synthetic construct
  source 1..20: mol_type = other DNA
ctgacaggccttgcaggatg

SEQ ID NO: 2805 - DNA, 20 bp, synthetic construct
  source 1..20: mol_type = other DNA
ggaactcaagatcacctcgg

SEQ ID NO: 2806 - DNA, 20 bp, synthetic construct
  source 1..20: mol_type = other DNA
tggggctcaggtgtgtgaac

SEQ ID NO: 2807 - DNA, 20 bp, synthetic construct
  source 1..20: mol_type = other DNA
ggccatcaaggtgctgaagc

SEQ ID NO: 2808 - DNA, 20 bp, synthetic construct
  source 1..20: mol_type = other DNA
tacagtgtagtagctgtcgt

SEQ ID NO: 2809 - DNA, 20 bp, synthetic construct
  source 1..20: mol_type = other DNA
ctgctgagcgggcctgggga

SEQ ID NO: 2810 - DNA, 20 bp, synthetic construct
  source 1..20: mol_type = other DNA
cgacggcaagttcctgtatg

SEQ ID NO: 2811 - DNA, 20 bp, synthetic construct
  source 1..20: mol_type = other DNA
tgctgccgtagaagaagggc

SEQ ID NO: 2812 - DNA, 20 bp, synthetic construct
  source 1..20: mol_type = other DNA
cggcacccagtgctttggag

SEQ ID NO: 2813 - DNA, 20 bp, synthetic construct
  source 1..20: mol_type = other DNA
cggcccacgagcggatgccc

SEQ ID NO: 2814 - DNA, 20 bp, synthetic construct
  source 1..20: mol_type = other DNA
ccgaccaggaacttgtgcag

SEQ ID NO: 2815 - DNA, 20 bp, synthetic construct
  source 1..20: mol_type = other DNA
ctgctccacggtcaggaagt

SEQ ID NO: 2816 - DNA, 20 bp, synthetic construct
  source 1..20: mol_type = other DNA
ggacacctggtgcagcagct

SEQ ID NO: 2817 - DNA, 20 bp, synthetic construct
  source 1..20: mol_type = other DNA
tatctgaagctgaaggcgga

SEQ ID NO: 2818 - DNA, 20 bp, synthetic construct
  source 1..20: mol_type = other DNA
tgctccacggtcaggaagtc

SEQ ID NO: 2819 - DNA, 20 bp, synthetic construct
  source 1..20: mol_type = other DNA
gcagaagatgaaagggccgg

SEQ ID NO: 2820 - DNA, 20 bp, synthetic construct
  source 1..20: mol_type = other DNA
caatgagccgcacgatgtag

SEQ ID NO: 2821 - DNA, 20 bp, synthetic construct
  source 1..20: mol_type = other DNA
cgaaacctgcgggttcacag

SEQ ID NO: 2822 - DNA, 20 bp, synthetic construct
  source 1..20: mol_type = other DNA
cctcatcagccaagacaagg

SEQ ID NO: 2823 - DNA, 20 bp, synthetic construct
  source 1..20: mol_type = other DNA
ggcgctcgatgggaaagtgg

SEQ ID NO: 2824 - DNA, 20 bp, synthetic construct
  source 1..20: mol_type = other DNA
catcgagcagggcaagcgga

SEQ ID NO: 2825 - DNA, 20 bp, synthetic construct
  source 1..20: mol_type = other DNA
tctacaagtgagtgccagtg

SEQ ID NO: 2826 - DNA, 20 bp, synthetic construct
  source 1..20: mol_type = other DNA
gagctatggggtcaccatgt

SEQ ID NO: 2827 - DNA, 20 bp, synthetic construct
  source 1..20: mol_type = other DNA
tgaggaggttatcgcgcttc

SEQ ID NO: 2828 - DNA, 20 bp, synthetic construct
  source 1..20: mol_type = other DNA
ctcatgagtgcgtacagttc

SEQ ID NO: 2829 - DNA, 20 bp, synthetic construct
  source 1..20: mol_type = other DNA
gcgagcctgttactacagcc

SEQ ID NO: 2830 - DNA, 20 bp, synthetic construct
  source 1..20: mol_type = other DNA
tcacatgagtcaacgtggat

SEQ ID NO: 2831 - DNA, 20 bp, synthetic construct
  source 1..20: mol_type = other DNA
ggccgaggagcacctgaagc

SEQ ID NO: 2832 - DNA, 20 bp, synthetic construct
  source 1..20: mol_type = other DNA
gggcaggaagcagatcgacg

SEQ ID NO: 2833 - DNA, 20 bp, synthetic construct
  source 1..20: mol_type = other DNA
gccatcaaggtgctgaagca

SEQ ID NO: 2834 - DNA, 20 bp, synthetic construct
  source 1..20: mol_type = other DNA
gctgaagcagggcacggaga

SEQ ID NO: 2835 - DNA, 20 bp, synthetic construct
  source 1..20: mol_type = other DNA
gcctcgccctagaaaaggag

SEQ ID NO: 2836 - DNA, 20 bp, synthetic construct
  source 1..20: mol_type = other DNA
tcctcccacctgtggggcgt

SEQ ID NO: 2837 - DNA, 20 bp, synthetic construct
  source 1..20: mol_type = other DNA
gaagaagggcaggtgcgccg

SEQ ID NO: 2838 - DNA, 20 bp, synthetic construct
  source 1..20: mol_type = other DNA
tcgggtgcgtaccacttgag

SEQ ID NO: 2839 - DNA, 20 bp, synthetic construct
  source 1..20: mol_type = other DNA
acgcactcatgagtgactgc

SEQ ID NO: 2840 - DNA, 20 bp, synthetic construct
  source 1..20: mol_type = other DNA
tgagcagaagatgaaagggc

SEQ ID NO: 2841 - DNA, 20 bp, synthetic construct
  source 1..20: mol_type = other DNA
tcatggagatggctgggggc

SEQ ID NO: 2842 - DNA, 20 bp, synthetic construct
  source 1..20: mol_type = other DNA
ggcggcccgcaacgtcctgc

SEQ ID NO: 2843 - DNA, 20 bp, synthetic construct
  source 1..20: mol_type = other DNA
gccgtcacctgaggcgttgc

SEQ ID NO: 2844 - DNA, 20 bp, synthetic construct
  source 1..20: mol_type = other DNA
ccaactcacatgagtcaacg

SEQ ID NO: 2845 - DNA, 20 bp, synthetic construct
  source 1..20: mol_type = other DNA
ctccaggtacttcatcccca

SEQ ID NO: 2846 - DNA, 20 bp, synthetic construct
  source 1..20: mol_type = other DNA
ctatggggtcaccatgtggg

SEQ ID NO: 2847 - DNA, 20 bp, synthetic construct
  source 1..20: mol_type = other DNA
ctccccaggcccgctcagca

SEQ ID NO: 2848 - DNA, 20 bp, synthetic construct
  source 1..20: mol_type = other DNA
cctgcgggttcacagagggt

SEQ ID NO: 2849 - DNA, 20 bp, synthetic construct
  source 1..20: mol_type = other DNA
gcgccagacgtggaagctgg

SEQ ID NO: 2850 - DNA, 20 bp, synthetic construct
  source 1..20: mol_type = other DNA
ggcacctacgccattgccgg

SEQ ID NO: 2851 - DNA, 20 bp, synthetic construct
  source 1..20: mol_type = other DNA
ccatctccatgaccagcatg

SEQ ID NO: 2852 - DNA, 20 bp, synthetic construct
  source 1..20: mol_type = other DNA
gcctggtgtctgctgagctc

SEQ ID NO: 2853 - DNA, 20 bp, synthetic construct
  source 1..20: mol_type = other DNA
ctacctcatcagccaagaca

SEQ ID NO: 2854 - DNA, 20 bp, synthetic construct
  source 1..20: mol_type = other DNA
ggagctatggggtcaccatg

SEQ ID NO: 2855 - DNA, 20 bp, synthetic construct
  source 1..20: mol_type = other DNA
gagatgctgccgtagaagaa

SEQ ID NO: 2856 - DNA, 20 bp, synthetic construct
  source 1..20: mol_type = other DNA
ttcctgcccgacccggccac

SEQ ID NO: 2857 - DNA, 20 bp, synthetic construct
  source 1..20: mol_type = other DNA
cgcccagcgagcgcaggcac

SEQ ID NO: 2858 - DNA, 20 bp, synthetic construct
  source 1..20: mol_type = other DNA
gccaatgagccgcacgatgt

SEQ ID NO: 2859 - DNA, 20 bp, synthetic construct
  source 1..20: mol_type = other DNA
cttgtagggcttctggccgt

SEQ ID NO: 2860 - DNA, 20 bp, synthetic construct
  source 1..20: mol_type = other DNA
ctgaggccgcggaaggagca

SEQ ID NO: 2861 - DNA, 20 bp, synthetic construct
  source 1..20: mol_type = other DNA
ctgcccgctcacctggctca

SEQ ID NO: 2862 - DNA, 20 bp, synthetic construct
  source 1..20: mol_type = other DNA
ccgcttgccctgctcgatga

SEQ ID NO: 2863 - DNA, 20 bp, synthetic construct
  source 1..20: mol_type = other DNA
gctccagacatcgctgcggc

SEQ ID NO: 2864 - DNA, 20 bp, synthetic construct
  source 1..20: mol_type = other DNA
acggcaagttcctgtatgtg

SEQ ID NO: 2865 - DNA, 20 bp, synthetic construct
  source 1..20: mol_type = other DNA
gctccacggtcaggaagtcg

SEQ ID NO: 2866 - DNA, 20 bp, synthetic construct
  source 1..20: mol_type = other DNA
gccaggtgagcgggcagagg

SEQ ID NO: 2867 - DNA, 20 bp, synthetic construct
  source 1..20: mol_type = other DNA
cttcctgcccgacccggcca

SEQ ID NO: 2868 - DNA, 20 bp, synthetic construct
  source 1..20: mol_type = other DNA
ttcatcttctgctcaagccg

SEQ ID NO: 2869 - DNA, 20 bp, synthetic construct
  source 1..20: mol_type = other DNA
ccttcatcgagcagggcaag

SEQ ID NO: 2870 - DNA, 20 bp, synthetic construct
  source 1..20: mol_type = other DNA
tcgccccgacttcctgaccg

SEQ ID NO: 2871 - DNA, 20 bp, synthetic construct
  source 1..20: mol_type = other DNA
cgcaggtttcgggaggccca

SEQ ID NO: 2872 - DNA, 20 bp, synthetic construct
  source 1..20: mol_type = other DNA
ggccagaagccctacaaggc

SEQ ID NO: 2873 - DNA, 20 bp, synthetic construct
  source 1..20: mol_type = other DNA
gcctcagcctggcaggggaa

SEQ ID NO: 2874 - DNA, 20 bp, synthetic construct
  source 1..20: mol_type = other DNA
ccaatgagccgcacgatgta

SEQ ID NO: 2875 - DNA, 20 bp, synthetic construct
  source 1..20: mol_type = other DNA
gcaagaggtgagcaccgggt

SEQ ID NO: 2876 - DNA, 20 bp, synthetic construct
  source 1..20: mol_type = other DNA
aagaagggcaggtgcgccgc

SEQ ID NO: 2877 - DNA, 20 bp, synthetic construct
  source 1..20: mol_type = other DNA
gaggccaaagtcgctgatct

SEQ ID NO: 2878 - DNA, 20 bp, synthetic construct
  source 1..20: mol_type = other DNA
ctagaaaaggagaggcgagg

SEQ ID NO: 2879 - DNA, 20 bp, synthetic construct
  source 1..20: mol_type = other DNA
ggtaccagggcatccgctcg

SEQ ID NO: 2880 - DNA, 20 bp, synthetic construct
  source 1..20: mol_type = other DNA
ggcaagtactgcattcccga

SEQ ID NO: 2881 - DNA, 20 bp, synthetic construct
  source 1..20: mol_type = other DNA
aatgagcttctccacctgcg

SEQ ID NO: 2882 - DNA, 20 bp, synthetic construct
  source 1..20: mol_type = other DNA
cgggctcatctactgcctga

SEQ ID NO: 2883 - DNA, 20 bp, synthetic construct
  source 1..20: mol_type = other DNA
tacaaggcaggcgcgggcag

SEQ ID NO: 2884 - DNA, 20 bp, synthetic construct
  source 1..20: mol_type = other DNA
cagggaagtggccgctcaag

SEQ ID NO: 2885 - DNA, 20 bp, synthetic construct
  source 1..20: mol_type = other DNA
tcacctccagcttccacgtc

SEQ ID NO: 2886 - DNA, 20 bp, synthetic construct
  source 1..20: mol_type = other DNA
catgagtcaacgtggatggg

SEQ ID NO: 2887 - DNA, 20 bp, synthetic construct
  source 1..20: mol_type = other DNA
gtaggacaaggcctcccaca

SEQ ID NO: 2888 - DNA, 20 bp, synthetic construct
  source 1..20: mol_type = other DNA
caggttgcagggcagcccgt

SEQ ID NO: 2889 - DNA, 20 bp, synthetic construct
  source 1..20: mol_type = other DNA
ccacagcagcctgacgcgtg

SEQ ID NO: 2890 - DNA, 20 bp, synthetic construct
  source 1..20: mol_type = other DNA
tcagatactccaccagctgc

SEQ ID NO: 2891 - DNA, 20 bp, synthetic construct
  source 1..20: mol_type = other DNA
tccacagtgcgctttgccgc

SEQ ID NO: 2892 - DNA, 20 bp, synthetic construct
  source 1..20: mol_type = other DNA
cagtgcctgcgctcgctggg

SEQ ID NO: 2893 - DNA, 20 bp, synthetic construct
  source 1..20: mol_type = other DNA
cggccacttccctgctgagc

SEQ ID NO: 2894 - DNA, 20 bp, synthetic construct
  source 1..20: mol_type = other DNA
gaaacctgcgggttcacaga

SEQ ID NO: 2895 - DNA, 20 bp, synthetic construct
  source 1..20: mol_type = other DNA
tagaactcgcagagctctgc

SEQ ID NO: 2896 - DNA, 20 bp, synthetic construct
  source 1..20: mol_type = other DNA
ggcaagaggtgagcaccggg

SEQ ID NO: 2897 - DNA, 20 bp, synthetic construct
  source 1..20: mol_type = other DNA
ggcctcagcctggcagggga

SEQ ID NO: 2898 - DNA, 20 bp, synthetic construct
  source 1..20: mol_type = other DNA
ctttcatcttctgctcaagc

SEQ ID NO: 2899 - DNA, 20 bp, synthetic construct
  source 1..20: mol_type = other DNA
ggagtatctgaagctgaagg

SEQ ID NO: 2900 - DNA, 20 bp, synthetic construct
  source 1..20: mol_type = other DNA
gctcatctactgcctgaagg

SEQ ID NO: 2901 - DNA, 20 bp, synthetic construct
  source 1..20: mol_type = other DNA
actcatgagtgcgtacagtt

SEQ ID NO: 2902 - DNA, 20 bp, synthetic construct
  source 1..20: mol_type = other DNA
caggtgagcgggcagaggtg

SEQ ID NO: 2903 - DNA, 20 bp, synthetic construct
  source 1..20: mol_type = other DNA
ccgctgcacaagttcctggt

SEQ ID NO: 2904 - DNA, 20 bp, synthetic construct
  source 1..20: mol_type = other DNA
ccagcatgagggcctcggcc

SEQ ID NO: 2905 - DNA, 20 bp, synthetic construct
  source 1..20: mol_type = other DNA
aagccctacaaggcaggcgc

SEQ ID NO: 2906 - DNA, 20 bp, synthetic construct
  source 1..20: mol_type = other DNA
cgctgcggctggagaacttg

SEQ ID NO: 2907 - DNA, 20 bp, synthetic construct
  source 1..20: mol_type = other DNA
gtccctcatctatgggaaga

SEQ ID NO: 2908 - DNA, 20 bp, synthetic construct
  source 1..20: mol_type = other DNA
cggggcgatcctcccacctg

SEQ ID NO: 2909 - DNA, 20 bp, synthetic construct
  source 1..20: mol_type = other DNA
gggcgatcctcccacctgtg

SEQ ID NO: 2910 - DNA, 20 bp, synthetic construct
  source 1..20: mol_type = other DNA
gtaccagggcatccgctcgt

SEQ ID NO: 2911 - DNA, 20 bp, synthetic construct
  source 1..20: mol_type = other DNA
ggggcgatcctcccacctgt

SEQ ID NO: 2912 - DNA, 20 bp, synthetic construct
  source 1..20: mol_type = other DNA
caagttcaatgtcagctatg

SEQ ID NO: 2913 - DNA, 20 bp, synthetic construct
  source 1..20: mol_type = other DNA
gacggcaagttcctgtatgt

SEQ ID NO: 2914 - DNA, 20 bp, synthetic construct
  source 1..20: mol_type = other DNA
ctcacatgagtcaacgtgga

SEQ ID NO: 2915 - DNA, 20 bp, synthetic construct
  source 1..20: mol_type = other DNA
catggggatgaagtacctgg

SEQ ID NO: 2916 - DNA, 20 bp, synthetic construct
  source 1..20: mol_type = other DNA
acttcatccccatggacacc

SEQ ID NO: 2917 - DNA, 20 bp, synthetic construct
  source 1..20: mol_type = other DNA
atctacaagtgagtgccagt

SEQ ID NO: 2918 - DNA, 20 bp, synthetic construct
  source 1..20: mol_type = other DNA
agaagggcaggtgcgccgcg

SEQ ID NO: 2919 - DNA, 20 bp, synthetic construct
  source 1..20: mol_type = other DNA
ggcgcagatcatgcaccagc

SEQ ID NO: 2920 - DNA, 20 bp, synthetic construct
  source 1..20: mol_type = other DNA
ccaggtgagcgggcagaggt

SEQ ID NO: 2921 - DNA, 20 bp, synthetic construct
  source 1..20: mol_type = other DNA
tgctgcaccaggtgtccatg

SEQ ID NO: 2922 - DNA, 20 bp, synthetic construct
  source 1..20: mol_type = other DNA
gcaccaagtttgacacgctc

SEQ ID NO: 2923 - DNA, 20 bp, synthetic construct
  source 1..20: mol_type = other DNA
cctcacgcgtcaggctgctg

SEQ ID NO: 2924 - DNA, 20 bp, synthetic construct
  source 1..20: mol_type = other DNA
ctacggccagaagccctaca

SEQ ID NO: 2925 - DNA, 20 bp, synthetic construct
  source 1..20: mol_type = other DNA
ggctcgcatgcgctgctcca

SEQ ID NO: 2926 - DNA, 20 bp, synthetic construct
  source 1..20: mol_type = other DNA
cgttgcgggccgccaggtca

SEQ ID NO: 2927 - DNA, 20 bp, synthetic construct
  source 1..20: mol_type = other DNA
catagctccagacatcgctg

SEQ ID NO: 2928 - DNA, 20 bp, synthetic construct
  source 1..20: mol_type = other DNA
ctccaccagctgcagggagc

SEQ ID NO: 2929 - DNA, 20 bp, synthetic construct
  source 1..20: mol_type = other DNA
gctcggcctcctcacgcgtc

SEQ ID NO: 2930 - DNA, 20 bp, synthetic construct
  source 1..20: mol_type = other DNA
cgctgatcttggcgtagtgc

SEQ ID NO: 2931 - DNA, 20 bp, synthetic construct
  source 1..20: mol_type = other DNA
tgccaggctgaggccgcgga

SEQ ID NO: 2932 - DNA, 20 bp, synthetic construct
  source 1..20: mol_type = other DNA
catagccgcccagcgagcgc

SEQ ID NO: 2933 - DNA, 20 bp, synthetic construct
  source 1..20: mol_type = other DNA
gatctacaagtgagtgccag

SEQ ID NO: 2934 - DNA, 20 bp, synthetic construct
  source 1..20: mol_type = other DNA
cacatacaggaacttgccgt

SEQ ID NO: 2935 - DNA, 20 bp, synthetic construct
  source 1..20: mol_type = other DNA
caatgagcttctccacctgc

SEQ ID NO: 2936 - DNA, 20 bp, synthetic construct
  source 1..20: mol_type = other DNA
cgagatgctgccgtagaaga

SEQ ID NO: 2937 - DNA, 20 bp, synthetic construct
  source 1..20: mol_type = other DNA
gaagccctacaaggcaggcg

SEQ ID NO: 2938 - DNA, 20 bp, synthetic construct
  source 1..20: mol_type = other DNA
tgcccgctcacctggctcag

SEQ ID NO: 2939 - DNA, 20 bp, synthetic construct
  source 1..20: mol_type = other DNA
gtccatggggatgaagtacc

SEQ ID NO: 2940 - DNA, 20 bp, synthetic construct
  source 1..20: mol_type = other DNA
cagatactccaccagctgca

SEQ ID NO: 2941 - DNA, 20 bp, synthetic construct
  source 1..20: mol_type = other DNA
gcggccacttccctgctgag

SEQ ID NO: 2942 - DNA, 20 bp, synthetic construct
  source 1..20: mol_type = other DNA
catctccatgaccagcatga

SEQ ID NO: 2943 - DNA, 20 bp, synthetic construct
  source 1..20: mol_type = other DNA
atgagtcaacgtggatgggt

SEQ ID NO: 2944 - DNA, 20 bp, synthetic construct
  source 1..20: mol_type = other DNA
cccagagtaaagtttgcgct

SEQ ID NO: 2945 - DNA, 20 bp, synthetic construct
  source 1..20: mol_type = other DNA
gctgaggccgcggaaggagc

SEQ ID NO: 2946 - DNA, 20 bp, synthetic construct
  source 1..20: mol_type = other DNA
gggcaagtactgcattcccg

SEQ ID NO: 2947 - DNA, 20 bp, synthetic construct
  source 1..20: mol_type = other DNA
tacagttcgggtggacactc

SEQ ID NO: 2948 - DNA, 20 bp, synthetic construct
  source 1..20: mol_type = other DNA
gccggttgcacggcttgcgc

SEQ ID NO: 2949 - DNA, 20 bp, synthetic construct
  source 1..20: mol_type = other DNA
tctcatagatcagaacatcc

SEQ ID NO: 2950 - DNA, 20 bp, synthetic construct
  source 1..20: mol_type = other DNA
tctcggaggcggcgcgcagc

SEQ ID NO: 2951 - DNA, 20 bp, synthetic construct
  source 1..20: mol_type = other DNA
tctctgggcctgacctgctt

SEQ ID NO: 2952 - DNA, 20 bp, synthetic construct
  source 1..20: mol_type = other DNA
gagcagcggctgtacaaggt

SEQ ID NO: 2953 - DNA, 20 bp, synthetic construct
  source 1..20: mol_type = other DNA
agacgttcagctgctgtcct

SEQ ID NO: 2954 - DNA, 20 bp, synthetic construct
  source 1..20: mol_type = other DNA
cgagcagcggctgtacaagg

SEQ ID NO: 2955 - DNA, 20 bp, synthetic construct
  source 1..20: mol_type = other DNA
cgcagccgtcccagttgcag

SEQ ID NO: 2956 - DNA, 20 bp, synthetic construct
  source 1..20: mol_type = other DNA
gctgtacaaggtgggtcccg

SEQ ID NO: 2957 - DNA, 20 bp, synthetic construct
  source 1..20: mol_type = other DNA
gggcagtcctgcagaaggac

SEQ ID NO: 2958 - DNA, 20 bp, synthetic construct
  source 1..20: mol_type = other DNA
gcgccactaccgaaagcaca

SEQ ID NO: 2959 - DNA, 20 bp, synthetic construct
  source 1..20: mol_type = other DNA
tcgcacagatggcactggaa

SEQ ID NO: 2960 - DNA, 20 bp, synthetic construct
  source 1..20: mol_type = other DNA
ctgtacaaggtgggtcccgc

SEQ ID NO: 2961 - DNA, 20 bp, synthetic construct
  source 1..20: mol_type = other DNA
tctcttcgccgctcggcctc

SEQ ID NO: 2962 - DNA, 20 bp, synthetic construct
  source 1..20: mol_type = other DNA
cttcagttcgaacaccgtgc

SEQ ID NO: 2963 - DNA, 20 bp, synthetic construct
  source 1..20: mol_type = other DNA
tacagccgctgctcgtcagg

SEQ ID NO: 2964 - DNA, 20 bp, synthetic construct
  source 1..20: mol_type = other DNA
gatggcactggaatggccgg

SEQ ID NO: 2965 - DNA, 20 bp, synthetic construct
  source 1..20: mol_type = other DNA
ttgtacagccgctgctcgtc

SEQ ID NO: 2966 - DNA, 20 bp, synthetic construct
  source 1..20: mol_type = other DNA
ggcagtcctgcagaaggaca

SEQ ID NO: 2967 - DNA, 20 bp, synthetic construct
  source 1..20: mol_type = other DNA
cgccactaccgaaagcacac

SEQ ID NO: 2968 - DNA, 20 bp, synthetic construct
  source 1..20: mol_type = other DNA
agacgtcccaccaagggtct

SEQ ID NO: 2969 - DNA, 20 bp, synthetic construct
  source 1..20: mol_type = other DNA
tcctcaggatgaccaactct

SEQ ID NO: 2970 - DNA, 20 bp, synthetic construct
  source 1..20: mol_type = other DNA
gaactgaagcgcatcgtcga

SEQ ID NO: 2971 - DNA, 20 bp, synthetic construct
  source 1..20: mol_type = other DNA
tcatgaggaacacgtcctgg

SEQ ID NO: 2972 - DNA, 20 bp, synthetic construct
  source 1..20: mol_type = other DNA
tacacatagcgcctctgact

SEQ ID NO: 2973 - DNA, 20 bp, synthetic construct
  source 1..20: mol_type = other DNA
atcatgaggaacacgtcctg

SEQ ID NO: 2974 - DNA, 20 bp, synthetic construct
  source 1..20: mol_type = other DNA
accaggaaggccccatcacg

SEQ ID NO: 2975 - DNA, 20 bp, synthetic construct
  source 1..20: mol_type = other DNA
ccggaaggccagccccactg

SEQ ID NO: 2976 - DNA, 20 bp, synthetic construct
  source 1..20: mol_type = other DNA
tctcagtgaaagtgccaatc

SEQ ID NO: 2977 - DNA, 20 bp, synthetic construct
  source 1..20: mol_type = other DNA
gcgatggtgagcgggcgtgg

SEQ ID NO: 2978 - DNA, 20 bp, synthetic construct
  source 1..20: mol_type = other DNA
tcttccctcaggaactgcaa

SEQ ID NO: 2979 - DNA, 20 bp, synthetic construct
  source 1..20: mol_type = other DNA
tctcctgcacagccagaata

SEQ ID NO: 2980 - DNA, 20 bp, synthetic construct
  source 1..20: mol_type = other DNA
agacgcgctcaaactccgtc

SEQ ID NO: 2981 - DNA, 20 bp, synthetic construct
  source 1..20: mol_type = other DNA
ccaggaaggccccatcacga

SEQ ID NO: 2982 - DNA, 20 bp, synthetic construct
  source 1..20: mol_type = other DNA
gtatgagcacgagaaggacc

SEQ ID NO: 2983 - DNA, 20 bp, synthetic construct
  source 1..20: mol_type = other DNA
aaacaaaaggagatatcaag

SEQ ID NO: 2984 - DNA, 20 bp, synthetic construct
  source 1..20: mol_type = other DNA
cgcgatggtgagcgggcgtg

SEQ ID NO: 2985 - DNA, 20 bp, synthetic construct
  source 1..20: mol_type = other DNA
ctccacagatgacacctttg

SEQ ID NO: 2986 - DNA, 20 bp, synthetic construct
  source 1..20: mol_type = other DNA
agaaggcacgatcgcacaga

SEQ ID NO: 2987 - DNA, 20 bp, synthetic construct
  source 1..20: mol_type = other DNA
tctctgggttctgaagttct

SEQ ID NO: 2988 - DNA, 20 bp, synthetic construct
  source 1..20: mol_type = other DNA
catgcagactctgctcagct

SEQ ID NO: 2989 - DNA, 20 bp, synthetic construct
  source 1..20: mol_type = other DNA
aaaaggagatatcaagagga

SEQ ID NO: 2990 - DNA, 20 bp, synthetic construct
  source 1..20: mol_type = other DNA
cctcatcttcagccacatgc

SEQ ID NO: 2991 - DNA, 20 bp, synthetic construct
  source 1..20: mol_type = other DNA
ggtttgataagttctagctg

SEQ ID NO: 2992 - DNA, 20 bp, synthetic construct
  source 1..20: mol_type = other DNA
gccgcgatggtgagcgggcg

SEQ ID NO: 2993 - DNA, 20 bp, synthetic construct
  source 1..20: mol_type = other DNA
acctctgcaattaaatttgg

SEQ ID NO: 2994 - DNA, 20 bp, synthetic construct
  source 1..20: mol_type = other DNA
cacacacaggtaacggctga

SEQ ID NO: 2995 - DNA, 20 bp, synthetic construct
  source 1..20: mol_type = other DNA
ccgtgaagatggtggtcttg

SEQ ID NO: 2996 - DNA, 20 bp, synthetic construct
  source 1..20: mol_type = other DNA
gcagaggaagttggggctgt

SEQ ID NO: 2997 - DNA, 20 bp, synthetic construct
  source 1..20: mol_type = other DNA
ccgcgatggtgagcgggcgt

SEQ ID NO: 2998 - DNA, 20 bp, synthetic construct
  source 1..20: mol_type = other DNA
tgaccagaatttcctggctc

SEQ ID NO: 2999 - DNA, 20 bp, synthetic construct
  source 1..20: mol_type = other DNA
tctcaggtgtgcgaagtccc

SEQ ID NO: 3000 - DNA, 20 bp, synthetic construct
  source 1..20: mol_type = other DNA
gtacttcacaaaaacagtag

SEQ ID NO: 3001 - DNA, 20 bp, synthetic construct
  source 1..20: mol_type = other DNA
gatcatgaggaacacgtcct

SEQ ID NO: 3002 - DNA, 20 bp, synthetic construct
  source 1..20: mol_type = other DNA
ccacacacaggtaacggctg

SEQ ID NO: 3003 - DNA, 20 bp, synthetic construct
  source 1..20: mol_type = other DNA
gtagctgcaggtgtgagtgg

SEQ ID NO: 3004 - DNA, 20 bp, synthetic construct
  source 1..20: mol_type = other DNA
acagatggcactggaatggc

SEQ ID NO: 3005 - DNA, 20 bp, synthetic construct
  source 1..20: mol_type = other DNA
gactgggaatagttactccc

SEQ ID NO: 3006 - DNA, 20 bp, synthetic construct
  source 1..20: mol_type = other DNA
agacgatcgtcaccggattg

SEQ ID NO: 3007 - DNA, 20 bp, synthetic construct
  source 1..20: mol_type = other DNA
atacacatagcgcctctgac

SEQ ID NO: 3008 - DNA, 20 bp, synthetic construct
  source 1..20: mol_type = other DNA
agacgaggaggacggggaac

SEQ ID NO: 3009 - DNA, 20 bp, synthetic construct
  source 1..20: mol_type = other DNA
cctcagccgttacctgtgtg

SEQ ID NO: 3010 - DNA, 20 bp, synthetic construct
  source 1..20: mol_type = other DNA
attcactgtaaagctggaaa

SEQ ID NO: 3011 - DNA, 20 bp, synthetic construct
  source 1..20: mol_type = other DNA
tctcaatgtcttgaggtttc

SEQ ID NO: 3012 - DNA, 20 bp, synthetic construct
  source 1..20: mol_type = other DNA
tctcttcctagtctctcaca

SEQ ID NO: 3013 - DNA, 20 bp, synthetic construct
  source 1..20: mol_type = other DNA
ttgacctgtatccatttctg

SEQ ID NO: 3014 - DNA, 20 bp, synthetic construct
  source 1..20: mol_type = other DNA
tctctgaaattacaaagtaa

SEQ ID NO: 3015 - DNA, 20 bp, synthetic construct
  source 1..20: mol_type = other DNA
tctccaactttaaatcctgt

SEQ ID NO: 3016 - DNA, 20 bp, synthetic construct
  source 1..20: mol_type = other DNA
tctcagctcctgtagcagct

SEQ ID NO: 3017 - DNA, 20 bp, synthetic construct
  source 1..20: mol_type = other DNA
tgggaatagttactccctgg

SEQ ID NO: 3018 - DNA, 20 bp, synthetic construct
  source 1..20: mol_type = other DNA
tctcataggatcccccggct

SEQ ID NO: 3019 - DNA, 20 bp, synthetic construct
  source 1..20: mol_type = other DNA
tctcttaaggcaggctgctt

SEQ ID NO: 3020 - DNA, 20 bp, synthetic construct
  source 1..20: mol_type = other DNA
ctggcacttcgagttggaac

SEQ ID NO: 3021 - DNA, 20 bp, synthetic construct
  source 1..20: mol_type = other DNA
tctctgctccttttggtgac

SEQ ID NO: 3022 - DNA, 20 bp, synthetic construct
  source 1..20: mol_type = other DNA
tctcggagtgcacaggccga

SEQ ID NO: 3023 - DNA, 20 bp, synthetic construct
  source 1..20: mol_type = other DNA
tgttgcagaggaagttctcc

SEQ ID NO: 3024 - DNA, 20 bp, synthetic construct
  source 1..20: mol_type = other DNA
gttctagctgtggtgggtta

SEQ ID NO: 3025 - DNA, 20 bp, synthetic construct
  source 1..20: mol_type = other DNA
tccaagagttggtcatcctg

SEQ ID NO: 3026 - DNA, 20 bp, synthetic construct
  source 1..20: mol_type = other DNA
tctctctgttgtccgaggcc

SEQ ID NO: 3027 - DNA, 20 bp, synthetic construct
  source 1..20: mol_type = other DNA
tctcgtggtggtaataaggg

SEQ ID NO: 3028 - DNA, 20 bp, synthetic construct
  source 1..20: mol_type = other DNA
ccgtcccagttgcagtggta

SEQ ID NO: 3029 - DNA, 20 bp, synthetic construct
  source 1..20: mol_type = other DNA
tctcccggcaaacctcgccc

SEQ ID NO: 3030 - DNA, 20 bp, synthetic construct
  source 1..20: mol_type = other DNA
atatcaccacacacaggtaa

SEQ ID NO: 3031 - DNA, 20 bp, synthetic construct
  source 1..20: mol_type = other DNA
tctcgaagtgtgggaggtac

SEQ ID NO: 3032 - DNA, 20 bp, synthetic construct
  source 1..20: mol_type = other DNA
tctcccaaagttcgtggcac

SEQ ID NO: 3033 - DNA, 20 bp, synthetic construct
  source 1..20: mol_type = other DNA
atcttccattggattggcaa

SEQ ID NO: 3034 - DNA, 20 bp, synthetic construct
  source 1..20: mol_type = other DNA
tctcacctaggaaaacatct

SEQ ID NO: 3035 - DNA, 20 bp, synthetic construct
  source 1..20: mol_type = other DNA
tctcgacacagcaggtcaag

SEQ ID NO: 3036 - DNA, 20 bp, synthetic construct
  source 1..20: mol_type = other DNA
aattcactgtaaagctggaa

SEQ ID NO: 3037 - DNA, 20 bp, synthetic construct
  source 1..20: mol_type = other DNA
tctcacagtagacactctcc

SEQ ID NO: 3038 - DNA, 20 bp, synthetic construct
  source 1..20: mol_type = other DNA
tctctttctgaaggagacac

SEQ ID NO: 3039 - DNA, 20 bp, synthetic construct
  source 1..20: mol_type = other DNA
tctctttgatctgcgccttg

SEQ ID NO: 3040 - DNA, 20 bp, synthetic construct
  source 1..20: mol_type = other DNA
tagcagatgattgagctctg

SEQ ID NO: 3041 - DNA, 20 bp, synthetic construct
  source 1..20: mol_type = other DNA
agcggcctcctgacgagcag

SEQ ID NO: 3042 - DNA, 20 bp, synthetic construct
  source 1..20: mol_type = other DNA
tctctcggcggaagtcgctc

SEQ ID NO: 3043 - DNA, 20 bp, synthetic construct
  source 1..20: mol_type = other DNA
ccacaaactgaggatctgca

SEQ ID NO: 3044 - DNA, 20 bp, synthetic construct
  source 1..20: mol_type = other DNA
tctcccttggatggtcggcg

SEQ ID NO: 3045 - DNA, 20 bp, synthetic construct
  source 1..20: mol_type = other DNA
ggagctgtatgagcacgaga

SEQ ID NO: 3046 - DNA, 20 bp, synthetic construct
  source 1..20: mol_type = other DNA
tgggacactgaggagacaga

SEQ ID NO: 3047 - DNA, 20 bp, synthetic construct
  source 1..20: mol_type = other DNA
tctccgccgaggaggtgaca

SEQ ID NO: 3048 - DNA, 20 bp, synthetic construct
  source 1..20: mol_type = other DNA
aatcccatagcaataatgtt

SEQ ID NO: 3049 - DNA, 20 bp, synthetic construct
  source 1..20: mol_type = other DNA
ccagcatgtggctgaagatg

SEQ ID NO: 3050 - DNA, 20 bp, synthetic construct
  source 1..20: mol_type = other DNA
ctggaggtctacctcaagga

SEQ ID NO: 3051 - DNA, 20 bp, synthetic construct
  source 1..20: mol_type = other DNA
tctctcctggcctcagcgac

SEQ ID NO: 3052 - DNA, 20 bp, synthetic construct
  source 1..20: mol_type = other DNA
tccattggattggcaagggc

SEQ ID NO: 3053 - DNA, 20 bp, synthetic construct
  source 1..20: mol_type = other DNA
aggccagccccactgtggct

SEQ ID NO: 3054 - DNA, 20 bp, synthetic construct
  source 1..20: mol_type = other DNA
tctccaggctggtgcgcgag

SEQ ID NO: 3055 - DNA, 20 bp, synthetic construct
  source 1..20: mol_type = other DNA
gcgcatctgcgcacgcacac

SEQ ID NO: 3056 - DNA, 20 bp, synthetic construct
  source 1..20: mol_type = other DNA
catccccagcaggtacaagg

SEQ ID NO: 3057 - DNA, 20 bp, synthetic construct
  source 1..20: mol_type = other DNA
actcacccagcatccccagc

SEQ ID NO: 3058 - DNA, 20 bp, synthetic construct
  source 1..20: mol_type = other DNA
ggcaagacactgggcgagtg

SEQ ID NO: 3059 - DNA, 20 bp, synthetic construct
  source 1..20: mol_type = other DNA
gggacactgaggagacagaa

SEQ ID NO: 3060 - DNA, 20 bp, synthetic construct
  source 1..20: mol_type = other DNA
ccgccgccctcacctcctgc

SEQ ID NO: 3061 - DNA, 20 bp, synthetic construct
  source 1..20: mol_type = other DNA
cacactggaggttgttgcag

SEQ ID NO: 3062 - DNA, 20 bp, synthetic construct
  source 1..20: mol_type = other DNA
tctcaggctccgattattca

SEQ ID NO: 3063 - DNA, 20 bp, synthetic construct
  source 1..20: mol_type = other DNA
tctccttgatgccagctcac

SEQ ID NO: 3064 - DNA, 20 bp, synthetic construct
  source 1..20: mol_type = other DNA
cagaagtctgtgcagaacag

SEQ ID NO: 3065 - DNA, 20 bp, synthetic construct
  source 1..20: mol_type = other DNA
aggggcaggatggcaacagg

SEQ ID NO: 3066 - DNA, 20 bp, synthetic construct
  source 1..20: mol_type = other DNA
tgttcaggaaaacaacacac

SEQ ID NO: 3067 - DNA, 20 bp, synthetic construct
  source 1..20: mol_type = other DNA
cactgggacagcttctgatg

SEQ ID NO: 3068 - DNA, 20 bp, synthetic construct
  source 1..20: mol_type = other DNA
gctgcagcctgggaggagct

SEQ ID NO: 3069 - DNA, 20 bp, synthetic construct
  source 1..20: mol_type = other DNA
tctcctggcatgtctcagca

SEQ ID NO: 3070 - DNA, 20 bp, synthetic construct
  source 1..20: mol_type = other DNA
tctctcaggtactcagacaa

SEQ ID NO: 3071 - DNA, 20 bp, synthetic construct
  source 1..20: mol_type = other DNA
agcgccatggccgggacccg

SEQ ID NO: 3072 - DNA, 20 bp, synthetic construct
  source 1..20: mol_type = other DNA
cgtgaggctgcaagcttgca

SEQ ID NO: 3073 - DNA, 20 bp, synthetic construct
  source 1..20: mol_type = other DNA
tctccaaagaagcagaaaaa

SEQ ID NO: 3074 - DNA, 20 bp, synthetic construct
  source 1..20: mol_type = other DNA
ggcagccagcatgatgagac

SEQ ID NO: 3075 - DNA, 20 bp, synthetic construct
  source 1..20: mol_type = other DNA
tctcctctgccccagggggc

SEQ ID NO: 3076 - DNA, 20 bp, synthetic construct
  source 1..20: mol_type = other DNA
tctcacaggtgacgcagcca

SEQ ID NO: 3077 - DNA, 20 bp, synthetic construct
  source 1..20: mol_type = other DNA
tttctcagctggataaggtc

SEQ ID NO: 3078 - DNA, 20 bp, synthetic construct
  source 1..20: mol_type = other DNA
tgaggaacacgtcctggggg

SEQ ID NO: 3079 - DNA, 20 bp, synthetic construct
  source 1..20: mol_type = other DNA
tgctgctcctgagctgagac

SEQ ID NO: 3080 - DNA, 20 bp, synthetic construct
  source 1..20: mol_type = other DNA
gggaggtacagcttgagttc

SEQ ID NO: 3081 - DNA, 20 bp, synthetic construct
  source 1..20: mol_type = other DNA
ctggctcacctgaccacgtt

SEQ ID NO: 3082 - DNA, 20 bp, synthetic construct
  source 1..20: mol_type = other DNA
ggtgcagcagcagtcgtaca

SEQ ID NO: 3083 - DNA, 20 bp, synthetic construct
  source 1..20: mol_type = other DNA
cccttaccaggcttgatgag

SEQ ID NO: 3084 - DNA, 20 bp, synthetic construct
  source 1..20: mol_type = other DNA
tctccaggacctggaagcgc

SEQ ID NO: 3085 - DNA, 20 bp, synthetic construct
  source 1..20: mol_type = other DNA
agaggaagttctccaggtcc

SEQ ID NO: 3086 - DNA, 20 bp, synthetic construct
  source 1..20: mol_type = other DNA
agacgcccccgggcccagcc

SEQ ID NO: 3087 - DNA, 20 bp, synthetic construct
  source 1..20: mol_type = other DNA
ccttgaggtagacctccagc

SEQ ID NO: 3088 - DNA, 20 bp, synthetic construct
  source 1..20: mol_type = other DNA
gttctacagcggcagcctgg

SEQ ID NO: 3089 - DNA, 20 bp, synthetic construct
  source 1..20: mol_type = other DNA
gtagttgttgaagacatcca

SEQ ID NO: 3090 - DNA, 20 bp, synthetic construct
  source 1..20: mol_type = other DNA
tctcgctccaatgtcgacac

SEQ ID NO: 3091 - DNA, 20 bp, synthetic construct
  source 1..20: mol_type = other DNA
tctctgcaaggcaaaaggat

SEQ ID NO: 3092 - DNA, 20 bp, synthetic construct
  source 1..20: mol_type = other DNA
ctgcacctagccatcatcca

SEQ ID NO: 3093 - DNA, 20 bp, synthetic construct
  source 1..20: mol_type = other DNA
cttgtagatatcctgatcat

SEQ ID NO: 3094 - DNA, 20 bp, synthetic construct
  source 1..20: mol_type = other DNA
ctcctccagccccggccctc

SEQ ID NO: 3095 - DNA, 20 bp, synthetic construct
  source 1..20: mol_type = other DNA
actcacgctttgccgttttg

SEQ ID NO: 3096 - DNA, 20 bp, synthetic construct
  source 1..20: mol_type = other DNA
tatttctgccctaaacaccc

SEQ ID NO: 3097 - DNA, 20 bp, synthetic construct
  source 1..20: mol_type = other DNA
ctgcacgtcctcccgggctg

SEQ ID NO: 3098 - DNA, 20 bp, synthetic construct
  source 1..20: mol_type = other DNA
tctgcctgctggtaggacag

SEQ ID NO: 3099 - DNA, 20 bp, synthetic construct
  source 1..20: mol_type = other DNA
ctcgctctcccggatgagga

SEQ ID NO: 3100 - DNA, 20 bp, synthetic construct
  source 1..20: mol_type = other DNA
taatgtctctcatgatggct

SEQ ID NO: 3101 - DNA, 20 bp, synthetic construct
  source 1..20: mol_type = other DNA
cggaagaaaggcctctgatt

SEQ ID NO: 3102 - DNA, 20 bp, synthetic construct
  source 1..20: mol_type = other DNA
tccatcaagtgcgtgttggt

SEQ ID NO: 3103 - DNA, 20 bp, synthetic construct
  source 1..20: mol_type = other DNA
acaatagccagcacaggaga

SEQ ID NO: 3104 - DNA, 20 bp, synthetic construct
  source 1..20: mol_type = other DNA
tgattgacatgatgctgctg

SEQ ID NO: 3105 - DNA, 20 bp, synthetic construct
  source 1..20: mol_type = other DNA
aggaataagagggatgtgaa

SEQ ID NO: 3106 - DNA, 20 bp, synthetic construct
  source 1..20: mol_type = other DNA
ttgggaaggttgagctctgc

SEQ ID NO: 3107 - DNA, 20 bp, synthetic construct
  source 1..20: mol_type = other DNA
ctctcggaggaagcgcatgt

SEQ ID NO: 3108 - DNA, 20 bp, synthetic construct
  source 1..20: mol_type = other DNA
cagctccagggcgctcagga

SEQ ID NO: 3109 - DNA, 20 bp, synthetic construct
  source 1..20: mol_type = other DNA
tcgagtacatgaattgcact

SEQ ID NO: 3110 - DNA, 20 bp, synthetic construct
  source 1..20: mol_type = other DNA
gcaggactacaaccgcgagg

SEQ ID NO: 3111 - DNA, 20 bp, synthetic construct
  source 1..20: mol_type = other DNA
cctcatcacgcactaccagc

SEQ ID NO: 3112 - DNA, 20 bp, synthetic construct
  source 1..20: mol_type = other DNA
gtcggtgcagaggtaatgat

SEQ ID NO: 3113 - DNA, 20 bp, synthetic construct
  source 1..20: mol_type = other DNA
ggagacacgtaggcaacaga

SEQ ID NO: 3114 - DNA, 20 bp, synthetic construct
  source 1..20: mol_type = other DNA
gggcaccaagctggacctgc

SEQ ID NO: 3115 - DNA, 20 bp, synthetic construct
  source 1..20: mol_type = other DNA
taccaggtagcaggtgagtg

SEQ ID NO: 3116 - DNA, 20 bp, synthetic construct
  source 1..20: mol_type = other DNA
aggtcagctcgtcctccctc

SEQ ID NO: 3117 - DNA, 20 bp, synthetic construct
  source 1..20: mol_type = other DNA
gataccggagtcgagtcacc

SEQ ID NO: 3118 - DNA, 20 bp, synthetic construct
  source 1..20: mol_type = other DNA
ttccgggatctgaatcacag

SEQ ID NO: 3119 - DNA, 20 bp, synthetic construct
  source 1..20: mol_type = other DNA
gcacggtaagaggcgagaca

SEQ ID NO: 3120 - DNA, 20 bp, synthetic construct
  source 1..20: mol_type = other DNA
ccattccagtgtaatcagtg

SEQ ID NO: 3121 - DNA, 20 bp, synthetic construct
  source 1..20: mol_type = other DNA
agcgggtccgcatcatctcg

SEQ ID NO: 3122 - DNA, 20 bp, synthetic construct
  source 1..20: mol_type = other DNA
caagcaggactacaaccgcg

SEQ ID NO: 3123 - DNA, 20 bp, synthetic construct
  source 1..20: mol_type = other DNA
ctgcagcttctccaacacat

SEQ ID NO: 3124 - DNA, 20 bp, synthetic construct
  source 1..20: mol_type = other DNA
gacaattactttggcacagg

SEQ ID NO: 3125 - DNA, 20 bp, synthetic construct
  source 1..20: mol_type = other DNA
ccaggttgtctgtaaagaca

SEQ ID NO: 3126 - DNA, 20 bp, synthetic construct
  source 1..20: mol_type = other DNA
catcacccagtcccgaacat

SEQ ID NO: 3127 - DNA, 20 bp, synthetic construct
  source 1..20: mol_type = other DNA
gaagccggccttgcacatgc

SEQ ID NO: 3128 - DNA, 20 bp, synthetic construct
  source 1..20: mol_type = other DNA
cattgcccagcagagaaaca

SEQ ID NO: 3129 - DNA, 20 bp, synthetic construct
  source 1..20: mol_type = other DNA
tcagtgcgtccagggataca

SEQ ID NO: 3130 - DNA, 20 bp, synthetic construct
  source 1..20: mol_type = other DNA
gggacgttgcagctctcaga

SEQ ID NO: 3131 - DNA, 20 bp, synthetic construct
  source 1..20: mol_type = other DNA
cagtcagtttccaggtaggg

SEQ ID NO: 3132 - DNA, 20 bp, synthetic construct
  source 1..20: mol_type = other DNA
atcaggtcgcgcaggcttgg

SEQ ID NO: 3133 - DNA, 20 bp, synthetic construct
  source 1..20: mol_type = other DNA
ggtcaacttgatgcctgaag

SEQ ID NO: 3134 - DNA, 20 bp, synthetic construct
  source 1..20: mol_type = other DNA
cggggcgccgacaagatcga

SEQ ID NO: 3135 - DNA, 20 bp, synthetic construct
  source 1..20: mol_type = other DNA
ctgcaagcgtttgctcacca

SEQ ID NO: 3136 - DNA, 20 bp, synthetic construct
  source 1..20: mol_type = other DNA
acacgaccgcaaggaggccc

SEQ ID NO: 3137 - DNA, 20 bp, synthetic construct
  source 1..20: mol_type = other DNA
ccgatcagagctgtcgctca

SEQ ID NO: 3138 - DNA, 20 bp, synthetic construct
  source 1..20: mol_type = other DNA
tcgccgaatagattcaacaa

SEQ ID NO: 3139 - DNA, 20 bp, synthetic construct
  source 1..20: mol_type = other DNA
tgacacggaagcggcagtcc

SEQ ID NO: 3140 - DNA, 20 bp, synthetic construct
  source 1..20: mol_type = other DNA
actggaagggccgttctcct

SEQ ID NO: 3141 - DNA, 20 bp, synthetic construct
  source 1..20: mol_type = other DNA
caggagaacattgcaggtat

SEQ ID NO: 3142 - DNA, 20 bp, synthetic construct
  source 1..20: mol_type = other DNA
acacgaggttctccttggtc

SEQ ID NO: 3143 - DNA, 20 bp, synthetic construct
  source 1..20: mol_type = other DNA
tcccagggtagctctccagc

SEQ ID NO: 3144 - DNA, 20 bp, synthetic construct
  source 1..20: mol_type = other DNA
cctgccacccacctgcgatg

SEQ ID NO: 3145 - DNA, 20 bp, synthetic construct
  source 1..20: mol_type = other DNA
ctgctgagcgggcctgggga

SEQ ID NO: 3146 - DNA, 20 bp, synthetic construct
  source 1..20: mol_type = other DNA
tgctgaccttgatggtgggg

SEQ ID NO: 3147 - DNA, 20 bp, synthetic construct
  source 1..20: mol_type = other DNA
aacttcagcagacacaggct

SEQ ID NO: 3148 - DNA, 20 bp, synthetic construct
  source 1..20: mol_type = other DNA
ccaggcggatatctacaagg

SEQ ID NO: 3149 - DNA, 20 bp, synthetic construct
  source 1..20: mol_type = other DNA
ccttcctccactgtggagag

SEQ ID NO: 3150 - DNA, 20 bp, synthetic construct
  source 1..20: mol_type = other DNA
catttgcggtggacgatgga

SEQ ID NO: 3151 - DNA, 20 bp, synthetic construct
  source 1..20: mol_type = other DNA
acaggacgtccctgctctcc

SEQ ID NO: 3152 - DNA, 20 bp, synthetic construct
  source 1..20: mol_type = other DNA
ccctttgatgaagagagtaa

SEQ ID NO: 3153 - DNA, 20 bp, synthetic construct
  source 1..20: mol_type = other DNA
ctcccagcaggggcagctgc

SEQ ID NO: 3154 - DNA, 20 bp, synthetic construct
  source 1..20: mol_type = other DNA
gaggttggcctcggccagga

SEQ ID NO: 3155 - DNA, 20 bp, synthetic construct
  source 1..20: mol_type = other DNA
cctgcaatgttctcctgctt

SEQ ID NO: 3156 - DNA, 20 bp, synthetic construct
  source 1..20: mol_type = other DNA
tgaccactggctgaattcaa

SEQ ID NO: 3157 - DNA, 20 bp, synthetic construct
  source 1..20: mol_type = other DNA
ggagatcaccacaactggca

SEQ ID NO: 3158 - DNA, 20 bp, synthetic construct
  source 1..20: mol_type = other DNA
gcagcttgacacacggtacc

SEQ ID NO: 3159 - DNA, 20 bp, synthetic construct
  source 1..20: mol_type = other DNA
ggagtctgagagatggagag

SEQ ID NO: 3160 - DNA, 20 bp, synthetic construct
  source 1..20: mol_type = other DNA
ccaggacaaactacatcgca

SEQ ID NO: 3161 - DNA, 20 bp, synthetic construct
  source 1..20: mol_type = other DNA
caagttcaatgtcagctatg

SEQ ID NO: 3162 - DNA, 20 bp, synthetic construct
  source 1..20: mol_type = other DNA
ccatgagggtgagtgggtgt

SEQ ID NO: 3163 - DNA, 20 bp, synthetic construct
  source 1..20: mol_type = other DNA
ctactcatctgtaagcgcag

SEQ ID NO: 3164 - DNA, 20 bp, synthetic construct
  source 1..20: mol_type = other DNA
ccacagcactttgtcaggca

SEQ ID NO: 3165 - DNA, 20 bp, synthetic construct
  source 1..20: mol_type = other DNA
gtgctgaaataaagaaaaag

SEQ ID NO: 3166 - DNA, 20 bp, synthetic construct
  source 1..20: mol_type = other DNA
ggtggtctgacagttcgcac

SEQ ID NO: 3167 - DNA, 20 bp, synthetic construct
  source 1..20: mol_type = other DNA
ggatcaggtcgcgcaggctt

SEQ ID NO: 3168 - DNA, 20 bp, synthetic construct
  source 1..20: mol_type = other DNA
agtctcccaagcggtcggct

SEQ ID NO: 3169 - DNA, 20 bp, synthetic construct
  source 1..20: mol_type = other DNA
tatctgaagctgaaggcgga

SEQ ID NO: 3170 - DNA, 20 bp, synthetic construct
  source 1..20: mol_type = other DNA
ctaaaggcggggcattgccc

SEQ ID NO: 3171 - DNA, 20 bp, synthetic construct
  source 1..20: mol_type = other DNA
cctgtggggcaacggggaaa

SEQ ID NO: 3172 - DNA, 20 bp, synthetic construct
  source 1..20: mol_type = other DNA
tccacagtgcgctttgccgc

SEQ ID NO: 3173 - DNA, 20 bp, synthetic construct
  source 1..20: mol_type = other DNA
gaagcagggcagcatgtccc

SEQ ID NO: 3174 - DNA, 20 bp, synthetic construct
  source 1..20: mol_type = other DNA
ccattaacttcagcagacac

SEQ ID NO: 3175 - DNA, 20 bp, synthetic construct
  source 1..20: mol_type = other DNA
ggttcttaggtaggtggggt

SEQ ID NO: 3176 - DNA, 20 bp, synthetic construct
  source 1..20: mol_type = other DNA
cgaaacctgcgggttcacag

SEQ ID NO: 3177 - DNA, 20 bp, synthetic construct
  source 1..20: mol_type = other DNA
cttgcctccttgactcttga

SEQ ID NO: 3178 - DNA, 20 bp, synthetic construct
  source 1..20: mol_type = other DNA
catttggtgagtgtcatgct

SEQ ID NO: 3179 - DNA, 20 bp, synthetic construct
  source 1..20: mol_type = other DNA
tcttgttcaaagcgcaccgc

SEQ ID NO: 3180 - DNA, 20 bp, synthetic construct
  source 1..20: mol_type = other DNA
gcaggagaacattgcaggta

SEQ ID NO: 3181 - DNA, 20 bp, synthetic construct
  source 1..20: mol_type = other DNA
gcccaccaacacgcacttga

SEQ ID NO: 3182 - DNA, 20 bp, synthetic construct
  source 1..20: mol_type = other DNA
gacgatggagtcgtttcccg

SEQ ID NO: 3183 - DNA, 20 bp, synthetic construct
  source 1..20: mol_type = other DNA
cccgttgtagtaccctgggt

SEQ ID NO: 3184 - DNA, 20 bp, synthetic construct
  source 1..20: mol_type = other DNA
caactataaggactgtgaga

SEQ ID NO: 3185 - DNA, 20 bp, synthetic construct
  source 1..20: mol_type = other DNA
tggcaggtactggaattcca

SEQ ID NO: 3186 - DNA, 20 bp, synthetic construct
  source 1..20: mol_type = other DNA
ttgtgtatggttccacggac

SEQ ID NO: 3187 - DNA, 20 bp, synthetic construct
  source 1..20: mol_type = other DNA
ggtctcaaacatgatctgta

SEQ ID NO: 3188 - DNA, 20 bp, synthetic construct
  source 1..20: mol_type = other DNA
tcccaccaccacacacttga

SEQ ID NO: 3189 - DNA, 20 bp, synthetic construct
  source 1..20: mol_type = other DNA
agagcccgcaggcgttgcac

SEQ ID NO: 3190 - DNA, 20 bp, synthetic construct
  source 1..20: mol_type = other DNA
ccaccacaaccacactctgg

SEQ ID NO: 3191 - DNA, 20 bp, synthetic construct
  source 1..20: mol_type = other DNA
ctagaaaaggagaggcgagg

SEQ ID NO: 3192 - DNA, 20 bp, synthetic construct
  source 1..20: mol_type = other DNA
tgtcaaatgaacttcccctt

SEQ ID NO: 3193 - DNA, 20 bp, synthetic construct
  source 1..20: mol_type = other DNA
cgcggcgcagtacccgctgc

SEQ ID NO: 3194 - DNA, 20 bp, synthetic construct
  source 1..20: mol_type = other DNA
ccttcatcgagcagggcaag

SEQ ID NO: 3195 - DNA, 20 bp, synthetic construct
  source 1..20: mol_type = other DNA
gctccttctttgccctggaa

SEQ ID NO: 3196 - DNA, 20 bp, synthetic construct
  source 1..20: mol_type = other DNA
gaagcatttgcggtggacga

SEQ ID NO: 3197 - DNA, 20 bp, synthetic construct
  source 1..20: mol_type = other DNA
agcactgcctgctggaggct

SEQ ID NO: 3198 - DNA, 20 bp, synthetic construct
  source 1..20: mol_type = other DNA
tgcagaagtaaatatctgtt

SEQ ID NO: 3199 - DNA, 20 bp, synthetic construct
  source 1..20: mol_type = other DNA
tttgcagaccccaagtcccg

SEQ ID NO: 3200 - DNA, 20 bp, synthetic construct
  source 1..20: mol_type = other DNA
caatgagcttctccacctgc

SEQ ID NO: 3201 - DNA, 20 bp, synthetic construct
  source 1..20: mol_type = other DNA
ccaggaggcagaggaagtgg

SEQ ID NO: 3202 - DNA, 20 bp, synthetic construct
  source 1..20: mol_type = other DNA
ggggtcacgattgtgcgtgc

SEQ ID NO: 3203 - DNA, 20 bp, synthetic construct
  source 1..20: mol_type = other DNA
tttggacagatctattccag

SEQ ID NO: 3204 - DNA, 20 bp, synthetic construct
  source 1..20: mol_type = other DNA
tgaaaaccgaagcaactcag

SEQ ID NO: 3205 - DNA, 20 bp, synthetic construct
  source 1..20: mol_type = other DNA
acctgcaatgttctcctgct

SEQ ID NO: 3206 - DNA, 20 bp, synthetic construct
  source 1..20: mol_type = other DNA
cttggaacacgaccgcaagg

SEQ ID NO: 3207 - DNA, 20 bp, synthetic construct
  source 1..20: mol_type = other DNA
ccgctcctgcgccacggagg

SEQ ID NO: 3208 - DNA, 20 bp, synthetic construct
  source 1..20: mol_type = other DNA
gtccatggccggggtcccgg

SEQ ID NO: 3209 - DNA, 20 bp, synthetic construct
  source 1..20: mol_type = other DNA
ctggaaaggtaccccagtga

SEQ ID NO: 3210 - DNA, 20 bp, synthetic construct
  source 1..20: mol_type = other DNA
ggaagatctcatccccaccg

SEQ ID NO: 3211 - DNA, 20 bp, synthetic construct
  source 1..20: mol_type = other DNA
ggaaggttctaatgttctta

SEQ ID NO: 3212 - DNA, 20 bp, synthetic construct
  source 1..20: mol_type = other DNA
ccctgagggagcagagatgt

SEQ ID NO: 3213 - DNA, 20 bp, synthetic construct
  source 1..20: mol_type = other DNA
ctccatgccctgcgggcggg

SEQ ID NO: 3214 - DNA, 20 bp, synthetic construct
  source 1..20: mol_type = other DNA
catgaggatgttgtcaaagt

SEQ ID NO: 3215 - DNA, 20 bp, synthetic construct
  source 1..20: mol_type = other DNA
gtacagcaggacttgggtgc

SEQ ID NO: 3216 - DNA, 20 bp, synthetic construct
  source 1..20: mol_type = other DNA
gctccgcgtccttgcggctc

SEQ ID NO: 3217 - DNA, 20 bp, synthetic construct
  source 1..20: mol_type = other DNA
gtgaactggcccaggccctc

SEQ ID NO: 3218 - DNA, 20 bp, synthetic construct
  source 1..20: mol_type = other DNA
tggggactgcaggtgggaga

SEQ ID NO: 3219 - DNA, 20 bp, synthetic construct
  source 1..20: mol_type = other DNA
tctggttgctggggctcatg

SEQ ID NO: 3220 - DNA, 20 bp, synthetic construct
  source 1..20: mol_type = other DNA
taatccgcgtcatcttccac

SEQ ID NO: 3221 - DNA, 20 bp, synthetic construct
  source 1..20: mol_type = other DNA
cagcagtgaccagggcaacg

SEQ ID NO: 3222 - DNA, 20 bp, synthetic construct
  source 1..20: mol_type = other DNA
ggctgtaggggatgaggctg

SEQ ID NO: 3223 - DNA, 20 bp, synthetic construct
  source 1..20: mol_type = other DNA
gggccagctctgtccacttg

SEQ ID NO: 3224 - DNA, 20 bp, synthetic construct
  source 1..20: mol_type = other DNA
caccagatagttgagggcgt

SEQ ID NO: 3225 - DNA, 20 bp, synthetic construct
  source 1..20: mol_type = other DNA
ttgggacagcagaagtcagg

SEQ ID NO: 3226 - DNA, 20 bp, synthetic construct
  source 1..20: mol_type = other DNA
acccgcagcacttgtcccag

SEQ ID NO: 3227 - DNA, 20 bp, synthetic construct
  source 1..20: mol_type = other DNA
cagctggactgtgagtgact

SEQ ID NO: 3228 - DNA, 20 bp, synthetic construct
  source 1..20: mol_type = other DNA
ccagactgaccagcgggaga

SEQ ID NO: 3229 - DNA, 20 bp, synthetic construct
  source 1..20: mol_type = other DNA
cactttcacttgggtggaga

SEQ ID NO: 3230 - DNA, 20 bp, synthetic construct
  source 1..20: mol_type = other DNA
gtgacaccatgtaccaggac

SEQ ID NO: 3231 - DNA, 20 bp, synthetic construct
  source 1..20: mol_type = other DNA
caacgagtacacagccaggg

SEQ ID NO: 3232 - DNA, 20 bp, synthetic construct
  source 1..20: mol_type = other DNA
gcattgccgtgtccagcaag

SEQ ID NO: 3233 - DNA, 20 bp, synthetic construct
  source 1..20: mol_type = other DNA
tcttacctgtcacaggacat

SEQ ID NO: 3234 - DNA, 20 bp, synthetic construct
  source 1..20: mol_type = other DNA
tataaagcattatcacatca

SEQ ID NO: 3235 - DNA, 20 bp, synthetic construct
  source 1..20: mol_type = other DNA
accccgatcgcccagaacag

SEQ ID NO: 3236 - DNA, 20 bp, synthetic construct
  source 1..20: mol_type = other DNA
cgtatcctcctgcctagcgc

SEQ ID NO: 3237 - DNA, 20 bp, synthetic construct
  source 1..20: mol_type = other DNA
accactgggcaggtgggtgg

SEQ ID NO: 3238 - DNA, 20 bp, synthetic construct
  source 1..20: mol_type = other DNA
gccgaagtgcagagcaaccg

SEQ ID NO: 3239 - DNA, 20 bp, synthetic construct
  source 1..20: mol_type = other DNA
cggtgctacaactgggctgg

SEQ ID NO: 3240 - DNA, 20 bp, synthetic construct
  source 1..20: mol_type = other DNA
tcaggttggacttttctatg

SEQ ID NO: 3241 - DNA, 20 bp, synthetic construct
  source 1..20: mol_type = other DNA
gcaactacgcctgccgccgg

SEQ ID NO: 3242 - DNA, 20 bp, synthetic construct
  source 1..20: mol_type = other DNA
ctgcagggaacctccaccat

SEQ ID NO: 3243 - DNA, 20 bp, synthetic construct
  source 1..20: mol_type = other DNA
tcacttcctaaaggagatga

SEQ ID NO: 3244 - DNA, 20 bp, synthetic construct
  source 1..20: mol_type = other DNA
cgaatgacggctcggaagga

SEQ ID NO: 3245 - DNA, 20 bp, synthetic construct
  source 1..20: mol_type = other DNA
ggtcagctgctgcacagtgt

SEQ ID NO: 3246 - DNA, 20 bp, synthetic construct
  source 1..20: mol_type = other DNA
caatcttgactctcaatcca

SEQ ID NO: 3247 - DNA, 20 bp, synthetic construct
  source 1..20: mol_type = other DNA
gaagaagtaccacatcgatg

SEQ ID NO: 3248 - DNA, 20 bp, synthetic construct
  source 1..20: mol_type = other DNA
ctgaagcatctgcgaggacg

SEQ ID NO: 3249 - DNA, 20 bp, synthetic construct
  source 1..20: mol_type = other DNA
tgtccactgccgggggtctg

SEQ ID NO: 3250 - DNA, 20 bp, synthetic construct
  source 1..20: mol_type = other DNA
ggtgcaggagctgcagaaga

SEQ ID NO: 3251 - DNA, 20 bp, synthetic construct
  source 1..20: mol_type = other DNA
aaatgtcagacttgcaacaa

SEQ ID NO: 3252 - DNA, 20 bp, synthetic construct
  source 1..20: mol_type = other DNA
gccatgagtgcaacttgcct

SEQ ID NO: 3253 - DNA, 20 bp, synthetic construct
  source 1..20: mol_type = other DNA
cctgagagggaaatgagggc

SEQ ID NO: 3254 - DNA, 20 bp, synthetic construct
  source 1..20: mol_type = other DNA
ggcgaggggagatctatggc

SEQ ID NO: 3255 - DNA, 20 bp, synthetic construct
  source 1..20: mol_type = other DNA
tccactaccggatgaggtat

SEQ ID NO: 3256 - DNA, 20 bp, synthetic construct
  source 1..20: mol_type = other DNA
ttcatgatccagttcttgaa

SEQ ID NO: 3257 - DNA, 20 bp, synthetic construct
  source 1..20: mol_type = other DNA
aatggagccacccaatccac

SEQ ID NO: 3258 - DNA, 20 bp, synthetic construct
  source 1..20: mol_type = other DNA
tctactcatctgtaagcgca

SEQ ID NO: 3259 - DNA, 20 bp, synthetic construct
  source 1..20: mol_type = other DNA
agcgggcagcagcacatgca

SEQ ID NO: 3260 - DNA, 20 bp, synthetic construct
  source 1..20: mol_type = other DNA
tcacttccacccctggctca

SEQ ID NO: 3261 - DNA, 20 bp, synthetic construct
  source 1..20: mol_type = other DNA
tgatcccaggttccaattgg

SEQ ID NO: 3262 - DNA, 20 bp, synthetic construct
  source 1..20: mol_type = other DNA
tgcacctagccatcatccac

SEQ ID NO: 3263 - DNA, 20 bp, synthetic construct
  source 1..20: mol_type = other DNA
ggaactgcagaaagataaga

SEQ ID NO: 3264 - DNA, 20 bp, synthetic construct
  source 1..20: mol_type = other DNA
acggtggggatgtactctcc

SEQ ID NO: 3265 - DNA, 20 bp, synthetic construct
  source 1..20: mol_type = other DNA
tgtctggggagtctgagaga

SEQ ID NO: 3266 - DNA, 20 bp, synthetic construct
  source 1..20: mol_type = other DNA
gcagaagtcatagcgggctt

SEQ ID NO: 3267 - DNA, 20 bp, synthetic construct
  source 1..20: mol_type = other DNA
ctgtcctcaagttcctctat

SEQ ID NO: 3268 - DNA, 20 bp, synthetic construct
  source 1..20: mol_type = other DNA
gaggccaaagtcgctgatct

SEQ ID NO: 3269 - DNA, 20 bp, synthetic construct
  source 1..20: mol_type = other DNA
cttgaaggggaactgcaagg

SEQ ID NO: 3270 - DNA, 20 bp, synthetic construct
  source 1..20: mol_type = other DNA
cgcgccacatgaagacgcac

SEQ ID NO: 3271 - DNA, 20 bp, synthetic construct
  source 1..20: mol_type = other DNA
acttgcctccttgactcttg

SEQ ID NO: 3272 - DNA, 20 bp, synthetic construct
  source 1..20: mol_type = other DNA
caggcacagttgccgattac

SEQ ID NO: 3273 - DNA, 20 bp, synthetic construct
  source 1..20: mol_type = other DNA
caggtgggtcttgagattgc

SEQ ID NO: 3274 - DNA, 20 bp, synthetic construct
  source 1..20: mol_type = other DNA
gcaggcagtgcttgttctgc

SEQ ID NO: 3275 - DNA, 20 bp, synthetic construct
  source 1..20: mol_type = other DNA
accttgatcttcattgtgct

SEQ ID NO: 3276 - DNA, 20 bp, synthetic construct
  source 1..20: mol_type = other DNA
cctgcgggttcacagagggt

SEQ ID NO: 3277 - DNA, 20 bp, synthetic construct
  source 1..20: mol_type = other DNA
ggcccaccgcactcgctgtt

SEQ ID NO: 3278 - DNA, 20 bp, synthetic construct
  source 1..20: mol_type = other DNA
ctatggggtcaccatgtggg

SEQ ID NO: 3279 - DNA, 20 bp, synthetic construct
  source 1..20: mol_type = other DNA
tccctgagtaagtgtccagg

SEQ ID NO: 3280 - DNA, 20 bp, synthetic construct
  source 1..20: mol_type = other DNA
acagaactggtgggaggtac

SEQ ID NO: 3281 - DNA, 20 bp, synthetic construct
  source 1..20: mol_type = other DNA
tttctccaggaaaacatggc

SEQ ID NO: 3282 - DNA, 20 bp, synthetic construct
  source 1..20: mol_type = other DNA
gatcaggtcgcgcaggcttg

SEQ ID NO: 3283 - DNA, 20 bp, synthetic construct
  source 1..20: mol_type = other DNA
cccggaggtgattcagaacc

SEQ ID NO: 3284 - DNA, 20 bp, synthetic construct
  source 1..20: mol_type = other DNA
gggtgtagatgacctgtgac

SEQ ID NO: 3285 - DNA, 20 bp, synthetic construct
  source 1..20: mol_type = other DNA
cagcggcacctacctctgtg

SEQ ID NO: 3286 - DNA, 20 bp, synthetic construct
  source 1..20: mol_type = other DNA
tcatggagatggctgggggc

SEQ ID NO: 3287 - DNA, 20 bp, synthetic construct
  source 1..20: mol_type = other DNA
ccgtaagtggggacccgtcg

SEQ ID NO: 3288 - DNA, 20 bp, synthetic construct
  source 1..20: mol_type = other DNA
ctcgggcaggcagatgagca

SEQ ID NO: 3289 - DNA, 20 bp, synthetic construct
  source 1..20: mol_type = other DNA
caaggtgagctggacagggt

SEQ ID NO: 3290 - DNA, 20 bp, synthetic construct
  source 1..20: mol_type = other DNA
ggagcagcgcaagaccatct

SEQ ID NO: 3291 - DNA, 20 bp, synthetic construct
  source 1..20: mol_type = other DNA
ggaaccattatccatgtgaa

SEQ ID NO: 3292 - DNA, 20 bp, synthetic construct
  source 1..20: mol_type = other DNA
ccagcttatgttgcatctgt

SEQ ID NO: 3293 - DNA, 20 bp, synthetic construct
  source 1..20: mol_type = other DNA
ccaataatgcagagtgaggt

SEQ ID NO: 3294 - DNA, 20 bp, synthetic construct
  source 1..20: mol_type = other DNA
agtgcagctccaggcggcag

SEQ ID NO: 3295 - DNA, 20 bp, synthetic construct
  source 1..20: mol_type = other DNA
cacgcactgagccaggtcct

SEQ ID NO: 3296 - DNA, 20 bp, synthetic construct
  source 1..20: mol_type = other DNA
ggcgcaggttgacctcacgc

SEQ ID NO: 3297 - DNA, 20 bp, synthetic construct
  source 1..20: mol_type = other DNA
cgttctcccacaccagcccg

SEQ ID NO: 3298 - DNA, 20 bp, synthetic construct
  source 1..20: mol_type = other DNA
ttgaaggagcagggactgga

SEQ ID NO: 3299 - DNA, 20 bp, synthetic construct
  source 1..20: mol_type = other DNA
agcgggcacctgaagagatg

SEQ ID NO: 3300 - DNA, 20 bp, synthetic construct
  source 1..20: mol_type = other DNA
gtcgaaggcctcatcccgca

SEQ ID NO: 3301 - DNA, 20 bp, synthetic construct
  source 1..20: mol_type = other DNA
aagagagattctatgaaagc

SEQ ID NO: 3302 - DNA, 20 bp, synthetic construct
  source 1..20: mol_type = other DNA
cgtgtcacacaactgcccaa

SEQ ID NO: 3303 - DNA, 20 bp, synthetic construct
  source 1..20: mol_type = other DNA
gccgacttacgatttccgag

SEQ ID NO: 3304 - DNA, 20 bp, synthetic construct
  source 1..20: mol_type = other DNA
cctggagcacctctttgccc

SEQ ID NO: 3305 - DNA, 20 bp, synthetic construct
  source 1..20: mol_type = other DNA
ctgagctgtaccttgaaagt

SEQ ID NO: 3306 - DNA, 20 bp, synthetic construct
  source 1..20: mol_type = other DNA
gcttccagctggctggcacc

SEQ ID NO: 3307 - DNA, 20 bp, synthetic construct
  source 1..20: mol_type = other DNA
caaaccaaacctcagagtac

SEQ ID NO: 3308 - DNA, 20 bp, synthetic construct
  source 1..20: mol_type = other DNA
ctatgctcgctgcctgcgga

SEQ ID NO: 3309 - DNA, 20 bp, synthetic construct
  source 1..20: mol_type = other DNA
gcagcgcaagaccatctggg

SEQ ID NO: 3310 - DNA, 20 bp, synthetic construct
  source 1..20: mol_type = other DNA
agcagcttctgcctctggtc

SEQ ID NO: 3311 - DNA, 20 bp, synthetic construct
  source 1..20: mol_type = other DNA
catggagatggatgtgatgt

SEQ ID NO: 3312 - DNA, 20 bp, synthetic construct
  source 1..20: mol_type = other DNA
tggcccagacagcagacgcc

SEQ ID NO: 3313 - DNA, 20 bp, synthetic construct
  source 1..20: mol_type = other DNA
gatgatgtagatgggctcct

SEQ ID NO: 3314 - DNA, 20 bp, synthetic construct
  source 1..20: mol_type = other DNA
tcggaagaaaggcctctgat

SEQ ID NO: 3315 - DNA, 20 bp, synthetic construct
  source 1..20: mol_type = other DNA
tgagctccacaatgtctcca

SEQ ID NO: 3316 - DNA, 20 bp, synthetic construct
  source 1..20: mol_type = other DNA
acgccagggtgagattctgc

SEQ ID NO: 3317 - DNA, 20 bp, synthetic construct
  source 1..20: mol_type = other DNA
tgctgtcccaggtcaactac

SEQ ID NO: 3318 - DNA, 20 bp, synthetic construct
  source 1..20: mol_type = other DNA
tcgctcagaggtcctgggct

SEQ ID NO: 3319 - DNA, 20 bp, synthetic construct
  source 1..20: mol_type = other DNA
actgagctgtgcgtagcgca

SEQ ID NO: 3320 - DNA, 20 bp, synthetic construct
  source 1..20: mol_type = other DNA
ggaggagctgctgggctctg

SEQ ID NO: 3321 - DNA, 20 bp, synthetic construct
  source 1..20: mol_type = other DNA
gtcagtttctgagactgcaa

SEQ ID NO: 3322 - DNA, 20 bp, synthetic construct
  source 1..20: mol_type = other DNA
tggccagtgccaggccctgc

SEQ ID NO: 3323 - DNA, 20 bp, synthetic construct
  source 1..20: mol_type = other DNA
cggtgaggccagaatcaggg

SEQ ID NO: 3324 - DNA, 20 bp, synthetic construct
  source 1..20: mol_type = other DNA
tcgccgccacagtggggtcg

SEQ ID NO: 3325 - DNA, 20 bp, synthetic construct
  source 1..20: mol_type = other DNA
ggaatagagaaggaggcggc

SEQ ID NO: 3326 - DNA, 20 bp, synthetic construct
  source 1..20: mol_type = other DNA
aggtgagcaggtcagggtcg

SEQ ID NO: 3327 - DNA, 20 bp, synthetic construct
  source 1..20: mol_type = other DNA
tcccacagccccaggttcac

SEQ ID NO: 3328 - DNA, 20 bp, synthetic construct
  source 1..20: mol_type = other DNA
gaccccgatcgcccagaaca

SEQ ID NO: 3329 - DNA, 20 bp, synthetic construct
  source 1..20: mol_type = other DNA
ctgcagggtgtccatatcag

SEQ ID NO: 3330 - DNA, 20 bp, synthetic construct
  source 1..20: mol_type = other DNA
gccatagacgaggaacctac

SEQ ID NO: 3331 - DNA, 20 bp, synthetic construct
  source 1..20: mol_type = other DNA
ggcagggagtgtgtgaactg

SEQ ID NO: 3332 - DNA, 20 bp, synthetic construct
  source 1..20: mol_type = other DNA
gaggcactcacatggacata

SEQ ID NO: 3333 - DNA, 20 bp, synthetic construct
  source 1..20: mol_type = other DNA
aggtgccgctgtcattgcgc

SEQ ID NO: 3334 - DNA, 20 bp, synthetic construct
  source 1..20: mol_type = other DNA
cttccagtgcaatcagtgcg

SEQ ID NO: 3335 - DNA, 20 bp, synthetic construct
  source 1..20: mol_type = other DNA
gtgattcagaacctggagcg

SEQ ID NO: 3336 - DNA, 20 bp, synthetic construct
  source 1..20: mol_type = other DNA
ctggaggagactggcggagc

SEQ ID NO: 3337 - DNA, 20 bp, synthetic construct
  source 1..20: mol_type = other DNA
ttcgtgcttctgtctattga

SEQ ID NO: 3338 - DNA, 20 bp, synthetic construct
  source 1..20: mol_type = other DNA
cccagagtaaagtttgcgct

SEQ ID NO: 3339 - DNA, 20 bp, synthetic construct
  source 1..20: mol_type = other DNA
tggatcaggtcgcgcaggct

SEQ ID NO: 3340 - DNA, 20 bp, synthetic construct
  source 1..20: mol_type = other DNA
catgaggttggcccaggcaa

SEQ ID NO: 3341 - DNA, 20 bp, synthetic construct
  source 1..20: mol_type = other DNA
gcacctctgccgcagcctcg

SEQ ID NO: 3342 - DNA, 20 bp, synthetic construct
  source 1..20: mol_type = other DNA
agccaacctggaaacagacg

SEQ ID NO: 3343 - DNA, 20 bp, synthetic construct
  source 1..20: mol_type = other DNA
cctggctgccaggcaggtaa

SEQ ID NO: 3344 - DNA, 20 bp, synthetic construct
  source 1..20: mol_type = other DNA
tgacaggcttcgaatggtat

SEQ ID NO: 3345 - DNA, 20 bp, synthetic construct
  source 1..20: mol_type = other DNA
caatgaccttacactgacgc

SEQ ID NO: 3346 - DNA, 20 bp, synthetic construct
  source 1..20: mol_type = other DNA
agtgaaagcagcaaagaagg

SEQ ID NO: 3347 - DNA, 20 bp, synthetic construct
  source 1..20: mol_type = other DNA
gtctgcctgctggtaggaca

SEQ ID NO: 3348 - DNA, 20 bp, synthetic construct
  source 1..20: mol_type = other DNA
accagttttctagccgatct

SEQ ID NO: 3349 - DNA, 20 bp, synthetic construct
  source 1..20: mol_type = other DNA
tatagcggctgagcatgtgc

SEQ ID NO: 3350 - DNA, 20 bp, synthetic construct
  source 1..20: mol_type = other DNA
ggaacagatgctcactgcgc

SEQ ID NO: 3351 - DNA, 20 bp, synthetic construct
  source 1..20: mol_type = other DNA
gcacttcttctgcaaggagg

SEQ ID NO: 3352 - DNA, 20 bp, synthetic construct
  source 1..20: mol_type = other DNA
ggccacaggtgagcaggtca

SEQ ID NO: 3353 - DNA, 20 bp, synthetic construct
  source 1..20: mol_type = other DNA
tgtgcccccccagagaccga

SEQ ID NO: 3354 - DNA, 20 bp, synthetic construct
  source 1..20: mol_type = other DNA
caggttgtctgtaaagacaa

SEQ ID NO: 3355 - DNA, 20 bp, synthetic construct
  source 1..20: mol_type = other DNA
ttacccctagaggaggctgc

SEQ ID NO: 3356 - DNA, 20 bp, synthetic construct
  source 1..20: mol_type = other DNA
gcagtgttctcttaaggtac

SEQ ID NO: 3357 - DNA, 20 bp, synthetic construct
  source 1..20: mol_type = other DNA
agcacagccagtggccgctc

SEQ ID NO: 3358 - DNA, 20 bp, synthetic construct
  source 1..20: mol_type = other DNA
ccccactgcaaggtgacccc

SEQ ID NO: 3359 - DNA, 20 bp, synthetic construct
  source 1..20: mol_type = other DNA
gtcttttgggatcctgctga

SEQ ID NO: 3360 - DNA, 20 bp, synthetic construct
  source 1..20: mol_type = other DNA
catgagctcgtgaacctgag

SEQ ID NO: 3361 - DNA, 20 bp, synthetic construct
  source 1..20: mol_type = other DNA
gtacgtgcagaaaactctca

SEQ ID NO: 3362 - DNA, 20 bp, synthetic construct
  source 1..20: mol_type = other DNA
gtgggacactgctgggcagg

SEQ ID NO: 3363 - DNA, 20 bp, synthetic construct
  source 1..20: mol_type = other DNA
gggaaacttggcccctaagg

SEQ ID NO: 3364 - DNA, 20 bp, synthetic construct
  source 1..20: mol_type = other DNA
gaagcggactttaaagttcg

SEQ ID NO: 3365 - DNA, 20 bp, synthetic construct
  source 1..20: mol_type = other DNA
ctgagggcaagaggtaatcc

SEQ ID NO: 3366 - DNA, 20 bp, synthetic construct
  source 1..20: mol_type = other DNA
cgccagaagccattaactac

SEQ ID NO: 3367 - DNA, 20 bp, synthetic construct
  source 1..20: mol_type = other DNA
agaccaccacaaccacactc

SEQ ID NO: 3368 - DNA, 20 bp, synthetic construct
  source 1..20: mol_type = other DNA
ggatacagtcctaaggatgc

SEQ ID NO: 3369 - DNA, 20 bp, synthetic construct
  source 1..20: mol_type = other DNA
ccaggtcttcatcaaataca

SEQ ID NO: 3370 - DNA, 20 bp, synthetic construct
  source 1..20: mol_type = other DNA
agtggactgctgggacggcc

SEQ ID NO: 3371 - DNA, 20 bp, synthetic construct
  source 1..20: mol_type = other DNA
cgtccatggccggggtcccg

SEQ ID NO: 3372 - DNA, 20 bp, synthetic construct
  source 1..20: mol_type = other DNA
gcgctcagtttccagaacct

SEQ ID NO: 3373 - DNA, 20 bp, synthetic construct
  source 1..20: mol_type = other DNA
gacggtatgttatgcaaggc

SEQ ID NO: 3374 - DNA, 20 bp, synthetic construct
  source 1..20: mol_type = other DNA
ttcaggaaaccacttggtta

SEQ ID NO: 3375 - DNA, 20 bp, synthetic construct
  source 1..20: mol_type = other DNA
gcagaaaggtatacatcagg

SEQ ID NO: 3376 - DNA, 20 bp, synthetic construct
  source 1..20: mol_type = other DNA
ccggggcgccgacaagatcg

SEQ ID NO: 3377 - DNA, 20 bp, synthetic construct
  source 1..20: mol_type = other DNA
caccaccagcacaggggtac

SEQ ID NO: 3378 - DNA, 20 bp, synthetic construct
  source 1..20: mol_type = other DNA
agtctcttaccattcttggt

SEQ ID NO: 3379 - DNA, 20 bp, synthetic construct
  source 1..20: mol_type = other DNA
ggacgtgcagatgaagctgg

SEQ ID NO: 3380 - DNA, 20 bp, synthetic construct
  source 1..20: mol_type = other DNA
tgtcccaggtgagccctccg

SEQ ID NO: 3381 - DNA, 20 bp, synthetic construct
  source 1..20: mol_type = other DNA
tcaaatgaacttccccttgg

SEQ ID NO: 3382 - DNA, 20 bp, synthetic construct
  source 1..20: mol_type = other DNA
ccaccaggtatctggaaaga

SEQ ID NO: 3383 - DNA, 20 bp, synthetic construct
  source 1..20: mol_type = other DNA
agggcacagcacggcccgga

SEQ ID NO: 3384 - DNA, 20 bp, synthetic construct
  source 1..20: mol_type = other DNA
ccagagcatcgtgagtgagc

SEQ ID NO: 3385 - DNA, 20 bp, synthetic construct
  source 1..20: mol_type = other DNA
ggaggcctaccgagtgattc

SEQ ID NO: 3386 - DNA, 20 bp, synthetic construct
  source 1..20: mol_type = other DNA
tgcatcagctccttggtctg

SEQ ID NO: 3387 - DNA, 20 bp, synthetic construct
  source 1..20: mol_type = other DNA
ggctctctgagaacattcct

SEQ ID NO: 3388 - DNA, 20 bp, synthetic construct
  source 1..20: mol_type = other DNA
ccacctgcagaaacactacc

SEQ ID NO: 3389 - DNA, 20 bp, synthetic construct
  source 1..20: mol_type = other DNA
ccttccagtgcaatcagtgc

SEQ ID NO: 3390 - DNA, 20 bp, synthetic construct
  source 1..20: mol_type = other DNA
caacagattgcctgcattgg

SEQ ID NO: 3391 - DNA, 20 bp, synthetic construct
  source 1..20: mol_type = other DNA
ggccacccagactgaccagc

SEQ ID NO: 3392 - DNA, 20 bp, synthetic construct
  source 1..20: mol_type = other DNA
gtgttccaagatgtccagga

SEQ ID NO: 3393 - DNA, 20 bp, synthetic construct
  source 1..20: mol_type = other DNA
tcacctgggtcatcttctcg

SEQ ID NO: 3394 - DNA, 20 bp, synthetic construct
  source 1..20: mol_type = other DNA
gcgccaaggtgagctggaca

SEQ ID NO: 3395 - DNA, 20 bp, synthetic construct
  source 1..20: mol_type = other DNA
gctggttcggctctacgctg

SEQ ID NO: 3396 - DNA, 20 bp, synthetic construct
  source 1..20: mol_type = other DNA
ctaccccaagggccagcgac

SEQ ID NO: 3397 - DNA, 20 bp, synthetic construct
  source 1..20: mol_type = other DNA
ccaatacttcaagaaggtgc

SEQ ID NO: 3398 - DNA, 20 bp, synthetic construct
  source 1..20: mol_type = other DNA
ggcaggtactggaattccat

SEQ ID NO: 3399 - DNA, 20 bp, synthetic construct
  source 1..20: mol_type = other DNA
tctgcagggtgtccatatca

SEQ ID NO: 3400 - DNA, 20 bp, synthetic construct
  source 1..20: mol_type = other DNA
catgcactgttgaatcagca

SEQ ID NO: 3401 - DNA, 20 bp, synthetic construct
  source 1..20: mol_type = other DNA
tgcccacggccctgaaagac

SEQ ID NO: 3402 - DNA, 20 bp, synthetic construct
  source 1..20: mol_type = other DNA
cctcacctcctgttctccct

SEQ ID NO: 3403 - DNA, 20 bp, synthetic construct
  source 1..20: mol_type = other DNA
tgctcagcccttagcaatcg

SEQ ID NO: 3404 - DNA, 20 bp, synthetic construct
  source 1..20: mol_type = other DNA
cggcaacagattgcctgcat

SEQ ID NO: 3405 - DNA, 20 bp, synthetic construct
  source 1..20: mol_type = other DNA
gcagttctcacacactgtgg

SEQ ID NO: 3406 - DNA, 20 bp, synthetic construct
  source 1..20: mol_type = other DNA
ggcccaggatgtcagagcca

SEQ ID NO: 3407 - DNA, 20 bp, synthetic construct
  source 1..20: mol_type = other DNA
ttcctggaacagaccaaaga

SEQ ID NO: 3408 - DNA, 20 bp, synthetic construct
  source 1..20: mol_type = other DNA
cgttcatcaggaagtgcgtg

SEQ ID NO: 3409 - DNA, 20 bp, synthetic construct
  source 1..20: mol_type = other DNA
ttcacctgtgcatatgagct

SEQ ID NO: 3410 - DNA, 20 bp, synthetic construct
  source 1..20: mol_type = other DNA
tgtctgtcaagaagaacttg

SEQ ID NO: 3411 - DNA, 20 bp, synthetic construct
  source 1..20: mol_type = other DNA
cgtcgggctcactggtgtaa

SEQ ID NO: 3412 - DNA, 20 bp, synthetic construct
  source 1..20: mol_type = other DNA
gccggttgcacggcttgcgc

SEQ ID NO: 3413 - DNA, 20 bp, synthetic construct
  source 1..20: mol_type = other DNA
taccggagtgcgtcctcagg

SEQ ID NO: 3414 - DNA, 20 bp, synthetic construct
  source 1..20: mol_type = other DNA
tggaggaggtggagcgggag

SEQ ID NO: 3415 - DNA, 20 bp, synthetic construct
  source 1..20: mol_type = other DNA
tcttacccagaaaataataa

SEQ ID NO: 3416 - DNA, 20 bp, synthetic construct
  source 1..20: mol_type = other DNA
ctcctgcagctccccgagca

SEQ ID NO: 3417 - DNA, 20 bp, synthetic construct
  source 1..20: mol_type = other DNA
cttaaggtactggagcctga

SEQ ID NO: 3418 - DNA, 20 bp, synthetic construct
  source 1..20: mol_type = other DNA
ggaaatctacgggagggtaa

SEQ ID NO: 3419 - DNA, 20 bp, synthetic construct
  source 1..20: mol_type = other DNA
gaaacctgcgggttcacaga

SEQ ID NO: 3420 - DNA, 20 bp, synthetic construct
  source 1..20: mol_type = other DNA
atgtccaacagccggcctag

SEQ ID NO: 3421 - DNA, 20 bp, synthetic construct
  source 1..20: mol_type = other DNA
ggaccagatgcggagagtaa

SEQ ID NO: 3422 - DNA, 20 bp, synthetic construct
  source 1..20: mol_type = other DNA
aggccctcttcatgacgggc

SEQ ID NO: 3423 - DNA, 20 bp, synthetic construct
  source 1..20: mol_type = other DNA
cgccccggctccacgtgatc

SEQ ID NO: 3424 - DNA, 20 bp, synthetic construct
  source 1..20: mol_type = other DNA
cttactaatgaagtaatccg

SEQ ID NO: 3425 - DNA, 20 bp, synthetic construct
  source 1..20: mol_type = other DNA
ggcattctccggatagatgt

SEQ ID NO: 3426 - DNA, 20 bp, synthetic construct
  source 1..20: mol_type = other DNA
cagtgctgaccttgatggtg

SEQ ID NO: 3427 - DNA, 20 bp, synthetic construct
  source 1..20: mol_type = other DNA
gcagtacccgctgccggagg

SEQ ID NO: 3428 - DNA, 20 bp, synthetic construct
  source 1..20: mol_type = other DNA
acctaccggagtgcgtcctc

SEQ ID NO: 3429 - DNA, 20 bp, synthetic construct
  source 1..20: mol_type = other DNA
gctgaagcagggcacggaga

SEQ ID NO: 3430 - DNA, 20 bp, synthetic construct
  source 1..20: mol_type = other DNA
ttcaggatcgttttcactgt

SEQ ID NO: 3431 - DNA, 20 bp, synthetic construct
  source 1..20: mol_type = other DNA
gatgagcagctgtggagtgg

SEQ ID NO: 3432 - DNA, 20 bp, synthetic construct
  source 1..20: mol_type = other DNA
tcctgcaggtgaggagtaag

SEQ ID NO: 3433 - DNA, 20 bp, synthetic construct
  source 1..20: mol_type = other DNA
ccccgagcaaggacgtcacc

SEQ ID NO: 3434 - DNA, 20 bp, synthetic construct
  source 1..20: mol_type = other DNA
ctccgggttggtcatcccta

SEQ ID NO: 3435 - DNA, 20 bp, synthetic construct
  source 1..20: mol_type = other DNA
gagaatttatcatttcgtgg

SEQ ID NO: 3436 - DNA, 20 bp, synthetic construct
  source 1..20: mol_type = other DNA
catggcccaatacttcaaga

SEQ ID NO: 3437 - DNA, 20 bp, synthetic construct
  source 1..20: mol_type = other DNA
gcctgcggatccctggctgt

SEQ ID NO: 3438 - DNA, 20 bp, synthetic construct
  source 1..20: mol_type = other DNA
gttcacaaaagaagccacac

SEQ ID NO: 3439 - DNA, 20 bp, synthetic construct
  source 1..20: mol_type = other DNA
tggagccacccaatccactg

SEQ ID NO: 3440 - DNA, 20 bp, synthetic construct
  source 1..20: mol_type = other DNA
cccggatgaagagcacgatg

SEQ ID NO: 3441 - DNA, 20 bp, synthetic construct
  source 1..20: mol_type = other DNA
gatgaagagagtaagggcca

SEQ ID NO: 3442 - DNA, 20 bp, synthetic construct
  source 1..20: mol_type = other DNA
ggaccagctccatggggcag

SEQ ID NO: 3443 - DNA, 20 bp, synthetic construct
  source 1..20: mol_type = other DNA
gctcctggatcaggcgcccg

SEQ ID NO: 3444 - DNA, 20 bp, synthetic construct
  source 1..20: mol_type = other DNA
ggacgagtgggaggttccca

SEQ ID NO: 3445 - DNA, 20 bp, synthetic construct
  source 1..20: mol_type = other DNA
caatttctggcagcctggag

SEQ ID NO: 3446 - DNA, 20 bp, synthetic construct
  source 1..20: mol_type = other DNA
gaggataaagacctggtcca

SEQ ID NO: 3447 - DNA, 20 bp, synthetic construct
  source 1..20: mol_type = other DNA
cctgcgggagatccagcaga

SEQ ID NO: 3448 - DNA, 20 bp, synthetic construct
  source 1..20: mol_type = other DNA
ttcaggtaagtccatcaggt

SEQ ID NO: 3449 - DNA, 20 bp, synthetic construct
  source 1..20: mol_type = other DNA
ggaaaggtaccccagtgaag

SEQ ID NO: 3450 - DNA, 20 bp, synthetic construct
  source 1..20: mol_type = other DNA
ggaggggaagacggcccggg

SEQ ID NO: 3451 - DNA, 20 bp, synthetic construct
  source 1..20: mol_type = other DNA
gaggccgaacttctcacagc

SEQ ID NO: 3452 - DNA, 20 bp, synthetic construct
  source 1..20: mol_type = other DNA
cgacatgggcaaggtacgag

SEQ ID NO: 3453 - DNA, 20 bp, synthetic construct
  source 1..20: mol_type = other DNA
caaggtacagctcaggcctc

SEQ ID NO: 3454 - DNA, 20 bp, synthetic construct
  source 1..20: mol_type = other DNA
gtagtcaggctcctggaaac

SEQ ID NO: 3455 - DNA, 20 bp, synthetic construct
  source 1..20: mol_type = other DNA
caccacgtctgcctgctggt

SEQ ID NO: 3456 - DNA, 20 bp, synthetic construct
  source 1..20: mol_type = other DNA
catcctactcacctgataag

SEQ ID NO: 3457 - DNA, 20 bp, synthetic construct
  source 1..20: mol_type = other DNA
ggcagcccaagtaaggagac

SEQ ID NO: 3458 - DNA, 20 bp, synthetic construct
  source 1..20: mol_type = other DNA
tgtctgactttgggatgaca

SEQ ID NO: 3459 - DNA, 20 bp, synthetic construct
  source 1..20: mol_type = other DNA
gcagaaagataagatggcgg

SEQ ID NO: 3460 - DNA, 20 bp, synthetic construct
  source 1..20: mol_type = other DNA
tacaaggcaggcgcgggcag

SEQ ID NO: 3461 - DNA, 20 bp, synthetic construct
  source 1..20: mol_type = other DNA
cacctgtaggcagacaaaga

SEQ ID NO: 3462 - DNA, 20 bp, synthetic construct
  source 1..20: mol_type = other DNA
gcgcactcaccgtggtgggt

SEQ ID NO: 3463 - DNA, 20 bp, synthetic construct
  source 1..20: mol_type = other DNA
cccgagcaaggacgtcacct

SEQ ID NO: 3464 - DNA, 20 bp, synthetic construct
  source 1..20: mol_type = other DNA
atgcccttactctccgcatc

SEQ ID NO: 3465 - DNA, 20 bp, synthetic construct
  source 1..20: mol_type = other DNA
acaggtgagcaggtcagggt

SEQ ID NO: 3466 - DNA, 20 bp, synthetic construct
  source 1..20: mol_type = other DNA
gccccagcacgcaggggacc

SEQ ID NO: 3467 - DNA, 20 bp, synthetic construct
  source 1..20: mol_type = other DNA
cagcccaagtaaggagactg

SEQ ID NO: 3468 - DNA, 20 bp, synthetic construct
  source 1..20: mol_type = other DNA
tactcccggctgccatctgt

SEQ ID NO: 3469 - DNA, 20 bp, synthetic construct
  source 1..20: mol_type = other DNA
cgccatggctccgacgctgg

SEQ ID NO: 3470 - DNA, 20 bp, synthetic construct
  source 1..20: mol_type = other DNA
ctggtcctatgcagtaggca

SEQ ID NO: 3471 - DNA, 20 bp, synthetic construct
  source 1..20: mol_type = other DNA
cactcacgtgttgtgcgagg

SEQ ID NO: 3472 - DNA, 20 bp, synthetic construct
  source 1..20: mol_type = other DNA
gtaccactccctctttgctc

SEQ ID NO: 3473 - DNA, 20 bp, synthetic construct
  source 1..20: mol_type = other DNA
tttcaggtaagtccatcagg

SEQ ID NO: 3474 - DNA, 20 bp, synthetic construct
  source 1..20: mol_type = other DNA
accaggggtctggaagttga

SEQ ID NO: 3475 - DNA, 20 bp, synthetic construct
  source 1..20: mol_type = other DNA
ctcaccaaatgaccacacat

SEQ ID NO: 3476 - DNA, 20 bp, synthetic construct
  source 1..20: mol_type = other DNA
gcagcaccaccatttccacc

SEQ ID NO: 3477 - DNA, 20 bp, synthetic construct
  source 1..20: mol_type = other DNA
acttcatccccatggacacc

SEQ ID NO: 3478 - DNA, 20 bp, synthetic construct
  source 1..20: mol_type = other DNA
tccgcagcagcggctcccgc

SEQ ID NO: 3479 - DNA, 20 bp, synthetic construct
  source 1..20: mol_type = other DNA
agcaaagagaaagccagata

SEQ ID NO: 3480 - DNA, 20 bp, synthetic construct
  source 1..20: mol_type = other DNA
tatgtagaatgtccaacagc

SEQ ID NO: 3481 - DNA, 20 bp, synthetic construct
  source 1..20: mol_type = other DNA
ggcgctcacctcagcagggc

SEQ ID NO: 3482 - DNA, 20 bp, synthetic construct
  source 1..20: mol_type = other DNA
atcagcacacctacaagaaa

SEQ ID NO: 3483 - DNA, 20 bp, synthetic construct
  source 1..20: mol_type = other DNA
agtcactcacagtccagctg

SEQ ID NO: 3484 - DNA, 20 bp, synthetic construct
  source 1..20: mol_type = other DNA
atcgaggaccaaggtgccca

SEQ ID NO: 3485 - DNA, 20 bp, synthetic construct
  source 1..20: mol_type = other DNA
gacactggccacaggtgagc

SEQ ID NO: 3486 - DNA, 20 bp, synthetic construct
  source 1..20: mol_type = other DNA
gaggatgcctctcttgctct

SEQ ID NO: 3487 - DNA, 20 bp, synthetic construct
  source 1..20: mol_type = other DNA
gagcacaaaaggaagcagtg

SEQ ID NO: 3488 - DNA, 20 bp, synthetic construct
  source 1..20: mol_type = other DNA
ccgccatggctccgacgctg

SEQ ID NO: 3489 - DNA, 20 bp, synthetic construct
  source 1..20: mol_type = other DNA
gcctggtgtctgctgagctc

SEQ ID NO: 3490 - DNA, 20 bp, synthetic construct
  source 1..20: mol_type = other DNA
ttggacagatctattccaga

SEQ ID NO: 3491 - DNA, 20 bp, synthetic construct
  source 1..20: mol_type = other DNA
gtattcagtgatgatgtaga

SEQ ID NO: 3492 - DNA, 20 bp, synthetic construct
  source 1..20: mol_type = other DNA
ccggctttccccccatctca

SEQ ID NO: 3493 - DNA, 20 bp, synthetic construct
  source 1..20: mol_type = other DNA
gcagctcaccatcttggtga

SEQ ID NO: 3494 - DNA, 20 bp, synthetic construct
  source 1..20: mol_type = other DNA
aatccacatctgctggaagg

SEQ ID NO: 3495 - DNA, 20 bp, synthetic construct
  source 1..20: mol_type = other DNA
ttcacagtacctggaggaga

SEQ ID NO: 3496 - DNA, 20 bp, synthetic construct
  source 1..20: mol_type = other DNA
ccagctgtgagatgtacttg

SEQ ID NO: 3497 - DNA, 20 bp, synthetic construct
  source 1..20: mol_type = other DNA
ccgggacttcgaccagaacc

SEQ ID NO: 3498 - DNA, 20 bp, synthetic construct
  source 1..20: mol_type = other DNA
caaaacactgaacctctggg

SEQ ID NO: 3499 - DNA, 20 bp, synthetic construct
  source 1..20: mol_type = other DNA
ggcgcagtacccgctgccgg

SEQ ID NO: 3500 - DNA, 20 bp, synthetic construct
  source 1..20: mol_type = other DNA
cattgccgtgtccagcaaga

SEQ ID NO: 3501 - DNA, 20 bp, synthetic construct
  source 1..20: mol_type = other DNA
tattgtaccacctgaaagca

SEQ ID NO: 3502 - DNA, 20 bp, synthetic construct
  source 1..20: mol_type = other DNA
tcttgatgagctgttcttcc

SEQ ID NO: 3503 - DNA, 20 bp, synthetic construct
  source 1..20: mol_type = other DNA
tagaactcgcagagctctgc

SEQ ID NO: 3504 - DNA, 20 bp, synthetic construct
  source 1..20: mol_type = other DNA
ggtatttcaccgagtctggt

SEQ ID NO: 3505 - DNA, 20 bp, synthetic construct
  source 1..20: mol_type = other DNA
ggcgcagatcatgcaccagc

SEQ ID NO: 3506 - DNA, 20 bp, synthetic construct
  source 1..20: mol_type = other DNA
ccagcacttcttctgcaagg

SEQ ID NO: 3507 - DNA, 20 bp, synthetic construct
  source 1..20: mol_type = other DNA
ctgaatacatggagaatggt

SEQ ID NO: 3508 - DNA, 20 bp, synthetic construct
  source 1..20: mol_type = other DNA
tgaggcactcacatggacat

SEQ ID NO: 3509 - DNA, 20 bp, synthetic construct
  source 1..20: mol_type = other DNA
caacgggaggttcaccctgc

SEQ ID NO: 3510 - DNA, 20 bp, synthetic construct
  source 1..20: mol_type = other DNA
ccagcaggacaggtcctccg

SEQ ID NO: 3511 - DNA, 20 bp, synthetic construct
  source 1..20: mol_type = other DNA
cggtgcatgaagagatccag

SEQ ID NO: 3512 - DNA, 20 bp, synthetic construct
  source 1..20: mol_type = other DNA
atccccaccgtgtgagttcc

SEQ ID NO: 3513 - DNA, 20 bp, synthetic construct
  source 1..20: mol_type = other DNA
gctcagcctgtgctctggtc

SEQ ID NO: 3514 - DNA, 20 bp, synthetic construct
  source 1..20: mol_type = other DNA
ggaaccactgggcaggtggg

SEQ ID NO: 3515 - DNA, 20 bp, synthetic construct
  source 1..20: mol_type = other DNA
cacaggaggagctgcaggac

SEQ ID NO: 3516 - DNA, 20 bp, synthetic construct
  source 1..20: mol_type = other DNA
ccacaaccacactctggagg

SEQ ID NO: 3517 - DNA, 20 bp, synthetic construct
  source 1..20: mol_type = other DNA
cacaggctggggcttccttc

SEQ ID NO: 3518 - DNA, 20 bp, synthetic construct
  source 1..20: mol_type = other DNA
ttcactgaatcttagcagga

SEQ ID NO: 3519 - DNA, 20 bp, synthetic construct
  source 1..20: mol_type = other DNA
gaaggagccgtgagtgttcc

SEQ ID NO: 3520 - DNA, 20 bp, synthetic construct
  source 1..20: mol_type = other DNA
agatcgatcagctaaagcac

SEQ ID NO: 3521 - DNA, 20 bp, synthetic construct
  source 1..20: mol_type = other DNA
cgggtgaggcaggcagggct

SEQ ID NO: 3522 - DNA, 20 bp, synthetic construct
  source 1..20: mol_type = other DNA
gtccatggggatgaagtacc

SEQ ID NO: 3523 - DNA, 20 bp, synthetic construct
  source 1..20: mol_type = other DNA
gctgaccttgatggtggggt

SEQ ID NO: 3524 - DNA, 20 bp, synthetic construct
  source 1..20: mol_type = other DNA
gccagctcctgagggaaggg

SEQ ID NO: 3525 - DNA, 20 bp, synthetic construct
  source 1..20: mol_type = other DNA
gagcacgatggggtagatgt

SEQ ID NO: 3526 - DNA, 20 bp, synthetic construct
  source 1..20: mol_type = other DNA
ctcatgatggctcggaagaa

SEQ ID NO: 3527 - DNA, 20 bp, synthetic construct
  source 1..20: mol_type = other DNA
tccataccttacaacagcct

SEQ ID NO: 3528 - DNA, 20 bp, synthetic construct
  source 1..20: mol_type = other DNA
cagtgcagctccaggcggca

SEQ ID NO: 3529 - DNA, 20 bp, synthetic construct
  source 1..20: mol_type = other DNA
ggacagatcaatggctacac

SEQ ID NO: 3530 - DNA, 20 bp, synthetic construct
  source 1..20: mol_type = other DNA
ccaatgagccgcacgatgta

SEQ ID NO: 3531 - DNA, 20 bp, synthetic construct
  source 1..20: mol_type = other DNA
gccccagaagccgtggtggg

SEQ ID NO: 3532 - DNA, 20 bp, synthetic construct
  source 1..20: mol_type = other DNA
atttcagatccaggatactg

SEQ ID NO: 3533 - DNA, 20 bp, synthetic construct
  source 1..20: mol_type = other DNA
cctcccgggctgcggccaca

SEQ ID NO: 3534 - DNA, 20 bp, synthetic construct
  source 1..20: mol_type = other DNA
cagctctccaatctgaaggt

SEQ ID NO: 3535 - DNA, 20 bp, synthetic construct
  source 1..20: mol_type = other DNA
cccagtggttcccagaagtg

SEQ ID NO: 3536 - DNA, 20 bp, synthetic construct
  source 1..20: mol_type = other DNA
tgactacaaggcccagaggg

SEQ ID NO: 3537 - DNA, 20 bp, synthetic construct
  source 1..20: mol_type = other DNA
taaaatctacatggaagaaa

SEQ ID NO: 3538 - DNA, 20 bp, synthetic construct
  source 1..20: mol_type = other DNA
ctcctggatcaggcgcccga

SEQ ID NO: 3539 - DNA, 20 bp, synthetic construct
  source 1..20: mol_type = other DNA
tgagagtgcacagtggagaa

SEQ ID NO: 3540 - DNA, 20 bp, synthetic construct
  source 1..20: mol_type = other DNA
gctggacctgcgggacgaca

SEQ ID NO: 3541 - DNA, 20 bp, synthetic construct
  source 1..20: mol_type = other DNA
attcctggaacagaccaaag

SEQ ID NO: 3542 - DNA, 20 bp, synthetic construct
  source 1..20: mol_type = other DNA
cctcacgcgtcaggctgctg

SEQ ID NO: 3543 - DNA, 20 bp, synthetic construct
  source 1..20: mol_type = other DNA
cgccacctgtgggagccaca

SEQ ID NO: 3544 - DNA, 20 bp, synthetic construct
  source 1..20: mol_type = other DNA
tcaagaaatgctgcggggaa

SEQ ID NO: 3545 - DNA, 20 bp, synthetic construct
  source 1..20: mol_type = other DNA
cacagtggaggaaggccacg

SEQ ID NO: 3546 - DNA, 20 bp, synthetic construct
  source 1..20: mol_type = other DNA
ctgttataggagctcaatct

SEQ ID NO: 3547 - DNA, 20 bp, synthetic construct
  source 1..20: mol_type = other DNA
cctgtggaagacacagagtg

SEQ ID NO: 3548 - DNA, 20 bp, synthetic construct
  source 1..20: mol_type = other DNA
gcagaagatgaaagggccgg

SEQ ID NO: 3549 - DNA, 20 bp, synthetic construct
  source 1..20: mol_type = other DNA
gcagcacaccgtctgtggat

SEQ ID NO: 3550 - DNA, 20 bp, synthetic construct
  source 1..20: mol_type = other DNA
gacgcacgggcagatcggca

SEQ ID NO: 3551 - DNA, 20 bp, synthetic construct
  source 1..20: mol_type = other DNA
aggcgccctggccagtcgtc

SEQ ID NO: 3552 - DNA, 20 bp, synthetic construct
  source 1..20: mol_type = other DNA
cgggccagccagagctcccc

SEQ ID NO: 3553 - DNA, 20 bp, synthetic construct
  source 1..20: mol_type = other DNA
cggtgtcacacagataaact

SEQ ID NO: 3554 - DNA, 20 bp, synthetic construct
  source 1..20: mol_type = other DNA
ccctcagggaccatgggctg

SEQ ID NO: 3555 - DNA, 20 bp, synthetic construct
  source 1..20: mol_type = other DNA
cgcgcaagcagccgctgggc

SEQ ID NO: 3556 - DNA, 20 bp, synthetic construct
  source 1..20: mol_type = other DNA
ggccgaggagcacctgaagc

SEQ ID NO: 3557 - DNA, 20 bp, synthetic construct
  source 1..20: mol_type = other DNA
ccaagaggagtggtttaagg

SEQ ID NO: 3558 - DNA, 20 bp, synthetic construct
  source 1..20: mol_type = other DNA
ctcacctgggccttcagcac

SEQ ID NO: 3559 - DNA, 20 bp, synthetic construct
  source 1..20: mol_type = other DNA
tcttcacacgcaagtgagtg

SEQ ID NO: 3560 - DNA, 20 bp, synthetic construct
  source 1..20: mol_type = other DNA
gagccgtagaaagggtccaa

SEQ ID NO: 3561 - DNA, 20 bp, synthetic construct
  source 1..20: mol_type = other DNA
gccgccagacagcactgtgt

SEQ ID NO: 3562 - DNA, 20 bp, synthetic construct
  source 1..20: mol_type = other DNA
ctgtcagatgccaaatgcct

SEQ ID NO: 3563 - DNA, 20 bp, synthetic construct
  source 1..20: mol_type = other DNA
gcgccagatcacgtggagcc

SEQ ID NO: 3564 - DNA, 20 bp, synthetic construct
  source 1..20: mol_type = other DNA
gaaggagcagggactggaag

SEQ ID NO: 3565 - DNA, 20 bp, synthetic construct
  source 1..20: mol_type = other DNA
gctaccgctgccatcggtgc

SEQ ID NO: 3566 - DNA, 20 bp, synthetic construct
  source 1..20: mol_type = other DNA
cctggccgtcatctgctccc

SEQ ID NO: 3567 - DNA, 20 bp, synthetic construct
  source 1..20: mol_type = other DNA
agagactggtcctatgcagt

SEQ ID NO: 3568 - DNA, 20 bp, synthetic construct
  source 1..20: mol_type = other DNA
gatcgaggaccaaggtgccc

SEQ ID NO: 3569 - DNA, 20 bp, synthetic construct
  source 1..20: mol_type = other DNA
gcagcagcggctcccgcagg

SEQ ID NO: 3570 - DNA, 20 bp, synthetic construct
  source 1..20: mol_type = other DNA
ggcacctacgccattgccgg

SEQ ID NO: 3571 - DNA, 20 bp, synthetic construct
  source 1..20: mol_type = other DNA
cctcatcagccaagacaagg

SEQ ID NO: 3572 - DNA, 20 bp, synthetic construct
  source 1..20: mol_type = other DNA
ggtcagctcgtcctccctct

SEQ ID NO: 3573 - DNA, 20 bp, synthetic construct
  source 1..20: mol_type = other DNA
tccctgcagagaaacacact

SEQ ID NO: 3574 - DNA, 20 bp, synthetic construct
  source 1..20: mol_type = other DNA
tcgctgagcctccgcagcag

SEQ ID NO: 3575 - DNA, 20 bp, synthetic construct
  source 1..20: mol_type = other DNA
caccaggatgatgggtgtgc

SEQ ID NO: 3576 - DNA, 20 bp, synthetic construct
  source 1..20: mol_type = other DNA
gctcctgcactcagcacccc

SEQ ID NO: 3577 - DNA, 20 bp, synthetic construct
  source 1..20: mol_type = other DNA
gttcacttcatcctcagatg

SEQ ID NO: 3578 - DNA, 20 bp, synthetic construct
  source 1..20: mol_type = other DNA
tcatacagggccccgtagtc

SEQ ID NO: 3579 - DNA, 20 bp, synthetic construct
  source 1..20: mol_type = other DNA
ttgatcttggatggcagcat

SEQ ID NO: 3580 - DNA, 20 bp, synthetic construct
  source 1..20: mol_type = other DNA
gacaaggtaaaagagggatg

SEQ ID NO: 3581 - DNA, 20 bp, synthetic construct
  source 1..20: mol_type = other DNA
cgaggaatatataggtgtaa

SEQ ID NO: 3582 - DNA, 20 bp, synthetic construct
  source 1..20: mol_type = other DNA
ccctgcagagaaacacactt

SEQ ID NO: 3583 - DNA, 20 bp, synthetic construct
  source 1..20: mol_type = other DNA
ttcaggtatggggcagcgcc

SEQ ID NO: 3584 - DNA, 20 bp, synthetic construct
  source 1..20: mol_type = other DNA
ctccactaccggatgaggta

SEQ ID NO: 3585 - DNA, 20 bp, synthetic construct
  source 1..20: mol_type = other DNA
ctgtaggggcaaccagaaca

SEQ ID NO: 3586 - DNA, 20 bp, synthetic construct
  source 1..20: mol_type = other DNA
acgagaactcgtaccggtcc

SEQ ID NO: 3587 - DNA, 20 bp, synthetic construct
  source 1..20: mol_type = other DNA
ggagctggatccagccaccg

SEQ ID NO: 3588 - DNA, 20 bp, synthetic construct
  source 1..20: mol_type = other DNA
actccacctggctgcagtag

SEQ ID NO: 3589 - DNA, 20 bp, synthetic construct
  source 1..20: mol_type = other DNA
catctgcgaggacgagggag

SEQ ID NO: 3590 - DNA, 20 bp, synthetic construct
  source 1..20: mol_type = other DNA
tggccacccagactgaccag

SEQ ID NO: 3591 - DNA, 20 bp, synthetic construct
  source 1..20: mol_type = other DNA
gacctcacctgtggatgcag

SEQ ID NO: 3592 - DNA, 20 bp, synthetic construct
  source 1..20: mol_type = other DNA
ggctggccctggatgccatg

SEQ ID NO: 3593 - DNA, 20 bp, synthetic construct
  source 1..20: mol_type = other DNA
aacggcaaagcgtgagtaca

SEQ ID NO: 3594 - DNA, 20 bp, synthetic construct
  source 1..20: mol_type = other DNA
ggtcagtttctgagactgca

SEQ ID NO: 3595 - DNA, 20 bp, synthetic construct
  source 1..20: mol_type = other DNA
tgtcctccagggcctccttg

SEQ ID NO: 3596 - DNA, 20 bp, synthetic construct
  source 1..20: mol_type = other DNA
catcgagcagggcaagcgga

SEQ ID NO: 3597 - DNA, 20 bp, synthetic construct
  source 1..20: mol_type = other DNA
actgaatacatggagaatgg

SEQ ID NO: 3598 - DNA, 20 bp, synthetic construct
  source 1..20: mol_type = other DNA
gaggacagccaaggggcacg

SEQ ID NO: 3599 - DNA, 20 bp, synthetic construct
  source 1..20: mol_type = other DNA
tcccaaagcaaggagcagag

SEQ ID NO: 3600 - DNA, 20 bp, synthetic construct
  source 1..20: mol_type = other DNA
gccaatgagccgcacgatgt

SEQ ID NO: 3601 - DNA, 20 bp, synthetic construct
  source 1..20: mol_type = other DNA
ggccacccaggggatcctgt

SEQ ID NO: 3602 - DNA, 20 bp, synthetic construct
  source 1..20: mol_type = other DNA
cgttgtagtaccctgggtcg

SEQ ID NO: 3603 - DNA, 20 bp, synthetic construct
  source 1..20: mol_type = other DNA
tggatcaggcgcccgagggc

SEQ ID NO: 3604 - DNA, 20 bp, synthetic construct
  source 1..20: mol_type = other DNA
ctcccagccatccgtcctga

SEQ ID NO: 3605 - DNA, 20 bp, synthetic construct
  source 1..20: mol_type = other DNA
cgcccacgacaccaaccacc

SEQ ID NO: 3606 - DNA, 20 bp, synthetic construct
  source 1..20: mol_type = other DNA
caccagcgtcttggccagca

SEQ ID NO: 3607 - DNA, 20 bp, synthetic construct
  source 1..20: mol_type = other DNA
acgcactccggtaggtcccc

SEQ ID NO: 3608 - DNA, 20 bp, synthetic construct
  source 1..20: mol_type = other DNA
ggcaggccttgtagctgcag

SEQ ID NO: 3609 - DNA, 20 bp, synthetic construct
  source 1..20: mol_type = other DNA
aatataataaccctgaaaag

SEQ ID NO: 3610 - DNA, 20 bp, synthetic construct
  source 1..20: mol_type = other DNA
tccgaaatggctctgaggtg

SEQ ID NO: 3611 - DNA, 20 bp, synthetic construct
  source 1..20: mol_type = other DNA
ctggataggcaaggagaggc

SEQ ID NO: 3612 - DNA, 20 bp, synthetic construct
  source 1..20: mol_type = other DNA
cagttccaaaccctggtggt

SEQ ID NO: 3613 - DNA, 20 bp, synthetic construct
  source 1..20: mol_type = other DNA
gccccctcgctaacagccag

SEQ ID NO: 3614 - DNA, 20 bp, synthetic construct
  source 1..20: mol_type = other DNA
agcatctgcgaggacgaggg

SEQ ID NO: 3615 - DNA, 20 bp, synthetic construct
  source 1..20: mol_type = other DNA
aggggaagttcatttgacac

SEQ ID NO: 3616 - DNA, 20 bp, synthetic construct
  source 1..20: mol_type = other DNA
cagtgccaggccctgcgggt

SEQ ID NO: 3617 - DNA, 20 bp, synthetic construct
  source 1..20: mol_type = other DNA
gagcagagatgtgggaatgg

SEQ ID NO: 3618 - DNA, 20 bp, synthetic construct
  source 1..20: mol_type = other DNA
tctgtcagatgccaaatgcc

SEQ ID NO: 3619 - DNA, 20 bp, synthetic construct
  source 1..20: mol_type = other DNA
accagcgccggaggggcaag

SEQ ID NO: 3620 - DNA, 20 bp, synthetic construct
  source 1..20: mol_type = other DNA
ggccagtttcttcccttcca

SEQ ID NO: 3621 - DNA, 20 bp, synthetic construct
  source 1..20: mol_type = other DNA
tcaggaaaccgcgggacttg

SEQ ID NO: 3622 - DNA, 20 bp, synthetic construct
  source 1..20: mol_type = other DNA
gaaccaggccctcttcatga

SEQ ID NO: 3623 - DNA, 20 bp, synthetic construct
  source 1..20: mol_type = other DNA
tgtggccacagcactttgtc

SEQ ID NO: 3624 - DNA, 20 bp, synthetic construct
  source 1..20: mol_type = other DNA
ggtttattatcagtgcgtcc

SEQ ID NO: 3625 - DNA, 20 bp, synthetic construct
  source 1..20: mol_type = other DNA
tgtggcagacctacagtgta

SEQ ID NO: 3626 - DNA, 20 bp, synthetic construct
  source 1..20: mol_type = other DNA
gccggagaccttgaagagcg

SEQ ID NO: 3627 - DNA, 20 bp, synthetic construct
  source 1..20: mol_type = other DNA
ccctgtggggcaacggggaa

SEQ ID NO: 3628 - DNA, 20 bp, synthetic construct
  source 1..20: mol_type = other DNA
cacaaaaggaagcagtgtgg

SEQ ID NO: 3629 - DNA, 20 bp, synthetic construct
  source 1..20: mol_type = other DNA
acagcaaggctggtggcgag

SEQ ID NO: 3630 - DNA, 20 bp, synthetic construct
  source 1..20: mol_type = other DNA
atcctccagctgccgcaacc

SEQ ID NO: 3631 - DNA, 20 bp, synthetic construct
  source 1..20: mol_type = other DNA
cctgctcggttgatcttgga

SEQ ID NO: 3632 - DNA, 20 bp, synthetic construct
  source 1..20: mol_type = other DNA
ggccatcctgctaaaatcag

SEQ ID NO: 3633 - DNA, 20 bp, synthetic construct
  source 1..20: mol_type = other DNA
ttggacattctacataccaa

SEQ ID NO: 3634 - DNA, 20 bp, synthetic construct
  source 1..20: mol_type = other DNA
accctgttgtcttcaggagt

SEQ ID NO: 3635 - DNA, 20 bp, synthetic construct
  source 1..20: mol_type = other DNA
cgtctgcctgctggtaggac

SEQ ID NO: 3636 - DNA, 20 bp, synthetic construct
  source 1..20: mol_type = other DNA
cccctgactatgaagaagga

SEQ ID NO: 3637 - DNA, 20 bp, synthetic construct
  source 1..20: mol_type = other DNA
aaaccgaagcaactcagagg

SEQ ID NO: 3638 - DNA, 20 bp, synthetic construct
  source 1..20: mol_type = other DNA
cggctacagcttcaccacca

SEQ ID NO: 3639 - DNA, 20 bp, synthetic construct
  source 1..20: mol_type = other DNA
ggagaaggacatcagcggta

SEQ ID NO: 3640 - DNA, 20 bp, synthetic construct
  source 1..20: mol_type = other DNA
acgcaggtagggcgtgagct

SEQ ID NO: 3641 - DNA, 20 bp, synthetic construct
  source 1..20: mol_type = other DNA
ctacctgtgagtggccaggt

SEQ ID NO: 3642 - DNA, 20 bp, synthetic construct
  source 1..20: mol_type = other DNA
ccagaatgtggagaagcaag

SEQ ID NO: 3643 - DNA, 20 bp, synthetic construct
  source 1..20: mol_type = other DNA
acacctgcacgagagcccca

SEQ ID NO: 3644 - DNA, 20 bp, synthetic construct
  source 1..20: mol_type = other DNA
cagggtgaacctcccgttgt

SEQ ID NO: 3645 - DNA, 20 bp, synthetic construct
  source 1..20: mol_type = other DNA
ttcatcaagctgagtgaccc

SEQ ID NO: 3646 - DNA, 20 bp, synthetic construct
  source 1..20: mol_type = other DNA
ttgacgcaggaggccctgtg

SEQ ID NO: 3647 - DNA, 20 bp, synthetic construct
  source 1..20: mol_type = other DNA
agaatttatcatttcgtggt

SEQ ID NO: 3648 - DNA, 20 bp, synthetic construct
  source 1..20: mol_type = other DNA
ctcggccagctcctgaggga

SEQ ID NO: 3649 - DNA, 20 bp, synthetic construct
  source 1..20: mol_type = other DNA
ggaacatgtggctccactgc

SEQ ID NO: 3650 - DNA, 20 bp, synthetic construct
  source 1..20: mol_type = other DNA
gcagcagggcctgaaagaca

SEQ ID NO: 3651 - DNA, 20 bp, synthetic construct
  source 1..20: mol_type = other DNA
gaagctgaaaagagaaaaac

SEQ ID NO: 3652 - DNA, 20 bp, synthetic construct
  source 1..20: mol_type = other DNA
tatcagtaaggagcgggagc

SEQ ID NO: 3653 - DNA, 20 bp, synthetic construct
  source 1..20: mol_type = other DNA
aatgtccaacagccggccta

SEQ ID NO: 3654 - DNA, 20 bp, synthetic construct
  source 1..20: mol_type = other DNA
tgagccgcaaggacgcggag

SEQ ID NO: 3655 - DNA, 20 bp, synthetic construct
  source 1..20: mol_type = other DNA
ttctgaaatgaagacacata

SEQ ID NO: 3656 - DNA, 20 bp, synthetic construct
  source 1..20: mol_type = other DNA
cggggaggtggtggaggtcc

SEQ ID NO: 3657 - DNA, 20 bp, synthetic construct
  source 1..20: mol_type = other DNA
aagcggactttaaagttcga

SEQ ID NO: 3658 - DNA, 20 bp, synthetic construct
  source 1..20: mol_type = other DNA
actgcagaaagataagatgg

SEQ ID NO: 3659 - DNA, 20 bp, synthetic construct
  source 1..20: mol_type = other DNA
tcctggccgtcatctgctcc

SEQ ID NO: 3660 - DNA, 20 bp, synthetic construct
  source 1..20: mol_type = other DNA
gagaaggcaggtcttgccca

SEQ ID NO: 3661 - DNA, 20 bp, synthetic construct
  source 1..20: mol_type = other DNA
acacaaggagtgtctgggga

SEQ ID NO: 3662 - DNA, 20 bp, synthetic construct
  source 1..20: mol_type = other DNA
tcttaagctggttgggtgag

SEQ ID NO: 3663 - DNA, 20 bp, synthetic construct
  source 1..20: mol_type = other DNA
aatcttagcaggaaggtgcc

SEQ ID NO: 3664 - DNA, 20 bp, synthetic construct
  source 1..20: mol_type = other DNA
atgaagctggaggtgggcgc

SEQ ID NO: 3665 - DNA, 20 bp, synthetic construct
  source 1..20: mol_type = other DNA
tttcacctgtgcatatgagc

SEQ ID NO: 3666 - DNA, 20 bp, synthetic construct
  source 1..20: mol_type = other DNA
tcggtcaccacgagcagggc

SEQ ID NO: 3667 - DNA, 20 bp, synthetic construct
  source 1..20: mol_type = other DNA
tcctcaggctctcctggtac

SEQ ID NO: 3668 - DNA, 20 bp, synthetic construct
  source 1..20: mol_type = other DNA
tgacgagggagaagcagatg

SEQ ID NO: 3669 - DNA, 20 bp, synthetic construct
  source 1..20: mol_type = other DNA
acagcggcacctacctctgt

SEQ ID NO: 3670 - DNA, 20 bp, synthetic construct
  source 1..20: mol_type = other DNA
ctgcaaggtgggagttaagg

SEQ ID NO: 3671 - DNA, 20 bp, synthetic construct
  source 1..20: mol_type = other DNA
cctggctcagtgcgtgaacg

SEQ ID NO: 3672 - DNA, 20 bp, synthetic construct
  source 1..20: mol_type = other DNA
accaccagcacaggggtaca

SEQ ID NO: 3673 - DNA, 20 bp, synthetic construct
  source 1..20: mol_type = other DNA
tcgccacctgtgggagccac

SEQ ID NO: 3674 - DNA, 20 bp, synthetic construct
  source 1..20: mol_type = other DNA
ccggagaatgccaccgccaa

SEQ ID NO: 3675 - DNA, 20 bp, synthetic construct
  source 1..20: mol_type = other DNA
gcatcacctgcactctcttc

SEQ ID NO: 3676 - DNA, 20 bp, synthetic construct
  source 1..20: mol_type = other DNA
gcagttgtgtgacacggaag

SEQ ID NO: 3677 - DNA, 20 bp, synthetic construct
  source 1..20: mol_type = other DNA
gaccctgacctgctcacctg

SEQ ID NO: 3678 - DNA, 20 bp, synthetic construct
  source 1..20: mol_type = other DNA
gcgccagacgtggaagctgg

SEQ ID NO: 3679 - DNA, 20 bp, synthetic construct
  source 1..20: mol_type = other DNA
gggaccacttgcttgatctg

SEQ ID NO: 3680 - DNA, 20 bp, synthetic construct
  source 1..20: mol_type = other DNA
ggcccagcttgttgtgcagg

SEQ ID NO: 3681 - DNA, 20 bp, synthetic construct
  source 1..20: mol_type = other DNA
atcttgaaggggctcactaa

SEQ ID NO: 3682 - DNA, 20 bp, synthetic construct
  source 1..20: mol_type = other DNA
tggttccacggactggatct

SEQ ID NO: 3683 - DNA, 20 bp, synthetic construct
  source 1..20: mol_type = other DNA
ccggcccctgtcctaccagc

SEQ ID NO: 3684 - DNA, 20 bp, synthetic construct
  source 1..20: mol_type = other DNA
caatacttcaagaaggtgct

SEQ ID NO: 3685 - DNA, 20 bp, synthetic construct
  source 1..20: mol_type = other DNA
cacactcctcaccaagcccg

SEQ ID NO: 3686 - DNA, 20 bp, synthetic construct
  source 1..20: mol_type = other DNA
ctccaccagctgcagggagc

SEQ ID NO: 3687 - DNA, 20 bp, synthetic construct
  source 1..20: mol_type = other DNA
cacgggatggggagcaggtc

SEQ ID NO: 3688 - DNA, 20 bp, synthetic construct
  source 1..20: mol_type = other DNA
tcctcaccatgttcctgaag

SEQ ID NO: 3689 - DNA, 20 bp, synthetic construct
  source 1..20: mol_type = other DNA
tgtggggaaaacctctctgt

SEQ ID NO: 3690 - DNA, 20 bp, synthetic construct
  source 1..20: mol_type = other DNA
gttgacctcacgcaggttga

SEQ ID NO: 3691 - DNA, 20 bp, synthetic construct
  source 1..20: mol_type = other DNA
atcctgaatgaatgaatgga

SEQ ID NO: 3692 - DNA, 20 bp, synthetic construct
  source 1..20: mol_type = other DNA
cctcaccatgttcctgaagt

SEQ ID NO: 3693 - DNA, 20 bp, synthetic construct
  source 1..20: mol_type = other DNA
ctgaggtttggtttggagtg

SEQ ID NO: 3694 - DNA, 20 bp, synthetic construct
  source 1..20: mol_type = other DNA
cttcgtgaaaccatctgtgg

SEQ ID NO: 3695 - DNA, 20 bp, synthetic construct
  source 1..20: mol_type = other DNA
gcctggggtcaccttgcagt

SEQ ID NO: 3696 - DNA, 20 bp, synthetic construct
  source 1..20: mol_type = other DNA
tggacagatctattccagag

SEQ ID NO: 3697 - DNA, 20 bp, synthetic construct
  source 1..20: mol_type = other DNA
ttactcatgggcaaggaggt

SEQ ID NO: 3698 - DNA, 20 bp, synthetic construct
  source 1..20: mol_type = other DNA
ctttcatcttctgctcaagc

SEQ ID NO: 3699 - DNA, 20 bp, synthetic construct
  source 1..20: mol_type = other DNA
agggccagacagtgatgcta

SEQ ID NO: 3700 - DNA, 20 bp, synthetic construct
  source 1..20: mol_type = other DNA
gaagaaccagctgtgcaggg

SEQ ID NO: 3701 - DNA, 20 bp, synthetic construct
  source 1..20: mol_type = other DNA
agcaggcagtgcttgttctg

SEQ ID NO: 3702 - DNA, 20 bp, synthetic construct
  source 1..20: mol_type = other DNA
agaagccccagaagccgtgg

SEQ ID NO: 3703 - DNA, 20 bp, synthetic construct
  source 1..20: mol_type = other DNA
gctccaggactggcaggtca

SEQ ID NO: 3704 - DNA, 20 bp, synthetic construct
  source 1..20: mol_type = other DNA
tctgaggtttggtttggagt

SEQ ID NO: 3705 - DNA, 20 bp, synthetic construct
  source 1..20: mol_type = other DNA
atctgctcccgggccgcacg

SEQ ID NO: 3706 - DNA, 20 bp, synthetic construct
  source 1..20: mol_type = other DNA
tccacttgttcttcaagttc

SEQ ID NO: 3707 - DNA, 20 bp, synthetic construct
  source 1..20: mol_type = other DNA
tgttaagcagctgacacaga

SEQ ID NO: 3708 - DNA, 20 bp, synthetic construct
  source 1..20: mol_type = other DNA
gtcacgaatgacggctcgga

SEQ ID NO: 3709 - DNA, 20 bp, synthetic construct
  source 1..20: mol_type = other DNA
ttgacgcagcagtctggaga

SEQ ID NO: 3710 - DNA, 20 bp, synthetic construct
  source 1..20: mol_type = other DNA
cgacggcaagttcctgtatg

SEQ ID NO: 3711 - DNA, 20 bp, synthetic construct
  source 1..20: mol_type = other DNA
atgagttggtacagctcctc

SEQ ID NO: 3712 - DNA, 20 bp, synthetic construct
  source 1..20: mol_type = other DNA
ttgcctctacatagaagcca

SEQ ID NO: 3713 - DNA, 20 bp, synthetic construct
  source 1..20: mol_type = other DNA
gacagcaaggctggtggcga

SEQ ID NO: 3714 - DNA, 20 bp, synthetic construct
  source 1..20: mol_type = other DNA
gaggcttacctcttcactgt

SEQ ID NO: 3715 - DNA, 20 bp, synthetic construct
  source 1..20: mol_type = other DNA
cttctccccagccctgctcg

SEQ ID NO: 3716 - DNA, 20 bp, synthetic construct
  source 1..20: mol_type = other DNA
tttcctcagtgcctttgtgg

SEQ ID NO: 3717 - DNA, 20 bp, synthetic construct
  source 1..20: mol_type = other DNA
cttgaagaaccagctgtgca

SEQ ID NO: 3718 - DNA, 20 bp, synthetic construct
  source 1..20: mol_type = other DNA
agaggcccagcttgttgtgc

SEQ ID NO: 3719 - DNA, 20 bp, synthetic construct
  source 1..20: mol_type = other DNA
ataagaggctgggctgacga

SEQ ID NO: 3720 - DNA, 20 bp, synthetic construct
  source 1..20: mol_type = other DNA
gcgagcctgttactacagcc

SEQ ID NO: 3721 - DNA, 20 bp, synthetic construct
  source 1..20: mol_type = other DNA
gcaggccatcaagtgtgtgg

SEQ ID NO: 3722 - DNA, 20 bp, synthetic construct
  source 1..20: mol_type = other DNA
ggctgatatactgagaaaac

SEQ ID NO: 3723 - DNA, 20 bp, synthetic construct
  source 1..20: mol_type = other DNA
gatccacatctgctggaagg

SEQ ID NO: 3724 - DNA, 20 bp, synthetic construct
  source 1..20: mol_type = other DNA
agaccagtcagtttccaggt

SEQ ID NO: 3725 - DNA, 20 bp, synthetic construct
  source 1..20: mol_type = other DNA
cctcgtagatgggcacagtg

SEQ ID NO: 3726 - DNA, 20 bp, synthetic construct
  source 1..20: mol_type = other DNA
ctacggccagaagccctaca

SEQ ID NO: 3727 - DNA, 20 bp, synthetic construct
  source 1..20: mol_type = other DNA
gccgggaaaagtgattcgag

SEQ ID NO: 3728 - DNA, 20 bp, synthetic construct
  source 1..20: mol_type = other DNA
tcggccagctcctgagggaa

SEQ ID NO: 3729 - DNA, 20 bp, synthetic construct
  source 1..20: mol_type = other DNA
tggtcagtacctgacagaga

SEQ ID NO: 3730 - DNA, 20 bp, synthetic construct
  source 1..20: mol_type = other DNA
gggtggccaccaccagcaca

SEQ ID NO: 3731 - DNA, 20 bp, synthetic construct
  source 1..20: mol_type = other DNA
gtagcagatttcccagagcg

SEQ ID NO: 3732 - DNA, 20 bp, synthetic construct
  source 1..20: mol_type = other DNA
cttcctccacgtagttggca

SEQ ID NO: 3733 - DNA, 20 bp, synthetic construct
  source 1..20: mol_type = other DNA
gatcagtacaccagttccac

SEQ ID NO: 3734 - DNA, 20 bp, synthetic construct
  source 1..20: mol_type = other DNA
ctgactgccacagatccaca

SEQ ID NO: 3735 - DNA, 20 bp, synthetic construct
  source 1..20: mol_type = other DNA
tcagcaccacgtctgcctgc

SEQ ID NO: 3736 - DNA, 20 bp, synthetic construct
  source 1..20: mol_type = other DNA
cctgcgcccccagatgtccc

SEQ ID NO: 3737 - DNA, 20 bp, synthetic construct
  source 1..20: mol_type = other DNA
gcttacctcttcactgttgg

SEQ ID NO: 3738 - DNA, 20 bp, synthetic construct
  source 1..20: mol_type = other DNA
aaggaagatctgcttctgtc

SEQ ID NO: 3739 - DNA, 20 bp, synthetic construct
  source 1..20: mol_type = other DNA
tcttaggtaggtggggtcgg

SEQ ID NO: 3740 - DNA, 20 bp, synthetic construct
  source 1..20: mol_type = other DNA
gagaaggacatcagcggtaa

SEQ ID NO: 3741 - DNA, 20 bp, synthetic construct
  source 1..20: mol_type = other DNA
aaggagatgaaggaagccct

SEQ ID NO: 3742 - DNA, 20 bp, synthetic construct
  source 1..20: mol_type = other DNA
acgtggtcagctccttcacg

SEQ ID NO: 3743 - DNA, 20 bp, synthetic construct
  source 1..20: mol_type = other DNA
caggtgagcaggtcagggtc

SEQ ID NO: 3744 - DNA, 20 bp, synthetic construct
  source 1..20: mol_type = other DNA
atgcccggcaccgatggcag

SEQ ID NO: 3745 - DNA, 20 bp, synthetic construct
  source 1..20: mol_type = other DNA
gcgggagcgggaccaggtac

SEQ ID NO: 3746 - DNA, 20 bp, synthetic construct
  source 1..20: mol_type = other DNA
gcatataaagtctccatctc

SEQ ID NO: 3747 - DNA, 20 bp, synthetic construct
  source 1..20: mol_type = other DNA
catctgcaggaaacagaacc

SEQ ID NO: 3748 - DNA, 20 bp, synthetic construct
  source 1..20: mol_type = other DNA
gaacatgtggctccactgca

SEQ ID NO: 3749 - DNA, 20 bp, synthetic construct
  source 1..20: mol_type = other DNA
agaccacacatctgacttga

SEQ ID NO: 3750 - DNA, 20 bp, synthetic construct
  source 1..20: mol_type = other DNA
gtctgggcggtgctacaact

SEQ ID NO: 3751 - DNA, 20 bp, synthetic construct
  source 1..20: mol_type = other DNA
gagggccagacagtgatgct

SEQ ID NO: 3752 - DNA, 20 bp, synthetic construct
  source 1..20: mol_type = other DNA
ggtttccgcagaataaaaag

SEQ ID NO: 3753 - DNA, 20 bp, synthetic construct
  source 1..20: mol_type = other DNA
cagtgcctgcgctcgctggg

SEQ ID NO: 3754 - DNA, 20 bp, synthetic construct
  source 1..20: mol_type = other DNA
tcaaggtaagggcctactag

SEQ ID NO: 3755 - DNA, 20 bp, synthetic construct
  source 1..20: mol_type = other DNA
gtagtaccctgggtcgggga

SEQ ID NO: 3756 - DNA, 20 bp, synthetic construct
  source 1..20: mol_type = other DNA
caggagcggcgagtggtgga

SEQ ID NO: 3757 - DNA, 20 bp, synthetic construct
  source 1..20: mol_type = other DNA
aagaaggtaagactttcccg

SEQ ID NO: 3758 - DNA, 20 bp, synthetic construct
  source 1..20: mol_type = other DNA
tccagtaccaggagagcctg

SEQ ID NO: 3759 - DNA, 20 bp, synthetic construct
  source 1..20: mol_type = other DNA
gctgatatactgagaaaaca

SEQ ID NO: 3760 - DNA, 20 bp, synthetic construct
  source 1..20: mol_type = other DNA
cgagatgctgccgtagaaga

SEQ ID NO: 3761 - DNA, 20 bp, synthetic construct
  source 1..20: mol_type = other DNA
tcccaaggtgctcgccctga

SEQ ID NO: 3762 - DNA, 20 bp, synthetic construct
  source 1..20: mol_type = other DNA
tgtgcgacgagaactcgtac

SEQ ID NO: 3763 - DNA, 20 bp, synthetic construct
  source 1..20: mol_type = other DNA
cagatacttacttgggaaac

SEQ ID NO: 3764 - DNA, 20 bp, synthetic construct
  source 1..20: mol_type = other DNA
ttgagtgtgcgtggggtcca

SEQ ID NO: 3765 - DNA, 20 bp, synthetic construct
  source 1..20: mol_type = other DNA
ttctctcaaggtttgtactc

SEQ ID NO: 3766 - DNA, 20 bp, synthetic construct
  source 1..20: mol_type = other DNA
agctggactgtgagtgacta

SEQ ID NO: 3767 - DNA, 20 bp, synthetic construct
  source 1..20: mol_type = other DNA
ggtgaatgtcccgtagttaa

SEQ ID NO: 3768 - DNA, 20 bp, synthetic construct
  source 1..20: mol_type = other DNA
gttaggttctctggagccca

SEQ ID NO: 3769 - DNA, 20 bp, synthetic construct
  source 1..20: mol_type = other DNA
gagaaggtgggggggttcca

SEQ ID NO: 3770 - DNA, 20 bp, synthetic construct
  source 1..20: mol_type = other DNA
cagcagcacggggtgctcct

SEQ ID NO: 3771 - DNA, 20 bp, synthetic construct
  source 1..20: mol_type = other DNA
ttcttacctctcaatctgca

SEQ ID NO: 3772 - DNA, 20 bp, synthetic construct
  source 1..20: mol_type = other DNA
actggggagcaacatcacca

SEQ ID NO: 3773 - DNA, 20 bp, synthetic construct
  source 1..20: mol_type = other DNA
ggcggcccgcaacgtcctgc

SEQ ID NO: 3774 - DNA, 20 bp, synthetic construct
  source 1..20: mol_type = other DNA
aaagagaaagccagatatgg

SEQ ID NO: 3775 - DNA, 20 bp, synthetic construct
  source 1..20: mol_type = other DNA
tgtaggagtccgtccaggac

SEQ ID NO: 3776 - DNA, 20 bp, synthetic construct
  source 1..20: mol_type = other DNA
acataccatcatcttcatcc

SEQ ID NO: 3777 - DNA, 20 bp, synthetic construct
  source 1..20: mol_type = other DNA
tgctcccccagtggattggg

SEQ ID NO: 3778 - DNA, 20 bp, synthetic construct
  source 1..20: mol_type = other DNA
tagagctttgtcgagcagga

SEQ ID NO: 3779 - DNA, 20 bp, synthetic construct
  source 1..20: mol_type = other DNA
gtccctccatgtggccgaca

SEQ ID NO: 3780 - DNA, 20 bp, synthetic construct
  source 1..20: mol_type = other DNA
tggccgctactgcagccagg

SEQ ID NO: 3781 - DNA, 20 bp, synthetic construct
  source 1..20: mol_type = other DNA
gcagatgaggaagacgtcct

SEQ ID NO: 3782 - DNA, 20 bp, synthetic construct
  source 1..20: mol_type = other DNA
gattctcagtaagttaagtc

SEQ ID NO: 3783 - DNA, 20 bp, synthetic construct
  source 1..20: mol_type = other DNA
cctggaatcccttaccatga

SEQ ID NO: 3784 - DNA, 20 bp, synthetic construct
  source 1..20: mol_type = other DNA
ggagcatacctggtcttctc

SEQ ID NO: 3785 - DNA, 20 bp, synthetic construct
  source 1..20: mol_type = other DNA
caactaggaaggtagcaaag

SEQ ID NO: 3786 - DNA, 20 bp, synthetic construct
  source 1..20: mol_type = other DNA
aggatggttcttaggtaggt

SEQ ID NO: 3787 - DNA, 20 bp, synthetic construct
  source 1..20: mol_type = other DNA
gcagctgcaacaccagcggc

SEQ ID NO: 3788 - DNA, 20 bp, synthetic construct
  source 1..20: mol_type = other DNA
gagatccagtagtgggaaag

SEQ ID NO: 3789 - DNA, 20 bp, synthetic construct
  source 1..20: mol_type = other DNA
cagttccttcttgactacca

SEQ ID NO: 3790 - DNA, 20 bp, synthetic construct
  source 1..20: mol_type = other DNA
tgaggaggttatcgcgcttc

SEQ ID NO: 3791 - DNA, 20 bp, synthetic construct
  source 1..20: mol_type = other DNA
gacgagctggggttccacag

SEQ ID NO: 3792 - DNA, 20 bp, synthetic construct
  source 1..20: mol_type = other DNA
gatccagctccacacagctc

SEQ ID NO: 3793 - DNA, 20 bp, synthetic construct
  source 1..20: mol_type = other DNA
ggtggcgaggggactacgga

SEQ ID NO: 3794 - DNA, 20 bp, synthetic construct
  source 1..20: mol_type = other DNA
gccaggtgagcgggcagagg

SEQ ID NO: 3795 - DNA, 20 bp, synthetic construct
  source 1..20: mol_type = other DNA
cttcctgcccgacccggcca

SEQ ID NO: 3796 - DNA, 20 bp, synthetic construct
  source 1..20: mol_type = other DNA
ctacaactgggctggcggcc

SEQ ID NO: 3797 - DNA, 20 bp, synthetic construct
  source 1..20: mol_type = other DNA
gatgtccactatgacaattg

SEQ ID NO: 3798 - DNA, 20 bp, synthetic construct
  source 1..20: mol_type = other DNA
catctgccaaagaatggccg

SEQ ID NO: 3799 - DNA, 20 bp, synthetic construct
  source 1..20: mol_type = other DNA
ccagcatgagggcctcggcc

SEQ ID NO: 3800 - DNA, 20 bp, synthetic construct
  source 1..20: mol_type = other DNA
ctggacagttcggggaggtg

SEQ ID NO: 3801 - DNA, 20 bp, synthetic construct
  source 1..20: mol_type = other DNA
tctgcaggggagctcggagc

SEQ ID NO: 3802 - DNA, 20 bp, synthetic construct
  source 1..20: mol_type = other DNA
ctcacgttcatcatggtgcc

SEQ ID NO: 3803 - DNA, 20 bp, synthetic construct
  source 1..20: mol_type = other DNA
agaaggtacctctgagatgc

SEQ ID NO: 3804 - DNA, 20 bp, synthetic construct
  source 1..20: mol_type = other DNA
tcacctgtgcatatgagctg

SEQ ID NO: 3805 - DNA, 20 bp, synthetic construct
  source 1..20: mol_type = other DNA
gccctggaggatgacgagct

SEQ ID NO: 3806 - DNA, 20 bp, synthetic construct
  source 1..20: mol_type = other DNA
ctcactctctcgcacgagga

SEQ ID NO: 3807 - DNA, 20 bp, synthetic construct
  source 1..20: mol_type = other DNA
tccaggtatttcaccgagtc

SEQ ID NO: 3808 - DNA, 20 bp, synthetic construct
  source 1..20: mol_type = other DNA
ttggccagtgccaggccctg

SEQ ID NO: 3809 - DNA, 20 bp, synthetic construct
  source 1..20: mol_type = other DNA
gggtgcgtagataatctgac

SEQ ID NO: 3810 - DNA, 20 bp, synthetic construct
  source 1..20: mol_type = other DNA
gccaccgcgtgacctgggat

SEQ ID NO: 3811 - DNA, 20 bp, synthetic construct
  source 1..20: mol_type = other DNA
acagcccacagctcctgatg

SEQ ID NO: 3812 - DNA, 20 bp, synthetic construct
  source 1..20: mol_type = other DNA
gaactgctggaactcaggaa

SEQ ID NO: 3813 - DNA, 20 bp, synthetic construct
  source 1..20: mol_type = other DNA
ttaccagcagaactctctaa

SEQ ID NO: 3814 - DNA, 20 bp, synthetic construct
  source 1..20: mol_type = other DNA
ctgaagggaagataatggaa

SEQ ID NO: 3815 - DNA, 20 bp, synthetic construct
  source 1..20: mol_type = other DNA
tttgattcgggagagctcaa

SEQ ID NO: 3816 - DNA, 20 bp, synthetic construct
  source 1..20: mol_type = other DNA
catgagtcaacgtggatggg

SEQ ID NO: 3817 - DNA, 20 bp, synthetic construct
  source 1..20: mol_type = other DNA
tgcaacaccagcggctggtt

SEQ ID NO: 3818 - DNA, 20 bp, synthetic construct
  source 1..20: mol_type = other DNA
caactacgcctgccgccgga

SEQ ID NO: 3819 - DNA, 20 bp, synthetic construct
  source 1..20: mol_type = other DNA
cggccactgtcaatagagag

SEQ ID NO: 3820 - DNA, 20 bp, synthetic construct
  source 1..20: mol_type = other DNA
ggctcgcatgcgctgctcca

SEQ ID NO: 3821 - DNA, 20 bp, synthetic construct
  source 1..20: mol_type = other DNA
tccccaccgtgtgagttcct

SEQ ID NO: 3822 - DNA, 20 bp, synthetic construct
  source 1..20: mol_type = other DNA
caaaggtgggccggtcctct

SEQ ID NO: 3823 - DNA, 20 bp, synthetic construct
  source 1..20: mol_type = other DNA
acaaactgtccagaaacatg

SEQ ID NO: 3824 - DNA, 20 bp, synthetic construct
  source 1..20: mol_type = other DNA
ggagcagccccagcccgtcg

SEQ ID NO: 3825 - DNA, 20 bp, synthetic construct
  source 1..20: mol_type = other DNA
ccatccaagatcaaccgagc

SEQ ID NO: 3826 - DNA, 20 bp, synthetic construct
  source 1..20: mol_type = other DNA
agaattgaagaagaagtgga

SEQ ID NO: 3827 - DNA, 20 bp, synthetic construct
  source 1..20: mol_type = other DNA
acccacctgcgactccattc

SEQ ID NO: 3828 - DNA, 20 bp, synthetic construct
  source 1..20: mol_type = other DNA
cagtgccatggctgctctcc

SEQ ID NO: 3829 - DNA, 20 bp, synthetic construct
  source 1..20: mol_type = other DNA
gataggagagcggccggaga

SEQ ID NO: 3830 - DNA, 20 bp, synthetic construct
  source 1..20: mol_type = other DNA
cgggagtggaaggcctgcca

SEQ ID NO: 3831 - DNA, 20 bp, synthetic construct
  source 1..20: mol_type = other DNA
ggtcaccacgagcagggctg

SEQ ID NO: 3832 - DNA, 20 bp, synthetic construct
  source 1..20: mol_type = other DNA
gaccagtcagtttccaggta

SEQ ID NO: 3833 - DNA, 20 bp, synthetic construct
  source 1..20: mol_type = other DNA
gttacctgctcggttgatct

SEQ ID NO: 3834 - DNA, 20 bp, synthetic construct
  source 1..20: mol_type = other DNA
tcaccggctgtagctgggta

SEQ ID NO: 3835 - DNA, 20 bp, synthetic construct
  source 1..20: mol_type = other DNA
ctctggaggaggaatgccaa

SEQ ID NO: 3836 - DNA, 20 bp, synthetic construct
  source 1..20: mol_type = other DNA
aagcagaagacagagtttgt

SEQ ID NO: 3837 - DNA, 20 bp, synthetic construct
  source 1..20: mol_type = other DNA
agccaccgcgtgacctggga

SEQ ID NO: 3838 - DNA, 20 bp, synthetic construct
  source 1..20: mol_type = other DNA
caccaggggtctggaagttg

SEQ ID NO: 3839 - DNA, 20 bp, synthetic construct
  source 1..20: mol_type = other DNA
agcggcagctcctggcgccc

SEQ ID NO: 3840 - DNA, 20 bp, synthetic construct
  source 1..20: mol_type = other DNA
tgtttctaggaacgccgagg

SEQ ID NO: 3841 - DNA, 20 bp, synthetic construct
  source 1..20: mol_type = other DNA
ggtagggcgtgagcttggca

SEQ ID NO: 3842 - DNA, 20 bp, synthetic construct
  source 1..20: mol_type = other DNA
caggccctccaggagctggg

SEQ ID NO: 3843 - DNA, 20 bp, synthetic construct
  source 1..20: mol_type = other DNA
ggtgaagcgcaccaacagag

SEQ ID NO: 3844 - DNA, 20 bp, synthetic construct
  source 1..20: mol_type = other DNA
cgatgtgttggagaagctgc

SEQ ID NO: 3845 - DNA, 20 bp, synthetic construct
  source 1..20: mol_type = other DNA
ccacagatccacatgggcaa

SEQ ID NO: 3846 - DNA, 20 bp, synthetic construct
  source 1..20: mol_type = other DNA
cggggcgatcctcccacctg

SEQ ID NO: 3847 - DNA, 20 bp, synthetic construct
  source 1..20: mol_type = other DNA
tgttgcactcaaaaggatca

SEQ ID NO: 3848 - DNA, 20 bp, synthetic construct
  source 1..20: mol_type = other DNA
gtaccaggtagcaggtgagt

SEQ ID NO: 3849 - DNA, 20 bp, synthetic construct
  source 1..20: mol_type = other DNA
ggccgtcccagcagtccact

SEQ ID NO: 3850 - DNA, 20 bp, synthetic construct
  source 1..20: mol_type = other DNA
aggcgtcactttcacttggg

SEQ ID NO: 3851 - DNA, 20 bp, synthetic construct
  source 1..20: mol_type = other DNA
gtaccacaggatggacgccc

SEQ ID NO: 3852 - DNA, 20 bp, synthetic construct
  source 1..20: mol_type = other DNA
tctggaaccagatggtcacc

SEQ ID NO: 3853 - DNA, 20 bp, synthetic construct
  source 1..20: mol_type = other DNA
ctcacatgagtcaacgtgga

SEQ ID NO: 3854 - DNA, 20 bp, synthetic construct
  source 1..20: mol_type = other DNA
actggccccctcgatcttgt

SEQ ID NO: 3855 - DNA, 20 bp, synthetic construct
  source 1..20: mol_type = other DNA
tggggctcaggtgtgtgaac

SEQ ID NO: 3856 - DNA, 20 bp, synthetic construct
  source 1..20: mol_type = other DNA
gtgagaagttcggcctcaag

SEQ ID NO: 3857 - DNA, 20 bp, synthetic construct
  source 1..20: mol_type = other DNA
cctgaaacgggtatttatag

SEQ ID NO: 3858 - DNA, 20 bp, synthetic construct
  source 1..20: mol_type = other DNA
gtctgcaatcttgcagctca

SEQ ID NO: 3859 - DNA, 20 bp, synthetic construct
  source 1..20: mol_type = other DNA
tcacctaagcagcatctgac

SEQ ID NO: 3860 - DNA, 20 bp, synthetic construct
  source 1..20: mol_type = other DNA
gcaaagaggtgctccaggac

SEQ ID NO: 3861 - DNA, 20 bp, synthetic construct
  source 1..20: mol_type = other DNA
tcacatgagtcaacgtggat

SEQ ID NO: 3862 - DNA, 20 bp, synthetic construct
  source 1..20: mol_type = other DNA
ctgtaaagacaaggggcatc

SEQ ID NO: 3863 - DNA, 20 bp, synthetic construct
  source 1..20: mol_type = other DNA
ttcatcaagctcagtgaccc

SEQ ID NO: 3864 - DNA, 20 bp, synthetic construct
  source 1..20: mol_type = other DNA
caagcagaagacagagtttg

SEQ ID NO: 3865 - DNA, 20 bp, synthetic construct
  source 1..20: mol_type = other DNA
ttcctgcccgacccggccac

SEQ ID NO: 3866 - DNA, 20 bp, synthetic construct
  source 1..20: mol_type = other DNA
ctttggttaacacaaagaag

SEQ ID NO: 3867 - DNA, 20 bp, synthetic construct
  source 1..20: mol_type = other DNA
ttgctccagatcgtgagagc

SEQ ID NO: 3868 - DNA, 20 bp, synthetic construct
  source 1..20: mol_type = other DNA
tggtcctatgcagtaggcag

SEQ ID NO: 3869 - DNA, 20 bp, synthetic construct
  source 1..20: mol_type = other DNA
cccttactctcttcatcaaa

SEQ ID NO: 3870 - DNA, 20 bp, synthetic construct
  source 1..20: mol_type = other DNA
gagtccattgtccactgtga

SEQ ID NO: 3871 - DNA, 20 bp, synthetic construct
  source 1..20: mol_type = other DNA
catccagatccgttatcaga

SEQ ID NO: 3872 - DNA, 20 bp, synthetic construct
  source 1..20: mol_type = other DNA
gctggtcagaacaaagtagt

SEQ ID NO: 3873 - DNA, 20 bp, synthetic construct
  source 1..20: mol_type = other DNA
acatacttctgtaatacact

SEQ ID NO: 3874 - DNA, 20 bp, synthetic construct
  source 1..20: mol_type = other DNA
gctctacgctgtggtcaccc

SEQ ID NO: 3875 - DNA, 20 bp, synthetic construct
  source 1..20: mol_type = other DNA
agcagatgaggaagacgtcc

SEQ ID NO: 3876 - DNA, 20 bp, synthetic construct
  source 1..20: mol_type = other DNA
tgaccagggcaacgaggatg

SEQ ID NO: 3877 - DNA, 20 bp, synthetic construct
  source 1..20: mol_type = other DNA
gatttcggttgtacaagccc

SEQ ID NO: 3878 - DNA, 20 bp, synthetic construct
  source 1..20: mol_type = other DNA
cccacagtgtacgagaacac

SEQ ID NO: 3879 - DNA, 20 bp, synthetic construct
  source 1..20: mol_type = other DNA
ttcctggaggaaaaagacaa

SEQ ID NO: 3880 - DNA, 20 bp, synthetic construct
  source 1..20: mol_type = other DNA
tcccatacctcatccggtag

SEQ ID NO: 3881 - DNA, 20 bp, synthetic construct
  source 1..20: mol_type = other DNA
gcatctgcgaggacgaggga

SEQ ID NO: 3882 - DNA, 20 bp, synthetic construct
  source 1..20: mol_type = other DNA
tgcccgctcacctggctcag

SEQ ID NO: 3883 - DNA, 20 bp, synthetic construct
  source 1..20: mol_type = other DNA
tagtggacatctgcatcact

SEQ ID NO: 3884 - DNA, 20 bp, synthetic construct
  source 1..20: mol_type = other DNA
tacctccctctccggctcca

SEQ ID NO: 3885 - DNA, 20 bp, synthetic construct
  source 1..20: mol_type = other DNA
agaccgagacaacaagaagg

SEQ ID NO: 3886 - DNA, 20 bp, synthetic construct
  source 1..20: mol_type = other DNA
cttcctccactgtggagagg

SEQ ID NO: 3887 - DNA, 20 bp, synthetic construct
  source 1..20: mol_type = other DNA
cagctgagcaaactgcccgt

SEQ ID NO: 3888 - DNA, 20 bp, synthetic construct
  source 1..20: mol_type = other DNA
tagtaccctgggtcggggaa

SEQ ID NO: 3889 - DNA, 20 bp, synthetic construct
  source 1..20: mol_type = other DNA
ggtggccaccaccagcacag

SEQ ID NO: 3890 - DNA, 20 bp, synthetic construct
  source 1..20: mol_type = other DNA
cagctggagaagcttgcaac

SEQ ID NO: 3891 - DNA, 20 bp, synthetic construct
  source 1..20: mol_type = other DNA
gccgccaccctccaatgacg

SEQ ID NO: 3892 - DNA, 20 bp, synthetic construct
  source 1..20: mol_type = other DNA
aaacactgaacctctgggag

SEQ ID NO: 3893 - DNA, 20 bp, synthetic construct
  source 1..20: mol_type = other DNA
ccatgtcagtctctgtcctc

SEQ ID NO: 3894 - DNA, 20 bp, synthetic construct
  source 1..20: mol_type = other DNA
ctggttccctgccaactacg

SEQ ID NO: 3895 - DNA, 20 bp, synthetic construct
  source 1..20: mol_type = other DNA
ggacagcaaggctggtggcg

SEQ ID NO: 3896 - DNA, 20 bp, synthetic construct
  source 1..20: mol_type = other DNA
aaccaggccctcttcatgac

SEQ ID NO: 3897 - DNA, 20 bp, synthetic construct
  source 1..20: mol_type = other DNA
ggccagctctgtccacttgg

SEQ ID NO: 3898 - DNA, 20 bp, synthetic construct
  source 1..20: mol_type = other DNA
ggaccccgatcgcccagaac

SEQ ID NO: 3899 - DNA, 20 bp, synthetic construct
  source 1..20: mol_type = other DNA
ctggtcagaacaaagtagtg

SEQ ID NO: 3900 - DNA, 20 bp, synthetic construct
  source 1..20: mol_type = other DNA
taatgcagagtgaggttggt

SEQ ID NO: 3901 - DNA, 20 bp, synthetic construct
  source 1..20: mol_type = other DNA
agcccacaggcattgcagac

SEQ ID NO: 3902 - DNA, 20 bp, synthetic construct
  source 1..20: mol_type = other DNA
ccatagacgaggaacctaca

SEQ ID NO: 3903 - DNA, 20 bp, synthetic construct
  source 1..20: mol_type = other DNA
caaccagcgccggaggggca

SEQ ID NO: 3904 - DNA, 20 bp, synthetic construct
  source 1..20: mol_type = other DNA
tcctcccaccacggcttctg

SEQ ID NO: 3905 - DNA, 20 bp, synthetic construct
  source 1..20: mol_type = other DNA
gctccagacacaggagatgt

SEQ ID NO: 3906 - DNA, 20 bp, synthetic construct
  source 1..20: mol_type = other DNA
atgacgagaacaccaagctc

SEQ ID NO: 3907 - DNA, 20 bp, synthetic construct
  source 1..20: mol_type = other DNA
ttgagcgcctcacacagctg

SEQ ID NO: 3908 - DNA, 20 bp, synthetic construct
  source 1..20: mol_type = other DNA
tggcggccaggatggttctt

SEQ ID NO: 3909 - DNA, 20 bp, synthetic construct
  source 1..20: mol_type = other DNA
ccacagctgctcatccgaaa

SEQ ID NO: 3910 - DNA, 20 bp, synthetic construct
  source 1..20: mol_type = other DNA
ccgggacatgtcatccttcc

SEQ ID NO: 3911 - DNA, 20 bp, synthetic construct
  source 1..20: mol_type = other DNA
gacggcaagttcctgtatgt

SEQ ID NO: 3912 - DNA, 20 bp, synthetic construct
  source 1..20: mol_type = other DNA
caccgtgtctgttttcacca

SEQ ID NO: 3913 - DNA, 20 bp, synthetic construct
  source 1..20: mol_type = other DNA
gtttccgcagaataaaaagc

SEQ ID NO: 3914 - DNA, 20 bp, synthetic construct
  source 1..20: mol_type = other DNA
cagacccctgactatgaaga

SEQ ID NO: 3915 - DNA, 20 bp, synthetic construct
  source 1..20: mol_type = other DNA
cattgccggctgtgtcccag

SEQ ID NO: 3916 - DNA, 20 bp, synthetic construct
  source 1..20: mol_type = other DNA
ccatctccatgaccagcatg

SEQ ID NO: 3917 - DNA, 20 bp, synthetic construct
  source 1..20: mol_type = other DNA
caaggtaaggctactccagg

SEQ ID NO: 3918 - DNA, 20 bp, synthetic construct
  source 1..20: mol_type = other DNA
gtggcttcattttcccatgg

SEQ ID NO: 3919 - DNA, 20 bp, synthetic construct
  source 1..20: mol_type = other DNA
ctaccgggaaatcctcgtga

SEQ ID NO: 3920 - DNA, 20 bp, synthetic construct
  source 1..20: mol_type = other DNA
ctccatcagcatggcgtcgg

SEQ ID NO: 3921 - DNA, 20 bp, synthetic construct
  source 1..20: mol_type = other DNA
agccttaccttgcgagagaa

SEQ ID NO: 3922 - DNA, 20 bp, synthetic construct
  source 1..20: mol_type = other DNA
aagcctcaggcaagccccga

SEQ ID NO: 3923 - DNA, 20 bp, synthetic construct
  source 1..20: mol_type = other DNA
caatgagccgcacgatgtag

SEQ ID NO: 3924 - DNA, 20 bp, synthetic construct
  source 1..20: mol_type = other DNA
gcccaggatgtcagagccaa

SEQ ID NO: 3925 - DNA, 20 bp, synthetic construct
  source 1..20: mol_type = other DNA
gctgccagaaattgtttggt

SEQ ID NO: 3926 - DNA, 20 bp, synthetic construct
  source 1..20: mol_type = other DNA
ctcgtagatgggcaccgtgt

SEQ ID NO: 3927 - DNA, 20 bp, synthetic construct
  source 1..20: mol_type = other DNA
gttcaggaatgagttatggt

SEQ ID NO: 3928 - DNA, 20 bp, synthetic construct
  source 1..20: mol_type = other DNA
ctgaagctggtggagcggct

SEQ ID NO: 3929 - DNA, 20 bp, synthetic construct
  source 1..20: mol_type = other DNA
gacagccattctgtatgttg

SEQ ID NO: 3930 - DNA, 20 bp, synthetic construct
  source 1..20: mol_type = other DNA
tggacattctacataccaag

SEQ ID NO: 3931 - DNA, 20 bp, synthetic construct
  source 1..20: mol_type = other DNA
acaccctgtctgctctgtcc

SEQ ID NO: 3932 - DNA, 20 bp, synthetic construct
  source 1..20: mol_type = other DNA
ttttgaaggtaggtgacctg

SEQ ID NO: 3933 - DNA, 20 bp, synthetic construct
  source 1..20: mol_type = other DNA
tgtaaagacaaggggcatca

SEQ ID NO: 3934 - DNA, 20 bp, synthetic construct
  source 1..20: mol_type = other DNA
aactatcaccaacataatgg

SEQ ID NO: 3935 - DNA, 20 bp, synthetic construct
  source 1..20: mol_type = other DNA
cactggagaaggcactgtct

SEQ ID NO: 3936 - DNA, 20 bp, synthetic construct
  source 1..20: mol_type = other DNA
cagatgaggaagacgtcctg

SEQ ID NO: 3937 - DNA, 20 bp, synthetic construct
  source 1..20: mol_type = other DNA
gtcccaggtgagccctccgc

SEQ ID NO: 3938 - DNA, 20 bp, synthetic construct
  source 1..20: mol_type = other DNA
ccccaccgtgtgagttcctg

SEQ ID NO: 3939 - DNA, 20 bp, synthetic construct
  source 1..20: mol_type = other DNA
tgaaggagcagggactggaa

SEQ ID NO: 3940 - DNA, 20 bp, synthetic construct
  source 1..20: mol_type = other DNA
ccatgagtgcaacttgcctg

SEQ ID NO: 3941 - DNA, 20 bp, synthetic construct
  source 1..20: mol_type = other DNA
tgcagttctcacacactgtg

SEQ ID NO: 3942 - DNA, 20 bp, synthetic construct
  source 1..20: mol_type = other DNA
tgatgatgtagatgggctcc

SEQ ID NO: 3943 - DNA, 20 bp, synthetic construct
  source 1..20: mol_type = other DNA
ttctactcttcctcctgtag

SEQ ID NO: 3944 - DNA, 20 bp, synthetic construct
  source 1..20: mol_type = other DNA
ccacagctcctgatggggta

SEQ ID NO: 3945 - DNA, 20 bp, synthetic construct
  source 1..20: mol_type = other DNA
aggagctgtaccaactcatg

SEQ ID NO: 3946 - DNA, 20 bp, synthetic construct
  source 1..20: mol_type = other DNA
ccccgatcgcccagaacagg

SEQ ID NO: 3947 - DNA, 20 bp, synthetic construct
  source 1..20: mol_type = other DNA
ccacagtgtacgagaacaca

SEQ ID NO: 3948 - DNA, 20 bp, synthetic construct
  source 1..20: mol_type = other DNA
ggaagagtgcctcagggcag

SEQ ID NO: 3949 - DNA, 20 bp, synthetic construct
  source 1..20: mol_type = other DNA
aacgagtacacagccaggga

SEQ ID NO: 3950 - DNA, 20 bp, synthetic construct
  source 1..20: mol_type = other DNA
ggcggccggtccaccaggat

SEQ ID NO: 3951 - DNA, 20 bp, synthetic construct
  source 1..20: mol_type = other DNA
tgctccacggtcaggaagtc

SEQ ID NO: 3952 - DNA, 20 bp, synthetic construct
  source 1..20: mol_type = other DNA
agccagttgacgcagcagtc

SEQ ID NO: 3953 - DNA, 20 bp, synthetic construct
  source 1..20: mol_type = other DNA
ctcctagaaggcggaccaca

SEQ ID NO: 3954 - DNA, 20 bp, synthetic construct
  source 1..20: mol_type = other DNA
tcctggaggaaaaagacaag

SEQ ID NO: 3955 - DNA, 20 bp, synthetic construct
  source 1..20: mol_type = other DNA
gggcagctgcaggaataaga

SEQ ID NO: 3956 - DNA, 20 bp, synthetic construct
  source 1..20: mol_type = other DNA
tcccactcgtcctcccacca

SEQ ID NO: 3957 - DNA, 20 bp, synthetic construct
  source 1..20: mol_type = other DNA
aaaacactgaacctctggga

SEQ ID NO: 3958 - DNA, 20 bp, synthetic construct
  source 1..20: mol_type = other DNA
gtgcaggcggccggtccacc

SEQ ID NO: 3959 - DNA, 20 bp, synthetic construct
  source 1..20: mol_type = other DNA
tctgtggcttcattttccca

SEQ ID NO: 3960 - DNA, 20 bp, synthetic construct
  source 1..20: mol_type = other DNA
ctcggaggaagcgcatgttg

SEQ ID NO: 3961 - DNA, 20 bp, synthetic construct
  source 1..20: mol_type = other DNA
accaactcatgaggctgtgc

SEQ ID NO: 3962 - DNA, 20 bp, synthetic construct
  source 1..20: mol_type = other DNA
gcctcgccctagaaaaggag

SEQ ID NO: 3963 - DNA, 20 bp, synthetic construct
  source 1..20: mol_type = other DNA
cagaatgtggagaagcaaga

SEQ ID NO: 3964 - DNA, 20 bp, synthetic construct
  source 1..20: mol_type = other DNA
ctggaagggcacaaaggtca

SEQ ID NO: 3965 - DNA, 20 bp, synthetic construct
  source 1..20: mol_type = other DNA
gcacatcaagctgcattccg

SEQ ID NO: 3966 - DNA, 20 bp, synthetic construct
  source 1..20: mol_type = other DNA
ggtgtagatgacctgtgacg

SEQ ID NO: 3967 - DNA, 20 bp, synthetic construct
  source 1..20: mol_type = other DNA
ggagaagctgcaggtgaagg

SEQ ID NO: 3968 - DNA, 20 bp, synthetic construct
  source 1..20: mol_type = other DNA
atgagtcaacgtggatgggt

SEQ ID NO: 3969 - DNA, 20 bp, synthetic construct
  source 1..20: mol_type = other DNA
ctccactcacccaggaagga

SEQ ID NO: 3970 - DNA, 20 bp, synthetic construct
  source 1..20: mol_type = other DNA
cccttccatggcattgacgc

SEQ ID NO: 3971 - DNA, 20 bp, synthetic construct
  source 1..20: mol_type = other DNA
ggggcgatcctcccacctgt

SEQ ID NO: 3972 - DNA, 20 bp, synthetic construct
  source 1..20: mol_type = other DNA
ggaggttccctgcagtgacc

SEQ ID NO: 3973 - DNA, 20 bp, synthetic construct
  source 1..20: mol_type = other DNA
gccagcttcttgtgctgtag

SEQ ID NO: 3974 - DNA, 20 bp, synthetic construct
  source 1..20: mol_type = other DNA
cccttccagtgcaatcagtg

SEQ ID NO: 3975 - DNA, 20 bp, synthetic construct
  source 1..20: mol_type = other DNA
aggccccgcactgattgcac

SEQ ID NO: 3976 - DNA, 20 bp, synthetic construct
  source 1..20: mol_type = other DNA
ggaaggcatacctggaagga

SEQ ID NO: 3977 - DNA, 20 bp, synthetic construct
  source 1..20: mol_type = other DNA
gttggacattctacatacca

SEQ ID NO: 3978 - DNA, 20 bp, synthetic construct
  source 1..20: mol_type = other DNA
cggtcaccacgagcagggct

SEQ ID NO: 3979 - DNA, 20 bp, synthetic construct
  source 1..20: mol_type = other DNA
ccctgctcgtggtgaccgaa

SEQ ID NO: 3980 - DNA, 20 bp, synthetic construct
  source 1..20: mol_type = other DNA
tctaccagcttatttaggga

SEQ ID NO: 3981 - DNA, 20 bp, synthetic construct
  source 1..20: mol_type = other DNA
gcagcggtagccctgataga

SEQ ID NO: 3982 - DNA, 20 bp, synthetic construct
  source 1..20: mol_type = other DNA
gtggcagacctacagtgtag

SEQ ID NO: 3983 - DNA, 20 bp, synthetic construct
  source 1..20: mol_type = other DNA
gtgcagatgaagctggaggt

SEQ ID NO: 3984 - DNA, 20 bp, synthetic construct
  source 1..20: mol_type = other DNA
catccagacacatgcccagc

SEQ ID NO: 3985 - DNA, 20 bp, synthetic construct
  source 1..20: mol_type = other DNA
tggtcatccctacgggttga

SEQ ID NO: 3986 - DNA, 20 bp, synthetic construct
  source 1..20: mol_type = other DNA
gccgttgtcgacgacgagcg

SEQ ID NO: 3987 - DNA, 20 bp, synthetic construct
  source 1..20: mol_type = other DNA
caccctgaaaggaagtgaaa

SEQ ID NO: 3988 - DNA, 20 bp, synthetic construct
  source 1..20: mol_type = other DNA
gcttcattttcccatggtgg

SEQ ID NO: 3989 - DNA, 20 bp, synthetic construct
  source 1..20: mol_type = other DNA
ggcttcaaagagagggtgag

SEQ ID NO: 3990 - DNA, 20 bp, synthetic construct
  source 1..20: mol_type = other DNA
tccagcaggtagcagagttt

SEQ ID NO: 3991 - DNA, 20 bp, synthetic construct
  source 1..20: mol_type = other DNA
caagtaaggagactggggag

SEQ ID NO: 3992 - DNA, 20 bp, synthetic construct
  source 1..20: mol_type = other DNA
atgcagttctcacacactgt

SEQ ID NO: 3993 - DNA, 20 bp, synthetic construct
  source 1..20: mol_type = other DNA
ttgtggcagacctacagtgt

SEQ ID NO: 3994 - DNA, 20 bp, synthetic construct
  source 1..20: mol_type = other DNA
cctcctccagagtgtggttg

SEQ ID NO: 3995 - DNA, 20 bp, synthetic construct
  source 1..20: mol_type = other DNA
ggaactgctggaactcagga

SEQ ID NO: 3996 - DNA, 20 bp, synthetic construct
  source 1..20: mol_type = other DNA
tctacaagtgagtgccagtg

SEQ ID NO: 3997 - DNA, 20 bp, synthetic construct
  source 1..20: mol_type = other DNA
acggcctcgtgagtacaagg

SEQ ID NO: 3998 - DNA, 20 bp, synthetic construct
  source 1..20: mol_type = other DNA
tcacctccagcttccacgtc

SEQ ID NO: 3999 - DNA, 20 bp, synthetic construct
  source 1..20: mol_type = other DNA
gacatgggcaaggtacgagt

SEQ ID NO: 4000 - DNA, 20 bp, synthetic construct
  source 1..20: mol_type = other DNA
tgaggatgcctctcttgctc

SEQ ID NO: 4001 - DNA, 20 bp, synthetic construct
  source 1..20: mol_type = other DNA
gcaaagtccaatgcagccag

SEQ ID NO: 4002 - DNA, 20 bp, synthetic construct
  source 1..20: mol_type = other DNA
ggcaagaggtgagcaccggg

SEQ ID NO: 4003 - DNA, 20 bp, synthetic construct
  source 1..20: mol_type = other DNA
ccccatcccaggtcacgcgg

SEQ ID NO: 4004 - DNA, 20 bp, synthetic construct
  source 1..20: mol_type = other DNA
ttcagtgaaagcagcaaaga

SEQ ID NO: 4005 - DNA, 20 bp, synthetic construct
  source 1..20: mol_type = other DNA
tgctatgttccatctcccag

SEQ ID NO: 4006 - DNA, 20 bp, synthetic construct
  source 1..20: mol_type = other DNA
cataccatcatcttcatcct

SEQ ID NO: 4007 - DNA, 20 bp, synthetic construct
  source 1..20: mol_type = other DNA
accagattatgaatcactgc

SEQ ID NO: 4008 - DNA, 20 bp, synthetic construct
  source 1..20: mol_type = other DNA
acctgtaggcagacaaagaa

SEQ ID NO: 4009 - DNA, 20 bp, synthetic construct
  source 1..20: mol_type = other DNA
ggggcagctgcaggaataag

SEQ ID NO: 4010 - DNA, 20 bp, synthetic construct
  source 1..20: mol_type = other DNA
agtcctccagcacactgcgc

SEQ ID NO: 4011 - DNA, 20 bp, synthetic construct
  source 1..20: mol_type = other DNA
cgttgcgggccgccaggtca

SEQ ID NO: 4012 - DNA, 20 bp, synthetic construct
  source 1..20: mol_type = other DNA
ggtgtcagacaccagaatgt

SEQ ID NO: 4013 - DNA, 20 bp, synthetic construct
  source 1..20: mol_type = other DNA
gcttcatctgcacgtcctcc

SEQ ID NO: 4014 - DNA, 20 bp, synthetic construct
  source 1..20: mol_type = other DNA
tgaactggcccaggccctcc

SEQ ID NO: 4015 - DNA, 20 bp, synthetic construct
  source 1..20: mol_type = other DNA
ccgtgcccttgccatccagt

SEQ ID NO: 4016 - DNA, 20 bp, synthetic construct
  source 1..20: mol_type = other DNA
ttctcaccgaaaagttcccg

SEQ ID NO: 4017 - DNA, 20 bp, synthetic construct
  source 1..20: mol_type = other DNA
caggtaggaggtctcagact

SEQ ID NO: 4018 - DNA, 20 bp, synthetic construct
  source 1..20: mol_type = other DNA
aggggaacaggacctggtcc

SEQ ID NO: 4019 - DNA, 20 bp, synthetic construct
  source 1..20: mol_type = other DNA
ctgcagggctggggagcggc

SEQ ID NO: 4020 - DNA, 20 bp, synthetic construct
  source 1..20: mol_type = other DNA
aggcctgtcagatgctgctt

SEQ ID NO: 4021 - DNA, 20 bp, synthetic construct
  source 1..20: mol_type = other DNA
gctcggcctcctcacgcgtc

SEQ ID NO: 4022 - DNA, 20 bp, synthetic construct
  source 1..20: mol_type = other DNA
gtgtacaggattgttcctga

SEQ ID NO: 4023 - DNA, 20 bp, synthetic construct
  source 1..20: mol_type = other DNA
gctctcccgcatctacccca

SEQ ID NO: 4024 - DNA, 20 bp, synthetic construct
  source 1..20: mol_type = other DNA
ctgctccacggtcaggaagt

SEQ ID NO: 4025 - DNA, 20 bp, synthetic construct
  source 1..20: mol_type = other DNA
tcaggtgtgtgaactggccc

SEQ ID NO: 4026 - DNA, 20 bp, synthetic construct
  source 1..20: mol_type = other DNA
ccatgcggtagcctcgctcc

SEQ ID NO: 4027 - DNA, 20 bp, synthetic construct
  source 1..20: mol_type = other DNA
tgaaggctccttctttgccc

SEQ ID NO: 4028 - DNA, 20 bp, synthetic construct
  source 1..20: mol_type = other DNA
ccatcatcttcatcctggga

SEQ ID NO: 4029 - DNA, 20 bp, synthetic construct
  source 1..20: mol_type = other DNA
cttgcagatggtgaactcca

SEQ ID NO: 4030 - DNA, 20 bp, synthetic construct
  source 1..20: mol_type = other DNA
ccgcttgccctgctcgatga

SEQ ID NO: 4031 - DNA, 20 bp, synthetic construct
  source 1..20: mol_type = other DNA
gtgccagagctgtgtggagc

SEQ ID NO: 4032 - DNA, 20 bp, synthetic construct
  source 1..20: mol_type = other DNA
aaccagcgccggaggggcaa

SEQ ID NO: 4033 - DNA, 20 bp, synthetic construct
  source 1..20: mol_type = other DNA
tcggttgtacaagccccggc

SEQ ID NO: 4034 - DNA, 20 bp, synthetic construct
  source 1..20: mol_type = other DNA
aaacagtgcccaagcctggt

SEQ ID NO: 4035 - DNA, 20 bp, synthetic construct
  source 1..20: mol_type = other DNA
cccacagctcctgatggggt

SEQ ID NO: 4036 - DNA, 20 bp, synthetic construct
  source 1..20: mol_type = other DNA
gtaggagcctgggaaagaga

SEQ ID NO: 4037 - DNA, 20 bp, synthetic construct
  source 1..20: mol_type = other DNA
tcaccatcaagtcagatgtg

SEQ ID NO: 4038 - DNA, 20 bp, synthetic construct
  source 1..20: mol_type = other DNA
tgctgcagccaagcaccatg

SEQ ID NO: 4039 - DNA, 20 bp, synthetic construct
  source 1..20: mol_type = other DNA
accccagctcgtcatcctcc

SEQ ID NO: 4040 - DNA, 20 bp, synthetic construct
  source 1..20: mol_type = other DNA
cgcaggcgcgtcttccaggt

SEQ ID NO: 4041 - DNA, 20 bp, synthetic construct
  source 1..20: mol_type = other DNA
ctcgtagatgggcacagtgt

SEQ ID NO: 4042 - DNA, 20 bp, synthetic construct
  source 1..20: mol_type = other DNA
cttagcaggaaggtgcctgg

SEQ ID NO: 4043 - DNA, 20 bp, synthetic construct
  source 1..20: mol_type = other DNA
ctgtggaagacacagagtga

SEQ ID NO: 4044 - DNA, 20 bp, synthetic construct
  source 1..20: mol_type = other DNA
gctccaggcatgtgagagga

SEQ ID NO: 4045 - DNA, 20 bp, synthetic construct
  source 1..20: mol_type = other DNA
ttcttgtaggtgtgctgatg

SEQ ID NO: 4046 - DNA, 20 bp, synthetic construct
  source 1..20: mol_type = other DNA
actgaaagagaaaacctctg

SEQ ID NO: 4047 - DNA, 20 bp, synthetic construct
  source 1..20: mol_type = other DNA
ccccggtcaggtacctggat

SEQ ID NO: 4048 - DNA, 20 bp, synthetic construct
  source 1..20: mol_type = other DNA
gctgccaggtgagcccactc

SEQ ID NO: 4049 - DNA, 20 bp, synthetic construct
  source 1..20: mol_type = other DNA
ccagctgtccattgagaacc

SEQ ID NO: 4050 - DNA, 20 bp, synthetic construct
  source 1..20: mol_type = other DNA
caccaggccctccaggagct

SEQ ID NO: 4051 - DNA, 20 bp, synthetic construct
  source 1..20: mol_type = other DNA
accgtgcccttgccatccag

SEQ ID NO: 4052 - DNA, 20 bp, synthetic construct
  source 1..20: mol_type = other DNA
cttacattctctcttctgtc

SEQ ID NO: 4053 - DNA, 20 bp, synthetic construct
  source 1..20: mol_type = other DNA
ccatgccttctgcaatctgc

SEQ ID NO: 4054 - DNA, 20 bp, synthetic construct
  source 1..20: mol_type = other DNA
ggcgctcgatgggaaagtgg

SEQ ID NO: 4055 - DNA, 20 bp, synthetic construct
  source 1..20: mol_type = other DNA
ccaggtgagtgggaaactgg

SEQ ID NO: 4056 - DNA, 20 bp, synthetic construct
  source 1..20: mol_type = other DNA
gtcctaccagcaggcagacg

SEQ ID NO: 4057 - DNA, 20 bp, synthetic construct
  source 1..20: mol_type = other DNA
ggtcctatgcagtaggcagg

SEQ ID NO: 4058 - DNA, 20 bp, synthetic construct
  source 1..20: mol_type = other DNA
cactgagccaggtcctgggg

SEQ ID NO: 4059 - DNA, 20 bp, synthetic construct
  source 1..20: mol_type = other DNA
gagatgctgccgtagaagaa

SEQ ID NO: 4060 - DNA, 20 bp, synthetic construct
  source 1..20: mol_type = other DNA
tgtccacttaatgggaaact

SEQ ID NO: 4061 - DNA, 20 bp, synthetic construct
  source 1..20: mol_type = other DNA
tcctcccacctgtggggcgt

SEQ ID NO: 4062 - DNA, 20 bp, synthetic construct
  source 1..20: mol_type = other DNA
attgcagacagggtccccat

SEQ ID NO: 4063 - DNA, 20 bp, synthetic construct
  source 1..20: mol_type = other DNA
tccacagaccggcccccctc

SEQ ID NO: 4064 - DNA, 20 bp, synthetic construct
  source 1..20: mol_type = other DNA
caggtgagcgggcagaggtg

SEQ ID NO: 4065 - DNA, 20 bp, synthetic construct
  source 1..20: mol_type = other DNA
gcgacagctctgatcggtct

SEQ ID NO: 4066 - DNA, 20 bp, synthetic construct
  source 1..20: mol_type = other DNA
gctgcagccaagcaccatgc

SEQ ID NO: 4067 - DNA, 20 bp, synthetic construct
  source 1..20: mol_type = other DNA
gtacctgcaaagagacacca

SEQ ID NO: 4068 - DNA, 20 bp, synthetic construct
  source 1..20: mol_type = other DNA
gccgtcccagcagtccactg

SEQ ID NO: 4069 - DNA, 20 bp, synthetic construct
  source 1..20: mol_type = other DNA
tgagccaggtcctggggagg

SEQ ID NO: 4070 - DNA, 20 bp, synthetic construct
  source 1..20: mol_type = other DNA
ccacagcagcctgacgcgtg

SEQ ID NO: 4071 - DNA, 20 bp, synthetic construct
  source 1..20: mol_type = other DNA
accaccatcagaatcccgcc

SEQ ID NO: 4072 - DNA, 20 bp, synthetic construct
  source 1..20: mol_type = other DNA
gacagcggcacctacctctg

SEQ ID NO: 4073 - DNA, 20 bp, synthetic construct
  source 1..20: mol_type = other DNA
gaagccctacaaggcaggcg

SEQ ID NO: 4074 - DNA, 20 bp, synthetic construct
  source 1..20: mol_type = other DNA
catccggtagtggagccgga

SEQ ID NO: 4075 - DNA, 20 bp, synthetic construct
  source 1..20: mol_type = other DNA
caacttccagacccctggtg

SEQ ID NO: 4076 - DNA, 20 bp, synthetic construct
  source 1..20: mol_type = other DNA
aagcctatgctcgctgcctg

SEQ ID NO: 4077 - DNA, 20 bp, synthetic construct
  source 1..20: mol_type = other DNA
cagcaggttggagatttctg

SEQ ID NO: 4078 - DNA, 20 bp, synthetic construct
  source 1..20: mol_type = other DNA
gcccgacatctgccaaagaa

SEQ ID NO: 4079 - DNA, 20 bp, synthetic construct
  source 1..20: mol_type = other DNA
tgcactggtatctggaacct

SEQ ID NO: 4080 - DNA, 20 bp, synthetic construct
  source 1..20: mol_type = other DNA
ggtagagattggctgcgcca

SEQ ID NO: 4081 - DNA, 20 bp, synthetic construct
  source 1..20: mol_type = other DNA
gcccaccgcactcgctgttg

SEQ ID NO: 4082 - DNA, 20 bp, synthetic construct
  source 1..20: mol_type = other DNA
ccaggttctgaatcacctcc

SEQ ID NO: 4083 - DNA, 20 bp, synthetic construct
  source 1..20: mol_type = other DNA
cacagtgtacgagaacacag

SEQ ID NO: 4084 - DNA, 20 bp, synthetic construct
  source 1..20: mol_type = other DNA
ttctctctggaagggcacaa

SEQ ID NO: 4085 - DNA, 20 bp, synthetic construct
  source 1..20: mol_type = other DNA
gccatcaacatggccaggat

SEQ ID NO: 4086 - DNA, 20 bp, synthetic construct
  source 1..20: mol_type = other DNA
acttcagcagacacaggctg

SEQ ID NO: 4087 - DNA, 20 bp, synthetic construct
  source 1..20: mol_type = other DNA
actgtccagaaacatgtgga

SEQ ID NO: 4088 - DNA, 20 bp, synthetic construct
  source 1..20: mol_type = other DNA
gtttattatcagtgcgtcca

SEQ ID NO: 4089 - DNA, 20 bp, synthetic construct
  source 1..20: mol_type = other DNA
cagggctggggagaaggtgg

SEQ ID NO: 4090 - DNA, 20 bp, synthetic construct
  source 1..20: mol_type = other DNA
cgctgtgggttgtgaggtca

SEQ ID NO: 4091 - DNA, 20 bp, synthetic construct
  source 1..20: mol_type = other DNA
tacagcgcaggggcacctgc

SEQ ID NO: 4092 - DNA, 20 bp, synthetic construct
  source 1..20: mol_type = other DNA
gcgggagatccagcagacgg

SEQ ID NO: 4093 - DNA, 20 bp, synthetic construct
  source 1..20: mol_type = other DNA
tcaaaggtgggccggtcctc

SEQ ID NO: 4094 - DNA, 20 bp, synthetic construct
  source 1..20: mol_type = other DNA
cgacagctctgatcggtctc

SEQ ID NO: 4095 - DNA, 20 bp, synthetic construct
  source 1..20: mol_type = other DNA
cagcaaacacctggaccgtg

SEQ ID NO: 4096 - DNA, 20 bp, synthetic construct
  source 1..20: mol_type = other DNA
cgctcctgcgccacggaggt

SEQ ID NO: 4097 - DNA, 20 bp, synthetic construct
  source 1..20: mol_type = other DNA
agttgtcagggcgcaccatg

SEQ ID NO: 4098 - DNA, 20 bp, synthetic construct
  source 1..20: mol_type = other DNA
acggcaagttcctgtatgtg

SEQ ID NO: 4099 - DNA, 20 bp, synthetic construct
  source 1..20: mol_type = other DNA
ggacacctggtgcagcagct

SEQ ID NO: 4100 - DNA, 20 bp, synthetic construct
  source 1..20: mol_type = other DNA
cggtatgttatgcaaggctg

SEQ ID NO: 4101 - DNA, 20 bp, synthetic construct
  source 1..20: mol_type = other DNA
gcgtcctcaggtggccagtg

SEQ ID NO: 4102 - DNA, 20 bp, synthetic construct
  source 1..20: mol_type = other DNA
cacttactgtctccgctgcc

SEQ ID NO: 4103 - DNA, 20 bp, synthetic construct
  source 1..20: mol_type = other DNA
ctctcttcatcaaagggaac

SEQ ID NO: 4104 - DNA, 20 bp, synthetic construct
  source 1..20: mol_type = other DNA
ttacgttatagagctggttc

SEQ ID NO: 4105 - DNA, 20 bp, synthetic construct
  source 1..20: mol_type = other DNA
ggccatcaaggtgctgaagc

SEQ ID NO: 4106 - DNA, 20 bp, synthetic construct
  source 1..20: mol_type = other DNA
ccctggaggatgacgagctg

SEQ ID NO: 4107 - DNA, 20 bp, synthetic construct
  source 1..20: mol_type = other DNA
cctgaagaacatgctgtccc

SEQ ID NO: 4108 - DNA, 20 bp, synthetic construct
  source 1..20: mol_type = other DNA
gccctttcgctcagaggtcc

SEQ ID NO: 4109 - DNA, 20 bp, synthetic construct
  source 1..20: mol_type = other DNA
gatggcctcctccatctgca

SEQ ID NO: 4110 - DNA, 20 bp, synthetic construct
  source 1..20: mol_type = other DNA
cgggacttcgaccagaacca

SEQ ID NO: 4111 - DNA, 20 bp, synthetic construct
  source 1..20: mol_type = other DNA
gcgctccaagatggacaggt

SEQ ID NO: 4112 - DNA, 20 bp, synthetic construct
  source 1..20: mol_type = other DNA
tgagcactccaggtagccct

SEQ ID NO: 4113 - DNA, 20 bp, synthetic construct
  source 1..20: mol_type = other DNA
ggagtatctgaagctgaagg

SEQ ID NO: 4114 - DNA, 20 bp, synthetic construct
  source 1..20: mol_type = other DNA
acggtatgttatgcaaggct

SEQ ID NO: 4115 - DNA, 20 bp, synthetic construct
  source 1..20: mol_type = other DNA
ccacacccctgcagattgag

SEQ ID NO: 4116 - DNA, 20 bp, synthetic construct
  source 1..20: mol_type = other DNA
catagagtcacctggaatct

SEQ ID NO: 4117 - DNA, 20 bp, synthetic construct
  source 1..20: mol_type = other DNA
agaaggaactgctggaactc

SEQ ID NO: 4118 - DNA, 20 bp, synthetic construct
  source 1..20: mol_type = other DNA
ctgtccagaaacatgtggaa

SEQ ID NO: 4119 - DNA, 20 bp, synthetic construct
  source 1..20: mol_type = other DNA
agtccaggccgctgtcgtgg

SEQ ID NO: 4120 - DNA, 20 bp, synthetic construct
  source 1..20: mol_type = other DNA
cactcaccgtggtgggtcgg

SEQ ID NO: 4121 - DNA, 20 bp, synthetic construct
  source 1..20: mol_type = other DNA
tgttcatactcacttcctaa

SEQ ID NO: 4122 - DNA, 20 bp, synthetic construct
  source 1..20: mol_type = other DNA
catctggaagtcatgcccgt

SEQ ID NO: 4123 - DNA, 20 bp, synthetic construct
  source 1..20: mol_type = other DNA
cgcaggtttcgggaggccca

SEQ ID NO: 4124 - DNA, 20 bp, synthetic construct
  source 1..20: mol_type = other DNA
cggaagcggcagtcctggcc

SEQ ID NO: 4125 - DNA, 20 bp, synthetic construct
  source 1..20: mol_type = other DNA
gctcatctactgcctgaagg

SEQ ID NO: 4126 - DNA, 20 bp, synthetic construct
  source 1..20: mol_type = other DNA
gttggagaagctgcaggtga

SEQ ID NO: 4127 - DNA, 20 bp, synthetic construct
  source 1..20: mol_type = other DNA
accagatcgagtgagtgctc

SEQ ID NO: 4128 - DNA, 20 bp, synthetic construct
  source 1..20: mol_type = other DNA
agaacttaccagccttcgct

SEQ ID NO: 4129 - DNA, 20 bp, synthetic construct
  source 1..20: mol_type = other DNA
acggaagcggcagtcctggc

SEQ ID NO: 4130 - DNA, 20 bp, synthetic construct
  source 1..20: mol_type = other DNA
ttcccatcaatgagcagaag

SEQ ID NO: 4131 - DNA, 20 bp, synthetic construct
  source 1..20: mol_type = other DNA
gagatggagactttatatgc

SEQ ID NO: 4132 - DNA, 20 bp, synthetic construct
  source 1..20: mol_type = other DNA
gagtggctagaaaatataga

SEQ ID NO: 4133 - DNA, 20 bp, synthetic construct
  source 1..20: mol_type = other DNA
ctccctgcagggctggggag

SEQ ID NO: 4134 - DNA, 20 bp, synthetic construct
  source 1..20: mol_type = other DNA
tccctccatgtggccgacat

SEQ ID NO: 4135 - DNA, 20 bp, synthetic construct
  source 1..20: mol_type = other DNA
cctctgccgcagcctcgagg

SEQ ID NO: 4136 - DNA, 20 bp, synthetic construct
  source 1..20: mol_type = other DNA
gctggccctggatgccatga

SEQ ID NO: 4137 - DNA, 20 bp, synthetic construct
  source 1..20: mol_type = other DNA
gggtccaggacagagcagac

SEQ ID NO: 4138 - DNA, 20 bp, synthetic construct
  source 1..20: mol_type = other DNA
gctctctgagaacattcctg

SEQ ID NO: 4139 - DNA, 20 bp, synthetic construct
  source 1..20: mol_type = other DNA
taccaccatcagaatcccgc

SEQ ID NO: 4140 - DNA, 20 bp, synthetic construct
  source 1..20: mol_type = other DNA
cttaaggcacaggaactgtg

SEQ ID NO: 4141 - DNA, 20 bp, synthetic construct
  source 1..20: mol_type = other DNA
gagccccatcccaggtcacg

SEQ ID NO: 4142 - DNA, 20 bp, synthetic construct
  source 1..20: mol_type = other DNA
tcctgcctcgtcacaacaac

SEQ ID NO: 4143 - DNA, 20 bp, synthetic construct
  source 1..20: mol_type = other DNA
atccagacacatgcccagca

SEQ ID NO: 4144 - DNA, 20 bp, synthetic construct
  source 1..20: mol_type = other DNA
ctctcaggcatggagtcctg

SEQ ID NO: 4145 - DNA, 20 bp, synthetic construct
  source 1..20: mol_type = other DNA
actcaccgtggtgggtcgga

SEQ ID NO: 4146 - DNA, 20 bp, synthetic construct
  source 1..20: mol_type = other DNA
cataccaataatgcagagtg

SEQ ID NO: 4147 - DNA, 20 bp, synthetic construct
  source 1..20: mol_type = other DNA
acgcactcatgagtgactgc

SEQ ID NO: 4148 - DNA, 20 bp, synthetic construct
  source 1..20: mol_type = other DNA
cggcctcgtgagtacaagga

SEQ ID NO: 4149 - DNA, 20 bp, synthetic construct
  source 1..20: mol_type = other DNA
cccaggacctctgagcgaaa

SEQ ID NO: 4150 - DNA, 20 bp, synthetic construct
  source 1..20: mol_type = other DNA
ccctttcgctcagaggtcct

SEQ ID NO: 4151 - DNA, 20 bp, synthetic construct
  source 1..20: mol_type = other DNA
cctcaatggacaggatgact

SEQ ID NO: 4152 - DNA, 20 bp, synthetic construct
  source 1..20: mol_type = other DNA
tcgcaaggtaaggctactcc

SEQ ID NO: 4153 - DNA, 20 bp, synthetic construct
  source 1..20: mol_type = other DNA
gctatcaaaaccattcggga

SEQ ID NO: 4154 - DNA, 20 bp, synthetic construct
  source 1..20: mol_type = other DNA
gcgagagagtgagaccttcg

SEQ ID NO: 4155 - DNA, 20 bp, synthetic construct
  source 1..20: mol_type = other DNA
cctgctcgtggtgaccgaag

SEQ ID NO: 4156 - DNA, 20 bp, synthetic construct
  source 1..20: mol_type = other DNA
tccatgctgtaacgtgaagc

SEQ ID NO: 4157 - DNA, 20 bp, synthetic construct
  source 1..20: mol_type = other DNA
caggatggttcttaggtagg

SEQ ID NO: 4158 - DNA, 20 bp, synthetic construct
  source 1..20: mol_type = other DNA
ccgccagtctcctccagccc

SEQ ID NO: 4159 - DNA, 20 bp, synthetic construct
  source 1..20: mol_type = other DNA
ggcggtgaagagcctgaagc

SEQ ID NO: 4160 - DNA, 20 bp, synthetic construct
  source 1..20: mol_type = other DNA
gagtgaaggtgggtaccact

SEQ ID NO: 4161 - DNA, 20 bp, synthetic construct
  source 1..20: mol_type = other DNA
cggccacttccctgctgagc

SEQ ID NO: 4162 - DNA, 20 bp, synthetic construct
  source 1..20: mol_type = other DNA
gagcactcactcgatctggt

SEQ ID NO: 4163 - DNA, 20 bp, synthetic construct
  source 1..20: mol_type = other DNA
ctcagatgtggctgtgagca

SEQ ID NO: 4164 - DNA, 20 bp, synthetic construct
  source 1..20: mol_type = other DNA
gttctgaatcacctccgggt

SEQ ID NO: 4165 - DNA, 20 bp, synthetic construct
  source 1..20: mol_type = other DNA
gccatcaagtgtgtggtggt

SEQ ID NO: 4166 - DNA, 20 bp, synthetic construct
  source 1..20: mol_type = other DNA
gggccagcacccagcgctgc

SEQ ID NO: 4167 - DNA, 20 bp, synthetic construct
  source 1..20: mol_type = other DNA
ctcggccaggaaggcgtccg

SEQ ID NO: 4168 - DNA, 20 bp, synthetic construct
  source 1..20: mol_type = other DNA
ccaggcaggtaagggcctgt

SEQ ID NO: 4169 - DNA, 20 bp, synthetic construct
  source 1..20: mol_type = other DNA
caagagaattgaagaagaag

SEQ ID NO: 4170 - DNA, 20 bp, synthetic construct
  source 1..20: mol_type = other DNA
cggcacccagtgctttggag

SEQ ID NO: 4171 - DNA, 20 bp, synthetic construct
  source 1..20: mol_type = other DNA
ctgcgcacctggcattcatg

SEQ ID NO: 4172 - DNA, 20 bp, synthetic construct
  source 1..20: mol_type = other DNA
tcactcaccctgttgtcttc

SEQ ID NO: 4173 - DNA, 20 bp, synthetic construct
  source 1..20: mol_type = other DNA
gaggtttcaggaaccgttgc

SEQ ID NO: 4174 - DNA, 20 bp, synthetic construct
  source 1..20: mol_type = other DNA
gctgatccacatctgctgga

SEQ ID NO: 4175 - DNA, 20 bp, synthetic construct
  source 1..20: mol_type = other DNA
ccgaaatggctctgaggtgc

SEQ ID NO: 4176 - DNA, 20 bp, synthetic construct
  source 1..20: mol_type = other DNA
catagccgcccagcgagcgc

SEQ ID NO: 4177 - DNA, 20 bp, synthetic construct
  source 1..20: mol_type = other DNA
ctcagagagccaacaacggg

SEQ ID NO: 4178 - DNA, 20 bp, synthetic construct
  source 1..20: mol_type = other DNA
gtagagattggctgcgccag

SEQ ID NO: 4179 - DNA, 20 bp, synthetic construct
  source 1..20: mol_type = other DNA
ggccatcaagtgtgtggtgg

SEQ ID NO: 4180 - DNA, 20 bp, synthetic construct
  source 1..20: mol_type = other DNA
cctcggccaggaaggcgtcc

SEQ ID NO: 4181 - DNA, 20 bp, synthetic construct
  source 1..20: mol_type = other DNA
tcccaaactctgctacctgc

SEQ ID NO: 4182 - DNA, 20 bp, synthetic construct
  source 1..20: mol_type = other DNA
ggtcatccctacgggttgat

SEQ ID NO: 4183 - DNA, 20 bp, synthetic construct
  source 1..20: mol_type = other DNA
gcttacctcctccattatgt

SEQ ID NO: 4184 - DNA, 20 bp, synthetic construct
  source 1..20: mol_type = other DNA
accctgaaaggaagtgaaaa

SEQ ID NO: 4185 - DNA, 20 bp, synthetic construct
  source 1..20: mol_type = other DNA
cctcttccctgccaactacg

SEQ ID NO: 4186 - DNA, 20 bp, synthetic construct
  source 1..20: mol_type = other DNA
tctggaagggcacaaaggtc

SEQ ID NO: 4187 - DNA, 20 bp, synthetic construct
  source 1..20: mol_type = other DNA
ttcatcttctgctcaagccg

SEQ ID NO: 4188 - DNA, 20 bp, synthetic construct
  source 1..20: mol_type = other DNA
gatgaagacctggtagagat

SEQ ID NO: 4189 - DNA, 20 bp, synthetic construct
  source 1..20: mol_type = other DNA
tcctgaaatgagaaaagccg

SEQ ID NO: 4190 - DNA, 20 bp, synthetic construct
  source 1..20: mol_type = other DNA
tgaagcatctgcgaggacga

SEQ ID NO: 4191 - DNA, 20 bp, synthetic construct
  source 1..20: mol_type = other DNA
cttcgtcttctccatcagca

SEQ ID NO: 4192 - DNA, 20 bp, synthetic construct
  source 1..20: mol_type = other DNA
cctggggtcaccttgcagtg

SEQ ID NO: 4193 - DNA, 20 bp, synthetic construct
  source 1..20: mol_type = other DNA
gcagcgagcataggcttcca

SEQ ID NO: 4194 - DNA, 20 bp, synthetic construct
  source 1..20: mol_type = other DNA
cccaccgcactcgctgttgg

SEQ ID NO: 4195 - DNA, 20 bp, synthetic construct
  source 1..20: mol_type = other DNA
agatgaacagacaggtcctg

SEQ ID NO: 4196 - DNA, 20 bp, synthetic construct
  source 1..20: mol_type = other DNA
agcactgccgtatccactcc

SEQ ID NO: 4197 - DNA, 20 bp, synthetic construct
  source 1..20: mol_type = other DNA
gtgctctggtcaggctcgcg

SEQ ID NO: 4198 - DNA, 20 bp, synthetic construct
  source 1..20: mol_type = other DNA
gtgagctggtgacacacaca

SEQ ID NO: 4199 - DNA, 20 bp, synthetic construct
  source 1..20: mol_type = other DNA
cggccagttccaaaccctgg

SEQ ID NO: 4200 - DNA, 20 bp, synthetic construct
  source 1..20: mol_type = other DNA
catgcagttctcacacactg

SEQ ID NO: 4201 - DNA, 20 bp, synthetic construct
  source 1..20: mol_type = other DNA
agacttggtatgagcatgca

SEQ ID NO: 4202 - DNA, 20 bp, synthetic construct
  source 1..20: mol_type = other DNA
caacacaatgataaaaacat

SEQ ID NO: 4203 - DNA, 20 bp, synthetic construct
  source 1..20: mol_type = other DNA
tgcagatcccacaggcgccc

SEQ ID NO: 4204 - DNA, 20 bp, synthetic construct
  source 1..20: mol_type = other DNA
cgtcccagtagatcctgctc

SEQ ID NO: 4205 - DNA, 20 bp, synthetic construct
  source 1..20: mol_type = other DNA
ccctgtaggttcctcgtcta

SEQ ID NO: 4206 - DNA, 20 bp, synthetic construct
  source 1..20: mol_type = other DNA
taaacagtgcccaagcctgg

SEQ ID NO: 4207 - DNA, 20 bp, synthetic construct
  source 1..20: mol_type = other DNA
ccccacagatggtttcacga

SEQ ID NO: 4208 - DNA, 20 bp, synthetic construct
  source 1..20: mol_type = other DNA
ttacttgggctgccatgtcc

SEQ ID NO: 4209 - DNA, 20 bp, synthetic construct
  source 1..20: mol_type = other DNA
ctctcccgcatctaccccaa

SEQ ID NO: 4210 - DNA, 20 bp, synthetic construct
  source 1..20: mol_type = other DNA
cttgagagaagtatggtggc

SEQ ID NO: 4211 - DNA, 20 bp, synthetic construct
  source 1..20: mol_type = other DNA
aaagtatgccaggctggctt

SEQ ID NO: 4212 - DNA, 20 bp, synthetic construct
  source 1..20: mol_type = other DNA
agaaggtggggctttgacgc

SEQ ID NO: 4213 - DNA, 20 bp, synthetic construct
  source 1..20: mol_type = other DNA
tgatgagctgttcttccagg

SEQ ID NO: 4214 - DNA, 20 bp, synthetic construct
  source 1..20: mol_type = other DNA
cccagaagccccagaagccg

SEQ ID NO: 4215 - DNA, 20 bp, synthetic construct
  source 1..20: mol_type = other DNA
cgttaatgtgcactggtatc

SEQ ID NO: 4216 - DNA, 20 bp, synthetic construct
  source 1..20: mol_type = other DNA
gcatggcattcattgaagag

SEQ ID NO: 4217 - DNA, 20 bp, synthetic construct
  source 1..20: mol_type = other DNA
acagttgccgattacaggta

SEQ ID NO: 4218 - DNA, 20 bp, synthetic construct
  source 1..20: mol_type = other DNA
cgggcccttaccgatgtaca

SEQ ID NO: 4219 - DNA, 20 bp, synthetic construct
  source 1..20: mol_type = other DNA
tacagtgtagtagctgtcgt

SEQ ID NO: 4220 - DNA, 20 bp, synthetic construct
  source 1..20: mol_type = other DNA
tgacccttaccgtaagcccc

SEQ ID NO: 4221 - DNA, 20 bp, synthetic construct
  source 1..20: mol_type = other DNA
gatgtacatggagttggagt

SEQ ID NO: 4222 - DNA, 20 bp, synthetic construct
  source 1..20: mol_type = other DNA
gatctacaagtgagtgccag

SEQ ID NO: 4223 - DNA, 20 bp, synthetic construct
  source 1..20: mol_type = other DNA
ccgcctagaagcatttgcgg

SEQ ID NO: 4224 - DNA, 20 bp, synthetic construct
  source 1..20: mol_type = other DNA
tatcaccaacataatggagg

SEQ ID NO: 4225 - DNA, 20 bp, synthetic construct
  source 1..20: mol_type = other DNA
cacgaagctctccgatgtgt

SEQ ID NO: 4226 - DNA, 20 bp, synthetic construct
  source 1..20: mol_type = other DNA
tcagccagctccttacatga

SEQ ID NO: 4227 - DNA, 20 bp, synthetic construct
  source 1..20: mol_type = other DNA
attggttgtcccaggacgag

SEQ ID NO: 4228 - DNA, 20 bp, synthetic construct
  source 1..20: mol_type = other DNA
cgctgcggctggagaacttg

SEQ ID NO: 4229 - DNA, 20 bp, synthetic construct
  source 1..20: mol_type = other DNA
caccttcactctcaggaaca

SEQ ID NO: 4230 - DNA, 20 bp, synthetic construct
  source 1..20: mol_type = other DNA
gggcgatcctcccacctgtg

SEQ ID NO: 4231 - DNA, 20 bp, synthetic construct
  source 1..20: mol_type = other DNA
ccgacccagggtactacaac

SEQ ID NO: 4232 - DNA, 20 bp, synthetic construct
  source 1..20: mol_type = other DNA
agccggccagttccaaaccc

SEQ ID NO: 4233 - DNA, 20 bp, synthetic construct
  source 1..20: mol_type = other DNA
atggcctcctccatctgcag

SEQ ID NO: 4234 - DNA, 20 bp, synthetic construct
  source 1..20: mol_type = other DNA
aaggagccgtgagtgttccc

SEQ ID NO: 4235 - DNA, 20 bp, synthetic construct
  source 1..20: mol_type = other DNA
ggctgccagaaattgtttgg

SEQ ID NO: 4236 - DNA, 20 bp, synthetic construct
  source 1..20: mol_type = other DNA
ctgcagctcctcctgtgagt

SEQ ID NO: 4237 - DNA, 20 bp, synthetic construct
  source 1..20: mol_type = other DNA
caaatatcacctccttctcc

SEQ ID NO: 4238 - DNA, 20 bp, synthetic construct
  source 1..20: mol_type = other DNA
tgctgccgtagaagaagggc

SEQ ID NO: 4239 - DNA, 20 bp, synthetic construct
  source 1..20: mol_type = other DNA
tcagatactccaccagctgc

SEQ ID NO: 4240 - DNA, 20 bp, synthetic construct
  source 1..20: mol_type = other DNA
gaggaggtaagctctagagc

SEQ ID NO: 4241 - DNA, 20 bp, synthetic construct
  source 1..20: mol_type = other DNA
atcatacccacctagtgtga

SEQ ID NO: 4242 - DNA, 20 bp, synthetic construct
  source 1..20: mol_type = other DNA
atgtacatggagttggagtt

SEQ ID NO: 4243 - DNA, 20 bp, synthetic construct
  source 1..20: mol_type = other DNA
agaagtcccctggggagctc

SEQ ID NO: 4244 - DNA, 20 bp, synthetic construct
  source 1..20: mol_type = other DNA
attttgcagacgctctcagc

SEQ ID NO: 4245 - DNA, 20 bp, synthetic construct
  source 1..20: mol_type = other DNA
ccagaatgttggcagcccga

SEQ ID NO: 4246 - DNA, 20 bp, synthetic construct
  source 1..20: mol_type = other DNA
tcatacccacctagtgtgaa

SEQ ID NO: 4247 - DNA, 20 bp, synthetic construct
  source 1..20: mol_type = other DNA
ggaatccagtcgctggccct

SEQ ID NO: 4248 - DNA, 20 bp, synthetic construct
  source 1..20: mol_type = other DNA
gcaccaggccctccaggagc

SEQ ID NO: 4249 - DNA, 20 bp, synthetic construct
  source 1..20: mol_type = other DNA
catctccatgaccagcatga

SEQ ID NO: 4250 - DNA, 20 bp, synthetic construct
  source 1..20: mol_type = other DNA
cagatactccaccagctgca

SEQ ID NO: 4251 - DNA, 20 bp, synthetic construct
  source 1..20: mol_type = other DNA
cccgcactgattgcactgga

SEQ ID NO: 4252 - DNA, 20 bp, synthetic construct
  source 1..20: mol_type = other DNA
tcaggtatggggcagcgcct

SEQ ID NO: 4253 - DNA, 20 bp, synthetic construct
  source 1..20: mol_type = other DNA
gcctcggccaggaaggcgtc

SEQ ID NO: 4254 - DNA, 20 bp, synthetic construct
  source 1..20: mol_type = other DNA
atgggagatccggcagccct

SEQ ID NO: 4255 - DNA, 20 bp, synthetic construct
  source 1..20: mol_type = other DNA
cgagctggggttccacagcg

SEQ ID NO: 4256 - DNA, 20 bp, synthetic construct
  source 1..20: mol_type = other DNA
gcaagaggtgagcaccgggt

SEQ ID NO: 4257 - DNA, 20 bp, synthetic construct
  source 1..20: mol_type = other DNA
ggcccagacagcagacgcca

SEQ ID NO: 4258 - DNA, 20 bp, synthetic construct
  source 1..20: mol_type = other DNA
tggccggcccaagatcgacg

SEQ ID NO: 4259 - DNA, 20 bp, synthetic construct
  source 1..20: mol_type = other DNA
cactcgtaccttgcccatgt

SEQ ID NO: 4260 - DNA, 20 bp, synthetic construct
  source 1..20: mol_type = other DNA
gcccaggacctctgagcgaa

SEQ ID NO: 4261 - DNA, 20 bp, synthetic construct
  source 1..20: mol_type = other DNA
gcatttgaagggcttctccc

SEQ ID NO: 4262 - DNA, 20 bp, synthetic construct
  source 1..20: mol_type = other DNA
cttctccatcagcatggcgt

SEQ ID NO: 4263 - DNA, 20 bp, synthetic construct
  source 1..20: mol_type = other DNA
catactttgaagatcgtcat

SEQ ID NO: 4264 - DNA, 20 bp, synthetic construct
  source 1..20: mol_type = other DNA
ggtcctgcatggtatagagc

SEQ ID NO: 4265 - DNA, 20 bp, synthetic construct
  source 1..20: mol_type = other DNA
catgtccaggagtttgttga

SEQ ID NO: 4266 - DNA, 20 bp, synthetic construct
  source 1..20: mol_type = other DNA
caaggtgaccccaggcagca

SEQ ID NO: 4267 - DNA, 20 bp, synthetic construct
  source 1..20: mol_type = other DNA
cagggaagtggccgctcaag

SEQ ID NO: 4268 - DNA, 20 bp, synthetic construct
  source 1..20: mol_type = other DNA
cgcacgaggaaggagccgtc

SEQ ID NO: 4269 - DNA, 20 bp, synthetic construct
  source 1..20: mol_type = other DNA
tgtacttctcctccgtctgc

SEQ ID NO: 4270 - DNA, 20 bp, synthetic construct
  source 1..20: mol_type = other DNA
cctttgcccatgtggatctg

SEQ ID NO: 4271 - DNA, 20 bp, synthetic construct
  source 1..20: mol_type = other DNA
tgtggcgccaatgcacccac

SEQ ID NO: 4272 - DNA, 20 bp, synthetic construct
  source 1..20: mol_type = other DNA
ggaggtaagctctagagcag

SEQ ID NO: 4273 - DNA, 20 bp, synthetic construct
  source 1..20: mol_type = other DNA
caaccctggcttctatgtag

SEQ ID NO: 4274 - DNA, 20 bp, synthetic construct
  source 1..20: mol_type = other DNA
caggatgactgggtacctgc

SEQ ID NO: 4275 - DNA, 20 bp, synthetic construct
  source 1..20: mol_type = other DNA
agaccccttacgagagatcg

SEQ ID NO: 4276 - DNA, 20 bp, synthetic construct
  source 1..20: mol_type = other DNA
cgcccagccaccgcgtgacc

SEQ ID NO: 4277 - DNA, 20 bp, synthetic construct
  source 1..20: mol_type = other DNA
tccaggacaaactacatcgc

SEQ ID NO: 4278 - DNA, 20 bp, synthetic construct
  source 1..20: mol_type = other DNA
gcttcaaagagagggtgaga

SEQ ID NO: 4279 - DNA, 20 bp, synthetic construct
  source 1..20: mol_type = other DNA
gtgtcccaggaactgcatcc

SEQ ID NO: 4280 - DNA, 20 bp, synthetic construct
  source 1..20: mol_type = other DNA
ccccagctcgtcatcctcca

SEQ ID NO: 4281 - DNA, 20 bp, synthetic construct
  source 1..20: mol_type = other DNA
cagagatggagaagtcccct

SEQ ID NO: 4282 - DNA, 20 bp, synthetic construct
  source 1..20: mol_type = other DNA
gcagggctcaggacaaaaag

SEQ ID NO: 4283 - DNA, 20 bp, synthetic construct
  source 1..20: mol_type = other DNA
ctctgaggtttggtttggag

SEQ ID NO: 4284 - DNA, 20 bp, synthetic construct
  source 1..20: mol_type = other DNA
ctccaggcatgtgagaggat

SEQ ID NO: 4285 - DNA, 20 bp, synthetic construct
  source 1..20: mol_type = other DNA
cagcacgcaggggaccagga

SEQ ID NO: 4286 - DNA, 20 bp, synthetic construct
  source 1..20: mol_type = other DNA
tcactctatatgctctgtac

SEQ ID NO: 4287 - DNA, 20 bp, synthetic construct
  source 1..20: mol_type = other DNA
ctacctcatcagccaagaca

SEQ ID NO: 4288 - DNA, 20 bp, synthetic construct
  source 1..20: mol_type = other DNA
gcaggtttacaaagtccttg

SEQ ID NO: 4289 - DNA, 20 bp, synthetic construct
  source 1..20: mol_type = other DNA
ccgggagagcgagagcaccg

SEQ ID NO: 4290 - DNA, 20 bp, synthetic construct
  source 1..20: mol_type = other DNA
cccaccatcacgccctggga

SEQ ID NO: 4291 - DNA, 20 bp, synthetic construct
  source 1..20: mol_type = other DNA
ctctactcatctgtaagcgc

SEQ ID NO: 4292 - DNA, 20 bp, synthetic construct
  source 1..20: mol_type = other DNA
tacaaaccttgagagaagta

SEQ ID NO: 4293 - DNA, 20 bp, synthetic construct
  source 1..20: mol_type = other DNA
cctacgggttgatgggtgaa

SEQ ID NO: 4294 - DNA, 20 bp, synthetic construct
  source 1..20: mol_type = other DNA
tgctcttagaaagataaacc

SEQ ID NO: 4295 - DNA, 20 bp, synthetic construct
  source 1..20: mol_type = other DNA
ggcaagtactgcattcccga

SEQ ID NO: 4296 - DNA, 20 bp, synthetic construct
  source 1..20: mol_type = other DNA
catggggatgaagtacctgg

SEQ ID NO: 4297 - DNA, 20 bp, synthetic construct
  source 1..20: mol_type = other DNA
tgccatagtatttcagatcc

SEQ ID NO: 4298 - DNA, 20 bp, synthetic construct
  source 1..20: mol_type = other DNA
gcccttactctcttcatcaa

SEQ ID NO: 4299 - DNA, 20 bp, synthetic construct
  source 1..20: mol_type = other DNA
aactgggctggcggccagga

SEQ ID NO: 4300 - DNA, 20 bp, synthetic construct
  source 1..20: mol_type = other DNA
tcttgtaggtgtgctgatgt

SEQ ID NO: 4301 - DNA, 20 bp, synthetic construct
  source 1..20: mol_type = other DNA
ccttcccaggatgaagatga

SEQ ID NO: 4302 - DNA, 20 bp, synthetic construct
  source 1..20: mol_type = other DNA
gggagatccggcagccctcg

SEQ ID NO: 4303 - DNA, 20 bp, synthetic construct
  source 1..20: mol_type = other DNA
ctggaggaggaatgccaatg

SEQ ID NO: 4304 - DNA, 20 bp, synthetic construct
  source 1..20: mol_type = other DNA
ctaccttcagattggagagc

SEQ ID NO: 4305 - DNA, 20 bp, synthetic construct
  source 1..20: mol_type = other DNA
gctacctgtgagtggccagg

SEQ ID NO: 4306 - DNA, 20 bp, synthetic construct
  source 1..20: mol_type = other DNA
ttcctgggaaatctacggga

SEQ ID NO: 4307 - DNA, 20 bp, synthetic construct
  source 1..20: mol_type = other DNA
actcacgaggccgtttgaac

SEQ ID NO: 4308 - DNA, 20 bp, synthetic construct
  source 1..20: mol_type = other DNA
acacgccacattcaaagcca

SEQ ID NO: 4309 - DNA, 20 bp, synthetic construct
  source 1..20: mol_type = other DNA
ccttgctgactatttcaaga

SEQ ID NO: 4310 - DNA, 20 bp, synthetic construct
  source 1..20: mol_type = other DNA
tctaacctgggtaagggatg

SEQ ID NO: 4311 - DNA, 20 bp, synthetic construct
  source 1..20: mol_type = other DNA
gaccagtctctggctcacta

SEQ ID NO: 4312 - DNA, 20 bp, synthetic construct
  source 1..20: mol_type = other DNA
tccaggttctgaatcacctc

SEQ ID NO: 4313 - DNA, 20 bp, synthetic construct
  source 1..20: mol_type = other DNA
cttctgtaatacacttggag

SEQ ID NO: 4314 - DNA, 20 bp, synthetic construct
  source 1..20: mol_type = other DNA
ccaactcacatgagtcaacg

SEQ ID NO: 4315 - DNA, 20 bp, synthetic construct
  source 1..20: mol_type = other DNA
ggatggttcttaggtaggtg

SEQ ID NO: 4316 - DNA, 20 bp, synthetic construct
  source 1..20: mol_type = other DNA
tccagcagtgattcataatc

SEQ ID NO: 4317 - DNA, 20 bp, synthetic construct
  source 1..20: mol_type = other DNA
cctgtctcttcaggaaaccg

SEQ ID NO: 4318 - DNA, 20 bp, synthetic construct
  source 1..20: mol_type = other DNA
tctattgaaggagcagggac

SEQ ID NO: 4319 - DNA, 20 bp, synthetic construct
  source 1..20: mol_type = other DNA
cgggctcatctactgcctga

SEQ ID NO: 4320 - DNA, 20 bp, synthetic construct
  source 1..20: mol_type = other DNA
cgggagagcgagagcaccgc

SEQ ID NO: 4321 - DNA, 20 bp, synthetic construct
  source 1..20: mol_type = other DNA
cttcatctgcacgtcctccc

SEQ ID NO: 4322 - DNA, 20 bp, synthetic construct
  source 1..20: mol_type = other DNA
ggagaagtacactgacacgc

SEQ ID NO: 4323 - DNA, 20 bp, synthetic construct
  source 1..20: mol_type = other DNA
gcccagccaccgcgtgacct

SEQ ID NO: 4324 - DNA, 20 bp, synthetic construct
  source 1..20: mol_type = other DNA
caggcagagaacttactcat

SEQ ID NO: 4325 - DNA, 20 bp, synthetic construct
  source 1..20: mol_type = other DNA
gagacttggtatgagcatgc

SEQ ID NO: 4326 - DNA, 20 bp, synthetic construct
  source 1..20: mol_type = other DNA
gtcgggcccccagcacctgt

SEQ ID NO: 4327 - DNA, 20 bp, synthetic construct
  source 1..20: mol_type = other DNA
ttgcaagtctgacatttgaa

SEQ ID NO: 4328 - DNA, 20 bp, synthetic construct
  source 1..20: mol_type = other DNA
tgagtagagctttgtcgagc

SEQ ID NO: 4329 - DNA, 20 bp, synthetic construct
  source 1..20: mol_type = other DNA
ggactcactgctccaggatg

SEQ ID NO: 4330 - DNA, 20 bp, synthetic construct
  source 1..20: mol_type = other DNA
ccagggggcaaccgtgtctg

SEQ ID NO: 4331 - DNA, 20 bp, synthetic construct
  source 1..20: mol_type = other DNA
ccgcaggcgcgtcttccagg

SEQ ID NO: 4332 - DNA, 20 bp, synthetic construct
  source 1..20: mol_type = other DNA
atctacaagtgagtgccagt

SEQ ID NO: 4333 - DNA, 20 bp, synthetic construct
  source 1..20: mol_type = other DNA
cgccagatcacgtggagccg

SEQ ID NO: 4334 - DNA, 20 bp, synthetic construct
  source 1..20: mol_type = other DNA
ctcctggaaacaggacacaa

SEQ ID NO: 4335 - DNA, 20 bp, synthetic construct
  source 1..20: mol_type = other DNA
tcctcgcagatgcttcagat

SEQ ID NO: 4336 - DNA, 20 bp, synthetic construct
  source 1..20: mol_type = other DNA
tggcatccagggccagccgc

SEQ ID NO: 4337 - DNA, 20 bp, synthetic construct
  source 1..20: mol_type = other DNA
cagagcttgtgcattgacat

SEQ ID NO: 4338 - DNA, 20 bp, synthetic construct
  source 1..20: mol_type = other DNA
tttcagatccaggatactga

SEQ ID NO: 4339 - DNA, 20 bp, synthetic construct
  source 1..20: mol_type = other DNA
cctcgatcaggaggaacatg

SEQ ID NO: 4340 - DNA, 20 bp, synthetic construct
  source 1..20: mol_type = other DNA
ggtccaggacagagcagaca

SEQ ID NO: 4341 - DNA, 20 bp, synthetic construct
  source 1..20: mol_type = other DNA
gagggctcacctgggacatc

SEQ ID NO: 4342 - DNA, 20 bp, synthetic construct
  source 1..20: mol_type = other DNA
ctatcaaaaccattcgggaa

SEQ ID NO: 4343 - DNA, 20 bp, synthetic construct
  source 1..20: mol_type = other DNA
tgtactcgttgtcctcaatg

SEQ ID NO: 4344 - DNA, 20 bp, synthetic construct
  source 1..20: mol_type = other DNA
gcgtctgcaaaatgacccac

SEQ ID NO: 4345 - DNA, 20 bp, synthetic construct
  source 1..20: mol_type = other DNA
gccctcaacttccagacccc

SEQ ID NO: 4346 - DNA, 20 bp, synthetic construct
  source 1..20: mol_type = other DNA
ccaggcagagaacttactca

SEQ ID NO: 4347 - DNA, 20 bp, synthetic construct
  source 1..20: mol_type = other DNA
gcatactttgaagatcgtca

SEQ ID NO: 4348 - DNA, 20 bp, synthetic construct
  source 1..20: mol_type = other DNA
agggctcacctgggacatct

SEQ ID NO: 4349 - DNA, 20 bp, synthetic construct
  source 1..20: mol_type = other DNA
tcttcgtggctttctgtgga

SEQ ID NO: 4350 - DNA, 20 bp, synthetic construct
  source 1..20: mol_type = other DNA
tgttctcagagagccaacaa

SEQ ID NO: 4351 - DNA, 20 bp, synthetic construct
  source 1..20: mol_type = other DNA
ctctccagagaccagaagat

SEQ ID NO: 4352 - DNA, 20 bp, synthetic construct
  source 1..20: mol_type = other DNA
cttacccaggttagagccaa

SEQ ID NO: 4353 - DNA, 20 bp, synthetic construct
  source 1..20: mol_type = other DNA
cctcccagccatccgtcctg

SEQ ID NO: 4354 - DNA, 20 bp, synthetic construct
  source 1..20: mol_type = other DNA
tagttgagctgcaaagagaa

SEQ ID NO: 4355 - DNA, 20 bp, synthetic construct
  source 1..20: mol_type = other DNA
ccatgagtaagttctctgcc

SEQ ID NO: 4356 - DNA, 20 bp, synthetic construct
  source 1..20: mol_type = other DNA
cctgcagagaaacacacttg

SEQ ID NO: 4357 - DNA, 20 bp, synthetic construct
  source 1..20: mol_type = other DNA
cggtgcccacctcgaggctg

SEQ ID NO: 4358 - DNA, 20 bp, synthetic construct
  source 1..20: mol_type = other DNA
ttgcagctgcttcatgaggt

SEQ ID NO: 4359 - DNA, 20 bp, synthetic construct
  source 1..20: mol_type = other DNA
gaaggtacctctgagatgca

SEQ ID NO: 4360 - DNA, 20 bp, synthetic construct
  source 1..20: mol_type = other DNA
cagccccagctcatatgcac

SEQ ID NO: 4361 - DNA, 20 bp, synthetic construct
  source 1..20: mol_type = other DNA
gtccctcatctatgggaaga

SEQ ID NO: 4362 - DNA, 20 bp, synthetic construct
  source 1..20: mol_type = other DNA
atcagggctaccgctgccat

SEQ ID NO: 4363 - DNA, 20 bp, synthetic construct
  source 1..20: mol_type = other DNA
gccagaccacggggtgcctg

SEQ ID NO: 4364 - DNA, 20 bp, synthetic construct
  source 1..20: mol_type = other DNA
acttacggcacccggagctt

SEQ ID NO: 4365 - DNA, 20 bp, synthetic construct
  source 1..20: mol_type = other DNA
cgtagggatgaccaacccgg

SEQ ID NO: 4366 - DNA, 20 bp, synthetic construct
  source 1..20: mol_type = other DNA
cacgcaggaggcgatggaga

SEQ ID NO: 4367 - DNA, 20 bp, synthetic construct
  source 1..20: mol_type = other DNA
ctgcagttttagcatctgtg

SEQ ID NO: 4368 - DNA, 20 bp, synthetic construct
  source 1..20: mol_type = other DNA
tacactgatacatccctcga

SEQ ID NO: 4369 - DNA, 20 bp, synthetic construct
  source 1..20: mol_type = other DNA
catcatcttcatcctgggaa

SEQ ID NO: 4370 - DNA, 20 bp, synthetic construct
  source 1..20: mol_type = other DNA
cccttacctgcctggcagcc

SEQ ID NO: 4371 - DNA, 20 bp, synthetic construct
  source 1..20: mol_type = other DNA
tacagttcgggtggacactc

SEQ ID NO: 4372 - DNA, 20 bp, synthetic construct
  source 1..20: mol_type = other DNA
cctccatctgcaggggagct

SEQ ID NO: 4373 - DNA, 20 bp, synthetic construct
  source 1..20: mol_type = other DNA
cttcctgcccacacagtgat

SEQ ID NO: 4374 - DNA, 20 bp, synthetic construct
  source 1..20: mol_type = other DNA
ctcatgagtgcgtacagttc

SEQ ID NO: 4375 - DNA, 20 bp, synthetic construct
  source 1..20: mol_type = other DNA
tgactgccacagatccacat

SEQ ID NO: 4376 - DNA, 20 bp, synthetic construct
  source 1..20: mol_type = other DNA
ccgctgcacaagttcctggt

SEQ ID NO: 4377 - DNA, 20 bp, synthetic construct
  source 1..20: mol_type = other DNA
ttcctgcccacacagtgata

SEQ ID NO: 4378 - DNA, 20 bp, synthetic construct
  source 1..20: mol_type = other DNA
gaagccccagaagccgtggt

SEQ ID NO: 4379 - DNA, 20 bp, synthetic construct
  source 1..20: mol_type = other DNA
gcaggtaggaggtctcagac

SEQ ID NO: 4380 - DNA, 20 bp, synthetic construct
  source 1..20: mol_type = other DNA
cgtagagccgaaccagccgc

SEQ ID NO: 4381 - DNA, 20 bp, synthetic construct
  source 1..20: mol_type = other DNA
cttgtagggcttctggccgt

SEQ ID NO: 4382 - DNA, 20 bp, synthetic construct
  source 1..20: mol_type = other DNA
aagccctacaaggcaggcgc

SEQ ID NO: 4383 - DNA, 20 bp, synthetic construct
  source 1..20: mol_type = other DNA
cactcaccctcatggcatcc

SEQ ID NO: 4384 - DNA, 20 bp, synthetic construct
  source 1..20: mol_type = other DNA
cgcagatcaaagagagcctg

SEQ ID NO: 4385 - DNA, 20 bp, synthetic construct
  source 1..20: mol_type = other DNA
gggcaagtactgcattcccg

SEQ ID NO: 4386 - DNA, 20 bp, synthetic construct
  source 1..20: mol_type = other DNA
actcatgagtgcgtacagtt

SEQ ID NO: 4387 - DNA, 20 bp, synthetic construct
  source 1..20: mol_type = other DNA
gcaggtcctactcggaggga

SEQ ID NO: 4388 - DNA, 20 bp, synthetic construct
  source 1..20: mol_type = other DNA
atgtggaagtcacgcccgtt

SEQ ID NO: 4389 - DNA, 20 bp, synthetic construct
  source 1..20: mol_type = other DNA
atagttgagctgcaaagaga

SEQ ID NO: 4390 - DNA, 20 bp, synthetic construct
  source 1..20: mol_type = other DNA
ttgagagaagtatggtggca

SEQ ID NO: 4391 - DNA, 20 bp, synthetic construct
  source 1..20: mol_type = other DNA
ctgagccaggtcctggggag

SEQ ID NO: 4392 - DNA, 20 bp, synthetic construct
  source 1..20: mol_type = other DNA
gccctgctcgtggtgaccga

SEQ ID NO: 4393 - DNA, 20 bp, synthetic construct
  source 1..20: mol_type = other DNA
gttccctgccaactacgtgg

SEQ ID NO: 4394 - DNA, 20 bp, synthetic construct
  source 1..20: mol_type = other DNA
ccagaagttccccaagctcc

SEQ ID NO: 4395 - DNA, 20 bp, synthetic construct
  source 1..20: mol_type = other DNA
tctgtgccaagagataaagc

SEQ ID NO: 4396 - DNA, 20 bp, synthetic construct
  source 1..20: mol_type = other DNA
agcgtctgcaaaatgaccca

SEQ ID NO: 4397 - DNA, 20 bp, synthetic construct
  source 1..20: mol_type = other DNA
tgaagcagctgcaacaccag

SEQ ID NO: 4398 - DNA, 20 bp, synthetic construct
  source 1..20: mol_type = other DNA
ccatgccatcaacctgcgtg

SEQ ID NO: 4399 - DNA, 20 bp, synthetic construct
  source 1..20: mol_type = other DNA
ggccggtctgtggaaacaca

SEQ ID NO: 4400 - DNA, 20 bp, synthetic construct
  source 1..20: mol_type = other DNA
gccacagcccatggtccctg

SEQ ID NO: 4401 - DNA, 20 bp, synthetic construct
  source 1..20: mol_type = other DNA
ctgcccgctcacctggctca

SEQ ID NO: 4402 - DNA, 20 bp, synthetic construct
  source 1..20: mol_type = other DNA
aggacctgtctgttcatctc

SEQ ID NO: 4403 - DNA, 20 bp, synthetic construct
  source 1..20: mol_type = other DNA
gcgccctgacaactgtccag

SEQ ID NO: 4404 - DNA, 20 bp, synthetic construct
  source 1..20: mol_type = other DNA
tgggagatccggcagccctc

SEQ ID NO: 4405 - DNA, 20 bp, synthetic construct
  source 1..20: mol_type = other DNA
tgtacatggagttggagttg

SEQ ID NO: 4406 - DNA, 20 bp, synthetic construct
  source 1..20: mol_type = other DNA
cagtgagggcgtccctccgg

SEQ ID NO: 4407 - DNA, 20 bp, synthetic construct
  source 1..20: mol_type = other DNA
gctccagacatcgctgcggc

SEQ ID NO: 4408 - DNA, 20 bp, synthetic construct
  source 1..20: mol_type = other DNA
aagggaagataatggaacgg

SEQ ID NO: 4409 - DNA, 20 bp, synthetic construct
  source 1..20: mol_type = other DNA
cgcgccagatcacgtggagc

SEQ ID NO: 4410 - DNA, 20 bp, synthetic construct
  source 1..20: mol_type = other DNA
tgagctgcagccacagccca

SEQ ID NO: 4411 - DNA, 20 bp, synthetic construct
  source 1..20: mol_type = other DNA
actcacccaggaaggaaggc

SEQ ID NO: 4412 - DNA, 20 bp, synthetic construct
  source 1..20: mol_type = other DNA
gaatttatcatttcgtggtg

SEQ ID NO: 4413 - DNA, 20 bp, synthetic construct
  source 1..20: mol_type = other DNA
ggttccttccttgtaggcca

SEQ ID NO: 4414 - DNA, 20 bp, synthetic construct
  source 1..20: mol_type = other DNA
accgagacaacaagaaggtg

SEQ ID NO: 4415 - DNA, 20 bp, synthetic construct
  source 1..20: mol_type = other DNA
agatggagactttatatgct

SEQ ID NO: 4416 - DNA, 20 bp, synthetic construct
  source 1..20: mol_type = other DNA
ggcagcggagacagtaagtg

SEQ ID NO: 4417 - DNA, 20 bp, synthetic construct
  source 1..20: mol_type = other DNA
gatggagccgccgatccaca

SEQ ID NO: 4418 - DNA, 20 bp, synthetic construct
  source 1..20: mol_type = other DNA
ctccaccagctcctagaagg

SEQ ID NO: 4419 - DNA, 20 bp, synthetic construct
  source 1..20: mol_type = other DNA
cagatacctggtggaaatgg

SEQ ID NO: 4420 - DNA, 20 bp, synthetic construct
  source 1..20: mol_type = other DNA
caggtcctactcggagggaa

SEQ ID NO: 4421 - DNA, 20 bp, synthetic construct
  source 1..20: mol_type = other DNA
caggttgcagggcagcccgt

SEQ ID NO: 4422 - DNA, 20 bp, synthetic construct
  source 1..20: mol_type = other DNA
gtaggacaaggcctcccaca

SEQ ID NO: 4423 - DNA, 20 bp, synthetic construct
  source 1..20: mol_type = other DNA
gactgacatggaacagggga

SEQ ID NO: 4424 - DNA, 20 bp, synthetic construct
  source 1..20: mol_type = other DNA
tcttacctctcaatctgcag

SEQ ID NO: 4425 - DNA, 20 bp, synthetic construct
  source 1..20: mol_type = other DNA
aaaccttgagagaagtatgg

SEQ ID NO: 4426 - DNA, 20 bp, synthetic construct
  source 1..20: mol_type = other DNA
tacttacggcacccggagct

SEQ ID NO: 4427 - DNA, 20 bp, synthetic construct
  source 1..20: mol_type = other DNA
ctctggcacactgtggggga

SEQ ID NO: 4428 - DNA, 20 bp, synthetic construct
  source 1..20: mol_type = other DNA
agctcaccaatctgacaagc

SEQ ID NO: 4429 - DNA, 20 bp, synthetic construct
  source 1..20: mol_type = other DNA
agaagggcaggtgcgccgcg

SEQ ID NO: 4430 - DNA, 20 bp, synthetic construct
  source 1..20: mol_type = other DNA
tcatgaggttggcctcggcc

SEQ ID NO: 4431 - DNA, 20 bp, synthetic construct
  source 1..20: mol_type = other DNA
acggaggaagaagattgccc

SEQ ID NO: 4432 - DNA, 20 bp, synthetic construct
  source 1..20: mol_type = other DNA
aggaggtaagctctagagca

SEQ ID NO: 4433 - DNA, 20 bp, synthetic construct
  source 1..20: mol_type = other DNA
actgacatggaacaggggaa

SEQ ID NO: 4434 - DNA, 20 bp, synthetic construct
  source 1..20: mol_type = other DNA
tcttcatcaaatacaaggag

SEQ ID NO: 4435 - DNA, 20 bp, synthetic construct
  source 1..20: mol_type = other DNA
cgctgatcttggcgtagtgc

SEQ ID NO: 4436 - DNA, 20 bp, synthetic construct
  source 1..20: mol_type = other DNA
ccacagcccatggtccctga

SEQ ID NO: 4437 - DNA, 20 bp, synthetic construct
  source 1..20: mol_type = other DNA
tcaccttgcagtggggaagc

SEQ ID NO: 4438 - DNA, 20 bp, synthetic construct
  source 1..20: mol_type = other DNA
ggcaggcgtagttgcagagg

SEQ ID NO: 4439 - DNA, 20 bp, synthetic construct
  source 1..20: mol_type = other DNA
gtctgtcaagaagaacttgg

SEQ ID NO: 4440 - DNA, 20 bp, synthetic construct
  source 1..20: mol_type = other DNA
ccgcctcaccaggttctcaa

SEQ ID NO: 4441 - DNA, 20 bp, synthetic construct
  source 1..20: mol_type = other DNA
gcggcagaggtgcagcacct

SEQ ID NO: 4442 - DNA, 20 bp, synthetic construct
  source 1..20: mol_type = other DNA
ctctgccgcagcctcgaggt

SEQ ID NO: 4443 - DNA, 20 bp, synthetic construct
  source 1..20: mol_type = other DNA
gaatccagtcgctggccctt

SEQ ID NO: 4444 - DNA, 20 bp, synthetic construct
  source 1..20: mol_type = other DNA
gcccacaggcattgcagaca

SEQ ID NO: 4445 - DNA, 20 bp, synthetic construct
  source 1..20: mol_type = other DNA
gacagaaatggctgcaacca

SEQ ID NO: 4446 - DNA, 20 bp, synthetic construct
  source 1..20: mol_type = other DNA
agcgcagaaaggcaaattca

SEQ ID NO: 4447 - DNA, 20 bp, synthetic construct
  source 1..20: mol_type = other DNA
caggtcacgcggtggctggg

SEQ ID NO: 4448 - DNA, 20 bp, synthetic construct
  source 1..20: mol_type = other DNA
gcggccacttccctgctgag

SEQ ID NO: 4449 - DNA, 20 bp, synthetic construct
  source 1..20: mol_type = other DNA
gtactacaacgggcacacga

SEQ ID NO: 4450 - DNA, 20 bp, synthetic construct
  source 1..20: mol_type = other DNA
ctcgtcacaacaacaggtgc

SEQ ID NO: 4451 - DNA, 20 bp, synthetic construct
  source 1..20: mol_type = other DNA
ttgcagccctcgattccagc

SEQ ID NO: 4452 - DNA, 20 bp, synthetic construct
  source 1..20: mol_type = other DNA
actgagccaggtcctgggga

SEQ ID NO: 4453 - DNA, 20 bp, synthetic construct
  source 1..20: mol_type = other DNA
agatccagtagtgggaaaga

SEQ ID NO: 4454 - DNA, 20 bp, synthetic construct
  source 1..20: mol_type = other DNA
ctgaacttgtcgtctactgc

SEQ ID NO: 4455 - DNA, 20 bp, synthetic construct
  source 1..20: mol_type = other DNA
cactcgccgctcctgcgcca

SEQ ID NO: 4456 - DNA, 20 bp, synthetic construct
  source 1..20: mol_type = other DNA
ggagctatggggtcaccatg

SEQ ID NO: 4457 - DNA, 20 bp, synthetic construct
  source 1..20: mol_type = other DNA
cgagagagtgagaccttcgt

SEQ ID NO: 4458 - DNA, 20 bp, synthetic construct
  source 1..20: mol_type = other DNA
tacaacaccatgaggacata

SEQ ID NO: 4459 - DNA, 20 bp, synthetic construct
  source 1..20: mol_type = other DNA
tgaagaacagctcatagccc

SEQ ID NO: 4460 - DNA, 20 bp, synthetic construct
  source 1..20: mol_type = other DNA
cgcagcagtctggagaaggc

SEQ ID NO: 4461 - DNA, 20 bp, synthetic construct
  source 1..20: mol_type = other DNA
tcttgaaggggctcactaaa

SEQ ID NO: 4462 - DNA, 20 bp, synthetic construct
  source 1..20: mol_type = other DNA
ctggaagtcatgcccgttgg

SEQ ID NO: 4463 - DNA, 20 bp, synthetic construct
  source 1..20: mol_type = other DNA
cctatccaggtacctgaccg

SEQ ID NO: 4464 - DNA, 20 bp, synthetic construct
  source 1..20: mol_type = other DNA
ttctgtctattgaaggagca

SEQ ID NO: 4465 - DNA, 20 bp, synthetic construct
  source 1..20: mol_type = other DNA
ccgtctgctggatctcccgc

SEQ ID NO: 4466 - DNA, 20 bp, synthetic construct
  source 1..20: mol_type = other DNA
ccaggtgagcgggcagaggt

SEQ ID NO: 4467 - DNA, 20 bp, synthetic construct
  source 1..20: mol_type = other DNA
acagcacaagaagctggctg

SEQ ID NO: 4468 - DNA, 20 bp, synthetic construct
  source 1..20: mol_type = other DNA
cgaggaggagatccagtagt

SEQ ID NO: 4469 - DNA, 20 bp, synthetic construct
  source 1..20: mol_type = other DNA
gaccgagacaacaagaaggt

SEQ ID NO: 4470 - DNA, 20 bp, synthetic construct
  source 1..20: mol_type = other DNA
ggccagaagccctacaaggc

SEQ ID NO: 4471 - DNA, 20 bp, synthetic construct
  source 1..20: mol_type = other DNA
ggcggcaggcgtagttgcag

SEQ ID NO: 4472 - DNA, 20 bp, synthetic construct
  source 1..20: mol_type = other DNA
cctcgtcacaacaacaggtg

SEQ ID NO: 4473 - DNA, 20 bp, synthetic construct
  source 1..20: mol_type = other DNA
caccatgaggacatatggat

SEQ ID NO: 4474 - DNA, 20 bp, synthetic construct
  source 1..20: mol_type = other DNA
ttacactgatacatccctcg

SEQ ID NO: 4475 - DNA, 20 bp, synthetic construct
  source 1..20: mol_type = other DNA
ggccacctgaggacgcactc

SEQ ID NO: 4476 - DNA, 20 bp, synthetic construct
  source 1..20: mol_type = other DNA
tccagaagttccccaagctc

SEQ ID NO: 4477 - DNA, 20 bp, synthetic construct
  source 1..20: mol_type = other DNA
cctccaccacctccccgctg

SEQ ID NO: 4478 - DNA, 20 bp, synthetic construct
  source 1..20: mol_type = other DNA
tccatggctaccgcctgccc

SEQ ID NO: 4479 - DNA, 20 bp, synthetic construct
  source 1..20: mol_type = other DNA
ccactggctcatccagtgcc

SEQ ID NO: 4480 - DNA, 20 bp, synthetic construct
  source 1..20: mol_type = other DNA
tggagtccaggccgctgtcg

SEQ ID NO: 4481 - DNA, 20 bp, synthetic construct
  source 1..20: mol_type = other DNA
catccgcaggcagcgagcat

SEQ ID NO: 4482 - DNA, 20 bp, synthetic construct
  source 1..20: mol_type = other DNA
ggcacagaggcacagagctt

SEQ ID NO: 4483 - DNA, 20 bp, synthetic construct
  source 1..20: mol_type = other DNA
ttcctctataggtatcttga

SEQ ID NO: 4484 - DNA, 20 bp, synthetic construct
  source 1..20: mol_type = other DNA
caccatcagcaggtcccgca

SEQ ID NO: 4485 - DNA, 20 bp, synthetic construct
  source 1..20: mol_type = other DNA
aatgagcttctccacctgcg

SEQ ID NO: 4486 - DNA, 20 bp, synthetic construct
  source 1..20: mol_type = other DNA
gaacttaccagccttcgctt

SEQ ID NO: 4487 - DNA, 20 bp, synthetic construct
  source 1..20: mol_type = other DNA
ggccactgtcaatagagaga

SEQ ID NO: 4488 - DNA, 20 bp, synthetic construct
  source 1..20: mol_type = other DNA
tacacctatatattcctcgt

SEQ ID NO: 4489 - DNA, 20 bp, synthetic construct
  source 1..20: mol_type = other DNA
gagcagggctggggagaagg

SEQ ID NO: 4490 - DNA, 20 bp, synthetic construct
  source 1..20: mol_type = other DNA
ccacatgttcctcctgatcg

SEQ ID NO: 4491 - DNA, 20 bp, synthetic construct
  source 1..20: mol_type = other DNA
gctccacggtcaggaagtcg

SEQ ID NO: 4492 - DNA, 20 bp, synthetic construct
  source 1..20: mol_type = other DNA
gcaccaagtttgacacgctc

SEQ ID NO: 4493 - DNA, 20 bp, synthetic construct
  source 1..20: mol_type = other DNA
agttggaggaatccagtcgc

SEQ ID NO: 4494 - DNA, 20 bp, synthetic construct
  source 1..20: mol_type = other DNA
cttccacatgagcgtggtca

SEQ ID NO: 4495 - DNA, 20 bp, synthetic construct
  source 1..20: mol_type = other DNA
ctcttacctcttcctccgcg

SEQ ID NO: 4496 - DNA, 20 bp, synthetic construct
  source 1..20: mol_type = other DNA
tcctctataggtatcttgaa

SEQ ID NO: 4497 - DNA, 20 bp, synthetic construct
  source 1..20: mol_type = other DNA
ggtgttgcagctgcttcatg

SEQ ID NO: 4498 - DNA, 20 bp, synthetic construct
  source 1..20: mol_type = other DNA
tctgcacacaaggagtgtct

SEQ ID NO: 4499 - DNA, 20 bp, synthetic construct
  source 1..20: mol_type = other DNA
accgcccagacgactggcca

SEQ ID NO: 4500 - DNA, 20 bp, synthetic construct
  source 1..20: mol_type = other DNA
ctcactcgatctggtcggac

SEQ ID NO: 4501 - DNA, 20 bp, synthetic construct
  source 1..20: mol_type = other DNA
agcagagtttgggatccagc

SEQ ID NO: 4502 - DNA, 20 bp, synthetic construct
  source 1..20: mol_type = other DNA
gagaagtacactgacacgct

SEQ ID NO: 4503 - DNA, 20 bp, synthetic construct
  source 1..20: mol_type = other DNA
ggtaccagggcatccgctcg

SEQ ID NO: 4504 - DNA, 20 bp, synthetic construct
  source 1..20: mol_type = other DNA
acagagagggagaagtcccc

SEQ ID NO: 4505 - DNA, 20 bp, synthetic construct
  source 1..20: mol_type = other DNA
gagctatggggtcaccatgt

SEQ ID NO: 4506 - DNA, 20 bp, synthetic construct
  source 1..20: mol_type = other DNA
gcattgacattggttgtccc

SEQ ID NO: 4507 - DNA, 20 bp, synthetic construct
  source 1..20: mol_type = other DNA
tgggcaaggtacgagtggga

SEQ ID NO: 4508 - DNA, 20 bp, synthetic construct
  source 1..20: mol_type = other DNA
tcctccaggtctgcccaaga

SEQ ID NO: 4509 - DNA, 20 bp, synthetic construct
  source 1..20: mol_type = other DNA
acagagatggagaagtcccc

SEQ ID NO: 4510 - DNA, 20 bp, synthetic construct
  source 1..20: mol_type = other DNA
acctggaaggtcttccgctc

SEQ ID NO: 4511 - DNA, 20 bp, synthetic construct
  source 1..20: mol_type = other DNA
agagatggagaagtcccctg

SEQ ID NO: 4512 - DNA, 20 bp, synthetic construct
  source 1..20: mol_type = other DNA
cttacggcacccggagcttg

SEQ ID NO: 4513 - DNA, 20 bp, synthetic construct
  source 1..20: mol_type = other DNA
actcacctgataagaggcag

SEQ ID NO: 4514 - DNA, 20 bp, synthetic construct
  source 1..20: mol_type = other DNA
ccatggctaccgcctgccca

SEQ ID NO: 4515 - DNA, 20 bp, synthetic construct
  source 1..20: mol_type = other DNA
gccggtccaccaggatgggt

SEQ ID NO: 4516 - DNA, 20 bp, synthetic construct
  source 1..20: mol_type = other DNA
agttgagctgcaaagagaag

SEQ ID NO: 4517 - DNA, 20 bp, synthetic construct
  source 1..20: mol_type = other DNA
gcccatggtccctgagggaa

SEQ ID NO: 4518 - DNA, 20 bp, synthetic construct
  source 1..20: mol_type = other DNA
cacagttgccgattacaggt

SEQ ID NO: 4519 - DNA, 20 bp, synthetic construct
  source 1..20: mol_type = other DNA
gcagggctggggagaaggtg

SEQ ID NO: 4520 - DNA, 20 bp, synthetic construct
  source 1..20: mol_type = other DNA
agtgccatggctgctctccc

SEQ ID NO: 4521 - DNA, 20 bp, synthetic construct
  source 1..20: mol_type = other DNA
tcacgcactgagccaggtcc

SEQ ID NO: 4522 - DNA, 20 bp, synthetic construct
  source 1..20: mol_type = other DNA
agaagtcgcagcgacccgag

SEQ ID NO: 4523 - DNA, 20 bp, synthetic construct
  source 1..20: mol_type = other DNA
tgctgcaccaggtgtccatg

SEQ ID NO: 4524 - DNA, 20 bp, synthetic construct
  source 1..20: mol_type = other DNA
tcagcagggaggccaactcc

SEQ ID NO: 4525 - DNA, 20 bp, synthetic construct
  source 1..20: mol_type = other DNA
cctccagagtgtggttgtgg

SEQ ID NO: 4526 - DNA, 20 bp, synthetic construct
  source 1..20: mol_type = other DNA
gcgaggaggagatccagtag

SEQ ID NO: 4527 - DNA, 20 bp, synthetic construct
  source 1..20: mol_type = other DNA
gacctggaaggtcttccgct

SEQ ID NO: 4528 - DNA, 20 bp, synthetic construct
  source 1..20: mol_type = other DNA
tgggtaagggatgcggccgt

SEQ ID NO: 4529 - DNA, 20 bp, synthetic construct
  source 1..20: mol_type = other DNA
caggacctggagcagcgcag

SEQ ID NO: 4530 - DNA, 20 bp, synthetic construct
  source 1..20: mol_type = other DNA
cacacaaggagtgtctgggg

SEQ ID NO: 4531 - DNA, 20 bp, synthetic construct
  source 1..20: mol_type = other DNA
ctgtctcttcaggaaaccgc

SEQ ID NO: 4532 - DNA, 20 bp, synthetic construct
  source 1..20: mol_type = other DNA
caatgtcaatgcacaagctc

SEQ ID NO: 4533 - DNA, 20 bp, synthetic construct
  source 1..20: mol_type = other DNA
aacctttctgagaatgctcc

SEQ ID NO: 4534 - DNA, 20 bp, synthetic construct
  source 1..20: mol_type = other DNA
ccgaccaggaacttgtgcag

SEQ ID NO: 4535 - DNA, 20 bp, synthetic construct
  source 1..20: mol_type = other DNA
tccagcacagcctcatgagt

SEQ ID NO: 4536 - DNA, 20 bp, synthetic construct
  source 1..20: mol_type = other DNA
gtcacgcaccggcatggaca

SEQ ID NO: 4537 - DNA, 20 bp, synthetic construct
  source 1..20: mol_type = other DNA
cccttcggtcaccacgagca

SEQ ID NO: 4538 - DNA, 20 bp, synthetic construct
  source 1..20: mol_type = other DNA
cctgggacatctgggggcgc

SEQ ID NO: 4539 - DNA, 20 bp, synthetic construct
  source 1..20: mol_type = other DNA
cgaagagctcgctccgcttg

SEQ ID NO: 4540 - DNA, 20 bp, synthetic construct
  source 1..20: mol_type = other DNA
tgccaggctgaggccgcgga

SEQ ID NO: 4541 - DNA, 20 bp, synthetic construct
  source 1..20: mol_type = other DNA
ttacacctatatattcctcg

SEQ ID NO: 4542 - DNA, 20 bp, synthetic construct
  source 1..20: mol_type = other DNA
aatccagtcgctggcccttg

SEQ ID NO: 4543 - DNA, 20 bp, synthetic construct
  source 1..20: mol_type = other DNA
cggcccacgagcggatgccc

SEQ ID NO: 4544 - DNA, 20 bp, synthetic construct
  source 1..20: mol_type = other DNA
agcaggaaggcatacctgga

SEQ ID NO: 4545 - DNA, 20 bp, synthetic construct
  source 1..20: mol_type = other DNA
ctcaccagagatgaacagac

SEQ ID NO: 4546 - DNA, 20 bp, synthetic construct
  source 1..20: mol_type = other DNA
ctggattacctcttgccctc

SEQ ID NO: 4547 - DNA, 20 bp, synthetic construct
  source 1..20: mol_type = other DNA
cctgcagattgcagaaggca

SEQ ID NO: 4548 - DNA, 20 bp, synthetic construct
  source 1..20: mol_type = other DNA
ctgcgcaggtagtcaaaggt

SEQ ID NO: 4549 - DNA, 20 bp, synthetic construct
  source 1..20: mol_type = other DNA
agatgcagtcgggcactcac

SEQ ID NO: 4550 - DNA, 20 bp, synthetic construct
  source 1..20: mol_type = other DNA
gggcggtgctacaactgggc

SEQ ID NO: 4551 - DNA, 20 bp, synthetic construct
  source 1..20: mol_type = other DNA
gctgcagtcgattgtactga

SEQ ID NO: 4552 - DNA, 20 bp, synthetic construct
  source 1..20: mol_type = other DNA
gaagaagggcaggtgcgccg

SEQ ID NO: 4553 - DNA, 20 bp, synthetic construct
  source 1..20: mol_type = other DNA
tgcagcgacagcccatccgc

SEQ ID NO: 4554 - DNA, 20 bp, synthetic construct
  source 1..20: mol_type = other DNA
tgcagtggtcctcaatggac

SEQ ID NO: 4555 - DNA, 20 bp, synthetic construct
  source 1..20: mol_type = other DNA
gccgtcacctgaggcgttgc

SEQ ID NO: 4556 - DNA, 20 bp, synthetic construct
  source 1..20: mol_type = other DNA
acctgttgttgtgacgaggc

SEQ ID NO: 4557 - DNA, 20 bp, synthetic construct
  source 1..20: mol_type = other DNA
acaggatgactgggtacctg

SEQ ID NO: 4558 - DNA, 20 bp, synthetic construct
  source 1..20: mol_type = other DNA
ccgcactgattgcactggaa

SEQ ID NO: 4559 - DNA, 20 bp, synthetic construct
  source 1..20: mol_type = other DNA
cctcagacacggttgccccc

SEQ ID NO: 4560 - DNA, 20 bp, synthetic construct
  source 1..20: mol_type = other DNA
tcccaggtcacgcggtggct

SEQ ID NO: 4561 - DNA, 20 bp, synthetic construct
  source 1..20: mol_type = other DNA
ctactcacgggatggggagc

SEQ ID NO: 4562 - DNA, 20 bp, synthetic construct
  source 1..20: mol_type = other DNA
acgactggccagggcgcctg

SEQ ID NO: 4563 - DNA, 20 bp, synthetic construct
  source 1..20: mol_type = other DNA
ctcagaggtaccttctatca

SEQ ID NO: 4564 - DNA, 20 bp, synthetic construct
  source 1..20: mol_type = other DNA
acgcactgagccaggtcctg

SEQ ID NO: 4565 - DNA, 20 bp, synthetic construct
  source 1..20: mol_type = other DNA
gtcctcttcgtggctttctg

SEQ ID NO: 4566 - DNA, 20 bp, synthetic construct
  source 1..20: mol_type = other DNA
tcgccccgacttcctgaccg

SEQ ID NO: 4567 - DNA, 20 bp, synthetic construct
  source 1..20: mol_type = other DNA
gatgacctgtgacggggcag

SEQ ID NO: 4568 - DNA, 20 bp, synthetic construct
  source 1..20: mol_type = other DNA
gtaccagggcatccgctcgt

SEQ ID NO: 4569 - DNA, 20 bp, synthetic construct
  source 1..20: mol_type = other DNA
gcacgaggaaggagccgtca

SEQ ID NO: 4570 - DNA, 20 bp, synthetic construct
  source 1..20: mol_type = other DNA
aggttgtctgtaaagacaag

SEQ ID NO: 4571 - DNA, 20 bp, synthetic construct
  source 1..20: mol_type = other DNA
tgaagaggattccatccagc

SEQ ID NO: 4572 - DNA, 20 bp, synthetic construct
  source 1..20: mol_type = other DNA
acagctctggcacactgtgg

SEQ ID NO: 4573 - DNA, 20 bp, synthetic construct
  source 1..20: mol_type = other DNA
ccccttcggtcaccacgagc

SEQ ID NO: 4574 - DNA, 20 bp, synthetic construct
  source 1..20: mol_type = other DNA
gggcaggaagcagatcgacg

SEQ ID NO: 4575 - DNA, 20 bp, synthetic construct
  source 1..20: mol_type = other DNA
cagtaagtgtggcatcacca

SEQ ID NO: 4576 - DNA, 20 bp, synthetic construct
  source 1..20: mol_type = other DNA
cttaccttgtcagaaaatgg

SEQ ID NO: 4577 - DNA, 20 bp, synthetic construct
  source 1..20: mol_type = other DNA
gccgaacttctcacagcagg

SEQ ID NO: 4578 - DNA, 20 bp, synthetic construct
  source 1..20: mol_type = other DNA
tgcagtagcggccatagacg

SEQ ID NO: 4579 - DNA, 20 bp, synthetic construct
  source 1..20: mol_type = other DNA
ctgacaggccttgcaggatg

SEQ ID NO: 4580 - DNA, 20 bp, synthetic construct
  source 1..20: mol_type = other DNA
aggtttcaggaaccgttgca

SEQ ID NO: 4581 - DNA, 20 bp, synthetic construct
  source 1..20: mol_type = other DNA
gactcactctgaggccacaa

SEQ ID NO: 4582 - DNA, 20 bp, synthetic construct
  source 1..20: mol_type = other DNA
cgtcctcaggtggccagtga

SEQ ID NO: 4583 - DNA, 20 bp, synthetic construct
  source 1..20: mol_type = other DNA
catgtggaagtcacgcccgt

SEQ ID NO: 4584 - DNA, 20 bp, synthetic construct
  source 1..20: mol_type = other DNA
cgggctcactggtgtaatgg

SEQ ID NO: 4585 - DNA, 20 bp, synthetic construct
  source 1..20: mol_type = other DNA
ttaccgtcagccgctctcgg

SEQ ID NO: 4586 - DNA, 20 bp, synthetic construct
  source 1..20: mol_type = other DNA
tcgggtgcgtaccacttgag

SEQ ID NO: 4587 - DNA, 20 bp, synthetic construct
  source 1..20: mol_type = other DNA
ctgcacacaaggagtgtctg

SEQ ID NO: 4588 - DNA, 20 bp, synthetic construct
  source 1..20: mol_type = other DNA
gttccccgtcgatcttgggc

SEQ ID NO: 4589 - DNA, 20 bp, synthetic construct
  source 1..20: mol_type = other DNA
gcagatcaaagagagcctgc

SEQ ID NO: 4590 - DNA, 20 bp, synthetic construct
  source 1..20: mol_type = other DNA
ggaggaggacgctgatcagc

SEQ ID NO: 4591 - DNA, 20 bp, synthetic construct
  source 1..20: mol_type = other DNA
gtcctgaaagagtcaagata

SEQ ID NO: 4592 - DNA, 20 bp, synthetic construct
  source 1..20: mol_type = other DNA
tttccaggagcctgactacg

SEQ ID NO: 4593 - DNA, 20 bp, synthetic construct
  source 1..20: mol_type = other DNA
aagaagggcaggtgcgccgc

SEQ ID NO: 4594 - DNA, 20 bp, synthetic construct
  source 1..20: mol_type = other DNA
ggctcacctgggacatctgg

SEQ ID NO: 4595 - DNA, 20 bp, synthetic construct
  source 1..20: mol_type = other DNA
cttgcagccctcgattccag

SEQ ID NO: 4596 - DNA, 20 bp, synthetic construct
  source 1..20: mol_type = other DNA
tcacgcaccggcatggacac

SEQ ID NO: 4597 - DNA, 20 bp, synthetic construct
  source 1..20: mol_type = other DNA
cacagtgtgtgagaactgca

SEQ ID NO: 4598 - DNA, 20 bp, synthetic construct
  source 1..20: mol_type = other DNA
gtcgagcaggaaggcatacc

SEQ ID NO: 4599 - DNA, 20 bp, synthetic construct
  source 1..20: mol_type = other DNA
cacacgcaagtgagtgcggc

SEQ ID NO: 4600 - DNA, 20 bp, synthetic construct
  source 1..20: mol_type = other DNA
ctccaggtacttcatcccca

SEQ ID NO: 4601 - DNA, 20 bp, synthetic construct
  source 1..20: mol_type = other DNA
ctccccaggcccgctcagca

SEQ ID NO: 4602 - DNA, 20 bp, synthetic construct
  source 1..20: mol_type = other DNA
cttaccgatgtacatggagt

SEQ ID NO: 4603 - DNA, 20 bp, synthetic construct
  source 1..20: mol_type = other DNA
cctcgcacaacacgtgagtg

SEQ ID NO: 4604 - DNA, 20 bp, synthetic construct
  source 1..20: mol_type = other DNA
ggtttcaggaaccgttgcag

SEQ ID NO: 4605 - DNA, 20 bp, synthetic construct
  source 1..20: mol_type = other DNA
cccggcactggatgagccag

SEQ ID NO: 4606 - DNA, 20 bp, synthetic construct
  source 1..20: mol_type = other DNA
gaaacactacctggtacaca

SEQ ID NO: 4607 - DNA, 20 bp, synthetic construct
  source 1..20: mol_type = other DNA
ttaccttcccgctggaatcg

SEQ ID NO: 4608 - DNA, 20 bp, synthetic construct
  source 1..20: mol_type = other DNA
catagctccagacatcgctg

SEQ ID NO: 4609 - DNA, 20 bp, synthetic construct
  source 1..20: mol_type = other DNA
tggttccagatataacgtcg

SEQ ID NO: 4610 - DNA, 20 bp, synthetic construct
  source 1..20: mol_type = other DNA
agagctcagggtgacaggtg

SEQ ID NO: 4611 - DNA, 20 bp, synthetic construct
  source 1..20: mol_type = other DNA
gacaagttcagagagctcca

SEQ ID NO: 4612 - DNA, 20 bp, synthetic construct
  source 1..20: mol_type = other DNA
cagcacaagaagctggctga

SEQ ID NO: 4613 - DNA, 20 bp, synthetic construct
  source 1..20: mol_type = other DNA
ttgcaggtacgcaggcccca

SEQ ID NO: 4614 - DNA, 20 bp, synthetic construct
  source 1..20: mol_type = other DNA
gtaccttgaaagttggcata

SEQ ID NO: 4615 - DNA, 20 bp, synthetic construct
  source 1..20: mol_type = other DNA
cttgaaggggctcactaaag

SEQ ID NO: 4616 - DNA, 20 bp, synthetic construct
  source 1..20: mol_type = other DNA
ccacctcgaggctgcggcag

SEQ ID NO: 4617 - DNA, 20 bp, synthetic construct
  source 1..20: mol_type = other DNA
agaagcgagccccatcgatg

SEQ ID NO: 4618 - DNA, 20 bp, synthetic construct
  source 1..20: mol_type = other DNA
aggaggactcactggagaac

SEQ ID NO: 4619 - DNA, 20 bp, synthetic construct
  source 1..20: mol_type = other DNA
gtcatccttcccggaaacca

SEQ ID NO: 4620 - DNA, 20 bp, synthetic construct
  source 1..20: mol_type = other DNA
gctgaggccgcggaaggagc

SEQ ID NO: 4621 - DNA, 20 bp, synthetic construct
  source 1..20: mol_type = other DNA
ggcgcaggagcggcgagtgg

SEQ ID NO: 4622 - DNA, 20 bp, synthetic construct
  source 1..20: mol_type = other DNA
gtaggccatggctttgaatg

SEQ ID NO: 4623 - DNA, 20 bp, synthetic construct
  source 1..20: mol_type = other DNA
gatggagactttatatgctg

SEQ ID NO: 4624 - DNA, 20 bp, synthetic construct
  source 1..20: mol_type = other DNA
aacccacagcgacacggtgg

SEQ ID NO: 4625 - DNA, 20 bp, synthetic construct
  source 1..20: mol_type = other DNA
ggccaggatggttcttaggt

SEQ ID NO: 4626 - DNA, 20 bp, synthetic construct
  source 1..20: mol_type = other DNA
acgaagcaggtcctactcgg

SEQ ID NO: 4627 - DNA, 20 bp, synthetic construct
  source 1..20: mol_type = other DNA
cacgaggaaggagccgtcag

SEQ ID NO: 4628 - DNA, 20 bp, synthetic construct
  source 1..20: mol_type = other DNA
ccttcttgaaatagtcagca

SEQ ID NO: 4629 - DNA, 20 bp, synthetic construct
  source 1..20: mol_type = other DNA
ccggcactggatgagccagt

SEQ ID NO: 4630 - DNA, 20 bp, synthetic construct
  source 1..20: mol_type = other DNA
agggcatgtcaatattactg

SEQ ID NO: 4631 - DNA, 20 bp, synthetic construct
  source 1..20: mol_type = other DNA
cttctgtctattgaaggagc

SEQ ID NO: 4632 - DNA, 20 bp, synthetic construct
  source 1..20: mol_type = other DNA
agtcctgaaagagtcaagat

SEQ ID NO: 4633 - DNA, 20 bp, synthetic construct
  source 1..20: mol_type = other DNA
ctctcttacctcttcctccg

SEQ ID NO: 4634 - DNA, 20 bp, synthetic construct
  source 1..20: mol_type = other DNA
aaacactacctggtacacac

SEQ ID NO: 4635 - DNA, 20 bp, synthetic construct
  source 1..20: mol_type = other DNA
cctctataggtatcttgaag

SEQ ID NO: 4636 - DNA, 20 bp, synthetic construct
  source 1..20: mol_type = other DNA
gcattggcgccacagctcca

SEQ ID NO: 4637 - DNA, 20 bp, synthetic construct
  source 1..20: mol_type = other DNA
gtttccaggagcctgactac

SEQ ID NO: 4638 - DNA, 20 bp, synthetic construct
  source 1..20: mol_type = other DNA
cacatacaggaacttgccgt

SEQ ID NO: 4639 - DNA, 20 bp, synthetic construct
  source 1..20: mol_type = other DNA
gcaggatgtggtctcctcaa

SEQ ID NO: 4640 - DNA, 20 bp, synthetic construct
  source 1..20: mol_type = other DNA
gcagatggaggaggccatcc

SEQ ID NO: 4641 - DNA, 20 bp, synthetic construct
  source 1..20: mol_type = other DNA
ggaactcaagatcacctcgg

SEQ ID NO: 4642 - DNA, 20 bp, synthetic construct
  source 1..20: mol_type = other DNA
tgtaccttgaaagttggcat

SEQ ID NO: 4643 - DNA, 20 bp, synthetic construct
  source 1..20: mol_type = other DNA
tccaggtctgcccaagatgg

SEQ ID NO: 4644 - DNA, 20 bp, synthetic construct
  source 1..20: mol_type = other DNA
gcggtgaagagcctgaagca

SEQ ID NO: 4645 - DNA, 20 bp, synthetic construct
  source 1..20: mol_type = other DNA
tattatgtctgctaccccag

SEQ ID NO: 4646 - DNA, 20 bp, synthetic construct
  source 1..20: mol_type = other DNA
agagacaggtaaagctctca

SEQ ID NO: 4647 - DNA, 20 bp, synthetic construct
  source 1..20: mol_type = other DNA
ccacagcgacacggtggagg

SEQ ID NO: 4648 - DNA, 20 bp, synthetic construct
  source 1..20: mol_type = other DNA
agagaagggtagccagtacc

SEQ ID NO: 4649 - DNA, 20 bp, synthetic construct
  source 1..20: mol_type = other DNA
tgacgttacctcgtgcggcc

SEQ ID NO: 4650 - DNA, 20 bp, synthetic construct
  source 1..20: mol_type = other DNA
cgactggccagggcgcctgt

SEQ ID NO: 4651 - DNA, 20 bp, synthetic construct
  source 1..20: mol_type = other DNA
gacacagaaggacaccatcc

SEQ ID NO: 4652 - DNA, 20 bp, synthetic construct
  source 1..20: mol_type = other DNA
cacacagctctggcacactg

SEQ ID NO: 4653 - DNA, 20 bp, synthetic construct
  source 1..20: mol_type = other DNA
ggcctcagcctggcagggga

SEQ ID NO: 4654 - DNA, 20 bp, synthetic construct
  source 1..20: mol_type = other DNA
aaggagaggtgagacccagc

SEQ ID NO: 4655 - DNA, 20 bp, synthetic construct
  source 1..20: mol_type = other DNA
cacagctctggcacactgtg

SEQ ID NO: 4656 - DNA, 20 bp, synthetic construct
  source 1..20: mol_type = other DNA
acagaaggacaccatcccgg

SEQ ID NO: 4657 - DNA, 20 bp, synthetic construct
  source 1..20: mol_type = other DNA
cacagtgtgccagagctgtg

SEQ ID NO: 4658 - DNA, 20 bp, synthetic construct
  source 1..20: mol_type = other DNA
gaagaacagctcatagccct

SEQ ID NO: 4659 - DNA, 20 bp, synthetic construct
  source 1..20: mol_type = other DNA
cagaaggacaccatcccgga

SEQ ID NO: 4660 - DNA, 20 bp, synthetic construct
  source 1..20: mol_type = other DNA
ggatgagccagtgggtgcat

SEQ ID NO: 4661 - DNA, 20 bp, synthetic construct
  source 1..20: mol_type = other DNA
ccaagaaagtcccgtccgag

SEQ ID NO: 4662 - DNA, 20 bp, synthetic construct
  source 1..20: mol_type = other DNA
ccgggaaggatgacatgtcc

SEQ ID NO: 4663 - DNA, 20 bp, synthetic construct
  source 1..20: mol_type = other DNA
agcaggagccccagcacgca

SEQ ID NO: 4664 - DNA, 20 bp, synthetic construct
  source 1..20: mol_type = other DNA
cccactcacctggcagtctg

SEQ ID NO: 4665 - DNA, 20 bp, synthetic construct
  source 1..20: mol_type = other DNA
cgaagcaggtcctactcgga

SEQ ID NO: 4666 - DNA, 20 bp, synthetic construct
  source 1..20: mol_type = other DNA
gccatcaaggtgctgaagca

SEQ ID NO: 4667 - DNA, 20 bp, synthetic construct
  source 1..20: mol_type = other DNA
tctggcacactgtgggggaa

SEQ ID NO: 4668 - DNA, 20 bp, synthetic construct
  source 1..20: mol_type = other DNA
actcaccctcatggcatcca

SEQ ID NO: 4669 - DNA, 20 bp, synthetic construct
  source 1..20: mol_type = other DNA
ctgaggccgcggaaggagca

SEQ ID NO: 4670 - DNA, 20 bp, synthetic construct
  source 1..20: mol_type = other DNA
tgtttccaggagcctgacta

SEQ ID NO: 4671 - DNA, 20 bp, synthetic construct
  source 1..20: mol_type = other DNA
aggtgagcccactcaggagg

SEQ ID NO: 4672 - DNA, 20 bp, synthetic construct
  source 1..20: mol_type = other DNA
cctacctgctggcctgctga

SEQ ID NO: 4673 - DNA, 20 bp, synthetic construct
  source 1..20: mol_type = other DNA
tcttacctcttcctccgcgg

SEQ ID NO: 4674 - DNA, 20 bp, synthetic construct
  source 1..20: mol_type = other DNA
gtccacctgagagtgcacag

SEQ ID NO: 4675 - DNA, 20 bp, synthetic construct
  source 1..20: mol_type = other DNA
tcatgacggtgcccacctcg

SEQ ID NO: 4676 - DNA, 20 bp, synthetic construct
  source 1..20: mol_type = other DNA
gtcaggtacctggataggca

SEQ ID NO: 4677 - DNA, 20 bp, synthetic construct
  source 1..20: mol_type = other DNA
taccttcccgctggaatcga

SEQ ID NO: 4678 - DNA, 20 bp, synthetic construct
  source 1..20: mol_type = other DNA
acacagctctggcacactgt

SEQ ID NO: 4679 - DNA, 20 bp, synthetic construct
  source 1..20: mol_type = other DNA
gcaggagccccagcacgcag

SEQ ID NO: 4680 - DNA, 20 bp, synthetic construct
  source 1..20: mol_type = other DNA
gggctcacctgggacatctg

SEQ ID NO: 4681 - DNA, 20 bp, synthetic construct
  source 1..20: mol_type = other DNA
tgggcggcagcacccggcac

SEQ ID NO: 4682 - DNA, 20 bp, synthetic construct
  source 1..20: mol_type = other DNA
cacacacagtgccatcaaca

SEQ ID NO: 4683 - DNA, 20 bp, synthetic construct
  source 1..20: mol_type = other DNA
agtggacatctgcatcactg

SEQ ID NO: 4684 - DNA, 20 bp, synthetic construct
  source 1..20: mol_type = other DNA
gtggacatctgcatcactgg

SEQ ID NO: 4685 - DNA, 20 bp, synthetic construct
  source 1..20: mol_type = other DNA
ccccaggcccttccccaccg

SEQ ID NO: 4686 - DNA, 20 bp, synthetic construct
  source 1..20: mol_type = other DNA
cgcccagcgagcgcaggcac

SEQ ID NO: 4687 - DNA, 20 bp, synthetic construct
  source 1..20: mol_type = other DNA
acttcgataatgaacttgca

SEQ ID NO: 4688 - DNA, 20 bp, synthetic construct
  source 1..20: mol_type = other DNA
gcctcagcctggcaggggaa

SEQ ID NO: 4689 - DNA, 20 bp, synthetic construct
  source 1..20: mol_type = other DNA
gcctaccgagtgattccggc

SEQ ID NO: 4690 - DNA, 20 bp, synthetic construct
  source 1..20: mol_type = other DNA
tggccaggatgggcagcagc

SEQ ID NO: 4691 - DNA, 20 bp, synthetic construct
  source 1..20: mol_type = other DNA
cagcaggagccccagcacgc

SEQ ID NO: 4692 - DNA, 20 bp, synthetic construct
  source 1..20: mol_type = other DNA
agcagggctggggagaaggt

SEQ ID NO: 4693 - DNA, 20 bp, synthetic construct
  source 1..20: mol_type = other DNA
tgagcagaagatgaaagggc

SEQ ID NO: 4694 - DNA, 20 bp, synthetic construct
  source 1..20: mol_type = other DNA
ctgtgcatatgagctggggc

SEQ ID NO: 4695 - DNA, 20 bp, synthetic construct
  source 1..20: mol_type = other DNA
gaatccatcttcctgaccct

SEQ ID NO: 4696 - DNA, 20 bp, synthetic construct
  source 1..20: mol_type = other DNA
gtacctggataggcaaggag

SEQ ID NO: 4697 - DNA, 20 bp, synthetic construct
  source 1..20: mol_type = other DNA
ggcacactgtgggggaaggg

SEQ ID NO: 4698 - DNA, 20 bp, synthetic construct
  source 1..20: mol_type = other DNA
caccctacctggaaactgac

SEQ ID NO: 4699 - DNA, 20 bp, synthetic construct
  source 1..20: mol_type = other DNA
cacgagcagggctggggaga

SEQ ID NO: 4700 - DNA, 20 bp, synthetic construct
  source 1..20: mol_type = other DNA
agtacaggcagatgtgcagc

SEQ ID NO: 4701 - DNA, 20 bp, synthetic construct
  source 1..20: mol_type = other DNA
gacgttacctcgtgcggccc

SEQ ID NO: 4702 - DNA, 20 bp, synthetic construct
  source 1..20: mol_type = other DNA
tggagaactggtccccggtc

SEQ ID NO: 4703 - DNA, 20 bp, synthetic construct
  source 1..20: mol_type = other DNA
aatccatcttcctgaccctt

SEQ ID NO: 4704 - DNA, 20 bp, synthetic construct
  source 1..20: mol_type = other DNA
tgagcagtccccacatcagc

SEQ ID NO: 4705 - DNA, 20 bp, synthetic construct
  source 1..20: mol_type = other DNA
ccagggagatggccccacag

SEQ ID NO: 4706 - DNA, 20 bp, synthetic construct
  source 1..20: mol_type = other DNA
ggtgacaggtgcggcctcgg

SEQ ID NO: 4707 - DNA, 20 bp, synthetic construct
  source 1..20: mol_type = other DNA
tgtagcaccgcccagacgac

SEQ ID NO: 4708 - DNA, 20 bp, synthetic construct
  source 1..20: mol_type = other DNA
tccaggcatgcagatcccac

SEQ ID NO: 4709 - DNA, 20 bp, synthetic construct
  source 1..20: mol_type = other DNA
tgtgcatatgagctggggct

SEQ ID NO: 4710 - DNA, 20 bp, synthetic construct
  source 1..20: mol_type = other DNA
cttgcattcacagttcaaca

SEQ ID NO: 4711 - DNA, 20 bp, synthetic construct
  source 1..20: mol_type = other DNA
ggatacagggctctacacag

SEQ ID NO: 4712 - DNA, 20 bp, synthetic construct
  source 1..20: mol_type = other DNA
ggtccaccttgtcttcccgt

SEQ ID NO: 4713 - DNA, 20 bp, synthetic construct
  source 1..20: mol_type = other DNA
gatcagcaggaaaacacagc

SEQ ID NO: 4714 - DNA, 20 bp, synthetic construct
  source 1..20: mol_type = other DNA
gggtccaccttgtcttcccg

SEQ ID NO: 4715 - DNA, 20 bp, synthetic construct
  source 1..20: mol_type = other DNA
cacctacctaagaaccatcc

SEQ ID NO: 4716 - DNA, 20 bp, synthetic construct
  source 1..20: mol_type = other DNA
ggagatggccccacagaggt

SEQ ID NO: 4717 - DNA, 20 bp, synthetic construct
  source 1..20: mol_type = other DNA
cccaggtgaagagaagcctc

SEQ ID NO: 4718 - DNA, 20 bp, synthetic construct
  source 1..20: mol_type = other DNA
gccaggtgagcccactcagg

SEQ ID NO: 4719 - DNA, 20 bp, synthetic construct
  source 1..20: mol_type = other DNA
tcaccctgagctctgcccgc

SEQ ID NO: 4720 - DNA, 20 bp, synthetic construct
  source 1..20: mol_type = other DNA
ccgcacctgttgttgtgacg

SEQ ID NO: 4721 - DNA, 20 bp, synthetic construct
  source 1..20: mol_type = other DNA
gcagtgacctggaagatgga

SEQ ID NO: 4722 - DNA, 20 bp, synthetic construct
  source 1..20: mol_type = other DNA
ccctgcagtgacctggaaga

SEQ ID NO: 4723 - DNA, 20 bp, synthetic construct
  source 1..20: mol_type = other DNA
acacttcatgatggagttga

SEQ ID NO: 4724 - DNA, 20 bp, synthetic construct
  source 1..20: mol_type = other DNA
gcaatgatctgaggagggaa

SEQ ID NO: 4725 - DNA, 20 bp, synthetic construct
  source 1..20: mol_type = other DNA
agctgtagccgcgctcggtg

SEQ ID NO: 4726 - DNA, 20 bp, synthetic construct
  source 1..20: mol_type = other DNA
gctgatccacatctgctgga

SEQ ID NO: 4727 - DNA, 20 bp, synthetic construct
  source 1..20: mol_type = other DNA
tcacctgggtcatcttctcg

SEQ ID NO: 4728 - DNA, 20 bp, synthetic construct
  source 1..20: mol_type = other DNA
gtcacgcacgatttcccgct

SEQ ID NO: 4729 - DNA, 20 bp, synthetic construct
  source 1..20: mol_type = other DNA
ggctccggcatgtgcaaggc

SEQ ID NO: 4730 - DNA, 20 bp, synthetic construct
  source 1..20: mol_type = other DNA
gtgacgatgccgtgctcgat

SEQ ID NO: 4731 - DNA, 20 bp, synthetic construct
  source 1..20: mol_type = other DNA
aaggctggaagagtgcctca

SEQ ID NO: 4732 - DNA, 20 bp, synthetic construct
  source 1..20: mol_type = other DNA
acggagtacttgcgctcagg

SEQ ID NO: 4733 - DNA, 20 bp, synthetic construct
  source 1..20: mol_type = other DNA
catgcccaccatcacgccct

SEQ ID NO: 4734 - DNA, 20 bp, synthetic construct
  source 1..20: mol_type = other DNA
cggctacagcttcaccacca

SEQ ID NO: 4735 - DNA, 20 bp, synthetic construct
  source 1..20: mol_type = other DNA
gccgccagacagcactgtgt

SEQ ID NO: 4736 - DNA, 20 bp, synthetic construct
  source 1..20: mol_type = other DNA
ctgagcgcaagtactccgtg

SEQ ID NO: 4737 - DNA, 20 bp, synthetic construct
  source 1..20: mol_type = other DNA
tggggcgccccacgatggag

SEQ ID NO: 4738 - DNA, 20 bp, synthetic construct
  source 1..20: mol_type = other DNA
ctgaagtaccccatcgagca

SEQ ID NO: 4739 - DNA, 20 bp, synthetic construct
  source 1..20: mol_type = other DNA
gaagcatttgcggtggacga

SEQ ID NO: 4740 - DNA, 20 bp, synthetic construct
  source 1..20: mol_type = other DNA
ggttggccttggggttcagg

SEQ ID NO: 4741 - DNA, 20 bp, synthetic construct
  source 1..20: mol_type = other DNA
gtacatggctggggtgttga

SEQ ID NO: 4742 - DNA, 20 bp, synthetic construct
  source 1..20: mol_type = other DNA
tggaggggaagacggcccgg

SEQ ID NO: 4743 - DNA, 20 bp, synthetic construct
  source 1..20: mol_type = other DNA
cgcggcgatatcatcatcca

SEQ ID NO: 4744 - DNA, 20 bp, synthetic construct
  source 1..20: mol_type = other DNA
cacacggagtacttgcgctc

SEQ ID NO: 4745 - DNA, 20 bp, synthetic construct
  source 1..20: mol_type = other DNA
catttgcggtggacgatgga

SEQ ID NO: 4746 - DNA, 20 bp, synthetic construct
  source 1..20: mol_type = other DNA
ggaggagcaatgatctgagg

SEQ ID NO: 4747 - DNA, 20 bp, synthetic construct
  source 1..20: mol_type = other DNA
tgagcggttccgctgccctg

SEQ ID NO: 4748 - DNA, 20 bp, synthetic construct
  source 1..20: mol_type = other DNA
gacggccaggtcatcaccat

SEQ ID NO: 4749 - DNA, 20 bp, synthetic construct
  source 1..20: mol_type = other DNA
ctgggtcatcttctcgcggt

SEQ ID NO: 4750 - DNA, 20 bp, synthetic construct
  source 1..20: mol_type = other DNA
cgtacagggatagcacagcc

SEQ ID NO: 4751 - DNA, 20 bp, synthetic construct
  source 1..20: mol_type = other DNA
agggcatacccctcgtagat

SEQ ID NO: 4752 - DNA, 20 bp, synthetic construct
  source 1..20: mol_type = other DNA
gaagccggccttgcacatgc

SEQ ID NO: 4753 - DNA, 20 bp, synthetic construct
  source 1..20: mol_type = other DNA
gcagctcgtagctcttctcc

SEQ ID NO: 4754 - DNA, 20 bp, synthetic construct
  source 1..20: mol_type = other DNA
atctgaggagggaaggggac

SEQ ID NO: 4755 - DNA, 20 bp, synthetic construct
  source 1..20: mol_type = other DNA
gcggttggccttggggttca

SEQ ID NO: 4756 - DNA, 20 bp, synthetic construct
  source 1..20: mol_type = other DNA
gctcccctacctggtgcctg

SEQ ID NO: 4757 - DNA, 20 bp, synthetic construct
  source 1..20: mol_type = other DNA
gggcctcggtcagcagcacg

SEQ ID NO: 4758 - DNA, 20 bp, synthetic construct
  source 1..20: mol_type = other DNA
cttcgagcaagagatggcca

SEQ ID NO: 4759 - DNA, 20 bp, synthetic construct
  source 1..20: mol_type = other DNA
cagctcgtagctcttctcca

SEQ ID NO: 4760 - DNA, 20 bp, synthetic construct
  source 1..20: mol_type = other DNA
ctgctggaaggtggacagcg

SEQ ID NO: 4761 - DNA, 20 bp, synthetic construct
  source 1..20: mol_type = other DNA
tggatagcaacgtacatggc

SEQ ID NO: 4762 - DNA, 20 bp, synthetic construct
  source 1..20: mol_type = other DNA
cggttggccttggggttcag

SEQ ID NO: 4763 - DNA, 20 bp, synthetic construct
  source 1..20: mol_type = other DNA
aagcaggagtatgacgagtc

SEQ ID NO: 4764 - DNA, 20 bp, synthetic construct
  source 1..20: mol_type = other DNA
cgtgatggactccggtgacg

SEQ ID NO: 4765 - DNA, 20 bp, synthetic construct
  source 1..20: mol_type = other DNA
ccgtcttcccctccatcgtg

SEQ ID NO: 4766 - DNA, 20 bp, synthetic construct
  source 1..20: mol_type = other DNA
catcacgccctgggaaggaa

SEQ ID NO: 4767 - DNA, 20 bp, synthetic construct
  source 1..20: mol_type = other DNA
ccgcctagaagcatttgcgg

SEQ ID NO: 4768 - DNA, 20 bp, synthetic construct
  source 1..20: mol_type = other DNA
gaggatgcctctcttgctct

SEQ ID NO: 4769 - DNA, 20 bp, synthetic construct
  source 1..20: mol_type = other DNA
gcatttgcggtggacgatgg

SEQ ID NO: 4770 - DNA, 20 bp, synthetic construct
  source 1..20: mol_type = other DNA
cttctacaatgagctgcgtg

SEQ ID NO: 4771 - DNA, 20 bp, synthetic construct
  source 1..20: mol_type = other DNA
gcagatgtggatcagcaagc

SEQ ID NO: 4772 - DNA, 20 bp, synthetic construct
  source 1..20: mol_type = other DNA
atcgtgatggactccggtga

SEQ ID NO: 4773 - DNA, 20 bp, synthetic construct
  source 1..20: mol_type = other DNA
cctggggcgccccacgatgg

SEQ ID NO: 4774 - DNA, 20 bp, synthetic construct
  source 1..20: mol_type = other DNA
ggtctcaaacatgatctgta

SEQ ID NO: 4775 - DNA, 20 bp, synthetic construct
  source 1..20: mol_type = other DNA
ggaaggtggacagcgaggcc

SEQ ID NO: 4776 - DNA, 20 bp, synthetic construct
  source 1..20: mol_type = other DNA
gagggcatacccctcgtaga

SEQ ID NO: 4777 - DNA, 20 bp, synthetic construct
  source 1..20: mol_type = other DNA
gatggagccgccgatccaca

SEQ ID NO: 4778 - DNA, 20 bp, synthetic construct
  source 1..20: mol_type = other DNA
gctcggtgaggatcttcatg

SEQ ID NO: 4779 - DNA, 20 bp, synthetic construct
  source 1..20: mol_type = other DNA
tccagacgcaggatggcatg

SEQ ID NO: 4780 - DNA, 20 bp, synthetic construct
  source 1..20: mol_type = other DNA
tacgcctctggccgtaccac

SEQ ID NO: 4781 - DNA, 20 bp, synthetic construct
  source 1..20: mol_type = other DNA
ggtcagaaggattcctatgt

SEQ ID NO: 4782 - DNA, 20 bp, synthetic construct
  source 1..20: mol_type = other DNA
gcttgctgatccacatctgc

SEQ ID NO: 4783 - DNA, 20 bp, synthetic construct
  source 1..20: mol_type = other DNA
agcaatgatctgaggaggga

SEQ ID NO: 4784 - DNA, 20 bp, synthetic construct
  source 1..20: mol_type = other DNA
tggagttgaaggtagtttcg

SEQ ID NO: 4785 - DNA, 20 bp, synthetic construct
  source 1..20: mol_type = other DNA
atgtgcaaggccggcttcgc

SEQ ID NO: 4786 - DNA, 20 bp, synthetic construct
  source 1..20: mol_type = other DNA
gggggcctcggtcagcagca

SEQ ID NO: 4787 - DNA, 20 bp, synthetic construct
  source 1..20: mol_type = other DNA
ccatgcccaccatcacgccc

SEQ ID NO: 4788 - DNA, 20 bp, synthetic construct
  source 1..20: mol_type = other DNA
cccaccatcacgccctggga

SEQ ID NO: 4789 - DNA, 20 bp, synthetic construct
  source 1..20: mol_type = other DNA
ggtgacgatgccgtgctcga

SEQ ID NO: 4790 - DNA, 20 bp, synthetic construct
  source 1..20: mol_type = other DNA
cctgagagggaaatgagggc

SEQ ID NO: 4791 - DNA, 20 bp, synthetic construct
  source 1..20: mol_type = other DNA
cagcagcacggggtgctcct

SEQ ID NO: 4792 - DNA, 20 bp, synthetic construct
  source 1..20: mol_type = other DNA
cttcaccaccacggccgagc

SEQ ID NO: 4793 - DNA, 20 bp, synthetic construct
  source 1..20: mol_type = other DNA
tgaggatgcctctcttgctc

SEQ ID NO: 4794 - DNA, 20 bp, synthetic construct
  source 1..20: mol_type = other DNA
gggtcagaaggattcctatg

SEQ ID NO: 4795 - DNA, 20 bp, synthetic construct
  source 1..20: mol_type = other DNA
ggaagagtgcctcagggcag

SEQ ID NO: 4796 - DNA, 20 bp, synthetic construct
  source 1..20: mol_type = other DNA
ccttcccagggcgtgatggt

SEQ ID NO: 4797 - DNA, 20 bp, synthetic construct
  source 1..20: mol_type = other DNA
catgcctgagagggaaatga

SEQ ID NO: 4798 - DNA, 20 bp, synthetic construct
  source 1..20: mol_type = other DNA
tgaggtagtcagtcaggtcc

SEQ ID NO: 4799 - DNA, 20 bp, synthetic construct
  source 1..20: mol_type = other DNA
accttgatcttcattgtgct

SEQ ID NO: 4800 - DNA, 20 bp, synthetic construct
  source 1..20: mol_type = other DNA
cgatggaggggaagacggcc

SEQ ID NO: 4801 - DNA, 20 bp, synthetic construct
  source 1..20: mol_type = other DNA
ctccactcacccaggaagga

SEQ ID NO: 4802 - DNA, 20 bp, synthetic construct
  source 1..20: mol_type = other DNA
gatccacatctgctggaagg

SEQ ID NO: 4803 - DNA, 20 bp, synthetic construct
  source 1..20: mol_type = other DNA
agccaggtccagacgcagga

SEQ ID NO: 4804 - DNA, 20 bp, synthetic construct
  source 1..20: mol_type = other DNA
tgacgatgccgtgctcgatg

SEQ ID NO: 4805 - DNA, 20 bp, synthetic construct
  source 1..20: mol_type = other DNA
tcaggaggagcaatgatctg

SEQ ID NO: 4806 - DNA, 20 bp, synthetic construct
  source 1..20: mol_type = other DNA
ggatagcaacgtacatggct

SEQ ID NO: 4807 - DNA, 20 bp, synthetic construct
  source 1..20: mol_type = other DNA
gccgttgtcgacgacgagcg

SEQ ID NO: 4808 - DNA, 20 bp, synthetic construct
  source 1..20: mol_type = other DNA
acgcaggatggcatggggga

SEQ ID NO: 4809 - DNA, 20 bp, synthetic construct
  source 1..20: mol_type = other DNA
caccttgatcttcattgtgc

SEQ ID NO: 4810 - DNA, 20 bp, synthetic construct
  source 1..20: mol_type = other DNA
cacgatttcccgctcggccg

SEQ ID NO: 4811 - DNA, 20 bp, synthetic construct
  source 1..20: mol_type = other DNA
ggaggggaagacggcccggg

SEQ ID NO: 4812 - DNA, 20 bp, synthetic construct
  source 1..20: mol_type = other DNA
ctctcaggcatggagtcctg

SEQ ID NO: 4813 - DNA, 20 bp, synthetic construct
  source 1..20: mol_type = other DNA
gatgccagtggtacggccag

SEQ ID NO: 4814 - DNA, 20 bp, synthetic construct
  source 1..20: mol_type = other DNA
gacgaggcccagagcaagag

SEQ ID NO: 4815 - DNA, 20 bp, synthetic construct
  source 1..20: mol_type = other DNA
gaggagcaatgatctgagga

SEQ ID NO: 4816 - DNA, 20 bp, synthetic construct
  source 1..20: mol_type = other DNA
actcacccaggaaggaaggc

SEQ ID NO: 4817 - DNA, 20 bp, synthetic construct
  source 1..20: mol_type = other DNA
gccgtcttcccctccatcgt

SEQ ID NO: 4818 - DNA, 20 bp, synthetic construct
  source 1..20: mol_type = other DNA
gtccagacgcaggatggcat

SEQ ID NO: 4819 - DNA, 20 bp, synthetic construct
  source 1..20: mol_type = other DNA
ccccacgatggaggggaaga

SEQ ID NO: 4820 - DNA, 20 bp, synthetic construct
  source 1..20: mol_type = other DNA
ctcgtagatgggcacagtgt

SEQ ID NO: 4821 - DNA, 20 bp, synthetic construct
  source 1..20: mol_type = other DNA
gcgccccaggcaccaggtag

SEQ ID NO: 4822 - DNA, 20 bp, synthetic construct
  source 1..20: mol_type = other DNA
cctcgtagatgggcacagtg

SEQ ID NO: 4823 - DNA, 20 bp, synthetic construct
  source 1..20: mol_type = other DNA
ctggggcgccccacgatgga

SEQ ID NO: 4824 - DNA, 20 bp, synthetic construct
  source 1..20: mol_type = other DNA
gcagctcattgtagaaggtg

SEQ ID NO: 4825 - DNA, 20 bp, synthetic construct
  source 1..20: mol_type = other DNA
gtccacgtcacacttcatga

SEQ ID NO: 4826 - DNA, 20 bp, synthetic construct
  source 1..20: mol_type = other DNA
cgcggttggccttggggttc

SEQ ID NO: 4827 - DNA, 20 bp, synthetic construct
  source 1..20: mol_type = other DNA
ggcgccccaggcaccaggta

SEQ ID NO: 4828 - DNA, 20 bp, synthetic construct
  source 1..20: mol_type = other DNA
ggtgaagctgtagccgcgct

SEQ ID NO: 4829 - DNA, 20 bp, synthetic construct
  source 1..20: mol_type = other DNA
agcctggatagcaacgtaca

SEQ ID NO: 4830 - DNA, 20 bp, synthetic construct
  source 1..20: mol_type = other DNA
gcagaaggagatcactgccc

SEQ ID NO: 4831 - DNA, 20 bp, synthetic construct
  source 1..20: mol_type = other DNA
gcggaaccgctcattgccaa

SEQ ID NO: 4832 - DNA, 20 bp, synthetic construct
  source 1..20: mol_type = other DNA
tgaggtagtcggtcaggtcc

SEQ ID NO: 4833 - DNA, 20 bp, synthetic construct
  source 1..20: mol_type = other DNA
gatggccaggtcatcaccat

SEQ ID NO: 4834 - DNA, 20 bp, synthetic construct
  source 1..20: mol_type = other DNA
ctcgtagatgggcaccgtgt

SEQ ID NO: 4835 - DNA, 20 bp, synthetic construct
  source 1..20: mol_type = other DNA
ctggggcgcccgacgatgga

SEQ ID NO: 4836 - DNA, 20 bp, synthetic construct
  source 1..20: mol_type = other DNA
cctcgtagatgggcaccgtg

SEQ ID NO: 4837 - DNA, 20 bp, synthetic construct
  source 1..20: mol_type = other DNA
gctaatccacatctgctgga

SEQ ID NO: 4838 - DNA, 20 bp, synthetic construct
  source 1..20: mol_type = other DNA
gtcgcgcacgatttcccgct

SEQ ID NO: 4839 - DNA, 20 bp, synthetic construct
  source 1..20: mol_type = other DNA
aggctacagcttcaccacca

SEQ ID NO: 4840 - DNA, 20 bp, synthetic construct
  source 1..20: mol_type = other DNA
gctcagtgaggatcttcatg

SEQ ID NO: 4841 - DNA, 20 bp, synthetic construct
  source 1..20: mol_type = other DNA
ctgttggccttggggttcag

SEQ ID NO: 4842 - DNA, 20 bp, synthetic construct
  source 1..20: mol_type = other DNA
ccggaaccgctcattgccaa

SEQ ID NO: 4843 - DNA, 20 bp, synthetic construct
  source 1..20: mol_type = other DNA
cacaccgagtacttgcgctc

SEQ ID NO: 4844 - DNA, 20 bp, synthetic construct
  source 1..20: mol_type = other DNA
ctgctggaaggtggacagtg

SEQ ID NO: 4845 - DNA, 20 bp, synthetic construct
  source 1..20: mol_type = other DNA
cgtagagggacagcacggcc

SEQ ID NO: 4846 - DNA, 20 bp, synthetic construct
  source 1..20: mol_type = other DNA
gcagctcgttgtagaaggtg

SEQ ID NO: 4847 - DNA, 20 bp, synthetic construct
  source 1..20: mol_type = other DNA
gtacatggccggggtgttga

SEQ ID NO: 4848 - DNA, 20 bp, synthetic construct
  source 1..20: mol_type = other DNA
aatccacatctgctggaagg

SEQ ID NO: 4849 - DNA, 20 bp, synthetic construct
  source 1..20: mol_type = other DNA
gccgcccgacagcaccgtgt

SEQ ID NO: 4850 - DNA, 20 bp, synthetic construct
  source 1..20: mol_type = other DNA
gagggacagcacggcctgga

SEQ ID NO: 4851 - DNA, 20 bp, synthetic construct
  source 1..20: mol_type = other DNA
cagtggtccactgcaggcag

SEQ ID NO: 4852 - DNA, 20 bp, synthetic construct
  source 1..20: mol_type = other DNA
agcagaggcggtcgtgggtc

SEQ ID NO: 4853 - DNA, 20 bp, synthetic construct
  source 1..20: mol_type = other DNA
ggtggaagaacagctgcggg

SEQ ID NO: 4854 - DNA, 20 bp, synthetic construct
  source 1..20: mol_type = other DNA
ccgctccttgtagccaatga

SEQ ID NO: 4855 - DNA, 20 bp, synthetic construct
  source 1..20: mol_type = other DNA
ttgtcctccagcacctgcac

SEQ ID NO: 4856 - DNA, 20 bp, synthetic construct
  source 1..20: mol_type = other DNA
gtcatgtacgagatgatgtg

SEQ ID NO: 4857 - DNA, 20 bp, synthetic construct
  source 1..20: mol_type = other DNA
gtgctggaggacaatgacta

SEQ ID NO: 4858 - DNA, 20 bp, synthetic construct
  source 1..20: mol_type = other DNA
tggaggacaatgactatggc

SEQ ID NO: 4859 - DNA, 20 bp, synthetic construct
  source 1..20: mol_type = other DNA
acaggtggaagaacagctgc

SEQ ID NO: 4860 - DNA, 20 bp, synthetic construct
  source 1..20: mol_type = other DNA
ccttcattgggtacaaggag

SEQ ID NO: 4861 - DNA, 20 bp, synthetic construct
  source 1..20: mol_type = other DNA
cgtgtgcaggagtttgacag

SEQ ID NO: 4862 - DNA, 20 bp, synthetic construct
  source 1..20: mol_type = other DNA
cagcatccaggacaacaatg

SEQ ID NO: 4863 - DNA, 20 bp, synthetic construct
  source 1..20: mol_type = other DNA
acctcatgcctggcaatggg

SEQ ID NO: 4864 - DNA, 20 bp, synthetic construct
  source 1..20: mol_type = other DNA
gtccaactgccccgagatgt

SEQ ID NO: 4865 - DNA, 20 bp, synthetic construct
  source 1..20: mol_type = other DNA
cttcgctcagcagcgcttcg

SEQ ID NO: 4866 - DNA, 20 bp, synthetic construct
  source 1..20: mol_type = other DNA
tgacaggcttcgaatggtat

SEQ ID NO: 4867 - DNA, 20 bp, synthetic construct
  source 1..20: mol_type = other DNA
cagcagaactctcacgacca

SEQ ID NO: 4868 - DNA, 20 bp, synthetic construct
  source 1..20: mol_type = other DNA
gggctaccagggctaccccg

SEQ ID NO: 4869 - DNA, 20 bp, synthetic construct
  source 1..20: mol_type = other DNA
tcagggacccccatattcca

SEQ ID NO: 4870 - DNA, 20 bp, synthetic construct
  source 1..20: mol_type = other DNA
gacctgtataaccaaaccaa

SEQ ID NO: 4871 - DNA, 20 bp, synthetic construct
  source 1..20: mol_type = other DNA
caagggattaatagtatggc

SEQ ID NO: 4872 - DNA, 20 bp, synthetic construct
  source 1..20: mol_type = other DNA
atcaacagcaacagcaggtg

SEQ ID NO: 4873 - DNA, 20 bp, synthetic construct
  source 1..20: mol_type = other DNA
acagcaacagcaggtgagga

SEQ ID NO: 4874 - DNA, 20 bp, synthetic construct
  source 1..20: mol_type = other DNA
caagatgtatacaaccagta

SEQ ID NO: 4875 - DNA, 20 bp, synthetic construct
  source 1..20: mol_type = other DNA
acctgcagaattgttggcca

SEQ ID NO: 4876 - DNA, 20 bp, synthetic construct
  source 1..20: mol_type = other DNA
ctacctgctgtgtataagag

SEQ ID NO: 4877 - DNA, 20 bp, synthetic construct
  source 1..20: mol_type = other DNA
gcagtaccacagccatctcc

SEQ ID NO: 4878 - DNA, 20 bp, synthetic construct
  source 1..20: mol_type = other DNA
catggcggacaacaaagccc

SEQ ID NO: 4879 - DNA, 20 bp, synthetic construct
  source 1..20: mol_type = other DNA
cacagcctgtgttgaagcag

SEQ ID NO: 4880 - DNA, 20 bp, synthetic construct
  source 1..20: mol_type = other DNA
ttacctcatgcctggcaatg

SEQ ID NO: 4881 - DNA, 20 bp, synthetic construct
  source 1..20: mol_type = other DNA
gcttacctcactctgtcata

SEQ ID NO: 4882 - DNA, 20 bp, synthetic construct
  source 1..20: mol_type = other DNA
tgtcctctaggaagcccagg

SEQ ID NO: 4883 - DNA, 20 bp, synthetic construct
  source 1..20: mol_type = other DNA
gacatctcaaagtcattgcc

SEQ ID NO: 4884 - DNA, 20 bp, synthetic construct
  source 1..20: mol_type = other DNA
ggggctaccagggctacccc

SEQ ID NO: 4885 - DNA, 20 bp, synthetic construct
  source 1..20: mol_type = other DNA
gcttcgggcaaccctacggc

SEQ ID NO: 4886 - DNA, 20 bp, synthetic construct
  source 1..20: mol_type = other DNA
tcaggtccacattgttgtcc

SEQ ID NO: 4887 - DNA, 20 bp, synthetic construct
  source 1..20: mol_type = other DNA
ccttacctcatgcctggcaa

SEQ ID NO: 4888 - DNA, 20 bp, synthetic construct
  source 1..20: mol_type = other DNA
tggccaaggcaagcagcgcg

SEQ ID NO: 4889 - DNA, 20 bp, synthetic construct
  source 1..20: mol_type = other DNA
cccaggatgagcagcagccc

SEQ ID NO: 4890 - DNA, 20 bp, synthetic construct
  source 1..20: mol_type = other DNA
cccagtgtaggagtccgtcc

SEQ ID NO: 4891 - DNA, 20 bp, synthetic construct
  source 1..20: mol_type = other DNA
ggccaaggcaagcagcgcgc

SEQ ID NO: 4892 - DNA, 20 bp, synthetic construct
  source 1..20: mol_type = other DNA
ggcaatcagttctccaccca

SEQ ID NO: 4893 - DNA, 20 bp, synthetic construct
  source 1..20: mol_type = other DNA
gcagccccccatgattcggc

SEQ ID NO: 4894 - DNA, 20 bp, synthetic construct
  source 1..20: mol_type = other DNA
catgcagaatcacattcctc

SEQ ID NO: 4895 - DNA, 20 bp, synthetic construct
  source 1..20: mol_type = other DNA
cgacagcactatccctatgg

SEQ ID NO: 4896 - DNA, 20 bp, synthetic construct
  source 1..20: mol_type = other DNA
tccacccacatcttcctctc

SEQ ID NO: 4897 - DNA, 20 bp, synthetic construct
  source 1..20: mol_type = other DNA
cagggacccccatattccat

SEQ ID NO: 4898 - DNA, 20 bp, synthetic construct
  source 1..20: mol_type = other DNA
gcagggccccaacggcggga

SEQ ID NO: 4899 - DNA, 20 bp, synthetic construct
  source 1..20: mol_type = other DNA
gatcagagggccaaccacga

SEQ ID NO: 4900 - DNA, 20 bp, synthetic construct
  source 1..20: mol_type = other DNA
cttgcaaccaacctcaatgt

SEQ ID NO: 4901 - DNA, 20 bp, synthetic construct
  source 1..20: mol_type = other DNA
ttgagatgtccaaacaccca

SEQ ID NO: 4902 - DNA, 20 bp, synthetic construct
  source 1..20: mol_type = other DNA
ttccaagaccagtctctgcg

SEQ ID NO: 4903 - DNA, 20 bp, synthetic construct
  source 1..20: mol_type = other DNA
agcaaggcaccatgtggcag

SEQ ID NO: 4904 - DNA, 20 bp, synthetic construct
  source 1..20: mol_type = other DNA
tacctcatgcctggcaatgg

SEQ ID NO: 4905 - DNA, 20 bp, synthetic construct
  source 1..20: mol_type = other DNA
actcacctgactgaggttga

SEQ ID NO: 4906 - DNA, 20 bp, synthetic construct
  source 1..20: mol_type = other DNA
ttacctgttttggatagagt

SEQ ID NO: 4907 - DNA, 20 bp, synthetic construct
  source 1..20: mol_type = other DNA
atactcacaggcaagctgga

SEQ ID NO: 4908 - DNA, 20 bp, synthetic construct
  source 1..20: mol_type = other DNA
gagctaaaaagagaaagaac

SEQ ID NO: 4909 - DNA, 20 bp, synthetic construct
  source 1..20: mol_type = other DNA
tccttcgctcagcagcgctt

SEQ ID NO: 4910 - DNA, 20 bp, synthetic construct
  source 1..20: mol_type = other DNA
tgtaggagtccgtccaggac

SEQ ID NO: 4911 - DNA, 20 bp, synthetic construct
  source 1..20: mol_type = other DNA
ccagtcaaccagcagttcca

SEQ ID NO: 4912 - DNA, 20 bp, synthetic construct
  source 1..20: mol_type = other DNA
ccctcccaggtggctacccc

SEQ ID NO: 4913 - DNA, 20 bp, synthetic construct
  source 1..20: mol_type = other DNA
cagcaaggcaccatgtggca

SEQ ID NO: 4914 - DNA, 20 bp, synthetic construct
  source 1..20: mol_type = other DNA
accgaaagaacccggtgtgc

SEQ ID NO: 4915 - DNA, 20 bp, synthetic construct
  source 1..20: mol_type = other DNA
agcagcgcttcggggccatg

SEQ ID NO: 4916 - DNA, 20 bp, synthetic construct
  source 1..20: mol_type = other DNA
aatactcacaggcaagctgg

SEQ ID NO: 4917 - DNA, 20 bp, synthetic construct
  source 1..20: mol_type = other DNA
tttcaggaaccccggaggca

SEQ ID NO: 4918 - DNA, 20 bp, synthetic construct
  source 1..20: mol_type = other DNA
gtcttccaccaacaacatgg

SEQ ID NO: 4919 - DNA, 20 bp, synthetic construct
  source 1..20: mol_type = other DNA
ttgctcagcaaggcaccatg

SEQ ID NO: 4920 - DNA, 20 bp, synthetic construct
  source 1..20: mol_type = other DNA
ggaggaggcagcggaggagg

SEQ ID NO: 4921 - DNA, 20 bp, synthetic construct
  source 1..20: mol_type = other DNA
ggcggcggcggaggaggagg

SEQ ID NO: 4922 - DNA, 20 bp, synthetic construct
  source 1..20: mol_type = other DNA
gccccagtcccaggcggcgg

SEQ ID NO: 4923 - DNA, 20 bp, synthetic construct
  source 1..20: mol_type = other DNA
ggcggcggcggcggaggagg

SEQ ID NO: 4924 - DNA, 20 bp, synthetic construct
  source 1..20: mol_type = other DNA
ggcgcgcggcgcggcggcgg

SEQ ID NO: 4925 - DNA, 20 bp, synthetic construct
  source 1..20: mol_type = other DNA
tctcctggcatgtctcagca

SEQ ID NO: 4926 - DNA, 20 bp, synthetic construct
  source 1..20: mol_type = other DNA
ggcagcggaggaggaggagg

SEQ ID NO: 4927 - DNA, 20 bp, synthetic construct
  source 1..20: mol_type = other DNA
ggcagcagcggcggcggcgg

SEQ ID NO: 4928 - DNA, 20 bp, synthetic construct
  source 1..20: mol_type = other DNA
tcaaactgtataggcagagc

SEQ ID NO: 4929 - DNA, 20 bp, synthetic construct
  source 1..20: mol_type = other DNA
tgaataccagcaggctcagc

SEQ ID NO: 4930 - DNA, 20 bp, synthetic construct
  source 1..20: mol_type = other DNA
ttggacaggtaaggtatttg

SEQ ID NO: 4931 - DNA, 20 bp, synthetic construct
  source 1..20: mol_type = other DNA
tggacaggtaaggtatttgg

SEQ ID NO: 4932 - DNA, 20 bp, synthetic construct
  source 1..20: mol_type = other DNA
atctgcattgagaagaatgg

SEQ ID NO: 4933 - DNA, 20 bp, synthetic construct
  source 1..20: mol_type = other DNA
cagaagtctgtgcagaacag

SEQ ID NO: 4934 - DNA, 20 bp, synthetic construct
  source 1..20: mol_type = other DNA
gcaagtgaactggtactcct

SEQ ID NO: 4935 - DNA, 20 bp, synthetic construct
  source 1..20: mol_type = other DNA
taccagcttcttcctgggtc

SEQ ID NO: 4936 - DNA, 20 bp, synthetic construct
  source 1..20: mol_type = other DNA
atgttgcacttgggacactg

SEQ ID NO: 4937 - DNA, 20 bp, synthetic construct
  source 1..20: mol_type = other DNA
caagtgaactggtactcctc

SEQ ID NO: 4938 - DNA, 20 bp, synthetic construct
  source 1..20: mol_type = other DNA
atacacactgcacagtggtg

SEQ ID NO: 4939 - DNA, 20 bp, synthetic construct
  source 1..20: mol_type = other DNA
tgcaccgattgcactgtact

SEQ ID NO: 4940 - DNA, 20 bp, synthetic construct
  source 1..20: mol_type = other DNA
agataccttggccaagagct

SEQ ID NO: 4941 - DNA, 20 bp, synthetic construct
  source 1..20: mol_type = other DNA
gactctgtgaacacaccaag

SEQ ID NO: 4942 - DNA, 20 bp, synthetic construct
  source 1..20: mol_type = other DNA
tatacagtttgaataccagc

SEQ ID NO: 4943 - DNA, 20 bp, synthetic construct
  source 1..20: mol_type = other DNA
ttcaacaggagtctcttgca

SEQ ID NO: 4944 - DNA, 20 bp, synthetic construct
  source 1..20: mol_type = other DNA
acacactgcacagtggtgag

SEQ ID NO: 4945 - DNA, 20 bp, synthetic construct
  source 1..20: mol_type = other DNA
tgccttaccagcttcttcct

SEQ ID NO: 4946 - DNA, 20 bp, synthetic construct
  source 1..20: mol_type = other DNA
acaggtaaggtatttggggg

SEQ ID NO: 4947 - DNA, 20 bp, synthetic construct
  source 1..20: mol_type = other DNA
cacactgcacagtggtgagg

SEQ ID NO: 4948 - DNA, 20 bp, synthetic construct
  source 1..20: mol_type = other DNA
gggacactgaggagacagaa

SEQ ID NO: 4949 - DNA, 20 bp, synthetic construct
  source 1..20: mol_type = other DNA
tgcacagtggtgagggggat

SEQ ID NO: 4950 - DNA, 20 bp, synthetic construct
  source 1..20: mol_type = other DNA
tcagggactatgtggaggta

SEQ ID NO: 4951 - DNA, 20 bp, synthetic construct
  source 1..20: mol_type = other DNA
tgggacactgaggagacaga

SEQ ID NO: 4952 - DNA, 20 bp, synthetic construct
  source 1..20: mol_type = other DNA
tacacactgcacagtggtga

SEQ ID NO: 4953 - DNA, 20 bp, synthetic construct
  source 1..20: mol_type = other DNA
ctgagatcgaaaacctctca

SEQ ID NO: 4954 - DNA, 20 bp, synthetic construct
  source 1..20: mol_type = other DNA
cagcgatgtggagcagcagg

SEQ ID NO: 4955 - DNA, 20 bp, synthetic construct
  source 1..20: mol_type = other DNA
agtagaataagtacttcttg

SEQ ID NO: 4956 - DNA, 20 bp, synthetic construct
  source 1..20: mol_type = other DNA
tcaatgcagatgttgcactt

SEQ ID NO: 4957 - DNA, 20 bp, synthetic construct
  source 1..20: mol_type = other DNA
gctgacaggccagagagagt

SEQ ID NO: 4958 - DNA, 20 bp, synthetic construct
  source 1..20: mol_type = other DNA
gtagaataagtacttcttga

SEQ ID NO: 4959 - DNA, 20 bp, synthetic construct
  source 1..20: mol_type = other DNA
taatagtcctctatgtcccc

SEQ ID NO: 4960 - DNA, 20 bp, synthetic construct
  source 1..20: mol_type = other DNA
tctccaaggggggtgagcga

SEQ ID NO: 4961 - DNA, 20 bp, synthetic construct
  source 1..20: mol_type = other DNA
agaggaggaggatgaagagg

SEQ ID NO: 4962 - DNA, 20 bp, synthetic construct
  source 1..20: mol_type = other DNA
tctacctgtttgccaggggg

SEQ ID NO: 4963 - DNA, 20 bp, synthetic construct
  source 1..20: mol_type = other DNA
ccgacagaggcagacacaga

SEQ ID NO: 4964 - DNA, 20 bp, synthetic construct
  source 1..20: mol_type = other DNA
ggactctacctgtttgccag

SEQ ID NO: 4965 - DNA, 20 bp, synthetic construct
  source 1..20: mol_type = other DNA
gactctacctgtttgccagg

SEQ ID NO: 4966 - DNA, 20 bp, synthetic construct
  source 1..20: mol_type = other DNA
ccgcccagaagagccgacag

SEQ ID NO: 4967 - DNA, 20 bp, synthetic construct
  source 1..20: mol_type = other DNA
acttaccaggtgcagggtgt

SEQ ID NO: 4968 - DNA, 20 bp, synthetic construct
  source 1..20: mol_type = other DNA
aggcatggctgaaatcttcc

SEQ ID NO: 4969 - DNA, 20 bp, synthetic construct
  source 1..20: mol_type = other DNA
gaggcatggctgaaatcttc

SEQ ID NO: 4970 - DNA, 20 bp, synthetic construct
  source 1..20: mol_type = other DNA
aggactctacctgtttgcca

SEQ ID NO: 4971 - DNA, 20 bp, synthetic construct
  source 1..20: mol_type = other DNA
cctacaggagagcgaagacc

SEQ ID NO: 4972 - DNA, 20 bp, synthetic construct
  source 1..20: mol_type = other DNA
ccaggtcttcgctctcctgt

SEQ ID NO: 4973 - DNA, 20 bp, synthetic construct
  source 1..20: mol_type = other DNA
aactacacttcccagacctg

SEQ ID NO: 4974 - DNA, 20 bp, synthetic construct
  source 1..20: mol_type = other DNA
ctcgccgaatagattcaaca

SEQ ID NO: 4975 - DNA, 20 bp, synthetic construct
  source 1..20: mol_type = other DNA
gtcgaacatcaagtagaaaa

SEQ ID NO: 4976 - DNA, 20 bp, synthetic construct
  source 1..20: mol_type = other DNA
tcgaacatcaagtagaaaaa

SEQ ID NO: 4977 - DNA, 20 bp, synthetic construct
  source 1..20: mol_type = other DNA
tcgccgaatagattcaacaa

SEQ ID NO: 4978 - DNA, 20 bp, synthetic construct
  source 1..20: mol_type = other DNA
ggcctaaaagacataaaata

SEQ ID NO: 4979 - DNA, 20 bp, synthetic construct
  source 1..20: mol_type = other DNA
acaggaaaacccaaaaggtc

SEQ ID NO: 4980 - DNA, 20 bp, synthetic construct
  source 1..20: mol_type = other DNA
cagctatgattttctcacac

SEQ ID NO: 4981 - DNA, 20 bp, synthetic construct
  source 1..20: mol_type = other DNA
cggcggccctccttggagct

SEQ ID NO: 4982 - DNA, 20 bp, synthetic construct
  source 1..20: mol_type = other DNA
aggtgagcaggtcagggtcg

SEQ ID NO: 4983 - DNA, 20 bp, synthetic construct
  source 1..20: mol_type = other DNA
aaaccaggatgtcccccaag

SEQ ID NO: 4984 - DNA, 20 bp, synthetic construct
  source 1..20: mol_type = other DNA
tctttacctggggaaacaca

SEQ ID NO: 4985 - DNA, 20 bp, synthetic construct
  source 1..20: mol_type = other DNA
acgcgccacatgaagacgca

SEQ ID NO: 4986 - DNA, 20 bp, synthetic construct
  source 1..20: mol_type = other DNA
ggaggaggaggacgaggagg

SEQ ID NO: 4987 - DNA, 20 bp, synthetic construct
  source 1..20: mol_type = other DNA
agcagcccttcaacagcgcg

SEQ ID NO: 4988 - DNA, 20 bp, synthetic construct
  source 1..20: mol_type = other DNA
gcaacttgacggtgcaccgg

SEQ ID NO: 4989 - DNA, 20 bp, synthetic construct
  source 1..20: mol_type = other DNA
cccgcagcacttgtcccaga

SEQ ID NO: 4990 - DNA, 20 bp, synthetic construct
  source 1..20: mol_type = other DNA
gaagcagtgtggcggcagct

SEQ ID NO: 4991 - DNA, 20 bp, synthetic construct
  source 1..20: mol_type = other DNA
caggtgagcaggtcagggtc

SEQ ID NO: 4992 - DNA, 20 bp, synthetic construct
  source 1..20: mol_type = other DNA
gcaggagaacattgcaggta

SEQ ID NO: 4993 - DNA, 20 bp, synthetic construct
  source 1..20: mol_type = other DNA
gctcgccggtgtggctccgc

SEQ ID NO: 4994 - DNA, 20 bp, synthetic construct
  source 1..20: mol_type = other DNA
ggccacaggtgagcaggtca

SEQ ID NO: 4995 - DNA, 20 bp, synthetic construct
  source 1..20: mol_type = other DNA
gagcacaaaaggaagcagtg

SEQ ID NO: 4996 - DNA, 20 bp, synthetic construct
  source 1..20: mol_type = other DNA
acctgcaatgttctcctgct

SEQ ID NO: 4997 - DNA, 20 bp, synthetic construct
  source 1..20: mol_type = other DNA
tgtaaggccgctcgccggtg

SEQ ID NO: 4998 - DNA, 20 bp, synthetic construct
  source 1..20: mol_type = other DNA
tccagcagaggctgaccatg

SEQ ID NO: 4999 - DNA, 20 bp, synthetic construct
  source 1..20: mol_type = other DNA
acaggtgagcaggtcagggt

SEQ ID NO: 5000 - DNA, 20 bp, synthetic construct
  source 1..20: mol_type = other DNA
ggcgtcgcggcacttcatga

SEQ ID NO: 5001 - DNA, 20 bp, synthetic construct
  source 1..20: mol_type = other DNA
cctgcaatgttctcctgctt

SEQ ID NO: 5002 - DNA, 20 bp, synthetic construct
  source 1..20: mol_type = other DNA
ttgcacagctcgcacttgta

SEQ ID NO: 5003 - DNA, 20 bp, synthetic construct
  source 1..20: mol_type = other DNA
aaaaaccaggatgtccccca

SEQ ID NO: 5004 - DNA, 20 bp, synthetic construct
  source 1..20: mol_type = other DNA
gctggagacagaaagaagaa

SEQ ID NO: 5005 - DNA, 20 bp, synthetic construct
  source 1..20: mol_type = other DNA
gcagcaacttgacggtgcac

SEQ ID NO: 5006 - DNA, 20 bp, synthetic construct
  source 1..20: mol_type = other DNA
gcacgggcagatcggcaagg

SEQ ID NO: 5007 - DNA, 20 bp, synthetic construct
  source 1..20: mol_type = other DNA
tctgcccgtgcgtcttcatg

SEQ ID NO: 5008 - DNA, 20 bp, synthetic construct
  source 1..20: mol_type = other DNA
cgcgccacatgaagacgcac

SEQ ID NO: 5009 - DNA, 20 bp, synthetic construct
  source 1..20: mol_type = other DNA
actcgcacgtgtcgctgcgg

SEQ ID NO: 5010 - DNA, 20 bp, synthetic construct
  source 1..20: mol_type = other DNA
tacgggtgatgagctccctc

SEQ ID NO: 5011 - DNA, 20 bp, synthetic construct
  source 1..20: mol_type = other DNA
atgaagacgcacgggcagat

SEQ ID NO: 5012 - DNA, 20 bp, synthetic construct
  source 1..20: mol_type = other DNA
agtactcgcacgtgtcgctg

SEQ ID NO: 5013 - DNA, 20 bp, synthetic construct
  source 1..20: mol_type = other DNA
tttgcggcgggacattgccc

SEQ ID NO: 5014 - DNA, 20 bp, synthetic construct
  source 1..20: mol_type = other DNA
aaacacatgaaaaagtggca

SEQ ID NO: 5015 - DNA, 20 bp, synthetic construct
  source 1..20: mol_type = other DNA
aagcagtgtggcggcagctt

SEQ ID NO: 5016 - DNA, 20 bp, synthetic construct
  source 1..20: mol_type = other DNA
aaaaccaggatgtcccccaa

SEQ ID NO: 5017 - DNA, 20 bp, synthetic construct
  source 1..20: mol_type = other DNA
tcaaatgaacttccccttgg

SEQ ID NO: 5018 - DNA, 20 bp, synthetic construct
  source 1..20: mol_type = other DNA
gaccctgacctgctcacctg

SEQ ID NO: 5019 - DNA, 20 bp, synthetic construct
  source 1..20: mol_type = other DNA
acgggtgatgagctccctct

SEQ ID NO: 5020 - DNA, 20 bp, synthetic construct
  source 1..20: mol_type = other DNA
gcaatgtcccgccgcaaaca

SEQ ID NO: 5021 - DNA, 20 bp, synthetic construct
  source 1..20: mol_type = other DNA
tggccacaggtgagcaggtc

SEQ ID NO: 5022 - DNA, 20 bp, synthetic construct
  source 1..20: mol_type = other DNA
ctggagacagaaagaagaaa

SEQ ID NO: 5023 - DNA, 20 bp, synthetic construct
  source 1..20: mol_type = other DNA
gtcaaatgaacttccccttg

SEQ ID NO: 5024 - DNA, 20 bp, synthetic construct
  source 1..20: mol_type = other DNA
gtgtcaaatgaacttcccct

SEQ ID NO: 5025 - DNA, 20 bp, synthetic construct
  source 1..20: mol_type = other DNA
aggggaagttcatttgacac

SEQ ID NO: 5026 - DNA, 20 bp, synthetic construct
  source 1..20: mol_type = other DNA
cacaaaaggaagcagtgtgg

SEQ ID NO: 5027 - DNA, 20 bp, synthetic construct
  source 1..20: mol_type = other DNA
gacactggccacaggtgagc

SEQ ID NO: 5028 - DNA, 20 bp, synthetic construct
  source 1..20: mol_type = other DNA
cccaagcaggagaacattgc

SEQ ID NO: 5029 - DNA, 20 bp, synthetic construct
  source 1..20: mol_type = other DNA
caggagaacattgcaggtat

SEQ ID NO: 5030 - DNA, 20 bp, synthetic construct
  source 1..20: mol_type = other DNA
gttgtgcaaatgtagctgga

SEQ ID NO: 5031 - DNA, 20 bp, synthetic construct
  source 1..20: mol_type = other DNA
catctacctggagcccgggc

SEQ ID NO: 5032 - DNA, 20 bp, synthetic construct
  source 1..20: mol_type = other DNA
ggcggagccacaccggcgag

SEQ ID NO: 5033 - DNA, 20 bp, synthetic construct
  source 1..20: mol_type = other DNA
gcacttgtaaggccgctcgc

SEQ ID NO: 5034 - DNA, 20 bp, synthetic construct
  source 1..20: mol_type = other DNA
gcatctggcagatgtcgcag

SEQ ID NO: 5035 - DNA, 20 bp, synthetic construct
  source 1..20: mol_type = other DNA
tgtcaaatgaacttcccctt

SEQ ID NO: 5036 - DNA, 20 bp, synthetic construct
  source 1..20: mol_type = other DNA
cagcacgcgcagaacacgca

SEQ ID NO: 5037 - DNA, 20 bp, synthetic construct
  source 1..20: mol_type = other DNA
gtgcaccggcggagccacac

SEQ ID NO: 5038 - DNA, 20 bp, synthetic construct
  source 1..20: mol_type = other DNA
gacgcacgggcagatcggca

SEQ ID NO: 5039 - DNA, 20 bp, synthetic construct
  source 1..20: mol_type = other DNA
cgaggatggcggcctccaca

SEQ ID NO: 5040 - DNA, 20 bp, synthetic construct
  source 1..20: mol_type = other DNA
aggaaccacgcgctgttgaa

SEQ ID NO: 5041 - DNA, 20 bp, synthetic construct
  source 1..20: mol_type = other DNA
acccgcagcacttgtcccag

SEQ ID NO: 5042 - DNA, 20 bp, synthetic construct
  source 1..20: mol_type = other DNA
ccgctccttggggaaggggt

SEQ ID NO: 5043 - DNA, 20 bp, synthetic construct
  source 1..20: mol_type = other DNA
acagtgaaatctcgatggag

SEQ ID NO: 5044 - DNA, 20 bp, synthetic construct
  source 1..20: mol_type = other DNA
tctcctctgccccagggggc

SEQ ID NO: 5045 - DNA, 20 bp, synthetic construct
  source 1..20: mol_type = other DNA
tcaccagtttgtacagttct

SEQ ID NO: 5046 - DNA, 20 bp, synthetic construct
  source 1..20: mol_type = other DNA
caccatcttggtgaaggagt

SEQ ID NO: 5047 - DNA, 20 bp, synthetic construct
  source 1..20: mol_type = other DNA
gcgggagcgggaccaggtac

SEQ ID NO: 5048 - DNA, 20 bp, synthetic construct
  source 1..20: mol_type = other DNA
cggtgaggccagaatcaggg

SEQ ID NO: 5049 - DNA, 20 bp, synthetic construct
  source 1..20: mol_type = other DNA
caagctgcagcagcagatga

SEQ ID NO: 5050 - DNA, 20 bp, synthetic construct
  source 1..20: mol_type = other DNA
gtcaccagtttgtacagttc

SEQ ID NO: 5051 - DNA, 20 bp, synthetic construct
  source 1..20: mol_type = other DNA
cagcgcaggatgaacctgaa

SEQ ID NO: 5052 - DNA, 20 bp, synthetic construct
  source 1..20: mol_type = other DNA
ctggaaaggtaccccagtga

SEQ ID NO: 5053 - DNA, 20 bp, synthetic construct
  source 1..20: mol_type = other DNA
atacccagctacagccggtg

SEQ ID NO: 5054 - DNA, 20 bp, synthetic construct
  source 1..20: mol_type = other DNA
ccctcaccagcagcagctgg

SEQ ID NO: 5055 - DNA, 20 bp, synthetic construct
  source 1..20: mol_type = other DNA
tggaggaggtggagcgggag

SEQ ID NO: 5056 - DNA, 20 bp, synthetic construct
  source 1..20: mol_type = other DNA
gccctacctgcgtcagtgta

SEQ ID NO: 5057 - DNA, 20 bp, synthetic construct
  source 1..20: mol_type = other DNA
cagtgaggagaagaacatgg

SEQ ID NO: 5058 - DNA, 20 bp, synthetic construct
  source 1..20: mol_type = other DNA
tccaggtgcatgggtgtgga

SEQ ID NO: 5059 - DNA, 20 bp, synthetic construct
  source 1..20: mol_type = other DNA
ccccatcgtgctcttcatcc

SEQ ID NO: 5060 - DNA, 20 bp, synthetic construct
  source 1..20: mol_type = other DNA
ccatccaagatcaaccgagc

SEQ ID NO: 5061 - DNA, 20 bp, synthetic construct
  source 1..20: mol_type = other DNA
caagctgcggcgcctctcca

SEQ ID NO: 5062 - DNA, 20 bp, synthetic construct
  source 1..20: mol_type = other DNA
cccggagtgcccgcagggtg

SEQ ID NO: 5063 - DNA, 20 bp, synthetic construct
  source 1..20: mol_type = other DNA
gagttcaccatctgcaagtc

SEQ ID NO: 5064 - DNA, 20 bp, synthetic construct
  source 1..20: mol_type = other DNA
tgtcaaggacaagatcggcg

SEQ ID NO: 5065 - DNA, 20 bp, synthetic construct
  source 1..20: mol_type = other DNA
tgactgggaaagagcccact

SEQ ID NO: 5066 - DNA, 20 bp, synthetic construct
  source 1..20: mol_type = other DNA
acacgaccgcaaggaggccc

SEQ ID NO: 5067 - DNA, 20 bp, synthetic construct
  source 1..20: mol_type = other DNA
ttacccagaactgtacaaac

SEQ ID NO: 5068 - DNA, 20 bp, synthetic construct
  source 1..20: mol_type = other DNA
ggtcgtgttccaagatgtcc

SEQ ID NO: 5069 - DNA, 20 bp, synthetic construct
  source 1..20: mol_type = other DNA
gaacaagcactgcctgctgg

SEQ ID NO: 5070 - DNA, 20 bp, synthetic construct
  source 1..20: mol_type = other DNA
cacccctcacctcgagttgg

SEQ ID NO: 5071 - DNA, 20 bp, synthetic construct
  source 1..20: mol_type = other DNA
cttggaacacgaccgcaagg

SEQ ID NO: 5072 - DNA, 20 bp, synthetic construct
  source 1..20: mol_type = other DNA
tttctgggaggagacacgca

SEQ ID NO: 5073 - DNA, 20 bp, synthetic construct
  source 1..20: mol_type = other DNA
ctttctgggaggagacacgc

SEQ ID NO: 5074 - DNA, 20 bp, synthetic construct
  source 1..20: mol_type = other DNA
ttctacataccaaggggcaa

SEQ ID NO: 5075 - DNA, 20 bp, synthetic construct
  source 1..20: mol_type = other DNA
tggcctcaccggctgtagct

SEQ ID NO: 5076 - DNA, 20 bp, synthetic construct
  source 1..20: mol_type = other DNA
gacctacccggagtgcccgc

SEQ ID NO: 5077 - DNA, 20 bp, synthetic construct
  source 1..20: mol_type = other DNA
caccgtgctggccaagacgc

SEQ ID NO: 5078 - DNA, 20 bp, synthetic construct
  source 1..20: mol_type = other DNA
gggagaatgtggagtgtaac

SEQ ID NO: 5079 - DNA, 20 bp, synthetic construct
  source 1..20: mol_type = other DNA
gacgatggagtcgtttcccg

SEQ ID NO: 5080 - DNA, 20 bp, synthetic construct
  source 1..20: mol_type = other DNA
ctctctgcagctaaaaggga

SEQ ID NO: 5081 - DNA, 20 bp, synthetic construct
  source 1..20: mol_type = other DNA
gtgcagaggctgctcaactc

SEQ ID NO: 5082 - DNA, 20 bp, synthetic construct
  source 1..20: mol_type = other DNA
acagtggaggaaggccacga

SEQ ID NO: 5083 - DNA, 20 bp, synthetic construct
  source 1..20: mol_type = other DNA
cgaccgcaaggaggccctgg

SEQ ID NO: 5084 - DNA, 20 bp, synthetic construct
  source 1..20: mol_type = other DNA
ggaaaggtaccccagtgaag

SEQ ID NO: 5085 - DNA, 20 bp, synthetic construct
  source 1..20: mol_type = other DNA
gtcaatcaccgccgagcccc

SEQ ID NO: 5086 - DNA, 20 bp, synthetic construct
  source 1..20: mol_type = other DNA
gcaggcagtgcttgttctgc

SEQ ID NO: 5087 - DNA, 20 bp, synthetic construct
  source 1..20: mol_type = other DNA
atcctccagctgccgcaacc

SEQ ID NO: 5088 - DNA, 20 bp, synthetic construct
  source 1..20: mol_type = other DNA
tatgtagaatgtccaacagc

SEQ ID NO: 5089 - DNA, 20 bp, synthetic construct
  source 1..20: mol_type = other DNA
tcaccggctgtagctgggta

SEQ ID NO: 5090 - DNA, 20 bp, synthetic construct
  source 1..20: mol_type = other DNA
cttgcagatggtgaactcca

SEQ ID NO: 5091 - DNA, 20 bp, synthetic construct
  source 1..20: mol_type = other DNA
agcactgcctgctggaggct

SEQ ID NO: 5092 - DNA, 20 bp, synthetic construct
  source 1..20: mol_type = other DNA
ggcacgagtggctgtgcgcg

SEQ ID NO: 5093 - DNA, 20 bp, synthetic construct
  source 1..20: mol_type = other DNA
catcgtcagacgctacaagg

SEQ ID NO: 5094 - DNA, 20 bp, synthetic construct
  source 1..20: mol_type = other DNA
ccagcgcaggatgaacctga

SEQ ID NO: 5095 - DNA, 20 bp, synthetic construct
  source 1..20: mol_type = other DNA
tggacattctacataccaag

SEQ ID NO: 5096 - DNA, 20 bp, synthetic construct
  source 1..20: mol_type = other DNA
tcaatcaccgccgagccccc

SEQ ID NO: 5097 - DNA, 20 bp, synthetic construct
  source 1..20: mol_type = other DNA
gaatgtccaacagccggcct

SEQ ID NO: 5098 - DNA, 20 bp, synthetic construct
  source 1..20: mol_type = other DNA
gaggacagccaaggggcacg

SEQ ID NO: 5099 - DNA, 20 bp, synthetic construct
  source 1..20: mol_type = other DNA
ggcagaggagctgcgagaca

SEQ ID NO: 5100 - DNA, 20 bp, synthetic construct
  source 1..20: mol_type = other DNA
aaagcaccggttgaataaga

SEQ ID NO: 5101 - DNA, 20 bp, synthetic construct
  source 1..20: mol_type = other DNA
ccacatgtcaggttccaccg

SEQ ID NO: 5102 - DNA, 20 bp, synthetic construct
  source 1..20: mol_type = other DNA
agcgggtccgcatcatctcg

SEQ ID NO: 5103 - DNA, 20 bp, synthetic construct
  source 1..20: mol_type = other DNA
ggaagtgcgtgaggccctcg

SEQ ID NO: 5104 - DNA, 20 bp, synthetic construct
  source 1..20: mol_type = other DNA
cctggaggagaaggaggacc

SEQ ID NO: 5105 - DNA, 20 bp, synthetic construct
  source 1..20: mol_type = other DNA
ggaggaggagtggatggagg

SEQ ID NO: 5106 - DNA, 20 bp, synthetic construct
  source 1..20: mol_type = other DNA
gccttcctccactgtggaga

SEQ ID NO: 5107 - DNA, 20 bp, synthetic construct
  source 1..20: mol_type = other DNA
cacgcacttcctgatgaacg

SEQ ID NO: 5108 - DNA, 20 bp, synthetic construct
  source 1..20: mol_type = other DNA
cacccggatgaagagcacga

SEQ ID NO: 5109 - DNA, 20 bp, synthetic construct
  source 1..20: mol_type = other DNA
gacctccaactcgaggtgag

SEQ ID NO: 5110 - DNA, 20 bp, synthetic construct
  source 1..20: mol_type = other DNA
tctggggacagagaaaaagc

SEQ ID NO: 5111 - DNA, 20 bp, synthetic construct
  source 1..20: mol_type = other DNA
gcagcatgaccgtgttcatg

SEQ ID NO: 5112 - DNA, 20 bp, synthetic construct
  source 1..20: mol_type = other DNA
tgacgatatctgcagagaga

SEQ ID NO: 5113 - DNA, 20 bp, synthetic construct
  source 1..20: mol_type = other DNA
agccggtgaggccagaatca

SEQ ID NO: 5114 - DNA, 20 bp, synthetic construct
  source 1..20: mol_type = other DNA
aggagcagcgcaagaccatc

SEQ ID NO: 5115 - DNA, 20 bp, synthetic construct
  source 1..20: mol_type = other DNA
ccacggtggaacctgacatg

SEQ ID NO: 5116 - DNA, 20 bp, synthetic construct
  source 1..20: mol_type = other DNA
ccaggtcctccttctcctcc

SEQ ID NO: 5117 - DNA, 20 bp, synthetic construct
  source 1..20: mol_type = other DNA
gttacctgctcggttgatct

SEQ ID NO: 5118 - DNA, 20 bp, synthetic construct
  source 1..20: mol_type = other DNA
ctcgcagctcctctgcctgg

SEQ ID NO: 5119 - DNA, 20 bp, synthetic construct
  source 1..20: mol_type = other DNA
tgtcatctgcagagggacga

SEQ ID NO: 5120 - DNA, 20 bp, synthetic construct
  source 1..20: mol_type = other DNA
ggccttcctccactgtggag

SEQ ID NO: 5121 - DNA, 20 bp, synthetic construct
  source 1..20: mol_type = other DNA
ccggttgaataagatggagg

SEQ ID NO: 5122 - DNA, 20 bp, synthetic construct
  source 1..20: mol_type = other DNA
tgacgaactggaggagaaga

SEQ ID NO: 5123 - DNA, 20 bp, synthetic construct
  source 1..20: mol_type = other DNA
gggctctggggagcgaagag

SEQ ID NO: 5124 - DNA, 20 bp, synthetic construct
  source 1..20: mol_type = other DNA
gcagctcaccatcttggtga

SEQ ID NO: 5125 - DNA, 20 bp, synthetic construct
  source 1..20: mol_type = other DNA
ccttcctccactgtggagag

SEQ ID NO: 5126 - DNA, 20 bp, synthetic construct
  source 1..20: mol_type = other DNA
gcaccatacccagctacagc

SEQ ID NO: 5127 - DNA, 20 bp, synthetic construct
  source 1..20: mol_type = other DNA
tcaaccgagcaggtaacctt

SEQ ID NO: 5128 - DNA, 20 bp, synthetic construct
  source 1..20: mol_type = other DNA
gcagcgcaagaccatctggg

SEQ ID NO: 5129 - DNA, 20 bp, synthetic construct
  source 1..20: mol_type = other DNA
ggagctgcagtccatcatcc

SEQ ID NO: 5130 - DNA, 20 bp, synthetic construct
  source 1..20: mol_type = other DNA
gatcttggatggcagcatag

SEQ ID NO: 5131 - DNA, 20 bp, synthetic construct
  source 1..20: mol_type = other DNA
cccggatgaagagcacgatg

SEQ ID NO: 5132 - DNA, 20 bp, synthetic construct
  source 1..20: mol_type = other DNA
gcaccggttgaataagatgg

SEQ ID NO: 5133 - DNA, 20 bp, synthetic construct
  source 1..20: mol_type = other DNA
atcgatctgaaataccccaa

SEQ ID NO: 5134 - DNA, 20 bp, synthetic construct
  source 1..20: mol_type = other DNA
tatagcggctgagcatgtgc

SEQ ID NO: 5135 - DNA, 20 bp, synthetic construct
  source 1..20: mol_type = other DNA
cctggaggacaggcaggagc

SEQ ID NO: 5136 - DNA, 20 bp, synthetic construct
  source 1..20: mol_type = other DNA
atccaggtgcatgggtgtgg

SEQ ID NO: 5137 - DNA, 20 bp, synthetic construct
  source 1..20: mol_type = other DNA
cctgccacccacctgcgatg

SEQ ID NO: 5138 - DNA, 20 bp, synthetic construct
  source 1..20: mol_type = other DNA
ctcgcagcgttgcaggtcct

SEQ ID NO: 5139 - DNA, 20 bp, synthetic construct
  source 1..20: mol_type = other DNA
actgagctgtgcgtagcgca

SEQ ID NO: 5140 - DNA, 20 bp, synthetic construct
  source 1..20: mol_type = other DNA
gatcgatctgaaatacccca

SEQ ID NO: 5141 - DNA, 20 bp, synthetic construct
  source 1..20: mol_type = other DNA
gcgatgcattcgaacgcgtt

SEQ ID NO: 5142 - DNA, 20 bp, synthetic construct
  source 1..20: mol_type = other DNA
ggacgccttgtgggagaatg

SEQ ID NO: 5143 - DNA, 20 bp, synthetic construct
  source 1..20: mol_type = other DNA
accttacactgacgcaggta

SEQ ID NO: 5144 - DNA, 20 bp, synthetic construct
  source 1..20: mol_type = other DNA
atgtccaacagccggcctag

SEQ ID NO: 5145 - DNA, 20 bp, synthetic construct
  source 1..20: mol_type = other DNA
ctgacgaactggaggagaag

SEQ ID NO: 5146 - DNA, 20 bp, synthetic construct
  source 1..20: mol_type = other DNA
tcacctcgagttggaggtct

SEQ ID NO: 5147 - DNA, 20 bp, synthetic construct
  source 1..20: mol_type = other DNA
ggctgtaggggatgaggctg

SEQ ID NO: 5148 - DNA, 20 bp, synthetic construct
  source 1..20: mol_type = other DNA
cgtcccgccccacctggtcc

SEQ ID NO: 5149 - DNA, 20 bp, synthetic construct
  source 1..20: mol_type = other DNA
gagcacgatggggtagatgt

SEQ ID NO: 5150 - DNA, 20 bp, synthetic construct
  source 1..20: mol_type = other DNA
gcagtccatcatccaggtga

SEQ ID NO: 5151 - DNA, 20 bp, synthetic construct
  source 1..20: mol_type = other DNA
ggacagctacaatgacgagc

SEQ ID NO: 5152 - DNA, 20 bp, synthetic construct
  source 1..20: mol_type = other DNA
gcaaggaggccctggaggac

SEQ ID NO: 5153 - DNA, 20 bp, synthetic construct
  source 1..20: mol_type = other DNA
tcatccaggtgagggcctgg

SEQ ID NO: 5154 - DNA, 20 bp, synthetic construct
  source 1..20: mol_type = other DNA
caaggggcaaaggggctatg

SEQ ID NO: 5155 - DNA, 20 bp, synthetic construct
  source 1..20: mol_type = other DNA
agatcgatcagctaaagcac

SEQ ID NO: 5156 - DNA, 20 bp, synthetic construct
  source 1..20: mol_type = other DNA
gagaagcaggaaggtacatg

SEQ ID NO: 5157 - DNA, 20 bp, synthetic construct
  source 1..20: mol_type = other DNA
gcacgagtggctgtgcgcgc

SEQ ID NO: 5158 - DNA, 20 bp, synthetic construct
  source 1..20: mol_type = other DNA
tgcttgttctgcgggcacag

SEQ ID NO: 5159 - DNA, 20 bp, synthetic construct
  source 1..20: mol_type = other DNA
gtcgtttcccgggggctcgg

SEQ ID NO: 5160 - DNA, 20 bp, synthetic construct
  source 1..20: mol_type = other DNA
gaactgtacaaactggtgac

SEQ ID NO: 5161 - DNA, 20 bp, synthetic construct
  source 1..20: mol_type = other DNA
aactgtacaaactggtgact

SEQ ID NO: 5162 - DNA, 20 bp, synthetic construct
  source 1..20: mol_type = other DNA
tccaccgtggcgtacaggca

SEQ ID NO: 5163 - DNA, 20 bp, synthetic construct
  source 1..20: mol_type = other DNA
ggaggaggtggagcgggagc

SEQ ID NO: 5164 - DNA, 20 bp, synthetic construct
  source 1..20: mol_type = other DNA
gtgacgatatctgcagagag

SEQ ID NO: 5165 - DNA, 20 bp, synthetic construct
  source 1..20: mol_type = other DNA
caggaagcagatccgcgagc

SEQ ID NO: 5166 - DNA, 20 bp, synthetic construct
  source 1..20: mol_type = other DNA
ggaggaggcccgccaggcag

SEQ ID NO: 5167 - DNA, 20 bp, synthetic construct
  source 1..20: mol_type = other DNA
cacagtggaggaaggccacg

SEQ ID NO: 5168 - DNA, 20 bp, synthetic construct
  source 1..20: mol_type = other DNA
aggatgaagaggacgccttg

SEQ ID NO: 5169 - DNA, 20 bp, synthetic construct
  source 1..20: mol_type = other DNA
catgcacctggatgcccttc

SEQ ID NO: 5170 - DNA, 20 bp, synthetic construct
  source 1..20: mol_type = other DNA
ggatgaagaggacgccttgt

SEQ ID NO: 5171 - DNA, 20 bp, synthetic construct
  source 1..20: mol_type = other DNA
caggatctacaacctgcagg

SEQ ID NO: 5172 - DNA, 20 bp, synthetic construct
  source 1..20: mol_type = other DNA
ggtagggcgtgagcttggca

SEQ ID NO: 5173 - DNA, 20 bp, synthetic construct
  source 1..20: mol_type = other DNA
gaccttacactgacgcaggt

SEQ ID NO: 5174 - DNA, 20 bp, synthetic construct
  source 1..20: mol_type = other DNA
gcagatgacgctgacgcgcg

SEQ ID NO: 5175 - DNA, 20 bp, synthetic construct
  source 1..20: mol_type = other DNA
ccagcagctcgcagcgttgc

SEQ ID NO: 5176 - DNA, 20 bp, synthetic construct
  source 1..20: mol_type = other DNA
tgcagtccatcatccaggtg

SEQ ID NO: 5177 - DNA, 20 bp, synthetic construct
  source 1..20: mol_type = other DNA
gggtcgagcacttgagctcc

SEQ ID NO: 5178 - DNA, 20 bp, synthetic construct
  source 1..20: mol_type = other DNA
ctgcagcgcctgatgcaccg

SEQ ID NO: 5179 - DNA, 20 bp, synthetic construct
  source 1..20: mol_type = other DNA
gaacatcaagaggttcaggt

SEQ ID NO: 5180 - DNA, 20 bp, synthetic construct
  source 1..20: mol_type = other DNA
gcaggttctggaactggagc

SEQ ID NO: 5181 - DNA, 20 bp, synthetic construct
  source 1..20: mol_type = other DNA
tgtcctccagggcctccttg

SEQ ID NO: 5182 - DNA, 20 bp, synthetic construct
  source 1..20: mol_type = other DNA
atcccctcaccagcagcagc

SEQ ID NO: 5183 - DNA, 20 bp, synthetic construct
  source 1..20: mol_type = other DNA
cgagaggcagagtgtcccgt

SEQ ID NO: 5184 - DNA, 20 bp, synthetic construct
  source 1..20: mol_type = other DNA
aggtagggcgtgagcttggc

SEQ ID NO: 5185 - DNA, 20 bp, synthetic construct
  source 1..20: mol_type = other DNA
ccggcggcgctcgcagtaga

SEQ ID NO: 5186 - DNA, 20 bp, synthetic construct
  source 1..20: mol_type = other DNA
agacctccaactcgaggtga

SEQ ID NO: 5187 - DNA, 20 bp, synthetic construct
  source 1..20: mol_type = other DNA
gtgttccaagatgtccagga

SEQ ID NO: 5188 - DNA, 20 bp, synthetic construct
  source 1..20: mol_type = other DNA
cctcctccatcttattcaac

SEQ ID NO: 5189 - DNA, 20 bp, synthetic construct
  source 1..20: mol_type = other DNA
ccatctgcaagtcaggtgag

SEQ ID NO: 5190 - DNA, 20 bp, synthetic construct
  source 1..20: mol_type = other DNA
acgcaggtagggcgtgagct

SEQ ID NO: 5191 - DNA, 20 bp, synthetic construct
  source 1..20: mol_type = other DNA
gctcttcacacccaccgtgc

SEQ ID NO: 5192 - DNA, 20 bp, synthetic construct
  source 1..20: mol_type = other DNA
acactccacattctcccaca

SEQ ID NO: 5193 - DNA, 20 bp, synthetic construct
  source 1..20: mol_type = other DNA
caggaggagctgctgggctc

SEQ ID NO: 5194 - DNA, 20 bp, synthetic construct
  source 1..20: mol_type = other DNA
ggcgccgcagcttgctctcc

SEQ ID NO: 5195 - DNA, 20 bp, synthetic construct
  source 1..20: mol_type = other DNA
tgtgctgcaagacacaaggg

SEQ ID NO: 5196 - DNA, 20 bp, synthetic construct
  source 1..20: mol_type = other DNA
gagacctccaactcgaggtg

SEQ ID NO: 5197 - DNA, 20 bp, synthetic construct
  source 1..20: mol_type = other DNA
gtgtgaagagcacgggccgg

SEQ ID NO: 5198 - DNA, 20 bp, synthetic construct
  source 1..20: mol_type = other DNA
gagccgagacctccaactcg

SEQ ID NO: 5199 - DNA, 20 bp, synthetic construct
  source 1..20: mol_type = other DNA
ggaggccctggaggacaggc

SEQ ID NO: 5200 - DNA, 20 bp, synthetic construct
  source 1..20: mol_type = other DNA
ccctgccaacattgaagctg

SEQ ID NO: 5201 - DNA, 20 bp, synthetic construct
  source 1..20: mol_type = other DNA
ttctgggaggagacacgcag

SEQ ID NO: 5202 - DNA, 20 bp, synthetic construct
  source 1..20: mol_type = other DNA
gctctccaggttgacgatgc

SEQ ID NO: 5203 - DNA, 20 bp, synthetic construct
  source 1..20: mol_type = other DNA
caccagcgtcttggccagca

SEQ ID NO: 5204 - DNA, 20 bp, synthetic construct
  source 1..20: mol_type = other DNA
ggtgcagaggctgctcaact

SEQ ID NO: 5205 - DNA, 20 bp, synthetic construct
  source 1..20: mol_type = other DNA
cttcctccactgtggagagg

SEQ ID NO: 5206 - DNA, 20 bp, synthetic construct
  source 1..20: mol_type = other DNA
cgggagtggaaggcctgcca

SEQ ID NO: 5207 - DNA, 20 bp, synthetic construct
  source 1..20: mol_type = other DNA
ctcccagctcaccctgctgg

SEQ ID NO: 5208 - DNA, 20 bp, synthetic construct
  source 1..20: mol_type = other DNA
cgaactggaggagaagaggg

SEQ ID NO: 5209 - DNA, 20 bp, synthetic construct
  source 1..20: mol_type = other DNA
cctgccgtgcctgtacgcca

SEQ ID NO: 5210 - DNA, 20 bp, synthetic construct
  source 1..20: mol_type = other DNA
tgtaccaggacaggcacgag

SEQ ID NO: 5211 - DNA, 20 bp, synthetic construct
  source 1..20: mol_type = other DNA
gccgtgcctgtacgccacgg

SEQ ID NO: 5212 - DNA, 20 bp, synthetic construct
  source 1..20: mol_type = other DNA
tgatgctgctgcggctccgg

SEQ ID NO: 5213 - DNA, 20 bp, synthetic construct
  source 1..20: mol_type = other DNA
tggaaaggtaccccagtgaa

SEQ ID NO: 5214 - DNA, 20 bp, synthetic construct
  source 1..20: mol_type = other DNA
tgtctcgcagctcctctgcc

SEQ ID NO: 5215 - DNA, 20 bp, synthetic construct
  source 1..20: mol_type = other DNA
agcaggcagtgcttgttctg

SEQ ID NO: 5216 - DNA, 20 bp, synthetic construct
  source 1..20: mol_type = other DNA
acagccactcgtgcctgtcc

SEQ ID NO: 5217 - DNA, 20 bp, synthetic construct
  source 1..20: mol_type = other DNA
ggagcggtactacaagatga

SEQ ID NO: 5218 - DNA, 20 bp, synthetic construct
  source 1..20: mol_type = other DNA
ccagctcctgcctgtcctcc

SEQ ID NO: 5219 - DNA, 20 bp, synthetic construct
  source 1..20: mol_type = other DNA
cagaggctgctcaactcggg

SEQ ID NO: 5220 - DNA, 20 bp, synthetic construct
  source 1..20: mol_type = other DNA
cagcgtcttggccagcacgg

SEQ ID NO: 5221 - DNA, 20 bp, synthetic construct
  source 1..20: mol_type = other DNA
cgatgcattcgaacgcgttg

SEQ ID NO: 5222 - DNA, 20 bp, synthetic construct
  source 1..20: mol_type = other DNA
gaggaggagtggatggagga

SEQ ID NO: 5223 - DNA, 20 bp, synthetic construct
  source 1..20: mol_type = other DNA
aacatcaagaggttcaggta

SEQ ID NO: 5224 - DNA, 20 bp, synthetic construct
  source 1..20: mol_type = other DNA
ttggccagctccttcaggta

SEQ ID NO: 5225 - DNA, 20 bp, synthetic construct
  source 1..20: mol_type = other DNA
tgacgagctggtcaaggtga

SEQ ID NO: 5226 - DNA, 20 bp, synthetic construct
  source 1..20: mol_type = other DNA
gaagcagatccgcgagctgg

SEQ ID NO: 5227 - DNA, 20 bp, synthetic construct
  source 1..20: mol_type = other DNA
cgttcatcaggaagtgcgtg

SEQ ID NO: 5228 - DNA, 20 bp, synthetic construct
  source 1..20: mol_type = other DNA
gagcgggtccgcatcatctc

SEQ ID NO: 5229 - DNA, 20 bp, synthetic construct
  source 1..20: mol_type = other DNA
ttggacattctacataccaa

SEQ ID NO: 5230 - DNA, 20 bp, synthetic construct
  source 1..20: mol_type = other DNA
gctcaactcgggaggtgcca

SEQ ID NO: 5231 - DNA, 20 bp, synthetic construct
  source 1..20: mol_type = other DNA
cacggtggaacctgacatgt

SEQ ID NO: 5232 - DNA, 20 bp, synthetic construct
  source 1..20: mol_type = other DNA
agcaggttctggaactggag

SEQ ID NO: 5233 - DNA, 20 bp, synthetic construct
  source 1..20: mol_type = other DNA
ttcacagtacctggaggaga

SEQ ID NO: 5234 - DNA, 20 bp, synthetic construct
  source 1..20: mol_type = other DNA
ctcgtggccttcctccactg

SEQ ID NO: 5235 - DNA, 20 bp, synthetic construct
  source 1..20: mol_type = other DNA
gtgacaccatgtaccaggac

SEQ ID NO: 5236 - DNA, 20 bp, synthetic construct
  source 1..20: mol_type = other DNA
ccagctccttctccttcagc

SEQ ID NO: 5237 - DNA, 20 bp, synthetic construct
  source 1..20: mol_type = other DNA
ggagcagcgcaagaccatct

SEQ ID NO: 5238 - DNA, 20 bp, synthetic construct
  source 1..20: mol_type = other DNA
gcttggcagggttgatatag

SEQ ID NO: 5239 - DNA, 20 bp, synthetic construct
  source 1..20: mol_type = other DNA
acctacccggagtgcccgca

SEQ ID NO: 5240 - DNA, 20 bp, synthetic construct
  source 1..20: mol_type = other DNA
ctacataccaaggggcaaag

SEQ ID NO: 5241 - DNA, 20 bp, synthetic construct
  source 1..20: mol_type = other DNA
tcggagattctccaccattg

SEQ ID NO: 5242 - DNA, 20 bp, synthetic construct
  source 1..20: mol_type = other DNA
caatgaccttacactgacgc

SEQ ID NO: 5243 - DNA, 20 bp, synthetic construct
  source 1..20: mol_type = other DNA
tgattgacatgatgctgctg

SEQ ID NO: 5244 - DNA, 20 bp, synthetic construct
  source 1..20: mol_type = other DNA
cctgctcggttgatcttgga

SEQ ID NO: 5245 - DNA, 20 bp, synthetic construct
  source 1..20: mol_type = other DNA
aatgtccaacagccggccta

SEQ ID NO: 5246 - DNA, 20 bp, synthetic construct
  source 1..20: mol_type = other DNA
ggaggagctgctgggctctg

SEQ ID NO: 5247 - DNA, 20 bp, synthetic construct
  source 1..20: mol_type = other DNA
ggaggaggaggaggagtgga

SEQ ID NO: 5248 - DNA, 20 bp, synthetic construct
  source 1..20: mol_type = other DNA
gcagcagcagatgaaggcca

SEQ ID NO: 5249 - DNA, 20 bp, synthetic construct
  source 1..20: mol_type = other DNA
gttggacattctacatacca

SEQ ID NO: 5250 - DNA, 20 bp, synthetic construct
  source 1..20: mol_type = other DNA
ttgatcttggatggcagcat

SEQ ID NO: 5251 - DNA, 20 bp, synthetic construct
  source 1..20: mol_type = other DNA
tctccgcctggggcagagag

SEQ ID NO: 5252 - DNA, 20 bp, synthetic construct
  source 1..20: mol_type = other DNA
cgcggcatcttcccgccctg

SEQ ID NO: 5253 - DNA, 20 bp, synthetic construct
  source 1..20: mol_type = other DNA
gtttgatgaggagcgagccc

SEQ ID NO: 5254 - DNA, 20 bp, synthetic construct
  source 1..20: mol_type = other DNA
gccttgcagattaagtacac

SEQ ID NO: 5255 - DNA, 20 bp, synthetic construct
  source 1..20: mol_type = other DNA
ttccagaacgcctgccgcga

SEQ ID NO: 5256 - DNA, 20 bp, synthetic construct
  source 1..20: mol_type = other DNA
gccgacttacgatttccgag

SEQ ID NO: 5257 - DNA, 20 bp, synthetic construct
  source 1..20: mol_type = other DNA
cgatttccgagcggccgtcg

SEQ ID NO: 5258 - DNA, 20 bp, synthetic construct
  source 1..20: mol_type = other DNA
gagagacagattggttcctg

SEQ ID NO: 5259 - DNA, 20 bp, synthetic construct
  source 1..20: mol_type = other DNA
ccagcatgtggctgaagatg

SEQ ID NO: 5260 - DNA, 20 bp, synthetic construct
  source 1..20: mol_type = other DNA
gtgcacatgaggtgtccaca

SEQ ID NO: 5261 - DNA, 20 bp, synthetic construct
  source 1..20: mol_type = other DNA
taagacaggatgtgcacatg

SEQ ID NO: 5262 - DNA, 20 bp, synthetic construct
  source 1..20: mol_type = other DNA
gtgtcctacctgaaagagtc

SEQ ID NO: 5263 - DNA, 20 bp, synthetic construct
  source 1..20: mol_type = other DNA
tctctggagggacagtcgcc

SEQ ID NO: 5264 - DNA, 20 bp, synthetic construct
  source 1..20: mol_type = other DNA
cctcatcttcagccacatgc

SEQ ID NO: 5265 - DNA, 20 bp, synthetic construct
  source 1..20: mol_type = other DNA
tctcgaagtgtgggaggtac

SEQ ID NO: 5266 - DNA, 20 bp, synthetic construct
  source 1..20: mol_type = other DNA
cttaccaaaggtgctgctct

SEQ ID NO: 5267 - DNA, 20 bp, synthetic construct
  source 1..20: mol_type = other DNA
tgtgcacatgaggtgtccac

SEQ ID NO: 5268 - DNA, 20 bp, synthetic construct
  source 1..20: mol_type = other DNA
caagttgatgtcctgaccca

SEQ ID NO: 5269 - DNA, 20 bp, synthetic construct
  source 1..20: mol_type = other DNA
tatctcatcattggcatatg

SEQ ID NO: 5270 - DNA, 20 bp, synthetic construct
  source 1..20: mol_type = other DNA
caaggcaccccaggtttcca

SEQ ID NO: 5271 - DNA, 20 bp, synthetic construct
  source 1..20: mol_type = other DNA
caaaaggaagagaagtggga

SEQ ID NO: 5272 - DNA, 20 bp, synthetic construct
  source 1..20: mol_type = other DNA
ggaaagctcatcttaggggt

SEQ ID NO: 5273 - DNA, 20 bp, synthetic construct
  source 1..20: mol_type = other DNA
cttgggtcaggacatcaact

SEQ ID NO: 5274 - DNA, 20 bp, synthetic construct
  source 1..20: mol_type = other DNA
cttgatacaggtttaattcg

SEQ ID NO: 5275 - DNA, 20 bp, synthetic construct
  source 1..20: mol_type = other DNA
cgatgatcaggatatctaca

SEQ ID NO: 5276 - DNA, 20 bp, synthetic construct
  source 1..20: mol_type = other DNA
acatggaaagctcatcttag

SEQ ID NO: 5277 - DNA, 20 bp, synthetic construct
  source 1..20: mol_type = other DNA
cttgtagatatcctgatcat

SEQ ID NO: 5278 - DNA, 20 bp, synthetic construct
  source 1..20: mol_type = other DNA
cattcattacctcacaggtc

SEQ ID NO: 5279 - DNA, 20 bp, synthetic construct
  source 1..20: mol_type = other DNA
atacaagtccaggagatctt

SEQ ID NO: 5280 - DNA, 20 bp, synthetic construct
  source 1..20: mol_type = other DNA
cacgcacctggacagctgac

SEQ ID NO: 5281 - DNA, 20 bp, synthetic construct
  source 1..20: mol_type = other DNA
tggaggaggcagcctcttga

SEQ ID NO: 5282 - DNA, 20 bp, synthetic construct
  source 1..20: mol_type = other DNA
agttccattcattacctcac

SEQ ID NO: 5283 - DNA, 20 bp, synthetic construct
  source 1..20: mol_type = other DNA
acagctgacaggctcgacac

SEQ ID NO: 5284 - DNA, 20 bp, synthetic construct
  source 1..20: mol_type = other DNA
attgaaaatcagaaggaagc

SEQ ID NO: 5285 - DNA, 20 bp, synthetic construct
  source 1..20: mol_type = other DNA
accggctttccccccatctc

SEQ ID NO: 5286 - DNA, 20 bp, synthetic construct
  source 1..20: mol_type = other DNA
tcccaaactctgctacctgc

SEQ ID NO: 5287 - DNA, 20 bp, synthetic construct
  source 1..20: mol_type = other DNA
ggaactgcagaaagataaga

SEQ ID NO: 5288 - DNA, 20 bp, synthetic construct
  source 1..20: mol_type = other DNA
gggcagggcctgcatgtgaa

SEQ ID NO: 5289 - DNA, 20 bp, synthetic construct
  source 1..20: mol_type = other DNA
ggggcagggcctgcatgtga

SEQ ID NO: 5290 - DNA, 20 bp, synthetic construct
  source 1..20: mol_type = other DNA
tctgtgccaagagataaagc

SEQ ID NO: 5291 - DNA, 20 bp, synthetic construct
  source 1..20: mol_type = other DNA
gctgacttacgttatagagc

SEQ ID NO: 5292 - DNA, 20 bp, synthetic construct
  source 1..20: mol_type = other DNA
ggcacagagctttggcctgc

SEQ ID NO: 5293 - DNA, 20 bp, synthetic construct
  source 1..20: mol_type = other DNA
accagcgccggaggggcaag

SEQ ID NO: 5294 - DNA, 20 bp, synthetic construct
  source 1..20: mol_type = other DNA
tctgcagttcctgcagaaga

SEQ ID NO: 5295 - DNA, 20 bp, synthetic construct
  source 1..20: mol_type = other DNA
tgccccctcgctaacagcca

SEQ ID NO: 5296 - DNA, 20 bp, synthetic construct
  source 1..20: mol_type = other DNA
agttcctgcagaagagggcg

SEQ ID NO: 5297 - DNA, 20 bp, synthetic construct
  source 1..20: mol_type = other DNA
agcagagtttgggatccagc

SEQ ID NO: 5298 - DNA, 20 bp, synthetic construct
  source 1..20: mol_type = other DNA
aaccagcgccggaggggcaa

SEQ ID NO: 5299 - DNA, 20 bp, synthetic construct
  source 1..20: mol_type = other DNA
gagtgaaggtgggtaccact

SEQ ID NO: 5300 - DNA, 20 bp, synthetic construct
  source 1..20: mol_type = other DNA
agagtgaaggtgggtaccac

SEQ ID NO: 5301 - DNA, 20 bp, synthetic construct
  source 1..20: mol_type = other DNA
caaccagcgccggaggggca

SEQ ID NO: 5302 - DNA, 20 bp, synthetic construct
  source 1..20: mol_type = other DNA
ctgcatgtgaagggcgtcgt

SEQ ID NO: 5303 - DNA, 20 bp, synthetic construct
  source 1..20: mol_type = other DNA
caggcacagttgccgattac

SEQ ID NO: 5304 - DNA, 20 bp, synthetic construct
  source 1..20: mol_type = other DNA
gccccctcgctaacagccag

SEQ ID NO: 5305 - DNA, 20 bp, synthetic construct
  source 1..20: mol_type = other DNA
aaactctgctacctgctgga

SEQ ID NO: 5306 - DNA, 20 bp, synthetic construct
  source 1..20: mol_type = other DNA
ctgttataggagctcaatct

SEQ ID NO: 5307 - DNA, 20 bp, synthetic construct
  source 1..20: mol_type = other DNA
ttacgttatagagctggttc

SEQ ID NO: 5308 - DNA, 20 bp, synthetic construct
  source 1..20: mol_type = other DNA
acagttgccgattacaggta

SEQ ID NO: 5309 - DNA, 20 bp, synthetic construct
  source 1..20: mol_type = other DNA
ccggctttccccccatctca

SEQ ID NO: 5310 - DNA, 20 bp, synthetic construct
  source 1..20: mol_type = other DNA
cacagttgccgattacaggt

SEQ ID NO: 5311 - DNA, 20 bp, synthetic construct
  source 1..20: mol_type = other DNA
atccagcaggtagcagagtt

SEQ ID NO: 5312 - DNA, 20 bp, synthetic construct
  source 1..20: mol_type = other DNA
tgccttgttcctgagagtga

SEQ ID NO: 5313 - DNA, 20 bp, synthetic construct
  source 1..20: mol_type = other DNA
ccaaacaaccagcgccggag

SEQ ID NO: 5314 - DNA, 20 bp, synthetic construct
  source 1..20: mol_type = other DNA
tgaagaggattccatccagc

SEQ ID NO: 5315 - DNA, 20 bp, synthetic construct
  source 1..20: mol_type = other DNA
tccagcaggtagcagagttt

SEQ ID NO: 5316 - DNA, 20 bp, synthetic construct
  source 1..20: mol_type = other DNA
caccttcactctcaggaaca

SEQ ID NO: 5317 - DNA, 20 bp, synthetic construct
  source 1..20: mol_type = other DNA
ggcacagaggcacagagctt

SEQ ID NO: 5318 - DNA, 20 bp, synthetic construct
  source 1..20: mol_type = other DNA
actgcagaaagataagatgg

SEQ ID NO: 5319 - DNA, 20 bp, synthetic construct
  source 1..20: mol_type = other DNA
gcagaaagataagatggcgg

SEQ ID NO: 5320 - DNA, 20 bp, synthetic construct
  source 1..20: mol_type = other DNA
tctcccttggatggtcggcg

SEQ ID NO: 5321 - DNA, 20 bp, synthetic construct
  source 1..20: mol_type = other DNA
tctcttggaattggtggtgg

SEQ ID NO: 5322 - DNA, 20 bp, synthetic construct
  source 1..20: mol_type = other DNA
ttcctacaatctcttctcaa

SEQ ID NO: 5323 - DNA, 20 bp, synthetic construct
  source 1..20: mol_type = other DNA
caccaaaatcttgtttcctg

SEQ ID NO: 5324 - DNA, 20 bp, synthetic construct
  source 1..20: mol_type = other DNA
ccctgaaaaacaaaatagag

SEQ ID NO: 5325 - DNA, 20 bp, synthetic construct
  source 1..20: mol_type = other DNA
tcctgcaggtgaggagtaag

SEQ ID NO: 5326 - DNA, 20 bp, synthetic construct
  source 1..20: mol_type = other DNA
ttccgggcatcccttcacaa

SEQ ID NO: 5327 - DNA, 20 bp, synthetic construct
  source 1..20: mol_type = other DNA
gcttcaggtttactcaaaaa

SEQ ID NO: 5328 - DNA, 20 bp, synthetic construct
  source 1..20: mol_type = other DNA
ctagacaatgagaagagcaa

SEQ ID NO: 5329 - DNA, 20 bp, synthetic construct
  source 1..20: mol_type = other DNA
ggaaccattatccatgtgaa

SEQ ID NO: 5330 - DNA, 20 bp, synthetic construct
  source 1..20: mol_type = other DNA
caaaggactggatagtgctg

SEQ ID NO: 5331 - DNA, 20 bp, synthetic construct
  source 1..20: mol_type = other DNA
agcacccaaaagggcttaga

SEQ ID NO: 5332 - DNA, 20 bp, synthetic construct
  source 1..20: mol_type = other DNA
tcattgtctaggtaaggagg

SEQ ID NO: 5333 - DNA, 20 bp, synthetic construct
  source 1..20: mol_type = other DNA
cttcaggtttactcaaaaac

SEQ ID NO: 5334 - DNA, 20 bp, synthetic construct
  source 1..20: mol_type = other DNA
tgtaggaatacttgcagcta

SEQ ID NO: 5335 - DNA, 20 bp, synthetic construct
  source 1..20: mol_type = other DNA
tgttcatgtagtcactgtgc

SEQ ID NO: 5336 - DNA, 20 bp, synthetic construct
  source 1..20: mol_type = other DNA
taagcccttttgggtgctgg

SEQ ID NO: 5337 - DNA, 20 bp, synthetic construct
  source 1..20: mol_type = other DNA
tggaagtctgtgttgtatat

SEQ ID NO: 5338 - DNA, 20 bp, synthetic construct
  source 1..20: mol_type = other DNA
caaaagggcttagaaggtcc

SEQ ID NO: 5339 - DNA, 20 bp, synthetic construct
  source 1..20: mol_type = other DNA
gttacctttcacatggataa

SEQ ID NO: 5340 - DNA, 20 bp, synthetic construct
  source 1..20: mol_type = other DNA
ttagaaggtccgggaaatag

SEQ ID NO: 5341 - DNA, 20 bp, synthetic construct
  source 1..20: mol_type = other DNA
ttctcattgtctaggtaagg

SEQ ID NO: 5342 - DNA, 20 bp, synthetic construct
  source 1..20: mol_type = other DNA
aggtgaggagtaagaggagc

SEQ ID NO: 5343 - DNA, 20 bp, synthetic construct
  source 1..20: mol_type = other DNA
accaaaatcttgtttcctgg

SEQ ID NO: 5344 - DNA, 20 bp, synthetic construct
  source 1..20: mol_type = other DNA
tcttacccagaaaataataa

SEQ ID NO: 5345 - DNA, 20 bp, synthetic construct
  source 1..20: mol_type = other DNA
gaattactcccagcagcttc

SEQ ID NO: 5346 - DNA, 20 bp, synthetic construct
  source 1..20: mol_type = other DNA
ttcaggtttactcaaaaacg

SEQ ID NO: 5347 - DNA, 20 bp, synthetic construct
  source 1..20: mol_type = other DNA
ctcttctcattgtctaggta

SEQ ID NO: 5348 - DNA, 20 bp, synthetic construct
  source 1..20: mol_type = other DNA
tgcagaagtaaatatctgtt

SEQ ID NO: 5349 - DNA, 20 bp, synthetic construct
  source 1..20: mol_type = other DNA
ctcccttgagaagagattgt

SEQ ID NO: 5350 - DNA, 20 bp, synthetic construct
  source 1..20: mol_type = other DNA
cattgctcttctcattgtct

SEQ ID NO: 5351 - DNA, 20 bp, synthetic construct
  source 1..20: mol_type = other DNA
gcttgtagcgtacgacaatg

SEQ ID NO: 5352 - DNA, 20 bp, synthetic construct
  source 1..20: mol_type = other DNA
tcccccaggaaacaagattt

SEQ ID NO: 5353 - DNA, 20 bp, synthetic construct
  source 1..20: mol_type = other DNA
atctcttctcaagggagttc

SEQ ID NO: 5354 - DNA, 20 bp, synthetic construct
  source 1..20: mol_type = other DNA
ctatagcttgctagtaacag

SEQ ID NO: 5355 - DNA, 20 bp, synthetic construct
  source 1..20: mol_type = other DNA
ggcatcccttcacaaaggac

SEQ ID NO: 5356 - DNA, 20 bp, synthetic construct
  source 1..20: mol_type = other DNA
ccaaaagggcttagaaggtc

SEQ ID NO: 5357 - DNA, 20 bp, synthetic construct
  source 1..20: mol_type = other DNA
caaggtaaggctactccagg

SEQ ID NO: 5358 - DNA, 20 bp, synthetic construct
  source 1..20: mol_type = other DNA
tacacctatatattcctcgt

SEQ ID NO: 5359 - DNA, 20 bp, synthetic construct
  source 1..20: mol_type = other DNA
tccctctacccatgtgatgc

SEQ ID NO: 5360 - DNA, 20 bp, synthetic construct
  source 1..20: mol_type = other DNA
agtgacaatgatgccagcca

SEQ ID NO: 5361 - DNA, 20 bp, synthetic construct
  source 1..20: mol_type = other DNA
tcctctataggtatcttgaa

SEQ ID NO: 5362 - DNA, 20 bp, synthetic construct
  source 1..20: mol_type = other DNA
gacaatgatgccagccacgg

SEQ ID NO: 5363 - DNA, 20 bp, synthetic construct
  source 1..20: mol_type = other DNA
gtgccagagctgtgtggagc

SEQ ID NO: 5364 - DNA, 20 bp, synthetic construct
  source 1..20: mol_type = other DNA
tgccactctgctccttgctt

SEQ ID NO: 5365 - DNA, 20 bp, synthetic construct
  source 1..20: mol_type = other DNA
tcgcaaggtaaggctactcc

SEQ ID NO: 5366 - DNA, 20 bp, synthetic construct
  source 1..20: mol_type = other DNA
cctctataggtatcttgaag

SEQ ID NO: 5367 - DNA, 20 bp, synthetic construct
  source 1..20: mol_type = other DNA
acttcgataatgaacttgca

SEQ ID NO: 5368 - DNA, 20 bp, synthetic construct
  source 1..20: mol_type = other DNA
accagcatcacatgggtaga

SEQ ID NO: 5369 - DNA, 20 bp, synthetic construct
  source 1..20: mol_type = other DNA
agagaagggtagccagtacc

SEQ ID NO: 5370 - DNA, 20 bp, synthetic construct
  source 1..20: mol_type = other DNA
cgaggaatatataggtgtaa

SEQ ID NO: 5371 - DNA, 20 bp, synthetic construct
  source 1..20: mol_type = other DNA
acatgggtagagggaacggt

SEQ ID NO: 5372 - DNA, 20 bp, synthetic construct
  source 1..20: mol_type = other DNA
tcccaaagcaaggagcagag

SEQ ID NO: 5373 - DNA, 20 bp, synthetic construct
  source 1..20: mol_type = other DNA
ctctggcacactgtggggga

SEQ ID NO: 5374 - DNA, 20 bp, synthetic construct
  source 1..20: mol_type = other DNA
ggtccaggatgcgttttccc

SEQ ID NO: 5375 - DNA, 20 bp, synthetic construct
  source 1..20: mol_type = other DNA
ttacacctatatattcctcg

SEQ ID NO: 5376 - DNA, 20 bp, synthetic construct
  source 1..20: mol_type = other DNA
ttcctctataggtatcttga

SEQ ID NO: 5377 - DNA, 20 bp, synthetic construct
  source 1..20: mol_type = other DNA
tggacccacgaggaatatat

SEQ ID NO: 5378 - DNA, 20 bp, synthetic construct
  source 1..20: mol_type = other DNA
acacagctctggcacactgt

SEQ ID NO: 5379 - DNA, 20 bp, synthetic construct
  source 1..20: mol_type = other DNA
cacagtgtgccagagctgtg

SEQ ID NO: 5380 - DNA, 20 bp, synthetic construct
  source 1..20: mol_type = other DNA
ctgtcctcaagttcctctat

SEQ ID NO: 5381 - DNA, 20 bp, synthetic construct
  source 1..20: mol_type = other DNA
ccccttcaagatacctatag

SEQ ID NO: 5382 - DNA, 20 bp, synthetic construct
  source 1..20: mol_type = other DNA
aaacgcatcctggacccacg

SEQ ID NO: 5383 - DNA, 20 bp, synthetic construct
  source 1..20: mol_type = other DNA
gatccagctccacacagctc

SEQ ID NO: 5384 - DNA, 20 bp, synthetic construct
  source 1..20: mol_type = other DNA
ggagctggatccagccaccg

SEQ ID NO: 5385 - DNA, 20 bp, synthetic construct
  source 1..20: mol_type = other DNA
agccttaccttgcgagagaa

SEQ ID NO: 5386 - DNA, 20 bp, synthetic construct
  source 1..20: mol_type = other DNA
tctggcacactgtgggggaa

SEQ ID NO: 5387 - DNA, 20 bp, synthetic construct
  source 1..20: mol_type = other DNA
cacagctctggcacactgtg

SEQ ID NO: 5388 - DNA, 20 bp, synthetic construct
  source 1..20: mol_type = other DNA
tatatattcctcgtgggtcc

SEQ ID NO: 5389 - DNA, 20 bp, synthetic construct
  source 1..20: mol_type = other DNA
tagccttaccttgcgagaga

SEQ ID NO: 5390 - DNA, 20 bp, synthetic construct
  source 1..20: mol_type = other DNA
gagactggaaggctgtctgg

SEQ ID NO: 5391 - DNA, 20 bp, synthetic construct
  source 1..20: mol_type = other DNA
tgctatgttccatctcccag

SEQ ID NO: 5392 - DNA, 20 bp, synthetic construct
  source 1..20: mol_type = other DNA
acagctctggcacactgtgg

SEQ ID NO: 5393 - DNA, 20 bp, synthetic construct
  source 1..20: mol_type = other DNA
atcttgaaggggctcactaa

SEQ ID NO: 5394 - DNA, 20 bp, synthetic construct
  source 1..20: mol_type = other DNA
taccagcatcacatgggtag

SEQ ID NO: 5395 - DNA, 20 bp, synthetic construct
  source 1..20: mol_type = other DNA
cacacagctctggcacactg

SEQ ID NO: 5396 - DNA, 20 bp, synthetic construct
  source 1..20: mol_type = other DNA
cttgaaggggctcactaaag

SEQ ID NO: 5397 - DNA, 20 bp, synthetic construct
  source 1..20: mol_type = other DNA
tcttgaaggggctcactaaa

SEQ ID NO: 5398 - DNA, 20 bp, synthetic construct
  source 1..20: mol_type = other DNA
ggcacactgtgggggaaggg

SEQ ID NO: 5399 - DNA, 20 bp, synthetic construct
  source 1..20: mol_type = other DNA
ttatatgctggggagaaaga

SEQ ID NO: 5400 - DNA, 20 bp, synthetic construct
  source 1..20: mol_type = other DNA
cagttctcacacactgtggg

SEQ ID NO: 5401 - DNA, 20 bp, synthetic construct
  source 1..20: mol_type = other DNA
cttctggtttgcttcctctg

SEQ ID NO: 5402 - DNA, 20 bp, synthetic construct
  source 1..20: mol_type = other DNA
ggagatggatgtgatgtcgg

SEQ ID NO: 5403 - DNA, 20 bp, synthetic construct
  source 1..20: mol_type = other DNA
tagtctgggttgggaacagg

SEQ ID NO: 5404 - DNA, 20 bp, synthetic construct
  source 1..20: mol_type = other DNA
atgcagttctcacacactgt

SEQ ID NO: 5405 - DNA, 20 bp, synthetic construct
  source 1..20: mol_type = other DNA
acacgaggagcgggtgctgg

SEQ ID NO: 5406 - DNA, 20 bp, synthetic construct
  source 1..20: mol_type = other DNA
gatgtccactatgacaattg

SEQ ID NO: 5407 - DNA, 20 bp, synthetic construct
  source 1..20: mol_type = other DNA
atagtggacatctgcatcac

SEQ ID NO: 5408 - DNA, 20 bp, synthetic construct
  source 1..20: mol_type = other DNA
cactgggggcttgctgctgc

SEQ ID NO: 5409 - DNA, 20 bp, synthetic construct
  source 1..20: mol_type = other DNA
tatatgctggggagaaagaa

SEQ ID NO: 5410 - DNA, 20 bp, synthetic construct
  source 1..20: mol_type = other DNA
tgccatagtatttcagatcc

SEQ ID NO: 5411 - DNA, 20 bp, synthetic construct
  source 1..20: mol_type = other DNA
catcctactcacctgataag

SEQ ID NO: 5412 - DNA, 20 bp, synthetic construct
  source 1..20: mol_type = other DNA
gtggacatctgcatcactgg

SEQ ID NO: 5413 - DNA, 20 bp, synthetic construct
  source 1..20: mol_type = other DNA
tattactgtggttccagaga

SEQ ID NO: 5414 - DNA, 20 bp, synthetic construct
  source 1..20: mol_type = other DNA
caacacaatgataaaaacat

SEQ ID NO: 5415 - DNA, 20 bp, synthetic construct
  source 1..20: mol_type = other DNA
gttacctcatagtctgggtt

SEQ ID NO: 5416 - DNA, 20 bp, synthetic construct
  source 1..20: mol_type = other DNA
ctgagggcaagaggtaatcc

SEQ ID NO: 5417 - DNA, 20 bp, synthetic construct
  source 1..20: mol_type = other DNA
agggcatgtcaatattactg

SEQ ID NO: 5418 - DNA, 20 bp, synthetic construct
  source 1..20: mol_type = other DNA
gtgacacgaggagcgggtgc

SEQ ID NO: 5419 - DNA, 20 bp, synthetic construct
  source 1..20: mol_type = other DNA
agatggagactttatatgct

SEQ ID NO: 5420 - DNA, 20 bp, synthetic construct
  source 1..20: mol_type = other DNA
catgcagttctcacacactg

SEQ ID NO: 5421 - DNA, 20 bp, synthetic construct
  source 1..20: mol_type = other DNA
tttcagatccaggatactga

SEQ ID NO: 5422 - DNA, 20 bp, synthetic construct
  source 1..20: mol_type = other DNA
ctggattacctcttgccctc

SEQ ID NO: 5423 - DNA, 20 bp, synthetic construct
  source 1..20: mol_type = other DNA
tgcagttctcacacactgtg

SEQ ID NO: 5424 - DNA, 20 bp, synthetic construct
  source 1..20: mol_type = other DNA
gcatataaagtctccatctc

SEQ ID NO: 5425 - DNA, 20 bp, synthetic construct
  source 1..20: mol_type = other DNA
tcttctggtttgcttcctct

SEQ ID NO: 5426 - DNA, 20 bp, synthetic construct
  source 1..20: mol_type = other DNA
atttcagatccaggatactg

SEQ ID NO: 5427 - DNA, 20 bp, synthetic construct
  source 1..20: mol_type = other DNA
catggagatggatgtgatgt

SEQ ID NO: 5428 - DNA, 20 bp, synthetic construct
  source 1..20: mol_type = other DNA
tagtggacatctgcatcact

SEQ ID NO: 5429 - DNA, 20 bp, synthetic construct
  source 1..20: mol_type = other DNA
agatgcagtcgggcactcac

SEQ ID NO: 5430 - DNA, 20 bp, synthetic construct
  source 1..20: mol_type = other DNA
gcagttctcacacactgtgg

SEQ ID NO: 5431 - DNA, 20 bp, synthetic construct
  source 1..20: mol_type = other DNA
cacagtgtgtgagaactgca

SEQ ID NO: 5432 - DNA, 20 bp, synthetic construct
  source 1..20: mol_type = other DNA
actcacctgataagaggcag

SEQ ID NO: 5433 - DNA, 20 bp, synthetic construct
  source 1..20: mol_type = other DNA
ccgcaggacaaaacaaggag

SEQ ID NO: 5434 - DNA, 20 bp, synthetic construct
  source 1..20: mol_type = other DNA
tatctctacctgagggcaag

SEQ ID NO: 5435 - DNA, 20 bp, synthetic construct
  source 1..20: mol_type = other DNA
tattatgtctgctaccccag

SEQ ID NO: 5436 - DNA, 20 bp, synthetic construct
  source 1..20: mol_type = other DNA
agtggacatctgcatcactg

SEQ ID NO: 5437 - DNA, 20 bp, synthetic construct
  source 1..20: mol_type = other DNA
atcttctggtttgcttcctc

SEQ ID NO: 5438 - DNA, 20 bp, synthetic construct
  source 1..20: mol_type = other DNA
atcaggtgagtaggatggag

SEQ ID NO: 5439 - DNA, 20 bp, synthetic construct
  source 1..20: mol_type = other DNA
cgttacctcatagtctgggt

SEQ ID NO: 5440 - DNA, 20 bp, synthetic construct
  source 1..20: mol_type = other DNA
gagatggagactttatatgc

SEQ ID NO: 5441 - DNA, 20 bp, synthetic construct
  source 1..20: mol_type = other DNA
gatggagactttatatgctg

SEQ ID NO: 5442 - DNA, 20 bp, synthetic construct
  source 1..20: mol_type = other DNA
ccatgtcagtctctgtcctc

SEQ ID NO: 5443 - DNA, 20 bp, synthetic construct
  source 1..20: mol_type = other DNA
tgactatcaagaagatggtt

SEQ ID NO: 5444 - DNA, 20 bp, synthetic construct
  source 1..20: mol_type = other DNA
aaagagaaagccagatatgg

SEQ ID NO: 5445 - DNA, 20 bp, synthetic construct
  source 1..20: mol_type = other DNA
gactgacatggaacagggga

SEQ ID NO: 5446 - DNA, 20 bp, synthetic construct
  source 1..20: mol_type = other DNA
tctgacacactgtagggaaa

SEQ ID NO: 5447 - DNA, 20 bp, synthetic construct
  source 1..20: mol_type = other DNA
ttcaaggtaagggcctacta

SEQ ID NO: 5448 - DNA, 20 bp, synthetic construct
  source 1..20: mol_type = other DNA
cgagggatgtatcagtgtaa

SEQ ID NO: 5449 - DNA, 20 bp, synthetic construct
  source 1..20: mol_type = other DNA
catggaacaggggaagggcc

SEQ ID NO: 5450 - DNA, 20 bp, synthetic construct
  source 1..20: mol_type = other DNA
atgcagttctgacacactgt

SEQ ID NO: 5451 - DNA, 20 bp, synthetic construct
  source 1..20: mol_type = other DNA
actgacatggaacaggggaa

SEQ ID NO: 5452 - DNA, 20 bp, synthetic construct
  source 1..20: mol_type = other DNA
tcctgaaatgagaaaagccg

SEQ ID NO: 5453 - DNA, 20 bp, synthetic construct
  source 1..20: mol_type = other DNA
cttctgtaatacacttggag

SEQ ID NO: 5454 - DNA, 20 bp, synthetic construct
  source 1..20: mol_type = other DNA
tcaaggtaagggcctactag

SEQ ID NO: 5455 - DNA, 20 bp, synthetic construct
  source 1..20: mol_type = other DNA
ttacactgatacatccctcg

SEQ ID NO: 5456 - DNA, 20 bp, synthetic construct
  source 1..20: mol_type = other DNA
acatacttctgtaatacact

SEQ ID NO: 5457 - DNA, 20 bp, synthetic construct
  source 1..20: mol_type = other DNA
tggcccagtcaatcaaaggt

SEQ ID NO: 5458 - DNA, 20 bp, synthetic construct
  source 1..20: mol_type = other DNA
ttcaggaaaccacttggtta

SEQ ID NO: 5459 - DNA, 20 bp, synthetic construct
  source 1..20: mol_type = other DNA
tacactgatacatccctcga

SEQ ID NO: 5460 - DNA, 20 bp, synthetic construct
  source 1..20: mol_type = other DNA
agcaaagagaaagccagata

SEQ ID NO: 5461 - DNA, 20 bp, synthetic construct
  source 1..20: mol_type = other DNA
taagattctctcgaatctac

SEQ ID NO: 5462 - DNA, 20 bp, synthetic construct
  source 1..20: mol_type = other DNA
tctcatcagctgtcataaac

SEQ ID NO: 5463 - DNA, 20 bp, synthetic construct
  source 1..20: mol_type = other DNA
acaataagaatattttcatt

SEQ ID NO: 5464 - DNA, 20 bp, synthetic construct
  source 1..20: mol_type = other DNA
ctggcacttcgagttggaac

SEQ ID NO: 5465 - DNA, 20 bp, synthetic construct
  source 1..20: mol_type = other DNA
cggccagcactgtgccggcg

SEQ ID NO: 5466 - DNA, 20 bp, synthetic construct
  source 1..20: mol_type = other DNA
cacactggaggttgttgcag

SEQ ID NO: 5467 - DNA, 20 bp, synthetic construct
  source 1..20: mol_type = other DNA
ctggaggtctacctcaagga

SEQ ID NO: 5468 - DNA, 20 bp, synthetic construct
  source 1..20: mol_type = other DNA
taccatcagctatgaggccc

SEQ ID NO: 5469 - DNA, 20 bp, synthetic construct
  source 1..20: mol_type = other DNA
ccagctggaggtctacctca

SEQ ID NO: 5470 - DNA, 20 bp, synthetic construct
  source 1..20: mol_type = other DNA
gctgcagcctgggaggagct

SEQ ID NO: 5471 - DNA, 20 bp, synthetic construct
  source 1..20: mol_type = other DNA
ctagcttcttgtaggcaagg

SEQ ID NO: 5472 - DNA, 20 bp, synthetic construct
  source 1..20: mol_type = other DNA
tgagccttgcctggaaatct

SEQ ID NO: 5473 - DNA, 20 bp, synthetic construct
  source 1..20: mol_type = other DNA
tagcagatgattgagctctg

SEQ ID NO: 5474 - DNA, 20 bp, synthetic construct
  source 1..20: mol_type = other DNA
gcactgggacagcttctgat

SEQ ID NO: 5475 - DNA, 20 bp, synthetic construct
  source 1..20: mol_type = other DNA
gacccccagatttccaggca

SEQ ID NO: 5476 - DNA, 20 bp, synthetic construct
  source 1..20: mol_type = other DNA
caggcagagcccaagaccca

SEQ ID NO: 5477 - DNA, 20 bp, synthetic construct
  source 1..20: mol_type = other DNA
atcttccattggattggcaa

SEQ ID NO: 5478 - DNA, 20 bp, synthetic construct
  source 1..20: mol_type = other DNA
agcaggtacaaggtggccag

SEQ ID NO: 5479 - DNA, 20 bp, synthetic construct
  source 1..20: mol_type = other DNA
gacacatgtcatttctgctg

SEQ ID NO: 5480 - DNA, 20 bp, synthetic construct
  source 1..20: mol_type = other DNA
gcaccccacagttcagccgc

SEQ ID NO: 5481 - DNA, 20 bp, synthetic construct
  source 1..20: mol_type = other DNA
acgaatacagccaacctccc

SEQ ID NO: 5482 - DNA, 20 bp, synthetic construct
  source 1..20: mol_type = other DNA
cactagcttcttgtaggcaa

SEQ ID NO: 5483 - DNA, 20 bp, synthetic construct
  source 1..20: mol_type = other DNA
ctgcagctggtggcacagtc

SEQ ID NO: 5484 - DNA, 20 bp, synthetic construct
  source 1..20: mol_type = other DNA
cagacttttgacgcttgact

SEQ ID NO: 5485 - DNA, 20 bp, synthetic construct
  source 1..20: mol_type = other DNA
tcctatcgagtgctggacgc

SEQ ID NO: 5486 - DNA, 20 bp, synthetic construct
  source 1..20: mol_type = other DNA
ctgccagcggctgaactgtg

SEQ ID NO: 5487 - DNA, 20 bp, synthetic construct
  source 1..20: mol_type = other DNA
tcaagaaggagccacactgg

SEQ ID NO: 5488 - DNA, 20 bp, synthetic construct
  source 1..20: mol_type = other DNA
ggtagacctccagctggccc

SEQ ID NO: 5489 - DNA, 20 bp, synthetic construct
  source 1..20: mol_type = other DNA
actgcagaaagaagagagga

SEQ ID NO: 5490 - DNA, 20 bp, synthetic construct
  source 1..20: mol_type = other DNA
gctgtggctgcagttggaga

SEQ ID NO: 5491 - DNA, 20 bp, synthetic construct
  source 1..20: mol_type = other DNA
gactgcagaaagaagagagg

SEQ ID NO: 5492 - DNA, 20 bp, synthetic construct
  source 1..20: mol_type = other DNA
tccattggattggcaagggc

SEQ ID NO: 5493 - DNA, 20 bp, synthetic construct
  source 1..20: mol_type = other DNA
cctggcacttcgagttggaa

SEQ ID NO: 5494 - DNA, 20 bp, synthetic construct
  source 1..20: mol_type = other DNA
gttacccacctaagcaggtc

SEQ ID NO: 5495 - DNA, 20 bp, synthetic construct
  source 1..20: mol_type = other DNA
ccagcactgtgccggcgtgg

SEQ ID NO: 5496 - DNA, 20 bp, synthetic construct
  source 1..20: mol_type = other DNA
tctctgggcctgacctgctt

SEQ ID NO: 5497 - DNA, 20 bp, synthetic construct
  source 1..20: mol_type = other DNA
ctcccaccgcagcgagctcc

SEQ ID NO: 5498 - DNA, 20 bp, synthetic construct
  source 1..20: mol_type = other DNA
catagctgatggtacccccc

SEQ ID NO: 5499 - DNA, 20 bp, synthetic construct
  source 1..20: mol_type = other DNA
tcctcccaggctgcagctgg

SEQ ID NO: 5500 - DNA, 20 bp, synthetic construct
  source 1..20: mol_type = other DNA
gggaggtacagcttgagttc

SEQ ID NO: 5501 - DNA, 20 bp, synthetic construct
  source 1..20: mol_type = other DNA
gtgcagagccgtctggtggg

SEQ ID NO: 5502 - DNA, 20 bp, synthetic construct
  source 1..20: mol_type = other DNA
cagaagagcccccgggatgt

SEQ ID NO: 5503 - DNA, 20 bp, synthetic construct
  source 1..20: mol_type = other DNA
gttcttgccctcctttgctc

SEQ ID NO: 5504 - DNA, 20 bp, synthetic construct
  source 1..20: mol_type = other DNA
ggctgtattcgttatccacg

SEQ ID NO: 5505 - DNA, 20 bp, synthetic construct
  source 1..20: mol_type = other DNA
tctggcggccagcactgtgc

SEQ ID NO: 5506 - DNA, 20 bp, synthetic construct
  source 1..20: mol_type = other DNA
aagcgtcaaaagtctgccag

SEQ ID NO: 5507 - DNA, 20 bp, synthetic construct
  source 1..20: mol_type = other DNA
ttcccgttgggccaatccac

SEQ ID NO: 5508 - DNA, 20 bp, synthetic construct
  source 1..20: mol_type = other DNA
actcacccagcatccccagc

SEQ ID NO: 5509 - DNA, 20 bp, synthetic construct
  source 1..20: mol_type = other DNA
ggcactgggacagcttctga

SEQ ID NO: 5510 - DNA, 20 bp, synthetic construct
  source 1..20: mol_type = other DNA
agaggaagttctccaggtcc

SEQ ID NO: 5511 - DNA, 20 bp, synthetic construct
  source 1..20: mol_type = other DNA
tgtcccagtgccacgaactt

SEQ ID NO: 5512 - DNA, 20 bp, synthetic construct
  source 1..20: mol_type = other DNA
gatgcttgccaccgtgcctg

SEQ ID NO: 5513 - DNA, 20 bp, synthetic construct
  source 1..20: mol_type = other DNA
ttctacagcggcagcctggg

SEQ ID NO: 5514 - DNA, 20 bp, synthetic construct
  source 1..20: mol_type = other DNA
gatcttccattggattggca

SEQ ID NO: 5515 - DNA, 20 bp, synthetic construct
  source 1..20: mol_type = other DNA
cagtgactatgatctgcatg

SEQ ID NO: 5516 - DNA, 20 bp, synthetic construct
  source 1..20: mol_type = other DNA
gtgggctctggagttgtggt

SEQ ID NO: 5517 - DNA, 20 bp, synthetic construct
  source 1..20: mol_type = other DNA
ccaggtcctgggtcttgtcc

SEQ ID NO: 5518 - DNA, 20 bp, synthetic construct
  source 1..20: mol_type = other DNA
gccaccagctgcagcctggg

SEQ ID NO: 5519 - DNA, 20 bp, synthetic construct
  source 1..20: mol_type = other DNA
gactgggcaagagacaagaa

SEQ ID NO: 5520 - DNA, 20 bp, synthetic construct
  source 1..20: mol_type = other DNA
ggtgcagagccgtctggtgg

SEQ ID NO: 5521 - DNA, 20 bp, synthetic construct
  source 1..20: mol_type = other DNA
caaggtgcagagccgtctgg

SEQ ID NO: 5522 - DNA, 20 bp, synthetic construct
  source 1..20: mol_type = other DNA
tgtgggctctggagttgtgg

SEQ ID NO: 5523 - DNA, 20 bp, synthetic construct
  source 1..20: mol_type = other DNA
gttctacagcggcagcctgg

SEQ ID NO: 5524 - DNA, 20 bp, synthetic construct
  source 1..20: mol_type = other DNA
accaaaacagtaagtgtccc

SEQ ID NO: 5525 - DNA, 20 bp, synthetic construct
  source 1..20: mol_type = other DNA
ctgttttggttcattcccgt

SEQ ID NO: 5526 - DNA, 20 bp, synthetic construct
  source 1..20: mol_type = other DNA
acctgtgggctctggagttg

SEQ ID NO: 5527 - DNA, 20 bp, synthetic construct
  source 1..20: mol_type = other DNA
gcagacttttgacgcttgac

SEQ ID NO: 5528 - DNA, 20 bp, synthetic construct
  source 1..20: mol_type = other DNA
aacctgagaggggaagcaat

SEQ ID NO: 5529 - DNA, 20 bp, synthetic construct
  source 1..20: mol_type = other DNA
ccttgaggtagacctccagc

SEQ ID NO: 5530 - DNA, 20 bp, synthetic construct
  source 1..20: mol_type = other DNA
ctggccctggcacttcgagt

SEQ ID NO: 5531 - DNA, 20 bp, synthetic construct
  source 1..20: mol_type = other DNA
cctgaagcaatgctccaggg

SEQ ID NO: 5532 - DNA, 20 bp, synthetic construct
  source 1..20: mol_type = other DNA
tctgcagtcgcttcctgcct

SEQ ID NO: 5533 - DNA, 20 bp, synthetic construct
  source 1..20: mol_type = other DNA
gaggaagttctccaggtcct

SEQ ID NO: 5534 - DNA, 20 bp, synthetic construct
  source 1..20: mol_type = other DNA
cctctcaggtttccagccca

SEQ ID NO: 5535 - DNA, 20 bp, synthetic construct
  source 1..20: mol_type = other DNA
tctcccaaagttcgtggcac

SEQ ID NO: 5536 - DNA, 20 bp, synthetic construct
  source 1..20: mol_type = other DNA
aaggtgcagagccgtctggt

SEQ ID NO: 5537 - DNA, 20 bp, synthetic construct
  source 1..20: mol_type = other DNA
cagcaccaccaggagcacca

SEQ ID NO: 5538 - DNA, 20 bp, synthetic construct
  source 1..20: mol_type = other DNA
tctgccagcggctgaactgt

SEQ ID NO: 5539 - DNA, 20 bp, synthetic construct
  source 1..20: mol_type = other DNA
ccatgtgccatccgtccttg

SEQ ID NO: 5540 - DNA, 20 bp, synthetic construct
  source 1..20: mol_type = other DNA
gctgtagaactccaccacgc

SEQ ID NO: 5541 - DNA, 20 bp, synthetic construct
  source 1..20: mol_type = other DNA
ggcaagcatcatcctggccc

SEQ ID NO: 5542 - DNA, 20 bp, synthetic construct
  source 1..20: mol_type = other DNA
aagaagcagcgccagtggat

SEQ ID NO: 5543 - DNA, 20 bp, synthetic construct
  source 1..20: mol_type = other DNA
gccagaagaagcagcgccag

SEQ ID NO: 5544 - DNA, 20 bp, synthetic construct
  source 1..20: mol_type = other DNA
cctcccactgcttggagctc

SEQ ID NO: 5545 - DNA, 20 bp, synthetic construct
  source 1..20: mol_type = other DNA
cagtcgcttcctgcctcgga

SEQ ID NO: 5546 - DNA, 20 bp, synthetic construct
  source 1..20: mol_type = other DNA
gtgagccttgcctggaaatc

SEQ ID NO: 5547 - DNA, 20 bp, synthetic construct
  source 1..20: mol_type = other DNA
ccaccacgccggcacagtgc

SEQ ID NO: 5548 - DNA, 20 bp, synthetic construct
  source 1..20: mol_type = other DNA
gtgaagaaatgtaggtgtca

SEQ ID NO: 5549 - DNA, 20 bp, synthetic construct
  source 1..20: mol_type = other DNA
gagttctacagcggcagcct

SEQ ID NO: 5550 - DNA, 20 bp, synthetic construct
  source 1..20: mol_type = other DNA
catccccagcaggtacaagg

SEQ ID NO: 5551 - DNA, 20 bp, synthetic construct
  source 1..20: mol_type = other DNA
ggttctgcaatgagacactc

SEQ ID NO: 5552 - DNA, 20 bp, synthetic construct
  source 1..20: mol_type = other DNA
aggtgcagagccgtctggtg

SEQ ID NO: 5553 - DNA, 20 bp, synthetic construct
  source 1..20: mol_type = other DNA
agcgactgcagaaagaagag

SEQ ID NO: 5554 - DNA, 20 bp, synthetic construct
  source 1..20: mol_type = other DNA
tacctggataagctgacagg

SEQ ID NO: 5555 - DNA, 20 bp, synthetic construct
  source 1..20: mol_type = other DNA
cagctggtggcacagtctgg

SEQ ID NO: 5556 - DNA, 20 bp, synthetic construct
  source 1..20: mol_type = other DNA
tgttttggttcattcccgtt

SEQ ID NO: 5557 - DNA, 20 bp, synthetic construct
  source 1..20: mol_type = other DNA
caccagacggctctgcacct

SEQ ID NO: 5558 - DNA, 20 bp, synthetic construct
  source 1..20: mol_type = other DNA
cataccagctgagccgtccg

SEQ ID NO: 5559 - DNA, 20 bp, synthetic construct
  source 1..20: mol_type = other DNA
gtctgccagcggctgaactg

SEQ ID NO: 5560 - DNA, 20 bp, synthetic construct
  source 1..20: mol_type = other DNA
cactgggacagcttctgatg

SEQ ID NO: 5561 - DNA, 20 bp, synthetic construct
  source 1..20: mol_type = other DNA
gcttacctggataagctgac

SEQ ID NO: 5562 - DNA, 20 bp, synthetic construct
  source 1..20: mol_type = other DNA
agctcctcccaggctgcagc

SEQ ID NO: 5563 - DNA, 20 bp, synthetic construct
  source 1..20: mol_type = other DNA
accagcccttgccaatccaa

SEQ ID NO: 5564 - DNA, 20 bp, synthetic construct
  source 1..20: mol_type = other DNA
ggccaggatccaaaccccgc

SEQ ID NO: 5565 - DNA, 20 bp, synthetic construct
  source 1..20: mol_type = other DNA
agcaaaggagggcaagaact

SEQ ID NO: 5566 - DNA, 20 bp, synthetic construct
  source 1..20: mol_type = other DNA
tgttgcagaggaagttctcc

SEQ ID NO: 5567 - DNA, 20 bp, synthetic construct
  source 1..20: mol_type = other DNA
gttctcagcatgggatcgga

SEQ ID NO: 5568 - DNA, 20 bp, synthetic construct
  source 1..20: mol_type = other DNA
ccagctgagccgtccgaggc

SEQ ID NO: 5569 - DNA, 20 bp, synthetic construct
  source 1..20: mol_type = other DNA
cagagctcaatcatctgcta

SEQ ID NO: 5570 - DNA, 20 bp, synthetic construct
  source 1..20: mol_type = other DNA
gctgtattcgttatccacgt

SEQ ID NO: 5571 - DNA, 20 bp, synthetic construct
  source 1..20: mol_type = other DNA
agttctacagcggcagcctg

SEQ ID NO: 5572 - DNA, 20 bp, synthetic construct
  source 1..20: mol_type = other DNA
tctctcggcggaagtcgctc

SEQ ID NO: 5573 - DNA, 20 bp, synthetic construct
  source 1..20: mol_type = other DNA
gaaaagatcacttttctctt

SEQ ID NO: 5574 - DNA, 20 bp, synthetic construct
  source 1..20: mol_type = other DNA
acagtcggtacatattccga

SEQ ID NO: 5575 - DNA, 20 bp, synthetic construct
  source 1..20: mol_type = other DNA
cgtgcgggtgcagaccggcg

SEQ ID NO: 5576 - DNA, 20 bp, synthetic construct
  source 1..20: mol_type = other DNA
acctagaagaaaaaacaaag

SEQ ID NO: 5577 - DNA, 20 bp, synthetic construct
  source 1..20: mol_type = other DNA
aatgaagaaagtccagacct

SEQ ID NO: 5578 - DNA, 20 bp, synthetic construct
  source 1..20: mol_type = other DNA
gatacctttatggtttcagt

SEQ ID NO: 5579 - DNA, 20 bp, synthetic construct
  source 1..20: mol_type = other DNA
gaccacgttggggtgctcga

SEQ ID NO: 5580 - DNA, 20 bp, synthetic construct
  source 1..20: mol_type = other DNA
ctaggccagtcttcttctcc

SEQ ID NO: 5581 - DNA, 20 bp, synthetic construct
  source 1..20: mol_type = other DNA
tcgagcaccccaacgtggtc

SEQ ID NO: 5582 - DNA, 20 bp, synthetic construct
  source 1..20: mol_type = other DNA
actccagagatccacggggg

SEQ ID NO: 5583 - DNA, 20 bp, synthetic construct
  source 1..20: mol_type = other DNA
gcgggtgcagaccggcgagg

SEQ ID NO: 5584 - DNA, 20 bp, synthetic construct
  source 1..20: mol_type = other DNA
ccagcagtacgaatgcgtgg

SEQ ID NO: 5585 - DNA, 20 bp, synthetic construct
  source 1..20: mol_type = other DNA
tgacgacctgcaatggcaag

SEQ ID NO: 5586 - DNA, 20 bp, synthetic construct
  source 1..20: mol_type = other DNA
aacactccagagatccacgg

SEQ ID NO: 5587 - DNA, 20 bp, synthetic construct
  source 1..20: mol_type = other DNA
ctggctcacctgaccacgtt

SEQ ID NO: 5588 - DNA, 20 bp, synthetic construct
  source 1..20: mol_type = other DNA
tccgcgaggtggcggtgctg

SEQ ID NO: 5589 - DNA, 20 bp, synthetic construct
  source 1..20: mol_type = other DNA
cgggtgcagaccggcgagga

SEQ ID NO: 5590 - DNA, 20 bp, synthetic construct
  source 1..20: mol_type = other DNA
tgaccagcagtacgaatgcg

SEQ ID NO: 5591 - DNA, 20 bp, synthetic construct
  source 1..20: mol_type = other DNA
cattgcaggtcgtcacgctg

SEQ ID NO: 5592 - DNA, 20 bp, synthetic construct
  source 1..20: mol_type = other DNA
tgtagcgtgattggactccc

SEQ ID NO: 5593 - DNA, 20 bp, synthetic construct
  source 1..20: mol_type = other DNA
cctggctcacctgaccacgt

SEQ ID NO: 5594 - DNA, 20 bp, synthetic construct
  source 1..20: mol_type = other DNA
ctggaagtatgggtgagaca

SEQ ID NO: 5595 - DNA, 20 bp, synthetic construct
  source 1..20: mol_type = other DNA
cgctacaaaagaaccacaca

SEQ ID NO: 5596 - DNA, 20 bp, synthetic construct
  source 1..20: mol_type = other DNA
taggccagtcttcttctcct

SEQ ID NO: 5597 - DNA, 20 bp, synthetic construct
  source 1..20: mol_type = other DNA
gtccagctacgccacccccg

SEQ ID NO: 5598 - DNA, 20 bp, synthetic construct
  source 1..20: mol_type = other DNA
ctggactggagcaagacttc

SEQ ID NO: 5599 - DNA, 20 bp, synthetic construct
  source 1..20: mol_type = other DNA
caacactccagagatccacg

SEQ ID NO: 5600 - DNA, 20 bp, synthetic construct
  source 1..20: mol_type = other DNA
gcctcagcaccgccacctcg

SEQ ID NO: 5601 - DNA, 20 bp, synthetic construct
  source 1..20: mol_type = other DNA
ctgggaagggcaacatctct

SEQ ID NO: 5602 - DNA, 20 bp, synthetic construct
  source 1..20: mol_type = other DNA
cacagcgtgacgacctgcaa

SEQ ID NO: 5603 - DNA, 20 bp, synthetic construct
  source 1..20: mol_type = other DNA
cccgtggatctctggagtgt

SEQ ID NO: 5604 - DNA, 20 bp, synthetic construct
  source 1..20: mol_type = other DNA
cgcgcttcaacgccacgaaa

SEQ ID NO: 5605 - DNA, 20 bp, synthetic construct
  source 1..20: mol_type = other DNA
tggctcacctgaccacgttg

SEQ ID NO: 5606 - DNA, 20 bp, synthetic construct
  source 1..20: mol_type = other DNA
gctggactggagcaagactt

SEQ ID NO: 5607 - DNA, 20 bp, synthetic construct
  source 1..20: mol_type = other DNA
ccttcttcagagccaccttc

SEQ ID NO: 5608 - DNA, 20 bp, synthetic construct
  source 1..20: mol_type = other DNA
ggtcggaccagaagaagtcg

SEQ ID NO: 5609 - DNA, 20 bp, synthetic construct
  source 1..20: mol_type = other DNA
ctatgcaggatctgcaggaa

SEQ ID NO: 5610 - DNA, 20 bp, synthetic construct
  source 1..20: mol_type = other DNA
agacgcgctcaaactccgtc

SEQ ID NO: 5611 - DNA, 20 bp, synthetic construct
  source 1..20: mol_type = other DNA
tcaccgagcaacagctccgg

SEQ ID NO: 5612 - DNA, 20 bp, synthetic construct
  source 1..20: mol_type = other DNA
cctcaccgagcaacagctcc

SEQ ID NO: 5613 - DNA, 20 bp, synthetic construct
  source 1..20: mol_type = other DNA
tcctcaccgagcaacagctc

SEQ ID NO: 5614 - DNA, 20 bp, synthetic construct
  source 1..20: mol_type = other DNA
tcttcaggatgttggtggaa

SEQ ID NO: 5615 - DNA, 20 bp, synthetic construct
  source 1..20: mol_type = other DNA
gccccatggagcggcccccg

SEQ ID NO: 5616 - DNA, 20 bp, synthetic construct
  source 1..20: mol_type = other DNA
tgtaccagcatcgggtgagg

SEQ ID NO: 5617 - DNA, 20 bp, synthetic construct
  source 1..20: mol_type = other DNA
cgccccatggagcggccccc

SEQ ID NO: 5618 - DNA, 20 bp, synthetic construct
  source 1..20: mol_type = other DNA
cagcttctttgatattactg

SEQ ID NO: 5619 - DNA, 20 bp, synthetic construct
  source 1..20: mol_type = other DNA
aaagctccaataatcaacag

SEQ ID NO: 5620 - DNA, 20 bp, synthetic construct
  source 1..20: mol_type = other DNA
ccatggggcgggagggcaag

SEQ ID NO: 5621 - DNA, 20 bp, synthetic construct
  source 1..20: mol_type = other DNA
ggccgctccatggggcggga

SEQ ID NO: 5622 - DNA, 20 bp, synthetic construct
  source 1..20: mol_type = other DNA
gggccgctccatggggcggg

SEQ ID NO: 5623 - DNA, 20 bp, synthetic construct
  source 1..20: mol_type = other DNA
gtctgtaccagcatcgggtg

SEQ ID NO: 5624 - DNA, 20 bp, synthetic construct
  source 1..20: mol_type = other DNA
agacgttcagctgctgtcct

SEQ ID NO: 5625 - DNA, 20 bp, synthetic construct
  source 1..20: mol_type = other DNA
tctctgtgaattcttttgca

SEQ ID NO: 5626 - DNA, 20 bp, synthetic construct
  source 1..20: mol_type = other DNA
tcggccagcgttaggtggtg

SEQ ID NO: 5627 - DNA, 20 bp, synthetic construct
  source 1..20: mol_type = other DNA
caactcactgtggacttgga

SEQ ID NO: 5628 - DNA, 20 bp, synthetic construct
  source 1..20: mol_type = other DNA
tctcttcgccgctcggcctc

SEQ ID NO: 5629 - DNA, 20 bp, synthetic construct
  source 1..20: mol_type = other DNA
tcacctccaccagctgcatg

SEQ ID NO: 5630 - DNA, 20 bp, synthetic construct
  source 1..20: mol_type = other DNA
tggctgggatgatgccctca

SEQ ID NO: 5631 - DNA, 20 bp, synthetic construct
  source 1..20: mol_type = other DNA
ctgctgcagaccatcgggaa

SEQ ID NO: 5632 - DNA, 20 bp, synthetic construct
  source 1..20: mol_type = other DNA
tgccgtgagtaccacgagga

SEQ ID NO: 5633 - DNA, 20 bp, synthetic construct
  source 1..20: mol_type = other DNA
ctgcaaggcaggtgacacgt

SEQ ID NO: 5634 - DNA, 20 bp, synthetic construct
  source 1..20: mol_type = other DNA
caggacctgcccttctgcaa

SEQ ID NO: 5635 - DNA, 20 bp, synthetic construct
  source 1..20: mol_type = other DNA
ggttccacggcaagatcaca

SEQ ID NO: 5636 - DNA, 20 bp, synthetic construct
  source 1..20: mol_type = other DNA
tgcctggggcaggacgagag

SEQ ID NO: 5637 - DNA, 20 bp, synthetic construct
  source 1..20: mol_type = other DNA
cagccccaccttctctctca

SEQ ID NO: 5638 - DNA, 20 bp, synthetic construct
  source 1..20: mol_type = other DNA
ccccactcacgtcatgactg

SEQ ID NO: 5639 - DNA, 20 bp, synthetic construct
  source 1..20: mol_type = other DNA
tgtagtgctgcagggtgtgg

SEQ ID NO: 5640 - DNA, 20 bp, synthetic construct
  source 1..20: mol_type = other DNA
tctaggggtcggtcagtgct

SEQ ID NO: 5641 - DNA, 20 bp, synthetic construct
  source 1..20: mol_type = other DNA
ctgtgagtgaagcagcctct

SEQ ID NO: 5642 - DNA, 20 bp, synthetic construct
  source 1..20: mol_type = other DNA
agtggagaatttctgccatg

SEQ ID NO: 5643 - DNA, 20 bp, synthetic construct
  source 1..20: mol_type = other DNA
tacccccagagatgtctgcg

SEQ ID NO: 5644 - DNA, 20 bp, synthetic construct
  source 1..20: mol_type = other DNA
accaggaacaggcctgtctc

SEQ ID NO: 5645 - DNA, 20 bp, synthetic construct
  source 1..20: mol_type = other DNA
ggaaccaactggggagcagc

SEQ ID NO: 5646 - DNA, 20 bp, synthetic construct
  source 1..20: mol_type = other DNA
aggaacaggcctgtctccgg

SEQ ID NO: 5647 - DNA, 20 bp, synthetic construct
  source 1..20: mol_type = other DNA
cgcacagcgtgtagtctccg

SEQ ID NO: 5648 - DNA, 20 bp, synthetic construct
  source 1..20: mol_type = other DNA
cgatgctgagcttgctggca

SEQ ID NO: 5649 - DNA, 20 bp, synthetic construct
  source 1..20: mol_type = other DNA
cacaaggctcccctgggggc

SEQ ID NO: 5650 - DNA, 20 bp, synthetic construct
  source 1..20: mol_type = other DNA
tcgcagacatctctgggggt

SEQ ID NO: 5651 - DNA, 20 bp, synthetic construct
  source 1..20: mol_type = other DNA
tacaagatggatgcccccga

SEQ ID NO: 5652 - DNA, 20 bp, synthetic construct
  source 1..20: mol_type = other DNA
gccgtgagtaccacgaggag

SEQ ID NO: 5653 - DNA, 20 bp, synthetic construct
  source 1..20: mol_type = other DNA
caagctcagcatcgacgagg

SEQ ID NO: 5654 - DNA, 20 bp, synthetic construct
  source 1..20: mol_type = other DNA
ctcagacaccagcacattgc

SEQ ID NO: 5655 - DNA, 20 bp, synthetic construct
  source 1..20: mol_type = other DNA
gaaccaactggggagcagca

SEQ ID NO: 5656 - DNA, 20 bp, synthetic construct
  source 1..20: mol_type = other DNA
ccttcaggggctgtggccag

SEQ ID NO: 5657 - DNA, 20 bp, synthetic construct
  source 1..20: mol_type = other DNA
gttccacggcaagatcacac

SEQ ID NO: 5658 - DNA, 20 bp, synthetic construct
  source 1..20: mol_type = other DNA
tcacgcccaggagctgcacc

SEQ ID NO: 5659 - DNA, 20 bp, synthetic construct
  source 1..20: mol_type = other DNA
ggaacaggcctgtctccggc

SEQ ID NO: 5660 - DNA, 20 bp, synthetic construct
  source 1..20: mol_type = other DNA
gggcccagccgcctgtgggg

SEQ ID NO: 5661 - DNA, 20 bp, synthetic construct
  source 1..20: mol_type = other DNA
ctggcagcttgcccgtgtcc

SEQ ID NO: 5662 - DNA, 20 bp, synthetic construct
  source 1..20: mol_type = other DNA
aggagtagatttcccagaga

SEQ ID NO: 5663 - DNA, 20 bp, synthetic construct
  source 1..20: mol_type = other DNA
gctgctgcagaccatcggga

SEQ ID NO: 5664 - DNA, 20 bp, synthetic construct
  source 1..20: mol_type = other DNA
cagccaactacgtccagaag

SEQ ID NO: 5665 - DNA, 20 bp, synthetic construct
  source 1..20: mol_type = other DNA
gcaatacattctgtaccgga

SEQ ID NO: 5666 - DNA, 20 bp, synthetic construct
  source 1..20: mol_type = other DNA
acagagtccatctgcgtctg

SEQ ID NO: 5667 - DNA, 20 bp, synthetic construct
  source 1..20: mol_type = other DNA
cgggagagcaccaactaccc

SEQ ID NO: 5668 - DNA, 20 bp, synthetic construct
  source 1..20: mol_type = other DNA
cactgcggtagaactcatcc

SEQ ID NO: 5669 - DNA, 20 bp, synthetic construct
  source 1..20: mol_type = other DNA
gtgtagtgctgcagggtgtg

SEQ ID NO: 5670 - DNA, 20 bp, synthetic construct
  source 1..20: mol_type = other DNA
cacgcacagcgtgtagtctc

SEQ ID NO: 5671 - DNA, 20 bp, synthetic construct
  source 1..20: mol_type = other DNA
tacaggtaccacaggggtga

SEQ ID NO: 5672 - DNA, 20 bp, synthetic construct
  source 1..20: mol_type = other DNA
gcagaagggcaggtcctgct

SEQ ID NO: 5673 - DNA, 20 bp, synthetic construct
  source 1..20: mol_type = other DNA
tagaccgcaggtagtccaca

SEQ ID NO: 5674 - DNA, 20 bp, synthetic construct
  source 1..20: mol_type = other DNA
cagcaatacaggtaccacag

SEQ ID NO: 5675 - DNA, 20 bp, synthetic construct
  source 1..20: mol_type = other DNA
gtacaaagccaaaaacaagg

SEQ ID NO: 5676 - DNA, 20 bp, synthetic construct
  source 1..20: mol_type = other DNA
ctggtacaaagccaaaaaca

SEQ ID NO: 5677 - DNA, 20 bp, synthetic construct
  source 1..20: mol_type = other DNA
ccagaagcgggagggcgtga

SEQ ID NO: 5678 - DNA, 20 bp, synthetic construct
  source 1..20: mol_type = other DNA
cactacacctcagacgcaga

SEQ ID NO: 5679 - DNA, 20 bp, synthetic construct
  source 1..20: mol_type = other DNA
taccttggtgacggccacaa

SEQ ID NO: 5680 - DNA, 20 bp, synthetic construct
  source 1..20: mol_type = other DNA
tcactcacagcgagaacttg

SEQ ID NO: 5681 - DNA, 20 bp, synthetic construct
  source 1..20: mol_type = other DNA
cagcgactttggtctcacca

SEQ ID NO: 5682 - DNA, 20 bp, synthetic construct
  source 1..20: mol_type = other DNA
atactcacaattcttggata

SEQ ID NO: 5683 - DNA, 20 bp, synthetic construct
  source 1..20: mol_type = other DNA
ctcagtcatgacgtgagtgg

SEQ ID NO: 5684 - DNA, 20 bp, synthetic construct
  source 1..20: mol_type = other DNA
ttgtaccagttggggtcctg

SEQ ID NO: 5685 - DNA, 20 bp, synthetic construct
  source 1..20: mol_type = other DNA
tgacatcttctcaggagctc

SEQ ID NO: 5686 - DNA, 20 bp, synthetic construct
  source 1..20: mol_type = other DNA
aggtgtagtgctgcagggtg

SEQ ID NO: 5687 - DNA, 20 bp, synthetic construct
  source 1..20: mol_type = other DNA
acgcacagcgtgtagtctcc

SEQ ID NO: 5688 - DNA, 20 bp, synthetic construct
  source 1..20: mol_type = other DNA
taagaacgacgccactgccc

SEQ ID NO: 5689 - DNA, 20 bp, synthetic construct
  source 1..20: mol_type = other DNA
ggtgtagtgctgcagggtgt

SEQ ID NO: 5690 - DNA, 20 bp, synthetic construct
  source 1..20: mol_type = other DNA
actgagtacatggccaaggt

SEQ ID NO: 5691 - DNA, 20 bp, synthetic construct
  source 1..20: mol_type = other DNA
gtctaggggtcggtcagtgc

SEQ ID NO: 5692 - DNA, 20 bp, synthetic construct
  source 1..20: mol_type = other DNA
gccgtcacaggtgcagctcg

SEQ ID NO: 5693 - DNA, 20 bp, synthetic construct
  source 1..20: mol_type = other DNA
cgtatcctcctgcctagcgc

SEQ ID NO: 5694 - DNA, 20 bp, synthetic construct
  source 1..20: mol_type = other DNA
ccactgtgggacggaagaga

SEQ ID NO: 5695 - DNA, 20 bp, synthetic construct
  source 1..20: mol_type = other DNA
ggtcagctgctgcacagtgt

SEQ ID NO: 5696 - DNA, 20 bp, synthetic construct
  source 1..20: mol_type = other DNA
tcacctgaatcagtagtttg

SEQ ID NO: 5697 - DNA, 20 bp, synthetic construct
  source 1..20: mol_type = other DNA
gttacttggcttaacccttc

SEQ ID NO: 5698 - DNA, 20 bp, synthetic construct
  source 1..20: mol_type = other DNA
gagctccatatatctggact

SEQ ID NO: 5699 - DNA, 20 bp, synthetic construct
  source 1..20: mol_type = other DNA
gtaggtacctgtttattcag

SEQ ID NO: 5700 - DNA, 20 bp, synthetic construct
  source 1..20: mol_type = other DNA
cacggatactcacagtctag

SEQ ID NO: 5701 - DNA, 20 bp, synthetic construct
  source 1..20: mol_type = other DNA
acaccagcagttacttggcg

SEQ ID NO: 5702 - DNA, 20 bp, synthetic construct
  source 1..20: mol_type = other DNA
caccagtcaaaccaagcacg

SEQ ID NO: 5703 - DNA, 20 bp, synthetic construct
  source 1..20: mol_type = other DNA
catccttacctctgacggca

SEQ ID NO: 5704 - DNA, 20 bp, synthetic construct
  source 1..20: mol_type = other DNA
cttacctggatatagtcaac

SEQ ID NO: 5705 - DNA, 20 bp, synthetic construct
  source 1..20: mol_type = other DNA
gaatgatcatcaaacagcta

SEQ ID NO: 5706 - DNA, 20 bp, synthetic construct
  source 1..20: mol_type = other DNA
ttctacttagccaaacacag

SEQ ID NO: 5707 - DNA, 20 bp, synthetic construct
  source 1..20: mol_type = other DNA
gcagcacaatgttctagtag

SEQ ID NO: 5708 - DNA, 20 bp, synthetic construct
  source 1..20: mol_type = other DNA
tgagaggtattcaggagacc

SEQ ID NO: 5709 - DNA, 20 bp, synthetic construct
  source 1..20: mol_type = other DNA
gccctacagtccctcgcctg

SEQ ID NO: 5710 - DNA, 20 bp, synthetic construct
  source 1..20: mol_type = other DNA
tttacataggtatctttagg

SEQ ID NO: 5711 - DNA, 20 bp, synthetic construct
  source 1..20: mol_type = other DNA
atccagcgtaagaataacag

SEQ ID NO: 5712 - DNA, 20 bp, synthetic construct
  source 1..20: mol_type = other DNA
ttcaaacgctaaatcaagct

SEQ ID NO: 5713 - DNA, 20 bp, synthetic construct
  source 1..20: mol_type = other DNA
tgacatccacattcagtctg

SEQ ID NO: 5714 - DNA, 20 bp, synthetic construct
  source 1..20: mol_type = other DNA
ggatgaagtggaccagatgt

SEQ ID NO: 5715 - DNA, 20 bp, synthetic construct
  source 1..20: mol_type = other DNA
gtactcacattgacctccat

SEQ ID NO: 5716 - DNA, 20 bp, synthetic construct
  source 1..20: mol_type = other DNA
gaaataggaaggtcactcct

SEQ ID NO: 5717 - DNA, 20 bp, synthetic construct
  source 1..20: mol_type = other DNA
tactcacattgacctccata

SEQ ID NO: 5718 - DNA, 20 bp, synthetic construct
  source 1..20: mol_type = other DNA
acaggcagagctggaaggac

SEQ ID NO: 5719 - DNA, 20 bp, synthetic construct
  source 1..20: mol_type = other DNA
gacaggcagagctggaagga

SEQ ID NO: 5720 - DNA, 20 bp, synthetic construct
  source 1..20: mol_type = other DNA
caggcagagctggaaggacg

SEQ ID NO: 5721 - DNA, 20 bp, synthetic construct
  source 1..20: mol_type = other DNA
ccacaggtagccctgccagc

SEQ ID NO: 5722 - DNA, 20 bp, synthetic construct
  source 1..20: mol_type = other DNA
gcacctgggatagagtagag

SEQ ID NO: 5723 - DNA, 20 bp, synthetic construct
  source 1..20: mol_type = other DNA
tgaggtagggcatgtatccc

SEQ ID NO: 5724 - DNA, 20 bp, synthetic construct
  source 1..20: mol_type = other DNA
tgtatccctggctggacaca

SEQ ID NO: 5725 - DNA, 20 bp, synthetic construct
  source 1..20: mol_type = other DNA
tgtccaggatgtacttgttg

SEQ ID NO: 5726 - DNA, 20 bp, synthetic construct
  source 1..20: mol_type = other DNA
ccagacgctgagccccccgg

SEQ ID NO: 5727 - DNA, 20 bp, synthetic construct
  source 1..20: mol_type = other DNA
cgcggtaaaggcgtaccaga

SEQ ID NO: 5728 - DNA, 20 bp, synthetic construct
  source 1..20: mol_type = other DNA
aagtcccagctcaaggtgag

SEQ ID NO: 5729 - DNA, 20 bp, synthetic construct
  source 1..20: mol_type = other DNA
cagccggatcgccatctgga

SEQ ID NO: 5730 - DNA, 20 bp, synthetic construct
  source 1..20: mol_type = other DNA
cggcagactgctggaagagg

SEQ ID NO: 5731 - DNA, 20 bp, synthetic construct
  source 1..20: mol_type = other DNA
agctcaaggtgaggggcacc

SEQ ID NO: 5732 - DNA, 20 bp, synthetic construct
  source 1..20: mol_type = other DNA
aggcgctcatctcatacgtg

SEQ ID NO: 5733 - DNA, 20 bp, synthetic construct
  source 1..20: mol_type = other DNA
gagggtacttgtcctcagac

SEQ ID NO: 5734 - DNA, 20 bp, synthetic construct
  source 1..20: mol_type = other DNA
catcaggaaccatgatcaga

SEQ ID NO: 5735 - DNA, 20 bp, synthetic construct
  source 1..20: mol_type = other DNA
ctggtacgcctttaccgcgc

SEQ ID NO: 5736 - DNA, 20 bp, synthetic construct
  source 1..20: mol_type = other DNA
cctcttcaacttcctgtctg

SEQ ID NO: 5737 - DNA, 20 bp, synthetic construct
  source 1..20: mol_type = other DNA
caggatgtacttgttgaggt

SEQ ID NO: 5738 - DNA, 20 bp, synthetic construct
  source 1..20: mol_type = other DNA
caggttgtgggacagcacct

SEQ ID NO: 5739 - DNA, 20 bp, synthetic construct
  source 1..20: mol_type = other DNA
gaggcggaaggcatcctgat

SEQ ID NO: 5740 - DNA, 20 bp, synthetic construct
  source 1..20: mol_type = other DNA
ctcgtggatggccatgctga

SEQ ID NO: 5741 - DNA, 20 bp, synthetic construct
  source 1..20: mol_type = other DNA
ggctgagatggagctgaagg

SEQ ID NO: 5742 - DNA, 20 bp, synthetic construct
  source 1..20: mol_type = other DNA
gcaggtattccacctggagc

SEQ ID NO: 5743 - DNA, 20 bp, synthetic construct
  source 1..20: mol_type = other DNA
cagttccttgcgcagggcca

SEQ ID NO: 5744 - DNA, 20 bp, synthetic construct
  source 1..20: mol_type = other DNA
agcagaaacggcgcgagcag

SEQ ID NO: 5745 - DNA, 20 bp, synthetic construct
  source 1..20: mol_type = other DNA
ccatgaccccgtggccctgg

SEQ ID NO: 5746 - DNA, 20 bp, synthetic construct
  source 1..20: mol_type = other DNA
ggacaagtaccctctgatca

SEQ ID NO: 5747 - DNA, 20 bp, synthetic construct
  source 1..20: mol_type = other DNA
cctccagggccacggggtca

SEQ ID NO: 5748 - DNA, 20 bp, synthetic construct
  source 1..20: mol_type = other DNA
ccaggtggcccagaccaccg

SEQ ID NO: 5749 - DNA, 20 bp, synthetic construct
  source 1..20: mol_type = other DNA
cttgagcagttccttgcgca

SEQ ID NO: 5750 - DNA, 20 bp, synthetic construct
  source 1..20: mol_type = other DNA
acaggttgtgggacagcacc

SEQ ID NO: 5751 - DNA, 20 bp, synthetic construct
  source 1..20: mol_type = other DNA
gctcaaggtgaggggcaccc

SEQ ID NO: 5752 - DNA, 20 bp, synthetic construct
  source 1..20: mol_type = other DNA
atgtatccctggctggacac

SEQ ID NO: 5753 - DNA, 20 bp, synthetic construct
  source 1..20: mol_type = other DNA
ctgcagctggaaccagcgtt

SEQ ID NO: 5754 - DNA, 20 bp, synthetic construct
  source 1..20: mol_type = other DNA
ccaagtcccagctcaaggtg

SEQ ID NO: 5755 - DNA, 20 bp, synthetic construct
  source 1..20: mol_type = other DNA
ctccagggccacggggtcat

SEQ ID NO: 5756 - DNA, 20 bp, synthetic construct
  source 1..20: mol_type = other DNA
ggaggtgaggggcaggatgg

SEQ ID NO: 5757 - DNA, 20 bp, synthetic construct
  source 1..20: mol_type = other DNA
gcgctggacgtggagaagag

SEQ ID NO: 5758 - DNA, 20 bp, synthetic construct
  source 1..20: mol_type = other DNA
actcaccagctgtccactcc

SEQ ID NO: 5759 - DNA, 20 bp, synthetic construct
  source 1..20: mol_type = other DNA
ccagggccacggggtcatgg

SEQ ID NO: 5760 - DNA, 20 bp, synthetic construct
  source 1..20: mol_type = other DNA
gaagaggcaccagaggcgga

SEQ ID NO: 5761 - DNA, 20 bp, synthetic construct
  source 1..20: mol_type = other DNA
gctgtcccacaacctgtaca

SEQ ID NO: 5762 - DNA, 20 bp, synthetic construct
  source 1..20: mol_type = other DNA
ttttcagcaggtattccacc

SEQ ID NO: 5763 - DNA, 20 bp, synthetic construct
  source 1..20: mol_type = other DNA
tgacggccaagaagaactat

SEQ ID NO: 5764 - DNA, 20 bp, synthetic construct
  source 1..20: mol_type = other DNA
ggaagttgaagaggcaccag

SEQ ID NO: 5765 - DNA, 20 bp, synthetic construct
  source 1..20: mol_type = other DNA
atctcggaagtgttcctcca

SEQ ID NO: 5766 - DNA, 20 bp, synthetic construct
  source 1..20: mol_type = other DNA
acttgagcagttccttgcgc

SEQ ID NO: 5767 - DNA, 20 bp, synthetic construct
  source 1..20: mol_type = other DNA
tccagggccacggggtcatg

SEQ ID NO: 5768 - DNA, 20 bp, synthetic construct
  source 1..20: mol_type = other DNA
gcgaatcgctcagaccaggt

SEQ ID NO: 5769 - DNA, 20 bp, synthetic construct
  source 1..20: mol_type = other DNA
acccggcagactgctggaag

SEQ ID NO: 5770 - DNA, 20 bp, synthetic construct
  source 1..20: mol_type = other DNA
agttgaagaggcaccagagg

SEQ ID NO: 5771 - DNA, 20 bp, synthetic construct
  source 1..20: mol_type = other DNA
cctcagacaggaagttgaag

SEQ ID NO: 5772 - DNA, 20 bp, synthetic construct
  source 1..20: mol_type = other DNA
ctcagccatggccctgcgca

SEQ ID NO: 5773 - DNA, 20 bp, synthetic construct
  source 1..20: mol_type = other DNA
acgcagcagtgtgcatccag

SEQ ID NO: 5774 - DNA, 20 bp, synthetic construct
  source 1..20: mol_type = other DNA
ctgccagacgctgagccccc

SEQ ID NO: 5775 - DNA, 20 bp, synthetic construct
  source 1..20: mol_type = other DNA
ctgtgcgaatcgctcagacc

SEQ ID NO: 5776 - DNA, 20 bp, synthetic construct
  source 1..20: mol_type = other DNA
ccatggctgaggcgcccgcc

SEQ ID NO: 5777 - DNA, 20 bp, synthetic construct
  source 1..20: mol_type = other DNA
tcatcaggaaccatgatcag

SEQ ID NO: 5778 - DNA, 20 bp, synthetic construct
  source 1..20: mol_type = other DNA
tgcaactagaggtgaaagct

SEQ ID NO: 5779 - DNA, 20 bp, synthetic construct
  source 1..20: mol_type = other DNA
ggatgtgcaggaccgtgtac

SEQ ID NO: 5780 - DNA, 20 bp, synthetic construct
  source 1..20: mol_type = other DNA
cagctgtccactcctggcgc

SEQ ID NO: 5781 - DNA, 20 bp, synthetic construct
  source 1..20: mol_type = other DNA
ctccacgtccagcgcggtaa

SEQ ID NO: 5782 - DNA, 20 bp, synthetic construct
  source 1..20: mol_type = other DNA
gctgcaggaggcgcagcggc

SEQ ID NO: 5783 - DNA, 20 bp, synthetic construct
  source 1..20: mol_type = other DNA
tgagctcctggtagacctcg

SEQ ID NO: 5784 - DNA, 20 bp, synthetic construct
  source 1..20: mol_type = other DNA
tctctagattgttggtgacg

SEQ ID NO: 5785 - DNA, 20 bp, synthetic construct
  source 1..20: mol_type = other DNA
tctcaggctccgattattca

SEQ ID NO: 5786 - DNA, 20 bp, synthetic construct
  source 1..20: mol_type = other DNA
acgacggacagcacatgtgg

SEQ ID NO: 5787 - DNA, 20 bp, synthetic construct
  source 1..20: mol_type = other DNA
ctcccaaactgacctctagg

SEQ ID NO: 5788 - DNA, 20 bp, synthetic construct
  source 1..20: mol_type = other DNA
tctccgacagttcacctctg

SEQ ID NO: 5789 - DNA, 20 bp, synthetic construct
  source 1..20: mol_type = other DNA
tctctaggatctgaggaagt

SEQ ID NO: 5790 - DNA, 20 bp, synthetic construct
  source 1..20: mol_type = other DNA
ctacaggatcgaccgagccc

SEQ ID NO: 5791 - DNA, 20 bp, synthetic construct
  source 1..20: mol_type = other DNA
agtagttgttgaagacatcc

SEQ ID NO: 5792 - DNA, 20 bp, synthetic construct
  source 1..20: mol_type = other DNA
cttggcccgaaccctcaact

SEQ ID NO: 5793 - DNA, 20 bp, synthetic construct
  source 1..20: mol_type = other DNA
agaggatccagcccacctgg

SEQ ID NO: 5794 - DNA, 20 bp, synthetic construct
  source 1..20: mol_type = other DNA
ccccgcacgccaggatccgc

SEQ ID NO: 5795 - DNA, 20 bp, synthetic construct
  source 1..20: mol_type = other DNA
catcacactggaggcgggcg

SEQ ID NO: 5796 - DNA, 20 bp, synthetic construct
  source 1..20: mol_type = other DNA
gtacacagacgacgccagga

SEQ ID NO: 5797 - DNA, 20 bp, synthetic construct
  source 1..20: mol_type = other DNA
tgcaggtgaagagctgattg

SEQ ID NO: 5798 - DNA, 20 bp, synthetic construct
  source 1..20: mol_type = other DNA
tgttcaggaaaacaacacac

SEQ ID NO: 5799 - DNA, 20 bp, synthetic construct
  source 1..20: mol_type = other DNA
gtgggacgtactcgctgtgc

SEQ ID NO: 5800 - DNA, 20 bp, synthetic construct
  source 1..20: mol_type = other DNA
ctgaacatccccaggtgagg

SEQ ID NO: 5801 - DNA, 20 bp, synthetic construct
  source 1..20: mol_type = other DNA
tcaagtccattccatcacac

SEQ ID NO: 5802 - DNA, 20 bp, synthetic construct
  source 1..20: mol_type = other DNA
cacactggaggcgggcgggg

SEQ ID NO: 5803 - DNA, 20 bp, synthetic construct
  source 1..20: mol_type = other DNA
gcatgacgacggctacctcg

SEQ ID NO: 5804 - DNA, 20 bp, synthetic construct
  source 1..20: mol_type = other DNA
ccagcaggggcttcatgagc

SEQ ID NO: 5805 - DNA, 20 bp, synthetic construct
  source 1..20: mol_type = other DNA
tggcttcaccatgacgtcgt

SEQ ID NO: 5806 - DNA, 20 bp, synthetic construct
  source 1..20: mol_type = other DNA
ctgactcctagccacgggat

SEQ ID NO: 5807 - DNA, 20 bp, synthetic construct
  source 1..20: mol_type = other DNA
ccacctggatcctccgcgcc

SEQ ID NO: 5808 - DNA, 20 bp, synthetic construct
  source 1..20: mol_type = other DNA
agctgtctgtgggagacaga

SEQ ID NO: 5809 - DNA, 20 bp, synthetic construct
  source 1..20: mol_type = other DNA
ccaggggcaggatggcaaca

SEQ ID NO: 5810 - DNA, 20 bp, synthetic construct
  source 1..20: mol_type = other DNA
gggacgtactcgctgtgcag

SEQ ID NO: 5811 - DNA, 20 bp, synthetic construct
  source 1..20: mol_type = other DNA
ggcaactggaaaaaggtcaa

SEQ ID NO: 5812 - DNA, 20 bp, synthetic construct
  source 1..20: mol_type = other DNA
ccacaggccgcgctgcaggt

SEQ ID NO: 5813 - DNA, 20 bp, synthetic construct
  source 1..20: mol_type = other DNA
ggcacggtgagctccccgca

SEQ ID NO: 5814 - DNA, 20 bp, synthetic construct
  source 1..20: mol_type = other DNA
gctcaggtcgaagacttgtc

SEQ ID NO: 5815 - DNA, 20 bp, synthetic construct
  source 1..20: mol_type = other DNA
ccaggtgggcgggatgacca

SEQ ID NO: 5816 - DNA, 20 bp, synthetic construct
  source 1..20: mol_type = other DNA
ctgggtggagacaagcagtg

SEQ ID NO: 5817 - DNA, 20 bp, synthetic construct
  source 1..20: mol_type = other DNA
ccaagtcgttgccagtaccc

SEQ ID NO: 5818 - DNA, 20 bp, synthetic construct
  source 1..20: mol_type = other DNA
tcaaagtcgtggtgctcccc

SEQ ID NO: 5819 - DNA, 20 bp, synthetic construct
  source 1..20: mol_type = other DNA
tgaagcaggacaccttgctg

SEQ ID NO: 5820 - DNA, 20 bp, synthetic construct
  source 1..20: mol_type = other DNA
tgtggaaggtgaacttctgc

SEQ ID NO: 5821 - DNA, 20 bp, synthetic construct
  source 1..20: mol_type = other DNA
gttctacgccggggtgagtg

SEQ ID NO: 5822 - DNA, 20 bp, synthetic construct
  source 1..20: mol_type = other DNA
gacgccaggacggcaagtgt

SEQ ID NO: 5823 - DNA, 20 bp, synthetic construct
  source 1..20: mol_type = other DNA
cctgggtactggcaacgact

SEQ ID NO: 5824 - DNA, 20 bp, synthetic construct
  source 1..20: mol_type = other DNA
tgacgtgggcgtcaaagccc

SEQ ID NO: 5825 - DNA, 20 bp, synthetic construct
  source 1..20: mol_type = other DNA
tttgcaccctggatgggatg

SEQ ID NO: 5826 - DNA, 20 bp, synthetic construct
  source 1..20: mol_type = other DNA
tgaacatccccaggtgagga

SEQ ID NO: 5827 - DNA, 20 bp, synthetic construct
  source 1..20: mol_type = other DNA
ctaggagtcagcgacatatg

SEQ ID NO: 5828 - DNA, 20 bp, synthetic construct
  source 1..20: mol_type = other DNA
tcgagactcgtggaactcca

SEQ ID NO: 5829 - DNA, 20 bp, synthetic construct
  source 1..20: mol_type = other DNA
agttccacgagtctcgaggt

SEQ ID NO: 5830 - DNA, 20 bp, synthetic construct
  source 1..20: mol_type = other DNA
catggtggcctggttgcgca

SEQ ID NO: 5831 - DNA, 20 bp, synthetic construct
  source 1..20: mol_type = other DNA
accagcaggggcttcatgag

SEQ ID NO: 5832 - DNA, 20 bp, synthetic construct
  source 1..20: mol_type = other DNA
caggggcttcatgagcgggg

SEQ ID NO: 5833 - DNA, 20 bp, synthetic construct
  source 1..20: mol_type = other DNA
acggcaagtgtcggcactgt

SEQ ID NO: 5834 - DNA, 20 bp, synthetic construct
  source 1..20: mol_type = other DNA
ggagaggatccagcccacct

SEQ ID NO: 5835 - DNA, 20 bp, synthetic construct
  source 1..20: mol_type = other DNA
cgtggaactccagggtgacg

SEQ ID NO: 5836 - DNA, 20 bp, synthetic construct
  source 1..20: mol_type = other DNA
gccagtacccaggggcagga

SEQ ID NO: 5837 - DNA, 20 bp, synthetic construct
  source 1..20: mol_type = other DNA
tcttcgacctgagccaggga

SEQ ID NO: 5838 - DNA, 20 bp, synthetic construct
  source 1..20: mol_type = other DNA
cccactcaccaacgacgtca

SEQ ID NO: 5839 - DNA, 20 bp, synthetic construct
  source 1..20: mol_type = other DNA
tggtgcaagcaggcagtgag

SEQ ID NO: 5840 - DNA, 20 bp, synthetic construct
  source 1..20: mol_type = other DNA
gctcgccatccacctgcacc

SEQ ID NO: 5841 - DNA, 20 bp, synthetic construct
  source 1..20: mol_type = other DNA
tcccccagccaacctttgta

SEQ ID NO: 5842 - DNA, 20 bp, synthetic construct
  source 1..20: mol_type = other DNA
gagcccaggtgagcgattgc

SEQ ID NO: 5843 - DNA, 20 bp, synthetic construct
  source 1..20: mol_type = other DNA
ccgcacagtacctgcaaagg

SEQ ID NO: 5844 - DNA, 20 bp, synthetic construct
  source 1..20: mol_type = other DNA
cgttgccagtacccaggggc

SEQ ID NO: 5845 - DNA, 20 bp, synthetic construct
  source 1..20: mol_type = other DNA
tacccagtggtgccgtacaa

SEQ ID NO: 5846 - DNA, 20 bp, synthetic construct
  source 1..20: mol_type = other DNA
gggaccaccacagtgcccag

SEQ ID NO: 5847 - DNA, 20 bp, synthetic construct
  source 1..20: mol_type = other DNA
ctcctgggagacaaggtgag

SEQ ID NO: 5848 - DNA, 20 bp, synthetic construct
  source 1..20: mol_type = other DNA
gtagttgttgaagacatcca

SEQ ID NO: 5849 - DNA, 20 bp, synthetic construct
  source 1..20: mol_type = other DNA
agtcagagaaagctgtctgt

SEQ ID NO: 5850 - DNA, 20 bp, synthetic construct
  source 1..20: mol_type = other DNA
cacggaaggacggcttacag

SEQ ID NO: 5851 - DNA, 20 bp, synthetic construct
  source 1..20: mol_type = other DNA
ccatcacactggaggcgggc

SEQ ID NO: 5852 - DNA, 20 bp, synthetic construct
  source 1..20: mol_type = other DNA
gcggcagatccggagtacag

SEQ ID NO: 5853 - DNA, 20 bp, synthetic construct
  source 1..20: mol_type = other DNA
gcgctgcaggtgggcggaca

SEQ ID NO: 5854 - DNA, 20 bp, synthetic construct
  source 1..20: mol_type = other DNA
caaacaggtctccccgctgg

SEQ ID NO: 5855 - DNA, 20 bp, synthetic construct
  source 1..20: mol_type = other DNA
gcgcggaggatccaggtggg

SEQ ID NO: 5856 - DNA, 20 bp, synthetic construct
  source 1..20: mol_type = other DNA
tgagataccagaggaaagac

SEQ ID NO: 5857 - DNA, 20 bp, synthetic construct
  source 1..20: mol_type = other DNA
agtccattccatcacactgg

SEQ ID NO: 5858 - DNA, 20 bp, synthetic construct
  source 1..20: mol_type = other DNA
gcccgaaccctcaactgggg

SEQ ID NO: 5859 - DNA, 20 bp, synthetic construct
  source 1..20: mol_type = other DNA
gagccccagcggcatgacga

SEQ ID NO: 5860 - DNA, 20 bp, synthetic construct
  source 1..20: mol_type = other DNA
ggcaggatggcaacaggggg

SEQ ID NO: 5861 - DNA, 20 bp, synthetic construct
  source 1..20: mol_type = other DNA
cagcaggggcttcatgagcg

SEQ ID NO: 5862 - DNA, 20 bp, synthetic construct
  source 1..20: mol_type = other DNA
cgtccaggaagcaccacttg

SEQ ID NO: 5863 - DNA, 20 bp, synthetic construct
  source 1..20: mol_type = other DNA
ggctaggagtcagcgacata

SEQ ID NO: 5864 - DNA, 20 bp, synthetic construct
  source 1..20: mol_type = other DNA
gtggaactccagggtgacgt

SEQ ID NO: 5865 - DNA, 20 bp, synthetic construct
  source 1..20: mol_type = other DNA
ttcaggaaaacaacacactg

SEQ ID NO: 5866 - DNA, 20 bp, synthetic construct
  source 1..20: mol_type = other DNA
tgggagaggatcttggacac

SEQ ID NO: 5867 - DNA, 20 bp, synthetic construct
  source 1..20: mol_type = other DNA
ttcctgaacatccccaggtg

SEQ ID NO: 5868 - DNA, 20 bp, synthetic construct
  source 1..20: mol_type = other DNA
tctgggtggagacaagcagt

SEQ ID NO: 5869 - DNA, 20 bp, synthetic construct
  source 1..20: mol_type = other DNA
ggaataagatgttctacgcc

SEQ ID NO: 5870 - DNA, 20 bp, synthetic construct
  source 1..20: mol_type = other DNA
gctgactcctagccacggga

SEQ ID NO: 5871 - DNA, 20 bp, synthetic construct
  source 1..20: mol_type = other DNA
tgggacgtactcgctgtgca

SEQ ID NO: 5872 - DNA, 20 bp, synthetic construct
  source 1..20: mol_type = other DNA
gcgtgaggctgcaagcttgc

SEQ ID NO: 5873 - DNA, 20 bp, synthetic construct
  source 1..20: mol_type = other DNA
cgctccagtccactgtactc

SEQ ID NO: 5874 - DNA, 20 bp, synthetic construct
  source 1..20: mol_type = other DNA
gttcaggaaaacaacacact

SEQ ID NO: 5875 - DNA, 20 bp, synthetic construct
  source 1..20: mol_type = other DNA
cagggcgatgcggatgcgtg

SEQ ID NO: 5876 - DNA, 20 bp, synthetic construct
  source 1..20: mol_type = other DNA
ccatggtggcctggttgcgc

SEQ ID NO: 5877 - DNA, 20 bp, synthetic construct
  source 1..20: mol_type = other DNA
ggctcgccatccacctgcac

SEQ ID NO: 5878 - DNA, 20 bp, synthetic construct
  source 1..20: mol_type = other DNA
cccacaggccgcgctgcagg

SEQ ID NO: 5879 - DNA, 20 bp, synthetic construct
  source 1..20: mol_type = other DNA
ggatccagcccacctggggg

SEQ ID NO: 5880 - DNA, 20 bp, synthetic construct
  source 1..20: mol_type = other DNA
agaacatcttattccgaaag

SEQ ID NO: 5881 - DNA, 20 bp, synthetic construct
  source 1..20: mol_type = other DNA
gaataagatgttctacgccg

SEQ ID NO: 5882 - DNA, 20 bp, synthetic construct
  source 1..20: mol_type = other DNA
ctttgacgcccacgtcaccc

SEQ ID NO: 5883 - DNA, 20 bp, synthetic construct
  source 1..20: mol_type = other DNA
tctctgggttggcctctggg

SEQ ID NO: 5884 - DNA, 20 bp, synthetic construct
  source 1..20: mol_type = other DNA
cagtggtgccgtacaaaggt

SEQ ID NO: 5885 - DNA, 20 bp, synthetic construct
  source 1..20: mol_type = other DNA
aggctccaggaatgtccgcg

SEQ ID NO: 5886 - DNA, 20 bp, synthetic construct
  source 1..20: mol_type = other DNA
cctggggcctccgggcgcgg

SEQ ID NO: 5887 - DNA, 20 bp, synthetic construct
  source 1..20: mol_type = other DNA
caggggcaggatggcaacag

SEQ ID NO: 5888 - DNA, 20 bp, synthetic construct
  source 1..20: mol_type = other DNA
cgcggaggatccaggtgggc

SEQ ID NO: 5889 - DNA, 20 bp, synthetic construct
  source 1..20: mol_type = other DNA
cccgaaccctcaactggggt

SEQ ID NO: 5890 - DNA, 20 bp, synthetic construct
  source 1..20: mol_type = other DNA
gagaggatccagcccacctg

SEQ ID NO: 5891 - DNA, 20 bp, synthetic construct
  source 1..20: mol_type = other DNA
cccaggggcaggatggcaac

SEQ ID NO: 5892 - DNA, 20 bp, synthetic construct
  source 1..20: mol_type = other DNA
cacactggggtttcaggtcc

SEQ ID NO: 5893 - DNA, 20 bp, synthetic construct
  source 1..20: mol_type = other DNA
caggcgtagctggtccaggg

SEQ ID NO: 5894 - DNA, 20 bp, synthetic construct
  source 1..20: mol_type = other DNA
ctcgagactcgtggaactcc

SEQ ID NO: 5895 - DNA, 20 bp, synthetic construct
  source 1..20: mol_type = other DNA
gctaggagtcagcgacatat

SEQ ID NO: 5896 - DNA, 20 bp, synthetic construct
  source 1..20: mol_type = other DNA
caaagtcgtggtgctcccca

SEQ ID NO: 5897 - DNA, 20 bp, synthetic construct
  source 1..20: mol_type = other DNA
agtactcacctggggcctcc

SEQ ID NO: 5898 - DNA, 20 bp, synthetic construct
  source 1..20: mol_type = other DNA
ggccaagcacatccgagtgg

SEQ ID NO: 5899 - DNA, 20 bp, synthetic construct
  source 1..20: mol_type = other DNA
tagccgtcgtcatgccgctg

SEQ ID NO: 5900 - DNA, 20 bp, synthetic construct
  source 1..20: mol_type = other DNA
gctgttgaatttctctgggt

SEQ ID NO: 5901 - DNA, 20 bp, synthetic construct
  source 1..20: mol_type = other DNA
ttctccagctgctcgatgca

SEQ ID NO: 5902 - DNA, 20 bp, synthetic construct
  source 1..20: mol_type = other DNA
caggagctgcaccgagctgg

SEQ ID NO: 5903 - DNA, 20 bp, synthetic construct
  source 1..20: mol_type = other DNA
ccggctcaccgtggtccagc

SEQ ID NO: 5904 - DNA, 20 bp, synthetic construct
  source 1..20: mol_type = other DNA
gcacggtgagctccccgcat

SEQ ID NO: 5905 - DNA, 20 bp, synthetic construct
  source 1..20: mol_type = other DNA
agcggctgttgaatttctct

SEQ ID NO: 5906 - DNA, 20 bp, synthetic construct
  source 1..20: mol_type = other DNA
tgcccgcacagtacctgcaa

SEQ ID NO: 5907 - DNA, 20 bp, synthetic construct
  source 1..20: mol_type = other DNA
ctctcctcagtaccacagca

SEQ ID NO: 5908 - DNA, 20 bp, synthetic construct
  source 1..20: mol_type = other DNA
cggaataagatgttctacgc

SEQ ID NO: 5909 - DNA, 20 bp, synthetic construct
  source 1..20: mol_type = other DNA
gtcggggattgagataccag

SEQ ID NO: 5910 - DNA, 20 bp, synthetic construct
  source 1..20: mol_type = other DNA
cgtgaggctgcaagcttgca

SEQ ID NO: 5911 - DNA, 20 bp, synthetic construct
  source 1..20: mol_type = other DNA
aggggcaggatggcaacagg

SEQ ID NO: 5912 - DNA, 20 bp, synthetic construct
  source 1..20: mol_type = other DNA
cctggttgcccccactcttg

SEQ ID NO: 5913 - DNA, 20 bp, synthetic construct
  source 1..20: mol_type = other DNA
gcagaagtccccggacacgt

SEQ ID NO: 5914 - DNA, 20 bp, synthetic construct
  source 1..20: mol_type = other DNA
ccaggagctgcaccgagctg

SEQ ID NO: 5915 - DNA, 20 bp, synthetic construct
  source 1..20: mol_type = other DNA
tccgcaggttgtgcactttg

SEQ ID NO: 5916 - DNA, 20 bp, synthetic construct
  source 1..20: mol_type = other DNA
caagtcgttgccagtaccca

SEQ ID NO: 5917 - DNA, 20 bp, synthetic construct
  source 1..20: mol_type = other DNA
gcgggatgaccacggctgcg

SEQ ID NO: 5918 - DNA, 20 bp, synthetic construct
  source 1..20: mol_type = other DNA
ctcaggtcgaagacttgtcg

SEQ ID NO: 5919 - DNA, 20 bp, synthetic construct
  source 1..20: mol_type = other DNA
gggcaactggaaaaaggtca

SEQ ID NO: 5920 - DNA, 20 bp, synthetic construct
  source 1..20: mol_type = other DNA
ggctcaggtcgaagacttgt

SEQ ID NO: 5921 - DNA, 20 bp, synthetic construct
  source 1..20: mol_type = other DNA
tgcttaccccaccccagttg

SEQ ID NO: 5922 - DNA, 20 bp, synthetic construct
  source 1..20: mol_type = other DNA
gtccaggaagcaccacttgg

SEQ ID NO: 5923 - DNA, 20 bp, synthetic construct
  source 1..20: mol_type = other DNA
aacatccccaggtgaggagg

SEQ ID NO: 5924 - DNA, 20 bp, synthetic construct
  source 1..20: mol_type = other DNA
agttgaggtgctcctgtggg

SEQ ID NO: 5925 - DNA, 20 bp, synthetic construct
  source 1..20: mol_type = other DNA
gacggcaagtgtcggcactg

SEQ ID NO: 5926 - DNA, 20 bp, synthetic construct
  source 1..20: mol_type = other DNA
cgacaaggagcagctcaagg

SEQ ID NO: 5927 - DNA, 20 bp, synthetic construct
  source 1..20: mol_type = other DNA
ggacgtactcgctgtgcagg

SEQ ID NO: 5928 - DNA, 20 bp, synthetic construct
  source 1..20: mol_type = other DNA
tccaggagctgcaccgagct

SEQ ID NO: 5929 - DNA, 20 bp, synthetic construct
  source 1..20: mol_type = other DNA
aagtcagagaaagctgtctg

SEQ ID NO: 5930 - DNA, 20 bp, synthetic construct
  source 1..20: mol_type = other DNA
tggtgaagccaatgacctcg

SEQ ID NO: 5931 - DNA, 20 bp, synthetic construct
  source 1..20: mol_type = other DNA
tggtgcagaaggccaagcgg

SEQ ID NO: 5932 - DNA, 20 bp, synthetic construct
  source 1..20: mol_type = other DNA
tggagaggatccagcccacc

SEQ ID NO: 5933 - DNA, 20 bp, synthetic construct
  source 1..20: mol_type = other DNA
cgcacagtacctgcaaaggc

SEQ ID NO: 5934 - DNA, 20 bp, synthetic construct
  source 1..20: mol_type = other DNA
gcttaccccaccccagttga

SEQ ID NO: 5935 - DNA, 20 bp, synthetic construct
  source 1..20: mol_type = other DNA
gcggctgacgcagtgtcgcg

SEQ ID NO: 5936 - DNA, 20 bp, synthetic construct
  source 1..20: mol_type = other DNA
ccatgacgtcgttggtgagt

SEQ ID NO: 5937 - DNA, 20 bp, synthetic construct
  source 1..20: mol_type = other DNA
gtgtccgcccacctgcagcg

SEQ ID NO: 5938 - DNA, 20 bp, synthetic construct
  source 1..20: mol_type = other DNA
aagtcgttgccagtacccag

SEQ ID NO: 5939 - DNA, 20 bp, synthetic construct
  source 1..20: mol_type = other DNA
cctgtgggcacaggaagctt

SEQ ID NO: 5940 - DNA, 20 bp, synthetic construct
  source 1..20: mol_type = other DNA
cccacctgcagcgcggcctg

SEQ ID NO: 5941 - DNA, 20 bp, synthetic construct
  source 1..20: mol_type = other DNA
cagctgctcgtggtgcaagc

SEQ ID NO: 5942 - DNA, 20 bp, synthetic construct
  source 1..20: mol_type = other DNA
ttggcccgaaccctcaactg

SEQ ID NO: 5943 - DNA, 20 bp, synthetic construct
  source 1..20: mol_type = other DNA
aggaggcctgtgagtgcggt

SEQ ID NO: 5944 - DNA, 20 bp, synthetic construct
  source 1..20: mol_type = other DNA
gtagccgtcgtcatgccgct

SEQ ID NO: 5945 - DNA, 20 bp, synthetic construct
  source 1..20: mol_type = other DNA
gacgtactcgctgtgcaggg

SEQ ID NO: 5946 - DNA, 20 bp, synthetic construct
  source 1..20: mol_type = other DNA
cttgcaccacgagcagctga

SEQ ID NO: 5947 - DNA, 20 bp, synthetic construct
  source 1..20: mol_type = other DNA
gcatgtcgacttctcctcgg

SEQ ID NO: 5948 - DNA, 20 bp, synthetic construct
  source 1..20: mol_type = other DNA
accatggtggcggatggcgg

SEQ ID NO: 5949 - DNA, 20 bp, synthetic construct
  source 1..20: mol_type = other DNA
ggatgatctggccccctccg

SEQ ID NO: 5950 - DNA, 20 bp, synthetic construct
  source 1..20: mol_type = other DNA
tgatggtgcccgtcttcacc

SEQ ID NO: 5951 - DNA, 20 bp, synthetic construct
  source 1..20: mol_type = other DNA
ctcaccatggtggcggatgg

SEQ ID NO: 5952 - DNA, 20 bp, synthetic construct
  source 1..20: mol_type = other DNA
cgggcatgtcgacttctcct

SEQ ID NO: 5953 - DNA, 20 bp, synthetic construct
  source 1..20: mol_type = other DNA
gggagtcaatgaggttgatg

SEQ ID NO: 5954 - DNA, 20 bp, synthetic construct
  source 1..20: mol_type = other DNA
cacgccgacgccatccaccg

SEQ ID NO: 5955 - DNA, 20 bp, synthetic construct
  source 1..20: mol_type = other DNA
gctgcagctccagcagggcg

SEQ ID NO: 5956 - DNA, 20 bp, synthetic construct
  source 1..20: mol_type = other DNA
gagggagatggcactgatgg

SEQ ID NO: 5957 - DNA, 20 bp, synthetic construct
  source 1..20: mol_type = other DNA
tctccgagagctcgtagaag

SEQ ID NO: 5958 - DNA, 20 bp, synthetic construct
  source 1..20: mol_type = other DNA
tctcctcacacagtgcgccc

SEQ ID NO: 5959 - DNA, 20 bp, synthetic construct
  source 1..20: mol_type = other DNA
tctggattggcttcaggtag

SEQ ID NO: 5960 - DNA, 20 bp, synthetic construct
  source 1..20: mol_type = other DNA
tccgaccccatggtgcaggt

SEQ ID NO: 5961 - DNA, 20 bp, synthetic construct
  source 1..20: mol_type = other DNA
cacagtgcgccctgggggag

SEQ ID NO: 5962 - DNA, 20 bp, synthetic construct
  source 1..20: mol_type = other DNA
tgcggatgtgggtggtgagg

SEQ ID NO: 5963 - DNA, 20 bp, synthetic construct
  source 1..20: mol_type = other DNA
gggtgcggatgtgggtggtg

SEQ ID NO: 5964 - DNA, 20 bp, synthetic construct
  source 1..20: mol_type = other DNA
cagcagcagcagcagcagcg

SEQ ID NO: 5965 - DNA, 20 bp, synthetic construct
  source 1..20: mol_type = other DNA
acccacatccgcacccacac

SEQ ID NO: 5966 - DNA, 20 bp, synthetic construct
  source 1..20: mol_type = other DNA
gggacccgccagagcgcagg

SEQ ID NO: 5967 - DNA, 20 bp, synthetic construct
  source 1..20: mol_type = other DNA
tgcgcatgcagatccgacac

SEQ ID NO: 5968 - DNA, 20 bp, synthetic construct
  source 1..20: mol_type = other DNA
tgcggatatgggtggtgagg

SEQ ID NO: 5969 - DNA, 20 bp, synthetic construct
  source 1..20: mol_type = other DNA
cgcagccttctgctgggcac

SEQ ID NO: 5970 - DNA, 20 bp, synthetic construct
  source 1..20: mol_type = other DNA
tcgcagccttctgctgggca

SEQ ID NO: 5971 - DNA, 20 bp, synthetic construct
  source 1..20: mol_type = other DNA
cgtcagagcgggagaaccgc

SEQ ID NO: 5972 - DNA, 20 bp, synthetic construct
  source 1..20: mol_type = other DNA
ggggccagtggaggcagcga

SEQ ID NO: 5973 - DNA, 20 bp, synthetic construct
  source 1..20: mol_type = other DNA
tctcctgcacagccagaata

SEQ ID NO: 5974 - DNA, 20 bp, synthetic construct
  source 1..20: mol_type = other DNA
acccatatccgcacccacac

SEQ ID NO: 5975 - DNA, 20 bp, synthetic construct
  source 1..20: mol_type = other DNA
atgcagatccgacactggaa

SEQ ID NO: 5976 - DNA, 20 bp, synthetic construct
  source 1..20: mol_type = other DNA
catgcagatccgacactgga

SEQ ID NO: 5977 - DNA, 20 bp, synthetic construct
  source 1..20: mol_type = other DNA
atgcagatccggcactggaa

SEQ ID NO: 5978 - DNA, 20 bp, synthetic construct
  source 1..20: mol_type = other DNA
catgcagatccggcactgga

SEQ ID NO: 5979 - DNA, 20 bp, synthetic construct
  source 1..20: mol_type = other DNA
tccgcatgcagatccggcac

SEQ ID NO: 5980 - DNA, 20 bp, synthetic construct
  source 1..20: mol_type = other DNA
agttagaacaagagggccca

SEQ ID NO: 5981 - DNA, 20 bp, synthetic construct
  source 1..20: mol_type = other DNA
agaactggtctgacacgctg

SEQ ID NO: 5982 - DNA, 20 bp, synthetic construct
  source 1..20: mol_type = other DNA
ttgcagaaaaagaaagaaga

SEQ ID NO: 5983 - DNA, 20 bp, synthetic construct
  source 1..20: mol_type = other DNA
gcactcaccattgtatgtgg

SEQ ID NO: 5984 - DNA, 20 bp, synthetic construct
  source 1..20: mol_type = other DNA
gatgccccgtctgattgcca

SEQ ID NO: 5985 - DNA, 20 bp, synthetic construct
  source 1..20: mol_type = other DNA
gcatcttgtagcgatagaac

SEQ ID NO: 5986 - DNA, 20 bp, synthetic construct
  source 1..20: mol_type = other DNA
aagctttacttacacgttgg

SEQ ID NO: 5987 - DNA, 20 bp, synthetic construct
  source 1..20: mol_type = other DNA
tctgtagagaatagtgacag

SEQ ID NO: 5988 - DNA, 20 bp, synthetic construct
  source 1..20: mol_type = other DNA
aaccatgaagaaggtaccgt

SEQ ID NO: 5989 - DNA, 20 bp, synthetic construct
  source 1..20: mol_type = other DNA
gcccaacggtaccttcttca

SEQ ID NO: 5990 - DNA, 20 bp, synthetic construct
  source 1..20: mol_type = other DNA
attaccttggcaatcagacg

SEQ ID NO: 5991 - DNA, 20 bp, synthetic construct
  source 1..20: mol_type = other DNA
atacctgagtgctcttccca

SEQ ID NO: 5992 - DNA, 20 bp, synthetic construct
  source 1..20: mol_type = other DNA
aataggtactattaccaaag

SEQ ID NO: 5993 - DNA, 20 bp, synthetic construct
  source 1..20: mol_type = other DNA
tggattctaaagcagtgtcc

SEQ ID NO: 5994 - DNA, 20 bp, synthetic construct
  source 1..20: mol_type = other DNA
gatatgaattatgagaccat

SEQ ID NO: 5995 - DNA, 20 bp, synthetic construct
  source 1..20: mol_type = other DNA
gaataggtactattaccaaa

SEQ ID NO: 5996 - DNA, 20 bp, synthetic construct
  source 1..20: mol_type = other DNA
tttatatatataagatcttt

SEQ ID NO: 5997 - DNA, 20 bp, synthetic construct
  source 1..20: mol_type = other DNA
ttggatgatggcaagacact

SEQ ID NO: 5998 - DNA, 20 bp, synthetic construct
  source 1..20: mol_type = other DNA
cttcagttcgaacaccgtgc

SEQ ID NO: 5999 - DNA, 20 bp, synthetic construct
  source 1..20: mol_type = other DNA
gctgtacaaggtgggtcccg

SEQ ID NO: 6000 - DNA, 20 bp, synthetic construct
  source 1..20: mol_type = other DNA
atcatgaggaacacgtcctg

SEQ ID NO: 6001 - DNA, 20 bp, synthetic construct
  source 1..20: mol_type = other DNA
ccgtgaagatggtggtcttg

SEQ ID NO: 6002 - DNA, 20 bp, synthetic construct
  source 1..20: mol_type = other DNA
gatcatgaggaacacgtcct

SEQ ID NO: 6003 - DNA, 20 bp, synthetic construct
  source 1..20: mol_type = other DNA
tccaagagttggtcatcctg

SEQ ID NO: 6004 - DNA, 20 bp, synthetic construct
  source 1..20: mol_type = other DNA
gagcagcggctgtacaaggt

SEQ ID NO: 6005 - DNA, 20 bp, synthetic construct
  source 1..20: mol_type = other DNA
gatgaccaactcttggatga

SEQ ID NO: 6006 - DNA, 20 bp, synthetic construct
  source 1..20: mol_type = other DNA
cgcgatggtgagcgggcgtg

SEQ ID NO: 6007 - DNA, 20 bp, synthetic construct
  source 1..20: mol_type = other DNA
aaggccagccccactgtggc

SEQ ID NO: 6008 - DNA, 20 bp, synthetic construct
  source 1..20: mol_type = other DNA
cgaactgaagcgcatcgtcg

SEQ ID NO: 6009 - DNA, 20 bp, synthetic construct
  source 1..20: mol_type = other DNA
ttgtacagccgctgctcgtc

SEQ ID NO: 6010 - DNA, 20 bp, synthetic construct
  source 1..20: mol_type = other DNA
tacagccgctgctcgtcagg

SEQ ID NO: 6011 - DNA, 20 bp, synthetic construct
  source 1..20: mol_type = other DNA
ggccagccccactgtggctg

SEQ ID NO: 6012 - DNA, 20 bp, synthetic construct
  source 1..20: mol_type = other DNA
gaacaccgtgctggactcct

SEQ ID NO: 6013 - DNA, 20 bp, synthetic construct
  source 1..20: mol_type = other DNA
gcgatggtgagcgggcgtgg

SEQ ID NO: 6014 - DNA, 20 bp, synthetic construct
  source 1..20: mol_type = other DNA
gccgcgatggtgagcgggcg

SEQ ID NO: 6015 - DNA, 20 bp, synthetic construct
  source 1..20: mol_type = other DNA
tgacgagcagcggctgtaca

SEQ ID NO: 6016 - DNA, 20 bp, synthetic construct
  source 1..20: mol_type = other DNA
gccacaggccccagccacag

SEQ ID NO: 6017 - DNA, 20 bp, synthetic construct
  source 1..20: mol_type = other DNA
aggccagccccactgtggct

SEQ ID NO: 6018 - DNA, 20 bp, synthetic construct
  source 1..20: mol_type = other DNA
gcttcaccagtcaaacagca

SEQ ID NO: 6019 - DNA, 20 bp, synthetic construct
  source 1..20: mol_type = other DNA
caccatcttcacggacgcca

SEQ ID NO: 6020 - DNA, 20 bp, synthetic construct
  source 1..20: mol_type = other DNA
gctcgtcaggaggccgcttg

SEQ ID NO: 6021 - DNA, 20 bp, synthetic construct
  source 1..20: mol_type = other DNA
gaactgaagcgcatcgtcga

SEQ ID NO: 6022 - DNA, 20 bp, synthetic construct
  source 1..20: mol_type = other DNA
tacaaggtgggtcccgcggg

SEQ ID NO: 6023 - DNA, 20 bp, synthetic construct
  source 1..20: mol_type = other DNA
gaacacgtcctgggggcggc

SEQ ID NO: 6024 - DNA, 20 bp, synthetic construct
  source 1..20: mol_type = other DNA
ccgcgatggtgagcgggcgt

SEQ ID NO: 6025 - DNA, 20 bp, synthetic construct
  source 1..20: mol_type = other DNA
acaaggtgggtcccgcgggc

SEQ ID NO: 6026 - DNA, 20 bp, synthetic construct
  source 1..20: mol_type = other DNA
tcctcaggatgaccaactct

SEQ ID NO: 6027 - DNA, 20 bp, synthetic construct
  source 1..20: mol_type = other DNA
cagtcaaacagcacggccac

SEQ ID NO: 6028 - DNA, 20 bp, synthetic construct
  source 1..20: mol_type = other DNA
ggaacacgtcctgggggcgg

SEQ ID NO: 6029 - DNA, 20 bp, synthetic construct
  source 1..20: mol_type = other DNA
ggatcatgaggaacacgtcc

SEQ ID NO: 6030 - DNA, 20 bp, synthetic construct
  source 1..20: mol_type = other DNA
agcggcctcctgacgagcag

SEQ ID NO: 6031 - DNA, 20 bp, synthetic construct
  source 1..20: mol_type = other DNA
cgagcagcggctgtacaagg

SEQ ID NO: 6032 - DNA, 20 bp, synthetic construct
  source 1..20: mol_type = other DNA
cttggatgatggcaagacac

SEQ ID NO: 6033 - DNA, 20 bp, synthetic construct
  source 1..20: mol_type = other DNA
ccacaggccccagccacagt

SEQ ID NO: 6034 - DNA, 20 bp, synthetic construct
  source 1..20: mol_type = other DNA
tcatgaggaacacgtcctgg

SEQ ID NO: 6035 - DNA, 20 bp, synthetic construct
  source 1..20: mol_type = other DNA
ctgtacaaggtgggtcccgc

SEQ ID NO: 6036 - DNA, 20 bp, synthetic construct
  source 1..20: mol_type = other DNA
ggcaagacactgggcgagtg

SEQ ID NO: 6037 - DNA, 20 bp, synthetic construct
  source 1..20: mol_type = other DNA
ctccacagatgacacctttg

SEQ ID NO: 6038 - DNA, 20 bp, synthetic construct
  source 1..20: mol_type = other DNA
cacaggccccagccacagtg

SEQ ID NO: 6039 - DNA, 20 bp, synthetic construct
  source 1..20: mol_type = other DNA
tgaggaacacgtcctggggg

SEQ ID NO: 6040 - DNA, 20 bp, synthetic construct
  source 1..20: mol_type = other DNA
ccggaaggccagccccactg

SEQ ID NO: 6041 - DNA, 20 bp, synthetic construct
  source 1..20: mol_type = other DNA
cgagaaagcagtctttaccc

SEQ ID NO: 6042 - DNA, 20 bp, synthetic construct
  source 1..20: mol_type = other DNA
cagatgaggtaaggaaggag

SEQ ID NO: 6043 - DNA, 20 bp, synthetic construct
  source 1..20: mol_type = other DNA
cgtaatagtagcgtaggcca

SEQ ID NO: 6044 - DNA, 20 bp, synthetic construct
  source 1..20: mol_type = other DNA
actaaagaacagcaacgact

SEQ ID NO: 6045 - DNA, 20 bp, synthetic construct
  source 1..20: mol_type = other DNA
gctcttccgagctgatggga

SEQ ID NO: 6046 - DNA, 20 bp, synthetic construct
  source 1..20: mol_type = other DNA
aattatgagaaactgagccg

SEQ ID NO: 6047 - DNA, 20 bp, synthetic construct
  source 1..20: mol_type = other DNA
acatcacccagtcccgaaca

SEQ ID NO: 6048 - DNA, 20 bp, synthetic construct
  source 1..20: mol_type = other DNA
gagaaagcagtctttaccca

SEQ ID NO: 6049 - DNA, 20 bp, synthetic construct
  source 1..20: mol_type = other DNA
tgtccactgccgggggtctg

SEQ ID NO: 6050 - DNA, 20 bp, synthetic construct
  source 1..20: mol_type = other DNA
catcacccagtcccgaacat

SEQ ID NO: 6051 - DNA, 20 bp, synthetic construct
  source 1..20: mol_type = other DNA
tgcccagtgtgttccaccat

SEQ ID NO: 6052 - DNA, 20 bp, synthetic construct
  source 1..20: mol_type = other DNA
atttcaggtggccaggagat

SEQ ID NO: 6053 - DNA, 20 bp, synthetic construct
  source 1..20: mol_type = other DNA
gctggccccagactttgttg

SEQ ID NO: 6054 - DNA, 20 bp, synthetic construct
  source 1..20: mol_type = other DNA
aatttcaggtggccaggaga

SEQ ID NO: 6055 - DNA, 20 bp, synthetic construct
  source 1..20: mol_type = other DNA
gggtttctgtccactgccgg

SEQ ID NO: 6056 - DNA, 20 bp, synthetic construct
  source 1..20: mol_type = other DNA
tgacccagatgaggtaagga

SEQ ID NO: 6057 - DNA, 20 bp, synthetic construct
  source 1..20: mol_type = other DNA
gatgtccccaacaaagtctg

SEQ ID NO: 6058 - DNA, 20 bp, synthetic construct
  source 1..20: mol_type = other DNA
gacgctccatcccatcagct

SEQ ID NO: 6059 - DNA, 20 bp, synthetic construct
  source 1..20: mol_type = other DNA
cttactaatgaagtaatccg

SEQ ID NO: 6060 - DNA, 20 bp, synthetic construct
  source 1..20: mol_type = other DNA
cctacctgtgtagccagcta

SEQ ID NO: 6061 - DNA, 20 bp, synthetic construct
  source 1..20: mol_type = other DNA
tttcaggtggccaggagatg

SEQ ID NO: 6062 - DNA, 20 bp, synthetic construct
  source 1..20: mol_type = other DNA
cagaaacccatgttcgggac

SEQ ID NO: 6063 - DNA, 20 bp, synthetic construct
  source 1..20: mol_type = other DNA
ccagctgataaaagactgac

SEQ ID NO: 6064 - DNA, 20 bp, synthetic construct
  source 1..20: mol_type = other DNA
cagctggacaggagatggct

SEQ ID NO: 6065 - DNA, 20 bp, synthetic construct
  source 1..20: mol_type = other DNA
ctaaagaacagcaacgactg

SEQ ID NO: 6066 - DNA, 20 bp, synthetic construct
  source 1..20: mol_type = other DNA
ggccagggcgagcgcggcgg

SEQ ID NO: 6067 - DNA, 20 bp, synthetic construct
  source 1..20: mol_type = other DNA
gtcggccagggcgagcgcgg

SEQ ID NO: 6068 - DNA, 20 bp, synthetic construct
  source 1..20: mol_type = other DNA
caggcatgagcgccacggtg

SEQ ID NO: 6069 - DNA, 20 bp, synthetic construct
  source 1..20: mol_type = other DNA
gagcaggcgaccgcgcagcg

SEQ ID NO: 6070 - DNA, 20 bp, synthetic construct
  source 1..20: mol_type = other DNA
tctccaactttaaatcctgt

SEQ ID NO: 6071 - DNA, 20 bp, synthetic construct
  source 1..20: mol_type = other DNA
tctccttgtgatgtttttca

SEQ ID NO: 6072 - DNA, 20 bp, synthetic construct
  source 1..20: mol_type = other DNA
agacggtgagtagtggcgcg

SEQ ID NO: 6073 - DNA, 20 bp, synthetic construct
  source 1..20: mol_type = other DNA
tctctgtcagctcccggcgt

SEQ ID NO: 6074 - DNA, 20 bp, synthetic construct
  source 1..20: mol_type = other DNA
tctcctgccacggaaagaga

SEQ ID NO: 6075 - DNA, 20 bp, synthetic construct
  source 1..20: mol_type = other DNA
gtcgcagatctacgagtgga

SEQ ID NO: 6076 - DNA, 20 bp, synthetic construct
  source 1..20: mol_type = other DNA
caaggccatcgagagctcgg

SEQ ID NO: 6077 - DNA, 20 bp, synthetic construct
  source 1..20: mol_type = other DNA
cccatgcagatgagtgccct

SEQ ID NO: 6078 - DNA, 20 bp, synthetic construct
  source 1..20: mol_type = other DNA
tgatgaggtcggcgtaggac

SEQ ID NO: 6079 - DNA, 20 bp, synthetic construct
  source 1..20: mol_type = other DNA
ccgggcggcgggggctgcgg

SEQ ID NO: 6080 - DNA, 20 bp, synthetic construct
  source 1..20: mol_type = other DNA
ggctggaaggtgagtggact

SEQ ID NO: 6081 - DNA, 20 bp, synthetic construct
  source 1..20: mol_type = other DNA
catgcagatgagtgccctgg

SEQ ID NO: 6082 - DNA, 20 bp, synthetic construct
  source 1..20: mol_type = other DNA
gcaggcgcccggctccgtgg

SEQ ID NO: 6083 - DNA, 20 bp, synthetic construct
  source 1..20: mol_type = other DNA
cttggtgatgaggtcggcgt

SEQ ID NO: 6084 - DNA, 20 bp, synthetic construct
  source 1..20: mol_type = other DNA
ggttgccccacgcgttgcgg

SEQ ID NO: 6085 - DNA, 20 bp, synthetic construct
  source 1..20: mol_type = other DNA
tcgagagctcggcggagaag

SEQ ID NO: 6086 - DNA, 20 bp, synthetic construct
  source 1..20: mol_type = other DNA
ccatgcagatgagtgccctg

SEQ ID NO: 6087 - DNA, 20 bp, synthetic construct
  source 1..20: mol_type = other DNA
ctacgccgacctcatcacca

SEQ ID NO: 6088 - DNA, 20 bp, synthetic construct
  source 1..20: mol_type = other DNA
gccgctgtcgcagcacccgc

SEQ ID NO: 6089 - DNA, 20 bp, synthetic construct
  source 1..20: mol_type = other DNA
gatggccttggtgatgaggt

SEQ ID NO: 6090 - DNA, 20 bp, synthetic construct
  source 1..20: mol_type = other DNA
caggacaataagtcgagtta

SEQ ID NO: 6091 - DNA, 20 bp, synthetic construct
  source 1..20: mol_type = other DNA
cgctgtcgcagatctacgag

SEQ ID NO: 6092 - DNA, 20 bp, synthetic construct
  source 1..20: mol_type = other DNA
cgtgtgcagaatgaaggaac

SEQ ID NO: 6093 - DNA, 20 bp, synthetic construct
  source 1..20: mol_type = other DNA
cccgcaggcgcccggctccg

SEQ ID NO: 6094 - DNA, 20 bp, synthetic construct
  source 1..20: mol_type = other DNA
gtcccagatctacgagtgga

SEQ ID NO: 6095 - DNA, 20 bp, synthetic construct
  source 1..20: mol_type = other DNA
tctctgtcatggtcaaaatc

SEQ ID NO: 6096 - DNA, 20 bp, synthetic construct
  source 1..20: mol_type = other DNA
tcccaccgtgtgcatgctgg

SEQ ID NO: 6097 - DNA, 20 bp, synthetic construct
  source 1..20: mol_type = other DNA
atggggcagtcctgcgggca

SEQ ID NO: 6098 - DNA, 20 bp, synthetic construct
  source 1..20: mol_type = other DNA
ccgagtatatgaacaaaggt

SEQ ID NO: 6099 - DNA, 20 bp, synthetic construct
  source 1..20: mol_type = other DNA
gcttcacaatgtaagtggac

SEQ ID NO: 6100 - DNA, 20 bp, synthetic construct
  source 1..20: mol_type = other DNA
agcccacaggcattgcagac

SEQ ID NO: 6101 - DNA, 20 bp, synthetic construct
  source 1..20: mol_type = other DNA
actcaccgtggtgggtcgga

SEQ ID NO: 6102 - DNA, 20 bp, synthetic construct
  source 1..20: mol_type = other DNA
ggcgcagtacccgctgccgg

SEQ ID NO: 6103 - DNA, 20 bp, synthetic construct
  source 1..20: mol_type = other DNA
ctgtggcggcgagatggcac

SEQ ID NO: 6104 - DNA, 20 bp, synthetic construct
  source 1..20: mol_type = other DNA
cagacccctgactatgaaga

SEQ ID NO: 6105 - DNA, 20 bp, synthetic construct
  source 1..20: mol_type = other DNA
caccaccccgccgtgctcaa

SEQ ID NO: 6106 - DNA, 20 bp, synthetic construct
  source 1..20: mol_type = other DNA
actgtggcggcgagatggca

SEQ ID NO: 6107 - DNA, 20 bp, synthetic construct
  source 1..20: mol_type = other DNA
gccttccttcttcatagtca

SEQ ID NO: 6108 - DNA, 20 bp, synthetic construct
  source 1..20: mol_type = other DNA
ggtagggatccatgaagcag

SEQ ID NO: 6109 - DNA, 20 bp, synthetic construct
  source 1..20: mol_type = other DNA
ccaccacaaccacactctgg

SEQ ID NO: 6110 - DNA, 20 bp, synthetic construct
  source 1..20: mol_type = other DNA
cactacctgtgcaacgcctg

SEQ ID NO: 6111 - DNA, 20 bp, synthetic construct
  source 1..20: mol_type = other DNA
tacaagcttcacaatgtaag

SEQ ID NO: 6112 - DNA, 20 bp, synthetic construct
  source 1..20: mol_type = other DNA
cctgtggggcaacggggaaa

SEQ ID NO: 6113 - DNA, 20 bp, synthetic construct
  source 1..20: mol_type = other DNA
ttcacacactccctgccttc

SEQ ID NO: 6114 - DNA, 20 bp, synthetic construct
  source 1..20: mol_type = other DNA
accccactgtggcggcgaga

SEQ ID NO: 6115 - DNA, 20 bp, synthetic construct
  source 1..20: mol_type = other DNA
gcagggagtgtgtgaactgt

SEQ ID NO: 6116 - DNA, 20 bp, synthetic construct
  source 1..20: mol_type = other DNA
acaggacgtccctgctctcc

SEQ ID NO: 6117 - DNA, 20 bp, synthetic construct
  source 1..20: mol_type = other DNA
gctcctacctgtgctggacc

SEQ ID NO: 6118 - DNA, 20 bp, synthetic construct
  source 1..20: mol_type = other DNA
cctccagagtgtggttgtgg

SEQ ID NO: 6119 - DNA, 20 bp, synthetic construct
  source 1..20: mol_type = other DNA
cttcacaatgtaagtggact

SEQ ID NO: 6120 - DNA, 20 bp, synthetic construct
  source 1..20: mol_type = other DNA
ccttccttcttcatagtcag

SEQ ID NO: 6121 - DNA, 20 bp, synthetic construct
  source 1..20: mol_type = other DNA
ccacaaccacactctggagg

SEQ ID NO: 6122 - DNA, 20 bp, synthetic construct
  source 1..20: mol_type = other DNA
agaccaccacaaccacactc

SEQ ID NO: 6123 - DNA, 20 bp, synthetic construct
  source 1..20: mol_type = other DNA
ggcagggagtgtgtgaactg

SEQ ID NO: 6124 - DNA, 20 bp, synthetic construct
  source 1..20: mol_type = other DNA
cccctgactatgaagaagga

SEQ ID NO: 6125 - DNA, 20 bp, synthetic construct
  source 1..20: mol_type = other DNA
cagggagtgtgtgaactgtg

SEQ ID NO: 6126 - DNA, 20 bp, synthetic construct
  source 1..20: mol_type = other DNA
ccctgtggggcaacggggaa

SEQ ID NO: 6127 - DNA, 20 bp, synthetic construct
  source 1..20: mol_type = other DNA
agaacttaccagccttcgct

SEQ ID NO: 6128 - DNA, 20 bp, synthetic construct
  source 1..20: mol_type = other DNA
gcgcactcaccgtggtgggt

SEQ ID NO: 6129 - DNA, 20 bp, synthetic construct
  source 1..20: mol_type = other DNA
ggcattcctcctccagagtg

SEQ ID NO: 6130 - DNA, 20 bp, synthetic construct
  source 1..20: mol_type = other DNA
ctggaggaggaatgccaatg

SEQ ID NO: 6131 - DNA, 20 bp, synthetic construct
  source 1..20: mol_type = other DNA
aagcttgtagtagagcccac

SEQ ID NO: 6132 - DNA, 20 bp, synthetic construct
  source 1..20: mol_type = other DNA
gaacttaccagccttcgctt

SEQ ID NO: 6133 - DNA, 20 bp, synthetic construct
  source 1..20: mol_type = other DNA
ggtggtctgacagttcgcac

SEQ ID NO: 6134 - DNA, 20 bp, synthetic construct
  source 1..20: mol_type = other DNA
cactcaccgtggtgggtcgg

SEQ ID NO: 6135 - DNA, 20 bp, synthetic construct
  source 1..20: mol_type = other DNA
tctggaggaggaatgccaat

SEQ ID NO: 6136 - DNA, 20 bp, synthetic construct
  source 1..20: mol_type = other DNA
caacctcgaccccactgtgg

SEQ ID NO: 6137 - DNA, 20 bp, synthetic construct
  source 1..20: mol_type = other DNA
gcagtacccgctgccggagg

SEQ ID NO: 6138 - DNA, 20 bp, synthetic construct
  source 1..20: mol_type = other DNA
gggctctatcacaaaatgaa

SEQ ID NO: 6139 - DNA, 20 bp, synthetic construct
  source 1..20: mol_type = other DNA
attgcagacagggtccccat

SEQ ID NO: 6140 - DNA, 20 bp, synthetic construct
  source 1..20: mol_type = other DNA
cgaggccatggaggtgacgg

SEQ ID NO: 6141 - DNA, 20 bp, synthetic construct
  source 1..20: mol_type = other DNA
cgcggcgcagtacccgctgc

SEQ ID NO: 6142 - DNA, 20 bp, synthetic construct
  source 1..20: mol_type = other DNA
agagcccgcaggcgttgcac

SEQ ID NO: 6143 - DNA, 20 bp, synthetic construct
  source 1..20: mol_type = other DNA
ccctcattaagcccaagcga

SEQ ID NO: 6144 - DNA, 20 bp, synthetic construct
  source 1..20: mol_type = other DNA
cagtctgcagccaggagagc

SEQ ID NO: 6145 - DNA, 20 bp, synthetic construct
  source 1..20: mol_type = other DNA
cctcctccagagtgtggttg

SEQ ID NO: 6146 - DNA, 20 bp, synthetic construct
  source 1..20: mol_type = other DNA
tccagggggaggcggtgtgg

SEQ ID NO: 6147 - DNA, 20 bp, synthetic construct
  source 1..20: mol_type = other DNA
ctctggaggaggaatgccaa

SEQ ID NO: 6148 - DNA, 20 bp, synthetic construct
  source 1..20: mol_type = other DNA
tcgccgccacagtggggtcg

SEQ ID NO: 6149 - DNA, 20 bp, synthetic construct
  source 1..20: mol_type = other DNA
gcccacaggcattgcagaca

SEQ ID NO: 6150 - DNA, 20 bp, synthetic construct
  source 1..20: mol_type = other DNA
ccaggcagagaacttactca

SEQ ID NO: 6151 - DNA, 20 bp, synthetic construct
  source 1..20: mol_type = other DNA
gccggtccaccaggatgggt

SEQ ID NO: 6152 - DNA, 20 bp, synthetic construct
  source 1..20: mol_type = other DNA
gctgtatgactttgaggccc

SEQ ID NO: 6153 - DNA, 20 bp, synthetic construct
  source 1..20: mol_type = other DNA
cgaaggcctctctcgacacc

SEQ ID NO: 6154 - DNA, 20 bp, synthetic construct
  source 1..20: mol_type = other DNA
atagctccaacccatcctgg

SEQ ID NO: 6155 - DNA, 20 bp, synthetic construct
  source 1..20: mol_type = other DNA
agacccagtgcagctccagg

SEQ ID NO: 6156 - DNA, 20 bp, synthetic construct
  source 1..20: mol_type = other DNA
ggccctggaggatgacgagc

SEQ ID NO: 6157 - DNA, 20 bp, synthetic construct
  source 1..20: mol_type = other DNA
agtgcagctccaggcggcag

SEQ ID NO: 6158 - DNA, 20 bp, synthetic construct
  source 1..20: mol_type = other DNA
cctcttccctgccaactacg

SEQ ID NO: 6159 - DNA, 20 bp, synthetic construct
  source 1..20: mol_type = other DNA
agacagaacccgagaagacc

SEQ ID NO: 6160 - DNA, 20 bp, synthetic construct
  source 1..20: mol_type = other DNA
ggccagccagagctccccag

SEQ ID NO: 6161 - DNA, 20 bp, synthetic construct
  source 1..20: mol_type = other DNA
ggccttcgtgaaaccatctg

SEQ ID NO: 6162 - DNA, 20 bp, synthetic construct
  source 1..20: mol_type = other DNA
ccagtgcagctccaggcggc

SEQ ID NO: 6163 - DNA, 20 bp, synthetic construct
  source 1..20: mol_type = other DNA
caggcagagaacttactcat

SEQ ID NO: 6164 - DNA, 20 bp, synthetic construct
  source 1..20: mol_type = other DNA
gttttgaaggtaggtgacct

SEQ ID NO: 6165 - DNA, 20 bp, synthetic construct
  source 1..20: mol_type = other DNA
cagatacctggtggaaatgg

SEQ ID NO: 6166 - DNA, 20 bp, synthetic construct
  source 1..20: mol_type = other DNA
ccccacagatggtttcacga

SEQ ID NO: 6167 - DNA, 20 bp, synthetic construct
  source 1..20: mol_type = other DNA
tcacactggagatgttttga

SEQ ID NO: 6168 - DNA, 20 bp, synthetic construct
  source 1..20: mol_type = other DNA
gccttcgtgaaaccatctgt

SEQ ID NO: 6169 - DNA, 20 bp, synthetic construct
  source 1..20: mol_type = other DNA
cagtgcagctccaggcggca

SEQ ID NO: 6170 - DNA, 20 bp, synthetic construct
  source 1..20: mol_type = other DNA
gtgcaggcggccggtccacc

SEQ ID NO: 6171 - DNA, 20 bp, synthetic construct
  source 1..20: mol_type = other DNA
ccccagctcgtcatcctcca

SEQ ID NO: 6172 - DNA, 20 bp, synthetic construct
  source 1..20: mol_type = other DNA
gttcccatacccctgccgcc

SEQ ID NO: 6173 - DNA, 20 bp, synthetic construct
  source 1..20: mol_type = other DNA
tgttttgaaggtaggtgacc

SEQ ID NO: 6174 - DNA, 20 bp, synthetic construct
  source 1..20: mol_type = other DNA
cccccaacagcgagtgcggt

SEQ ID NO: 6175 - DNA, 20 bp, synthetic construct
  source 1..20: mol_type = other DNA
agaggcccagcttgttgtgc

SEQ ID NO: 6176 - DNA, 20 bp, synthetic construct
  source 1..20: mol_type = other DNA
cgggccagccagagctcccc

SEQ ID NO: 6177 - DNA, 20 bp, synthetic construct
  source 1..20: mol_type = other DNA
aggcggccggtccaccagga

SEQ ID NO: 6178 - DNA, 20 bp, synthetic construct
  source 1..20: mol_type = other DNA
agaagtcccctggggagctc

SEQ ID NO: 6179 - DNA, 20 bp, synthetic construct
  source 1..20: mol_type = other DNA
cagatacttacttgggaaac

SEQ ID NO: 6180 - DNA, 20 bp, synthetic construct
  source 1..20: mol_type = other DNA
gcagcaccaccatttccacc

SEQ ID NO: 6181 - DNA, 20 bp, synthetic construct
  source 1..20: mol_type = other DNA
tctaccagcttatttaggga

SEQ ID NO: 6182 - DNA, 20 bp, synthetic construct
  source 1..20: mol_type = other DNA
cagcttgttgtgcaggcggc

SEQ ID NO: 6183 - DNA, 20 bp, synthetic construct
  source 1..20: mol_type = other DNA
ggcggccggtccaccaggat

SEQ ID NO: 6184 - DNA, 20 bp, synthetic construct
  source 1..20: mol_type = other DNA
ggcccaccgcactcgctgtt

SEQ ID NO: 6185 - DNA, 20 bp, synthetic construct
  source 1..20: mol_type = other DNA
cttcgtgaaaccatctgtgg

SEQ ID NO: 6186 - DNA, 20 bp, synthetic construct
  source 1..20: mol_type = other DNA
tgggtgccacgtagttggca

SEQ ID NO: 6187 - DNA, 20 bp, synthetic construct
  source 1..20: mol_type = other DNA
ttgaacgtcatcctcatgcc

SEQ ID NO: 6188 - DNA, 20 bp, synthetic construct
  source 1..20: mol_type = other DNA
ccttcgtgaaaccatctgtg

SEQ ID NO: 6189 - DNA, 20 bp, synthetic construct
  source 1..20: mol_type = other DNA
gccctggaggatgacgagct

SEQ ID NO: 6190 - DNA, 20 bp, synthetic construct
  source 1..20: mol_type = other DNA
acagagatggagaagtcccc

SEQ ID NO: 6191 - DNA, 20 bp, synthetic construct
  source 1..20: mol_type = other DNA
gggccagccagagctcccca

SEQ ID NO: 6192 - DNA, 20 bp, synthetic construct
  source 1..20: mol_type = other DNA
cccaccgcactcgctgttgg

SEQ ID NO: 6193 - DNA, 20 bp, synthetic construct
  source 1..20: mol_type = other DNA
ggccgcctgcacaacaagct

SEQ ID NO: 6194 - DNA, 20 bp, synthetic construct
  source 1..20: mol_type = other DNA
ccgccttaaaccactcctct

SEQ ID NO: 6195 - DNA, 20 bp, synthetic construct
  source 1..20: mol_type = other DNA
acagcgagtgcggtgggccc

SEQ ID NO: 6196 - DNA, 20 bp, synthetic construct
  source 1..20: mol_type = other DNA
ccatgagtaagttctctgcc

SEQ ID NO: 6197 - DNA, 20 bp, synthetic construct
  source 1..20: mol_type = other DNA
taaaatctacatggaagaaa

SEQ ID NO: 6198 - DNA, 20 bp, synthetic construct
  source 1..20: mol_type = other DNA
gacgagctggggttccacag

SEQ ID NO: 6199 - DNA, 20 bp, synthetic construct
  source 1..20: mol_type = other DNA
gggcccaccgcactcgctgt

SEQ ID NO: 6200 - DNA, 20 bp, synthetic construct
  source 1..20: mol_type = other DNA
ccctggaggatgacgagctg

SEQ ID NO: 6201 - DNA, 20 bp, synthetic construct
  source 1..20: mol_type = other DNA
agagatggagaagtcccctg

SEQ ID NO: 6202 - DNA, 20 bp, synthetic construct
  source 1..20: mol_type = other DNA
cctcaaagtcatacagcgcc

SEQ ID NO: 6203 - DNA, 20 bp, synthetic construct
  source 1..20: mol_type = other DNA
tgtttctaggaacgccgagg

SEQ ID NO: 6204 - DNA, 20 bp, synthetic construct
  source 1..20: mol_type = other DNA
cagggaggcccacacctcag

SEQ ID NO: 6205 - DNA, 20 bp, synthetic construct
  source 1..20: mol_type = other DNA
ccacgtagttggcagggaag

SEQ ID NO: 6206 - DNA, 20 bp, synthetic construct
  source 1..20: mol_type = other DNA
tccatgctgtaacgtgaagc

SEQ ID NO: 6207 - DNA, 20 bp, synthetic construct
  source 1..20: mol_type = other DNA
cctccaccacctccccgctg

SEQ ID NO: 6208 - DNA, 20 bp, synthetic construct
  source 1..20: mol_type = other DNA
ggcccagcttgttgtgcagg

SEQ ID NO: 6209 - DNA, 20 bp, synthetic construct
  source 1..20: mol_type = other DNA
tcccccaacagcgagtgcgg

SEQ ID NO: 6210 - DNA, 20 bp, synthetic construct
  source 1..20: mol_type = other DNA
aaggtcatgcgagacaacaa

SEQ ID NO: 6211 - DNA, 20 bp, synthetic construct
  source 1..20: mol_type = other DNA
tggatagctccaacccatcc

SEQ ID NO: 6212 - DNA, 20 bp, synthetic construct
  source 1..20: mol_type = other DNA
accccagctcgtcatcctcc

SEQ ID NO: 6213 - DNA, 20 bp, synthetic construct
  source 1..20: mol_type = other DNA
gaacttactcatgggcaagg

SEQ ID NO: 6214 - DNA, 20 bp, synthetic construct
  source 1..20: mol_type = other DNA
tggtcagtacctgacagaga

SEQ ID NO: 6215 - DNA, 20 bp, synthetic construct
  source 1..20: mol_type = other DNA
ccaagaggagtggtttaagg

SEQ ID NO: 6216 - DNA, 20 bp, synthetic construct
  source 1..20: mol_type = other DNA
ccaccaggtatctggaaaga

SEQ ID NO: 6217 - DNA, 20 bp, synthetic construct
  source 1..20: mol_type = other DNA
gtagtctaccagcttattta

SEQ ID NO: 6218 - DNA, 20 bp, synthetic construct
  source 1..20: mol_type = other DNA
cggggaggtggtggaggtcc

SEQ ID NO: 6219 - DNA, 20 bp, synthetic construct
  source 1..20: mol_type = other DNA
acgagctggggttccacagc

SEQ ID NO: 6220 - DNA, 20 bp, synthetic construct
  source 1..20: mol_type = other DNA
gcccaccgcactcgctgttg

SEQ ID NO: 6221 - DNA, 20 bp, synthetic construct
  source 1..20: mol_type = other DNA
ctcaaagtcatacagcgccc

SEQ ID NO: 6222 - DNA, 20 bp, synthetic construct
  source 1..20: mol_type = other DNA
gtatgactttgaggccctgg

SEQ ID NO: 6223 - DNA, 20 bp, synthetic construct
  source 1..20: mol_type = other DNA
cagagatggagaagtcccct

SEQ ID NO: 6224 - DNA, 20 bp, synthetic construct
  source 1..20: mol_type = other DNA
caaggtcatgcgagacaaca

SEQ ID NO: 6225 - DNA, 20 bp, synthetic construct
  source 1..20: mol_type = other DNA
aaggaagatctgcttctgtc

SEQ ID NO: 6226 - DNA, 20 bp, synthetic construct
  source 1..20: mol_type = other DNA
cgagctggggttccacagcg

SEQ ID NO: 6227 - DNA, 20 bp, synthetic construct
  source 1..20: mol_type = other DNA
gatgaactgagctttcacac

SEQ ID NO: 6228 - DNA, 20 bp, synthetic construct
  source 1..20: mol_type = other DNA
ggagcatacctggtcttctc

SEQ ID NO: 6229 - DNA, 20 bp, synthetic construct
  source 1..20: mol_type = other DNA
gctccaggcggcaggggtat

SEQ ID NO: 6230 - DNA, 20 bp, synthetic construct
  source 1..20: mol_type = other DNA
ttactcatgggcaaggaggt

SEQ ID NO: 6231 - DNA, 20 bp, synthetic construct
  source 1..20: mol_type = other DNA
ttttgaaggtaggtgacctg

SEQ ID NO: 6232 - DNA, 20 bp, synthetic construct
  source 1..20: mol_type = other DNA
catggataaaatctccccgg

SEQ ID NO: 6233 - DNA, 20 bp, synthetic construct
  source 1..20: mol_type = other DNA
cccagctctccatcctcctg

SEQ ID NO: 6234 - DNA, 20 bp, synthetic construct
  source 1..20: mol_type = other DNA
aagctcctttccaccagttg

SEQ ID NO: 6235 - DNA, 20 bp, synthetic construct
  source 1..20: mol_type = other DNA
aattgaacttcaccacccag

SEQ ID NO: 6236 - DNA, 20 bp, synthetic construct
  source 1..20: mol_type = other DNA
acagagagggagaagtcccc

SEQ ID NO: 6237 - DNA, 20 bp, synthetic construct
  source 1..20: mol_type = other DNA
cacttcaaggtgctccgaga

SEQ ID NO: 6238 - DNA, 20 bp, synthetic construct
  source 1..20: mol_type = other DNA
cacccagaggaagtacttcc

SEQ ID NO: 6239 - DNA, 20 bp, synthetic construct
  source 1..20: mol_type = other DNA
gcccagctctccatcctcct

SEQ ID NO: 6240 - DNA, 20 bp, synthetic construct
  source 1..20: mol_type = other DNA
aagagggcctggacgtatgt

SEQ ID NO: 6241 - DNA, 20 bp, synthetic construct
  source 1..20: mol_type = other DNA
agcccagctctccatcctcc

SEQ ID NO: 6242 - DNA, 20 bp, synthetic construct
  source 1..20: mol_type = other DNA
gatggtaagcctcatcacag

SEQ ID NO: 6243 - DNA, 20 bp, synthetic construct
  source 1..20: mol_type = other DNA
tctccaccacggctttctgg

SEQ ID NO: 6244 - DNA, 20 bp, synthetic construct
  source 1..20: mol_type = other DNA
gagccctgagagaggagggg

SEQ ID NO: 6245 - DNA, 20 bp, synthetic construct
  source 1..20: mol_type = other DNA
ctaaaggcggggcattgccc

SEQ ID NO: 6246 - DNA, 20 bp, synthetic construct
  source 1..20: mol_type = other DNA
gtacattgtataaagaccac

SEQ ID NO: 6247 - DNA, 20 bp, synthetic construct
  source 1..20: mol_type = other DNA
tctccatttacaaaaactga

SEQ ID NO: 6248 - DNA, 20 bp, synthetic construct
  source 1..20: mol_type = other DNA
gccgaagctccagtagtcga

SEQ ID NO: 6249 - DNA, 20 bp, synthetic construct
  source 1..20: mol_type = other DNA
gctgacccaccccaatgtgg

SEQ ID NO: 6250 - DNA, 20 bp, synthetic construct
  source 1..20: mol_type = other DNA
gtcactcagcaaggtgagga

SEQ ID NO: 6251 - DNA, 20 bp, synthetic construct
  source 1..20: mol_type = other DNA
gcatgagaatcacttgaacc

SEQ ID NO: 6252 - DNA, 20 bp, synthetic construct
  source 1..20: mol_type = other DNA
gcagtactccatggccagca

SEQ ID NO: 6253 - DNA, 20 bp, synthetic construct
  source 1..20: mol_type = other DNA
cagtactccatggccagcag

SEQ ID NO: 6254 - DNA, 20 bp, synthetic construct
  source 1..20: mol_type = other DNA
atccgatggcacaatcaggt

SEQ ID NO: 6255 - DNA, 20 bp, synthetic construct
  source 1..20: mol_type = other DNA
gtggagctctgtgggcgggt

SEQ ID NO: 6256 - DNA, 20 bp, synthetic construct
  source 1..20: mol_type = other DNA
cagccattgggcccatacgt

SEQ ID NO: 6257 - DNA, 20 bp, synthetic construct
  source 1..20: mol_type = other DNA
accaccgctctcggttccgg

SEQ ID NO: 6258 - DNA, 20 bp, synthetic construct
  source 1..20: mol_type = other DNA
acttcttaccaggtactgca

SEQ ID NO: 6259 - DNA, 20 bp, synthetic construct
  source 1..20: mol_type = other DNA
ctgcagtacctggtaagaag

SEQ ID NO: 6260 - DNA, 20 bp, synthetic construct
  source 1..20: mol_type = other DNA
atatgccaaggagctggatc

SEQ ID NO: 6261 - DNA, 20 bp, synthetic construct
  source 1..20: mol_type = other DNA
acactcactgatcccaaact

SEQ ID NO: 6262 - DNA, 20 bp, synthetic construct
  source 1..20: mol_type = other DNA
ggcagtactccatggccagc

SEQ ID NO: 6263 - DNA, 20 bp, synthetic construct
  source 1..20: mol_type = other DNA
tatgccaaggagctggatca

SEQ ID NO: 6264 - DNA, 20 bp, synthetic construct
  source 1..20: mol_type = other DNA
caccaccgctctcggttccg

SEQ ID NO: 6265 - DNA, 20 bp, synthetic construct
  source 1..20: mol_type = other DNA
tgccatcaagcagtgccggc

SEQ ID NO: 6266 - DNA, 20 bp, synthetic construct
  source 1..20: mol_type = other DNA
tgcagtacctggtaagaagt

SEQ ID NO: 6267 - DNA, 20 bp, synthetic construct
  source 1..20: mol_type = other DNA
tttaccaatgtcactcagca

SEQ ID NO: 6268 - DNA, 20 bp, synthetic construct
  source 1..20: mol_type = other DNA
tattgacctaggatatgcca

SEQ ID NO: 6269 - DNA, 20 bp, synthetic construct
  source 1..20: mol_type = other DNA
cttacctgttaagattattg

SEQ ID NO: 6270 - DNA, 20 bp, synthetic construct
  source 1..20: mol_type = other DNA
cacttgggacagcagaagtc

SEQ ID NO: 6271 - DNA, 20 bp, synthetic construct
  source 1..20: mol_type = other DNA
cccaggtgacgtccttgctc

SEQ ID NO: 6272 - DNA, 20 bp, synthetic construct
  source 1..20: mol_type = other DNA
ccccgagcaaggacgtcacc

SEQ ID NO: 6273 - DNA, 20 bp, synthetic construct
  source 1..20: mol_type = other DNA
ctcctgcagctccccgagca

SEQ ID NO: 6274 - DNA, 20 bp, synthetic construct
  source 1..20: mol_type = other DNA
gctcactcaccaggggcggg

SEQ ID NO: 6275 - DNA, 20 bp, synthetic construct
  source 1..20: mol_type = other DNA
gcagcagcagcacagcgtgc

SEQ ID NO: 6276 - DNA, 20 bp, synthetic construct
  source 1..20: mol_type = other DNA
ggaactccttctcctccctc

SEQ ID NO: 6277 - DNA, 20 bp, synthetic construct
  source 1..20: mol_type = other DNA
ccgccttgtagatatccgcc

SEQ ID NO: 6278 - DNA, 20 bp, synthetic construct
  source 1..20: mol_type = other DNA
gtccttgctcggggagctgc

SEQ ID NO: 6279 - DNA, 20 bp, synthetic construct
  source 1..20: mol_type = other DNA
cccgagcaaggacgtcacct

SEQ ID NO: 6280 - DNA, 20 bp, synthetic construct
  source 1..20: mol_type = other DNA
ccagctgtcaggagtcggcc

SEQ ID NO: 6281 - DNA, 20 bp, synthetic construct
  source 1..20: mol_type = other DNA
ccaggtgacgtccttgctcg

SEQ ID NO: 6282 - DNA, 20 bp, synthetic construct
  source 1..20: mol_type = other DNA
ctcacctgggccttcagcac

SEQ ID NO: 6283 - DNA, 20 bp, synthetic construct
  source 1..20: mol_type = other DNA
tctgcagggtgtccatatca

SEQ ID NO: 6284 - DNA, 20 bp, synthetic construct
  source 1..20: mol_type = other DNA
tcttcagatcgagcttctcc

SEQ ID NO: 6285 - DNA, 20 bp, synthetic construct
  source 1..20: mol_type = other DNA
ccagcttcctcctgaggaaa

SEQ ID NO: 6286 - DNA, 20 bp, synthetic construct
  source 1..20: mol_type = other DNA
gagtagggccggccagtgca

SEQ ID NO: 6287 - DNA, 20 bp, synthetic construct
  source 1..20: mol_type = other DNA
caccctgcagatacatgtca

SEQ ID NO: 6288 - DNA, 20 bp, synthetic construct
  source 1..20: mol_type = other DNA
gtggaccagctgcgcatgca

SEQ ID NO: 6289 - DNA, 20 bp, synthetic construct
  source 1..20: mol_type = other DNA
ctgcagggtgtccatatcag

SEQ ID NO: 6290 - DNA, 20 bp, synthetic construct
  source 1..20: mol_type = other DNA
caaggcctctgtgaaagccc

SEQ ID NO: 6291 - DNA, 20 bp, synthetic construct
  source 1..20: mol_type = other DNA
ggagctcttgattctcctcc

SEQ ID NO: 6292 - DNA, 20 bp, synthetic construct
  source 1..20: mol_type = other DNA
ctcaccgaccctccagagcc

SEQ ID NO: 6293 - DNA, 20 bp, synthetic construct
  source 1..20: mol_type = other DNA
ctgcaggagctccttcttct

SEQ ID NO: 6294 - DNA, 20 bp, synthetic construct
  source 1..20: mol_type = other DNA
gctgctccagctgctcctgc

SEQ ID NO: 6295 - DNA, 20 bp, synthetic construct
  source 1..20: mol_type = other DNA
ttgggacagcagaagtcagg

SEQ ID NO: 6296 - DNA, 20 bp, synthetic construct
  source 1..20: mol_type = other DNA
gcgagtgagtgcgaccactg

SEQ ID NO: 6297 - DNA, 20 bp, synthetic construct
  source 1..20: mol_type = other DNA
gcccaggtgacgtccttgct

SEQ ID NO: 6298 - DNA, 20 bp, synthetic construct
  source 1..20: mol_type = other DNA
gccagcttcctcctgaggaa

SEQ ID NO: 6299 - DNA, 20 bp, synthetic construct
  source 1..20: mol_type = other DNA
gcagcagatggctgaggaca

SEQ ID NO: 6300 - DNA, 20 bp, synthetic construct
  source 1..20: mol_type = other DNA
ctgtcaggagtcggccaggt

SEQ ID NO: 6301 - DNA, 20 bp, synthetic construct
  source 1..20: mol_type = other DNA
ccaggcggatatctacaagg

SEQ ID NO: 6302 - DNA, 20 bp, synthetic construct
  source 1..20: mol_type = other DNA
aggcggacttccaggctgag

SEQ ID NO: 6303 - DNA, 20 bp, synthetic construct
  source 1..20: mol_type = other DNA
gcaggagagccagagtcgct

SEQ ID NO: 6304 - DNA, 20 bp, synthetic construct
  source 1..20: mol_type = other DNA
ttgccaggcggatatctaca

SEQ ID NO: 6305 - DNA, 20 bp, synthetic construct
  source 1..20: mol_type = other DNA
tgtcatggagtgcattgagt

SEQ ID NO: 6306 - DNA, 20 bp, synthetic construct
  source 1..20: mol_type = other DNA
actgggccagcttcctcctg

SEQ ID NO: 6307 - DNA, 20 bp, synthetic construct
  source 1..20: mol_type = other DNA
cggcacatcaagctgcattc

SEQ ID NO: 6308 - DNA, 20 bp, synthetic construct
  source 1..20: mol_type = other DNA
taaggtctcacctgaaactt

SEQ ID NO: 6309 - DNA, 20 bp, synthetic construct
  source 1..20: mol_type = other DNA
gcacatcaagctgcattccg

SEQ ID NO: 6310 - DNA, 20 bp, synthetic construct
  source 1..20: mol_type = other DNA
gaagggccgttctcctggga

SEQ ID NO: 6311 - DNA, 20 bp, synthetic construct
  source 1..20: mol_type = other DNA
gcgtcctcaggtggccagtg

SEQ ID NO: 6312 - DNA, 20 bp, synthetic construct
  source 1..20: mol_type = other DNA
ccagctgcacaagccgctcg

SEQ ID NO: 6313 - DNA, 20 bp, synthetic construct
  source 1..20: mol_type = other DNA
gcagcttgatgtgccggagc

SEQ ID NO: 6314 - DNA, 20 bp, synthetic construct
  source 1..20: mol_type = other DNA
gcatttgaagggcttctccc

SEQ ID NO: 6315 - DNA, 20 bp, synthetic construct
  source 1..20: mol_type = other DNA
caactacgcctgccgccgga

SEQ ID NO: 6316 - DNA, 20 bp, synthetic construct
  source 1..20: mol_type = other DNA
cactggaagggccgttctcc

SEQ ID NO: 6317 - DNA, 20 bp, synthetic construct
  source 1..20: mol_type = other DNA
ctcagataacctgaggacca

SEQ ID NO: 6318 - DNA, 20 bp, synthetic construct
  source 1..20: mol_type = other DNA
ggcacatcaagctgcattcc

SEQ ID NO: 6319 - DNA, 20 bp, synthetic construct
  source 1..20: mol_type = other DNA
ctcgtcgcacataacgcgag

SEQ ID NO: 6320 - DNA, 20 bp, synthetic construct
  source 1..20: mol_type = other DNA
ctcgcaggacgcgctccgcg

SEQ ID NO: 6321 - DNA, 20 bp, synthetic construct
  source 1..20: mol_type = other DNA
ggctttagctcatgtggaag

SEQ ID NO: 6322 - DNA, 20 bp, synthetic construct
  source 1..20: mol_type = other DNA
cccttccagtgcaatcagtg

SEQ ID NO: 6323 - DNA, 20 bp, synthetic construct
  source 1..20: mol_type = other DNA
acctgaggacgcactccggt

SEQ ID NO: 6324 - DNA, 20 bp, synthetic construct
  source 1..20: mol_type = other DNA
cgtcctcaggtggccagtga

SEQ ID NO: 6325 - DNA, 20 bp, synthetic construct
  source 1..20: mol_type = other DNA
tcacactttagttttccgtt

SEQ ID NO: 6326 - DNA, 20 bp, synthetic construct
  source 1..20: mol_type = other DNA
gttgcagaggtggcatttga

SEQ ID NO: 6327 - DNA, 20 bp, synthetic construct
  source 1..20: mol_type = other DNA
cccgcactgattgcactgga

SEQ ID NO: 6328 - DNA, 20 bp, synthetic construct
  source 1..20: mol_type = other DNA
cccagaagggcaacctgctc

SEQ ID NO: 6329 - DNA, 20 bp, synthetic construct
  source 1..20: mol_type = other DNA
acctaccggagtgcgtcctc

SEQ ID NO: 6330 - DNA, 20 bp, synthetic construct
  source 1..20: mol_type = other DNA
gaagccacactggtaaggcc

SEQ ID NO: 6331 - DNA, 20 bp, synthetic construct
  source 1..20: mol_type = other DNA
cggaatgcagcttgatgtgc

SEQ ID NO: 6332 - DNA, 20 bp, synthetic construct
  source 1..20: mol_type = other DNA
ggcggcaggcgtagttgcag

SEQ ID NO: 6333 - DNA, 20 bp, synthetic construct
  source 1..20: mol_type = other DNA
ggccacctgaggacgcactc

SEQ ID NO: 6334 - DNA, 20 bp, synthetic construct
  source 1..20: mol_type = other DNA
ccgcacatgttgcactcaaa

SEQ ID NO: 6335 - DNA, 20 bp, synthetic construct
  source 1..20: mol_type = other DNA
tctcggaggcggcgcgcagc

SEQ ID NO: 6336 - DNA, 20 bp, synthetic construct
  source 1..20: mol_type = other DNA
ccttttgagtgcaacatgtg

SEQ ID NO: 6337 - DNA, 20 bp, synthetic construct
  source 1..20: mol_type = other DNA
tcaggttatctgagaaagag

SEQ ID NO: 6338 - DNA, 20 bp, synthetic construct
  source 1..20: mol_type = other DNA
ccgcactgattgcactggaa

SEQ ID NO: 6339 - DNA, 20 bp, synthetic construct
  source 1..20: mol_type = other DNA
tgtgcgacgagaactcgtac

SEQ ID NO: 6340 - DNA, 20 bp, synthetic construct
  source 1..20: mol_type = other DNA
taccggagtgcgtcctcagg

SEQ ID NO: 6341 - DNA, 20 bp, synthetic construct
  source 1..20: mol_type = other DNA
actggaagggccgttctcct

SEQ ID NO: 6342 - DNA, 20 bp, synthetic construct
  source 1..20: mol_type = other DNA
ttgcagaggtggcatttgaa

SEQ ID NO: 6343 - DNA, 20 bp, synthetic construct
  source 1..20: mol_type = other DNA
gttcacaaaagaagccacac

SEQ ID NO: 6344 - DNA, 20 bp, synthetic construct
  source 1..20: mol_type = other DNA
cagtgagggcgtccctccgg

SEQ ID NO: 6345 - DNA, 20 bp, synthetic construct
  source 1..20: mol_type = other DNA
ccttccagtgcaatcagtgc

SEQ ID NO: 6346 - DNA, 20 bp, synthetic construct
  source 1..20: mol_type = other DNA
acgagaactcgtaccggtcc

SEQ ID NO: 6347 - DNA, 20 bp, synthetic construct
  source 1..20: mol_type = other DNA
ggcaggcgtagttgcagagg

SEQ ID NO: 6348 - DNA, 20 bp, synthetic construct
  source 1..20: mol_type = other DNA
gcaactacgcctgccgccgg

SEQ ID NO: 6349 - DNA, 20 bp, synthetic construct
  source 1..20: mol_type = other DNA
tgttgcactcaaaaggatca

SEQ ID NO: 6350 - DNA, 20 bp, synthetic construct
  source 1..20: mol_type = other DNA
aggccccgcactgattgcac

SEQ ID NO: 6351 - DNA, 20 bp, synthetic construct
  source 1..20: mol_type = other DNA
acgcactccggtaggtcccc

SEQ ID NO: 6352 - DNA, 20 bp, synthetic construct
  source 1..20: mol_type = other DNA
cgttctcctgggacggagag

SEQ ID NO: 6353 - DNA, 20 bp, synthetic construct
  source 1..20: mol_type = other DNA
cgtgatccaggaagagcacc

SEQ ID NO: 6354 - DNA, 20 bp, synthetic construct
  source 1..20: mol_type = other DNA
cttccagtgcaatcagtgcg

SEQ ID NO: 6355 - DNA, 20 bp, synthetic construct
  source 1..20: mol_type = other DNA
ccattccagtgtaatcagtg

SEQ ID NO: 6356 - DNA, 20 bp, synthetic construct
  source 1..20: mol_type = other DNA
tctcctagccgctcactcag

SEQ ID NO: 6357 - DNA, 20 bp, synthetic construct
  source 1..20: mol_type = other DNA
tctcttcccacattgtccgg

SEQ ID NO: 6358 - DNA, 20 bp, synthetic construct
  source 1..20: mol_type = other DNA
tcctgcctcgtcacaacaac

SEQ ID NO: 6359 - DNA, 20 bp, synthetic construct
  source 1..20: mol_type = other DNA
cccttacctgcctggcagcc

SEQ ID NO: 6360 - DNA, 20 bp, synthetic construct
  source 1..20: mol_type = other DNA
ttttcaaatacagacagaaa

SEQ ID NO: 6361 - DNA, 20 bp, synthetic construct
  source 1..20: mol_type = other DNA
ttctactcttcctcctgtag

SEQ ID NO: 6362 - DNA, 20 bp, synthetic construct
  source 1..20: mol_type = other DNA
cctggctgccaggcaggtaa

SEQ ID NO: 6363 - DNA, 20 bp, synthetic construct
  source 1..20: mol_type = other DNA
catatttacaacagagtacc

SEQ ID NO: 6364 - DNA, 20 bp, synthetic construct
  source 1..20: mol_type = other DNA
aacctgaagaacagaaagaa

SEQ ID NO: 6365 - DNA, 20 bp, synthetic construct
  source 1..20: mol_type = other DNA
tgaggcttctcttcacctgg

SEQ ID NO: 6366 - DNA, 20 bp, synthetic construct
  source 1..20: mol_type = other DNA
gacagaaatggctgcaacca

SEQ ID NO: 6367 - DNA, 20 bp, synthetic construct
  source 1..20: mol_type = other DNA
agagagaatttatcatttcg

SEQ ID NO: 6368 - DNA, 20 bp, synthetic construct
  source 1..20: mol_type = other DNA
ggttccttccttgtaggcca

SEQ ID NO: 6369 - DNA, 20 bp, synthetic construct
  source 1..20: mol_type = other DNA
ggtttccgcagaataaaaag

SEQ ID NO: 6370 - DNA, 20 bp, synthetic construct
  source 1..20: mol_type = other DNA
tcactctatatgctctgtac

SEQ ID NO: 6371 - DNA, 20 bp, synthetic construct
  source 1..20: mol_type = other DNA
tctgtggcttcattttccca

SEQ ID NO: 6372 - DNA, 20 bp, synthetic construct
  source 1..20: mol_type = other DNA
gaatccatcttcctgaccct

SEQ ID NO: 6373 - DNA, 20 bp, synthetic construct
  source 1..20: mol_type = other DNA
ggcagcggagacagtaagtg

SEQ ID NO: 6374 - DNA, 20 bp, synthetic construct
  source 1..20: mol_type = other DNA
gaaatgataaattctctctg

SEQ ID NO: 6375 - DNA, 20 bp, synthetic construct
  source 1..20: mol_type = other DNA
gtggcttcattttcccatgg

SEQ ID NO: 6376 - DNA, 20 bp, synthetic construct
  source 1..20: mol_type = other DNA
gggactgctcacgttcatca

SEQ ID NO: 6377 - DNA, 20 bp, synthetic construct
  source 1..20: mol_type = other DNA
tcagtgcgtccagggataca

SEQ ID NO: 6378 - DNA, 20 bp, synthetic construct
  source 1..20: mol_type = other DNA
gaatttatcatttcgtggtg

SEQ ID NO: 6379 - DNA, 20 bp, synthetic construct
  source 1..20: mol_type = other DNA
tgtgtagagccctgtatccc

SEQ ID NO: 6380 - DNA, 20 bp, synthetic construct
  source 1..20: mol_type = other DNA
aagcctcaggcaagccccga

SEQ ID NO: 6381 - DNA, 20 bp, synthetic construct
  source 1..20: mol_type = other DNA
caccctacctggaaactgac

SEQ ID NO: 6382 - DNA, 20 bp, synthetic construct
  source 1..20: mol_type = other DNA
acctgttgttgtgacgaggc

SEQ ID NO: 6383 - DNA, 20 bp, synthetic construct
  source 1..20: mol_type = other DNA
tcacctgtgcatatgagctg

SEQ ID NO: 6384 - DNA, 20 bp, synthetic construct
  source 1..20: mol_type = other DNA
tttcacctgtgcatatgagc

SEQ ID NO: 6385 - DNA, 20 bp, synthetic construct
  source 1..20: mol_type = other DNA
atcagtgcgtccagggatac

SEQ ID NO: 6386 - DNA, 20 bp, synthetic construct
  source 1..20: mol_type = other DNA
ctgaggcttctcttcacctg

SEQ ID NO: 6387 - DNA, 20 bp, synthetic construct
  source 1..20: mol_type = other DNA
gagtggctagaaaatataga

SEQ ID NO: 6388 - DNA, 20 bp, synthetic construct
  source 1..20: mol_type = other DNA
gaaactctagccactcgtcc

SEQ ID NO: 6389 - DNA, 20 bp, synthetic construct
  source 1..20: mol_type = other DNA
agaccagtcagtttccaggt

SEQ ID NO: 6390 - DNA, 20 bp, synthetic construct
  source 1..20: mol_type = other DNA
gatcagcaggaaaacacagc

SEQ ID NO: 6391 - DNA, 20 bp, synthetic construct
  source 1..20: mol_type = other DNA
cactctcaggacggccttcg

SEQ ID NO: 6392 - DNA, 20 bp, synthetic construct
  source 1..20: mol_type = other DNA
cacttactgtctccgctgcc

SEQ ID NO: 6393 - DNA, 20 bp, synthetic construct
  source 1..20: mol_type = other DNA
atggctttgaatgtggcgtg

SEQ ID NO: 6394 - DNA, 20 bp, synthetic construct
  source 1..20: mol_type = other DNA
agtaccaggtagcaggtgag

SEQ ID NO: 6395 - DNA, 20 bp, synthetic construct
  source 1..20: mol_type = other DNA
gctcatatgcacaggtgaaa

SEQ ID NO: 6396 - DNA, 20 bp, synthetic construct
  source 1..20: mol_type = other DNA
caatgtcaatgcacaagctc

SEQ ID NO: 6397 - DNA, 20 bp, synthetic construct
  source 1..20: mol_type = other DNA
aggtgagcccactcaggagg

SEQ ID NO: 6398 - DNA, 20 bp, synthetic construct
  source 1..20: mol_type = other DNA
ggaggaggacgctgatcagc

SEQ ID NO: 6399 - DNA, 20 bp, synthetic construct
  source 1..20: mol_type = other DNA
acacgccacattcaaagcca

SEQ ID NO: 6400 - DNA, 20 bp, synthetic construct
  source 1..20: mol_type = other DNA
cctcgtcacaacaacaggtg

SEQ ID NO: 6401 - DNA, 20 bp, synthetic construct
  source 1..20: mol_type = other DNA
gtgacccgctttttattctg

SEQ ID NO: 6402 - DNA, 20 bp, synthetic construct
  source 1..20: mol_type = other DNA
caggtagggtggctcccttc

SEQ ID NO: 6403 - DNA, 20 bp, synthetic construct
  source 1..20: mol_type = other DNA
ttcacctgtgcatatgagct

SEQ ID NO: 6404 - DNA, 20 bp, synthetic construct
  source 1..20: mol_type = other DNA
gggtccaccttgtcttcccg

SEQ ID NO: 6405 - DNA, 20 bp, synthetic construct
  source 1..20: mol_type = other DNA
ggtccaccttgtcttcccgt

SEQ ID NO: 6406 - DNA, 20 bp, synthetic construct
  source 1..20: mol_type = other DNA
aatccatcttcctgaccctt

SEQ ID NO: 6407 - DNA, 20 bp, synthetic construct
  source 1..20: mol_type = other DNA
gccaggcaggtaagggcctg

SEQ ID NO: 6408 - DNA, 20 bp, synthetic construct
  source 1..20: mol_type = other DNA
ctgtgcatatgagctggggc

SEQ ID NO: 6409 - DNA, 20 bp, synthetic construct
  source 1..20: mol_type = other DNA
cggccactgtcaatagagag

SEQ ID NO: 6410 - DNA, 20 bp, synthetic construct
  source 1..20: mol_type = other DNA
agcgtctgcaaaatgaccca

SEQ ID NO: 6411 - DNA, 20 bp, synthetic construct
  source 1..20: mol_type = other DNA
ccaggcaggtaagggcctgt

SEQ ID NO: 6412 - DNA, 20 bp, synthetic construct
  source 1..20: mol_type = other DNA
tgccccactcacctgctacc

SEQ ID NO: 6413 - DNA, 20 bp, synthetic construct
  source 1..20: mol_type = other DNA
ggtttattatcagtgcgtcc

SEQ ID NO: 6414 - DNA, 20 bp, synthetic construct
  source 1..20: mol_type = other DNA
tggcgtgtgggatctctggc

SEQ ID NO: 6415 - DNA, 20 bp, synthetic construct
  source 1..20: mol_type = other DNA
gtggcgtgtgggatctctgg

SEQ ID NO: 6416 - DNA, 20 bp, synthetic construct
  source 1..20: mol_type = other DNA
gtttccgcagaataaaaagc

SEQ ID NO: 6417 - DNA, 20 bp, synthetic construct
  source 1..20: mol_type = other DNA
cagagcttgtgcattgacat

SEQ ID NO: 6418 - DNA, 20 bp, synthetic construct
  source 1..20: mol_type = other DNA
gaccagtcagtttccaggta

SEQ ID NO: 6419 - DNA, 20 bp, synthetic construct
  source 1..20: mol_type = other DNA
cttgcattcacagttcaaca

SEQ ID NO: 6420 - DNA, 20 bp, synthetic construct
  source 1..20: mol_type = other DNA
gtttattatcagtgcgtcca

SEQ ID NO: 6421 - DNA, 20 bp, synthetic construct
  source 1..20: mol_type = other DNA
ggattcatacctgctgatgt

SEQ ID NO: 6422 - DNA, 20 bp, synthetic construct
  source 1..20: mol_type = other DNA
tgtgcatatgagctggggct

SEQ ID NO: 6423 - DNA, 20 bp, synthetic construct
  source 1..20: mol_type = other DNA
gtggaccaagcgagccttcc

SEQ ID NO: 6424 - DNA, 20 bp, synthetic construct
  source 1..20: mol_type = other DNA
ctcacgttcatcatggtgcc

SEQ ID NO: 6425 - DNA, 20 bp, synthetic construct
  source 1..20: mol_type = other DNA
ggatacagggctctacacag

SEQ ID NO: 6426 - DNA, 20 bp, synthetic construct
  source 1..20: mol_type = other DNA
gccaggtgagcccactcagg

SEQ ID NO: 6427 - DNA, 20 bp, synthetic construct
  source 1..20: mol_type = other DNA
gattcatacctgctgatgtg

SEQ ID NO: 6428 - DNA, 20 bp, synthetic construct
  source 1..20: mol_type = other DNA
ctcgtcacaacaacaggtgc

SEQ ID NO: 6429 - DNA, 20 bp, synthetic construct
  source 1..20: mol_type = other DNA
agaatttatcatttcgtggt

SEQ ID NO: 6430 - DNA, 20 bp, synthetic construct
  source 1..20: mol_type = other DNA
aggaagtctcactctcagga

SEQ ID NO: 6431 - DNA, 20 bp, synthetic construct
  source 1..20: mol_type = other DNA
gcttcattttcccatggtgg

SEQ ID NO: 6432 - DNA, 20 bp, synthetic construct
  source 1..20: mol_type = other DNA
gcattgacattggttgtccc

SEQ ID NO: 6433 - DNA, 20 bp, synthetic construct
  source 1..20: mol_type = other DNA
caacatggttccttccttgt

SEQ ID NO: 6434 - DNA, 20 bp, synthetic construct
  source 1..20: mol_type = other DNA
gcctggctgccaggcaggta

SEQ ID NO: 6435 - DNA, 20 bp, synthetic construct
  source 1..20: mol_type = other DNA
gctgccaggtgagcccactc

SEQ ID NO: 6436 - DNA, 20 bp, synthetic construct
  source 1..20: mol_type = other DNA
tgagcagtccccacatcagc

SEQ ID NO: 6437 - DNA, 20 bp, synthetic construct
  source 1..20: mol_type = other DNA
taccaggtagcaggtgagtg

SEQ ID NO: 6438 - DNA, 20 bp, synthetic construct
  source 1..20: mol_type = other DNA
cccaggtgaagagaagcctc

SEQ ID NO: 6439 - DNA, 20 bp, synthetic construct
  source 1..20: mol_type = other DNA
gtaccaggtagcaggtgagt

SEQ ID NO: 6440 - DNA, 20 bp, synthetic construct
  source 1..20: mol_type = other DNA
gtaggccatggctttgaatg

SEQ ID NO: 6441 - DNA, 20 bp, synthetic construct
  source 1..20: mol_type = other DNA
actgcagggaacctccacca

SEQ ID NO: 6442 - DNA, 20 bp, synthetic construct
  source 1..20: mol_type = other DNA
ggaaggctcgcttggtccac

SEQ ID NO: 6443 - DNA, 20 bp, synthetic construct
  source 1..20: mol_type = other DNA
attttgcagacgctctcagc

SEQ ID NO: 6444 - DNA, 20 bp, synthetic construct
  source 1..20: mol_type = other DNA
ggccactgtcaatagagaga

SEQ ID NO: 6445 - DNA, 20 bp, synthetic construct
  source 1..20: mol_type = other DNA
cagtaagtgtggcatcacca

SEQ ID NO: 6446 - DNA, 20 bp, synthetic construct
  source 1..20: mol_type = other DNA
gcaaagtccaatgcagccag

SEQ ID NO: 6447 - DNA, 20 bp, synthetic construct
  source 1..20: mol_type = other DNA
gcgtctgcaaaatgacccac

SEQ ID NO: 6448 - DNA, 20 bp, synthetic construct
  source 1..20: mol_type = other DNA
ccgcacctgttgttgtgacg

SEQ ID NO: 6449 - DNA, 20 bp, synthetic construct
  source 1..20: mol_type = other DNA
gcagtgacctggaagatgga

SEQ ID NO: 6450 - DNA, 20 bp, synthetic construct
  source 1..20: mol_type = other DNA
attggttgtcccaggacgag

SEQ ID NO: 6451 - DNA, 20 bp, synthetic construct
  source 1..20: mol_type = other DNA
gagaatttatcatttcgtgg

SEQ ID NO: 6452 - DNA, 20 bp, synthetic construct
  source 1..20: mol_type = other DNA
cagccccagctcatatgcac

SEQ ID NO: 6453 - DNA, 20 bp, synthetic construct
  source 1..20: mol_type = other DNA
cagtcagtttccaggtaggg

SEQ ID NO: 6454 - DNA, 20 bp, synthetic construct
  source 1..20: mol_type = other DNA
ccctgcagtgacctggaaga

SEQ ID NO: 6455 - DNA, 20 bp, synthetic construct
  source 1..20: mol_type = other DNA
ggaggttccctgcagtgacc

SEQ ID NO: 6456 - DNA, 20 bp, synthetic construct
  source 1..20: mol_type = other DNA
ctgcagggaacctccaccat

SEQ ID NO: 6457 - DNA, 20 bp, synthetic construct
  source 1..20: mol_type = other DNA
gggccgccattacatccaca

SEQ ID NO: 6458 - DNA, 20 bp, synthetic construct
  source 1..20: mol_type = other DNA
cccagtatgagtttcaggtg

SEQ ID NO: 6459 - DNA, 20 bp, synthetic construct
  source 1..20: mol_type = other DNA
ccagtatgagtttcaggtgc

SEQ ID NO: 6460 - DNA, 20 bp, synthetic construct
  source 1..20: mol_type = other DNA
gagttcttggagggacaagt

SEQ ID NO: 6461 - DNA, 20 bp, synthetic construct
  source 1..20: mol_type = other DNA
ccactactttgaaagacacc

SEQ ID NO: 6462 - DNA, 20 bp, synthetic construct
  source 1..20: mol_type = other DNA
ctggcaggcctctatctcca

SEQ ID NO: 6463 - DNA, 20 bp, synthetic construct
  source 1..20: mol_type = other DNA
cccagcttatgttgcatctg

SEQ ID NO: 6464 - DNA, 20 bp, synthetic construct
  source 1..20: mol_type = other DNA
agatgtgagtagcccaccca

SEQ ID NO: 6465 - DNA, 20 bp, synthetic construct
  source 1..20: mol_type = other DNA
tgcatctgtgggtctccacg

SEQ ID NO: 6466 - DNA, 20 bp, synthetic construct
  source 1..20: mol_type = other DNA
ttgggaaggacaccattccg

SEQ ID NO: 6467 - DNA, 20 bp, synthetic construct
  source 1..20: mol_type = other DNA
gaggatcaggttgcaggccc

SEQ ID NO: 6468 - DNA, 20 bp, synthetic construct
  source 1..20: mol_type = other DNA
gactcaccgtctgtccggcc

SEQ ID NO: 6469 - DNA, 20 bp, synthetic construct
  source 1..20: mol_type = other DNA
agtgcctgccgggcaagatg

SEQ ID NO: 6470 - DNA, 20 bp, synthetic construct
  source 1..20: mol_type = other DNA
cagttgacatcgtcaccctg

SEQ ID NO: 6471 - DNA, 20 bp, synthetic construct
  source 1..20: mol_type = other DNA
aggacaaagcctgcaggtac

SEQ ID NO: 6472 - DNA, 20 bp, synthetic construct
  source 1..20: mol_type = other DNA
aagtaggcatcagtgttcag

SEQ ID NO: 6473 - DNA, 20 bp, synthetic construct
  source 1..20: mol_type = other DNA
ccccgctgaggcccacgagg

SEQ ID NO: 6474 - DNA, 20 bp, synthetic construct
  source 1..20: mol_type = other DNA
ggtcagtttctgagactgca

SEQ ID NO: 6475 - DNA, 20 bp, synthetic construct
  source 1..20: mol_type = other DNA
tgtagacagatggccagggt

SEQ ID NO: 6476 - DNA, 20 bp, synthetic construct
  source 1..20: mol_type = other DNA
acttctagtggcgagatctc

SEQ ID NO: 6477 - DNA, 20 bp, synthetic construct
  source 1..20: mol_type = other DNA
cggggagcagctcacaggtt

SEQ ID NO: 6478 - DNA, 20 bp, synthetic construct
  source 1..20: mol_type = other DNA
ggggccgccattacatccac

SEQ ID NO: 6479 - DNA, 20 bp, synthetic construct
  source 1..20: mol_type = other DNA
cgctgaggcccacgaggagg

SEQ ID NO: 6480 - DNA, 20 bp, synthetic construct
  source 1..20: mol_type = other DNA
agttgtagaagcatgtgaac

SEQ ID NO: 6481 - DNA, 20 bp, synthetic construct
  source 1..20: mol_type = other DNA
cccaggatgcttgactcacg

SEQ ID NO: 6482 - DNA, 20 bp, synthetic construct
  source 1..20: mol_type = other DNA
tactcacatctggggctccg

SEQ ID NO: 6483 - DNA, 20 bp, synthetic construct
  source 1..20: mol_type = other DNA
acgaggaggtggccgagcca

SEQ ID NO: 6484 - DNA, 20 bp, synthetic construct
  source 1..20: mol_type = other DNA
cggacagacggtgagtccac

SEQ ID NO: 6485 - DNA, 20 bp, synthetic construct
  source 1..20: mol_type = other DNA
gttgtagaagcatgtgaact

SEQ ID NO: 6486 - DNA, 20 bp, synthetic construct
  source 1..20: mol_type = other DNA
gtcagtttctgagactgcaa

SEQ ID NO: 6487 - DNA, 20 bp, synthetic construct
  source 1..20: mol_type = other DNA
cctcactcacggttctcaaa

SEQ ID NO: 6488 - DNA, 20 bp, synthetic construct
  source 1..20: mol_type = other DNA
cagggtgacgatgtcaactg

SEQ ID NO: 6489 - DNA, 20 bp, synthetic construct
  source 1..20: mol_type = other DNA
gctccagacacaggagatgt

SEQ ID NO: 6490 - DNA, 20 bp, synthetic construct
  source 1..20: mol_type = other DNA
ctgagactgcaagggaagga

SEQ ID NO: 6491 - DNA, 20 bp, synthetic construct
  source 1..20: mol_type = other DNA
ggggcaggaggaggatgagg

SEQ ID NO: 6492 - DNA, 20 bp, synthetic construct
  source 1..20: mol_type = other DNA
gtgaactgggaagtgcctgc

SEQ ID NO: 6493 - DNA, 20 bp, synthetic construct
  source 1..20: mol_type = other DNA
gcccaggatgcttgactcac

SEQ ID NO: 6494 - DNA, 20 bp, synthetic construct
  source 1..20: mol_type = other DNA
ccgccattacatccacaggg

SEQ ID NO: 6495 - DNA, 20 bp, synthetic construct
  source 1..20: mol_type = other DNA
ctgtctacaccaagtgagtt

SEQ ID NO: 6496 - DNA, 20 bp, synthetic construct
  source 1..20: mol_type = other DNA
cagctgagctcagagcatgg

SEQ ID NO: 6497 - DNA, 20 bp, synthetic construct
  source 1..20: mol_type = other DNA
tctgagactgcaagggaagg

SEQ ID NO: 6498 - DNA, 20 bp, synthetic construct
  source 1..20: mol_type = other DNA
cctgcagcctctgtcagggg

SEQ ID NO: 6499 - DNA, 20 bp, synthetic construct
  source 1..20: mol_type = other DNA
gtgtagacagatggccaggg

SEQ ID NO: 6500 - DNA, 20 bp, synthetic construct
  source 1..20: mol_type = other DNA
ccagcttatgttgcatctgt

SEQ ID NO: 6501 - DNA, 20 bp, synthetic construct
  source 1..20: mol_type = other DNA
aaagggcttgaagtcctgga

SEQ ID NO: 6502 - DNA, 20 bp, synthetic construct
  source 1..20: mol_type = other DNA
tctgtctacaccaagtgagt

SEQ ID NO: 6503 - DNA, 20 bp, synthetic construct
  source 1..20: mol_type = other DNA
agttgacatcgtcaccctga

SEQ ID NO: 6504 - DNA, 20 bp, synthetic construct
  source 1..20: mol_type = other DNA
atagatagtggctgcacttc

SEQ ID NO: 6505 - DNA, 20 bp, synthetic construct
  source 1..20: mol_type = other DNA
ctcccagcaggggcagctgc

SEQ ID NO: 6506 - DNA, 20 bp, synthetic construct
  source 1..20: mol_type = other DNA
ttctcaccgaaaagttcccg

SEQ ID NO: 6507 - DNA, 20 bp, synthetic construct
  source 1..20: mol_type = other DNA
gcagagtgaggttggtaggc

SEQ ID NO: 6508 - DNA, 20 bp, synthetic construct
  source 1..20: mol_type = other DNA
gtgctcagcattggagtgaa

SEQ ID NO: 6509 - DNA, 20 bp, synthetic construct
  source 1..20: mol_type = other DNA
agccgctttaacccactctg

SEQ ID NO: 6510 - DNA, 20 bp, synthetic construct
  source 1..20: mol_type = other DNA
cagctggactgtgagtgact

SEQ ID NO: 6511 - DNA, 20 bp, synthetic construct
  source 1..20: mol_type = other DNA
aacacaaaacactgaacctc

SEQ ID NO: 6512 - DNA, 20 bp, synthetic construct
  source 1..20: mol_type = other DNA
aatggagccacccaatccac

SEQ ID NO: 6513 - DNA, 20 bp, synthetic construct
  source 1..20: mol_type = other DNA
cactcagtttgtgaagtgtt

SEQ ID NO: 6514 - DNA, 20 bp, synthetic construct
  source 1..20: mol_type = other DNA
tcgagtacatgaattgcact

SEQ ID NO: 6515 - DNA, 20 bp, synthetic construct
  source 1..20: mol_type = other DNA
agctggactgtgagtgacta

SEQ ID NO: 6516 - DNA, 20 bp, synthetic construct
  source 1..20: mol_type = other DNA
tggagcacttggtgcagtac

SEQ ID NO: 6517 - DNA, 20 bp, synthetic construct
  source 1..20: mol_type = other DNA
caaaacactgaacctctggg

SEQ ID NO: 6518 - DNA, 20 bp, synthetic construct
  source 1..20: mol_type = other DNA
agtcactcacagtccagctg

SEQ ID NO: 6519 - DNA, 20 bp, synthetic construct
  source 1..20: mol_type = other DNA
cctgtttgcattggaagccg

SEQ ID NO: 6520 - DNA, 20 bp, synthetic construct
  source 1..20: mol_type = other DNA
ggagccaacagagataacca

SEQ ID NO: 6521 - DNA, 20 bp, synthetic construct
  source 1..20: mol_type = other DNA
agagtgaggttggtaggctg

SEQ ID NO: 6522 - DNA, 20 bp, synthetic construct
  source 1..20: mol_type = other DNA
gcaccaagtgctccaaacag

SEQ ID NO: 6523 - DNA, 20 bp, synthetic construct
  source 1..20: mol_type = other DNA
aggaataagagggatgtgaa

SEQ ID NO: 6524 - DNA, 20 bp, synthetic construct
  source 1..20: mol_type = other DNA
ccaataatgcagagtgaggt

SEQ ID NO: 6525 - DNA, 20 bp, synthetic construct
  source 1..20: mol_type = other DNA
ctgcagttttagcatctgtg

SEQ ID NO: 6526 - DNA, 20 bp, synthetic construct
  source 1..20: mol_type = other DNA
ggggcagctgcaggaataag

SEQ ID NO: 6527 - DNA, 20 bp, synthetic construct
  source 1..20: mol_type = other DNA
gttaggttctctggagccca

SEQ ID NO: 6528 - DNA, 20 bp, synthetic construct
  source 1..20: mol_type = other DNA
atggagccacccaatccact

SEQ ID NO: 6529 - DNA, 20 bp, synthetic construct
  source 1..20: mol_type = other DNA
tggagccacccaatccactg

SEQ ID NO: 6530 - DNA, 20 bp, synthetic construct
  source 1..20: mol_type = other DNA
cctagaggagaaaggttgga

SEQ ID NO: 6531 - DNA, 20 bp, synthetic construct
  source 1..20: mol_type = other DNA
ggtgcagtaccggactgact

SEQ ID NO: 6532 - DNA, 20 bp, synthetic construct
  source 1..20: mol_type = other DNA
tctggagcccaggggatcac

SEQ ID NO: 6533 - DNA, 20 bp, synthetic construct
  source 1..20: mol_type = other DNA
tcctgggttcccgtgggtcc

SEQ ID NO: 6534 - DNA, 20 bp, synthetic construct
  source 1..20: mol_type = other DNA
gttccagttcagttctagct

SEQ ID NO: 6535 - DNA, 20 bp, synthetic construct
  source 1..20: mol_type = other DNA
ttccacagagtgggttaaag

SEQ ID NO: 6536 - DNA, 20 bp, synthetic construct
  source 1..20: mol_type = other DNA
ggagccacccaatccactgg

SEQ ID NO: 6537 - DNA, 20 bp, synthetic construct
  source 1..20: mol_type = other DNA
tgctcccccagtggattggg

SEQ ID NO: 6538 - DNA, 20 bp, synthetic construct
  source 1..20: mol_type = other DNA
agggatgtgaatggtaatga

SEQ ID NO: 6539 - DNA, 20 bp, synthetic construct
  source 1..20: mol_type = other DNA
ccaacctcactctgcattat

SEQ ID NO: 6540 - DNA, 20 bp, synthetic construct
  source 1..20: mol_type = other DNA
attgttccttgaggagaaag

SEQ ID NO: 6541 - DNA, 20 bp, synthetic construct
  source 1..20: mol_type = other DNA
tccaggacccacgggaaccc

SEQ ID NO: 6542 - DNA, 20 bp, synthetic construct
  source 1..20: mol_type = other DNA
cagagtgaggttggtaggct

SEQ ID NO: 6543 - DNA, 20 bp, synthetic construct
  source 1..20: mol_type = other DNA
aaacactgaacctctgggag

SEQ ID NO: 6544 - DNA, 20 bp, synthetic construct
  source 1..20: mol_type = other DNA
taatgcagagtgaggttggt

SEQ ID NO: 6545 - DNA, 20 bp, synthetic construct
  source 1..20: mol_type = other DNA
aaaacactgaacctctggga

SEQ ID NO: 6546 - DNA, 20 bp, synthetic construct
  source 1..20: mol_type = other DNA
cataccaataatgcagagtg

SEQ ID NO: 6547 - DNA, 20 bp, synthetic construct
  source 1..20: mol_type = other DNA
tcctctaggttcttcagggt

SEQ ID NO: 6548 - DNA, 20 bp, synthetic construct
  source 1..20: mol_type = other DNA
gggcagctgcaggaataaga

SEQ ID NO: 6549 - DNA, 20 bp, synthetic construct
  source 1..20: mol_type = other DNA
cagattcttgaaccactgtt

SEQ ID NO: 6550 - DNA, 20 bp, synthetic construct
  source 1..20: mol_type = other DNA
tgttaggttctctggagccc

SEQ ID NO: 6551 - DNA, 20 bp, synthetic construct
  source 1..20: mol_type = other DNA
tctccaagaacggtaagcaa

SEQ ID NO: 6552 - DNA, 20 bp, synthetic construct
  source 1..20: mol_type = other DNA
ttcacaaagtctggaaggaa

SEQ ID NO: 6553 - DNA, 20 bp, synthetic construct
  source 1..20: mol_type = other DNA
aaagacgcgggacgactctg

SEQ ID NO: 6554 - DNA, 20 bp, synthetic construct
  source 1..20: mol_type = other DNA
cagtacagatgtggctgatc

SEQ ID NO: 6555 - DNA, 20 bp, synthetic construct
  source 1..20: mol_type = other DNA
aagacgagggagaagctcta

SEQ ID NO: 6556 - DNA, 20 bp, synthetic construct
  source 1..20: mol_type = other DNA
cggagcgtgatgaatccagt

SEQ ID NO: 6557 - DNA, 20 bp, synthetic construct
  source 1..20: mol_type = other DNA
acaccaagcagaaagcgaca

SEQ ID NO: 6558 - DNA, 20 bp, synthetic construct
  source 1..20: mol_type = other DNA
cctcaaatgtggcaaagaca

SEQ ID NO: 6559 - DNA, 20 bp, synthetic construct
  source 1..20: mol_type = other DNA
acggagcgtgatgaatccag

SEQ ID NO: 6560 - DNA, 20 bp, synthetic construct
  source 1..20: mol_type = other DNA
tcacaaagtctggaaggaaa

SEQ ID NO: 6561 - DNA, 20 bp, synthetic construct
  source 1..20: mol_type = other DNA
ccaaggggcagggaaagacg

SEQ ID NO: 6562 - DNA, 20 bp, synthetic construct
  source 1..20: mol_type = other DNA
taagatccccaaaccagaag

SEQ ID NO: 6563 - DNA, 20 bp, synthetic construct
  source 1..20: mol_type = other DNA
tgcggatgttccagagcgtg

SEQ ID NO: 6564 - DNA, 20 bp, synthetic construct
  source 1..20: mol_type = other DNA
tagggaacaagggagccgtg

SEQ ID NO: 6565 - DNA, 20 bp, synthetic construct
  source 1..20: mol_type = other DNA
ccgtcttcacaaagtctgga

SEQ ID NO: 6566 - DNA, 20 bp, synthetic construct
  source 1..20: mol_type = other DNA
cagcgacgaatcctatggta

SEQ ID NO: 6567 - DNA, 20 bp, synthetic construct
  source 1..20: mol_type = other DNA
agcgacgaatcctatggtaa

SEQ ID NO: 6568 - DNA, 20 bp, synthetic construct
  source 1..20: mol_type = other DNA
tctctcctggcctcagcgac

SEQ ID NO: 6569 - DNA, 20 bp, synthetic construct
  source 1..20: mol_type = other DNA
tctctgctgccctgcgctcc

SEQ ID NO: 6570 - DNA, 20 bp, synthetic construct
  source 1..20: mol_type = other DNA
ctcggatgcgcatgagaccc

SEQ ID NO: 6571 - DNA, 20 bp, synthetic construct
  source 1..20: mol_type = other DNA
tccagatgagccccgggatt

SEQ ID NO: 6572 - DNA, 20 bp, synthetic construct
  source 1..20: mol_type = other DNA
ggcccagctccggaacaaac

SEQ ID NO: 6573 - DNA, 20 bp, synthetic construct
  source 1..20: mol_type = other DNA
cggagctgggccattcacac

SEQ ID NO: 6574 - DNA, 20 bp, synthetic construct
  source 1..20: mol_type = other DNA
ctctaggccgatacaaagca

SEQ ID NO: 6575 - DNA, 20 bp, synthetic construct
  source 1..20: mol_type = other DNA
gaactccctgccagatatcg

SEQ ID NO: 6576 - DNA, 20 bp, synthetic construct
  source 1..20: mol_type = other DNA
ctgtgtgaatggcccagctc

SEQ ID NO: 6577 - DNA, 20 bp, synthetic construct
  source 1..20: mol_type = other DNA
gccttccacgtcttgggatc

SEQ ID NO: 6578 - DNA, 20 bp, synthetic construct
  source 1..20: mol_type = other DNA
tggaagcatgctgccaagca

SEQ ID NO: 6579 - DNA, 20 bp, synthetic construct
  source 1..20: mol_type = other DNA
gcatgctgccaagcatggct

SEQ ID NO: 6580 - DNA, 20 bp, synthetic construct
  source 1..20: mol_type = other DNA
gatgagccccgggatttggt

SEQ ID NO: 6581 - DNA, 20 bp, synthetic construct
  source 1..20: mol_type = other DNA
cagccgagatgctaagagca

SEQ ID NO: 6582 - DNA, 20 bp, synthetic construct
  source 1..20: mol_type = other DNA
tattaatccagatgagcccc

SEQ ID NO: 6583 - DNA, 20 bp, synthetic construct
  source 1..20: mol_type = other DNA
tctaggccgatacaaagcag

SEQ ID NO: 6584 - DNA, 20 bp, synthetic construct
  source 1..20: mol_type = other DNA
ctccctgccagatatcgagg

SEQ ID NO: 6585 - DNA, 20 bp, synthetic construct
  source 1..20: mol_type = other DNA
catagagtcacctggaatct

SEQ ID NO: 6586 - DNA, 20 bp, synthetic construct
  source 1..20: mol_type = other DNA
tgcttgcccgcgtgcttcca

SEQ ID NO: 6587 - DNA, 20 bp, synthetic construct
  source 1..20: mol_type = other DNA
gtcttccaggtgggagggtc

SEQ ID NO: 6588 - DNA, 20 bp, synthetic construct
  source 1..20: mol_type = other DNA
aggggaacaggacctggtcc

SEQ ID NO: 6589 - DNA, 20 bp, synthetic construct
  source 1..20: mol_type = other DNA
ggaccacgcccctctccagg

SEQ ID NO: 6590 - DNA, 20 bp, synthetic construct
  source 1..20: mol_type = other DNA
gcaggactacaaccgcgagg

SEQ ID NO: 6591 - DNA, 20 bp, synthetic construct
  source 1..20: mol_type = other DNA
taaacagtgcccaagcctgg

SEQ ID NO: 6592 - DNA, 20 bp, synthetic construct
  source 1..20: mol_type = other DNA
gacacacagcagttcttgtc

SEQ ID NO: 6593 - DNA, 20 bp, synthetic construct
  source 1..20: mol_type = other DNA
ccgcaggcgcgtcttccagg

SEQ ID NO: 6594 - DNA, 20 bp, synthetic construct
  source 1..20: mol_type = other DNA
caagtaccccgggctggtgt

SEQ ID NO: 6595 - DNA, 20 bp, synthetic construct
  source 1..20: mol_type = other DNA
gccttgccagtggtggccgc

SEQ ID NO: 6596 - DNA, 20 bp, synthetic construct
  source 1..20: mol_type = other DNA
cagagcaggatctactggga

SEQ ID NO: 6597 - DNA, 20 bp, synthetic construct
  source 1..20: mol_type = other DNA
tccctccagcttcggtcgag

SEQ ID NO: 6598 - DNA, 20 bp, synthetic construct
  source 1..20: mol_type = other DNA
agcaaaataatatagttgtc

SEQ ID NO: 6599 - DNA, 20 bp, synthetic construct
  source 1..20: mol_type = other DNA
ctctctccagtttgttgggc

SEQ ID NO: 6600 - DNA, 20 bp, synthetic construct
  source 1..20: mol_type = other DNA
agtacaggcagatgtgcagc

SEQ ID NO: 6601 - DNA, 20 bp, synthetic construct
  source 1..20: mol_type = other DNA
gctgaccacgtccagccccg

SEQ ID NO: 6602 - DNA, 20 bp, synthetic construct
  source 1..20: mol_type = other DNA
cgttctcccacaccagcccg

SEQ ID NO: 6603 - DNA, 20 bp, synthetic construct
  source 1..20: mol_type = other DNA
ccgcatcccctggaagcacg

SEQ ID NO: 6604 - DNA, 20 bp, synthetic construct
  source 1..20: mol_type = other DNA
ggaggacgccgcgctcttca

SEQ ID NO: 6605 - DNA, 20 bp, synthetic construct
  source 1..20: mol_type = other DNA
gtccctccagcttcggtcga

SEQ ID NO: 6606 - DNA, 20 bp, synthetic construct
  source 1..20: mol_type = other DNA
ccctggcgctgtgcaacgac

SEQ ID NO: 6607 - DNA, 20 bp, synthetic construct
  source 1..20: mol_type = other DNA
tcgttctcccacaccagccc

SEQ ID NO: 6608 - DNA, 20 bp, synthetic construct
  source 1..20: mol_type = other DNA
aaacagtgcccaagcctggt

SEQ ID NO: 6609 - DNA, 20 bp, synthetic construct
  source 1..20: mol_type = other DNA
tcttgttcaaagcgcaccgc

SEQ ID NO: 6610 - DNA, 20 bp, synthetic construct
  source 1..20: mol_type = other DNA
agtgtacaggattgttcctg

SEQ ID NO: 6611 - DNA, 20 bp, synthetic construct
  source 1..20: mol_type = other DNA
ctgaccacgtccagccccga

SEQ ID NO: 6612 - DNA, 20 bp, synthetic construct
  source 1..20: mol_type = other DNA
gcaagtaccccgggctggtg

SEQ ID NO: 6613 - DNA, 20 bp, synthetic construct
  source 1..20: mol_type = other DNA
acgtggtcagctccttcacg

SEQ ID NO: 6614 - DNA, 20 bp, synthetic construct
  source 1..20: mol_type = other DNA
cgcatcccctggaagcacgc

SEQ ID NO: 6615 - DNA, 20 bp, synthetic construct
  source 1..20: mol_type = other DNA
cagacccgtacaaagtgtac

SEQ ID NO: 6616 - DNA, 20 bp, synthetic construct
  source 1..20: mol_type = other DNA
acagcagttcttgtcaggta

SEQ ID NO: 6617 - DNA, 20 bp, synthetic construct
  source 1..20: mol_type = other DNA
ctgctaaaggagtgcaggag

SEQ ID NO: 6618 - DNA, 20 bp, synthetic construct
  source 1..20: mol_type = other DNA
ctccaaagcatagagtcacc

SEQ ID NO: 6619 - DNA, 20 bp, synthetic construct
  source 1..20: mol_type = other DNA
tgggagatccggcagccctc

SEQ ID NO: 6620 - DNA, 20 bp, synthetic construct
  source 1..20: mol_type = other DNA
ttcccctacccagaggacaa

SEQ ID NO: 6621 - DNA, 20 bp, synthetic construct
  source 1..20: mol_type = other DNA
ccttgccagtggtggccgcg

SEQ ID NO: 6622 - DNA, 20 bp, synthetic construct
  source 1..20: mol_type = other DNA
tttaaaggaaagttccgaga

SEQ ID NO: 6623 - DNA, 20 bp, synthetic construct
  source 1..20: mol_type = other DNA
atacctgggctgggagcgaa

SEQ ID NO: 6624 - DNA, 20 bp, synthetic construct
  source 1..20: mol_type = other DNA
gggagatccggcagccctcg

SEQ ID NO: 6625 - DNA, 20 bp, synthetic construct
  source 1..20: mol_type = other DNA
ggcgcgtcttccaggtggga

SEQ ID NO: 6626 - DNA, 20 bp, synthetic construct
  source 1..20: mol_type = other DNA
atgggagatccggcagccct

SEQ ID NO: 6627 - DNA, 20 bp, synthetic construct
  source 1..20: mol_type = other DNA
gtgtacaggattgttcctga

SEQ ID NO: 6628 - DNA, 20 bp, synthetic construct
  source 1..20: mol_type = other DNA
agtccctccagcttcggtcg

SEQ ID NO: 6629 - DNA, 20 bp, synthetic construct
  source 1..20: mol_type = other DNA
cgtcccagtagatcctgctc

SEQ ID NO: 6630 - DNA, 20 bp, synthetic construct
  source 1..20: mol_type = other DNA
tcttcaaggtctccggcctc

SEQ ID NO: 6631 - DNA, 20 bp, synthetic construct
  source 1..20: mol_type = other DNA
ttccaggtgactctatgctt

SEQ ID NO: 6632 - DNA, 20 bp, synthetic construct
  source 1..20: mol_type = other DNA
gcttgcccgcgtgcttccag

SEQ ID NO: 6633 - DNA, 20 bp, synthetic construct
  source 1..20: mol_type = other DNA
agagcgcggcgtcctcctcg

SEQ ID NO: 6634 - DNA, 20 bp, synthetic construct
  source 1..20: mol_type = other DNA
ctaccgggaaatcctcgtga

SEQ ID NO: 6635 - DNA, 20 bp, synthetic construct
  source 1..20: mol_type = other DNA
cgcaggcgcgtcttccaggt

SEQ ID NO: 6636 - DNA, 20 bp, synthetic construct
  source 1..20: mol_type = other DNA
caagcaggactacaaccgcg

SEQ ID NO: 6637 - DNA, 20 bp, synthetic construct
  source 1..20: mol_type = other DNA
gaacaagagcaatgactttg

SEQ ID NO: 6638 - DNA, 20 bp, synthetic construct
  source 1..20: mol_type = other DNA
ctccagcttcggtcgagggg

SEQ ID NO: 6639 - DNA, 20 bp, synthetic construct
  source 1..20: mol_type = other DNA
ccttaccattttcacaagct

SEQ ID NO: 6640 - DNA, 20 bp, synthetic construct
  source 1..20: mol_type = other DNA
ctgcaagcgtttgctcacca

SEQ ID NO: 6641 - DNA, 20 bp, synthetic construct
  source 1..20: mol_type = other DNA
gccggagaccttgaagagcg

SEQ ID NO: 6642 - DNA, 20 bp, synthetic construct
  source 1..20: mol_type = other DNA
tgaaaaggggattatcctgg

SEQ ID NO: 6643 - DNA, 20 bp, synthetic construct
  source 1..20: mol_type = other DNA
cgatgggtagtcctggagag

SEQ ID NO: 6644 - DNA, 20 bp, synthetic construct
  source 1..20: mol_type = other DNA
atcaccgagtccggccgcat

SEQ ID NO: 6645 - DNA, 20 bp, synthetic construct
  source 1..20: mol_type = other DNA
gaaaaggggattatcctggt

SEQ ID NO: 6646 - DNA, 20 bp, synthetic construct
  source 1..20: mol_type = other DNA
ccaccagggcgagcagtggg

SEQ ID NO: 6647 - DNA, 20 bp, synthetic construct
  source 1..20: mol_type = other DNA
ggcccagcatgtcctgtgga

SEQ ID NO: 6648 - DNA, 20 bp, synthetic construct
  source 1..20: mol_type = other DNA
gctatcaaaaccattcggga

SEQ ID NO: 6649 - DNA, 20 bp, synthetic construct
  source 1..20: mol_type = other DNA
catttggtgagtgtcatgct

SEQ ID NO: 6650 - DNA, 20 bp, synthetic construct
  source 1..20: mol_type = other DNA
gggcatggcctacctggaag

SEQ ID NO: 6651 - DNA, 20 bp, synthetic construct
  source 1..20: mol_type = other DNA
caaactggtgcagctgtatg

SEQ ID NO: 6652 - DNA, 20 bp, synthetic construct
  source 1..20: mol_type = other DNA
gctccttctttgccctggaa

SEQ ID NO: 6653 - DNA, 20 bp, synthetic construct
  source 1..20: mol_type = other DNA
aactatcaccaacataatgg

SEQ ID NO: 6654 - DNA, 20 bp, synthetic construct
  source 1..20: mol_type = other DNA
cgctgccggctctcacgatc

SEQ ID NO: 6655 - DNA, 20 bp, synthetic construct
  source 1..20: mol_type = other DNA
accagattatgaatcactgc

SEQ ID NO: 6656 - DNA, 20 bp, synthetic construct
  source 1..20: mol_type = other DNA
gcttacctcctccattatgt

SEQ ID NO: 6657 - DNA, 20 bp, synthetic construct
  source 1..20: mol_type = other DNA
tggtgatagttgatgagaag

SEQ ID NO: 6658 - DNA, 20 bp, synthetic construct
  source 1..20: mol_type = other DNA
atagttgatgagaagaggga

SEQ ID NO: 6659 - DNA, 20 bp, synthetic construct
  source 1..20: mol_type = other DNA
gatcttctggtctctggaga

SEQ ID NO: 6660 - DNA, 20 bp, synthetic construct
  source 1..20: mol_type = other DNA
tgaaggctccttctttgccc

SEQ ID NO: 6661 - DNA, 20 bp, synthetic construct
  source 1..20: mol_type = other DNA
ttcaggtaagtccatcaggt

SEQ ID NO: 6662 - DNA, 20 bp, synthetic construct
  source 1..20: mol_type = other DNA
caggttcccaaagtggtcgc

SEQ ID NO: 6663 - DNA, 20 bp, synthetic construct
  source 1..20: mol_type = other DNA
agtctcttaccattcttggt

SEQ ID NO: 6664 - DNA, 20 bp, synthetic construct
  source 1..20: mol_type = other DNA
aggaggtaagctctagagca

SEQ ID NO: 6665 - DNA, 20 bp, synthetic construct
  source 1..20: mol_type = other DNA
aatctcaacacatttgattc

SEQ ID NO: 6666 - DNA, 20 bp, synthetic construct
  source 1..20: mol_type = other DNA
cagaaagccccagttacagc

SEQ ID NO: 6667 - DNA, 20 bp, synthetic construct
  source 1..20: mol_type = other DNA
cagctggagaagcttgcaac

SEQ ID NO: 6668 - DNA, 20 bp, synthetic construct
  source 1..20: mol_type = other DNA
tgatcatccagaacgaacct

SEQ ID NO: 6669 - DNA, 20 bp, synthetic construct
  source 1..20: mol_type = other DNA
ctttggttaacacaaagaag

SEQ ID NO: 6670 - DNA, 20 bp, synthetic construct
  source 1..20: mol_type = other DNA
gaggaggtaagctctagagc

SEQ ID NO: 6671 - DNA, 20 bp, synthetic construct
  source 1..20: mol_type = other DNA
cgcagcagtctggagaaggc

SEQ ID NO: 6672 - DNA, 20 bp, synthetic construct
  source 1..20: mol_type = other DNA
gaagcggactttaaagttcg

SEQ ID NO: 6673 - DNA, 20 bp, synthetic construct
  source 1..20: mol_type = other DNA
caatatgatccaaccaagaa

SEQ ID NO: 6674 - DNA, 20 bp, synthetic construct
  source 1..20: mol_type = other DNA
atgtgggaagttttcagtga

SEQ ID NO: 6675 - DNA, 20 bp, synthetic construct
  source 1..20: mol_type = other DNA
tcttgtaggtgtgctgatgt

SEQ ID NO: 6676 - DNA, 20 bp, synthetic construct
  source 1..20: mol_type = other DNA
gagacttggtatgagcatgc

SEQ ID NO: 6677 - DNA, 20 bp, synthetic construct
  source 1..20: mol_type = other DNA
ccgaagcaactcagaggtgg

SEQ ID NO: 6678 - DNA, 20 bp, synthetic construct
  source 1..20: mol_type = other DNA
cctgaaacgggtatttatag

SEQ ID NO: 6679 - DNA, 20 bp, synthetic construct
  source 1..20: mol_type = other DNA
atatcatcctaatttctgga

SEQ ID NO: 6680 - DNA, 20 bp, synthetic construct
  source 1..20: mol_type = other DNA
atcttcaaagtatgccaggc

SEQ ID NO: 6681 - DNA, 20 bp, synthetic construct
  source 1..20: mol_type = other DNA
aaaccgaagcaactcagagg

SEQ ID NO: 6682 - DNA, 20 bp, synthetic construct
  source 1..20: mol_type = other DNA
ttgctccagatcgtgagagc

SEQ ID NO: 6683 - DNA, 20 bp, synthetic construct
  source 1..20: mol_type = other DNA
tgaaaaccgaagcaactcag

SEQ ID NO: 6684 - DNA, 20 bp, synthetic construct
  source 1..20: mol_type = other DNA
ctcctactcctgaagacaac

SEQ ID NO: 6685 - DNA, 20 bp, synthetic construct
  source 1..20: mol_type = other DNA
tccagcagtgattcataatc

SEQ ID NO: 6686 - DNA, 20 bp, synthetic construct
  source 1..20: mol_type = other DNA
ctcaccaaatgaccacacat

SEQ ID NO: 6687 - DNA, 20 bp, synthetic construct
  source 1..20: mol_type = other DNA
ttcctggaggaaaaagacaa

SEQ ID NO: 6688 - DNA, 20 bp, synthetic construct
  source 1..20: mol_type = other DNA
tttgattcgggagagctcaa

SEQ ID NO: 6689 - DNA, 20 bp, synthetic construct
  source 1..20: mol_type = other DNA
ctaccaaaccaatgatcctc

SEQ ID NO: 6690 - DNA, 20 bp, synthetic construct
  source 1..20: mol_type = other DNA
gataccggagtcgagtcacc

SEQ ID NO: 6691 - DNA, 20 bp, synthetic construct
  source 1..20: mol_type = other DNA
tttcctggaggaaaaagaca

SEQ ID NO: 6692 - DNA, 20 bp, synthetic construct
  source 1..20: mol_type = other DNA
ttcttgtaggtgtgctgatg

SEQ ID NO: 6693 - DNA, 20 bp, synthetic construct
  source 1..20: mol_type = other DNA
gatcagtacaccagttccac

SEQ ID NO: 6694 - DNA, 20 bp, synthetic construct
  source 1..20: mol_type = other DNA
tgatgagctgttcttccagg

SEQ ID NO: 6695 - DNA, 20 bp, synthetic construct
  source 1..20: mol_type = other DNA
aagcggactttaaagttcga

SEQ ID NO: 6696 - DNA, 20 bp, synthetic construct
  source 1..20: mol_type = other DNA
tatcaccaacataatggagg

SEQ ID NO: 6697 - DNA, 20 bp, synthetic construct
  source 1..20: mol_type = other DNA
tcttccccagcgaccacttt

SEQ ID NO: 6698 - DNA, 20 bp, synthetic construct
  source 1..20: mol_type = other DNA
actcaaacaccaggcagatg

SEQ ID NO: 6699 - DNA, 20 bp, synthetic construct
  source 1..20: mol_type = other DNA
catactttgaagatcgtcat

SEQ ID NO: 6700 - DNA, 20 bp, synthetic construct
  source 1..20: mol_type = other DNA
tattgtaccacctgaaagca

SEQ ID NO: 6701 - DNA, 20 bp, synthetic construct
  source 1..20: mol_type = other DNA
ggtgatagttgatgagaaga

SEQ ID NO: 6702 - DNA, 20 bp, synthetic construct
  source 1..20: mol_type = other DNA
tgtctgactttgggatgaca

SEQ ID NO: 6703 - DNA, 20 bp, synthetic construct
  source 1..20: mol_type = other DNA
gcaccaaattcccggtgaag

SEQ ID NO: 6704 - DNA, 20 bp, synthetic construct
  source 1..20: mol_type = other DNA
agccagttgacgcagcagtc

SEQ ID NO: 6705 - DNA, 20 bp, synthetic construct
  source 1..20: mol_type = other DNA
gtcatcaaggtgtctgactt

SEQ ID NO: 6706 - DNA, 20 bp, synthetic construct
  source 1..20: mol_type = other DNA
aggttcccaaagtggtcgct

SEQ ID NO: 6707 - DNA, 20 bp, synthetic construct
  source 1..20: mol_type = other DNA
gacaaggtaaaagagggatg

SEQ ID NO: 6708 - DNA, 20 bp, synthetic construct
  source 1..20: mol_type = other DNA
caccgtgtctgttttcacca

SEQ ID NO: 6709 - DNA, 20 bp, synthetic construct
  source 1..20: mol_type = other DNA
atgctcataccaagtctctg

SEQ ID NO: 6710 - DNA, 20 bp, synthetic construct
  source 1..20: mol_type = other DNA
caatttctggcagcctggag

SEQ ID NO: 6711 - DNA, 20 bp, synthetic construct
  source 1..20: mol_type = other DNA
catgtgtctggatgtgtgtg

SEQ ID NO: 6712 - DNA, 20 bp, synthetic construct
  source 1..20: mol_type = other DNA
atcctcaggaactcgcactg

SEQ ID NO: 6713 - DNA, 20 bp, synthetic construct
  source 1..20: mol_type = other DNA
tcttgatgagctgttcttcc

SEQ ID NO: 6714 - DNA, 20 bp, synthetic construct
  source 1..20: mol_type = other DNA
ttcatgatccagttcttgaa

SEQ ID NO: 6715 - DNA, 20 bp, synthetic construct
  source 1..20: mol_type = other DNA
tcagccacatagtatcgctt

SEQ ID NO: 6716 - DNA, 20 bp, synthetic construct
  source 1..20: mol_type = other DNA
tcatttggtgagtgtcatgc

SEQ ID NO: 6717 - DNA, 20 bp, synthetic construct
  source 1..20: mol_type = other DNA
ggagagtccaggacaggaat

SEQ ID NO: 6718 - DNA, 20 bp, synthetic construct
  source 1..20: mol_type = other DNA
ttgggatgacaaggtaaaag

SEQ ID NO: 6719 - DNA, 20 bp, synthetic construct
  source 1..20: mol_type = other DNA
tggcagtgggcaatttgggt

SEQ ID NO: 6720 - DNA, 20 bp, synthetic construct
  source 1..20: mol_type = other DNA
tccataccttacaacagcct

SEQ ID NO: 6721 - DNA, 20 bp, synthetic construct
  source 1..20: mol_type = other DNA
cattcttggttggatcatat

SEQ ID NO: 6722 - DNA, 20 bp, synthetic construct
  source 1..20: mol_type = other DNA
tggagagtccaggacaggaa

SEQ ID NO: 6723 - DNA, 20 bp, synthetic construct
  source 1..20: mol_type = other DNA
actgaaagagaaaacctctg

SEQ ID NO: 6724 - DNA, 20 bp, synthetic construct
  source 1..20: mol_type = other DNA
cgccgcagtgcgagttcctg

SEQ ID NO: 6725 - DNA, 20 bp, synthetic construct
  source 1..20: mol_type = other DNA
tcctactcctgaagacaaca

SEQ ID NO: 6726 - DNA, 20 bp, synthetic construct
  source 1..20: mol_type = other DNA
caatctcaacacatttgatt

SEQ ID NO: 6727 - DNA, 20 bp, synthetic construct
  source 1..20: mol_type = other DNA
aaagtatgccaggctggctt

SEQ ID NO: 6728 - DNA, 20 bp, synthetic construct
  source 1..20: mol_type = other DNA
tataaagcattatcacatca

SEQ ID NO: 6729 - DNA, 20 bp, synthetic construct
  source 1..20: mol_type = other DNA
gcatactttgaagatcgtca

SEQ ID NO: 6730 - DNA, 20 bp, synthetic construct
  source 1..20: mol_type = other DNA
atactttgaagatcgtcatg

SEQ ID NO: 6731 - DNA, 20 bp, synthetic construct
  source 1..20: mol_type = other DNA
ggctgccagaaattgtttgg

SEQ ID NO: 6732 - DNA, 20 bp, synthetic construct
  source 1..20: mol_type = other DNA
gaacctgggaagagagtgga

SEQ ID NO: 6733 - DNA, 20 bp, synthetic construct
  source 1..20: mol_type = other DNA
ccaccacctctgagttgctt

SEQ ID NO: 6734 - DNA, 20 bp, synthetic construct
  source 1..20: mol_type = other DNA
ctggccgatcttctggtctc

SEQ ID NO: 6735 - DNA, 20 bp, synthetic construct
  source 1..20: mol_type = other DNA
ggttcccaaagtggtcgctg

SEQ ID NO: 6736 - DNA, 20 bp, synthetic construct
  source 1..20: mol_type = other DNA
accaaggctgttgtaaggta

SEQ ID NO: 6737 - DNA, 20 bp, synthetic construct
  source 1..20: mol_type = other DNA
gggtgcgtagataatctgac

SEQ ID NO: 6738 - DNA, 20 bp, synthetic construct
  source 1..20: mol_type = other DNA
cggagtcgagtcaccaggcc

SEQ ID NO: 6739 - DNA, 20 bp, synthetic construct
  source 1..20: mol_type = other DNA
tcggttgtacaagccccggc

SEQ ID NO: 6740 - DNA, 20 bp, synthetic construct
  source 1..20: mol_type = other DNA
caggcctggtgactcgactc

SEQ ID NO: 6741 - DNA, 20 bp, synthetic construct
  source 1..20: mol_type = other DNA
gggccagcacccagcgctgc

SEQ ID NO: 6742 - DNA, 20 bp, synthetic construct
  source 1..20: mol_type = other DNA
ctatcaaaaccattcgggaa

SEQ ID NO: 6743 - DNA, 20 bp, synthetic construct
  source 1..20: mol_type = other DNA
atcagcacacctacaagaaa

SEQ ID NO: 6744 - DNA, 20 bp, synthetic construct
  source 1..20: mol_type = other DNA
tttcaggtaagtccatcagg

SEQ ID NO: 6745 - DNA, 20 bp, synthetic construct
  source 1..20: mol_type = other DNA
tgatgtgagtgctcagaaca

SEQ ID NO: 6746 - DNA, 20 bp, synthetic construct
  source 1..20: mol_type = other DNA
gctgccagaaattgtttggt

SEQ ID NO: 6747 - DNA, 20 bp, synthetic construct
  source 1..20: mol_type = other DNA
cgatcttctggtctctggag

SEQ ID NO: 6748 - DNA, 20 bp, synthetic construct
  source 1..20: mol_type = other DNA
tcctggaggaaaaagacaag

SEQ ID NO: 6749 - DNA, 20 bp, synthetic construct
  source 1..20: mol_type = other DNA
gggcaaagaaggagccttca

SEQ ID NO: 6750 - DNA, 20 bp, synthetic construct
  source 1..20: mol_type = other DNA
tgggatgacaaggtaaaaga

SEQ ID NO: 6751 - DNA, 20 bp, synthetic construct
  source 1..20: mol_type = other DNA
cgactgaaagagaaaacctc

SEQ ID NO: 6752 - DNA, 20 bp, synthetic construct
  source 1..20: mol_type = other DNA
ggtgaagtgggcatccccag

SEQ ID NO: 6753 - DNA, 20 bp, synthetic construct
  source 1..20: mol_type = other DNA
ttgacgcagcagtctggaga

SEQ ID NO: 6754 - DNA, 20 bp, synthetic construct
  source 1..20: mol_type = other DNA
gaagctgaaaagagaaaaac

SEQ ID NO: 6755 - DNA, 20 bp, synthetic construct
  source 1..20: mol_type = other DNA
ggaggtaagctctagagcag

SEQ ID NO: 6756 - DNA, 20 bp, synthetic construct
  source 1..20: mol_type = other DNA
cctggaatcccttaccatga

SEQ ID NO: 6757 - DNA, 20 bp, synthetic construct
  source 1..20: mol_type = other DNA
tcactcaccctgttgtcttc

SEQ ID NO: 6758 - DNA, 20 bp, synthetic construct
  source 1..20: mol_type = other DNA
atcctaatttctggatggat

SEQ ID NO: 6759 - DNA, 20 bp, synthetic construct
  source 1..20: mol_type = other DNA
catccagacacatgcccagc

SEQ ID NO: 6760 - DNA, 20 bp, synthetic construct
  source 1..20: mol_type = other DNA
agacttggtatgagcatgca

SEQ ID NO: 6761 - DNA, 20 bp, synthetic construct
  source 1..20: mol_type = other DNA
gatttcggttgtacaagccc

SEQ ID NO: 6762 - DNA, 20 bp, synthetic construct
  source 1..20: mol_type = other DNA
gagaaggctggccgatcttc

SEQ ID NO: 6763 - DNA, 20 bp, synthetic construct
  source 1..20: mol_type = other DNA
tgcccacttcaccgggaatt

SEQ ID NO: 6764 - DNA, 20 bp, synthetic construct
  source 1..20: mol_type = other DNA
agaagaggacttcatagagg

SEQ ID NO: 6765 - DNA, 20 bp, synthetic construct
  source 1..20: mol_type = other DNA
agtcagacaccttgatgact

SEQ ID NO: 6766 - DNA, 20 bp, synthetic construct
  source 1..20: mol_type = other DNA
caatttgggttggtgcatct

SEQ ID NO: 6767 - DNA, 20 bp, synthetic construct
  source 1..20: mol_type = other DNA
tttgtgcaagagattggcag

SEQ ID NO: 6768 - DNA, 20 bp, synthetic construct
  source 1..20: mol_type = other DNA
tgacttacccattcctgtcc

SEQ ID NO: 6769 - DNA, 20 bp, synthetic construct
  source 1..20: mol_type = other DNA
tcatcaaggtgtctgacttt

SEQ ID NO: 6770 - DNA, 20 bp, synthetic construct
  source 1..20: mol_type = other DNA
atccagacacatgcccagca

SEQ ID NO: 6771 - DNA, 20 bp, synthetic construct
  source 1..20: mol_type = other DNA
ttgtgcaagagattggcagt

SEQ ID NO: 6772 - DNA, 20 bp, synthetic construct
  source 1..20: mol_type = other DNA
gactgaaagagaaaacctct

SEQ ID NO: 6773 - DNA, 20 bp, synthetic construct
  source 1..20: mol_type = other DNA
ctgttgtcttcaggagtagg

SEQ ID NO: 6774 - DNA, 20 bp, synthetic construct
  source 1..20: mol_type = other DNA
caccaaattcccggtgaagt

SEQ ID NO: 6775 - DNA, 20 bp, synthetic construct
  source 1..20: mol_type = other DNA
ccatacagctgcaccagttt

SEQ ID NO: 6776 - DNA, 20 bp, synthetic construct
  source 1..20: mol_type = other DNA
accctgttgtcttcaggagt

SEQ ID NO: 6777 - DNA, 20 bp, synthetic construct
  source 1..20: mol_type = other DNA
gagccggcagcgctgggtgc

SEQ ID NO: 6778 - DNA, 20 bp, synthetic construct
  source 1..20: mol_type = other DNA
atagcagcaagtccgatgtg

SEQ ID NO: 6779 - DNA, 20 bp, synthetic construct
  source 1..20: mol_type = other DNA
aacgggtatttatagtggca

SEQ ID NO: 6780 - DNA, 20 bp, synthetic construct
  source 1..20: mol_type = other DNA
ctctccagagaccagaagat

SEQ ID NO: 6781 - DNA, 20 bp, synthetic construct
  source 1..20: mol_type = other DNA
tctgaggtcagtcaggacac

SEQ ID NO: 6782 - DNA, 20 bp, synthetic construct
  source 1..20: mol_type = other DNA
tgtgactgtcatctggccat

SEQ ID NO: 6783 - DNA, 20 bp, synthetic construct
  source 1..20: mol_type = other DNA
gatttctgtggaagagattg

SEQ ID NO: 6784 - DNA, 20 bp, synthetic construct
  source 1..20: mol_type = other DNA
cacaggcatgccgtgagtac

SEQ ID NO: 6785 - DNA, 20 bp, synthetic construct
  source 1..20: mol_type = other DNA
gacagccattctgtatgttg

SEQ ID NO: 6786 - DNA, 20 bp, synthetic construct
  source 1..20: mol_type = other DNA
ctgtcatggtccaatctggt

SEQ ID NO: 6787 - DNA, 20 bp, synthetic construct
  source 1..20: mol_type = other DNA
cgaaactcagctggctcatg

SEQ ID NO: 6788 - DNA, 20 bp, synthetic construct
  source 1..20: mol_type = other DNA
aaacacatcgtgtacctcta

SEQ ID NO: 6789 - DNA, 20 bp, synthetic construct
  source 1..20: mol_type = other DNA
tccactaccggatgaggtat

SEQ ID NO: 6790 - DNA, 20 bp, synthetic construct
  source 1..20: mol_type = other DNA
cacacttactctccacgtcg

SEQ ID NO: 6791 - DNA, 20 bp, synthetic construct
  source 1..20: mol_type = other DNA
gacggtatgttatgcaaggc

SEQ ID NO: 6792 - DNA, 20 bp, synthetic construct
  source 1..20: mol_type = other DNA
tccaaaagaccagacgtcag

SEQ ID NO: 6793 - DNA, 20 bp, synthetic construct
  source 1..20: mol_type = other DNA
cggtgcatgaagagatccag

SEQ ID NO: 6794 - DNA, 20 bp, synthetic construct
  source 1..20: mol_type = other DNA
gcaaagaggttgtgacaaag

SEQ ID NO: 6795 - DNA, 20 bp, synthetic construct
  source 1..20: mol_type = other DNA
tgaactatgaccccaatcag

SEQ ID NO: 6796 - DNA, 20 bp, synthetic construct
  source 1..20: mol_type = other DNA
aacttacctctcccaagtca

SEQ ID NO: 6797 - DNA, 20 bp, synthetic construct
  source 1..20: mol_type = other DNA
gctgctgacaagtggagctt

SEQ ID NO: 6798 - DNA, 20 bp, synthetic construct
  source 1..20: mol_type = other DNA
ggaagaaaggcctctgattg

SEQ ID NO: 6799 - DNA, 20 bp, synthetic construct
  source 1..20: mol_type = other DNA
tattccttaaggcttcccga

SEQ ID NO: 6800 - DNA, 20 bp, synthetic construct
  source 1..20: mol_type = other DNA
gcagttgccagaactgccca

SEQ ID NO: 6801 - DNA, 20 bp, synthetic construct
  source 1..20: mol_type = other DNA
tctccttgatgccagctcac

SEQ ID NO: 6802 - DNA, 20 bp, synthetic construct
  source 1..20: mol_type = other DNA
gtgtactaaaaacctcctcc

SEQ ID NO: 6803 - DNA, 20 bp, synthetic construct
  source 1..20: mol_type = other DNA
gtcggtgcagaggtaatgat

SEQ ID NO: 6804 - DNA, 20 bp, synthetic construct
  source 1..20: mol_type = other DNA
cccctgtattgtccccttcg

SEQ ID NO: 6805 - DNA, 20 bp, synthetic construct
  source 1..20: mol_type = other DNA
ccggaagtagccatctacca

SEQ ID NO: 6806 - DNA, 20 bp, synthetic construct
  source 1..20: mol_type = other DNA
tcatccggtagtggagccgg

SEQ ID NO: 6807 - DNA, 20 bp, synthetic construct
  source 1..20: mol_type = other DNA
tctggacagttaggtgggca

SEQ ID NO: 6808 - DNA, 20 bp, synthetic construct
  source 1..20: mol_type = other DNA
cctgcaccagatccttcttg

SEQ ID NO: 6809 - DNA, 20 bp, synthetic construct
  source 1..20: mol_type = other DNA
tctccaaagaagcagaaaaa

SEQ ID NO: 6810 - DNA, 20 bp, synthetic construct
  source 1..20: mol_type = other DNA
ttgggaaggttgagctctgc

SEQ ID NO: 6811 - DNA, 20 bp, synthetic construct
  source 1..20: mol_type = other DNA
gccagtgacaccatcatgta

SEQ ID NO: 6812 - DNA, 20 bp, synthetic construct
  source 1..20: mol_type = other DNA
gacaccatcatgtaaggagc

SEQ ID NO: 6813 - DNA, 20 bp, synthetic construct
  source 1..20: mol_type = other DNA
cctccagggccactttggga

SEQ ID NO: 6814 - DNA, 20 bp, synthetic construct
  source 1..20: mol_type = other DNA
aacctcctcctggcccgtga

SEQ ID NO: 6815 - DNA, 20 bp, synthetic construct
  source 1..20: mol_type = other DNA
actccagtgagctggcatca

SEQ ID NO: 6816 - DNA, 20 bp, synthetic construct
  source 1..20: mol_type = other DNA
tcttccaccatgatatctgt

SEQ ID NO: 6817 - DNA, 20 bp, synthetic construct
  source 1..20: mol_type = other DNA
catgaggatgttgtcaaagt

SEQ ID NO: 6818 - DNA, 20 bp, synthetic construct
  source 1..20: mol_type = other DNA
cttcccaaagtggccctgga

SEQ ID NO: 6819 - DNA, 20 bp, synthetic construct
  source 1..20: mol_type = other DNA
catcaggtaaagcttcccac

SEQ ID NO: 6820 - DNA, 20 bp, synthetic construct
  source 1..20: mol_type = other DNA
gatcaacgggggggccacgt

SEQ ID NO: 6821 - DNA, 20 bp, synthetic construct
  source 1..20: mol_type = other DNA
taaggagtattacaccgtca

SEQ ID NO: 6822 - DNA, 20 bp, synthetic construct
  source 1..20: mol_type = other DNA
accgggacagccctgtgttt

SEQ ID NO: 6823 - DNA, 20 bp, synthetic construct
  source 1..20: mol_type = other DNA
cctaaagaggatccgtgact

SEQ ID NO: 6824 - DNA, 20 bp, synthetic construct
  source 1..20: mol_type = other DNA
catccggtagtggagccgga

SEQ ID NO: 6825 - DNA, 20 bp, synthetic construct
  source 1..20: mol_type = other DNA
ctctggatctcttcatgcac

SEQ ID NO: 6826 - DNA, 20 bp, synthetic construct
  source 1..20: mol_type = other DNA
acttgtcagcagccacactc

SEQ ID NO: 6827 - DNA, 20 bp, synthetic construct
  source 1..20: mol_type = other DNA
cctgtgggcgagcaggacat

SEQ ID NO: 6828 - DNA, 20 bp, synthetic construct
  source 1..20: mol_type = other DNA
caccaagtagctcagggcac

SEQ ID NO: 6829 - DNA, 20 bp, synthetic construct
  source 1..20: mol_type = other DNA
tcatgaggtctcccaagctg

SEQ ID NO: 6830 - DNA, 20 bp, synthetic construct
  source 1..20: mol_type = other DNA
gtatgatttggtgaaatgcc

SEQ ID NO: 6831 - DNA, 20 bp, synthetic construct
  source 1..20: mol_type = other DNA
cgcggacacagacgccatag

SEQ ID NO: 6832 - DNA, 20 bp, synthetic construct
  source 1..20: mol_type = other DNA
aaaaattgttccactcttcc

SEQ ID NO: 6833 - DNA, 20 bp, synthetic construct
  source 1..20: mol_type = other DNA
ctctctttctgtaaacaaga

SEQ ID NO: 6834 - DNA, 20 bp, synthetic construct
  source 1..20: mol_type = other DNA
ctgcctcgaagaaggcctgt

SEQ ID NO: 6835 - DNA, 20 bp, synthetic construct
  source 1..20: mol_type = other DNA
caaaggacaaggcctcctcg

SEQ ID NO: 6836 - DNA, 20 bp, synthetic construct
  source 1..20: mol_type = other DNA
ggcaagaaggaagcgaggag

SEQ ID NO: 6837 - DNA, 20 bp, synthetic construct
  source 1..20: mol_type = other DNA
tgcgcaggatctgcttcttg

SEQ ID NO: 6838 - DNA, 20 bp, synthetic construct
  source 1..20: mol_type = other DNA
acggtatgttatgcaaggct

SEQ ID NO: 6839 - DNA, 20 bp, synthetic construct
  source 1..20: mol_type = other DNA
gttctcggcaatacgttcac

SEQ ID NO: 6840 - DNA, 20 bp, synthetic construct
  source 1..20: mol_type = other DNA
tgaaatagaacctggaaggc

SEQ ID NO: 6841 - DNA, 20 bp, synthetic construct
  source 1..20: mol_type = other DNA
ctcatgaggtctcccaagct

SEQ ID NO: 6842 - DNA, 20 bp, synthetic construct
  source 1..20: mol_type = other DNA
gcaggtgagtcacggctgca

SEQ ID NO: 6843 - DNA, 20 bp, synthetic construct
  source 1..20: mol_type = other DNA
tcggaagaaaggcctctgat

SEQ ID NO: 6844 - DNA, 20 bp, synthetic construct
  source 1..20: mol_type = other DNA
aaaggacaaggcctcctcgt

SEQ ID NO: 6845 - DNA, 20 bp, synthetic construct
  source 1..20: mol_type = other DNA
gaaagacaagacgctgattg

SEQ ID NO: 6846 - DNA, 20 bp, synthetic construct
  source 1..20: mol_type = other DNA
ctcatgatggctcggaagaa

SEQ ID NO: 6847 - DNA, 20 bp, synthetic construct
  source 1..20: mol_type = other DNA
taatgtctctcatgatggct

SEQ ID NO: 6848 - DNA, 20 bp, synthetic construct
  source 1..20: mol_type = other DNA
cattctcaccaagtagctca

SEQ ID NO: 6849 - DNA, 20 bp, synthetic construct
  source 1..20: mol_type = other DNA
tcagccagctccttacatga

SEQ ID NO: 6850 - DNA, 20 bp, synthetic construct
  source 1..20: mol_type = other DNA
atgacgagaacaccaagctc

SEQ ID NO: 6851 - DNA, 20 bp, synthetic construct
  source 1..20: mol_type = other DNA
ctcccaaggtgctcgccctg

SEQ ID NO: 6852 - DNA, 20 bp, synthetic construct
  source 1..20: mol_type = other DNA
aaacagatactccagtgagc

SEQ ID NO: 6853 - DNA, 20 bp, synthetic construct
  source 1..20: mol_type = other DNA
ttcatcaagctcagtgaccc

SEQ ID NO: 6854 - DNA, 20 bp, synthetic construct
  source 1..20: mol_type = other DNA
caccaaatcatactgtccct

SEQ ID NO: 6855 - DNA, 20 bp, synthetic construct
  source 1..20: mol_type = other DNA
cggaagaaaggcctctgatt

SEQ ID NO: 6856 - DNA, 20 bp, synthetic construct
  source 1..20: mol_type = other DNA
tacacacatttccatggacc

SEQ ID NO: 6857 - DNA, 20 bp, synthetic construct
  source 1..20: mol_type = other DNA
gattgctcctgagtgtgttg

SEQ ID NO: 6858 - DNA, 20 bp, synthetic construct
  source 1..20: mol_type = other DNA
tcccaaggtgctcgccctga

SEQ ID NO: 6859 - DNA, 20 bp, synthetic construct
  source 1..20: mol_type = other DNA
tcaaggagaggggttgcatc

SEQ ID NO: 6860 - DNA, 20 bp, synthetic construct
  source 1..20: mol_type = other DNA
caaagcaggtgacggtcatg

SEQ ID NO: 6861 - DNA, 20 bp, synthetic construct
  source 1..20: mol_type = other DNA
ctagagggagaagtaggcaa

SEQ ID NO: 6862 - DNA, 20 bp, synthetic construct
  source 1..20: mol_type = other DNA
ttacaccgtcaaggatgacc

SEQ ID NO: 6863 - DNA, 20 bp, synthetic construct
  source 1..20: mol_type = other DNA
ctctgcaggtatgaccccga

SEQ ID NO: 6864 - DNA, 20 bp, synthetic construct
  source 1..20: mol_type = other DNA
gcttcttgaggtggctcatg

SEQ ID NO: 6865 - DNA, 20 bp, synthetic construct
  source 1..20: mol_type = other DNA
gccctgagggaagaagcaga

SEQ ID NO: 6866 - DNA, 20 bp, synthetic construct
  source 1..20: mol_type = other DNA
gacctcagacttctcaaagc

SEQ ID NO: 6867 - DNA, 20 bp, synthetic construct
  source 1..20: mol_type = other DNA
tagccaagtatttcaccttc

SEQ ID NO: 6868 - DNA, 20 bp, synthetic construct
  source 1..20: mol_type = other DNA
ttccctcagggcgagcacct

SEQ ID NO: 6869 - DNA, 20 bp, synthetic construct
  source 1..20: mol_type = other DNA
acgaacctcggggcttgggc

SEQ ID NO: 6870 - DNA, 20 bp, synthetic construct
  source 1..20: mol_type = other DNA
cagggcgagcaccttgggag

SEQ ID NO: 6871 - DNA, 20 bp, synthetic construct
  source 1..20: mol_type = other DNA
caagcaggacaacaagaaaa

SEQ ID NO: 6872 - DNA, 20 bp, synthetic construct
  source 1..20: mol_type = other DNA
ggcagccagcatgatgagac

SEQ ID NO: 6873 - DNA, 20 bp, synthetic construct
  source 1..20: mol_type = other DNA
gcaatacgttcaccgggact

SEQ ID NO: 6874 - DNA, 20 bp, synthetic construct
  source 1..20: mol_type = other DNA
ctgtaaacaagaggggcaca

SEQ ID NO: 6875 - DNA, 20 bp, synthetic construct
  source 1..20: mol_type = other DNA
ctccactaccggatgaggta

SEQ ID NO: 6876 - DNA, 20 bp, synthetic construct
  source 1..20: mol_type = other DNA
agtgagctggcatcaaggag

SEQ ID NO: 6877 - DNA, 20 bp, synthetic construct
  source 1..20: mol_type = other DNA
cggtatgttatgcaaggctg

SEQ ID NO: 6878 - DNA, 20 bp, synthetic construct
  source 1..20: mol_type = other DNA
catttggtttatgcctccac

SEQ ID NO: 6879 - DNA, 20 bp, synthetic construct
  source 1..20: mol_type = other DNA
gaggataaagacctggtcca

SEQ ID NO: 6880 - DNA, 20 bp, synthetic construct
  source 1..20: mol_type = other DNA
gctgtcccggtcatccttga

SEQ ID NO: 6881 - DNA, 20 bp, synthetic construct
  source 1..20: mol_type = other DNA
gcggcaagaaggaagcgagg

SEQ ID NO: 6882 - DNA, 20 bp, synthetic construct
  source 1..20: mol_type = other DNA
aagagagattctatgaaagc

SEQ ID NO: 6883 - DNA, 20 bp, synthetic construct
  source 1..20: mol_type = other DNA
gattctatgaaagccggtgc

SEQ ID NO: 6884 - DNA, 20 bp, synthetic construct
  source 1..20: mol_type = other DNA
atactgtccctaggagcaag

SEQ ID NO: 6885 - DNA, 20 bp, synthetic construct
  source 1..20: mol_type = other DNA
ttctcggcaatacgttcacc

SEQ ID NO: 6886 - DNA, 20 bp, synthetic construct
  source 1..20: mol_type = other DNA
gatacctcatctggacagtt

SEQ ID NO: 6887 - DNA, 20 bp, synthetic construct
  source 1..20: mol_type = other DNA
catttcttgctgccaagtcc

SEQ ID NO: 6888 - DNA, 20 bp, synthetic construct
  source 1..20: mol_type = other DNA
ttggtgaaatagaacctgga

SEQ ID NO: 6889 - DNA, 20 bp, synthetic construct
  source 1..20: mol_type = other DNA
tccctcagggcgagcacctt

SEQ ID NO: 6890 - DNA, 20 bp, synthetic construct
  source 1..20: mol_type = other DNA
actggagtatctgtttgctc

SEQ ID NO: 6891 - DNA, 20 bp, synthetic construct
  source 1..20: mol_type = other DNA
tgtccagatgaggtatctat

SEQ ID NO: 6892 - DNA, 20 bp, synthetic construct
  source 1..20: mol_type = other DNA
tcccatacctcatccggtag

SEQ ID NO: 6893 - DNA, 20 bp, synthetic construct
  source 1..20: mol_type = other DNA
tcacttccacccctggctca

SEQ ID NO: 6894 - DNA, 20 bp, synthetic construct
  source 1..20: mol_type = other DNA
ccaattggtgaaatagaacc

SEQ ID NO: 6895 - DNA, 20 bp, synthetic construct
  source 1..20: mol_type = other DNA
gtgagctggcatcaaggaga

SEQ ID NO: 6896 - DNA, 20 bp, synthetic construct
  source 1..20: mol_type = other DNA
taccagggacacaaaggaca

SEQ ID NO: 6897 - DNA, 20 bp, synthetic construct
  source 1..20: mol_type = other DNA
aatacgccatcaataaattg

SEQ ID NO: 6898 - DNA, 20 bp, synthetic construct
  source 1..20: mol_type = other DNA
tcacaatgttctcatgatag

SEQ ID NO: 6899 - DNA, 20 bp, synthetic construct
  source 1..20: mol_type = other DNA
tccttacatgatggtgtcac

SEQ ID NO: 6900 - DNA, 20 bp, synthetic construct
  source 1..20: mol_type = other DNA
caagaagcagatcctgcgca

SEQ ID NO: 6901 - DNA, 20 bp, synthetic construct
  source 1..20: mol_type = other DNA
cagcaggttggagatttctg

SEQ ID NO: 6902 - DNA, 20 bp, synthetic construct
  source 1..20: mol_type = other DNA
acgacaatgagcagtcagtg

SEQ ID NO: 6903 - DNA, 20 bp, synthetic construct
  source 1..20: mol_type = other DNA
tagaagatcacttccacccc

SEQ ID NO: 6904 - DNA, 20 bp, synthetic construct
  source 1..20: mol_type = other DNA
agcgcttttcaaaatgtgtg

SEQ ID NO: 6905 - DNA, 20 bp, synthetic construct
  source 1..20: mol_type = other DNA
accaaaacacagggctgtcc

SEQ ID NO: 6906 - DNA, 20 bp, synthetic construct
  source 1..20: mol_type = other DNA
tcgagaccccaagaccgagc

SEQ ID NO: 6907 - DNA, 20 bp, synthetic construct
  source 1..20: mol_type = other DNA
caaccttcccaaagtggccc

SEQ ID NO: 6908 - DNA, 20 bp, synthetic construct
  source 1..20: mol_type = other DNA
agttcatgcagcgggtcatg

SEQ ID NO: 6909 - DNA, 20 bp, synthetic construct
  source 1..20: mol_type = other DNA
tgaatttccatggtgtggta

SEQ ID NO: 6910 - DNA, 20 bp, synthetic construct
  source 1..20: mol_type = other DNA
cacttccacccctggctcag

SEQ ID NO: 6911 - DNA, 20 bp, synthetic construct
  source 1..20: mol_type = other DNA
ttctgatgaaatcagtaaca

SEQ ID NO: 6912 - DNA, 20 bp, synthetic construct
  source 1..20: mol_type = other DNA
cacctgctttgagaagtctg

SEQ ID NO: 6913 - DNA, 20 bp, synthetic construct
  source 1..20: mol_type = other DNA
aggaggggatgtacgtgctg

SEQ ID NO: 6914 - DNA, 20 bp, synthetic construct
  source 1..20: mol_type = other DNA
aagctttacctgatgtcctt

SEQ ID NO: 6915 - DNA, 20 bp, synthetic construct
  source 1..20: mol_type = other DNA
gaagctttacctgatgtcct

SEQ ID NO: 6916 - DNA, 20 bp, synthetic construct
  source 1..20: mol_type = other DNA
ggatggactatttgggttct

SEQ ID NO: 6917 - DNA, 20 bp, synthetic construct
  source 1..20: mol_type = other DNA
atcacttccacccctggctc

SEQ ID NO: 6918 - DNA, 20 bp, synthetic construct
  source 1..20: mol_type = other DNA
tgagctggcatcaaggagag

SEQ ID NO: 6919 - DNA, 20 bp, synthetic construct
  source 1..20: mol_type = other DNA
tcagcgtcttgtctttcaag

SEQ ID NO: 6920 - DNA, 20 bp, synthetic construct
  source 1..20: mol_type = other DNA
ctgcaggtatgaccccgaag

SEQ ID NO: 6921 - DNA, 20 bp, synthetic construct
  source 1..20: mol_type = other DNA
gtagcagatttcccagagcg

SEQ ID NO: 6922 - DNA, 20 bp, synthetic construct
  source 1..20: mol_type = other DNA
tcattacctctgcaccgacg

SEQ ID NO: 6923 - DNA, 20 bp, synthetic construct
  source 1..20: mol_type = other DNA
cgtcggtgcagaggtaatga

SEQ ID NO: 6924 - DNA, 20 bp, synthetic construct
  source 1..20: mol_type = other DNA
gatctggtgcaggtgagtca

SEQ ID NO: 6925 - DNA, 20 bp, synthetic construct
  source 1..20: mol_type = other DNA
tctgaccttagcaggatcca

SEQ ID NO: 6926 - DNA, 20 bp, synthetic construct
  source 1..20: mol_type = other DNA
gggcccagggcgctgaatga

SEQ ID NO: 6927 - DNA, 20 bp, synthetic construct
  source 1..20: mol_type = other DNA
tcgcaggaggccgagttccc

SEQ ID NO: 6928 - DNA, 20 bp, synthetic construct
  source 1..20: mol_type = other DNA
gggtcactcagcttgatgaa

SEQ ID NO: 6929 - DNA, 20 bp, synthetic construct
  source 1..20: mol_type = other DNA
gcccccagctggacatgctg

SEQ ID NO: 6930 - DNA, 20 bp, synthetic construct
  source 1..20: mol_type = other DNA
ccacggaggacctgtcctgc

SEQ ID NO: 6931 - DNA, 20 bp, synthetic construct
  source 1..20: mol_type = other DNA
gcagggcaggcaggaggcgc

SEQ ID NO: 6932 - DNA, 20 bp, synthetic construct
  source 1..20: mol_type = other DNA
cctcacctcctgttctccct

SEQ ID NO: 6933 - DNA, 20 bp, synthetic construct
  source 1..20: mol_type = other DNA
tggtgaaggacccatggccc

SEQ ID NO: 6934 - DNA, 20 bp, synthetic construct
  source 1..20: mol_type = other DNA
gctgcttccaggaatgactg

SEQ ID NO: 6935 - DNA, 20 bp, synthetic construct
  source 1..20: mol_type = other DNA
atccagggcactgatgggca

SEQ ID NO: 6936 - DNA, 20 bp, synthetic construct
  source 1..20: mol_type = other DNA
cgcaggaggccgagttccca

SEQ ID NO: 6937 - DNA, 20 bp, synthetic construct
  source 1..20: mol_type = other DNA
ccagcaggacaggtcctccg

SEQ ID NO: 6938 - DNA, 20 bp, synthetic construct
  source 1..20: mol_type = other DNA
gcaaagagggagtggtacac

SEQ ID NO: 6939 - DNA, 20 bp, synthetic construct
  source 1..20: mol_type = other DNA
acagtgcatggcctatgagc

SEQ ID NO: 6940 - DNA, 20 bp, synthetic construct
  source 1..20: mol_type = other DNA
cccgctgaaagtccctctgc

SEQ ID NO: 6941 - DNA, 20 bp, synthetic construct
  source 1..20: mol_type = other DNA
ggtgagtgggcgcctccccg

SEQ ID NO: 6942 - DNA, 20 bp, synthetic construct
  source 1..20: mol_type = other DNA
atcaggtcgcgcaggcttgg

SEQ ID NO: 6943 - DNA, 20 bp, synthetic construct
  source 1..20: mol_type = other DNA
ctccgcgtggctggtgacgg

SEQ ID NO: 6944 - DNA, 20 bp, synthetic construct
  source 1..20: mol_type = other DNA
acctgcagcttccagctggc

SEQ ID NO: 6945 - DNA, 20 bp, synthetic construct
  source 1..20: mol_type = other DNA
cctcctccagcagttccaag

SEQ ID NO: 6946 - DNA, 20 bp, synthetic construct
  source 1..20: mol_type = other DNA
gttgtccgagagggattcgg

SEQ ID NO: 6947 - DNA, 20 bp, synthetic construct
  source 1..20: mol_type = other DNA
cgaagctccagacgtctgac

SEQ ID NO: 6948 - DNA, 20 bp, synthetic construct
  source 1..20: mol_type = other DNA
accaggcggtgctctccggc

SEQ ID NO: 6949 - DNA, 20 bp, synthetic construct
  source 1..20: mol_type = other DNA
agagggagtggtacacaggc

SEQ ID NO: 6950 - DNA, 20 bp, synthetic construct
  source 1..20: mol_type = other DNA
cacaggcaggatgcctacag

SEQ ID NO: 6951 - DNA, 20 bp, synthetic construct
  source 1..20: mol_type = other DNA
tgacgcggaggcgtattcgg

SEQ ID NO: 6952 - DNA, 20 bp, synthetic construct
  source 1..20: mol_type = other DNA
cctgctgtacaggattcggt

SEQ ID NO: 6953 - DNA, 20 bp, synthetic construct
  source 1..20: mol_type = other DNA
ggccacccaggggatcctgt

SEQ ID NO: 6954 - DNA, 20 bp, synthetic construct
  source 1..20: mol_type = other DNA
gtgtctctcctcgaagatcg

SEQ ID NO: 6955 - DNA, 20 bp, synthetic construct
  source 1..20: mol_type = other DNA
ttctcatgctgaatggtgag

SEQ ID NO: 6956 - DNA, 20 bp, synthetic construct
  source 1..20: mol_type = other DNA
ccaagaggcggcagagggcg

SEQ ID NO: 6957 - DNA, 20 bp, synthetic construct
  source 1..20: mol_type = other DNA
cggaaggagggcctctggac

SEQ ID NO: 6958 - DNA, 20 bp, synthetic construct
  source 1..20: mol_type = other DNA
gggccagctctgtccacttg

SEQ ID NO: 6959 - DNA, 20 bp, synthetic construct
  source 1..20: mol_type = other DNA
ggtactccatgaccagccgc

SEQ ID NO: 6960 - DNA, 20 bp, synthetic construct
  source 1..20: mol_type = other DNA
gcgcaggcttgggggtaggc

SEQ ID NO: 6961 - DNA, 20 bp, synthetic construct
  source 1..20: mol_type = other DNA
ctgaagagatgaggctattg

SEQ ID NO: 6962 - DNA, 20 bp, synthetic construct
  source 1..20: mol_type = other DNA
agctctcgaagactgctgtg

SEQ ID NO: 6963 - DNA, 20 bp, synthetic construct
  source 1..20: mol_type = other DNA
taggcaggccttgtagctgc

SEQ ID NO: 6964 - DNA, 20 bp, synthetic construct
  source 1..20: mol_type = other DNA
gccacgaacgacagagcctc

SEQ ID NO: 6965 - DNA, 20 bp, synthetic construct
  source 1..20: mol_type = other DNA
gccgaggctgctggaggaag

SEQ ID NO: 6966 - DNA, 20 bp, synthetic construct
  source 1..20: mol_type = other DNA
tcttcaggtgcccgctggga

SEQ ID NO: 6967 - DNA, 20 bp, synthetic construct
  source 1..20: mol_type = other DNA
ggaagctgtcaaagtcctgg

SEQ ID NO: 6968 - DNA, 20 bp, synthetic construct
  source 1..20: mol_type = other DNA
ggccagctctgtccacttgg

SEQ ID NO: 6969 - DNA, 20 bp, synthetic construct
  source 1..20: mol_type = other DNA
agcgggcagcagcacatgca

SEQ ID NO: 6970 - DNA, 20 bp, synthetic construct
  source 1..20: mol_type = other DNA
ccgctgcgtgcaccgcgacc

SEQ ID NO: 6971 - DNA, 20 bp, synthetic construct
  source 1..20: mol_type = other DNA
gtgcagccccccatcccagc

SEQ ID NO: 6972 - DNA, 20 bp, synthetic construct
  source 1..20: mol_type = other DNA
tctctcgccagtcagacgtc

SEQ ID NO: 6973 - DNA, 20 bp, synthetic construct
  source 1..20: mol_type = other DNA
tgggaactcggcctcctgcg

SEQ ID NO: 6974 - DNA, 20 bp, synthetic construct
  source 1..20: mol_type = other DNA
cataaaattggagtttctga

SEQ ID NO: 6975 - DNA, 20 bp, synthetic construct
  source 1..20: mol_type = other DNA
gggttccccaccagaaaatg

SEQ ID NO: 6976 - DNA, 20 bp, synthetic construct
  source 1..20: mol_type = other DNA
cttgtagctgcaggggttgg

SEQ ID NO: 6977 - DNA, 20 bp, synthetic construct
  source 1..20: mol_type = other DNA
tcatcaagctgagtgaccct

SEQ ID NO: 6978 - DNA, 20 bp, synthetic construct
  source 1..20: mol_type = other DNA
gagagaagatgttgtccgag

SEQ ID NO: 6979 - DNA, 20 bp, synthetic construct
  source 1..20: mol_type = other DNA
gctccaggactggcaggtca

SEQ ID NO: 6980 - DNA, 20 bp, synthetic construct
  source 1..20: mol_type = other DNA
acgctgccaaagttgccctg

SEQ ID NO: 6981 - DNA, 20 bp, synthetic construct
  source 1..20: mol_type = other DNA
cccaggtactccatgccctg

SEQ ID NO: 6982 - DNA, 20 bp, synthetic construct
  source 1..20: mol_type = other DNA
gaagccgactcacggccgag

SEQ ID NO: 6983 - DNA, 20 bp, synthetic construct
  source 1..20: mol_type = other DNA
ccggaaggtgctcctggctc

SEQ ID NO: 6984 - DNA, 20 bp, synthetic construct
  source 1..20: mol_type = other DNA
agcgggcacctgaagagatg

SEQ ID NO: 6985 - DNA, 20 bp, synthetic construct
  source 1..20: mol_type = other DNA
cagctggacatgctgtggag

SEQ ID NO: 6986 - DNA, 20 bp, synthetic construct
  source 1..20: mol_type = other DNA
ccgggcagagacattgccat

SEQ ID NO: 6987 - DNA, 20 bp, synthetic construct
  source 1..20: mol_type = other DNA
cgaagctcaggccctggatc

SEQ ID NO: 6988 - DNA, 20 bp, synthetic construct
  source 1..20: mol_type = other DNA
gtccttcaccaagatttacc

SEQ ID NO: 6989 - DNA, 20 bp, synthetic construct
  source 1..20: mol_type = other DNA
actaaacacttcccagaccg

SEQ ID NO: 6990 - DNA, 20 bp, synthetic construct
  source 1..20: mol_type = other DNA
gtggaaggtctcggcggccc

SEQ ID NO: 6991 - DNA, 20 bp, synthetic construct
  source 1..20: mol_type = other DNA
ctgtggggctgcgccggatg

SEQ ID NO: 6992 - DNA, 20 bp, synthetic construct
  source 1..20: mol_type = other DNA
cagagacattgccatggggc

SEQ ID NO: 6993 - DNA, 20 bp, synthetic construct
  source 1..20: mol_type = other DNA
caagtggggcttcggcgcca

SEQ ID NO: 6994 - DNA, 20 bp, synthetic construct
  source 1..20: mol_type = other DNA
tcaccaggtcactgcggtgc

SEQ ID NO: 6995 - DNA, 20 bp, synthetic construct
  source 1..20: mol_type = other DNA
gcccactcaccaggtcactg

SEQ ID NO: 6996 - DNA, 20 bp, synthetic construct
  source 1..20: mol_type = other DNA
tcgtggtgtcagctatggcc

SEQ ID NO: 6997 - DNA, 20 bp, synthetic construct
  source 1..20: mol_type = other DNA
ccatcaacaagctcaagact

SEQ ID NO: 6998 - DNA, 20 bp, synthetic construct
  source 1..20: mol_type = other DNA
gaggaagctgtcaaagtcct

SEQ ID NO: 6999 - DNA, 20 bp, synthetic construct
  source 1..20: mol_type = other DNA
gtccaggtcggtctactgct

SEQ ID NO: 7000 - DNA, 20 bp, synthetic construct
  source 1..20: mol_type = other DNA
tggatcaggtcgcgcaggct

SEQ ID NO: 7001 - DNA, 20 bp, synthetic construct
  source 1..20: mol_type = other DNA
agggccagctctgtccactt

SEQ ID NO: 7002 - DNA, 20 bp, synthetic construct
  source 1..20: mol_type = other DNA
tcggggggaaccagcaggac

SEQ ID NO: 7003 - DNA, 20 bp, synthetic construct
  source 1..20: mol_type = other DNA
tccacggagaagatgtggct

SEQ ID NO: 7004 - DNA, 20 bp, synthetic construct
  source 1..20: mol_type = other DNA
ttccctcagtgctcaccgac

SEQ ID NO: 7005 - DNA, 20 bp, synthetic construct
  source 1..20: mol_type = other DNA
catgagctcgtgaacctgag

SEQ ID NO: 7006 - DNA, 20 bp, synthetic construct
  source 1..20: mol_type = other DNA
ctctgaccttagcaggatcc

SEQ ID NO: 7007 - DNA, 20 bp, synthetic construct
  source 1..20: mol_type = other DNA
cccatggcaatgtctctgcc

SEQ ID NO: 7008 - DNA, 20 bp, synthetic construct
  source 1..20: mol_type = other DNA
cgcacaggtcctcagccaag

SEQ ID NO: 7009 - DNA, 20 bp, synthetic construct
  source 1..20: mol_type = other DNA
cctggagcacctctttgccc

SEQ ID NO: 7010 - DNA, 20 bp, synthetic construct
  source 1..20: mol_type = other DNA
cccaccagaaaatggggctc

SEQ ID NO: 7011 - DNA, 20 bp, synthetic construct
  source 1..20: mol_type = other DNA
cgcgcaagcagccgctgggc

SEQ ID NO: 7012 - DNA, 20 bp, synthetic construct
  source 1..20: mol_type = other DNA
acttggccatgagcgagtgc

SEQ ID NO: 7013 - DNA, 20 bp, synthetic construct
  source 1..20: mol_type = other DNA
cggctacttccggctgacca

SEQ ID NO: 7014 - DNA, 20 bp, synthetic construct
  source 1..20: mol_type = other DNA
gggcctcagtctcaaggagc

SEQ ID NO: 7015 - DNA, 20 bp, synthetic construct
  source 1..20: mol_type = other DNA
gatcaggttggacttttcta

SEQ ID NO: 7016 - DNA, 20 bp, synthetic construct
  source 1..20: mol_type = other DNA
cccaggtggggttctgcctg

SEQ ID NO: 7017 - DNA, 20 bp, synthetic construct
  source 1..20: mol_type = other DNA
gctctccacgaggatgtttc

SEQ ID NO: 7018 - DNA, 20 bp, synthetic construct
  source 1..20: mol_type = other DNA
cacggagaagatgtggctcg

SEQ ID NO: 7019 - DNA, 20 bp, synthetic construct
  source 1..20: mol_type = other DNA
tcactcagcttgatgaaggg

SEQ ID NO: 7020 - DNA, 20 bp, synthetic construct
  source 1..20: mol_type = other DNA
ccatgcactgttgaatcagc

SEQ ID NO: 7021 - DNA, 20 bp, synthetic construct
  source 1..20: mol_type = other DNA
tcaggttggacttttctatg

SEQ ID NO: 7022 - DNA, 20 bp, synthetic construct
  source 1..20: mol_type = other DNA
atcaggttggacttttctat

SEQ ID NO: 7023 - DNA, 20 bp, synthetic construct
  source 1..20: mol_type = other DNA
gagcacctctttgcccaggt

SEQ ID NO: 7024 - DNA, 20 bp, synthetic construct
  source 1..20: mol_type = other DNA
gtgcaggaatttgtacacct

SEQ ID NO: 7025 - DNA, 20 bp, synthetic construct
  source 1..20: mol_type = other DNA
gatacatgtctatggccccc

SEQ ID NO: 7026 - DNA, 20 bp, synthetic construct
  source 1..20: mol_type = other DNA
ctcacctcagcagggcaggc

SEQ ID NO: 7027 - DNA, 20 bp, synthetic construct
  source 1..20: mol_type = other DNA
gaaggaggcggctggcatcg

SEQ ID NO: 7028 - DNA, 20 bp, synthetic construct
  source 1..20: mol_type = other DNA
gccccggtaaatcttggtga

SEQ ID NO: 7029 - DNA, 20 bp, synthetic construct
  source 1..20: mol_type = other DNA
gctatgaaaaggacagggag

SEQ ID NO: 7030 - DNA, 20 bp, synthetic construct
  source 1..20: mol_type = other DNA
aggagaaagataggcgctgg

SEQ ID NO: 7031 - DNA, 20 bp, synthetic construct
  source 1..20: mol_type = other DNA
tgaccagccgcaggctctgg

SEQ ID NO: 7032 - DNA, 20 bp, synthetic construct
  source 1..20: mol_type = other DNA
ggagctctcgaagactgctg

SEQ ID NO: 7033 - DNA, 20 bp, synthetic construct
  source 1..20: mol_type = other DNA
ggtccccaaaggagaaagat

SEQ ID NO: 7034 - DNA, 20 bp, synthetic construct
  source 1..20: mol_type = other DNA
agtacatcatggacctggag

SEQ ID NO: 7035 - DNA, 20 bp, synthetic construct
  source 1..20: mol_type = other DNA
tctgcgaggaatagagaagg

SEQ ID NO: 7036 - DNA, 20 bp, synthetic construct
  source 1..20: mol_type = other DNA
ggcctcagtctcaaggagca

SEQ ID NO: 7037 - DNA, 20 bp, synthetic construct
  source 1..20: mol_type = other DNA
agaaccccacctgggcaaag

SEQ ID NO: 7038 - DNA, 20 bp, synthetic construct
  source 1..20: mol_type = other DNA
cctgcaccatggtgcctggt

SEQ ID NO: 7039 - DNA, 20 bp, synthetic construct
  source 1..20: mol_type = other DNA
agcactcaccagatagttga

SEQ ID NO: 7040 - DNA, 20 bp, synthetic construct
  source 1..20: mol_type = other DNA
tgccatgagtgcaacttgcc

SEQ ID NO: 7041 - DNA, 20 bp, synthetic construct
  source 1..20: mol_type = other DNA
gcacgcagcggcgggagccc

SEQ ID NO: 7042 - DNA, 20 bp, synthetic construct
  source 1..20: mol_type = other DNA
ctccaggccgccagagcctg

SEQ ID NO: 7043 - DNA, 20 bp, synthetic construct
  source 1..20: mol_type = other DNA
tccaagaggcggcagagggc

SEQ ID NO: 7044 - DNA, 20 bp, synthetic construct
  source 1..20: mol_type = other DNA
caccgacaggatcccctggg

SEQ ID NO: 7045 - DNA, 20 bp, synthetic construct
  source 1..20: mol_type = other DNA
aggaactcctggagccaagg

SEQ ID NO: 7046 - DNA, 20 bp, synthetic construct
  source 1..20: mol_type = other DNA
tccaggtcggtctactgcta

SEQ ID NO: 7047 - DNA, 20 bp, synthetic construct
  source 1..20: mol_type = other DNA
aggcaggccttgtagctgca

SEQ ID NO: 7048 - DNA, 20 bp, synthetic construct
  source 1..20: mol_type = other DNA
tctccggccgggccaacgcg

SEQ ID NO: 7049 - DNA, 20 bp, synthetic construct
  source 1..20: mol_type = other DNA
cctcctcactgtctgtgtcc

SEQ ID NO: 7050 - DNA, 20 bp, synthetic construct
  source 1..20: mol_type = other DNA
caggcctttgtcctcctaag

SEQ ID NO: 7051 - DNA, 20 bp, synthetic construct
  source 1..20: mol_type = other DNA
gcccaggttctcatgctgaa

SEQ ID NO: 7052 - DNA, 20 bp, synthetic construct
  source 1..20: mol_type = other DNA
ccagctgtgagatgtacttg

SEQ ID NO: 7053 - DNA, 20 bp, synthetic construct
  source 1..20: mol_type = other DNA
cgtggagcagcacgagatgc

SEQ ID NO: 7054 - DNA, 20 bp, synthetic construct
  source 1..20: mol_type = other DNA
tcataaaattggagtttctg

SEQ ID NO: 7055 - DNA, 20 bp, synthetic construct
  source 1..20: mol_type = other DNA
tggcctatgagccggtccag

SEQ ID NO: 7056 - DNA, 20 bp, synthetic construct
  source 1..20: mol_type = other DNA
ggagaaagataggcgctggg

SEQ ID NO: 7057 - DNA, 20 bp, synthetic construct
  source 1..20: mol_type = other DNA
ttggagtttctgagggtgag

SEQ ID NO: 7058 - DNA, 20 bp, synthetic construct
  source 1..20: mol_type = other DNA
ggtcgcgcaggcttgggggt

SEQ ID NO: 7059 - DNA, 20 bp, synthetic construct
  source 1..20: mol_type = other DNA
tgtagctgcaggggttggag

SEQ ID NO: 7060 - DNA, 20 bp, synthetic construct
  source 1..20: mol_type = other DNA
gaagaagtgctgggagtccg

SEQ ID NO: 7061 - DNA, 20 bp, synthetic construct
  source 1..20: mol_type = other DNA
cctaccgaatcctgtacagc

SEQ ID NO: 7062 - DNA, 20 bp, synthetic construct
  source 1..20: mol_type = other DNA
ccctcacctcctgttctccc

SEQ ID NO: 7063 - DNA, 20 bp, synthetic construct
  source 1..20: mol_type = other DNA
cacgtcaagatcgctgactt

SEQ ID NO: 7064 - DNA, 20 bp, synthetic construct
  source 1..20: mol_type = other DNA
ccaccgcttcgggctacgca

SEQ ID NO: 7065 - DNA, 20 bp, synthetic construct
  source 1..20: mol_type = other DNA
tgtttcgggcggccaggtcg

SEQ ID NO: 7066 - DNA, 20 bp, synthetic construct
  source 1..20: mol_type = other DNA
catgtccagctgggggccca

SEQ ID NO: 7067 - DNA, 20 bp, synthetic construct
  source 1..20: mol_type = other DNA
agggtcactcagcttgatga

SEQ ID NO: 7068 - DNA, 20 bp, synthetic construct
  source 1..20: mol_type = other DNA
gagcgggcagcagcacatgc

SEQ ID NO: 7069 - DNA, 20 bp, synthetic construct
  source 1..20: mol_type = other DNA
tgccgccgtcaccagccacg

SEQ ID NO: 7070 - DNA, 20 bp, synthetic construct
  source 1..20: mol_type = other DNA
caggaatgactggggaaggt

SEQ ID NO: 7071 - DNA, 20 bp, synthetic construct
  source 1..20: mol_type = other DNA
ctcactgtctgtgtccaggt

SEQ ID NO: 7072 - DNA, 20 bp, synthetic construct
  source 1..20: mol_type = other DNA
gcaggcctttgtcctcctaa

SEQ ID NO: 7073 - DNA, 20 bp, synthetic construct
  source 1..20: mol_type = other DNA
cgggcagagacattgccatg

SEQ ID NO: 7074 - DNA, 20 bp, synthetic construct
  source 1..20: mol_type = other DNA
cttcaggtgcccgctgggac

SEQ ID NO: 7075 - DNA, 20 bp, synthetic construct
  source 1..20: mol_type = other DNA
cctgggcaaagaggtgctcc

SEQ ID NO: 7076 - DNA, 20 bp, synthetic construct
  source 1..20: mol_type = other DNA
cgctgcttccaggaatgact

SEQ ID NO: 7077 - DNA, 20 bp, synthetic construct
  source 1..20: mol_type = other DNA
catccgggccaggtccaaca

SEQ ID NO: 7078 - DNA, 20 bp, synthetic construct
  source 1..20: mol_type = other DNA
ggaatagagaaggaggcggc

SEQ ID NO: 7079 - DNA, 20 bp, synthetic construct
  source 1..20: mol_type = other DNA
ggccgcccgaaacatcctcg

SEQ ID NO: 7080 - DNA, 20 bp, synthetic construct
  source 1..20: mol_type = other DNA
gccagccagctggaagctgc

SEQ ID NO: 7081 - DNA, 20 bp, synthetic construct
  source 1..20: mol_type = other DNA
gcgaggaatagagaaggagg

SEQ ID NO: 7082 - DNA, 20 bp, synthetic construct
  source 1..20: mol_type = other DNA
catgcactgttgaatcagca

SEQ ID NO: 7083 - DNA, 20 bp, synthetic construct
  source 1..20: mol_type = other DNA
gcaaagaggtgctccaggac

SEQ ID NO: 7084 - DNA, 20 bp, synthetic construct
  source 1..20: mol_type = other DNA
accaggtcactgcggtgctg

SEQ ID NO: 7085 - DNA, 20 bp, synthetic construct
  source 1..20: mol_type = other DNA
ccatgaccagccgcaggctc

SEQ ID NO: 7086 - DNA, 20 bp, synthetic construct
  source 1..20: mol_type = other DNA
ttcatcaagctgagtgaccc

SEQ ID NO: 7087 - DNA, 20 bp, synthetic construct
  source 1..20: mol_type = other DNA
ttgtagctgcaggggttgga

SEQ ID NO: 7088 - DNA, 20 bp, synthetic construct
  source 1..20: mol_type = other DNA
gtctctcctcgaagatcgtg

SEQ ID NO: 7089 - DNA, 20 bp, synthetic construct
  source 1..20: mol_type = other DNA
cggggaggcgcccactcacc

SEQ ID NO: 7090 - DNA, 20 bp, synthetic construct
  source 1..20: mol_type = other DNA
gcacttcttctgcaaggagg

SEQ ID NO: 7091 - DNA, 20 bp, synthetic construct
  source 1..20: mol_type = other DNA
ggggctgcggcggagaacat

SEQ ID NO: 7092 - DNA, 20 bp, synthetic construct
  source 1..20: mol_type = other DNA
caaggtgcgagggggcgccc

SEQ ID NO: 7093 - DNA, 20 bp, synthetic construct
  source 1..20: mol_type = other DNA
acgtagtagtctttgtcaag

SEQ ID NO: 7094 - DNA, 20 bp, synthetic construct
  source 1..20: mol_type = other DNA
tggcaaagtccagactgtgg

SEQ ID NO: 7095 - DNA, 20 bp, synthetic construct
  source 1..20: mol_type = other DNA
ccgagccaggagcaccttcc

SEQ ID NO: 7096 - DNA, 20 bp, synthetic construct
  source 1..20: mol_type = other DNA
ctccacgaggatgtttcggg

SEQ ID NO: 7097 - DNA, 20 bp, synthetic construct
  source 1..20: mol_type = other DNA
catcaagctgagtgaccctg

SEQ ID NO: 7098 - DNA, 20 bp, synthetic construct
  source 1..20: mol_type = other DNA
ggcgctcacctcagcagggc

SEQ ID NO: 7099 - DNA, 20 bp, synthetic construct
  source 1..20: mol_type = other DNA
caggagctatgaaaaggaca

SEQ ID NO: 7100 - DNA, 20 bp, synthetic construct
  source 1..20: mol_type = other DNA
gggccaggtccaacacggcc

SEQ ID NO: 7101 - DNA, 20 bp, synthetic construct
  source 1..20: mol_type = other DNA
gcagttccaagaggcggcag

SEQ ID NO: 7102 - DNA, 20 bp, synthetic construct
  source 1..20: mol_type = other DNA
cgctgccaaagttgccctgg

SEQ ID NO: 7103 - DNA, 20 bp, synthetic construct
  source 1..20: mol_type = other DNA
gagctctcgaagactgctgt

SEQ ID NO: 7104 - DNA, 20 bp, synthetic construct
  source 1..20: mol_type = other DNA
ttggggaagtaaaagctgtg

SEQ ID NO: 7105 - DNA, 20 bp, synthetic construct
  source 1..20: mol_type = other DNA
ggctgaggacctgtgcgtgc

SEQ ID NO: 7106 - DNA, 20 bp, synthetic construct
  source 1..20: mol_type = other DNA
ggtcgcggtgcacgcagcgg

SEQ ID NO: 7107 - DNA, 20 bp, synthetic construct
  source 1..20: mol_type = other DNA
ggcaccgccgaggctgctgg

SEQ ID NO: 7108 - DNA, 20 bp, synthetic construct
  source 1..20: mol_type = other DNA
tcgggggcatacctggagag

SEQ ID NO: 7109 - DNA, 20 bp, synthetic construct
  source 1..20: mol_type = other DNA
gtacagcaggacttgggtgc

SEQ ID NO: 7110 - DNA, 20 bp, synthetic construct
  source 1..20: mol_type = other DNA
cttccaggaatgactgggga

SEQ ID NO: 7111 - DNA, 20 bp, synthetic construct
  source 1..20: mol_type = other DNA
aactccaattttatgaggac

SEQ ID NO: 7112 - DNA, 20 bp, synthetic construct
  source 1..20: mol_type = other DNA
cctccgtggccagagcaaag

SEQ ID NO: 7113 - DNA, 20 bp, synthetic construct
  source 1..20: mol_type = other DNA
cccccagcaccgcagtgacc

SEQ ID NO: 7114 - DNA, 20 bp, synthetic construct
  source 1..20: mol_type = other DNA
atgcagggcaccagcctccg

SEQ ID NO: 7115 - DNA, 20 bp, synthetic construct
  source 1..20: mol_type = other DNA
ggcaggccttgtagctgcag

SEQ ID NO: 7116 - DNA, 20 bp, synthetic construct
  source 1..20: mol_type = other DNA
gtcacgaatgacggctcgga

SEQ ID NO: 7117 - DNA, 20 bp, synthetic construct
  source 1..20: mol_type = other DNA
gatcaggtcgcgcaggcttg

SEQ ID NO: 7118 - DNA, 20 bp, synthetic construct
  source 1..20: mol_type = other DNA
tcatctcttcaggtgcccgc

SEQ ID NO: 7119 - DNA, 20 bp, synthetic construct
  source 1..20: mol_type = other DNA
catctcttcaggtgcccgct

SEQ ID NO: 7120 - DNA, 20 bp, synthetic construct
  source 1..20: mol_type = other DNA
tgtctctcctcgaagatcgt

SEQ ID NO: 7121 - DNA, 20 bp, synthetic construct
  source 1..20: mol_type = other DNA
ctgcggcgctcacctcagca

SEQ ID NO: 7122 - DNA, 20 bp, synthetic construct
  source 1..20: mol_type = other DNA
ggcaggcctttgtcctccta

SEQ ID NO: 7123 - DNA, 20 bp, synthetic construct
  source 1..20: mol_type = other DNA
ggatcaggtcgcgcaggctt

SEQ ID NO: 7124 - DNA, 20 bp, synthetic construct
  source 1..20: mol_type = other DNA
agtgaccaggcggtgctctc

SEQ ID NO: 7125 - DNA, 20 bp, synthetic construct
  source 1..20: mol_type = other DNA
cggagaagatgtggctcggg

SEQ ID NO: 7126 - DNA, 20 bp, synthetic construct
  source 1..20: mol_type = other DNA
cgaatgacggctcggaagga

SEQ ID NO: 7127 - DNA, 20 bp, synthetic construct
  source 1..20: mol_type = other DNA
ggccaagtacatcatggacc

SEQ ID NO: 7128 - DNA, 20 bp, synthetic construct
  source 1..20: mol_type = other DNA
ccaggtcgcggtgcacgcag

SEQ ID NO: 7129 - DNA, 20 bp, synthetic construct
  source 1..20: mol_type = other DNA
cctccagcagttccaagagg

SEQ ID NO: 7130 - DNA, 20 bp, synthetic construct
  source 1..20: mol_type = other DNA
gcggatgatgggatgtgagc

SEQ ID NO: 7131 - DNA, 20 bp, synthetic construct
  source 1..20: mol_type = other DNA
cggcatctcgtgctgctcca

SEQ ID NO: 7132 - DNA, 20 bp, synthetic construct
  source 1..20: mol_type = other DNA
acttcctccagcagcctcgg

SEQ ID NO: 7133 - DNA, 20 bp, synthetic construct
  source 1..20: mol_type = other DNA
ggagcagccccagcccgtcg

SEQ ID NO: 7134 - DNA, 20 bp, synthetic construct
  source 1..20: mol_type = other DNA
agcacctctttgcccaggtg

SEQ ID NO: 7135 - DNA, 20 bp, synthetic construct
  source 1..20: mol_type = other DNA
ccagcacttcttctgcaagg

SEQ ID NO: 7136 - DNA, 20 bp, synthetic construct
  source 1..20: mol_type = other DNA
cgtgttggacctggcccgga

SEQ ID NO: 7137 - DNA, 20 bp, synthetic construct
  source 1..20: mol_type = other DNA
ctccaggtccatgatgtact

SEQ ID NO: 7138 - DNA, 20 bp, synthetic construct
  source 1..20: mol_type = other DNA
ttggacttttctatggggag

SEQ ID NO: 7139 - DNA, 20 bp, synthetic construct
  source 1..20: mol_type = other DNA
tccagctggctggcaccagg

SEQ ID NO: 7140 - DNA, 20 bp, synthetic construct
  source 1..20: mol_type = other DNA
ctccgtggccagagcaaaga

SEQ ID NO: 7141 - DNA, 20 bp, synthetic construct
  source 1..20: mol_type = other DNA
ccagaaggaaggttcctgtg

SEQ ID NO: 7142 - DNA, 20 bp, synthetic construct
  source 1..20: mol_type = other DNA
gaggacaaaggcctgcccca

SEQ ID NO: 7143 - DNA, 20 bp, synthetic construct
  source 1..20: mol_type = other DNA
tcgcaccttgcagatctgcg

SEQ ID NO: 7144 - DNA, 20 bp, synthetic construct
  source 1..20: mol_type = other DNA
gagggattcgggggcatacc

SEQ ID NO: 7145 - DNA, 20 bp, synthetic construct
  source 1..20: mol_type = other DNA
ggcaggatgcctacagggga

SEQ ID NO: 7146 - DNA, 20 bp, synthetic construct
  source 1..20: mol_type = other DNA
ggcccggatggcgcgagagc

SEQ ID NO: 7147 - DNA, 20 bp, synthetic construct
  source 1..20: mol_type = other DNA
cgtggtgtcagctatggccc

SEQ ID NO: 7148 - DNA, 20 bp, synthetic construct
  source 1..20: mol_type = other DNA
gtgagtgggcgcctccccgt

SEQ ID NO: 7149 - DNA, 20 bp, synthetic construct
  source 1..20: mol_type = other DNA
gtcatggagtacctgcccag

SEQ ID NO: 7150 - DNA, 20 bp, synthetic construct
  source 1..20: mol_type = other DNA
gagcactcaccagatagttg

SEQ ID NO: 7151 - DNA, 20 bp, synthetic construct
  source 1..20: mol_type = other DNA
ggtggcccccgagtgtctcc

SEQ ID NO: 7152 - DNA, 20 bp, synthetic construct
  source 1..20: mol_type = other DNA
tcgttcgtggcgctcgtgga

SEQ ID NO: 7153 - DNA, 20 bp, synthetic construct
  source 1..20: mol_type = other DNA
gtaccactccctctttgctc

SEQ ID NO: 7154 - DNA, 20 bp, synthetic construct
  source 1..20: mol_type = other DNA
ggttctcatgctgaatggtg

SEQ ID NO: 7155 - DNA, 20 bp, synthetic construct
  source 1..20: mol_type = other DNA
tggccagagcaaagagggag

SEQ ID NO: 7156 - DNA, 20 bp, synthetic construct
  source 1..20: mol_type = other DNA
gccatcaacaagctcaagac

SEQ ID NO: 7157 - DNA, 20 bp, synthetic construct
  source 1..20: mol_type = other DNA
gacatgtatctgcgaaaacg

SEQ ID NO: 7158 - DNA, 20 bp, synthetic construct
  source 1..20: mol_type = other DNA
gttctcatgctgaatggtga

SEQ ID NO: 7159 - DNA, 20 bp, synthetic construct
  source 1..20: mol_type = other DNA
ctggaaagtcgcagaagggc

SEQ ID NO: 7160 - DNA, 20 bp, synthetic construct
  source 1..20: mol_type = other DNA
caagcggcagcagcttagct

SEQ ID NO: 7161 - DNA, 20 bp, synthetic construct
  source 1..20: mol_type = other DNA
ccaggtcactgcggtgctgg

SEQ ID NO: 7162 - DNA, 20 bp, synthetic construct
  source 1..20: mol_type = other DNA
tggagtgggtaagaggccct

SEQ ID NO: 7163 - DNA, 20 bp, synthetic construct
  source 1..20: mol_type = other DNA
ccgcagggcatggagtacct

SEQ ID NO: 7164 - DNA, 20 bp, synthetic construct
  source 1..20: mol_type = other DNA
cagaaaatggggctctggcc

SEQ ID NO: 7165 - DNA, 20 bp, synthetic construct
  source 1..20: mol_type = other DNA
acggagaagatgtggctcgg

SEQ ID NO: 7166 - DNA, 20 bp, synthetic construct
  source 1..20: mol_type = other DNA
ggtactccatgccctgcggg

SEQ ID NO: 7167 - DNA, 20 bp, synthetic construct
  source 1..20: mol_type = other DNA
caccagatagttgagggcgt

SEQ ID NO: 7168 - DNA, 20 bp, synthetic construct
  source 1..20: mol_type = other DNA
ctccatgccctgcgggcggg

SEQ ID NO: 7169 - DNA, 20 bp, synthetic construct
  source 1..20: mol_type = other DNA
cagagccccattttctggtg

SEQ ID NO: 7170 - DNA, 20 bp, synthetic construct
  source 1..20: mol_type = other DNA
cagcagtcttcgagagctcc

SEQ ID NO: 7171 - DNA, 20 bp, synthetic construct
  source 1..20: mol_type = other DNA
ggaggaagctgtcaaagtcc

SEQ ID NO: 7172 - DNA, 20 bp, synthetic construct
  source 1..20: mol_type = other DNA
cccgagccacatcttctccg

SEQ ID NO: 7173 - DNA, 20 bp, synthetic construct
  source 1..20: mol_type = other DNA
tgcaggaatttgtacacctg

SEQ ID NO: 7174 - DNA, 20 bp, synthetic construct
  source 1..20: mol_type = other DNA
acgaatgacggctcggaagg

SEQ ID NO: 7175 - DNA, 20 bp, synthetic construct
  source 1..20: mol_type = other DNA
ctgctccgcgtggctggtga

SEQ ID NO: 7176 - DNA, 20 bp, synthetic construct
  source 1..20: mol_type = other DNA
cactcagcttgatgaagggc

SEQ ID NO: 7177 - DNA, 20 bp, synthetic construct
  source 1..20: mol_type = other DNA
gccatgagtgcaacttgcct

SEQ ID NO: 7178 - DNA, 20 bp, synthetic construct
  source 1..20: mol_type = other DNA
ccaggcggtgctctccggcc

SEQ ID NO: 7179 - DNA, 20 bp, synthetic construct
  source 1..20: mol_type = other DNA
cagggccagctctgtccact

SEQ ID NO: 7180 - DNA, 20 bp, synthetic construct
  source 1..20: mol_type = other DNA
ccagggcgctgaatgatggc

SEQ ID NO: 7181 - DNA, 20 bp, synthetic construct
  source 1..20: mol_type = other DNA
gcaggaatttgtacacctgg

SEQ ID NO: 7182 - DNA, 20 bp, synthetic construct
  source 1..20: mol_type = other DNA
gggaactcggcctcctgcga

SEQ ID NO: 7183 - DNA, 20 bp, synthetic construct
  source 1..20: mol_type = other DNA
aaggagaaagataggcgctg

SEQ ID NO: 7184 - DNA, 20 bp, synthetic construct
  source 1..20: mol_type = other DNA
gcttccagctggctggcacc

SEQ ID NO: 7185 - DNA, 20 bp, synthetic construct
  source 1..20: mol_type = other DNA
gtcagacgtctggagcttcg

SEQ ID NO: 7186 - DNA, 20 bp, synthetic construct
  source 1..20: mol_type = other DNA
atcctgcacccactaaaatc

SEQ ID NO: 7187 - DNA, 20 bp, synthetic construct
  source 1..20: mol_type = other DNA
ccatgagtgcaacttgcctg

SEQ ID NO: 7188 - DNA, 20 bp, synthetic construct
  source 1..20: mol_type = other DNA
gagcaggagggcttcgccga

SEQ ID NO: 7189 - DNA, 20 bp, synthetic construct
  source 1..20: mol_type = other DNA
ggcacttggtggccgccagc

SEQ ID NO: 7190 - DNA, 20 bp, synthetic construct
  source 1..20: mol_type = other DNA
tctggtcagggctcggacac

SEQ ID NO: 7191 - DNA, 20 bp, synthetic construct
  source 1..20: mol_type = other DNA
gcggctgcggaaccggctgg

SEQ ID NO: 7192 - DNA, 20 bp, synthetic construct
  source 1..20: mol_type = other DNA
agcgcaagcggctgcggaac

SEQ ID NO: 7193 - DNA, 20 bp, synthetic construct
  source 1..20: mol_type = other DNA
aagtggagcgcaagcggctg

SEQ ID NO: 7194 - DNA, 20 bp, synthetic construct
  source 1..20: mol_type = other DNA
agacgcccccgggcccagcc

SEQ ID NO: 7195 - DNA, 20 bp, synthetic construct
  source 1..20: mol_type = other DNA
tctcttcctagtctctcaca

SEQ ID NO: 7196 - DNA, 20 bp, synthetic construct
  source 1..20: mol_type = other DNA
tctctgggccgtagaggaaa

SEQ ID NO: 7197 - DNA, 20 bp, synthetic construct
  source 1..20: mol_type = other DNA
catctgcgcacgcacacagg

SEQ ID NO: 7198 - DNA, 20 bp, synthetic construct
  source 1..20: mol_type = other DNA
caccaagagttcgcatctga

SEQ ID NO: 7199 - DNA, 20 bp, synthetic construct
  source 1..20: mol_type = other DNA
caagagcggcggccgcgctt

SEQ ID NO: 7200 - DNA, 20 bp, synthetic construct
  source 1..20: mol_type = other DNA
tcgcacagatggcactggaa

SEQ ID NO: 7201 - DNA, 20 bp, synthetic construct
  source 1..20: mol_type = other DNA
ccctaccactgcaactggga

SEQ ID NO: 7202 - DNA, 20 bp, synthetic construct
  source 1..20: mol_type = other DNA
acagatggcactggaatggc

SEQ ID NO: 7203 - DNA, 20 bp, synthetic construct
  source 1..20: mol_type = other DNA
agaaggcacgatcgcacaga

SEQ ID NO: 7204 - DNA, 20 bp, synthetic construct
  source 1..20: mol_type = other DNA
cacgatcgcacagatggcac

SEQ ID NO: 7205 - DNA, 20 bp, synthetic construct
  source 1..20: mol_type = other DNA
gaagccctaccactgcaact

SEQ ID NO: 7206 - DNA, 20 bp, synthetic construct
  source 1..20: mol_type = other DNA
gatggcactggaatggccgg

SEQ ID NO: 7207 - DNA, 20 bp, synthetic construct
  source 1..20: mol_type = other DNA
catgtgcagcgccaggtgat

SEQ ID NO: 7208 - DNA, 20 bp, synthetic construct
  source 1..20: mol_type = other DNA
ccgtcccagttgcagtggta

SEQ ID NO: 7209 - DNA, 20 bp, synthetic construct
  source 1..20: mol_type = other DNA
cgcagccgtcccagttgcag

SEQ ID NO: 7210 - DNA, 20 bp, synthetic construct
  source 1..20: mol_type = other DNA
agaagccctaccactgcaac

SEQ ID NO: 7211 - DNA, 20 bp, synthetic construct
  source 1..20: mol_type = other DNA
tgaagtccagcacgctgttg

SEQ ID NO: 7212 - DNA, 20 bp, synthetic construct
  source 1..20: mol_type = other DNA
gcgccactaccgaaagcaca

SEQ ID NO: 7213 - DNA, 20 bp, synthetic construct
  source 1..20: mol_type = other DNA
cctcctgcaggccgcgctcg

SEQ ID NO: 7214 - DNA, 20 bp, synthetic construct
  source 1..20: mol_type = other DNA
accgaaagcacacgggccac

SEQ ID NO: 7215 - DNA, 20 bp, synthetic construct
  source 1..20: mol_type = other DNA
ccgccgccctcacctcctgc

SEQ ID NO: 7216 - DNA, 20 bp, synthetic construct
  source 1..20: mol_type = other DNA
cgggctggcgaaagtggaga

SEQ ID NO: 7217 - DNA, 20 bp, synthetic construct
  source 1..20: mol_type = other DNA
agcgccatggccgggacccg

SEQ ID NO: 7218 - DNA, 20 bp, synthetic construct
  source 1..20: mol_type = other DNA
agggcttctcacctgcaggg

SEQ ID NO: 7219 - DNA, 20 bp, synthetic construct
  source 1..20: mol_type = other DNA
gccgtcccagttgcagtggt

SEQ ID NO: 7220 - DNA, 20 bp, synthetic construct
  source 1..20: mol_type = other DNA
gtagctgcaggtgtgagtgg

SEQ ID NO: 7221 - DNA, 20 bp, synthetic construct
  source 1..20: mol_type = other DNA
gccgcagcccgcgtagctgc

SEQ ID NO: 7222 - DNA, 20 bp, synthetic construct
  source 1..20: mol_type = other DNA
gctgcgggcgacagggcaat

SEQ ID NO: 7223 - DNA, 20 bp, synthetic construct
  source 1..20: mol_type = other DNA
cgccttcagatgcgaactct

SEQ ID NO: 7224 - DNA, 20 bp, synthetic construct
  source 1..20: mol_type = other DNA
cgccactaccgaaagcacac

SEQ ID NO: 7225 - DNA, 20 bp, synthetic construct
  source 1..20: mol_type = other DNA
gcgcatctgcgcacgcacac

SEQ ID NO: 7226 - DNA, 20 bp, synthetic construct
  source 1..20: mol_type = other DNA
tgagctgctgcgacccgagc

SEQ ID NO: 7227 - DNA, 20 bp, synthetic construct
  source 1..20: mol_type = other DNA
tcagcgccatggccgggacc

SEQ ID NO: 7228 - DNA, 20 bp, synthetic construct
  source 1..20: mol_type = other DNA
tcgtgcatgcgaggtcccgg

SEQ ID NO: 7229 - DNA, 20 bp, synthetic construct
  source 1..20: mol_type = other DNA
cagatgcgaactcttggtgt

SEQ ID NO: 7230 - DNA, 20 bp, synthetic construct
  source 1..20: mol_type = other DNA
ctggcgaaagtggagaagga

SEQ ID NO: 7231 - DNA, 20 bp, synthetic construct
  source 1..20: mol_type = other DNA
ggccagcgctgcgggcgaca

SEQ ID NO: 7232 - DNA, 20 bp, synthetic construct
  source 1..20: mol_type = other DNA
caggtgatcggagcgcgaga

SEQ ID NO: 7233 - DNA, 20 bp, synthetic construct
  source 1..20: mol_type = other DNA
acctggcgctgcacatgaaa

SEQ ID NO: 7234 - DNA, 20 bp, synthetic construct
  source 1..20: mol_type = other DNA
cagcgccatggccgggaccc

SEQ ID NO: 7235 - DNA, 20 bp, synthetic construct
  source 1..20: mol_type = other DNA
agggaccagtacatgaggac

SEQ ID NO: 7236 - DNA, 20 bp, synthetic construct
  source 1..20: mol_type = other DNA
tctcgacacagcaggtcaag

SEQ ID NO: 7237 - DNA, 20 bp, synthetic construct
  source 1..20: mol_type = other DNA
cgaatatgatccaacaatag

SEQ ID NO: 7238 - DNA, 20 bp, synthetic construct
  source 1..20: mol_type = other DNA
tctctgctccttttggtgac

SEQ ID NO: 7239 - DNA, 20 bp, synthetic construct
  source 1..20: mol_type = other DNA
ggagcaggtctggctggctc

SEQ ID NO: 7240 - DNA, 20 bp, synthetic construct
  source 1..20: mol_type = other DNA
ggagtatgtgaatgtgtccc

SEQ ID NO: 7241 - DNA, 20 bp, synthetic construct
  source 1..20: mol_type = other DNA
tacgtgaacgttccggagag

SEQ ID NO: 7242 - DNA, 20 bp, synthetic construct
  source 1..20: mol_type = other DNA
gatggcctcctccatctgca

SEQ ID NO: 7243 - DNA, 20 bp, synthetic construct
  source 1..20: mol_type = other DNA
ggggcggactcacctatctg

SEQ ID NO: 7244 - DNA, 20 bp, synthetic construct
  source 1..20: mol_type = other DNA
gtgcactgccacagactgcc

SEQ ID NO: 7245 - DNA, 20 bp, synthetic construct
  source 1..20: mol_type = other DNA
accctgaaaggaagtgaaaa

SEQ ID NO: 7246 - DNA, 20 bp, synthetic construct
  source 1..20: mol_type = other DNA
gtaggagcctgggaaagaga

SEQ ID NO: 7247 - DNA, 20 bp, synthetic construct
  source 1..20: mol_type = other DNA
acgacagcacatcctcagat

SEQ ID NO: 7248 - DNA, 20 bp, synthetic construct
  source 1..20: mol_type = other DNA
atactcccggctgccatctg

SEQ ID NO: 7249 - DNA, 20 bp, synthetic construct
  source 1..20: mol_type = other DNA
cagcaggagccccagcacgc

SEQ ID NO: 7250 - DNA, 20 bp, synthetic construct
  source 1..20: mol_type = other DNA
gctcctgctgctgcccatcc

SEQ ID NO: 7251 - DNA, 20 bp, synthetic construct
  source 1..20: mol_type = other DNA
gcagaggaagtggaggaaga

SEQ ID NO: 7252 - DNA, 20 bp, synthetic construct
  source 1..20: mol_type = other DNA
cggcctcgtgagtacaagga

SEQ ID NO: 7253 - DNA, 20 bp, synthetic construct
  source 1..20: mol_type = other DNA
gcaggagccccagcacgcag

SEQ ID NO: 7254 - DNA, 20 bp, synthetic construct
  source 1..20: mol_type = other DNA
cagaggaagtggaggaagag

SEQ ID NO: 7255 - DNA, 20 bp, synthetic construct
  source 1..20: mol_type = other DNA
tttaccagtttgtatccaag

SEQ ID NO: 7256 - DNA, 20 bp, synthetic construct
  source 1..20: mol_type = other DNA
agcaggagccccagcacgca

SEQ ID NO: 7257 - DNA, 20 bp, synthetic construct
  source 1..20: mol_type = other DNA
caggctacctgtgagtggcc

SEQ ID NO: 7258 - DNA, 20 bp, synthetic construct
  source 1..20: mol_type = other DNA
ccaggaggcagaggaagtgg

SEQ ID NO: 7259 - DNA, 20 bp, synthetic construct
  source 1..20: mol_type = other DNA
ccacagactgccaggtgagt

SEQ ID NO: 7260 - DNA, 20 bp, synthetic construct
  source 1..20: mol_type = other DNA
tgtggcgagctacgagaacg

SEQ ID NO: 7261 - DNA, 20 bp, synthetic construct
  source 1..20: mol_type = other DNA
caacccaggctacctgtgag

SEQ ID NO: 7262 - DNA, 20 bp, synthetic construct
  source 1..20: mol_type = other DNA
ccaggtgagtgggaaactgg

SEQ ID NO: 7263 - DNA, 20 bp, synthetic construct
  source 1..20: mol_type = other DNA
agatccccgcagccccttgg

SEQ ID NO: 7264 - DNA, 20 bp, synthetic construct
  source 1..20: mol_type = other DNA
caggtgagtgggaaactggt

SEQ ID NO: 7265 - DNA, 20 bp, synthetic construct
  source 1..20: mol_type = other DNA
cccttggtgagtgcctgggg

SEQ ID NO: 7266 - DNA, 20 bp, synthetic construct
  source 1..20: mol_type = other DNA
cctccatctgcaggggagct

SEQ ID NO: 7267 - DNA, 20 bp, synthetic construct
  source 1..20: mol_type = other DNA
atctgaggatgtgctgtcgt

SEQ ID NO: 7268 - DNA, 20 bp, synthetic construct
  source 1..20: mol_type = other DNA
taccaccatcagaatcccgc

SEQ ID NO: 7269 - DNA, 20 bp, synthetic construct
  source 1..20: mol_type = other DNA
ctacctgtgagtggccaggt

SEQ ID NO: 7270 - DNA, 20 bp, synthetic construct
  source 1..20: mol_type = other DNA
gctacctgtgagtggccagg

SEQ ID NO: 7271 - DNA, 20 bp, synthetic construct
  source 1..20: mol_type = other DNA
caccctgaaaggaagtgaaa

SEQ ID NO: 7272 - DNA, 20 bp, synthetic construct
  source 1..20: mol_type = other DNA
ggatggcctcctccatctgc

SEQ ID NO: 7273 - DNA, 20 bp, synthetic construct
  source 1..20: mol_type = other DNA
acgtgaacgttccggagagc

SEQ ID NO: 7274 - DNA, 20 bp, synthetic construct
  source 1..20: mol_type = other DNA
cttctgggagtcaaaggtca

SEQ ID NO: 7275 - DNA, 20 bp, synthetic construct
  source 1..20: mol_type = other DNA
cccactcacctggcagtctg

SEQ ID NO: 7276 - DNA, 20 bp, synthetic construct
  source 1..20: mol_type = other DNA
gctcctgcactcagcacccc

SEQ ID NO: 7277 - DNA, 20 bp, synthetic construct
  source 1..20: mol_type = other DNA
cagcacgcaggggaccagga

SEQ ID NO: 7278 - DNA, 20 bp, synthetic construct
  source 1..20: mol_type = other DNA
gaagatccccgcagcccctt

SEQ ID NO: 7279 - DNA, 20 bp, synthetic construct
  source 1..20: mol_type = other DNA
gccatcaacatggccaggat

SEQ ID NO: 7280 - DNA, 20 bp, synthetic construct
  source 1..20: mol_type = other DNA
gtgtcccaggaactgcatcc

SEQ ID NO: 7281 - DNA, 20 bp, synthetic construct
  source 1..20: mol_type = other DNA
ggcttcaaagagagggtgag

SEQ ID NO: 7282 - DNA, 20 bp, synthetic construct
  source 1..20: mol_type = other DNA
actcacgaggccgtttgaac

SEQ ID NO: 7283 - DNA, 20 bp, synthetic construct
  source 1..20: mol_type = other DNA
tcaggaagcaccaccctgaa

SEQ ID NO: 7284 - DNA, 20 bp, synthetic construct
  source 1..20: mol_type = other DNA
ttctgggagtcaaaggtcag

SEQ ID NO: 7285 - DNA, 20 bp, synthetic construct
  source 1..20: mol_type = other DNA
tactcccggctgccatctgt

SEQ ID NO: 7286 - DNA, 20 bp, synthetic construct
  source 1..20: mol_type = other DNA
cactggagaaggcactgtct

SEQ ID NO: 7287 - DNA, 20 bp, synthetic construct
  source 1..20: mol_type = other DNA
aagatccccgcagccccttg

SEQ ID NO: 7288 - DNA, 20 bp, synthetic construct
  source 1..20: mol_type = other DNA
atggcctcctccatctgcag

SEQ ID NO: 7289 - DNA, 20 bp, synthetic construct
  source 1..20: mol_type = other DNA
tctgcaggggagctcggagc

SEQ ID NO: 7290 - DNA, 20 bp, synthetic construct
  source 1..20: mol_type = other DNA
tcttctgggagtcaaaggtc

SEQ ID NO: 7291 - DNA, 20 bp, synthetic construct
  source 1..20: mol_type = other DNA
actcccggctgccatctgtg

SEQ ID NO: 7292 - DNA, 20 bp, synthetic construct
  source 1..20: mol_type = other DNA
cgtaggagcctgggaaagag

SEQ ID NO: 7293 - DNA, 20 bp, synthetic construct
  source 1..20: mol_type = other DNA
ggtctggctggctcaggggt

SEQ ID NO: 7294 - DNA, 20 bp, synthetic construct
  source 1..20: mol_type = other DNA
ctactcacgggatggggagc

SEQ ID NO: 7295 - DNA, 20 bp, synthetic construct
  source 1..20: mol_type = other DNA
acgagaacgagggtgcgtct

SEQ ID NO: 7296 - DNA, 20 bp, synthetic construct
  source 1..20: mol_type = other DNA
cacgggatggggagcaggtc

SEQ ID NO: 7297 - DNA, 20 bp, synthetic construct
  source 1..20: mol_type = other DNA
tgggtaggcaggtggccagg

SEQ ID NO: 7298 - DNA, 20 bp, synthetic construct
  source 1..20: mol_type = other DNA
tgccatcaacatggccagga

SEQ ID NO: 7299 - DNA, 20 bp, synthetic construct
  source 1..20: mol_type = other DNA
gaggacgactatcacaaccc

SEQ ID NO: 7300 - DNA, 20 bp, synthetic construct
  source 1..20: mol_type = other DNA
tggctggctcaggggtgggt

SEQ ID NO: 7301 - DNA, 20 bp, synthetic construct
  source 1..20: mol_type = other DNA
gtgggtaggcaggtggccag

SEQ ID NO: 7302 - DNA, 20 bp, synthetic construct
  source 1..20: mol_type = other DNA
gagcctgggaaagagagggc

SEQ ID NO: 7303 - DNA, 20 bp, synthetic construct
  source 1..20: mol_type = other DNA
atgccaggggtgctgagtgc

SEQ ID NO: 7304 - DNA, 20 bp, synthetic construct
  source 1..20: mol_type = other DNA
agcaggtctggctggctcag

SEQ ID NO: 7305 - DNA, 20 bp, synthetic construct
  source 1..20: mol_type = other DNA
acggcctcgtgagtacaagg

SEQ ID NO: 7306 - DNA, 20 bp, synthetic construct
  source 1..20: mol_type = other DNA
gtaggaggtgacaggtgggt

SEQ ID NO: 7307 - DNA, 20 bp, synthetic construct
  source 1..20: mol_type = other DNA
ccagggggcaaccgtgtctg

SEQ ID NO: 7308 - DNA, 20 bp, synthetic construct
  source 1..20: mol_type = other DNA
gagcaggtctggctggctca

SEQ ID NO: 7309 - DNA, 20 bp, synthetic construct
  source 1..20: mol_type = other DNA
caaacggcctcgtgagtaca

SEQ ID NO: 7310 - DNA, 20 bp, synthetic construct
  source 1..20: mol_type = other DNA
cctcagacacggttgccccc

SEQ ID NO: 7311 - DNA, 20 bp, synthetic construct
  source 1..20: mol_type = other DNA
tccagattacgagaatctgc

SEQ ID NO: 7312 - DNA, 20 bp, synthetic construct
  source 1..20: mol_type = other DNA
ctggctcaggggtgggtagg

SEQ ID NO: 7313 - DNA, 20 bp, synthetic construct
  source 1..20: mol_type = other DNA
gccccagcacgcaggggacc

SEQ ID NO: 7314 - DNA, 20 bp, synthetic construct
  source 1..20: mol_type = other DNA
ctggtaaaggagacacagct

SEQ ID NO: 7315 - DNA, 20 bp, synthetic construct
  source 1..20: mol_type = other DNA
cacacacagtgccatcaaca

SEQ ID NO: 7316 - DNA, 20 bp, synthetic construct
  source 1..20: mol_type = other DNA
tcctgcagattctcgtaatc

SEQ ID NO: 7317 - DNA, 20 bp, synthetic construct
  source 1..20: mol_type = other DNA
gccacagactgccaggtgag

SEQ ID NO: 7318 - DNA, 20 bp, synthetic construct
  source 1..20: mol_type = other DNA
tggccaggatgggcagcagc

SEQ ID NO: 7319 - DNA, 20 bp, synthetic construct
  source 1..20: mol_type = other DNA
atcctcatccgcatcctcac

SEQ ID NO: 7320 - DNA, 20 bp, synthetic construct
  source 1..20: mol_type = other DNA
cgtgaacgttccggagagcg

SEQ ID NO: 7321 - DNA, 20 bp, synthetic construct
  source 1..20: mol_type = other DNA
ggtgggtaggaggtgacagg

SEQ ID NO: 7322 - DNA, 20 bp, synthetic construct
  source 1..20: mol_type = other DNA
gtggcgagctacgagaacga

SEQ ID NO: 7323 - DNA, 20 bp, synthetic construct
  source 1..20: mol_type = other DNA
caggggagctcggagcaggc

SEQ ID NO: 7324 - DNA, 20 bp, synthetic construct
  source 1..20: mol_type = other DNA
gcttcaaagagagggtgaga

SEQ ID NO: 7325 - DNA, 20 bp, synthetic construct
  source 1..20: mol_type = other DNA
acagtgccatcaacatggcc

SEQ ID NO: 7326 - DNA, 20 bp, synthetic construct
  source 1..20: mol_type = other DNA
ctcgtagctcgccacactgt

SEQ ID NO: 7327 - DNA, 20 bp, synthetic construct
  source 1..20: mol_type = other DNA
gcagatggaggaggccatcc

SEQ ID NO: 7328 - DNA, 20 bp, synthetic construct
  source 1..20: mol_type = other DNA
accaccatcagaatcccgcc

SEQ ID NO: 7329 - DNA, 20 bp, synthetic construct
  source 1..20: mol_type = other DNA
agacgaggaggacggggaac

SEQ ID NO: 7330 - DNA, 20 bp, synthetic construct
  source 1..20: mol_type = other DNA
gcgagagcaccgcgggtgag

SEQ ID NO: 7331 - DNA, 20 bp, synthetic construct
  source 1..20: mol_type = other DNA
gcacggtaagaggcgagaca

SEQ ID NO: 7332 - DNA, 20 bp, synthetic construct
  source 1..20: mol_type = other DNA
cgggagagcgagagcaccgc

SEQ ID NO: 7333 - DNA, 20 bp, synthetic construct
  source 1..20: mol_type = other DNA
gtgattcagaacctggagcg

SEQ ID NO: 7334 - DNA, 20 bp, synthetic construct
  source 1..20: mol_type = other DNA
cctgcagattgcagaaggca

SEQ ID NO: 7335 - DNA, 20 bp, synthetic construct
  source 1..20: mol_type = other DNA
cgtagggatgaccaacccgg

SEQ ID NO: 7336 - DNA, 20 bp, synthetic construct
  source 1..20: mol_type = other DNA
agctgtgcagagcgataacc

SEQ ID NO: 7337 - DNA, 20 bp, synthetic construct
  source 1..20: mol_type = other DNA
ctgcttcatgaggttggcct

SEQ ID NO: 7338 - DNA, 20 bp, synthetic construct
  source 1..20: mol_type = other DNA
ggtcatccctacgggttgat

SEQ ID NO: 7339 - DNA, 20 bp, synthetic construct
  source 1..20: mol_type = other DNA
atgagttggtacagctcctc

SEQ ID NO: 7340 - DNA, 20 bp, synthetic construct
  source 1..20: mol_type = other DNA
gaagaaccagctgtgcaggg

SEQ ID NO: 7341 - DNA, 20 bp, synthetic construct
  source 1..20: mol_type = other DNA
aggctggtactggccctctg

SEQ ID NO: 7342 - DNA, 20 bp, synthetic construct
  source 1..20: mol_type = other DNA
ccaggttctgaatcacctcc

SEQ ID NO: 7343 - DNA, 20 bp, synthetic construct
  source 1..20: mol_type = other DNA
cgtcgggctcactggtgtaa

SEQ ID NO: 7344 - DNA, 20 bp, synthetic construct
  source 1..20: mol_type = other DNA
ccgggagagcgagagcaccg

SEQ ID NO: 7345 - DNA, 20 bp, synthetic construct
  source 1..20: mol_type = other DNA
aaggcgcagtccctgaccac

SEQ ID NO: 7346 - DNA, 20 bp, synthetic construct
  source 1..20: mol_type = other DNA
agcatctgcgaggacgaggg

SEQ ID NO: 7347 - DNA, 20 bp, synthetic construct
  source 1..20: mol_type = other DNA
gcccatctgaagcatctgcg

SEQ ID NO: 7348 - DNA, 20 bp, synthetic construct
  source 1..20: mol_type = other DNA
tccaggttctgaatcacctc

SEQ ID NO: 7349 - DNA, 20 bp, synthetic construct
  source 1..20: mol_type = other DNA
gcgccctgacaactgtccag

SEQ ID NO: 7350 - DNA, 20 bp, synthetic construct
  source 1..20: mol_type = other DNA
ccctcagggaccatgggctg

SEQ ID NO: 7351 - DNA, 20 bp, synthetic construct
  source 1..20: mol_type = other DNA
tgagccgcaaggacgcggag

SEQ ID NO: 7352 - DNA, 20 bp, synthetic construct
  source 1..20: mol_type = other DNA
tcaccttgcagtggggaagc

SEQ ID NO: 7353 - DNA, 20 bp, synthetic construct
  source 1..20: mol_type = other DNA
cacggccgcatcccttaccc

SEQ ID NO: 7354 - DNA, 20 bp, synthetic construct
  source 1..20: mol_type = other DNA
tcctcccaccacggcttctg

SEQ ID NO: 7355 - DNA, 20 bp, synthetic construct
  source 1..20: mol_type = other DNA
ttacttgggctgccatgtcc

SEQ ID NO: 7356 - DNA, 20 bp, synthetic construct
  source 1..20: mol_type = other DNA
tgtactcgttgtcctcaatg

SEQ ID NO: 7357 - DNA, 20 bp, synthetic construct
  source 1..20: mol_type = other DNA
gcccagatctccgtcgtgag

SEQ ID NO: 7358 - DNA, 20 bp, synthetic construct
  source 1..20: mol_type = other DNA
gcctcggccaggaaggcgtc

SEQ ID NO: 7359 - DNA, 20 bp, synthetic construct
  source 1..20: mol_type = other DNA
agcggcagctcctggcgccc

SEQ ID NO: 7360 - DNA, 20 bp, synthetic construct
  source 1..20: mol_type = other DNA
ctgggtaagggatgcggccg

SEQ ID NO: 7361 - DNA, 20 bp, synthetic construct
  source 1..20: mol_type = other DNA
ccgggacttcgaccagaacc

SEQ ID NO: 7362 - DNA, 20 bp, synthetic construct
  source 1..20: mol_type = other DNA
ctgaagcatctgcgaggacg

SEQ ID NO: 7363 - DNA, 20 bp, synthetic construct
  source 1..20: mol_type = other DNA
ggcggtgaagagcctgaagc

SEQ ID NO: 7364 - DNA, 20 bp, synthetic construct
  source 1..20: mol_type = other DNA
aaatccactagactccctgt

SEQ ID NO: 7365 - DNA, 20 bp, synthetic construct
  source 1..20: mol_type = other DNA
accaactcatgaggctgtgc

SEQ ID NO: 7366 - DNA, 20 bp, synthetic construct
  source 1..20: mol_type = other DNA
tccagcacagcctcatgagt

SEQ ID NO: 7367 - DNA, 20 bp, synthetic construct
  source 1..20: mol_type = other DNA
catctgcgaggacgagggag

SEQ ID NO: 7368 - DNA, 20 bp, synthetic construct
  source 1..20: mol_type = other DNA
ctgaatacatggagaatggt

SEQ ID NO: 7369 - DNA, 20 bp, synthetic construct
  source 1..20: mol_type = other DNA
tggtcaacttgatgcctgaa

SEQ ID NO: 7370 - DNA, 20 bp, synthetic construct
  source 1..20: mol_type = other DNA
ttgcagctgcttcatgaggt

SEQ ID NO: 7371 - DNA, 20 bp, synthetic construct
  source 1..20: mol_type = other DNA
tggtcatccctacgggttga

SEQ ID NO: 7372 - DNA, 20 bp, synthetic construct
  source 1..20: mol_type = other DNA
gcatctgcgaggacgaggga

SEQ ID NO: 7373 - DNA, 20 bp, synthetic construct
  source 1..20: mol_type = other DNA
ccgtgcccttgccatccagt

SEQ ID NO: 7374 - DNA, 20 bp, synthetic construct
  source 1..20: mol_type = other DNA
tgcctggggtcaccttgcag

SEQ ID NO: 7375 - DNA, 20 bp, synthetic construct
  source 1..20: mol_type = other DNA
tgagctgcagccacagccca

SEQ ID NO: 7376 - DNA, 20 bp, synthetic construct
  source 1..20: mol_type = other DNA
ccgctcctgcgccacggagg

SEQ ID NO: 7377 - DNA, 20 bp, synthetic construct
  source 1..20: mol_type = other DNA
caacgggcacacgaaggtgg

SEQ ID NO: 7378 - DNA, 20 bp, synthetic construct
  source 1..20: mol_type = other DNA
tcatgaggttggcctcggcc

SEQ ID NO: 7379 - DNA, 20 bp, synthetic construct
  source 1..20: mol_type = other DNA
gcagctgcaacaccagcggc

SEQ ID NO: 7380 - DNA, 20 bp, synthetic construct
  source 1..20: mol_type = other DNA
cactcgccgctcctgcgcca

SEQ ID NO: 7381 - DNA, 20 bp, synthetic construct
  source 1..20: mol_type = other DNA
agctgcaagattgcagactt

SEQ ID NO: 7382 - DNA, 20 bp, synthetic construct
  source 1..20: mol_type = other DNA
ccgaaatggctctgaggtgc

SEQ ID NO: 7383 - DNA, 20 bp, synthetic construct
  source 1..20: mol_type = other DNA
cagcccaagtaaggagactg

SEQ ID NO: 7384 - DNA, 20 bp, synthetic construct
  source 1..20: mol_type = other DNA
tgaagcatctgcgaggacga

SEQ ID NO: 7385 - DNA, 20 bp, synthetic construct
  source 1..20: mol_type = other DNA
gcagcccaagtaaggagact

SEQ ID NO: 7386 - DNA, 20 bp, synthetic construct
  source 1..20: mol_type = other DNA
gcatggcattcattgaagag

SEQ ID NO: 7387 - DNA, 20 bp, synthetic construct
  source 1..20: mol_type = other DNA
cttgaagaaccagctgtgca

SEQ ID NO: 7388 - DNA, 20 bp, synthetic construct
  source 1..20: mol_type = other DNA
gctgccgctccgcgtccttg

SEQ ID NO: 7389 - DNA, 20 bp, synthetic construct
  source 1..20: mol_type = other DNA
atcctgaatgaatgaatgga

SEQ ID NO: 7390 - DNA, 20 bp, synthetic construct
  source 1..20: mol_type = other DNA
gcctgcggatccctggctgt

SEQ ID NO: 7391 - DNA, 20 bp, synthetic construct
  source 1..20: mol_type = other DNA
ctggcgcccgggaacactca

SEQ ID NO: 7392 - DNA, 20 bp, synthetic construct
  source 1..20: mol_type = other DNA
tggacatggcagcccaagta

SEQ ID NO: 7393 - DNA, 20 bp, synthetic construct
  source 1..20: mol_type = other DNA
cacggtaagaggcgagacag

SEQ ID NO: 7394 - DNA, 20 bp, synthetic construct
  source 1..20: mol_type = other DNA
gaagccccagaagccgtggt

SEQ ID NO: 7395 - DNA, 20 bp, synthetic construct
  source 1..20: mol_type = other DNA
tgatgatgtagatgggctcc

SEQ ID NO: 7396 - DNA, 20 bp, synthetic construct
  source 1..20: mol_type = other DNA
ccgtaagtggggacccgtcg

SEQ ID NO: 7397 - DNA, 20 bp, synthetic construct
  source 1..20: mol_type = other DNA
accgtgcccttgccatccag

SEQ ID NO: 7398 - DNA, 20 bp, synthetic construct
  source 1..20: mol_type = other DNA
cccagatctccgtcgtgaga

SEQ ID NO: 7399 - DNA, 20 bp, synthetic construct
  source 1..20: mol_type = other DNA
ggcacggtaagaggcgagac

SEQ ID NO: 7400 - DNA, 20 bp, synthetic construct
  source 1..20: mol_type = other DNA
aacgatcctgaatgaatgaa

SEQ ID NO: 7401 - DNA, 20 bp, synthetic construct
  source 1..20: mol_type = other DNA
cgggacttcgaccagaacca

SEQ ID NO: 7402 - DNA, 20 bp, synthetic construct
  source 1..20: mol_type = other DNA
cccgttgtagtaccctgggt

SEQ ID NO: 7403 - DNA, 20 bp, synthetic construct
  source 1..20: mol_type = other DNA
ccattatcccatagtcccac

SEQ ID NO: 7404 - DNA, 20 bp, synthetic construct
  source 1..20: mol_type = other DNA
gatgagcagctgtggagtgg

SEQ ID NO: 7405 - DNA, 20 bp, synthetic construct
  source 1..20: mol_type = other DNA
cctggttctggtcgaagtcc

SEQ ID NO: 7406 - DNA, 20 bp, synthetic construct
  source 1..20: mol_type = other DNA
tcgccgctcctgcgccacgg

SEQ ID NO: 7407 - DNA, 20 bp, synthetic construct
  source 1..20: mol_type = other DNA
cctacgggttgatgggtgaa

SEQ ID NO: 7408 - DNA, 20 bp, synthetic construct
  source 1..20: mol_type = other DNA
gctccgcgtccttgcggctc

SEQ ID NO: 7409 - DNA, 20 bp, synthetic construct
  source 1..20: mol_type = other DNA
ccacagcccatggtccctga

SEQ ID NO: 7410 - DNA, 20 bp, synthetic construct
  source 1..20: mol_type = other DNA
gccccagaagccgtggtggg

SEQ ID NO: 7411 - DNA, 20 bp, synthetic construct
  source 1..20: mol_type = other DNA
accctgggtcggggaaggga

SEQ ID NO: 7412 - DNA, 20 bp, synthetic construct
  source 1..20: mol_type = other DNA
aaggagccgtgagtgttccc

SEQ ID NO: 7413 - DNA, 20 bp, synthetic construct
  source 1..20: mol_type = other DNA
tctaacctgggtaagggatg

SEQ ID NO: 7414 - DNA, 20 bp, synthetic construct
  source 1..20: mol_type = other DNA
agccaccgttgtccagatta

SEQ ID NO: 7415 - DNA, 20 bp, synthetic construct
  source 1..20: mol_type = other DNA
aggacgagtgggaggttccc

SEQ ID NO: 7416 - DNA, 20 bp, synthetic construct
  source 1..20: mol_type = other DNA
tgtaaagacaaggggcatca

SEQ ID NO: 7417 - DNA, 20 bp, synthetic construct
  source 1..20: mol_type = other DNA
gtctgcaatcttgcagctca

SEQ ID NO: 7418 - DNA, 20 bp, synthetic construct
  source 1..20: mol_type = other DNA
ccttacccaggttagagcca

SEQ ID NO: 7419 - DNA, 20 bp, synthetic construct
  source 1..20: mol_type = other DNA
gtagtaccctgggtcgggga

SEQ ID NO: 7420 - DNA, 20 bp, synthetic construct
  source 1..20: mol_type = other DNA
caggttgtctgtaaagacaa

SEQ ID NO: 7421 - DNA, 20 bp, synthetic construct
  source 1..20: mol_type = other DNA
ccatgccttctgcaatctgc

SEQ ID NO: 7422 - DNA, 20 bp, synthetic construct
  source 1..20: mol_type = other DNA
cctcggccaggaaggcgtcc

SEQ ID NO: 7423 - DNA, 20 bp, synthetic construct
  source 1..20: mol_type = other DNA
ccgacccagggtactacaac

SEQ ID NO: 7424 - DNA, 20 bp, synthetic construct
  source 1..20: mol_type = other DNA
ctacaacgggcacacgaagg

SEQ ID NO: 7425 - DNA, 20 bp, synthetic construct
  source 1..20: mol_type = other DNA
cctggagcgaggctaccgca

SEQ ID NO: 7426 - DNA, 20 bp, synthetic construct
  source 1..20: mol_type = other DNA
gagcggcagctcctggcgcc

SEQ ID NO: 7427 - DNA, 20 bp, synthetic construct
  source 1..20: mol_type = other DNA
ccccactgcaaggtgacccc

SEQ ID NO: 7428 - DNA, 20 bp, synthetic construct
  source 1..20: mol_type = other DNA
caaggtgaccccaggcagca

SEQ ID NO: 7429 - DNA, 20 bp, synthetic construct
  source 1..20: mol_type = other DNA
gctgaagctggtggagcggc

SEQ ID NO: 7430 - DNA, 20 bp, synthetic construct
  source 1..20: mol_type = other DNA
ccgttgtagtaccctgggtc

SEQ ID NO: 7431 - DNA, 20 bp, synthetic construct
  source 1..20: mol_type = other DNA
caaaggtgggccggtcctct

SEQ ID NO: 7432 - DNA, 20 bp, synthetic construct
  source 1..20: mol_type = other DNA
tcaaaggtgggccggtcctc

SEQ ID NO: 7433 - DNA, 20 bp, synthetic construct
  source 1..20: mol_type = other DNA
agaccacacatctgacttga

SEQ ID NO: 7434 - DNA, 20 bp, synthetic construct
  source 1..20: mol_type = other DNA
tgctctcgctctcccggatg

SEQ ID NO: 7435 - DNA, 20 bp, synthetic construct
  source 1..20: mol_type = other DNA
tccctgaccacgggccagga

SEQ ID NO: 7436 - DNA, 20 bp, synthetic construct
  source 1..20: mol_type = other DNA
ccacttacggttcgggctcc

SEQ ID NO: 7437 - DNA, 20 bp, synthetic construct
  source 1..20: mol_type = other DNA
ccaagtaaggagactgggga

SEQ ID NO: 7438 - DNA, 20 bp, synthetic construct
  source 1..20: mol_type = other DNA
ctgaagctggtggagcggct

SEQ ID NO: 7439 - DNA, 20 bp, synthetic construct
  source 1..20: mol_type = other DNA
ggccgggaaaagtgattcga

SEQ ID NO: 7440 - DNA, 20 bp, synthetic construct
  source 1..20: mol_type = other DNA
cccaagtaaggagactgggg

SEQ ID NO: 7441 - DNA, 20 bp, synthetic construct
  source 1..20: mol_type = other DNA
ggtgtcagacaccagaatgt

SEQ ID NO: 7442 - DNA, 20 bp, synthetic construct
  source 1..20: mol_type = other DNA
cgagagcaccgcgggtgagc

SEQ ID NO: 7443 - DNA, 20 bp, synthetic construct
  source 1..20: mol_type = other DNA
ccatgcggtagcctcgctcc

SEQ ID NO: 7444 - DNA, 20 bp, synthetic construct
  source 1..20: mol_type = other DNA
catagtcccactggatggca

SEQ ID NO: 7445 - DNA, 20 bp, synthetic construct
  source 1..20: mol_type = other DNA
ggcgcaggagcggcgagtgg

SEQ ID NO: 7446 - DNA, 20 bp, synthetic construct
  source 1..20: mol_type = other DNA
caggagcggcgagtggtgga

SEQ ID NO: 7447 - DNA, 20 bp, synthetic construct
  source 1..20: mol_type = other DNA
cggaccagttcatgcaggcc

SEQ ID NO: 7448 - DNA, 20 bp, synthetic construct
  source 1..20: mol_type = other DNA
gcagcagggcctgaaagaca

SEQ ID NO: 7449 - DNA, 20 bp, synthetic construct
  source 1..20: mol_type = other DNA
tcctcgcagatgcttcagat

SEQ ID NO: 7450 - DNA, 20 bp, synthetic construct
  source 1..20: mol_type = other DNA
ttcaggatcgttttcactgt

SEQ ID NO: 7451 - DNA, 20 bp, synthetic construct
  source 1..20: mol_type = other DNA
ccacagctgctcatccgaaa

SEQ ID NO: 7452 - DNA, 20 bp, synthetic construct
  source 1..20: mol_type = other DNA
gggccaagtttcccattaag

SEQ ID NO: 7453 - DNA, 20 bp, synthetic construct
  source 1..20: mol_type = other DNA
agttgtcagggcgcaccatg

SEQ ID NO: 7454 - DNA, 20 bp, synthetic construct
  source 1..20: mol_type = other DNA
aggagctgtaccaactcatg

SEQ ID NO: 7455 - DNA, 20 bp, synthetic construct
  source 1..20: mol_type = other DNA
gcaaggtgaccccaggcagc

SEQ ID NO: 7456 - DNA, 20 bp, synthetic construct
  source 1..20: mol_type = other DNA
gatggcaagggcacggtaag

SEQ ID NO: 7457 - DNA, 20 bp, synthetic construct
  source 1..20: mol_type = other DNA
ctacatcatcactgaataca

SEQ ID NO: 7458 - DNA, 20 bp, synthetic construct
  source 1..20: mol_type = other DNA
ggacttcttcacggccacag

SEQ ID NO: 7459 - DNA, 20 bp, synthetic construct
  source 1..20: mol_type = other DNA
gcgccagaagccattaacta

SEQ ID NO: 7460 - DNA, 20 bp, synthetic construct
  source 1..20: mol_type = other DNA
tcacggctccttcctcatcc

SEQ ID NO: 7461 - DNA, 20 bp, synthetic construct
  source 1..20: mol_type = other DNA
gcccatggtccctgagggaa

SEQ ID NO: 7462 - DNA, 20 bp, synthetic construct
  source 1..20: mol_type = other DNA
ctcgctctcccggatgagga

SEQ ID NO: 7463 - DNA, 20 bp, synthetic construct
  source 1..20: mol_type = other DNA
ccctctcacgacggagatct

SEQ ID NO: 7464 - DNA, 20 bp, synthetic construct
  source 1..20: mol_type = other DNA
cgtaagtggggacccgtcgt

SEQ ID NO: 7465 - DNA, 20 bp, synthetic construct
  source 1..20: mol_type = other DNA
gatgaagccttcctggcccg

SEQ ID NO: 7466 - DNA, 20 bp, synthetic construct
  source 1..20: mol_type = other DNA
tcccactcgtcctcccacca

SEQ ID NO: 7467 - DNA, 20 bp, synthetic construct
  source 1..20: mol_type = other DNA
gtattcagtgatgatgtaga

SEQ ID NO: 7468 - DNA, 20 bp, synthetic construct
  source 1..20: mol_type = other DNA
cccggaggtgattcagaacc

SEQ ID NO: 7469 - DNA, 20 bp, synthetic construct
  source 1..20: mol_type = other DNA
actcatgaggctgtgctgga

SEQ ID NO: 7470 - DNA, 20 bp, synthetic construct
  source 1..20: mol_type = other DNA
gctggttcggctctacgctg

SEQ ID NO: 7471 - DNA, 20 bp, synthetic construct
  source 1..20: mol_type = other DNA
acagttcggggaggtgtgga

SEQ ID NO: 7472 - DNA, 20 bp, synthetic construct
  source 1..20: mol_type = other DNA
caacgagtacacagccaggg

SEQ ID NO: 7473 - DNA, 20 bp, synthetic construct
  source 1..20: mol_type = other DNA
gcggtgaagagcctgaagca

SEQ ID NO: 7474 - DNA, 20 bp, synthetic construct
  source 1..20: mol_type = other DNA
gggggaacagctccgcatcc

SEQ ID NO: 7475 - DNA, 20 bp, synthetic construct
  source 1..20: mol_type = other DNA
cgtagagccgaaccagccgc

SEQ ID NO: 7476 - DNA, 20 bp, synthetic construct
  source 1..20: mol_type = other DNA
caagtaaggagactggggag

SEQ ID NO: 7477 - DNA, 20 bp, synthetic construct
  source 1..20: mol_type = other DNA
catgtccaggagtttgttga

SEQ ID NO: 7478 - DNA, 20 bp, synthetic construct
  source 1..20: mol_type = other DNA
cctaaggaggaggcagagtg

SEQ ID NO: 7479 - DNA, 20 bp, synthetic construct
  source 1..20: mol_type = other DNA
cctggggtcaccttgcagtg

SEQ ID NO: 7480 - DNA, 20 bp, synthetic construct
  source 1..20: mol_type = other DNA
cgccagaagccattaactac

SEQ ID NO: 7481 - DNA, 20 bp, synthetic construct
  source 1..20: mol_type = other DNA
ctccgggttggtcatcccta

SEQ ID NO: 7482 - DNA, 20 bp, synthetic construct
  source 1..20: mol_type = other DNA
tggcctagcacgcctcattg

SEQ ID NO: 7483 - DNA, 20 bp, synthetic construct
  source 1..20: mol_type = other DNA
ccttgcagtggggaagccgg

SEQ ID NO: 7484 - DNA, 20 bp, synthetic construct
  source 1..20: mol_type = other DNA
gatgatgtagatgggctcct

SEQ ID NO: 7485 - DNA, 20 bp, synthetic construct
  source 1..20: mol_type = other DNA
atccgtaatctggacaacgg

SEQ ID NO: 7486 - DNA, 20 bp, synthetic construct
  source 1..20: mol_type = other DNA
ctcggccaggaaggcgtccg

SEQ ID NO: 7487 - DNA, 20 bp, synthetic construct
  source 1..20: mol_type = other DNA
tgaagcagctgcaacaccag

SEQ ID NO: 7488 - DNA, 20 bp, synthetic construct
  source 1..20: mol_type = other DNA
tcaccacctctccctggttc

SEQ ID NO: 7489 - DNA, 20 bp, synthetic construct
  source 1..20: mol_type = other DNA
ggcagcccaagtaaggagac

SEQ ID NO: 7490 - DNA, 20 bp, synthetic construct
  source 1..20: mol_type = other DNA
gtactacaacgggcacacga

SEQ ID NO: 7491 - DNA, 20 bp, synthetic construct
  source 1..20: mol_type = other DNA
gccacagcccatggtccctg

SEQ ID NO: 7492 - DNA, 20 bp, synthetic construct
  source 1..20: mol_type = other DNA
tgcaacaccagcggctggtt

SEQ ID NO: 7493 - DNA, 20 bp, synthetic construct
  source 1..20: mol_type = other DNA
actgaatacatggagaatgg

SEQ ID NO: 7494 - DNA, 20 bp, synthetic construct
  source 1..20: mol_type = other DNA
tgtccacttaatgggaaact

SEQ ID NO: 7495 - DNA, 20 bp, synthetic construct
  source 1..20: mol_type = other DNA
aggttgtctgtaaagacaag

SEQ ID NO: 7496 - DNA, 20 bp, synthetic construct
  source 1..20: mol_type = other DNA
gccgggaaaagtgattcgag

SEQ ID NO: 7497 - DNA, 20 bp, synthetic construct
  source 1..20: mol_type = other DNA
tagtaccctgggtcggggaa

SEQ ID NO: 7498 - DNA, 20 bp, synthetic construct
  source 1..20: mol_type = other DNA
cattacaccagtgagcccga

SEQ ID NO: 7499 - DNA, 20 bp, synthetic construct
  source 1..20: mol_type = other DNA
gttctgaatcacctccgggt

SEQ ID NO: 7500 - DNA, 20 bp, synthetic construct
  source 1..20: mol_type = other DNA
aaacttggcccctaaggagg

SEQ ID NO: 7501 - DNA, 20 bp, synthetic construct
  source 1..20: mol_type = other DNA
gggaaacttggcccctaagg

SEQ ID NO: 7502 - DNA, 20 bp, synthetic construct
  source 1..20: mol_type = other DNA
gaaggcgcagtccctgacca

SEQ ID NO: 7503 - DNA, 20 bp, synthetic construct
  source 1..20: mol_type = other DNA
ctgacggaaattgtcaccca

SEQ ID NO: 7504 - DNA, 20 bp, synthetic construct
  source 1..20: mol_type = other DNA
cgttgtagtaccctgggtcg

SEQ ID NO: 7505 - DNA, 20 bp, synthetic construct
  source 1..20: mol_type = other DNA
ctggacagttcggggaggtg

SEQ ID NO: 7506 - DNA, 20 bp, synthetic construct
  source 1..20: mol_type = other DNA
cgtcctcccaccacggcttc

SEQ ID NO: 7507 - DNA, 20 bp, synthetic construct
  source 1..20: mol_type = other DNA
aacgagtacacagccaggga

SEQ ID NO: 7508 - DNA, 20 bp, synthetic construct
  source 1..20: mol_type = other DNA
tgggtaagggatgcggccgt

SEQ ID NO: 7509 - DNA, 20 bp, synthetic construct
  source 1..20: mol_type = other DNA
cccggacgccttcctggccg

SEQ ID NO: 7510 - DNA, 20 bp, synthetic construct
  source 1..20: mol_type = other DNA
gaggttggcctcggccagga

SEQ ID NO: 7511 - DNA, 20 bp, synthetic construct
  source 1..20: mol_type = other DNA
agaagccccagaagccgtgg

SEQ ID NO: 7512 - DNA, 20 bp, synthetic construct
  source 1..20: mol_type = other DNA
cttacccaggttagagccaa

SEQ ID NO: 7513 - DNA, 20 bp, synthetic construct
  source 1..20: mol_type = other DNA
agctgtggagtgggggatga

SEQ ID NO: 7514 - DNA, 20 bp, synthetic construct
  source 1..20: mol_type = other DNA
gcggaccagttcatgcaggc

SEQ ID NO: 7515 - DNA, 20 bp, synthetic construct
  source 1..20: mol_type = other DNA
catcaacaaactcctggaca

SEQ ID NO: 7516 - DNA, 20 bp, synthetic construct
  source 1..20: mol_type = other DNA
acccgtagggatgaccaacc

SEQ ID NO: 7517 - DNA, 20 bp, synthetic construct
  source 1..20: mol_type = other DNA
ggatgagcagctgtggagtg

SEQ ID NO: 7518 - DNA, 20 bp, synthetic construct
  source 1..20: mol_type = other DNA
cccagaagccccagaagccg

SEQ ID NO: 7519 - DNA, 20 bp, synthetic construct
  source 1..20: mol_type = other DNA
tccgggttggtcatccctac

SEQ ID NO: 7520 - DNA, 20 bp, synthetic construct
  source 1..20: mol_type = other DNA
tttccatccagtcatcttcc

SEQ ID NO: 7521 - DNA, 20 bp, synthetic construct
  source 1..20: mol_type = other DNA
gctctacgctgtggtcaccc

SEQ ID NO: 7522 - DNA, 20 bp, synthetic construct
  source 1..20: mol_type = other DNA
acattacaagatccgtaatc

SEQ ID NO: 7523 - DNA, 20 bp, synthetic construct
  source 1..20: mol_type = other DNA
tcaccatcaagtcagatgtg

SEQ ID NO: 7524 - DNA, 20 bp, synthetic construct
  source 1..20: mol_type = other DNA
actgcgcaggtagtcaaagg

SEQ ID NO: 7525 - DNA, 20 bp, synthetic construct
  source 1..20: mol_type = other DNA
gtaccagcctcagccttgag

SEQ ID NO: 7526 - DNA, 20 bp, synthetic construct
  source 1..20: mol_type = other DNA
gaagcagggcagcatgtccc

SEQ ID NO: 7527 - DNA, 20 bp, synthetic construct
  source 1..20: mol_type = other DNA
gggggctggacagttcgggg

SEQ ID NO: 7528 - DNA, 20 bp, synthetic construct
  source 1..20: mol_type = other DNA
tattcagtgatgatgtagat

SEQ ID NO: 7529 - DNA, 20 bp, synthetic construct
  source 1..20: mol_type = other DNA
tcttgaagaaccagctgtgc

SEQ ID NO: 7530 - DNA, 20 bp, synthetic construct
  source 1..20: mol_type = other DNA
tccgaaatggctctgaggtg

SEQ ID NO: 7531 - DNA, 20 bp, synthetic construct
  source 1..20: mol_type = other DNA
gctcatccgaaatggctctg

SEQ ID NO: 7532 - DNA, 20 bp, synthetic construct
  source 1..20: mol_type = other DNA
ccaggttgtctgtaaagaca

SEQ ID NO: 7533 - DNA, 20 bp, synthetic construct
  source 1..20: mol_type = other DNA
ggtgttgcagctgcttcatg

SEQ ID NO: 7534 - DNA, 20 bp, synthetic construct
  source 1..20: mol_type = other DNA
ggtgaatgtcccgtagttaa

SEQ ID NO: 7535 - DNA, 20 bp, synthetic construct
  source 1..20: mol_type = other DNA
gcctggggtcaccttgcagt

SEQ ID NO: 7536 - DNA, 20 bp, synthetic construct
  source 1..20: mol_type = other DNA
cagttcggggaggtgtggat

SEQ ID NO: 7537 - DNA, 20 bp, synthetic construct
  source 1..20: mol_type = other DNA
aagatccgtaatctggacaa

SEQ ID NO: 7538 - DNA, 20 bp, synthetic construct
  source 1..20: mol_type = other DNA
gtcttttgggatcctgctga

SEQ ID NO: 7539 - DNA, 20 bp, synthetic construct
  source 1..20: mol_type = other DNA
gctgggggctggacagttcg

SEQ ID NO: 7540 - DNA, 20 bp, synthetic construct
  source 1..20: mol_type = other DNA
ctgcgcaggtagtcaaaggt

SEQ ID NO: 7541 - DNA, 20 bp, synthetic construct
  source 1..20: mol_type = other DNA
agtcctccagcacactgcgc

SEQ ID NO: 7542 - DNA, 20 bp, synthetic construct
  source 1..20: mol_type = other DNA
ggtcaacttgatgcctgaag

SEQ ID NO: 7543 - DNA, 20 bp, synthetic construct
  source 1..20: mol_type = other DNA
agacaaggcctgcggatccc

SEQ ID NO: 7544 - DNA, 20 bp, synthetic construct
  source 1..20: mol_type = other DNA
ccagaatgttggcagcccga

SEQ ID NO: 7545 - DNA, 20 bp, synthetic construct
  source 1..20: mol_type = other DNA
ggactcactgctccaggatg

SEQ ID NO: 7546 - DNA, 20 bp, synthetic construct
  source 1..20: mol_type = other DNA
cgggctcactggtgtaatgg

SEQ ID NO: 7547 - DNA, 20 bp, synthetic construct
  source 1..20: mol_type = other DNA
ctgtaaagacaaggggcatc

SEQ ID NO: 7548 - DNA, 20 bp, synthetic construct
  source 1..20: mol_type = other DNA
cgctcctgcgccacggaggt

SEQ ID NO: 7549 - DNA, 20 bp, synthetic construct
  source 1..20: mol_type = other DNA
gaaggagccgtgagtgttcc

SEQ ID NO: 7550 - DNA, 20 bp, synthetic construct
  source 1..20: mol_type = other DNA
ggacgagtgggaggttccca

SEQ ID NO: 7551 - DNA, 20 bp, synthetic construct
  source 1..20: mol_type = other DNA
cttacggcacccggagcttg

SEQ ID NO: 7552 - DNA, 20 bp, synthetic construct
  source 1..20: mol_type = other DNA
gccgccaccctccaatgacg

SEQ ID NO: 7553 - DNA, 20 bp, synthetic construct
  source 1..20: mol_type = other DNA
ccctttcgctcagaggtcct

SEQ ID NO: 7554 - DNA, 20 bp, synthetic construct
  source 1..20: mol_type = other DNA
gacaattactttggcacagg

SEQ ID NO: 7555 - DNA, 20 bp, synthetic construct
  source 1..20: mol_type = other DNA
ccttcccaggatgaagatga

SEQ ID NO: 7556 - DNA, 20 bp, synthetic construct
  source 1..20: mol_type = other DNA
acttacggcacccggagctt

SEQ ID NO: 7557 - DNA, 20 bp, synthetic construct
  source 1..20: mol_type = other DNA
tttgcagaccccaagtcccg

SEQ ID NO: 7558 - DNA, 20 bp, synthetic construct
  source 1..20: mol_type = other DNA
ttgagagaagtatggtggca

SEQ ID NO: 7559 - DNA, 20 bp, synthetic construct
  source 1..20: mol_type = other DNA
atcatacccacctagtgtga

SEQ ID NO: 7560 - DNA, 20 bp, synthetic construct
  source 1..20: mol_type = other DNA
tcatacccacctagtgtgaa

SEQ ID NO: 7561 - DNA, 20 bp, synthetic construct
  source 1..20: mol_type = other DNA
agaagcgagccccatcgatg

SEQ ID NO: 7562 - DNA, 20 bp, synthetic construct
  source 1..20: mol_type = other DNA
tcaggaaaccgcgggacttg

SEQ ID NO: 7563 - DNA, 20 bp, synthetic construct
  source 1..20: mol_type = other DNA
agttgagctgcaaagagaag

SEQ ID NO: 7564 - DNA, 20 bp, synthetic construct
  source 1..20: mol_type = other DNA
aaatcaacaagaacgaagag

SEQ ID NO: 7565 - DNA, 20 bp, synthetic construct
  source 1..20: mol_type = other DNA
tccccatcctggtcatcatt

SEQ ID NO: 7566 - DNA, 20 bp, synthetic construct
  source 1..20: mol_type = other DNA
tcccgcccccaccagccggc

SEQ ID NO: 7567 - DNA, 20 bp, synthetic construct
  source 1..20: mol_type = other DNA
taatccgcgtcatcttccac

SEQ ID NO: 7568 - DNA, 20 bp, synthetic construct
  source 1..20: mol_type = other DNA
gagctgcaaagagaagggga

SEQ ID NO: 7569 - DNA, 20 bp, synthetic construct
  source 1..20: mol_type = other DNA
atcatcttcatcctgggaag

SEQ ID NO: 7570 - DNA, 20 bp, synthetic construct
  source 1..20: mol_type = other DNA
ctcattgatgggaaaaaccg

SEQ ID NO: 7571 - DNA, 20 bp, synthetic construct
  source 1..20: mol_type = other DNA
gtgaagaagtaccacatcga

SEQ ID NO: 7572 - DNA, 20 bp, synthetic construct
  source 1..20: mol_type = other DNA
ctctcttacctcttcctccg

SEQ ID NO: 7573 - DNA, 20 bp, synthetic construct
  source 1..20: mol_type = other DNA
acggcaaagcgtgagtacaa

SEQ ID NO: 7574 - DNA, 20 bp, synthetic construct
  source 1..20: mol_type = other DNA
tcttacctcttcctccgcgg

SEQ ID NO: 7575 - DNA, 20 bp, synthetic construct
  source 1..20: mol_type = other DNA
tgcctcttcctcctcattgg

SEQ ID NO: 7576 - DNA, 20 bp, synthetic construct
  source 1..20: mol_type = other DNA
agtgccatggctgctctccc

SEQ ID NO: 7577 - DNA, 20 bp, synthetic construct
  source 1..20: mol_type = other DNA
aaccaatccatatgtcctca

SEQ ID NO: 7578 - DNA, 20 bp, synthetic construct
  source 1..20: mol_type = other DNA
cttctgtctattgaaggagc

SEQ ID NO: 7579 - DNA, 20 bp, synthetic construct
  source 1..20: mol_type = other DNA
ttcgtgcttctgtctattga

SEQ ID NO: 7580 - DNA, 20 bp, synthetic construct
  source 1..20: mol_type = other DNA
tccatgcctgaaatgaatta

SEQ ID NO: 7581 - DNA, 20 bp, synthetic construct
  source 1..20: mol_type = other DNA
gtcctcttcgtggctttctg

SEQ ID NO: 7582 - DNA, 20 bp, synthetic construct
  source 1..20: mol_type = other DNA
ttgcagccctcgattccagc

SEQ ID NO: 7583 - DNA, 20 bp, synthetic construct
  source 1..20: mol_type = other DNA
ttcctgcccacacagtgata

SEQ ID NO: 7584 - DNA, 20 bp, synthetic construct
  source 1..20: mol_type = other DNA
cttgagagaagtatggtggc

SEQ ID NO: 7585 - DNA, 20 bp, synthetic construct
  source 1..20: mol_type = other DNA
caatgatgaccaggatgggg

SEQ ID NO: 7586 - DNA, 20 bp, synthetic construct
  source 1..20: mol_type = other DNA
gcgggacttggggtctgcaa

SEQ ID NO: 7587 - DNA, 20 bp, synthetic construct
  source 1..20: mol_type = other DNA
cttacattctctcttctgtc

SEQ ID NO: 7588 - DNA, 20 bp, synthetic construct
  source 1..20: mol_type = other DNA
agaccacctatcagagccga

SEQ ID NO: 7589 - DNA, 20 bp, synthetic construct
  source 1..20: mol_type = other DNA
gacctgtggagttcaggaaa

SEQ ID NO: 7590 - DNA, 20 bp, synthetic construct
  source 1..20: mol_type = other DNA
cgggcccttaccgatgtaca

SEQ ID NO: 7591 - DNA, 20 bp, synthetic construct
  source 1..20: mol_type = other DNA
tcttcacacgcaagtgagtg

SEQ ID NO: 7592 - DNA, 20 bp, synthetic construct
  source 1..20: mol_type = other DNA
ccatcatcttcatcctggga

SEQ ID NO: 7593 - DNA, 20 bp, synthetic construct
  source 1..20: mol_type = other DNA
aaatagtcagcaaggctgtc

SEQ ID NO: 7594 - DNA, 20 bp, synthetic construct
  source 1..20: mol_type = other DNA
tacttacggcacccggagct

SEQ ID NO: 7595 - DNA, 20 bp, synthetic construct
  source 1..20: mol_type = other DNA
tcgctcagaggtcctgggct

SEQ ID NO: 7596 - DNA, 20 bp, synthetic construct
  source 1..20: mol_type = other DNA
gaagaagtaccacatcgatg

SEQ ID NO: 7597 - DNA, 20 bp, synthetic construct
  source 1..20: mol_type = other DNA
acgaagaggacaatgggggc

SEQ ID NO: 7598 - DNA, 20 bp, synthetic construct
  source 1..20: mol_type = other DNA
agtgattccggccggctggt

SEQ ID NO: 7599 - DNA, 20 bp, synthetic construct
  source 1..20: mol_type = other DNA
gaaggagcagggactggaag

SEQ ID NO: 7600 - DNA, 20 bp, synthetic construct
  source 1..20: mol_type = other DNA
ttctgtctattgaaggagca

SEQ ID NO: 7601 - DNA, 20 bp, synthetic construct
  source 1..20: mol_type = other DNA
agactatgagtcccccaatg

SEQ ID NO: 7602 - DNA, 20 bp, synthetic construct
  source 1..20: mol_type = other DNA
gtgcctcttcctcctcattg

SEQ ID NO: 7603 - DNA, 20 bp, synthetic construct
  source 1..20: mol_type = other DNA
cagtgccatggctgctctcc

SEQ ID NO: 7604 - DNA, 20 bp, synthetic construct
  source 1..20: mol_type = other DNA
catcatcttcatcctgggaa

SEQ ID NO: 7605 - DNA, 20 bp, synthetic construct
  source 1..20: mol_type = other DNA
gagcagcttctgcctctggt

SEQ ID NO: 7606 - DNA, 20 bp, synthetic construct
  source 1..20: mol_type = other DNA
agagaagtatggtggcaggg

SEQ ID NO: 7607 - DNA, 20 bp, synthetic construct
  source 1..20: mol_type = other DNA
tgtacatggagttggagttg

SEQ ID NO: 7608 - DNA, 20 bp, synthetic construct
  source 1..20: mol_type = other DNA
acataccatcatcttcatcc

SEQ ID NO: 7609 - DNA, 20 bp, synthetic construct
  source 1..20: mol_type = other DNA
gatgtacatggagttggagt

SEQ ID NO: 7610 - DNA, 20 bp, synthetic construct
  source 1..20: mol_type = other DNA
aatagtcagcaaggctgtcg

SEQ ID NO: 7611 - DNA, 20 bp, synthetic construct
  source 1..20: mol_type = other DNA
accgagtgattccggccggc

SEQ ID NO: 7612 - DNA, 20 bp, synthetic construct
  source 1..20: mol_type = other DNA
tgaaggagcagggactggaa

SEQ ID NO: 7613 - DNA, 20 bp, synthetic construct
  source 1..20: mol_type = other DNA
gaatgtgccctttcgctcag

SEQ ID NO: 7614 - DNA, 20 bp, synthetic construct
  source 1..20: mol_type = other DNA
gtcctttgtgagtatggtgt

SEQ ID NO: 7615 - DNA, 20 bp, synthetic construct
  source 1..20: mol_type = other DNA
tcccaatgatgaccaggatg

SEQ ID NO: 7616 - DNA, 20 bp, synthetic construct
  source 1..20: mol_type = other DNA
ctcttacctcttcctccgcg

SEQ ID NO: 7617 - DNA, 20 bp, synthetic construct
  source 1..20: mol_type = other DNA
gtcctgaaagagtcaagata

SEQ ID NO: 7618 - DNA, 20 bp, synthetic construct
  source 1..20: mol_type = other DNA
ctatgagtcccccaatgagg

SEQ ID NO: 7619 - DNA, 20 bp, synthetic construct
  source 1..20: mol_type = other DNA
tacaaaccttgagagaagta

SEQ ID NO: 7620 - DNA, 20 bp, synthetic construct
  source 1..20: mol_type = other DNA
gactccgagggaaagaggta

SEQ ID NO: 7621 - DNA, 20 bp, synthetic construct
  source 1..20: mol_type = other DNA
tcaacaagaacgaagagagg

SEQ ID NO: 7622 - DNA, 20 bp, synthetic construct
  source 1..20: mol_type = other DNA
atcgagggctgcaagacagg

SEQ ID NO: 7623 - DNA, 20 bp, synthetic construct
  source 1..20: mol_type = other DNA
tctattgaaggagcagggac

SEQ ID NO: 7624 - DNA, 20 bp, synthetic construct
  source 1..20: mol_type = other DNA
cgtcctttgtgagtatggtg

SEQ ID NO: 7625 - DNA, 20 bp, synthetic construct
  source 1..20: mol_type = other DNA
agtcctgaaagagtcaagat

SEQ ID NO: 7626 - DNA, 20 bp, synthetic construct
  source 1..20: mol_type = other DNA
ctgccaccatacttctctca

SEQ ID NO: 7627 - DNA, 20 bp, synthetic construct
  source 1..20: mol_type = other DNA
cttaccttgtcagaaaatgg

SEQ ID NO: 7628 - DNA, 20 bp, synthetic construct
  source 1..20: mol_type = other DNA
aaaccttgagagaagtatgg

SEQ ID NO: 7629 - DNA, 20 bp, synthetic construct
  source 1..20: mol_type = other DNA
agcccccattgtcctcttcg

SEQ ID NO: 7630 - DNA, 20 bp, synthetic construct
  source 1..20: mol_type = other DNA
gcagggactggaaggggaaa

SEQ ID NO: 7631 - DNA, 20 bp, synthetic construct
  source 1..20: mol_type = other DNA
ggaatcgagggctgcaagac

SEQ ID NO: 7632 - DNA, 20 bp, synthetic construct
  source 1..20: mol_type = other DNA
cctcttcctccgcgggggat

SEQ ID NO: 7633 - DNA, 20 bp, synthetic construct
  source 1..20: mol_type = other DNA
ttctgaaatgaagacacata

SEQ ID NO: 7634 - DNA, 20 bp, synthetic construct
  source 1..20: mol_type = other DNA
ttcccatcaatgagcagaag

SEQ ID NO: 7635 - DNA, 20 bp, synthetic construct
  source 1..20: mol_type = other DNA
tagttgagctgcaaagagaa

SEQ ID NO: 7636 - DNA, 20 bp, synthetic construct
  source 1..20: mol_type = other DNA
tgcactggtatctggaacct

SEQ ID NO: 7637 - DNA, 20 bp, synthetic construct
  source 1..20: mol_type = other DNA
agagacaggtaaagctctca

SEQ ID NO: 7638 - DNA, 20 bp, synthetic construct
  source 1..20: mol_type = other DNA
aacggcaaagcgtgagtaca

SEQ ID NO: 7639 - DNA, 20 bp, synthetic construct
  source 1..20: mol_type = other DNA
acctcttcctccgcggggga

SEQ ID NO: 7640 - DNA, 20 bp, synthetic construct
  source 1..20: mol_type = other DNA
cttaccgatgtacatggagt

SEQ ID NO: 7641 - DNA, 20 bp, synthetic construct
  source 1..20: mol_type = other DNA
ttctctcaaggtttgtactc

SEQ ID NO: 7642 - DNA, 20 bp, synthetic construct
  source 1..20: mol_type = other DNA
tgctcttagaaagataaacc

SEQ ID NO: 7643 - DNA, 20 bp, synthetic construct
  source 1..20: mol_type = other DNA
gtcccaatgatgaccaggat

SEQ ID NO: 7644 - DNA, 20 bp, synthetic construct
  source 1..20: mol_type = other DNA
gattctcagtaagttaagtc

SEQ ID NO: 7645 - DNA, 20 bp, synthetic construct
  source 1..20: mol_type = other DNA
gcccaggacctctgagcgaa

SEQ ID NO: 7646 - DNA, 20 bp, synthetic construct
  source 1..20: mol_type = other DNA
ccagaagttccccaagctcc

SEQ ID NO: 7647 - DNA, 20 bp, synthetic construct
  source 1..20: mol_type = other DNA
gcctaccgagtgattccggc

SEQ ID NO: 7648 - DNA, 20 bp, synthetic construct
  source 1..20: mol_type = other DNA
tccagaagttccccaagctc

SEQ ID NO: 7649 - DNA, 20 bp, synthetic construct
  source 1..20: mol_type = other DNA
cttgcagccctcgattccag

SEQ ID NO: 7650 - DNA, 20 bp, synthetic construct
  source 1..20: mol_type = other DNA
ttcttatattacccgaccag

SEQ ID NO: 7651 - DNA, 20 bp, synthetic construct
  source 1..20: mol_type = other DNA
cctgtctcttcaggaaaccg

SEQ ID NO: 7652 - DNA, 20 bp, synthetic construct
  source 1..20: mol_type = other DNA
ttcgctcagaggtcctgggc

SEQ ID NO: 7653 - DNA, 20 bp, synthetic construct
  source 1..20: mol_type = other DNA
aaatccttacctctttccct

SEQ ID NO: 7654 - DNA, 20 bp, synthetic construct
  source 1..20: mol_type = other DNA
gccctttcgctcagaggtcc

SEQ ID NO: 7655 - DNA, 20 bp, synthetic construct
  source 1..20: mol_type = other DNA
catccagatccgttatcaga

SEQ ID NO: 7656 - DNA, 20 bp, synthetic construct
  source 1..20: mol_type = other DNA
ctcttcctccgcgggggatg

SEQ ID NO: 7657 - DNA, 20 bp, synthetic construct
  source 1..20: mol_type = other DNA
caactataaggactgtgaga

SEQ ID NO: 7658 - DNA, 20 bp, synthetic construct
  source 1..20: mol_type = other DNA
cccaggacctctgagcgaaa

SEQ ID NO: 7659 - DNA, 20 bp, synthetic construct
  source 1..20: mol_type = other DNA
cccggagcttggggaacttc

SEQ ID NO: 7660 - DNA, 20 bp, synthetic construct
  source 1..20: mol_type = other DNA
cacacgcaagtgagtgcggc

SEQ ID NO: 7661 - DNA, 20 bp, synthetic construct
  source 1..20: mol_type = other DNA
tgtgcccccccagagaccga

SEQ ID NO: 7662 - DNA, 20 bp, synthetic construct
  source 1..20: mol_type = other DNA
agcagcttctgcctctggtc

SEQ ID NO: 7663 - DNA, 20 bp, synthetic construct
  source 1..20: mol_type = other DNA
ttaccttcccgctggaatcg

SEQ ID NO: 7664 - DNA, 20 bp, synthetic construct
  source 1..20: mol_type = other DNA
cataccatcatcttcatcct

SEQ ID NO: 7665 - DNA, 20 bp, synthetic construct
  source 1..20: mol_type = other DNA
cgttaatgtgcactggtatc

SEQ ID NO: 7666 - DNA, 20 bp, synthetic construct
  source 1..20: mol_type = other DNA
tcttcgtggctttctgtgga

SEQ ID NO: 7667 - DNA, 20 bp, synthetic construct
  source 1..20: mol_type = other DNA
tgaagaagtaccacatcgat

SEQ ID NO: 7668 - DNA, 20 bp, synthetic construct
  source 1..20: mol_type = other DNA
taccttcccgctggaatcga

SEQ ID NO: 7669 - DNA, 20 bp, synthetic construct
  source 1..20: mol_type = other DNA
aacctttctgagaatgctcc

SEQ ID NO: 7670 - DNA, 20 bp, synthetic construct
  source 1..20: mol_type = other DNA
atgtacatggagttggagtt

SEQ ID NO: 7671 - DNA, 20 bp, synthetic construct
  source 1..20: mol_type = other DNA
agtcccaatgatgaccagga

SEQ ID NO: 7672 - DNA, 20 bp, synthetic construct
  source 1..20: mol_type = other DNA
actcacgctttgccgttttg

SEQ ID NO: 7673 - DNA, 20 bp, synthetic construct
  source 1..20: mol_type = other DNA
ctgtctcttcaggaaaccgc

SEQ ID NO: 7674 - DNA, 20 bp, synthetic construct
  source 1..20: mol_type = other DNA
ctccaggcatgtgagaggat

SEQ ID NO: 7675 - DNA, 20 bp, synthetic construct
  source 1..20: mol_type = other DNA
gtgaagggttctctatcaaa

SEQ ID NO: 7676 - DNA, 20 bp, synthetic construct
  source 1..20: mol_type = other DNA
atagttgagctgcaaagaga

SEQ ID NO: 7677 - DNA, 20 bp, synthetic construct
  source 1..20: mol_type = other DNA
gaatgctccaggcatgtgag

SEQ ID NO: 7678 - DNA, 20 bp, synthetic construct
  source 1..20: mol_type = other DNA
ggtgcctcttcctcctcatt

SEQ ID NO: 7679 - DNA, 20 bp, synthetic construct
  source 1..20: mol_type = other DNA
tccacagaccggcccccctc

SEQ ID NO: 7680 - DNA, 20 bp, synthetic construct
  source 1..20: mol_type = other DNA
tacaacaccatgaggacata

SEQ ID NO: 7681 - DNA, 20 bp, synthetic construct
  source 1..20: mol_type = other DNA
agaattcattaaatgaagag

SEQ ID NO: 7682 - DNA, 20 bp, synthetic construct
  source 1..20: mol_type = other DNA
ccttcttgaaatagtcagca

SEQ ID NO: 7683 - DNA, 20 bp, synthetic construct
  source 1..20: mol_type = other DNA
ttgaaggagcagggactgga

SEQ ID NO: 7684 - DNA, 20 bp, synthetic construct
  source 1..20: mol_type = other DNA
cttcctgcccacacagtgat

SEQ ID NO: 7685 - DNA, 20 bp, synthetic construct
  source 1..20: mol_type = other DNA
gagtgattccggccggctgg

SEQ ID NO: 7686 - DNA, 20 bp, synthetic construct
  source 1..20: mol_type = other DNA
gctcgcttcttggtaagctc

SEQ ID NO: 7687 - DNA, 20 bp, synthetic construct
  source 1..20: mol_type = other DNA
ccttgctgactatttcaaga

SEQ ID NO: 7688 - DNA, 20 bp, synthetic construct
  source 1..20: mol_type = other DNA
ggccggtctgtggaaacaca

SEQ ID NO: 7689 - DNA, 20 bp, synthetic construct
  source 1..20: mol_type = other DNA
ataatccgcgtcatcttcca

SEQ ID NO: 7690 - DNA, 20 bp, synthetic construct
  source 1..20: mol_type = other DNA
tgccacttctgctcattgat

SEQ ID NO: 7691 - DNA, 20 bp, synthetic construct
  source 1..20: mol_type = other DNA
gctccaggcatgtgagagga

SEQ ID NO: 7692 - DNA, 20 bp, synthetic construct
  source 1..20: mol_type = other DNA
ggaggcctaccgagtgattc

SEQ ID NO: 7693 - DNA, 20 bp, synthetic construct
  source 1..20: mol_type = other DNA
aagagacaggtaaagctctc

SEQ ID NO: 7694 - DNA, 20 bp, synthetic construct
  source 1..20: mol_type = other DNA
caccatgaggacatatggat

SEQ ID NO: 7695 - DNA, 20 bp, synthetic construct
  source 1..20: mol_type = other DNA
gaaatagtcagcaaggctgt

SEQ ID NO: 7696 - DNA, 20 bp, synthetic construct
  source 1..20: mol_type = other DNA
gaaatcatggtgcttccttc

SEQ ID NO: 7697 - DNA, 20 bp, synthetic construct
  source 1..20: mol_type = other DNA
tcttctaagattgaagaatt

SEQ ID NO: 7698 - DNA, 20 bp, synthetic construct
  source 1..20: mol_type = other DNA
atcatggtgcttccttcggg

SEQ ID NO: 7699 - DNA, 20 bp, synthetic construct
  source 1..20: mol_type = other DNA
cgaaatcatggtgcttcctt

SEQ ID NO: 7700 - DNA, 20 bp, synthetic construct
  source 1..20: mol_type = other DNA
ttactataacaacagtacca

SEQ ID NO: 7701 - DNA, 20 bp, synthetic construct
  source 1..20: mol_type = other DNA
gccgcggccgccgcgcagag

SEQ ID NO: 7702 - DNA, 20 bp, synthetic construct
  source 1..20: mol_type = other DNA
tcatccagtagtagtcttcc

SEQ ID NO: 7703 - DNA, 20 bp, synthetic construct
  source 1..20: mol_type = other DNA
gcagctgaaccccgaggcgc

SEQ ID NO: 7704 - DNA, 20 bp, synthetic construct
  source 1..20: mol_type = other DNA
ggcggcggcggaggcggcgg

SEQ ID NO: 7705 - DNA, 20 bp, synthetic construct
  source 1..20: mol_type = other DNA
gttcagctcgcgcacagaca

SEQ ID NO: 7706 - DNA, 20 bp, synthetic construct
  source 1..20: mol_type = other DNA
gcagctgcgcggggtcagca

SEQ ID NO: 7707 - DNA, 20 bp, synthetic construct
  source 1..20: mol_type = other DNA
tggagatctcctgcttgagg

SEQ ID NO: 7708 - DNA, 20 bp, synthetic construct
  source 1..20: mol_type = other DNA
cagctccagggcggcttcga

SEQ ID NO: 7709 - DNA, 20 bp, synthetic construct
  source 1..20: mol_type = other DNA
gcagagacacgtcctggagt

SEQ ID NO: 7710 - DNA, 20 bp, synthetic construct
  source 1..20: mol_type = other DNA
ggcaggactgggcatagccg

SEQ ID NO: 7711 - DNA, 20 bp, synthetic construct
  source 1..20: mol_type = other DNA
ccagctgctcgtcggagaag

SEQ ID NO: 7712 - DNA, 20 bp, synthetic construct
  source 1..20: mol_type = other DNA
ggtgcagcagagacacgtcc

SEQ ID NO: 7713 - DNA, 20 bp, synthetic construct
  source 1..20: mol_type = other DNA
cagctgaaccccgaggcgct

SEQ ID NO: 7714 - DNA, 20 bp, synthetic construct
  source 1..20: mol_type = other DNA
tgtctgtgcgcgagctgaac

SEQ ID NO: 7715 - DNA, 20 bp, synthetic construct
  source 1..20: mol_type = other DNA
tccgcctcttctgcttcagc

SEQ ID NO: 7716 - DNA, 20 bp, synthetic construct
  source 1..20: mol_type = other DNA
cccgcagcagctgaaccccg

SEQ ID NO: 7717 - DNA, 20 bp, synthetic construct
  source 1..20: mol_type = other DNA
ccagtcctgccgcttcaaga

SEQ ID NO: 7718 - DNA, 20 bp, synthetic construct
  source 1..20: mol_type = other DNA
cagcgagcagaaggcgcacc

SEQ ID NO: 7719 - DNA, 20 bp, synthetic construct
  source 1..20: mol_type = other DNA
ggcgcagcagctggccgcgg

SEQ ID NO: 7720 - DNA, 20 bp, synthetic construct
  source 1..20: mol_type = other DNA
gctgaaccggcagctgcgcg

SEQ ID NO: 7721 - DNA, 20 bp, synthetic construct
  source 1..20: mol_type = other DNA
gcaagtcgaccacctcaagc

SEQ ID NO: 7722 - DNA, 20 bp, synthetic construct
  source 1..20: mol_type = other DNA
caagcaggagatctccaggc

SEQ ID NO: 7723 - DNA, 20 bp, synthetic construct
  source 1..20: mol_type = other DNA
aggcggaccctgaaaaaccg

SEQ ID NO: 7724 - DNA, 20 bp, synthetic construct
  source 1..20: mol_type = other DNA
cccagtcctgccgcttcaag

SEQ ID NO: 7725 - DNA, 20 bp, synthetic construct
  source 1..20: mol_type = other DNA
tctccaggctggtgcgcgag

SEQ ID NO: 7726 - DNA, 20 bp, synthetic construct
  source 1..20: mol_type = other DNA
tctccgccgaggaggtgaca

SEQ ID NO: 7727 - DNA, 20 bp, synthetic construct
  source 1..20: mol_type = other DNA
tgtcggtgcgcgagctgaac

SEQ ID NO: 7728 - DNA, 20 bp, synthetic construct
  source 1..20: mol_type = other DNA
ctcctggatcaggcgcccga

SEQ ID NO: 7729 - DNA, 20 bp, synthetic construct
  source 1..20: mol_type = other DNA
cacaggctggggcttccttc

SEQ ID NO: 7730 - DNA, 20 bp, synthetic construct
  source 1..20: mol_type = other DNA
aacagcgacatggccctcgc

SEQ ID NO: 7731 - DNA, 20 bp, synthetic construct
  source 1..20: mol_type = other DNA
tcacctttgaattcagccag

SEQ ID NO: 7732 - DNA, 20 bp, synthetic construct
  source 1..20: mol_type = other DNA
atatgagatgcgtaatgctg

SEQ ID NO: 7733 - DNA, 20 bp, synthetic construct
  source 1..20: mol_type = other DNA
tcatttctatttaagggagg

SEQ ID NO: 7734 - DNA, 20 bp, synthetic construct
  source 1..20: mol_type = other DNA
gatcaggcgcccgagggccg

SEQ ID NO: 7735 - DNA, 20 bp, synthetic construct
  source 1..20: mol_type = other DNA
tggaacaccaaggaacctac

SEQ ID NO: 7736 - DNA, 20 bp, synthetic construct
  source 1..20: mol_type = other DNA
acttcccaaaagctgatgcc

SEQ ID NO: 7737 - DNA, 20 bp, synthetic construct
  source 1..20: mol_type = other DNA
gcgcgaccctcaaccgcctg

SEQ ID NO: 7738 - DNA, 20 bp, synthetic construct
  source 1..20: mol_type = other DNA
cttaaggtactggagcctga

SEQ ID NO: 7739 - DNA, 20 bp, synthetic construct
  source 1..20: mol_type = other DNA
gccctattcctcactaccag

SEQ ID NO: 7740 - DNA, 20 bp, synthetic construct
  source 1..20: mol_type = other DNA
gcggaggctcagcgagctcc

SEQ ID NO: 7741 - DNA, 20 bp, synthetic construct
  source 1..20: mol_type = other DNA
agacagtcaagatagcaaga

SEQ ID NO: 7742 - DNA, 20 bp, synthetic construct
  source 1..20: mol_type = other DNA
ccttaagagaacactgctcc

SEQ ID NO: 7743 - DNA, 20 bp, synthetic construct
  source 1..20: mol_type = other DNA
ctggaggagactggcggagc

SEQ ID NO: 7744 - DNA, 20 bp, synthetic construct
  source 1..20: mol_type = other DNA
ccattaacttcagcagacac

SEQ ID NO: 7745 - DNA, 20 bp, synthetic construct
  source 1..20: mol_type = other DNA
atatccaaacacaatattgg

SEQ ID NO: 7746 - DNA, 20 bp, synthetic construct
  source 1..20: mol_type = other DNA
tcgctgagcctccgcagcag

SEQ ID NO: 7747 - DNA, 20 bp, synthetic construct
  source 1..20: mol_type = other DNA
gcagtgttctcttaaggtac

SEQ ID NO: 7748 - DNA, 20 bp, synthetic construct
  source 1..20: mol_type = other DNA
tggatcaggcgcccgagggc

SEQ ID NO: 7749 - DNA, 20 bp, synthetic construct
  source 1..20: mol_type = other DNA
gcagcagcggctcccgcagg

SEQ ID NO: 7750 - DNA, 20 bp, synthetic construct
  source 1..20: mol_type = other DNA
gagcctgtttgcctttggta

SEQ ID NO: 7751 - DNA, 20 bp, synthetic construct
  source 1..20: mol_type = other DNA
tgctttcagttgcctagacc

SEQ ID NO: 7752 - DNA, 20 bp, synthetic construct
  source 1..20: mol_type = other DNA
ctttgagcttggggtgctcc

SEQ ID NO: 7753 - DNA, 20 bp, synthetic construct
  source 1..20: mol_type = other DNA
acttactctggaagctctct

SEQ ID NO: 7754 - DNA, 20 bp, synthetic construct
  source 1..20: mol_type = other DNA
taacttcagcagacacaggc

SEQ ID NO: 7755 - DNA, 20 bp, synthetic construct
  source 1..20: mol_type = other DNA
aacttcagcagacacaggct

SEQ ID NO: 7756 - DNA, 20 bp, synthetic construct
  source 1..20: mol_type = other DNA
gagacagctggacttcaaag

SEQ ID NO: 7757 - DNA, 20 bp, synthetic construct
  source 1..20: mol_type = other DNA
tgaccactggctgaattcaa

SEQ ID NO: 7758 - DNA, 20 bp, synthetic construct
  source 1..20: mol_type = other DNA
gtgaactgagtctggtatag

SEQ ID NO: 7759 - DNA, 20 bp, synthetic construct
  source 1..20: mol_type = other DNA
gctacaggccctgccgccct

SEQ ID NO: 7760 - DNA, 20 bp, synthetic construct
  source 1..20: mol_type = other DNA
gacaagcaggaagtgaatgt

SEQ ID NO: 7761 - DNA, 20 bp, synthetic construct
  source 1..20: mol_type = other DNA
gaggagactggcggagctgg

SEQ ID NO: 7762 - DNA, 20 bp, synthetic construct
  source 1..20: mol_type = other DNA
cctgagctcacctgaggcgg

SEQ ID NO: 7763 - DNA, 20 bp, synthetic construct
  source 1..20: mol_type = other DNA
gcacttactgatccaataca

SEQ ID NO: 7764 - DNA, 20 bp, synthetic construct
  source 1..20: mol_type = other DNA
ggatcaggcgcccgagggcc

SEQ ID NO: 7765 - DNA, 20 bp, synthetic construct
  source 1..20: mol_type = other DNA
gagggccatgtcgctgttgg

SEQ ID NO: 7766 - DNA, 20 bp, synthetic construct
  source 1..20: mol_type = other DNA
caggcggttgagggtcgcgc

SEQ ID NO: 7767 - DNA, 20 bp, synthetic construct
  source 1..20: mol_type = other DNA
gtggttcaaaatgaataaag

SEQ ID NO: 7768 - DNA, 20 bp, synthetic construct
  source 1..20: mol_type = other DNA
gctcctggatcaggcgcccg

SEQ ID NO: 7769 - DNA, 20 bp, synthetic construct
  source 1..20: mol_type = other DNA
ttgagggtcgcgccggccgg

SEQ ID NO: 7770 - DNA, 20 bp, synthetic construct
  source 1..20: mol_type = other DNA
tgcgggagccgctgctgcgg

SEQ ID NO: 7771 - DNA, 20 bp, synthetic construct
  source 1..20: mol_type = other DNA
ccggggctggaggagactgg

SEQ ID NO: 7772 - DNA, 20 bp, synthetic construct
  source 1..20: mol_type = other DNA
aagactagatgttcctgaaa

SEQ ID NO: 7773 - DNA, 20 bp, synthetic construct
  source 1..20: mol_type = other DNA
ccaagactgcctttgactct

SEQ ID NO: 7774 - DNA, 20 bp, synthetic construct
  source 1..20: mol_type = other DNA
ccgccagtctcctccagccc

SEQ ID NO: 7775 - DNA, 20 bp, synthetic construct
  source 1..20: mol_type = other DNA
gagaacactgctccaggtct

SEQ ID NO: 7776 - DNA, 20 bp, synthetic construct
  source 1..20: mol_type = other DNA
tccgcagcagcggctcccgc

SEQ ID NO: 7777 - DNA, 20 bp, synthetic construct
  source 1..20: mol_type = other DNA
cttcagcttctcagcccccc

SEQ ID NO: 7778 - DNA, 20 bp, synthetic construct
  source 1..20: mol_type = other DNA
catgacaccagtaggttcct

SEQ ID NO: 7779 - DNA, 20 bp, synthetic construct
  source 1..20: mol_type = other DNA
cgcgaccctcaaccgcctgc

SEQ ID NO: 7780 - DNA, 20 bp, synthetic construct
  source 1..20: mol_type = other DNA
gagtcaaaggcagtcttggc

SEQ ID NO: 7781 - DNA, 20 bp, synthetic construct
  source 1..20: mol_type = other DNA
aatataataaccctgaaaag

SEQ ID NO: 7782 - DNA, 20 bp, synthetic construct
  source 1..20: mol_type = other DNA
tagtcatttctatttaaggg

SEQ ID NO: 7783 - DNA, 20 bp, synthetic construct
  source 1..20: mol_type = other DNA
cccagagtcaaaggcagtct

SEQ ID NO: 7784 - DNA, 20 bp, synthetic construct
  source 1..20: mol_type = other DNA
atcatatcagtactcaggat

SEQ ID NO: 7785 - DNA, 20 bp, synthetic construct
  source 1..20: mol_type = other DNA
ttattatattatgcaggaca

SEQ ID NO: 7786 - DNA, 20 bp, synthetic construct
  source 1..20: mol_type = other DNA
agcacttactgatccaatac

SEQ ID NO: 7787 - DNA, 20 bp, synthetic construct
  source 1..20: mol_type = other DNA
gtgggccaaggctcatggta

SEQ ID NO: 7788 - DNA, 20 bp, synthetic construct
  source 1..20: mol_type = other DNA
gctcagcgagctcctggatc

SEQ ID NO: 7789 - DNA, 20 bp, synthetic construct
  source 1..20: mol_type = other DNA
aagtggaaaatcagtaacgt

SEQ ID NO: 7790 - DNA, 20 bp, synthetic construct
  source 1..20: mol_type = other DNA
gcggagctggcggggagtcg

SEQ ID NO: 7791 - DNA, 20 bp, synthetic construct
  source 1..20: mol_type = other DNA
cgagggccatgtcgctgttg

SEQ ID NO: 7792 - DNA, 20 bp, synthetic construct
  source 1..20: mol_type = other DNA
ctcctccagccccggccctc

SEQ ID NO: 7793 - DNA, 20 bp, synthetic construct
  source 1..20: mol_type = other DNA
acttcagcagacacaggctg

SEQ ID NO: 7794 - DNA, 20 bp, synthetic construct
  source 1..20: mol_type = other DNA
ggagactggcggagctggcg

SEQ ID NO: 7795 - DNA, 20 bp, synthetic construct
  source 1..20: mol_type = other DNA
caagctcaaagctcctttgg

SEQ ID NO: 7796 - DNA, 20 bp, synthetic construct
  source 1..20: mol_type = other DNA
accactggtagtgaggaata

SEQ ID NO: 7797 - DNA, 20 bp, synthetic construct
  source 1..20: mol_type = other DNA
tgagggtcgcgccggccgga

SEQ ID NO: 7798 - DNA, 20 bp, synthetic construct
  source 1..20: mol_type = other DNA
gcgagggccatgtcgctgtt

SEQ ID NO: 7799 - DNA, 20 bp, synthetic construct
  source 1..20: mol_type = other DNA
gttttacagtgtgttgctgt

SEQ ID NO: 7800 - DNA, 20 bp, synthetic construct
  source 1..20: mol_type = other DNA
ttggagggcttgacatctgc

SEQ ID NO: 7801 - DNA, 20 bp, synthetic construct
  source 1..20: mol_type = other DNA
ggccttgcagaagaagctgg

SEQ ID NO: 7802 - DNA, 20 bp, synthetic construct
  source 1..20: mol_type = other DNA
tctccccacgggagttgact

SEQ ID NO: 7803 - DNA, 20 bp, synthetic construct
  source 1..20: mol_type = other DNA
cagtcagacatctggagcat

SEQ ID NO: 7804 - DNA, 20 bp, synthetic construct
  source 1..20: mol_type = other DNA
ccatagaagcccacgatgta

SEQ ID NO: 7805 - DNA, 20 bp, synthetic construct
  source 1..20: mol_type = other DNA
gcagtcagacatctggagca

SEQ ID NO: 7806 - DNA, 20 bp, synthetic construct
  source 1..20: mol_type = other DNA
tccatggccaactccttcgt

SEQ ID NO: 7807 - DNA, 20 bp, synthetic construct
  source 1..20: mol_type = other DNA
cagtcggacatctggagcat

SEQ ID NO: 7808 - DNA, 20 bp, synthetic construct
  source 1..20: mol_type = other DNA
gcagtcggacatctggagca

SEQ ID NO: 7809 - DNA, 20 bp, synthetic construct
  source 1..20: mol_type = other DNA
aaaaactttaaagaattttg

SEQ ID NO: 7810 - DNA, 20 bp, synthetic construct
  source 1..20: mol_type = other DNA
tacaaattgacatgcagtgg

SEQ ID NO: 7811 - DNA, 20 bp, synthetic construct
  source 1..20: mol_type = other DNA
ggtggtggcggcggcggcgg

SEQ ID NO: 7812 - DNA, 20 bp, synthetic construct
  source 1..20: mol_type = other DNA
tctcacccacacagcacgcc

SEQ ID NO: 7813 - DNA, 20 bp, synthetic construct
  source 1..20: mol_type = other DNA
tgcaaataggccagtccctg

SEQ ID NO: 7814 - DNA, 20 bp, synthetic construct
  source 1..20: mol_type = other DNA
acagggacatcaaggtggtc

SEQ ID NO: 7815 - DNA, 20 bp, synthetic construct
  source 1..20: mol_type = other DNA
gggacatcaaggtggtctgg

SEQ ID NO: 7816 - DNA, 20 bp, synthetic construct
  source 1..20: mol_type = other DNA
taccttgccagtaggcggtg

SEQ ID NO: 7817 - DNA, 20 bp, synthetic construct
  source 1..20: mol_type = other DNA
cccggtcagcagcgcgaaca

SEQ ID NO: 7818 - DNA, 20 bp, synthetic construct
  source 1..20: mol_type = other DNA
tctcagctcctgtagcagct

SEQ ID NO: 7819 - DNA, 20 bp, synthetic construct
  source 1..20: mol_type = other DNA
tcccccaggctggagtgcag

SEQ ID NO: 7820 - DNA, 20 bp, synthetic construct
  source 1..20: mol_type = other DNA
aggagcaggtgctggtctgg

SEQ ID NO: 7821 - DNA, 20 bp, synthetic construct
  source 1..20: mol_type = other DNA
cactgcaacctcctcctccc

SEQ ID NO: 7822 - DNA, 20 bp, synthetic construct
  source 1..20: mol_type = other DNA
cccagctactcgggaggctg

SEQ ID NO: 7823 - DNA, 20 bp, synthetic construct
  source 1..20: mol_type = other DNA
gggaggaggaggttgcagtg

SEQ ID NO: 7824 - DNA, 20 bp, synthetic construct
  source 1..20: mol_type = other DNA
tctcaggtgtgcgaagtccc

SEQ ID NO: 7825 - DNA, 20 bp, synthetic construct
  source 1..20: mol_type = other DNA
tctctctcaggtctggctgt

SEQ ID NO: 7826 - DNA, 20 bp, synthetic construct
  source 1..20: mol_type = other DNA
cctctcaggtaggcaggcgt

SEQ ID NO: 7827 - DNA, 20 bp, synthetic construct
  source 1..20: mol_type = other DNA
tccccagagagctggagcgg

SEQ ID NO: 7828 - DNA, 20 bp, synthetic construct
  source 1..20: mol_type = other DNA
cactcacccgcagggaggag

SEQ ID NO: 7829 - DNA, 20 bp, synthetic construct
  source 1..20: mol_type = other DNA
ggaggatggggaggaggagg

SEQ ID NO: 7830 - DNA, 20 bp, synthetic construct
  source 1..20: mol_type = other DNA
tatggtcatgctgtagagac

SEQ ID NO: 7831 - DNA, 20 bp, synthetic construct
  source 1..20: mol_type = other DNA
ggcgcaaagaagaagaggag

SEQ ID NO: 7832 - DNA, 20 bp, synthetic construct
  source 1..20: mol_type = other DNA
tttctctaccagatcctcag

SEQ ID NO: 7833 - DNA, 20 bp, synthetic construct
  source 1..20: mol_type = other DNA
ttctctaccagatcctcaga

SEQ ID NO: 7834 - DNA, 20 bp, synthetic construct
  source 1..20: mol_type = other DNA
tcgtaatactgctccagata

SEQ ID NO: 7835 - DNA, 20 bp, synthetic construct
  source 1..20: mol_type = other DNA
gtattacgacccgagtgacg

SEQ ID NO: 7836 - DNA, 20 bp, synthetic construct
  source 1..20: mol_type = other DNA
cgtaatactgctccagatat

SEQ ID NO: 7837 - DNA, 20 bp, synthetic construct
  source 1..20: mol_type = other DNA
aatactgctccagatatggg

SEQ ID NO: 7838 - DNA, 20 bp, synthetic construct
  source 1..20: mol_type = other DNA
atactgctccagatatgggt

SEQ ID NO: 7839 - DNA, 20 bp, synthetic construct
  source 1..20: mol_type = other DNA
ccgtaggcgccggagcccac

SEQ ID NO: 7840 - DNA, 20 bp, synthetic construct
  source 1..20: mol_type = other DNA
atccagttcagcatgatctc

SEQ ID NO: 7841 - DNA, 20 bp, synthetic construct
  source 1..20: mol_type = other DNA
gtcaggcctagaaattggga

SEQ ID NO: 7842 - DNA, 20 bp, synthetic construct
  source 1..20: mol_type = other DNA
aggagccctgtaccacctag

SEQ ID NO: 7843 - DNA, 20 bp, synthetic construct
  source 1..20: mol_type = other DNA
cactcaccacacagagccat

SEQ ID NO: 7844 - DNA, 20 bp, synthetic construct
  source 1..20: mol_type = other DNA
cagaatctaaagggcagaag

SEQ ID NO: 7845 - DNA, 20 bp, synthetic construct
  source 1..20: mol_type = other DNA
caggctacgtggccactagg

SEQ ID NO: 7846 - DNA, 20 bp, synthetic construct
  source 1..20: mol_type = other DNA
agtaggcatgtgcaagggct

SEQ ID NO: 7847 - DNA, 20 bp, synthetic construct
  source 1..20: mol_type = other DNA
ggtcctaggaagcaaataca

SEQ ID NO: 7848 - DNA, 20 bp, synthetic construct
  source 1..20: mol_type = other DNA
tccaaaatccagaatctaaa

SEQ ID NO: 7849 - DNA, 20 bp, synthetic construct
  source 1..20: mol_type = other DNA
gtaggcatgtgcaagggctt

SEQ ID NO: 7850 - DNA, 20 bp, synthetic construct
  source 1..20: mol_type = other DNA
ctcctgagatcatgctgaac

SEQ ID NO: 7851 - DNA, 20 bp, synthetic construct
  source 1..20: mol_type = other DNA
aggtcctaggaagcaaatac

SEQ ID NO: 7852 - DNA, 20 bp, synthetic construct
  source 1..20: mol_type = other DNA
tctcataggatcccccggct

SEQ ID NO: 7853 - DNA, 20 bp, synthetic construct
  source 1..20: mol_type = other DNA
ggtatgagaaactgcacgag

SEQ ID NO: 7854 - DNA, 20 bp, synthetic construct
  source 1..20: mol_type = other DNA
cctccagctcggacagcatg

SEQ ID NO: 7855 - DNA, 20 bp, synthetic construct
  source 1..20: mol_type = other DNA
ttgacatgaccgctaaagaa

SEQ ID NO: 7856 - DNA, 20 bp, synthetic construct
  source 1..20: mol_type = other DNA
tagcggtcatgtcaatggtt

SEQ ID NO: 7857 - DNA, 20 bp, synthetic construct
  source 1..20: mol_type = other DNA
gaaccagggtacacgcagag

SEQ ID NO: 7858 - DNA, 20 bp, synthetic construct
  source 1..20: mol_type = other DNA
atgagcagctcaacttgcgt

SEQ ID NO: 7859 - DNA, 20 bp, synthetic construct
  source 1..20: mol_type = other DNA
cccctaaaagccctaacaca

SEQ ID NO: 7860 - DNA, 20 bp, synthetic construct
  source 1..20: mol_type = other DNA
gatgtgatgacttgcaaaga

SEQ ID NO: 7861 - DNA, 20 bp, synthetic construct
  source 1..20: mol_type = other DNA
gcagctccttgatatcctgc

SEQ ID NO: 7862 - DNA, 20 bp, synthetic construct
  source 1..20: mol_type = other DNA
catccaggtaaccgaggtga

SEQ ID NO: 7863 - DNA, 20 bp, synthetic construct
  source 1..20: mol_type = other DNA
tccactcacctccatagcat

SEQ ID NO: 7864 - DNA, 20 bp, synthetic construct
  source 1..20: mol_type = other DNA
cctggatgagcatcttgcgc

SEQ ID NO: 7865 - DNA, 20 bp, synthetic construct
  source 1..20: mol_type = other DNA
taaggaacgtgggcatgacc

SEQ ID NO: 7866 - DNA, 20 bp, synthetic construct
  source 1..20: mol_type = other DNA
ccagggtccacagagccacc

SEQ ID NO: 7867 - DNA, 20 bp, synthetic construct
  source 1..20: mol_type = other DNA
ccatcatggcctgctggacc

SEQ ID NO: 7868 - DNA, 20 bp, synthetic construct
  source 1..20: mol_type = other DNA
catcagcctccagttcagca

SEQ ID NO: 7869 - DNA, 20 bp, synthetic construct
  source 1..20: mol_type = other DNA
accattcccccaaggcctcg

SEQ ID NO: 7870 - DNA, 20 bp, synthetic construct
  source 1..20: mol_type = other DNA
ccagccaatgaggcccgagt

SEQ ID NO: 7871 - DNA, 20 bp, synthetic construct
  source 1..20: mol_type = other DNA
gccagcgtatcgtagaggac

SEQ ID NO: 7872 - DNA, 20 bp, synthetic construct
  source 1..20: mol_type = other DNA
ggcccagcaggagcgcaggg

SEQ ID NO: 7873 - DNA, 20 bp, synthetic construct
  source 1..20: mol_type = other DNA
gtgggtagatgagggcctga

SEQ ID NO: 7874 - DNA, 20 bp, synthetic construct
  source 1..20: mol_type = other DNA
ttatgggcgaagtcctttgg

SEQ ID NO: 7875 - DNA, 20 bp, synthetic construct
  source 1..20: mol_type = other DNA
gcccagcaggagcgcaggga

SEQ ID NO: 7876 - DNA, 20 bp, synthetic construct
  source 1..20: mol_type = other DNA
cagcaaggggtcatagacaa

SEQ ID NO: 7877 - DNA, 20 bp, synthetic construct
  source 1..20: mol_type = other DNA
agtggcctacctcggagctg

SEQ ID NO: 7878 - DNA, 20 bp, synthetic construct
  source 1..20: mol_type = other DNA
agatggaacggaagaagccc

SEQ ID NO: 7879 - DNA, 20 bp, synthetic construct
  source 1..20: mol_type = other DNA
gctcactttcgagatggcag

SEQ ID NO: 7880 - DNA, 20 bp, synthetic construct
  source 1..20: mol_type = other DNA
gtatgagaaactgcacgagt

SEQ ID NO: 7881 - DNA, 20 bp, synthetic construct
  source 1..20: mol_type = other DNA
acttctactcactctcatga

SEQ ID NO: 7882 - DNA, 20 bp, synthetic construct
  source 1..20: mol_type = other DNA
agacagcgtgtccatggctg

SEQ ID NO: 7883 - DNA, 20 bp, synthetic construct
  source 1..20: mol_type = other DNA
tagccagaccgcagtgcaag

SEQ ID NO: 7884 - DNA, 20 bp, synthetic construct
  source 1..20: mol_type = other DNA
caggaggcagaaggcaatgc

SEQ ID NO: 7885 - DNA, 20 bp, synthetic construct
  source 1..20: mol_type = other DNA
ccacatctcatgccagagga

SEQ ID NO: 7886 - DNA, 20 bp, synthetic construct
  source 1..20: mol_type = other DNA
ctacctctctgcgtgtaccc

SEQ ID NO: 7887 - DNA, 20 bp, synthetic construct
  source 1..20: mol_type = other DNA
gtgctatattggctggtgag

SEQ ID NO: 7888 - DNA, 20 bp, synthetic construct
  source 1..20: mol_type = other DNA
ggtcggaatgcagccaagcg

SEQ ID NO: 7889 - DNA, 20 bp, synthetic construct
  source 1..20: mol_type = other DNA
ttaggtaaagcttccctcac

SEQ ID NO: 7890 - DNA, 20 bp, synthetic construct
  source 1..20: mol_type = other DNA
caaccaggcctggcatgcgt

SEQ ID NO: 7891 - DNA, 20 bp, synthetic construct
  source 1..20: mol_type = other DNA
catgccacatctcatgccag

SEQ ID NO: 7892 - DNA, 20 bp, synthetic construct
  source 1..20: mol_type = other DNA
ggtacaaggtgatcagaagc

SEQ ID NO: 7893 - DNA, 20 bp, synthetic construct
  source 1..20: mol_type = other DNA
aggaacgtgggcatgacctg

SEQ ID NO: 7894 - DNA, 20 bp, synthetic construct
  source 1..20: mol_type = other DNA
gaccaggtgccccagcatgc

SEQ ID NO: 7895 - DNA, 20 bp, synthetic construct
  source 1..20: mol_type = other DNA
ctcgtgcagtttctcatacc

SEQ ID NO: 7896 - DNA, 20 bp, synthetic construct
  source 1..20: mol_type = other DNA
atggactgaatgcgaatgat

SEQ ID NO: 7897 - DNA, 20 bp, synthetic construct
  source 1..20: mol_type = other DNA
ctcgtgacaaggagatggaa

SEQ ID NO: 7898 - DNA, 20 bp, synthetic construct
  source 1..20: mol_type = other DNA
tctgatacctgagtgtatcc

SEQ ID NO: 7899 - DNA, 20 bp, synthetic construct
  source 1..20: mol_type = other DNA
gctatattggctggtgagtg

SEQ ID NO: 7900 - DNA, 20 bp, synthetic construct
  source 1..20: mol_type = other DNA
tgatcaccttgtaccagctg

SEQ ID NO: 7901 - DNA, 20 bp, synthetic construct
  source 1..20: mol_type = other DNA
tgaccaggtgtttgagatcc

SEQ ID NO: 7902 - DNA, 20 bp, synthetic construct
  source 1..20: mol_type = other DNA
acacccatccaacctgatgc

SEQ ID NO: 7903 - DNA, 20 bp, synthetic construct
  source 1..20: mol_type = other DNA
ctcaccagccaatatagcac

SEQ ID NO: 7904 - DNA, 20 bp, synthetic construct
  source 1..20: mol_type = other DNA
cctgttgtgccaaggagaag

SEQ ID NO: 7905 - DNA, 20 bp, synthetic construct
  source 1..20: mol_type = other DNA
gggctgccagcgtatcgtag

SEQ ID NO: 7906 - DNA, 20 bp, synthetic construct
  source 1..20: mol_type = other DNA
aaattactcacctatctccc

SEQ ID NO: 7907 - DNA, 20 bp, synthetic construct
  source 1..20: mol_type = other DNA
cccactggcacacctgagag

SEQ ID NO: 7908 - DNA, 20 bp, synthetic construct
  source 1..20: mol_type = other DNA
atcgatctgtaacaggacaa

SEQ ID NO: 7909 - DNA, 20 bp, synthetic construct
  source 1..20: mol_type = other DNA
cggtgaggtccccactgacc

SEQ ID NO: 7910 - DNA, 20 bp, synthetic construct
  source 1..20: mol_type = other DNA
ccaaccaggcctggcatgcg

SEQ ID NO: 7911 - DNA, 20 bp, synthetic construct
  source 1..20: mol_type = other DNA
atgagtccttcagcagctcc

SEQ ID NO: 7912 - DNA, 20 bp, synthetic construct
  source 1..20: mol_type = other DNA
accagcagtgctgtgaaaag

SEQ ID NO: 7913 - DNA, 20 bp, synthetic construct
  source 1..20: mol_type = other DNA
agagtcaagtggtcatagtc

SEQ ID NO: 7914 - DNA, 20 bp, synthetic construct
  source 1..20: mol_type = other DNA
aacttctactcactctcatg

SEQ ID NO: 7915 - DNA, 20 bp, synthetic construct
  source 1..20: mol_type = other DNA
agacgtcccaccaagggtct

SEQ ID NO: 7916 - DNA, 20 bp, synthetic construct
  source 1..20: mol_type = other DNA
caatgagctgaggtataacc

SEQ ID NO: 7917 - DNA, 20 bp, synthetic construct
  source 1..20: mol_type = other DNA
gtagtgctttggcatatgct

SEQ ID NO: 7918 - DNA, 20 bp, synthetic construct
  source 1..20: mol_type = other DNA
gctagctgcaaaagagagga

SEQ ID NO: 7919 - DNA, 20 bp, synthetic construct
  source 1..20: mol_type = other DNA
tagagcactgcagtgagggc

SEQ ID NO: 7920 - DNA, 20 bp, synthetic construct
  source 1..20: mol_type = other DNA
tggccagctcacggagaacc

SEQ ID NO: 7921 - DNA, 20 bp, synthetic construct
  source 1..20: mol_type = other DNA
aatcagacaggcacgaaggg

SEQ ID NO: 7922 - DNA, 20 bp, synthetic construct
  source 1..20: mol_type = other DNA
cagcagtcaaatgccttggt

SEQ ID NO: 7923 - DNA, 20 bp, synthetic construct
  source 1..20: mol_type = other DNA
catccatataaggtctgatg

SEQ ID NO: 7924 - DNA, 20 bp, synthetic construct
  source 1..20: mol_type = other DNA
catcatggcctgctggacca

SEQ ID NO: 7925 - DNA, 20 bp, synthetic construct
  source 1..20: mol_type = other DNA
tctccttcttgacacagctt

SEQ ID NO: 7926 - DNA, 20 bp, synthetic construct
  source 1..20: mol_type = other DNA
ggcacaggcctacaacccga

SEQ ID NO: 7927 - DNA, 20 bp, synthetic construct
  source 1..20: mol_type = other DNA
tagccaggtatcaatctgga

SEQ ID NO: 7928 - DNA, 20 bp, synthetic construct
  source 1..20: mol_type = other DNA
ccatcaagtctctgcaacac

SEQ ID NO: 7929 - DNA, 20 bp, synthetic construct
  source 1..20: mol_type = other DNA
gcgcaggaaaggcatgacaa

SEQ ID NO: 7930 - DNA, 20 bp, synthetic construct
  source 1..20: mol_type = other DNA
agaccaggtgccccagcatg

SEQ ID NO: 7931 - DNA, 20 bp, synthetic construct
  source 1..20: mol_type = other DNA
taaaagccctaacacacgga

SEQ ID NO: 7932 - DNA, 20 bp, synthetic construct
  source 1..20: mol_type = other DNA
aagcgagccctggaatggct

SEQ ID NO: 7933 - DNA, 20 bp, synthetic construct
  source 1..20: mol_type = other DNA
cccataagtgtcaatttccg

SEQ ID NO: 7934 - DNA, 20 bp, synthetic construct
  source 1..20: mol_type = other DNA
tgacatgaccgctaaagaac

SEQ ID NO: 7935 - DNA, 20 bp, synthetic construct
  source 1..20: mol_type = other DNA
tcaccttgatagagacaatg

SEQ ID NO: 7936 - DNA, 20 bp, synthetic construct
  source 1..20: mol_type = other DNA
ggtccagcatcaggttggat

SEQ ID NO: 7937 - DNA, 20 bp, synthetic construct
  source 1..20: mol_type = other DNA
tcaaaccacacctagaacac

SEQ ID NO: 7938 - DNA, 20 bp, synthetic construct
  source 1..20: mol_type = other DNA
tataggtcagtgggacagca

SEQ ID NO: 7939 - DNA, 20 bp, synthetic construct
  source 1..20: mol_type = other DNA
gaggcagaaggcaatgcagg

SEQ ID NO: 7940 - DNA, 20 bp, synthetic construct
  source 1..20: mol_type = other DNA
tgctgcctgtaaggaacagt

SEQ ID NO: 7941 - DNA, 20 bp, synthetic construct
  source 1..20: mol_type = other DNA
caggtaacggggagccgggc

SEQ ID NO: 7942 - DNA, 20 bp, synthetic construct
  source 1..20: mol_type = other DNA
gtctcacatgaccagcgtcc

SEQ ID NO: 7943 - DNA, 20 bp, synthetic construct
  source 1..20: mol_type = other DNA
ggaagacagaattatttacc

SEQ ID NO: 7944 - DNA, 20 bp, synthetic construct
  source 1..20: mol_type = other DNA
aaggtgcatgatcgtccacc

SEQ ID NO: 7945 - DNA, 20 bp, synthetic construct
  source 1..20: mol_type = other DNA
cgaacaggaaggttatctgc

SEQ ID NO: 7946 - DNA, 20 bp, synthetic construct
  source 1..20: mol_type = other DNA
caaggacccttgatgagctc

SEQ ID NO: 7947 - DNA, 20 bp, synthetic construct
  source 1..20: mol_type = other DNA
ggagaattggaaaacaatgt

SEQ ID NO: 7948 - DNA, 20 bp, synthetic construct
  source 1..20: mol_type = other DNA
gtctctgaaattacaaagta

SEQ ID NO: 7949 - DNA, 20 bp, synthetic construct
  source 1..20: mol_type = other DNA
gctccccgttacctgtgccg

SEQ ID NO: 7950 - DNA, 20 bp, synthetic construct
  source 1..20: mol_type = other DNA
aggtgcatgatcgtccacca

SEQ ID NO: 7951 - DNA, 20 bp, synthetic construct
  source 1..20: mol_type = other DNA
gaacttactagcatcttcag

SEQ ID NO: 7952 - DNA, 20 bp, synthetic construct
  source 1..20: mol_type = other DNA
gcgccatggcccgaagaccc

SEQ ID NO: 7953 - DNA, 20 bp, synthetic construct
  source 1..20: mol_type = other DNA
taccaggcacacaagagact

SEQ ID NO: 7954 - DNA, 20 bp, synthetic construct
  source 1..20: mol_type = other DNA
accaggcacacaagagactg

SEQ ID NO: 7955 - DNA, 20 bp, synthetic construct
  source 1..20: mol_type = other DNA
cttaccggtgcatctgccac

SEQ ID NO: 7956 - DNA, 20 bp, synthetic construct
  source 1..20: mol_type = other DNA
actggaattctacaatgcgt

SEQ ID NO: 7957 - DNA, 20 bp, synthetic construct
  source 1..20: mol_type = other DNA
tgtctcacatgaccagcgtc

SEQ ID NO: 7958 - DNA, 20 bp, synthetic construct
  source 1..20: mol_type = other DNA
tacttacagaatctataaat

SEQ ID NO: 7959 - DNA, 20 bp, synthetic construct
  source 1..20: mol_type = other DNA
gtcttcctcttctgtccagg

SEQ ID NO: 7960 - DNA, 20 bp, synthetic construct
  source 1..20: mol_type = other DNA
agaacttactagcatcttca

SEQ ID NO: 7961 - DNA, 20 bp, synthetic construct
  source 1..20: mol_type = other DNA
acagctcaactccctgccac

SEQ ID NO: 7962 - DNA, 20 bp, synthetic construct
  source 1..20: mol_type = other DNA
atgtgcagtgccagcaccga

SEQ ID NO: 7963 - DNA, 20 bp, synthetic construct
  source 1..20: mol_type = other DNA
gccatggcgcggcgggcgcg

SEQ ID NO: 7964 - DNA, 20 bp, synthetic construct
  source 1..20: mol_type = other DNA
cattttgtgcttcagaaatg

SEQ ID NO: 7965 - DNA, 20 bp, synthetic construct
  source 1..20: mol_type = other DNA
ctgaggctaaacggaagagt

SEQ ID NO: 7966 - DNA, 20 bp, synthetic construct
  source 1..20: mol_type = other DNA
cagaagttaagaaaacctcc

SEQ ID NO: 7967 - DNA, 20 bp, synthetic construct
  source 1..20: mol_type = other DNA
caagagactggggaacagat

SEQ ID NO: 7968 - DNA, 20 bp, synthetic construct
  source 1..20: mol_type = other DNA
aaggacccttgatgagctca

SEQ ID NO: 7969 - DNA, 20 bp, synthetic construct
  source 1..20: mol_type = other DNA
tctctgaaattacaaagtaa

SEQ ID NO: 7970 - DNA, 20 bp, synthetic construct
  source 1..20: mol_type = other DNA
tccccagtctcttgtgtgcc

SEQ ID NO: 7971 - DNA, 20 bp, synthetic construct
  source 1..20: mol_type = other DNA
tgagaaggaaaagcgaataa

SEQ ID NO: 7972 - DNA, 20 bp, synthetic construct
  source 1..20: mol_type = other DNA
gacggacaggatgtatgctg

SEQ ID NO: 7973 - DNA, 20 bp, synthetic construct
  source 1..20: mol_type = other DNA
atccaggactgtatgtggag

SEQ ID NO: 7974 - DNA, 20 bp, synthetic construct
  source 1..20: mol_type = other DNA
gttttagctcgttcctcctc

SEQ ID NO: 7975 - DNA, 20 bp, synthetic construct
  source 1..20: mol_type = other DNA
gggttccatgatataatccc

SEQ ID NO: 7976 - DNA, 20 bp, synthetic construct
  source 1..20: mol_type = other DNA
ggcccagactgtgaacctgc

SEQ ID NO: 7977 - DNA, 20 bp, synthetic construct
  source 1..20: mol_type = other DNA
caacttacaagttcaaccgg

SEQ ID NO: 7978 - DNA, 20 bp, synthetic construct
  source 1..20: mol_type = other DNA
cctcttcagagtgttgaaga

SEQ ID NO: 7979 - DNA, 20 bp, synthetic construct
  source 1..20: mol_type = other DNA
acaggtacgtgtgctccccg

SEQ ID NO: 7980 - DNA, 20 bp, synthetic construct
  source 1..20: mol_type = other DNA
gacgtccagcacctgcgtgg

SEQ ID NO: 7981 - DNA, 20 bp, synthetic construct
  source 1..20: mol_type = other DNA
cttcagagtgttgaagatgg

SEQ ID NO: 7982 - DNA, 20 bp, synthetic construct
  source 1..20: mol_type = other DNA
ttcaggtgttgagccagtgc

SEQ ID NO: 7983 - DNA, 20 bp, synthetic construct
  source 1..20: mol_type = other DNA
cttacaagttcaaccggagg

SEQ ID NO: 7984 - DNA, 20 bp, synthetic construct
  source 1..20: mol_type = other DNA
acctgtctgaatgagccact

SEQ ID NO: 7985 - DNA, 20 bp, synthetic construct
  source 1..20: mol_type = other DNA
agggttccatgatataatcc

SEQ ID NO: 7986 - DNA, 20 bp, synthetic construct
  source 1..20: mol_type = other DNA
ggtaaaggccagtctagtgg

SEQ ID NO: 7987 - DNA, 20 bp, synthetic construct
  source 1..20: mol_type = other DNA
gggcagtaaaagcatctact

SEQ ID NO: 7988 - DNA, 20 bp, synthetic construct
  source 1..20: mol_type = other DNA
gcagtaaaagcatctactgg

SEQ ID NO: 7989 - DNA, 20 bp, synthetic construct
  source 1..20: mol_type = other DNA
ccaattctcatcagtgacac

SEQ ID NO: 7990 - DNA, 20 bp, synthetic construct
  source 1..20: mol_type = other DNA
gctcacttacagcactcaac

SEQ ID NO: 7991 - DNA, 20 bp, synthetic construct
  source 1..20: mol_type = other DNA
tggcatcaacagtatggact

SEQ ID NO: 7992 - DNA, 20 bp, synthetic construct
  source 1..20: mol_type = other DNA
caatagatggacgacctcag

SEQ ID NO: 7993 - DNA, 20 bp, synthetic construct
  source 1..20: mol_type = other DNA
agtagtcatcggcgtggccc

SEQ ID NO: 7994 - DNA, 20 bp, synthetic construct
  source 1..20: mol_type = other DNA
gatgccaagtttcttctcca

SEQ ID NO: 7995 - DNA, 20 bp, synthetic construct
  source 1..20: mol_type = other DNA
cgaaaaggagaaactgatat

SEQ ID NO: 7996 - DNA, 20 bp, synthetic construct
  source 1..20: mol_type = other DNA
cctgcaggccgcgagcccgg

SEQ ID NO: 7997 - DNA, 20 bp, synthetic construct
  source 1..20: mol_type = other DNA
ggcagtaaaagcatctactg

SEQ ID NO: 7998 - DNA, 20 bp, synthetic construct
  source 1..20: mol_type = other DNA
cacctgcaggccgcgagccc

SEQ ID NO: 7999 - DNA, 20 bp, synthetic construct
  source 1..20: mol_type = other DNA
acctgcaggccgcgagcccg

SEQ ID NO: 8000 - DNA, 20 bp, synthetic construct
  source 1..20: mol_type = other DNA
tagaggctatctgcagagaa

SEQ ID NO: 8001 - DNA, 20 bp, synthetic construct
  source 1..20: mol_type = other DNA
taccaggtgcatcgaatcac

SEQ ID NO: 8002 - DNA, 20 bp, synthetic construct
  source 1..20: mol_type = other DNA
gtagtcatcggcgtggccca

SEQ ID NO: 8003 - DNA, 20 bp, synthetic construct
  source 1..20: mol_type = other DNA
ccgatgactactgcaaactg

SEQ ID NO: 8004 - DNA, 20 bp, synthetic construct
  source 1..20: mol_type = other DNA
ccttaccaatctcctagctc

SEQ ID NO: 8005 - DNA, 20 bp, synthetic construct
  source 1..20: mol_type = other DNA
tgatgccaagtttcttctcc

SEQ ID NO: 8006 - DNA, 20 bp, synthetic construct
  source 1..20: mol_type = other DNA
acagcactcaacgggtatag

SEQ ID NO: 8007 - DNA, 20 bp, synthetic construct
  source 1..20: mol_type = other DNA
ccaggtacgaggagtcatga

SEQ ID NO: 8008 - DNA, 20 bp, synthetic construct
  source 1..20: mol_type = other DNA
agcacaaagtacgggccagg

SEQ ID NO: 8009 - DNA, 20 bp, synthetic construct
  source 1..20: mol_type = other DNA
agaaggaggcgggtgagggt

SEQ ID NO: 8010 - DNA, 20 bp, synthetic construct
  source 1..20: mol_type = other DNA
ctacgggccacagagggcgt

SEQ ID NO: 8011 - DNA, 20 bp, synthetic construct
  source 1..20: mol_type = other DNA
gcccccgcacctggtgcagg

SEQ ID NO: 8012 - DNA, 20 bp, synthetic construct
  source 1..20: mol_type = other DNA
gtgacagtcccggcccttag

SEQ ID NO: 8013 - DNA, 20 bp, synthetic construct
  source 1..20: mol_type = other DNA
ccagctccaccttccaccag

SEQ ID NO: 8014 - DNA, 20 bp, synthetic construct
  source 1..20: mol_type = other DNA
gccaggtgcaggggcgtctg

SEQ ID NO: 8015 - DNA, 20 bp, synthetic construct
  source 1..20: mol_type = other DNA
tacaaaaacttcagaggcag

SEQ ID NO: 8016 - DNA, 20 bp, synthetic construct
  source 1..20: mol_type = other DNA
ccagtccggcgcgggcccca

SEQ ID NO: 8017 - DNA, 20 bp, synthetic construct
  source 1..20: mol_type = other DNA
ggagatgctgcagcgaggta

SEQ ID NO: 8018 - DNA, 20 bp, synthetic construct
  source 1..20: mol_type = other DNA
ggcaagcaatgctcggagct

SEQ ID NO: 8019 - DNA, 20 bp, synthetic construct
  source 1..20: mol_type = other DNA
tccccagacgcccctgcacc

SEQ ID NO: 8020 - DNA, 20 bp, synthetic construct
  source 1..20: mol_type = other DNA
ctcgagctacgggccacaga

SEQ ID NO: 8021 - DNA, 20 bp, synthetic construct
  source 1..20: mol_type = other DNA
aagtgaggtcaagaggcgtg

SEQ ID NO: 8022 - DNA, 20 bp, synthetic construct
  source 1..20: mol_type = other DNA
cttcagaaggaggcgggtga

SEQ ID NO: 8023 - DNA, 20 bp, synthetic construct
  source 1..20: mol_type = other DNA
tcgtcccccctgccgctctg

SEQ ID NO: 8024 - DNA, 20 bp, synthetic construct
  source 1..20: mol_type = other DNA
tcccaccttggtgaccagat

SEQ ID NO: 8025 - DNA, 20 bp, synthetic construct
  source 1..20: mol_type = other DNA
ggctaggtgcagtggtctgg

SEQ ID NO: 8026 - DNA, 20 bp, synthetic construct
  source 1..20: mol_type = other DNA
actgaccagccttcagaagg

SEQ ID NO: 8027 - DNA, 20 bp, synthetic construct
  source 1..20: mol_type = other DNA
cggagacacgtaggcaacag

SEQ ID NO: 8028 - DNA, 20 bp, synthetic construct
  source 1..20: mol_type = other DNA
agcagtgcacgcagcagctc

SEQ ID NO: 8029 - DNA, 20 bp, synthetic construct
  source 1..20: mol_type = other DNA
ggatacagtcctaaggatgc

SEQ ID NO: 8030 - DNA, 20 bp, synthetic construct
  source 1..20: mol_type = other DNA
cttgcatctagccacagaga

SEQ ID NO: 8031 - DNA, 20 bp, synthetic construct
  source 1..20: mol_type = other DNA
cctggtgcaggtggttggtg

SEQ ID NO: 8032 - DNA, 20 bp, synthetic construct
  source 1..20: mol_type = other DNA
acctgtttatgcacatctgt

SEQ ID NO: 8033 - DNA, 20 bp, synthetic construct
  source 1..20: mol_type = other DNA
gcagcgaggtatggactccg

SEQ ID NO: 8034 - DNA, 20 bp, synthetic construct
  source 1..20: mol_type = other DNA
ccagcagatccaggcactca

SEQ ID NO: 8035 - DNA, 20 bp, synthetic construct
  source 1..20: mol_type = other DNA
tcaccttggtgctgcaagtg

SEQ ID NO: 8036 - DNA, 20 bp, synthetic construct
  source 1..20: mol_type = other DNA
gggggctacggaggagctgg

SEQ ID NO: 8037 - DNA, 20 bp, synthetic construct
  source 1..20: mol_type = other DNA
ttgtagatgacattgaggtt

SEQ ID NO: 8038 - DNA, 20 bp, synthetic construct
  source 1..20: mol_type = other DNA
gcccgagccctactcgacta

SEQ ID NO: 8039 - DNA, 20 bp, synthetic construct
  source 1..20: mol_type = other DNA
gcaagcaatgctcggagctg

SEQ ID NO: 8040 - DNA, 20 bp, synthetic construct
  source 1..20: mol_type = other DNA
taaacaggtacccagggcta

SEQ ID NO: 8041 - DNA, 20 bp, synthetic construct
  source 1..20: mol_type = other DNA
cctcaccaaccacctgcacc

SEQ ID NO: 8042 - DNA, 20 bp, synthetic construct
  source 1..20: mol_type = other DNA
gtcccaccttggtgaccaga

SEQ ID NO: 8043 - DNA, 20 bp, synthetic construct
  source 1..20: mol_type = other DNA
cagctccaccttccaccaga

SEQ ID NO: 8044 - DNA, 20 bp, synthetic construct
  source 1..20: mol_type = other DNA
acagttcacctattaccctc

SEQ ID NO: 8045 - DNA, 20 bp, synthetic construct
  source 1..20: mol_type = other DNA
agcccctaccagtccggcgc

SEQ ID NO: 8046 - DNA, 20 bp, synthetic construct
  source 1..20: mol_type = other DNA
cagtccggcgcgggccccat

SEQ ID NO: 8047 - DNA, 20 bp, synthetic construct
  source 1..20: mol_type = other DNA
gatggctaggtgcagtggtc

SEQ ID NO: 8048 - DNA, 20 bp, synthetic construct
  source 1..20: mol_type = other DNA
ctgcaactgaaacgcaagcg

SEQ ID NO: 8049 - DNA, 20 bp, synthetic construct
  source 1..20: mol_type = other DNA
ccgccaggtgcaggggcgtc

SEQ ID NO: 8050 - DNA, 20 bp, synthetic construct
  source 1..20: mol_type = other DNA
cagcccctaccagtccggcg

SEQ ID NO: 8051 - DNA, 20 bp, synthetic construct
  source 1..20: mol_type = other DNA
caggggtgtgtttcccgcaa

SEQ ID NO: 8052 - DNA, 20 bp, synthetic construct
  source 1..20: mol_type = other DNA
ggagacacgtaggcaacaga

SEQ ID NO: 8053 - DNA, 20 bp, synthetic construct
  source 1..20: mol_type = other DNA
taaatctgagaagagagaat

SEQ ID NO: 8054 - DNA, 20 bp, synthetic construct
  source 1..20: mol_type = other DNA
caggtgagtgagcaaaaggg

SEQ ID NO: 8055 - DNA, 20 bp, synthetic construct
  source 1..20: mol_type = other DNA
tggaaggtggagctgggctg

SEQ ID NO: 8056 - DNA, 20 bp, synthetic construct
  source 1..20: mol_type = other DNA
cggggcgcagatggccgcca

SEQ ID NO: 8057 - DNA, 20 bp, synthetic construct
  source 1..20: mol_type = other DNA
ctgcacctagccatcatcca

SEQ ID NO: 8058 - DNA, 20 bp, synthetic construct
  source 1..20: mol_type = other DNA
tgccacctgtggatacaggc

SEQ ID NO: 8059 - DNA, 20 bp, synthetic construct
  source 1..20: mol_type = other DNA
tggctaggtgcagtggtctg

SEQ ID NO: 8060 - DNA, 20 bp, synthetic construct
  source 1..20: mol_type = other DNA
cgccaggtgcaggggcgtct

SEQ ID NO: 8061 - DNA, 20 bp, synthetic construct
  source 1..20: mol_type = other DNA
gggacagcgccacctgctga

SEQ ID NO: 8062 - DNA, 20 bp, synthetic construct
  source 1..20: mol_type = other DNA
gctgagaagacagaggaatg

SEQ ID NO: 8063 - DNA, 20 bp, synthetic construct
  source 1..20: mol_type = other DNA
tacctgtttatgcacatctg

SEQ ID NO: 8064 - DNA, 20 bp, synthetic construct
  source 1..20: mol_type = other DNA
caactgaaacgcaagcgagg

SEQ ID NO: 8065 - DNA, 20 bp, synthetic construct
  source 1..20: mol_type = other DNA
cacgtaggcaacagagggcc

SEQ ID NO: 8066 - DNA, 20 bp, synthetic construct
  source 1..20: mol_type = other DNA
ggcgtctggggatgaaagca

SEQ ID NO: 8067 - DNA, 20 bp, synthetic construct
  source 1..20: mol_type = other DNA
tgcacctagccatcatccac

SEQ ID NO: 8068 - DNA, 20 bp, synthetic construct
  source 1..20: mol_type = other DNA
gagactgaccagccttcaga

SEQ ID NO: 8069 - DNA, 20 bp, synthetic construct
  source 1..20: mol_type = other DNA
aatcttcatcttgtgatagg

SEQ ID NO: 8070 - DNA, 20 bp, synthetic construct
  source 1..20: mol_type = other DNA
tggagtccaggccgctgtcg

SEQ ID NO: 8071 - DNA, 20 bp, synthetic construct
  source 1..20: mol_type = other DNA
cctcgtctttcatggagtcc

SEQ ID NO: 8072 - DNA, 20 bp, synthetic construct
  source 1..20: mol_type = other DNA
agtccaggccgctgtcgtgg

SEQ ID NO: 8073 - DNA, 20 bp, synthetic construct
  source 1..20: mol_type = other DNA
cctccatggcccactcctgg

SEQ ID NO: 8074 - DNA, 20 bp, synthetic construct
  source 1..20: mol_type = other DNA
tctccacaccttgagggctc

SEQ ID NO: 8075 - DNA, 20 bp, synthetic construct
  source 1..20: mol_type = other DNA
tctcctcagactgggggggc

SEQ ID NO: 8076 - DNA, 20 bp, synthetic construct
  source 1..20: mol_type = other DNA
aagagggagaggcgggagac

SEQ ID NO: 8077 - DNA, 20 bp, synthetic construct
  source 1..20: mol_type = other DNA
tgaatatgatcccaccatag

SEQ ID NO: 8078 - DNA, 20 bp, synthetic construct
  source 1..20: mol_type = other DNA
cctccaccattgccacctgc

SEQ ID NO: 8079 - DNA, 20 bp, synthetic construct
  source 1..20: mol_type = other DNA
tggaggctttaagcttggcg

SEQ ID NO: 8080 - DNA, 20 bp, synthetic construct
  source 1..20: mol_type = other DNA
tccaccattgccacctgcgg

SEQ ID NO: 8081 - DNA, 20 bp, synthetic construct
  source 1..20: mol_type = other DNA
ctccaccattgccacctgcg

SEQ ID NO: 8082 - DNA, 20 bp, synthetic construct
  source 1..20: mol_type = other DNA
ccaccattgccacctgcggg

SEQ ID NO: 8083 - DNA, 20 bp, synthetic construct
  source 1..20: mol_type = other DNA
ccaagcttaaagcctccagc

SEQ ID NO: 8084 - DNA, 20 bp, synthetic construct
  source 1..20: mol_type = other DNA
acctccaccattgccacctg

SEQ ID NO: 8085 - DNA, 20 bp, synthetic construct
  source 1..20: mol_type = other DNA
cccaggccagctcgatgtgg

SEQ ID NO: 8086 - DNA, 20 bp, synthetic construct
  source 1..20: mol_type = other DNA
cggagagcagagccgaggtc

SEQ ID NO: 8087 - DNA, 20 bp, synthetic construct
  source 1..20: mol_type = other DNA
ctatcaacagaagatcaagg

SEQ ID NO: 8088 - DNA, 20 bp, synthetic construct
  source 1..20: mol_type = other DNA
gcagccgcaggtagaccaca

SEQ ID NO: 8089 - DNA, 20 bp, synthetic construct
  source 1..20: mol_type = other DNA
tagaggatatcgtagtgtcc

SEQ ID NO: 8090 - DNA, 20 bp, synthetic construct
  source 1..20: mol_type = other DNA
ccatgaactgcagccacgga

SEQ ID NO: 8091 - DNA, 20 bp, synthetic construct
  source 1..20: mol_type = other DNA
ccacctggatggacacgctg

SEQ ID NO: 8092 - DNA, 20 bp, synthetic construct
  source 1..20: mol_type = other DNA
caggtggagtacatggaccg

SEQ ID NO: 8093 - DNA, 20 bp, synthetic construct
  source 1..20: mol_type = other DNA
ccgaattcagcaagaggtga

SEQ ID NO: 8094 - DNA, 20 bp, synthetic construct
  source 1..20: mol_type = other DNA
cctgggccagcgcaatgatg

SEQ ID NO: 8095 - DNA, 20 bp, synthetic construct
  source 1..20: mol_type = other DNA
ccttgaacctgggggtggga

SEQ ID NO: 8096 - DNA, 20 bp, synthetic construct
  source 1..20: mol_type = other DNA
tatcaacagaagatcaaggt

SEQ ID NO: 8097 - DNA, 20 bp, synthetic construct
  source 1..20: mol_type = other DNA
ccagcgcaatgatgtggatg

SEQ ID NO: 8098 - DNA, 20 bp, synthetic construct
  source 1..20: mol_type = other DNA
agcccgaggtgagcagccgc

SEQ ID NO: 8099 - DNA, 20 bp, synthetic construct
  source 1..20: mol_type = other DNA
atccagcagtgcctccaagt

SEQ ID NO: 8100 - DNA, 20 bp, synthetic construct
  source 1..20: mol_type = other DNA
catctatcaacagaagatca

SEQ ID NO: 8101 - DNA, 20 bp, synthetic construct
  source 1..20: mol_type = other DNA
gagaaggtagaccttgggct

SEQ ID NO: 8102 - DNA, 20 bp, synthetic construct
  source 1..20: mol_type = other DNA
accgaattcagcaagaggtg

SEQ ID NO: 8103 - DNA, 20 bp, synthetic construct
  source 1..20: mol_type = other DNA
cacctggatggacacgctga

SEQ ID NO: 8104 - DNA, 20 bp, synthetic construct
  source 1..20: mol_type = other DNA
tccagccgctctgacaccag

SEQ ID NO: 8105 - DNA, 20 bp, synthetic construct
  source 1..20: mol_type = other DNA
ggccagcaggtcggcgacag

SEQ ID NO: 8106 - DNA, 20 bp, synthetic construct
  source 1..20: mol_type = other DNA
ggctccacctcctgtggcac

SEQ ID NO: 8107 - DNA, 20 bp, synthetic construct
  source 1..20: mol_type = other DNA
tctctgggttctgaagttct

SEQ ID NO: 8108 - DNA, 20 bp, synthetic construct
  source 1..20: mol_type = other DNA
tctctttctgaaggagacac

SEQ ID NO: 8109 - DNA, 20 bp, synthetic construct
  source 1..20: mol_type = other DNA
gcatctctggtcctcttcaa

SEQ ID NO: 8110 - DNA, 20 bp, synthetic construct
  source 1..20: mol_type = other DNA
atctgctcccgggccgcacg

SEQ ID NO: 8111 - DNA, 20 bp, synthetic construct
  source 1..20: mol_type = other DNA
caagctggccgccttccccg

SEQ ID NO: 8112 - DNA, 20 bp, synthetic construct
  source 1..20: mol_type = other DNA
atctctcagactccccagac

SEQ ID NO: 8113 - DNA, 20 bp, synthetic construct
  source 1..20: mol_type = other DNA
cagcggcacctacctctgtg

SEQ ID NO: 8114 - DNA, 20 bp, synthetic construct
  source 1..20: mol_type = other DNA
cacgaagctctccgatgtgt

SEQ ID NO: 8115 - DNA, 20 bp, synthetic construct
  source 1..20: mol_type = other DNA
cgggctggctgcggtcctcg

SEQ ID NO: 8116 - DNA, 20 bp, synthetic construct
  source 1..20: mol_type = other DNA
gcagggctggggagaaggtg

SEQ ID NO: 8117 - DNA, 20 bp, synthetic construct
  source 1..20: mol_type = other DNA
tgcagatcccacaggcgccc

SEQ ID NO: 8118 - DNA, 20 bp, synthetic construct
  source 1..20: mol_type = other DNA
tctggttgctggggctcatg

SEQ ID NO: 8119 - DNA, 20 bp, synthetic construct
  source 1..20: mol_type = other DNA
acatgagcgtggtcagggcc

SEQ ID NO: 8120 - DNA, 20 bp, synthetic construct
  source 1..20: mol_type = other DNA
ggagatggccccacagaggt

SEQ ID NO: 8121 - DNA, 20 bp, synthetic construct
  source 1..20: mol_type = other DNA
gacgttacctcgtgcggccc

SEQ ID NO: 8122 - DNA, 20 bp, synthetic construct
  source 1..20: mol_type = other DNA
cagactccccagacaggccc

SEQ ID NO: 8123 - DNA, 20 bp, synthetic construct
  source 1..20: mol_type = other DNA
gggccctgaccacgctcatg

SEQ ID NO: 8124 - DNA, 20 bp, synthetic construct
  source 1..20: mol_type = other DNA
ccccttcggtcaccacgagc

SEQ ID NO: 8125 - DNA, 20 bp, synthetic construct
  source 1..20: mol_type = other DNA
cgcccacgacaccaaccacc

SEQ ID NO: 8126 - DNA, 20 bp, synthetic construct
  source 1..20: mol_type = other DNA
ggttcttaggtaggtggggt

SEQ ID NO: 8127 - DNA, 20 bp, synthetic construct
  source 1..20: mol_type = other DNA
cctgcagagaaacacacttg

SEQ ID NO: 8128 - DNA, 20 bp, synthetic construct
  source 1..20: mol_type = other DNA
cctggccgtcatctgctccc

SEQ ID NO: 8129 - DNA, 20 bp, synthetic construct
  source 1..20: mol_type = other DNA
gggggttccagggcctgtct

SEQ ID NO: 8130 - DNA, 20 bp, synthetic construct
  source 1..20: mol_type = other DNA
ttctctctggaagggcacaa

SEQ ID NO: 8131 - DNA, 20 bp, synthetic construct
  source 1..20: mol_type = other DNA
gccctggccagtcgtctggg

SEQ ID NO: 8132 - DNA, 20 bp, synthetic construct
  source 1..20: mol_type = other DNA
tcctccttctttgaggagaa

SEQ ID NO: 8133 - DNA, 20 bp, synthetic construct
  source 1..20: mol_type = other DNA
ggatggttcttaggtaggtg

SEQ ID NO: 8134 - DNA, 20 bp, synthetic construct
  source 1..20: mol_type = other DNA
aactgggctggcggccagga

SEQ ID NO: 8135 - DNA, 20 bp, synthetic construct
  source 1..20: mol_type = other DNA
aaccctggtggttggtgtcg

SEQ ID NO: 8136 - DNA, 20 bp, synthetic construct
  source 1..20: mol_type = other DNA
cttctgcccttctctctgga

SEQ ID NO: 8137 - DNA, 20 bp, synthetic construct
  source 1..20: mol_type = other DNA
gcagatcaaagagagcctgc

SEQ ID NO: 8138 - DNA, 20 bp, synthetic construct
  source 1..20: mol_type = other DNA
cgggcagagctcagggtgac

SEQ ID NO: 8139 - DNA, 20 bp, synthetic construct
  source 1..20: mol_type = other DNA
acggaagcggcagtcctggc

SEQ ID NO: 8140 - DNA, 20 bp, synthetic construct
  source 1..20: mol_type = other DNA
tccctgcagagaaacacact

SEQ ID NO: 8141 - DNA, 20 bp, synthetic construct
  source 1..20: mol_type = other DNA
ctggctgcggtcctcgggga

SEQ ID NO: 8142 - DNA, 20 bp, synthetic construct
  source 1..20: mol_type = other DNA
gccaccattgtctttcctag

SEQ ID NO: 8143 - DNA, 20 bp, synthetic construct
  source 1..20: mol_type = other DNA
gccctgctcgtggtgaccga

SEQ ID NO: 8144 - DNA, 20 bp, synthetic construct
  source 1..20: mol_type = other DNA
catgagccccagcaaccaga

SEQ ID NO: 8145 - DNA, 20 bp, synthetic construct
  source 1..20: mol_type = other DNA
cggaagcggcagtcctggcc

SEQ ID NO: 8146 - DNA, 20 bp, synthetic construct
  source 1..20: mol_type = other DNA
ggccaggatggttcttaggt

SEQ ID NO: 8147 - DNA, 20 bp, synthetic construct
  source 1..20: mol_type = other DNA
gcctgtgggatctgcatgcc

SEQ ID NO: 8148 - DNA, 20 bp, synthetic construct
  source 1..20: mol_type = other DNA
tcttaggtaggtggggtcgg

SEQ ID NO: 8149 - DNA, 20 bp, synthetic construct
  source 1..20: mol_type = other DNA
agccggccagttccaaaccc

SEQ ID NO: 8150 - DNA, 20 bp, synthetic construct
  source 1..20: mol_type = other DNA
agcccctcacccaggccagc

SEQ ID NO: 8151 - DNA, 20 bp, synthetic construct
  source 1..20: mol_type = other DNA
agggcccggcgcaatgacag

SEQ ID NO: 8152 - DNA, 20 bp, synthetic construct
  source 1..20: mol_type = other DNA
cggtgctacaactgggctgg

SEQ ID NO: 8153 - DNA, 20 bp, synthetic construct
  source 1..20: mol_type = other DNA
tgacacggaagcggcagtcc

SEQ ID NO: 8154 - DNA, 20 bp, synthetic construct
  source 1..20: mol_type = other DNA
aggcgccctggccagtcgtc

SEQ ID NO: 8155 - DNA, 20 bp, synthetic construct
  source 1..20: mol_type = other DNA
cggccagttccaaaccctgg

SEQ ID NO: 8156 - DNA, 20 bp, synthetic construct
  source 1..20: mol_type = other DNA
cctgctcgtggtgaccgaag

SEQ ID NO: 8157 - DNA, 20 bp, synthetic construct
  source 1..20: mol_type = other DNA
tcggtcaccacgagcagggc

SEQ ID NO: 8158 - DNA, 20 bp, synthetic construct
  source 1..20: mol_type = other DNA
aggatggttcttaggtaggt

SEQ ID NO: 8159 - DNA, 20 bp, synthetic construct
  source 1..20: mol_type = other DNA
gcagttgtgtgacacggaag

SEQ ID NO: 8160 - DNA, 20 bp, synthetic construct
  source 1..20: mol_type = other DNA
tcagggacacagggcacggg

SEQ ID NO: 8161 - DNA, 20 bp, synthetic construct
  source 1..20: mol_type = other DNA
ccctgctcgtggtgaccgaa

SEQ ID NO: 8162 - DNA, 20 bp, synthetic construct
  source 1..20: mol_type = other DNA
cagttccaaaccctggtggt

SEQ ID NO: 8163 - DNA, 20 bp, synthetic construct
  source 1..20: mol_type = other DNA
acagcggcacctacctctgt

SEQ ID NO: 8164 - DNA, 20 bp, synthetic construct
  source 1..20: mol_type = other DNA
tgcggcccgggagcagatga

SEQ ID NO: 8165 - DNA, 20 bp, synthetic construct
  source 1..20: mol_type = other DNA
gagcagggctggggagaagg

SEQ ID NO: 8166 - DNA, 20 bp, synthetic construct
  source 1..20: mol_type = other DNA
gggctggggagaaggtgggg

SEQ ID NO: 8167 - DNA, 20 bp, synthetic construct
  source 1..20: mol_type = other DNA
gttggagaagctgcaggtga

SEQ ID NO: 8168 - DNA, 20 bp, synthetic construct
  source 1..20: mol_type = other DNA
ctggaagggcacaaaggtca

SEQ ID NO: 8169 - DNA, 20 bp, synthetic construct
  source 1..20: mol_type = other DNA
catgtggaagtcacgcccgt

SEQ ID NO: 8170 - DNA, 20 bp, synthetic construct
  source 1..20: mol_type = other DNA
ggagaaggtgggggggttcc

SEQ ID NO: 8171 - DNA, 20 bp, synthetic construct
  source 1..20: mol_type = other DNA
agggctggggagaaggtggg

SEQ ID NO: 8172 - DNA, 20 bp, synthetic construct
  source 1..20: mol_type = other DNA
gtgtcacacaactgcccaac

SEQ ID NO: 8173 - DNA, 20 bp, synthetic construct
  source 1..20: mol_type = other DNA
ctctttgatctgcgccttgg

SEQ ID NO: 8174 - DNA, 20 bp, synthetic construct
  source 1..20: mol_type = other DNA
ggcgccctggccagtcgtct

SEQ ID NO: 8175 - DNA, 20 bp, synthetic construct
  source 1..20: mol_type = other DNA
gggcggtgctacaactgggc

SEQ ID NO: 8176 - DNA, 20 bp, synthetic construct
  source 1..20: mol_type = other DNA
tccaggcatgcagatcccac

SEQ ID NO: 8177 - DNA, 20 bp, synthetic construct
  source 1..20: mol_type = other DNA
aggtgccgctgtcattgcgc

SEQ ID NO: 8178 - DNA, 20 bp, synthetic construct
  source 1..20: mol_type = other DNA
caaccaccagggtttggaac

SEQ ID NO: 8179 - DNA, 20 bp, synthetic construct
  source 1..20: mol_type = other DNA
cttccacatgagcgtggtca

SEQ ID NO: 8180 - DNA, 20 bp, synthetic construct
  source 1..20: mol_type = other DNA
agagcctgcgggcagagctc

SEQ ID NO: 8181 - DNA, 20 bp, synthetic construct
  source 1..20: mol_type = other DNA
cccttcggtcaccacgagca

SEQ ID NO: 8182 - DNA, 20 bp, synthetic construct
  source 1..20: mol_type = other DNA
tgacgttacctcgtgcggcc

SEQ ID NO: 8183 - DNA, 20 bp, synthetic construct
  source 1..20: mol_type = other DNA
tcaccctgagctctgcccgc

SEQ ID NO: 8184 - DNA, 20 bp, synthetic construct
  source 1..20: mol_type = other DNA
agaacacaggcacggctgag

SEQ ID NO: 8185 - DNA, 20 bp, synthetic construct
  source 1..20: mol_type = other DNA
tctggaagggcacaaaggtc

SEQ ID NO: 8186 - DNA, 20 bp, synthetic construct
  source 1..20: mol_type = other DNA
agccgtgcctgtgttctctg

SEQ ID NO: 8187 - DNA, 20 bp, synthetic construct
  source 1..20: mol_type = other DNA
cctccttctttgaggagaaa

SEQ ID NO: 8188 - DNA, 20 bp, synthetic construct
  source 1..20: mol_type = other DNA
cgcagatcaaagagagcctg

SEQ ID NO: 8189 - DNA, 20 bp, synthetic construct
  source 1..20: mol_type = other DNA
cacctacctaagaaccatcc

SEQ ID NO: 8190 - DNA, 20 bp, synthetic construct
  source 1..20: mol_type = other DNA
tcctggccgtcatctgctcc

SEQ ID NO: 8191 - DNA, 20 bp, synthetic construct
  source 1..20: mol_type = other DNA
cacgagcagggctggggaga

SEQ ID NO: 8192 - DNA, 20 bp, synthetic construct
  source 1..20: mol_type = other DNA
atgtggaagtcacgcccgtt

SEQ ID NO: 8193 - DNA, 20 bp, synthetic construct
  source 1..20: mol_type = other DNA
ggagtctgagagatggagag

SEQ ID NO: 8194 - DNA, 20 bp, synthetic construct
  source 1..20: mol_type = other DNA
ggacccagactagcagcacc

SEQ ID NO: 8195 - DNA, 20 bp, synthetic construct
  source 1..20: mol_type = other DNA
cgtctgggcggtgctacaac

SEQ ID NO: 8196 - DNA, 20 bp, synthetic construct
  source 1..20: mol_type = other DNA
gcgtgacttccacatgagcg

SEQ ID NO: 8197 - DNA, 20 bp, synthetic construct
  source 1..20: mol_type = other DNA
gagcctgcgggcagagctca

SEQ ID NO: 8198 - DNA, 20 bp, synthetic construct
  source 1..20: mol_type = other DNA
accgcccagacgactggcca

SEQ ID NO: 8199 - DNA, 20 bp, synthetic construct
  source 1..20: mol_type = other DNA
acttccacatgagcgtggtc

SEQ ID NO: 8200 - DNA, 20 bp, synthetic construct
  source 1..20: mol_type = other DNA
agagctcagggtgacaggtg

SEQ ID NO: 8201 - DNA, 20 bp, synthetic construct
  source 1..20: mol_type = other DNA
caggatggttcttaggtagg

SEQ ID NO: 8202 - DNA, 20 bp, synthetic construct
  source 1..20: mol_type = other DNA
ggaccgcagccagcccggcc

SEQ ID NO: 8203 - DNA, 20 bp, synthetic construct
  source 1..20: mol_type = other DNA
gatctgcgccttgggggcca

SEQ ID NO: 8204 - DNA, 20 bp, synthetic construct
  source 1..20: mol_type = other DNA
tgtagcaccgcccagacgac

SEQ ID NO: 8205 - DNA, 20 bp, synthetic construct
  source 1..20: mol_type = other DNA
tctctttgatctgcgccttg

SEQ ID NO: 8206 - DNA, 20 bp, synthetic construct
  source 1..20: mol_type = other DNA
agcagggctggggagaaggt

SEQ ID NO: 8207 - DNA, 20 bp, synthetic construct
  source 1..20: mol_type = other DNA
gtctgggcggtgctacaact

SEQ ID NO: 8208 - DNA, 20 bp, synthetic construct
  source 1..20: mol_type = other DNA
cttctccccagccctgctcg

SEQ ID NO: 8209 - DNA, 20 bp, synthetic construct
  source 1..20: mol_type = other DNA
caccagggtttggaactggc

SEQ ID NO: 8210 - DNA, 20 bp, synthetic construct
  source 1..20: mol_type = other DNA
cggtcaccacgagcagggct

SEQ ID NO: 8211 - DNA, 20 bp, synthetic construct
  source 1..20: mol_type = other DNA
gacagcggcacctacctctg

SEQ ID NO: 8212 - DNA, 20 bp, synthetic construct
  source 1..20: mol_type = other DNA
ggtgccgctgtcattgcgcc

SEQ ID NO: 8213 - DNA, 20 bp, synthetic construct
  source 1..20: mol_type = other DNA
ctacaactgggctggcggcc

SEQ ID NO: 8214 - DNA, 20 bp, synthetic construct
  source 1..20: mol_type = other DNA
ttctgcccttctctctggaa

SEQ ID NO: 8215 - DNA, 20 bp, synthetic construct
  source 1..20: mol_type = other DNA
cgttgggcagttgtgtgaca

SEQ ID NO: 8216 - DNA, 20 bp, synthetic construct
  source 1..20: mol_type = other DNA
cgtgtcacacaactgcccaa

SEQ ID NO: 8217 - DNA, 20 bp, synthetic construct
  source 1..20: mol_type = other DNA
ggtgacaggtgcggcctcgg

SEQ ID NO: 8218 - DNA, 20 bp, synthetic construct
  source 1..20: mol_type = other DNA
cgatgtgttggagaagctgc

SEQ ID NO: 8219 - DNA, 20 bp, synthetic construct
  source 1..20: mol_type = other DNA
ctgcagcttctccaacacat

SEQ ID NO: 8220 - DNA, 20 bp, synthetic construct
  source 1..20: mol_type = other DNA
gcccacgacaccaaccacca

SEQ ID NO: 8221 - DNA, 20 bp, synthetic construct
  source 1..20: mol_type = other DNA
tggcggccaggatggttctt

SEQ ID NO: 8222 - DNA, 20 bp, synthetic construct
  source 1..20: mol_type = other DNA
gagaaggtgggggggttcca

SEQ ID NO: 8223 - DNA, 20 bp, synthetic construct
  source 1..20: mol_type = other DNA
cagggctggggagaaggtgg

SEQ ID NO: 8224 - DNA, 20 bp, synthetic construct
  source 1..20: mol_type = other DNA
ccagggagatggccccacag

SEQ ID NO: 8225 - DNA, 20 bp, synthetic construct
  source 1..20: mol_type = other DNA
ggtcaccacgagcagggctg

SEQ ID NO: 8226 - DNA, 20 bp, synthetic construct
  source 1..20: mol_type = other DNA
cgactggccagggcgcctgt

SEQ ID NO: 8227 - DNA, 20 bp, synthetic construct
  source 1..20: mol_type = other DNA
accctggtggttggtgtcgt

SEQ ID NO: 8228 - DNA, 20 bp, synthetic construct
  source 1..20: mol_type = other DNA
acgactggccagggcgcctg

SEQ ID NO: 8229 - DNA, 20 bp, synthetic construct
  source 1..20: mol_type = other DNA
tgtctggggagtctgagaga

SEQ ID NO: 8230 - DNA, 20 bp, synthetic construct
  source 1..20: mol_type = other DNA
ccctgcagagaaacacactt

SEQ ID NO: 8231 - DNA, 20 bp, synthetic construct
  source 1..20: mol_type = other DNA
ggagaagctgcaggtgaagg

SEQ ID NO: 8232 - DNA, 20 bp, synthetic construct
  source 1..20: mol_type = other DNA
cggcgggggcggcggcaggg

SEQ ID NO: 8233 - DNA, 20 bp, synthetic construct
  source 1..20: mol_type = other DNA
ccgggcggcggcgggggcgg

SEQ ID NO: 8234 - DNA, 20 bp, synthetic construct
  source 1..20: mol_type = other DNA
ctgtgatgtggcgatctaca

SEQ ID NO: 8235 - DNA, 20 bp, synthetic construct
  source 1..20: mol_type = other DNA
gggagatattcaccatctgt

SEQ ID NO: 8236 - DNA, 20 bp, synthetic construct
  source 1..20: mol_type = other DNA
gccttccactgtggggagat

SEQ ID NO: 8237 - DNA, 20 bp, synthetic construct
  source 1..20: mol_type = other DNA
catctgtaggtctgagattg

SEQ ID NO: 8238 - DNA, 20 bp, synthetic construct
  source 1..20: mol_type = other DNA
tctgtgatgtggcgatctac

SEQ ID NO: 8239 - DNA, 20 bp, synthetic construct
  source 1..20: mol_type = other DNA
ttccactgtggggagatggg

SEQ ID NO: 8240 - DNA, 20 bp, synthetic construct
  source 1..20: mol_type = other DNA
ggcccccagcaacagcttca

SEQ ID NO: 8241 - DNA, 20 bp, synthetic construct
  source 1..20: mol_type = other DNA
gacctacctttggagcctgt

SEQ ID NO: 8242 - DNA, 20 bp, synthetic construct
  source 1..20: mol_type = other DNA
cgccttccactgtggggaga

SEQ ID NO: 8243 - DNA, 20 bp, synthetic construct
  source 1..20: mol_type = other DNA
cctacctttggagcctgtag

SEQ ID NO: 8244 - DNA, 20 bp, synthetic construct
  source 1..20: mol_type = other DNA
ttacctgaagtgaaggccct

SEQ ID NO: 8245 - DNA, 20 bp, synthetic construct
  source 1..20: mol_type = other DNA
gctaaagctcagctctgtga

SEQ ID NO: 8246 - DNA, 20 bp, synthetic construct
  source 1..20: mol_type = other DNA
cctaggcgctggtacatgct

SEQ ID NO: 8247 - DNA, 20 bp, synthetic construct
  source 1..20: mol_type = other DNA
ggccctgaagctgttgctgg

SEQ ID NO: 8248 - DNA, 20 bp, synthetic construct
  source 1..20: mol_type = other DNA
acagattcacaagtttgccc

SEQ ID NO: 8249 - DNA, 20 bp, synthetic construct
  source 1..20: mol_type = other DNA
tagataggtatggatatcca

SEQ ID NO: 8250 - DNA, 20 bp, synthetic construct
  source 1..20: mol_type = other DNA
gggttaccttcaacaatgct

SEQ ID NO: 8251 - DNA, 20 bp, synthetic construct
  source 1..20: mol_type = other DNA
gaaggtaacccttaaatgtg

SEQ ID NO: 8252 - DNA, 20 bp, synthetic construct
  source 1..20: mol_type = other DNA
ttccctagcatgtttcgcca

SEQ ID NO: 8253 - DNA, 20 bp, synthetic construct
  source 1..20: mol_type = other DNA
ctttcagaggaagcttggaa

SEQ ID NO: 8254 - DNA, 20 bp, synthetic construct
  source 1..20: mol_type = other DNA
gacacttacgttaaaagctg

SEQ ID NO: 8255 - DNA, 20 bp, synthetic construct
  source 1..20: mol_type = other DNA
aactggatataaatcccagt

SEQ ID NO: 8256 - DNA, 20 bp, synthetic construct
  source 1..20: mol_type = other DNA
ggagagggtgaactcctcaa

SEQ ID NO: 8257 - DNA, 20 bp, synthetic construct
  source 1..20: mol_type = other DNA
ctcacctggaactggcagag

SEQ ID NO: 8258 - DNA, 20 bp, synthetic construct
  source 1..20: mol_type = other DNA
acatcatgatccgagagagt

SEQ ID NO: 8259 - DNA, 20 bp, synthetic construct
  source 1..20: mol_type = other DNA
gtcctgcaaacaaatcacag

SEQ ID NO: 8260 - DNA, 20 bp, synthetic construct
  source 1..20: mol_type = other DNA
agcacgagaaggacctggtg

SEQ ID NO: 8261 - DNA, 20 bp, synthetic construct
  source 1..20: mol_type = other DNA
gagagagtgggcaggtacag

SEQ ID NO: 8262 - DNA, 20 bp, synthetic construct
  source 1..20: mol_type = other DNA
gtgccaattctgcgaggagg

SEQ ID NO: 8263 - DNA, 20 bp, synthetic construct
  source 1..20: mol_type = other DNA
caccaagtggaacaagcatg

SEQ ID NO: 8264 - DNA, 20 bp, synthetic construct
  source 1..20: mol_type = other DNA
gcatcagggcaaagaggtgg

SEQ ID NO: 8265 - DNA, 20 bp, synthetic construct
  source 1..20: mol_type = other DNA
cacctgcatcaaccagacag

SEQ ID NO: 8266 - DNA, 20 bp, synthetic construct
  source 1..20: mol_type = other DNA
gaacgccgacgagcggatga

SEQ ID NO: 8267 - DNA, 20 bp, synthetic construct
  source 1..20: mol_type = other DNA
ctcctgtgctggctattgtg

SEQ ID NO: 8268 - DNA, 20 bp, synthetic construct
  source 1..20: mol_type = other DNA
tccagccgctgcttccacac

SEQ ID NO: 8269 - DNA, 20 bp, synthetic construct
  source 1..20: mol_type = other DNA
caatggggcagtcctgcaga

SEQ ID NO: 8270 - DNA, 20 bp, synthetic construct
  source 1..20: mol_type = other DNA
cttcatcttggagtccatga

SEQ ID NO: 8271 - DNA, 20 bp, synthetic construct
  source 1..20: mol_type = other DNA
cgcggtgccacagcagctgg

SEQ ID NO: 8272 - DNA, 20 bp, synthetic construct
  source 1..20: mol_type = other DNA
gacagcggagcagcaagagc

SEQ ID NO: 8273 - DNA, 20 bp, synthetic construct
  source 1..20: mol_type = other DNA
ccgcagctgcagctgctgag

SEQ ID NO: 8274 - DNA, 20 bp, synthetic construct
  source 1..20: mol_type = other DNA
atgaggttggcccaggcaat

SEQ ID NO: 8275 - DNA, 20 bp, synthetic construct
  source 1..20: mol_type = other DNA
aaatcaatgtggaacagctg

SEQ ID NO: 8276 - DNA, 20 bp, synthetic construct
  source 1..20: mol_type = other DNA
gcaggcagcggcggcagcgt

SEQ ID NO: 8277 - DNA, 20 bp, synthetic construct
  source 1..20: mol_type = other DNA
gggggtcatcctaggcaagg

SEQ ID NO: 8278 - DNA, 20 bp, synthetic construct
  source 1..20: mol_type = other DNA
aacatcatgatccgagagag

SEQ ID NO: 8279 - DNA, 20 bp, synthetic construct
  source 1..20: mol_type = other DNA
cagctccagggcgctcagga

SEQ ID NO: 8280 - DNA, 20 bp, synthetic construct
  source 1..20: mol_type = other DNA
ggaggtgccagaaaaggaag

SEQ ID NO: 8281 - DNA, 20 bp, synthetic construct
  source 1..20: mol_type = other DNA
aggaggaatggaccatggtc

SEQ ID NO: 8282 - DNA, 20 bp, synthetic construct
  source 1..20: mol_type = other DNA
ctatggctgcctccccaccg

SEQ ID NO: 8283 - DNA, 20 bp, synthetic construct
  source 1..20: mol_type = other DNA
cagggaccacagggacacag

SEQ ID NO: 8284 - DNA, 20 bp, synthetic construct
  source 1..20: mol_type = other DNA
ggcctgtgcggtccccggtg

SEQ ID NO: 8285 - DNA, 20 bp, synthetic construct
  source 1..20: mol_type = other DNA
gaaagtggccaaaatcaatg

SEQ ID NO: 8286 - DNA, 20 bp, synthetic construct
  source 1..20: mol_type = other DNA
ggtgaagctctcctgtgggg

SEQ ID NO: 8287 - DNA, 20 bp, synthetic construct
  source 1..20: mol_type = other DNA
tcacagatcagcctcctcat

SEQ ID NO: 8288 - DNA, 20 bp, synthetic construct
  source 1..20: mol_type = other DNA
caccaagaagaagtccaaga

SEQ ID NO: 8289 - DNA, 20 bp, synthetic construct
  source 1..20: mol_type = other DNA
ctacagctggtggtgcaggc

SEQ ID NO: 8290 - DNA, 20 bp, synthetic construct
  source 1..20: mol_type = other DNA
cagctgcagatgtactgaga

SEQ ID NO: 8291 - DNA, 20 bp, synthetic construct
  source 1..20: mol_type = other DNA
cagcaggtagagcatctggg

SEQ ID NO: 8292 - DNA, 20 bp, synthetic construct
  source 1..20: mol_type = other DNA
caagatgtgccaattctgcg

SEQ ID NO: 8293 - DNA, 20 bp, synthetic construct
  source 1..20: mol_type = other DNA
cccactgaccttctccaggg

SEQ ID NO: 8294 - DNA, 20 bp, synthetic construct
  source 1..20: mol_type = other DNA
catgtagaggcagcgttccc

SEQ ID NO: 8295 - DNA, 20 bp, synthetic construct
  source 1..20: mol_type = other DNA
gggcagtcctgcagaaggac

SEQ ID NO: 8296 - DNA, 20 bp, synthetic construct
  source 1..20: mol_type = other DNA
tccacaggacgtccatgagc

SEQ ID NO: 8297 - DNA, 20 bp, synthetic construct
  source 1..20: mol_type = other DNA
ggacggagggccacatgtag

SEQ ID NO: 8298 - DNA, 20 bp, synthetic construct
  source 1..20: mol_type = other DNA
cactgaccttctccagggcg

SEQ ID NO: 8299 - DNA, 20 bp, synthetic construct
  source 1..20: mol_type = other DNA
ggagctggaaggtgaaggga

SEQ ID NO: 8300 - DNA, 20 bp, synthetic construct
  source 1..20: mol_type = other DNA
ccagcccctcctgcttccac

SEQ ID NO: 8301 - DNA, 20 bp, synthetic construct
  source 1..20: mol_type = other DNA
gaaggtgaagctctcctgtg

SEQ ID NO: 8302 - DNA, 20 bp, synthetic construct
  source 1..20: mol_type = other DNA
cgccgacgagcggatgaagg

SEQ ID NO: 8303 - DNA, 20 bp, synthetic construct
  source 1..20: mol_type = other DNA
cgtacagcgcaaagcagaga

SEQ ID NO: 8304 - DNA, 20 bp, synthetic construct
  source 1..20: mol_type = other DNA
tacatgtggccctccgtccc

SEQ ID NO: 8305 - DNA, 20 bp, synthetic construct
  source 1..20: mol_type = other DNA
tggggactgcaggtgggaga

SEQ ID NO: 8306 - DNA, 20 bp, synthetic construct
  source 1..20: mol_type = other DNA
caggtgaacacataggcctc

SEQ ID NO: 8307 - DNA, 20 bp, synthetic construct
  source 1..20: mol_type = other DNA
caaggaccagcttaagaccg

SEQ ID NO: 8308 - DNA, 20 bp, synthetic construct
  source 1..20: mol_type = other DNA
cacagcaggtagagcatctg

SEQ ID NO: 8309 - DNA, 20 bp, synthetic construct
  source 1..20: mol_type = other DNA
atacctgcttgatggtgctg

SEQ ID NO: 8310 - DNA, 20 bp, synthetic construct
  source 1..20: mol_type = other DNA
gtggggactgcaggtgggag

SEQ ID NO: 8311 - DNA, 20 bp, synthetic construct
  source 1..20: mol_type = other DNA
ctcaccttcttcgcaggaat

SEQ ID NO: 8312 - DNA, 20 bp, synthetic construct
  source 1..20: mol_type = other DNA
cctgcagggaaggaaggcgc

SEQ ID NO: 8313 - DNA, 20 bp, synthetic construct
  source 1..20: mol_type = other DNA
ctagcagctccagggcgctc

SEQ ID NO: 8314 - DNA, 20 bp, synthetic construct
  source 1..20: mol_type = other DNA
ccactgaccttctccagggc

SEQ ID NO: 8315 - DNA, 20 bp, synthetic construct
  source 1..20: mol_type = other DNA
aagttcaggtagacccctgt

SEQ ID NO: 8316 - DNA, 20 bp, synthetic construct
  source 1..20: mol_type = other DNA
gtcgagtggggactgcaggt

SEQ ID NO: 8317 - DNA, 20 bp, synthetic construct
  source 1..20: mol_type = other DNA
gcagccgctggtggagcagc

SEQ ID NO: 8318 - DNA, 20 bp, synthetic construct
  source 1..20: mol_type = other DNA
ctccgagatgcacgtgccgt

SEQ ID NO: 8319 - DNA, 20 bp, synthetic construct
  source 1..20: mol_type = other DNA
gttgacccctcacctgacca

SEQ ID NO: 8320 - DNA, 20 bp, synthetic construct
  source 1..20: mol_type = other DNA
gaggcctgtgcggtccccgg

SEQ ID NO: 8321 - DNA, 20 bp, synthetic construct
  source 1..20: mol_type = other DNA
ggtggaggaagagaagcccg

SEQ ID NO: 8322 - DNA, 20 bp, synthetic construct
  source 1..20: mol_type = other DNA
atcctggaggcctactgcag

SEQ ID NO: 8323 - DNA, 20 bp, synthetic construct
  source 1..20: mol_type = other DNA
ccatgagctggatcatctgc

SEQ ID NO: 8324 - DNA, 20 bp, synthetic construct
  source 1..20: mol_type = other DNA
actccaagatgaagcccctg

SEQ ID NO: 8325 - DNA, 20 bp, synthetic construct
  source 1..20: mol_type = other DNA
ggaaggtgaagctctcctgt

SEQ ID NO: 8326 - DNA, 20 bp, synthetic construct
  source 1..20: mol_type = other DNA
ggctgggggccggggaagca

SEQ ID NO: 8327 - DNA, 20 bp, synthetic construct
  source 1..20: mol_type = other DNA
gaagttcaggtagacccctg

SEQ ID NO: 8328 - DNA, 20 bp, synthetic construct
  source 1..20: mol_type = other DNA
cccagcccagctgctgccgg

SEQ ID NO: 8329 - DNA, 20 bp, synthetic construct
  source 1..20: mol_type = other DNA
aatgaggcctgtgcggtccc

SEQ ID NO: 8330 - DNA, 20 bp, synthetic construct
  source 1..20: mol_type = other DNA
ttgattttggccactttctg

SEQ ID NO: 8331 - DNA, 20 bp, synthetic construct
  source 1..20: mol_type = other DNA
atgtggaacagctgagggga

SEQ ID NO: 8332 - DNA, 20 bp, synthetic construct
  source 1..20: mol_type = other DNA
gacccccaagccccagacca

SEQ ID NO: 8333 - DNA, 20 bp, synthetic construct
  source 1..20: mol_type = other DNA
tagggggtcatcctaggcaa

SEQ ID NO: 8334 - DNA, 20 bp, synthetic construct
  source 1..20: mol_type = other DNA
gcagggtcagcatgtcctgc

SEQ ID NO: 8335 - DNA, 20 bp, synthetic construct
  source 1..20: mol_type = other DNA
ctccagccgctgcttccaca

SEQ ID NO: 8336 - DNA, 20 bp, synthetic construct
  source 1..20: mol_type = other DNA
agcacagcaggtagagcatc

SEQ ID NO: 8337 - DNA, 20 bp, synthetic construct
  source 1..20: mol_type = other DNA
gatccacaggggcttcatct

SEQ ID NO: 8338 - DNA, 20 bp, synthetic construct
  source 1..20: mol_type = other DNA
aggtgaacacataggcctcg

SEQ ID NO: 8339 - DNA, 20 bp, synthetic construct
  source 1..20: mol_type = other DNA
gtgcaggccgggcttttcca

SEQ ID NO: 8340 - DNA, 20 bp, synthetic construct
  source 1..20: mol_type = other DNA
ctcctcaatggctcgatcca

SEQ ID NO: 8341 - DNA, 20 bp, synthetic construct
  source 1..20: mol_type = other DNA
ctcgggcaggcagatgagca

SEQ ID NO: 8342 - DNA, 20 bp, synthetic construct
  source 1..20: mol_type = other DNA
cagccatagggggtcatcct

SEQ ID NO: 8343 - DNA, 20 bp, synthetic construct
  source 1..20: mol_type = other DNA
aatcaatgtggaacagctga

SEQ ID NO: 8344 - DNA, 20 bp, synthetic construct
  source 1..20: mol_type = other DNA
ggcccccaggtttgagccga

SEQ ID NO: 8345 - DNA, 20 bp, synthetic construct
  source 1..20: mol_type = other DNA
tcacctggaactggcagagc

SEQ ID NO: 8346 - DNA, 20 bp, synthetic construct
  source 1..20: mol_type = other DNA
tcttcccctgctgaatcaca

SEQ ID NO: 8347 - DNA, 20 bp, synthetic construct
  source 1..20: mol_type = other DNA
tttgcaggactccctggcac

SEQ ID NO: 8348 - DNA, 20 bp, synthetic construct
  source 1..20: mol_type = other DNA
ccacctctttgccctgatgc

SEQ ID NO: 8349 - DNA, 20 bp, synthetic construct
  source 1..20: mol_type = other DNA
gctaccggaggtgccagaaa

SEQ ID NO: 8350 - DNA, 20 bp, synthetic construct
  source 1..20: mol_type = other DNA
acctgcagcgtgtagtcttc

SEQ ID NO: 8351 - DNA, 20 bp, synthetic construct
  source 1..20: mol_type = other DNA
ctgggccgacctgggacgga

SEQ ID NO: 8352 - DNA, 20 bp, synthetic construct
  source 1..20: mol_type = other DNA
gttgatgcaggtgaacacat

SEQ ID NO: 8353 - DNA, 20 bp, synthetic construct
  source 1..20: mol_type = other DNA
gaatggaccatggtcaggtg

SEQ ID NO: 8354 - DNA, 20 bp, synthetic construct
  source 1..20: mol_type = other DNA
ccccaccttcatccgctcgt

SEQ ID NO: 8355 - DNA, 20 bp, synthetic construct
  source 1..20: mol_type = other DNA
cccgcagctgcagctgctga

SEQ ID NO: 8356 - DNA, 20 bp, synthetic construct
  source 1..20: mol_type = other DNA
acagcaggtagagcatctgg

SEQ ID NO: 8357 - DNA, 20 bp, synthetic construct
  source 1..20: mol_type = other DNA
ccctatggctgcctccccac

SEQ ID NO: 8358 - DNA, 20 bp, synthetic construct
  source 1..20: mol_type = other DNA
ccaactcaacaagagcaaca

SEQ ID NO: 8359 - DNA, 20 bp, synthetic construct
  source 1..20: mol_type = other DNA
cctcccagcccagctgctgc

SEQ ID NO: 8360 - DNA, 20 bp, synthetic construct
  source 1..20: mol_type = other DNA
tgcaggactccctggcactg

SEQ ID NO: 8361 - DNA, 20 bp, synthetic construct
  source 1..20: mol_type = other DNA
gccacatatgtgctgggcat

SEQ ID NO: 8362 - DNA, 20 bp, synthetic construct
  source 1..20: mol_type = other DNA
tgtggaacagctgaggggag

SEQ ID NO: 8363 - DNA, 20 bp, synthetic construct
  source 1..20: mol_type = other DNA
cctatggctgcctccccacc

SEQ ID NO: 8364 - DNA, 20 bp, synthetic construct
  source 1..20: mol_type = other DNA
ggtgctgaggttggcattgc

SEQ ID NO: 8365 - DNA, 20 bp, synthetic construct
  source 1..20: mol_type = other DNA
atctgcagctgcctgcacag

SEQ ID NO: 8366 - DNA, 20 bp, synthetic construct
  source 1..20: mol_type = other DNA
caaactcgtggaggcctgcg

SEQ ID NO: 8367 - DNA, 20 bp, synthetic construct
  source 1..20: mol_type = other DNA
ggcaggcatgagtacctgta

SEQ ID NO: 8368 - DNA, 20 bp, synthetic construct
  source 1..20: mol_type = other DNA
gagcagggcatccttgttga

SEQ ID NO: 8369 - DNA, 20 bp, synthetic construct
  source 1..20: mol_type = other DNA
acagtagccccggaacctgc

SEQ ID NO: 8370 - DNA, 20 bp, synthetic construct
  source 1..20: mol_type = other DNA
gatggaggaggaatggacca

SEQ ID NO: 8371 - DNA, 20 bp, synthetic construct
  source 1..20: mol_type = other DNA
atctcggagctggaaggtga

SEQ ID NO: 8372 - DNA, 20 bp, synthetic construct
  source 1..20: mol_type = other DNA
tcccgcagctgcagctgctg

SEQ ID NO: 8373 - DNA, 20 bp, synthetic construct
  source 1..20: mol_type = other DNA
cggaggtctgtgccaccggc

SEQ ID NO: 8374 - DNA, 20 bp, synthetic construct
  source 1..20: mol_type = other DNA
caaaggtagctctgccgagt

SEQ ID NO: 8375 - DNA, 20 bp, synthetic construct
  source 1..20: mol_type = other DNA
aatgtggaacagctgagggg

SEQ ID NO: 8376 - DNA, 20 bp, synthetic construct
  source 1..20: mol_type = other DNA
aggacctggtgtggaagctg

SEQ ID NO: 8377 - DNA, 20 bp, synthetic construct
  source 1..20: mol_type = other DNA
gcacagcaggtagagcatct

SEQ ID NO: 8378 - DNA, 20 bp, synthetic construct
  source 1..20: mol_type = other DNA
cagagctacctttgccgatg

SEQ ID NO: 8379 - DNA, 20 bp, synthetic construct
  source 1..20: mol_type = other DNA
atgtacagcaacgaggaggc

SEQ ID NO: 8380 - DNA, 20 bp, synthetic construct
  source 1..20: mol_type = other DNA
atggaccatggtcaggtgag

SEQ ID NO: 8381 - DNA, 20 bp, synthetic construct
  source 1..20: mol_type = other DNA
cgagagagtgggcaggtaca

SEQ ID NO: 8382 - DNA, 20 bp, synthetic construct
  source 1..20: mol_type = other DNA
ggttttccagctctcacgga

SEQ ID NO: 8383 - DNA, 20 bp, synthetic construct
  source 1..20: mol_type = other DNA
gttgagttggatgttggcga

SEQ ID NO: 8384 - DNA, 20 bp, synthetic construct
  source 1..20: mol_type = other DNA
tgcatcagctccttggtctg

SEQ ID NO: 8385 - DNA, 20 bp, synthetic construct
  source 1..20: mol_type = other DNA
gcaccagctgcagcaggtac

SEQ ID NO: 8386 - DNA, 20 bp, synthetic construct
  source 1..20: mol_type = other DNA
gcaggtacaggggctggtgc

SEQ ID NO: 8387 - DNA, 20 bp, synthetic construct
  source 1..20: mol_type = other DNA
tcccaggtcggcccaggccc

SEQ ID NO: 8388 - DNA, 20 bp, synthetic construct
  source 1..20: mol_type = other DNA
acaatagccagcacaggaga

SEQ ID NO: 8389 - DNA, 20 bp, synthetic construct
  source 1..20: mol_type = other DNA
ccaccagctgtagaaggtgc

SEQ ID NO: 8390 - DNA, 20 bp, synthetic construct
  source 1..20: mol_type = other DNA
ccaggatgaggccgaagcgc

SEQ ID NO: 8391 - DNA, 20 bp, synthetic construct
  source 1..20: mol_type = other DNA
cagcgaggtgagcccatgcg

SEQ ID NO: 8392 - DNA, 20 bp, synthetic construct
  source 1..20: mol_type = other DNA
ctcaccagacttcagccagc

SEQ ID NO: 8393 - DNA, 20 bp, synthetic construct
  source 1..20: mol_type = other DNA
ggagctgtatgagcacgaga

SEQ ID NO: 8394 - DNA, 20 bp, synthetic construct
  source 1..20: mol_type = other DNA
tggatgagctcgatgcggaa

SEQ ID NO: 8395 - DNA, 20 bp, synthetic construct
  source 1..20: mol_type = other DNA
caggcgcaggacgggcagga

SEQ ID NO: 8396 - DNA, 20 bp, synthetic construct
  source 1..20: mol_type = other DNA
ttgcaggactccctggcact

SEQ ID NO: 8397 - DNA, 20 bp, synthetic construct
  source 1..20: mol_type = other DNA
gtatgagcacgagaaggacc

SEQ ID NO: 8398 - DNA, 20 bp, synthetic construct
  source 1..20: mol_type = other DNA
gaccacagggacacagagga

SEQ ID NO: 8399 - DNA, 20 bp, synthetic construct
  source 1..20: mol_type = other DNA
ccgcagcgacttgatggcga

SEQ ID NO: 8400 - DNA, 20 bp, synthetic construct
  source 1..20: mol_type = other DNA
gtttgctcagtgcttccccc

SEQ ID NO: 8401 - DNA, 20 bp, synthetic construct
  source 1..20: mol_type = other DNA
tgcagtaggcctccaggatg

SEQ ID NO: 8402 - DNA, 20 bp, synthetic construct
  source 1..20: mol_type = other DNA
gcaggtgaacacataggcct

SEQ ID NO: 8403 - DNA, 20 bp, synthetic construct
  source 1..20: mol_type = other DNA
acaaggaccagcttaagacc

SEQ ID NO: 8404 - DNA, 20 bp, synthetic construct
  source 1..20: mol_type = other DNA
caggcagatgagcagggcag

SEQ ID NO: 8405 - DNA, 20 bp, synthetic construct
  source 1..20: mol_type = other DNA
catgccgcagcttccacacc

SEQ ID NO: 8406 - DNA, 20 bp, synthetic construct
  source 1..20: mol_type = other DNA
tcaccagacttcagccagca

SEQ ID NO: 8407 - DNA, 20 bp, synthetic construct
  source 1..20: mol_type = other DNA
cacaatagccagcacaggag

SEQ ID NO: 8408 - DNA, 20 bp, synthetic construct
  source 1..20: mol_type = other DNA
caccagctgtagaaggtgcc

SEQ ID NO: 8409 - DNA, 20 bp, synthetic construct
  source 1..20: mol_type = other DNA
agctccagggcgctcaggac

SEQ ID NO: 8410 - DNA, 20 bp, synthetic construct
  source 1..20: mol_type = other DNA
gctcttgctgctccgctgtc

SEQ ID NO: 8411 - DNA, 20 bp, synthetic construct
  source 1..20: mol_type = other DNA
aacagctcatcgtccctgca

SEQ ID NO: 8412 - DNA, 20 bp, synthetic construct
  source 1..20: mol_type = other DNA
gtgggccagccagttcactt

SEQ ID NO: 8413 - DNA, 20 bp, synthetic construct
  source 1..20: mol_type = other DNA
ttgaccagaagggcccggtt

SEQ ID NO: 8414 - DNA, 20 bp, synthetic construct
  source 1..20: mol_type = other DNA
ggatgaatgggacacgctcg

SEQ ID NO: 8415 - DNA, 20 bp, synthetic construct
  source 1..20: mol_type = other DNA
tacaaggaccagcttaagac

SEQ ID NO: 8416 - DNA, 20 bp, synthetic construct
  source 1..20: mol_type = other DNA
agtgcatcagctccttggtc

SEQ ID NO: 8417 - DNA, 20 bp, synthetic construct
  source 1..20: mol_type = other DNA
aggcgcaggacgggcaggaa

SEQ ID NO: 8418 - DNA, 20 bp, synthetic construct
  source 1..20: mol_type = other DNA
ggcagtcctgcagaaggaca

SEQ ID NO: 8419 - DNA, 20 bp, synthetic construct
  source 1..20: mol_type = other DNA
gtgcatcagctccttggtct

SEQ ID NO: 8420 - DNA, 20 bp, synthetic construct
  source 1..20: mol_type = other DNA
ggccacacaatagccagcac

SEQ ID NO: 8421 - DNA, 20 bp, synthetic construct
  source 1..20: mol_type = other DNA
gcggtgccacagcagctgga

SEQ ID NO: 8422 - DNA, 20 bp, synthetic construct
  source 1..20: mol_type = other DNA
cctgtacctgcccactctct

SEQ ID NO: 8423 - DNA, 20 bp, synthetic construct
  source 1..20: mol_type = other DNA
ccaccaggcgcaggacgggc

SEQ ID NO: 8424 - DNA, 20 bp, synthetic construct
  source 1..20: mol_type = other DNA
gggtcagcatgtcctgccgg

SEQ ID NO: 8425 - DNA, 20 bp, synthetic construct
  source 1..20: mol_type = other DNA
cccgccggcagcagctgggc

SEQ ID NO: 8426 - DNA, 20 bp, synthetic construct
  source 1..20: mol_type = other DNA
tcttgaaattccccagaaag

SEQ ID NO: 8427 - DNA, 20 bp, synthetic construct
  source 1..20: mol_type = other DNA
tggcgaggatggaggaggaa

SEQ ID NO: 8428 - DNA, 20 bp, synthetic construct
  source 1..20: mol_type = other DNA
catgaggttggcccaggcaa

SEQ ID NO: 8429 - DNA, 20 bp, synthetic construct
  source 1..20: mol_type = other DNA
ctgcagggaaggaaggcgct

SEQ ID NO: 8430 - DNA, 20 bp, synthetic construct
  source 1..20: mol_type = other DNA
cctcctccatcctcgccatg

SEQ ID NO: 8431 - DNA, 20 bp, synthetic construct
  source 1..20: mol_type = other DNA
tggagcagctgagctcaggc

SEQ ID NO: 8432 - DNA, 20 bp, synthetic construct
  source 1..20: mol_type = other DNA
tgctcagtgcttccccctgg

SEQ ID NO: 8433 - DNA, 20 bp, synthetic construct
  source 1..20: mol_type = other DNA
ataatagtgagaaatttgaa

SEQ ID NO: 8434 - DNA, 20 bp, synthetic construct
  source 1..20: mol_type = other DNA
accttcttcgcaggaatggg

SEQ ID NO: 8435 - DNA, 20 bp, synthetic construct
  source 1..20: mol_type = other DNA
tgaggttggcccaggcaatg

SEQ ID NO: 8436 - DNA, 20 bp, synthetic construct
  source 1..20: mol_type = other DNA
aatggaccatggtcaggtga

SEQ ID NO: 8437 - DNA, 20 bp, synthetic construct
  source 1..20: mol_type = other DNA
catcctggaggcctactgca

SEQ ID NO: 8438 - DNA, 20 bp, synthetic construct
  source 1..20: mol_type = other DNA
aaaggaagtggccgatcttg

SEQ ID NO: 8439 - DNA, 20 bp, synthetic construct
  source 1..20: mol_type = other DNA
gccgacgagcggatgaaggt

SEQ ID NO: 8440 - DNA, 20 bp, synthetic construct
  source 1..20: mol_type = other DNA
ccccctgcagctggagccct

SEQ ID NO: 8441 - DNA, 20 bp, synthetic construct
  source 1..20: mol_type = other DNA
tgttgcagatcttggagctg

SEQ ID NO: 8442 - DNA, 20 bp, synthetic construct
  source 1..20: mol_type = other DNA
tggttttccagctctcacgg

SEQ ID NO: 8443 - DNA, 20 bp, synthetic construct
  source 1..20: mol_type = other DNA
catgagctggatcatctgca

SEQ ID NO: 8444 - DNA, 20 bp, synthetic construct
  source 1..20: mol_type = other DNA
agccacagccgccttcaaca

SEQ ID NO: 8445 - DNA, 20 bp, synthetic construct
  source 1..20: mol_type = other DNA
ggacttcagccagttgagca

SEQ ID NO: 8446 - DNA, 20 bp, synthetic construct
  source 1..20: mol_type = other DNA
ccgacgagcggatgaaggtg

SEQ ID NO: 8447 - DNA, 20 bp, synthetic construct
  source 1..20: mol_type = other DNA
cctcgggcaggcagatgagc

SEQ ID NO: 8448 - DNA, 20 bp, synthetic construct
  source 1..20: mol_type = other DNA
gatgcggaacggctgctcca

SEQ ID NO: 8449 - DNA, 20 bp, synthetic construct
  source 1..20: mol_type = other DNA
atcaatgtggaacagctgag

SEQ ID NO: 8450 - DNA, 20 bp, synthetic construct
  source 1..20: mol_type = other DNA
gtcctgcagaaggacagggc

SEQ ID NO: 8451 - DNA, 20 bp, synthetic construct
  source 1..20: mol_type = other DNA
aaagggcctacaccatcctg

SEQ ID NO: 8452 - DNA, 20 bp, synthetic construct
  source 1..20: mol_type = other DNA
agctacctttgccgatgagg

SEQ ID NO: 8453 - DNA, 20 bp, synthetic construct
  source 1..20: mol_type = other DNA
aggccctttcacagtagccc

SEQ ID NO: 8454 - DNA, 20 bp, synthetic construct
  source 1..20: mol_type = other DNA
cagtatctcaaggtatgtgc

SEQ ID NO: 8455 - DNA, 20 bp, synthetic construct
  source 1..20: mol_type = other DNA
ggtcgagtggggactgcagg

SEQ ID NO: 8456 - DNA, 20 bp, synthetic construct
  source 1..20: mol_type = other DNA
gctcagtgcttccccctggt

SEQ ID NO: 8457 - DNA, 20 bp, synthetic construct
  source 1..20: mol_type = other DNA
ccgaagcgcagggccaccga

SEQ ID NO: 8458 - DNA, 20 bp, synthetic construct
  source 1..20: mol_type = other DNA
tcatcagcaccttcatgtgg

SEQ ID NO: 8459 - DNA, 20 bp, synthetic construct
  source 1..20: mol_type = other DNA
aacggagtaccacctcaatg

SEQ ID NO: 8460 - DNA, 20 bp, synthetic construct
  source 1..20: mol_type = other DNA
aagagctggaggacgagcaa

SEQ ID NO: 8461 - DNA, 20 bp, synthetic construct
  source 1..20: mol_type = other DNA
tggacttcagccagttgagc

SEQ ID NO: 8462 - DNA, 20 bp, synthetic construct
  source 1..20: mol_type = other DNA
gaacagctcatcgtccctgc

SEQ ID NO: 8463 - DNA, 20 bp, synthetic construct
  source 1..20: mol_type = other DNA
agcggagcagcaagagctgg

SEQ ID NO: 8464 - DNA, 20 bp, synthetic construct
  source 1..20: mol_type = other DNA
gccccggaacctgcaggtag

SEQ ID NO: 8465 - DNA, 20 bp, synthetic construct
  source 1..20: mol_type = other DNA
gcagctggagggacagtcac

SEQ ID NO: 8466 - DNA, 20 bp, synthetic construct
  source 1..20: mol_type = other DNA
tgccctggatgagctcgatg

SEQ ID NO: 8467 - DNA, 20 bp, synthetic construct
  source 1..20: mol_type = other DNA
gtgggagagggcctctaggt

SEQ ID NO: 8468 - DNA, 20 bp, synthetic construct
  source 1..20: mol_type = other DNA
ccttggtccagaattccatg

SEQ ID NO: 8469 - DNA, 20 bp, synthetic construct
  source 1..20: mol_type = other DNA
gcaaaggtagctctgccgag

SEQ ID NO: 8470 - DNA, 20 bp, synthetic construct
  source 1..20: mol_type = other DNA
ctcctccatcctcgccatgc

SEQ ID NO: 8471 - DNA, 20 bp, synthetic construct
  source 1..20: mol_type = other DNA
gcttcatcagcaccttcatg

SEQ ID NO: 8472 - DNA, 20 bp, synthetic construct
  source 1..20: mol_type = other DNA
caggatgaggccgaagcgca

SEQ ID NO: 8473 - DNA, 20 bp, synthetic construct
  source 1..20: mol_type = other DNA
catcagcaccttcatgtggt

SEQ ID NO: 8474 - DNA, 20 bp, synthetic construct
  source 1..20: mol_type = other DNA
ggtggggaggcagccatagg

SEQ ID NO: 8475 - DNA, 20 bp, synthetic construct
  source 1..20: mol_type = other DNA
tgcacagcatctcgttgccg

SEQ ID NO: 8476 - DNA, 20 bp, synthetic construct
  source 1..20: mol_type = other DNA
aataggtatgtagttacctc

SEQ ID NO: 8477 - DNA, 20 bp, synthetic construct
  source 1..20: mol_type = other DNA
tgtcagcattgaagcttcct

SEQ ID NO: 8478 - DNA, 20 bp, synthetic construct
  source 1..20: mol_type = other DNA
ggtactggggagatatctcg

SEQ ID NO: 8479 - DNA, 20 bp, synthetic construct
  source 1..20: mol_type = other DNA
tacaagatgctgaatggtac

SEQ ID NO: 8480 - DNA, 20 bp, synthetic construct
  source 1..20: mol_type = other DNA
gcaacaggaagaggccgagg

SEQ ID NO: 8481 - DNA, 20 bp, synthetic construct
  source 1..20: mol_type = other DNA
tttctcagctggataaggtc

SEQ ID NO: 8482 - DNA, 20 bp, synthetic construct
  source 1..20: mol_type = other DNA
ctagagattcattccggtag

SEQ ID NO: 8483 - DNA, 20 bp, synthetic construct
  source 1..20: mol_type = other DNA
gctgtacaagttatagggct

SEQ ID NO: 8484 - DNA, 20 bp, synthetic construct
  source 1..20: mol_type = other DNA
gaaaactcacctgggatgtg

SEQ ID NO: 8485 - DNA, 20 bp, synthetic construct
  source 1..20: mol_type = other DNA
gtaccattcagcatcttgta

SEQ ID NO: 8486 - DNA, 20 bp, synthetic construct
  source 1..20: mol_type = other DNA
aaaactcacctgggatgtgc

SEQ ID NO: 8487 - DNA, 20 bp, synthetic construct
  source 1..20: mol_type = other DNA
caggatgctgagtggtactg

SEQ ID NO: 8488 - DNA, 20 bp, synthetic construct
  source 1..20: mol_type = other DNA
gctgctctcgcggatgagga

SEQ ID NO: 8489 - DNA, 20 bp, synthetic construct
  source 1..20: mol_type = other DNA
tctcgttcacctcctccctg

SEQ ID NO: 8490 - DNA, 20 bp, synthetic construct
  source 1..20: mol_type = other DNA
tctctctgttgtccgaggcc

SEQ ID NO: 8491 - DNA, 20 bp, synthetic construct
  source 1..20: mol_type = other DNA
aaccagagagccattcacag

SEQ ID NO: 8492 - DNA, 20 bp, synthetic construct
  source 1..20: mol_type = other DNA
aggcttaaaagaaatagatg

SEQ ID NO: 8493 - DNA, 20 bp, synthetic construct
  source 1..20: mol_type = other DNA
tgtatacctgtattattggt

SEQ ID NO: 8494 - DNA, 20 bp, synthetic construct
  source 1..20: mol_type = other DNA
ataagatacctgctttgtag

SEQ ID NO: 8495 - DNA, 20 bp, synthetic construct
  source 1..20: mol_type = other DNA
tgaagaggaggaagaggagg

SEQ ID NO: 8496 - DNA, 20 bp, synthetic construct
  source 1..20: mol_type = other DNA
agaggaggaagaggaggagg

SEQ ID NO: 8497 - DNA, 20 bp, synthetic construct
  source 1..20: mol_type = other DNA
cggtacatgcccaggaactg

SEQ ID NO: 8498 - DNA, 20 bp, synthetic construct
  source 1..20: mol_type = other DNA
tctcgctccaatgtcgacac

SEQ ID NO: 8499 - DNA, 20 bp, synthetic construct
  source 1..20: mol_type = other DNA
gttcagcggatgagagagac

SEQ ID NO: 8500 - DNA, 20 bp, synthetic construct
  source 1..20: mol_type = other DNA
tgagctggaggaggaggagg

SEQ ID NO: 8501 - DNA, 20 bp, synthetic construct
  source 1..20: mol_type = other DNA
ggaggtggaagaggaagagg

SEQ ID NO: 8502 - DNA, 20 bp, synthetic construct
  source 1..20: mol_type = other DNA
atgagccgcatttaccccaa

SEQ ID NO: 8503 - DNA, 20 bp, synthetic construct
  source 1..20: mol_type = other DNA
tgctgtcccaggtcaactac

SEQ ID NO: 8504 - DNA, 20 bp, synthetic construct
  source 1..20: mol_type = other DNA
aggccctcttcatgacgggc

SEQ ID NO: 8505 - DNA, 20 bp, synthetic construct
  source 1..20: mol_type = other DNA
tgccatctctttccggtgag

SEQ ID NO: 8506 - DNA, 20 bp, synthetic construct
  source 1..20: mol_type = other DNA
gtttccaggagcctgactac

SEQ ID NO: 8507 - DNA, 20 bp, synthetic construct
  source 1..20: mol_type = other DNA
caagcctatgcagatgaacc

SEQ ID NO: 8508 - DNA, 20 bp, synthetic construct
  source 1..20: mol_type = other DNA
cgccagatcacgtggagccg

SEQ ID NO: 8509 - DNA, 20 bp, synthetic construct
  source 1..20: mol_type = other DNA
caggacctggagcagcgcag

SEQ ID NO: 8510 - DNA, 20 bp, synthetic construct
  source 1..20: mol_type = other DNA
agtggactgctgggacggcc

SEQ ID NO: 8511 - DNA, 20 bp, synthetic construct
  source 1..20: mol_type = other DNA
tgaccagggcaacgaggatg

SEQ ID NO: 8512 - DNA, 20 bp, synthetic construct
  source 1..20: mol_type = other DNA
ttacctccctctccggctcc

SEQ ID NO: 8513 - DNA, 20 bp, synthetic construct
  source 1..20: mol_type = other DNA
ggcccagacagcagacgcca

SEQ ID NO: 8514 - DNA, 20 bp, synthetic construct
  source 1..20: mol_type = other DNA
agaggacccagctttccggc

SEQ ID NO: 8515 - DNA, 20 bp, synthetic construct
  source 1..20: mol_type = other DNA
cttcctccgagagcggctga

SEQ ID NO: 8516 - DNA, 20 bp, synthetic construct
  source 1..20: mol_type = other DNA
gcattgccgtgtccagcaag

SEQ ID NO: 8517 - DNA, 20 bp, synthetic construct
  source 1..20: mol_type = other DNA
cctctcaatctgcaggggtg

SEQ ID NO: 8518 - DNA, 20 bp, synthetic construct
  source 1..20: mol_type = other DNA
cgccccggctccacgtgatc

SEQ ID NO: 8519 - DNA, 20 bp, synthetic construct
  source 1..20: mol_type = other DNA
ctgaagggaagataatggaa

SEQ ID NO: 8520 - DNA, 20 bp, synthetic construct
  source 1..20: mol_type = other DNA
cacttaccgtcagccgctct

SEQ ID NO: 8521 - DNA, 20 bp, synthetic construct
  source 1..20: mol_type = other DNA
gctgtaggggcaaccagaac

SEQ ID NO: 8522 - DNA, 20 bp, synthetic construct
  source 1..20: mol_type = other DNA
caatacttcaagaaggtgct

SEQ ID NO: 8523 - DNA, 20 bp, synthetic construct
  source 1..20: mol_type = other DNA
ctgcagggctggggagcggc

SEQ ID NO: 8524 - DNA, 20 bp, synthetic construct
  source 1..20: mol_type = other DNA
cgtagtcccctcgccacctg

SEQ ID NO: 8525 - DNA, 20 bp, synthetic construct
  source 1..20: mol_type = other DNA
aaatacgtgaacaaggccaa

SEQ ID NO: 8526 - DNA, 20 bp, synthetic construct
  source 1..20: mol_type = other DNA
tttccaggagcctgactacg

SEQ ID NO: 8527 - DNA, 20 bp, synthetic construct
  source 1..20: mol_type = other DNA
gttctctttggagaacagga

SEQ ID NO: 8528 - DNA, 20 bp, synthetic construct
  source 1..20: mol_type = other DNA
gccgtcccagcagtccactg

SEQ ID NO: 8529 - DNA, 20 bp, synthetic construct
  source 1..20: mol_type = other DNA
gtacctggataggcaaggag

SEQ ID NO: 8530 - DNA, 20 bp, synthetic construct
  source 1..20: mol_type = other DNA
ggtcctgcatggtatagagc

SEQ ID NO: 8531 - DNA, 20 bp, synthetic construct
  source 1..20: mol_type = other DNA
ctgtatgagggacgcaaccc

SEQ ID NO: 8532 - DNA, 20 bp, synthetic construct
  source 1..20: mol_type = other DNA
caaaccaaacctcagagtac

SEQ ID NO: 8533 - DNA, 20 bp, synthetic construct
  source 1..20: mol_type = other DNA
cgatctctcgtaaggggtct

SEQ ID NO: 8534 - DNA, 20 bp, synthetic construct
  source 1..20: mol_type = other DNA
acgaaggtgaggaagatgga

SEQ ID NO: 8535 - DNA, 20 bp, synthetic construct
  source 1..20: mol_type = other DNA
gtagtcccctcgccacctgt

SEQ ID NO: 8536 - DNA, 20 bp, synthetic construct
  source 1..20: mol_type = other DNA
tctgaggtttggtttggagt

SEQ ID NO: 8537 - DNA, 20 bp, synthetic construct
  source 1..20: mol_type = other DNA
gctgatatactgagaaaaca

SEQ ID NO: 8538 - DNA, 20 bp, synthetic construct
  source 1..20: mol_type = other DNA
cctgctggtagtgcgtgatg

SEQ ID NO: 8539 - DNA, 20 bp, synthetic construct
  source 1..20: mol_type = other DNA
ggggcgccgacaagatcgag

SEQ ID NO: 8540 - DNA, 20 bp, synthetic construct
  source 1..20: mol_type = other DNA
gtagtcaggctcctggaaac

SEQ ID NO: 8541 - DNA, 20 bp, synthetic construct
  source 1..20: mol_type = other DNA
gaatccagtcgctggccctt

SEQ ID NO: 8542 - DNA, 20 bp, synthetic construct
  source 1..20: mol_type = other DNA
gtggcctcagagtgagtcgg

SEQ ID NO: 8543 - DNA, 20 bp, synthetic construct
  source 1..20: mol_type = other DNA
agatccagtagtgggaaaga

SEQ ID NO: 8544 - DNA, 20 bp, synthetic construct
  source 1..20: mol_type = other DNA
tgactaccagggggtatggc

SEQ ID NO: 8545 - DNA, 20 bp, synthetic construct
  source 1..20: mol_type = other DNA
accaggggtctggaagttga

SEQ ID NO: 8546 - DNA, 20 bp, synthetic construct
  source 1..20: mol_type = other DNA
cctcaatggacaggatgact

SEQ ID NO: 8547 - DNA, 20 bp, synthetic construct
  source 1..20: mol_type = other DNA
ctccatcagcatggcgtcgg

SEQ ID NO: 8548 - DNA, 20 bp, synthetic construct
  source 1..20: mol_type = other DNA
tcaaactcattacagcgcag

SEQ ID NO: 8549 - DNA, 20 bp, synthetic construct
  source 1..20: mol_type = other DNA
ccaatacttcaagaaggtgc

SEQ ID NO: 8550 - DNA, 20 bp, synthetic construct
  source 1..20: mol_type = other DNA
ttgggccatgtttctctgct

SEQ ID NO: 8551 - DNA, 20 bp, synthetic construct
  source 1..20: mol_type = other DNA
cctcatcacgcactaccagc

SEQ ID NO: 8552 - DNA, 20 bp, synthetic construct
  source 1..20: mol_type = other DNA
acaggatgactgggtacctg

SEQ ID NO: 8553 - DNA, 20 bp, synthetic construct
  source 1..20: mol_type = other DNA
catctgccaaagaatggccg

SEQ ID NO: 8554 - DNA, 20 bp, synthetic construct
  source 1..20: mol_type = other DNA
tgtctgtcaagaagaacttg

SEQ ID NO: 8555 - DNA, 20 bp, synthetic construct
  source 1..20: mol_type = other DNA
ctcccagccatccgtcctga

SEQ ID NO: 8556 - DNA, 20 bp, synthetic construct
  source 1..20: mol_type = other DNA
agaagattggcacagctgtg

SEQ ID NO: 8557 - DNA, 20 bp, synthetic construct
  source 1..20: mol_type = other DNA
tgactgggtacctgcgggat

SEQ ID NO: 8558 - DNA, 20 bp, synthetic construct
  source 1..20: mol_type = other DNA
ccacacccctgcagattgag

SEQ ID NO: 8559 - DNA, 20 bp, synthetic construct
  source 1..20: mol_type = other DNA
ctgtccagaaacatgtggaa

SEQ ID NO: 8560 - DNA, 20 bp, synthetic construct
  source 1..20: mol_type = other DNA
ctcactggagaactggtccc

SEQ ID NO: 8561 - DNA, 20 bp, synthetic construct
  source 1..20: mol_type = other DNA
ctgaaggaacttcttgcctt

SEQ ID NO: 8562 - DNA, 20 bp, synthetic construct
  source 1..20: mol_type = other DNA
ccgggaaggatgacatgtcc

SEQ ID NO: 8563 - DNA, 20 bp, synthetic construct
  source 1..20: mol_type = other DNA
gagcgccatcatccagaatg

SEQ ID NO: 8564 - DNA, 20 bp, synthetic construct
  source 1..20: mol_type = other DNA
ttgagtgtgcgtggggtcca

SEQ ID NO: 8565 - DNA, 20 bp, synthetic construct
  source 1..20: mol_type = other DNA
cattgcccagcagagaaaca

SEQ ID NO: 8566 - DNA, 20 bp, synthetic construct
  source 1..20: mol_type = other DNA
gcacctctgccgcagcctcg

SEQ ID NO: 8567 - DNA, 20 bp, synthetic construct
  source 1..20: mol_type = other DNA
gggcgccgacaagatcgagg

SEQ ID NO: 8568 - DNA, 20 bp, synthetic construct
  source 1..20: mol_type = other DNA
gaagccagtactctgaggtt

SEQ ID NO: 8569 - DNA, 20 bp, synthetic construct
  source 1..20: mol_type = other DNA
gcatgaactcctgcacctgg

SEQ ID NO: 8570 - DNA, 20 bp, synthetic construct
  source 1..20: mol_type = other DNA
tggatcggaatcgtgaggat

SEQ ID NO: 8571 - DNA, 20 bp, synthetic construct
  source 1..20: mol_type = other DNA
caacagcccacagctcctga

SEQ ID NO: 8572 - DNA, 20 bp, synthetic construct
  source 1..20: mol_type = other DNA
gcgaggaggagatccagtag

SEQ ID NO: 8573 - DNA, 20 bp, synthetic construct
  source 1..20: mol_type = other DNA
agtagtggggataccattcc

SEQ ID NO: 8574 - DNA, 20 bp, synthetic construct
  source 1..20: mol_type = other DNA
ggacctggagcagcgcagcg

SEQ ID NO: 8575 - DNA, 20 bp, synthetic construct
  source 1..20: mol_type = other DNA
tgactacggggccctgtatg

SEQ ID NO: 8576 - DNA, 20 bp, synthetic construct
  source 1..20: mol_type = other DNA
gctgcagtcgattgtactga

SEQ ID NO: 8577 - DNA, 20 bp, synthetic construct
  source 1..20: mol_type = other DNA
tgagtcggcagcaacatcca

SEQ ID NO: 8578 - DNA, 20 bp, synthetic construct
  source 1..20: mol_type = other DNA
aatccagtcgctggcccttg

SEQ ID NO: 8579 - DNA, 20 bp, synthetic construct
  source 1..20: mol_type = other DNA
tgcagtggtcctcaatggac

SEQ ID NO: 8580 - DNA, 20 bp, synthetic construct
  source 1..20: mol_type = other DNA
cttctccatcagcatggcgt

SEQ ID NO: 8581 - DNA, 20 bp, synthetic construct
  source 1..20: mol_type = other DNA
acctcaatagagatggcaca

SEQ ID NO: 8582 - DNA, 20 bp, synthetic construct
  source 1..20: mol_type = other DNA
cgaaggtgaggaagatggag

SEQ ID NO: 8583 - DNA, 20 bp, synthetic construct
  source 1..20: mol_type = other DNA
cggggcgccgacaagatcga

SEQ ID NO: 8584 - DNA, 20 bp, synthetic construct
  source 1..20: mol_type = other DNA
gagtccattgtccactgtga

SEQ ID NO: 8585 - DNA, 20 bp, synthetic construct
  source 1..20: mol_type = other DNA
acgccagggtgagattctgc

SEQ ID NO: 8586 - DNA, 20 bp, synthetic construct
  source 1..20: mol_type = other DNA
aagcgcagaaaggcaaattc

SEQ ID NO: 8587 - DNA, 20 bp, synthetic construct
  source 1..20: mol_type = other DNA
cagaatgtggagaagcaaga

SEQ ID NO: 8588 - DNA, 20 bp, synthetic construct
  source 1..20: mol_type = other DNA
gactaccagggggtatggct

SEQ ID NO: 8589 - DNA, 20 bp, synthetic construct
  source 1..20: mol_type = other DNA
gttcacttcatcctcagatg

SEQ ID NO: 8590 - DNA, 20 bp, synthetic construct
  source 1..20: mol_type = other DNA
ccctcactctttgctctcgt

SEQ ID NO: 8591 - DNA, 20 bp, synthetic construct
  source 1..20: mol_type = other DNA
cctcccagccatccgtcctg

SEQ ID NO: 8592 - DNA, 20 bp, synthetic construct
  source 1..20: mol_type = other DNA
tcctcaatggacaggatgac

SEQ ID NO: 8593 - DNA, 20 bp, synthetic construct
  source 1..20: mol_type = other DNA
aagattggcacagctgtgag

SEQ ID NO: 8594 - DNA, 20 bp, synthetic construct
  source 1..20: mol_type = other DNA
catctgcaggaaacagaacc

SEQ ID NO: 8595 - DNA, 20 bp, synthetic construct
  source 1..20: mol_type = other DNA
ccggggcgccgacaagatcg

SEQ ID NO: 8596 - DNA, 20 bp, synthetic construct
  source 1..20: mol_type = other DNA
caacttccagacccctggtg

SEQ ID NO: 8597 - DNA, 20 bp, synthetic construct
  source 1..20: mol_type = other DNA
ggtggcgaggggactacgga

SEQ ID NO: 8598 - DNA, 20 bp, synthetic construct
  source 1..20: mol_type = other DNA
gcagcgagcataggcttcca

SEQ ID NO: 8599 - DNA, 20 bp, synthetic construct
  source 1..20: mol_type = other DNA
taaataactggcatcccatc

SEQ ID NO: 8600 - DNA, 20 bp, synthetic construct
  source 1..20: mol_type = other DNA
gtgagctggtgacacacaca

SEQ ID NO: 8601 - DNA, 20 bp, synthetic construct
  source 1..20: mol_type = other DNA
cgactcacaggaggagctgc

SEQ ID NO: 8602 - DNA, 20 bp, synthetic construct
  source 1..20: mol_type = other DNA
tgactgccacagatccacat

SEQ ID NO: 8603 - DNA, 20 bp, synthetic construct
  source 1..20: mol_type = other DNA
tatgccatctctttccggtg

SEQ ID NO: 8604 - DNA, 20 bp, synthetic construct
  source 1..20: mol_type = other DNA
cacctggagagagaagcctg

SEQ ID NO: 8605 - DNA, 20 bp, synthetic construct
  source 1..20: mol_type = other DNA
tgtaccttgaaagttggcat

SEQ ID NO: 8606 - DNA, 20 bp, synthetic construct
  source 1..20: mol_type = other DNA
cccgccatggctccgacgct

SEQ ID NO: 8607 - DNA, 20 bp, synthetic construct
  source 1..20: mol_type = other DNA
gagggccagacagtgatgct

SEQ ID NO: 8608 - DNA, 20 bp, synthetic construct
  source 1..20: mol_type = other DNA
aaagagatggcatatgagtt

SEQ ID NO: 8609 - DNA, 20 bp, synthetic construct
  source 1..20: mol_type = other DNA
tgcagcgacagcccatccgc

SEQ ID NO: 8610 - DNA, 20 bp, synthetic construct
  source 1..20: mol_type = other DNA
gaaccaggccctcttcatga

SEQ ID NO: 8611 - DNA, 20 bp, synthetic construct
  source 1..20: mol_type = other DNA
gactcactctgaggccacaa

SEQ ID NO: 8612 - DNA, 20 bp, synthetic construct
  source 1..20: mol_type = other DNA
agctcaccaatctgacaagc

SEQ ID NO: 8613 - DNA, 20 bp, synthetic construct
  source 1..20: mol_type = other DNA
agttggaggaatccagtcgc

SEQ ID NO: 8614 - DNA, 20 bp, synthetic construct
  source 1..20: mol_type = other DNA
gtcgggcccccagcacctgt

SEQ ID NO: 8615 - DNA, 20 bp, synthetic construct
  source 1..20: mol_type = other DNA
gacctggaaggtcttccgct

SEQ ID NO: 8616 - DNA, 20 bp, synthetic construct
  source 1..20: mol_type = other DNA
acaaactgtccagaaacatg

SEQ ID NO: 8617 - DNA, 20 bp, synthetic construct
  source 1..20: mol_type = other DNA
cctcgcacaacacgtgagtg

SEQ ID NO: 8618 - DNA, 20 bp, synthetic construct
  source 1..20: mol_type = other DNA
tccccagtggactgctggga

SEQ ID NO: 8619 - DNA, 20 bp, synthetic construct
  source 1..20: mol_type = other DNA
cagttccttcttgactacca

SEQ ID NO: 8620 - DNA, 20 bp, synthetic construct
  source 1..20: mol_type = other DNA
gggcaaaggatcgtagttgg

SEQ ID NO: 8621 - DNA, 20 bp, synthetic construct
  source 1..20: mol_type = other DNA
ggctgagggcagtgcctacg

SEQ ID NO: 8622 - DNA, 20 bp, synthetic construct
  source 1..20: mol_type = other DNA
gtcgttctcagagtacatca

SEQ ID NO: 8623 - DNA, 20 bp, synthetic construct
  source 1..20: mol_type = other DNA
actggggagcaacatcacca

SEQ ID NO: 8624 - DNA, 20 bp, synthetic construct
  source 1..20: mol_type = other DNA
cccttactctcttcatcaaa

SEQ ID NO: 8625 - DNA, 20 bp, synthetic construct
  source 1..20: mol_type = other DNA
ttttctcagtatatcagcca

SEQ ID NO: 8626 - DNA, 20 bp, synthetic construct
  source 1..20: mol_type = other DNA
gggatgccagttatttacca

SEQ ID NO: 8627 - DNA, 20 bp, synthetic construct
  source 1..20: mol_type = other DNA
gaactgctggaactcaggaa

SEQ ID NO: 8628 - DNA, 20 bp, synthetic construct
  source 1..20: mol_type = other DNA
ctggataggcaaggagaggc

SEQ ID NO: 8629 - DNA, 20 bp, synthetic construct
  source 1..20: mol_type = other DNA
gaggaagatcctcatcaagg

SEQ ID NO: 8630 - DNA, 20 bp, synthetic construct
  source 1..20: mol_type = other DNA
tcgctgcattgagtgtgcgt

SEQ ID NO: 8631 - DNA, 20 bp, synthetic construct
  source 1..20: mol_type = other DNA
ggtcagctcgtcctccctct

SEQ ID NO: 8632 - DNA, 20 bp, synthetic construct
  source 1..20: mol_type = other DNA
aagcctatgctcgctgcctg

SEQ ID NO: 8633 - DNA, 20 bp, synthetic construct
  source 1..20: mol_type = other DNA
cgaggaggagatccagtagt

SEQ ID NO: 8634 - DNA, 20 bp, synthetic construct
  source 1..20: mol_type = other DNA
aacgaaggtgaggaagatgg

SEQ ID NO: 8635 - DNA, 20 bp, synthetic construct
  source 1..20: mol_type = other DNA
cctatccaggtacctgaccg

SEQ ID NO: 8636 - DNA, 20 bp, synthetic construct
  source 1..20: mol_type = other DNA
ggggacccggtagttgacct

SEQ ID NO: 8637 - DNA, 20 bp, synthetic construct
  source 1..20: mol_type = other DNA
ccaagaaggactcgggtcaa

SEQ ID NO: 8638 - DNA, 20 bp, synthetic construct
  source 1..20: mol_type = other DNA
caccaggggtctggaagttg

SEQ ID NO: 8639 - DNA, 20 bp, synthetic construct
  source 1..20: mol_type = other DNA
tcatgacggtgcccacctcg

SEQ ID NO: 8640 - DNA, 20 bp, synthetic construct
  source 1..20: mol_type = other DNA
gctctcccgcatctacccca

SEQ ID NO: 8641 - DNA, 20 bp, synthetic construct
  source 1..20: mol_type = other DNA
gtgctctggtcaggctcgcg

SEQ ID NO: 8642 - DNA, 20 bp, synthetic construct
  source 1..20: mol_type = other DNA
actgggtacctgcgggatgg

SEQ ID NO: 8643 - DNA, 20 bp, synthetic construct
  source 1..20: mol_type = other DNA
atacttcaagaaggtgctgg

SEQ ID NO: 8644 - DNA, 20 bp, synthetic construct
  source 1..20: mol_type = other DNA
attgggccatgtttctctgc

SEQ ID NO: 8645 - DNA, 20 bp, synthetic construct
  source 1..20: mol_type = other DNA
gcacgaggaaggagccgtca

SEQ ID NO: 8646 - DNA, 20 bp, synthetic construct
  source 1..20: mol_type = other DNA
agcacccacctcaatagaga

SEQ ID NO: 8647 - DNA, 20 bp, synthetic construct
  source 1..20: mol_type = other DNA
aatgctgcagtggtcctcaa

SEQ ID NO: 8648 - DNA, 20 bp, synthetic construct
  source 1..20: mol_type = other DNA
cacaaaggcatgctccttga

SEQ ID NO: 8649 - DNA, 20 bp, synthetic construct
  source 1..20: mol_type = other DNA
ttaccgtcagccgctctcgg

SEQ ID NO: 8650 - DNA, 20 bp, synthetic construct
  source 1..20: mol_type = other DNA
atgccatctctttccggtga

SEQ ID NO: 8651 - DNA, 20 bp, synthetic construct
  source 1..20: mol_type = other DNA
gcccttactctcttcatcaa

SEQ ID NO: 8652 - DNA, 20 bp, synthetic construct
  source 1..20: mol_type = other DNA
tgatggagaagacgaagagc

SEQ ID NO: 8653 - DNA, 20 bp, synthetic construct
  source 1..20: mol_type = other DNA
tcttacctctcaatctgcag

SEQ ID NO: 8654 - DNA, 20 bp, synthetic construct
  source 1..20: mol_type = other DNA
tcgccacctgtgggagccac

SEQ ID NO: 8655 - DNA, 20 bp, synthetic construct
  source 1..20: mol_type = other DNA
cgcgccagatcacgtggagc

SEQ ID NO: 8656 - DNA, 20 bp, synthetic construct
  source 1..20: mol_type = other DNA
gctgcagccaagcaccatgc

SEQ ID NO: 8657 - DNA, 20 bp, synthetic construct
  source 1..20: mol_type = other DNA
catggcccaatacttcaaga

SEQ ID NO: 8658 - DNA, 20 bp, synthetic construct
  source 1..20: mol_type = other DNA
tacctccctctccggctcca

SEQ ID NO: 8659 - DNA, 20 bp, synthetic construct
  source 1..20: mol_type = other DNA
tgaggagaccagcagtgacc

SEQ ID NO: 8660 - DNA, 20 bp, synthetic construct
  source 1..20: mol_type = other DNA
tcactgtagttgttcttcaa

SEQ ID NO: 8661 - DNA, 20 bp, synthetic construct
  source 1..20: mol_type = other DNA
ctatgctcgctgcctgcgga

SEQ ID NO: 8662 - DNA, 20 bp, synthetic construct
  source 1..20: mol_type = other DNA
gggagtggatacggcagtgc

SEQ ID NO: 8663 - DNA, 20 bp, synthetic construct
  source 1..20: mol_type = other DNA
tgtttccaggagcctgacta

SEQ ID NO: 8664 - DNA, 20 bp, synthetic construct
  source 1..20: mol_type = other DNA
cagcagtgaccagggcaacg

SEQ ID NO: 8665 - DNA, 20 bp, synthetic construct
  source 1..20: mol_type = other DNA
gctggtcagaacaaagtagt

SEQ ID NO: 8666 - DNA, 20 bp, synthetic construct
  source 1..20: mol_type = other DNA
accaggaaggccccatcacg

SEQ ID NO: 8667 - DNA, 20 bp, synthetic construct
  source 1..20: mol_type = other DNA
acggaggaagaagattgccc

SEQ ID NO: 8668 - DNA, 20 bp, synthetic construct
  source 1..20: mol_type = other DNA
ccccccgcagcaagtcccct

SEQ ID NO: 8669 - DNA, 20 bp, synthetic construct
  source 1..20: mol_type = other DNA
tgctggtcagaacaaagtag

SEQ ID NO: 8670 - DNA, 20 bp, synthetic construct
  source 1..20: mol_type = other DNA
ttgcctctacatagaagcca

SEQ ID NO: 8671 - DNA, 20 bp, synthetic construct
  source 1..20: mol_type = other DNA
attcctggaacagaccaaag

SEQ ID NO: 8672 - DNA, 20 bp, synthetic construct
  source 1..20: mol_type = other DNA
tacagcgcaggggcacctgc

SEQ ID NO: 8673 - DNA, 20 bp, synthetic construct
  source 1..20: mol_type = other DNA
catccgcaggcagcgagcat

SEQ ID NO: 8674 - DNA, 20 bp, synthetic construct
  source 1..20: mol_type = other DNA
cttcgtcttctccatcagca

SEQ ID NO: 8675 - DNA, 20 bp, synthetic construct
  source 1..20: mol_type = other DNA
ctcctggaaacaggacacaa

SEQ ID NO: 8676 - DNA, 20 bp, synthetic construct
  source 1..20: mol_type = other DNA
gccagcttcttgtgctgtag

SEQ ID NO: 8677 - DNA, 20 bp, synthetic construct
  source 1..20: mol_type = other DNA
ccgccatggctccgacgctg

SEQ ID NO: 8678 - DNA, 20 bp, synthetic construct
  source 1..20: mol_type = other DNA
cgagagagtgagaccttcgt

SEQ ID NO: 8679 - DNA, 20 bp, synthetic construct
  source 1..20: mol_type = other DNA
cgccacctgtgggagccaca

SEQ ID NO: 8680 - DNA, 20 bp, synthetic construct
  source 1..20: mol_type = other DNA
ggagtagaacaaagtcatga

SEQ ID NO: 8681 - DNA, 20 bp, synthetic construct
  source 1..20: mol_type = other DNA
cattgccgtgtccagcaaga

SEQ ID NO: 8682 - DNA, 20 bp, synthetic construct
  source 1..20: mol_type = other DNA
cggtgcccacctcgaggctg

SEQ ID NO: 8683 - DNA, 20 bp, synthetic construct
  source 1..20: mol_type = other DNA
gatagcgcagcttcatcttg

SEQ ID NO: 8684 - DNA, 20 bp, synthetic construct
  source 1..20: mol_type = other DNA
gctcctcgatctctcgtaag

SEQ ID NO: 8685 - DNA, 20 bp, synthetic construct
  source 1..20: mol_type = other DNA
ctctcccgcatctaccccaa

SEQ ID NO: 8686 - DNA, 20 bp, synthetic construct
  source 1..20: mol_type = other DNA
aaccaggccctcttcatgac

SEQ ID NO: 8687 - DNA, 20 bp, synthetic construct
  source 1..20: mol_type = other DNA
ctctgccgcagcctcgaggt

SEQ ID NO: 8688 - DNA, 20 bp, synthetic construct
  source 1..20: mol_type = other DNA
ggaagcgcatgttggggacc

SEQ ID NO: 8689 - DNA, 20 bp, synthetic construct
  source 1..20: mol_type = other DNA
ccacagatccacatgggcaa

SEQ ID NO: 8690 - DNA, 20 bp, synthetic construct
  source 1..20: mol_type = other DNA
ttcttacctctcaatctgca

SEQ ID NO: 8691 - DNA, 20 bp, synthetic construct
  source 1..20: mol_type = other DNA
gcagctggatgcagtatgcc

SEQ ID NO: 8692 - DNA, 20 bp, synthetic construct
  source 1..20: mol_type = other DNA
cccacagctcctgatggggt

SEQ ID NO: 8693 - DNA, 20 bp, synthetic construct
  source 1..20: mol_type = other DNA
tgctgcagccaagcaccatg

SEQ ID NO: 8694 - DNA, 20 bp, synthetic construct
  source 1..20: mol_type = other DNA
cccatggaaccacttctcat

SEQ ID NO: 8695 - DNA, 20 bp, synthetic construct
  source 1..20: mol_type = other DNA
tcttggaagccagtactctg

SEQ ID NO: 8696 - DNA, 20 bp, synthetic construct
  source 1..20: mol_type = other DNA
aggtggcgaggggactacgg

SEQ ID NO: 8697 - DNA, 20 bp, synthetic construct
  source 1..20: mol_type = other DNA
caagcagaagacagagtttg

SEQ ID NO: 8698 - DNA, 20 bp, synthetic construct
  source 1..20: mol_type = other DNA
cacactcctcaccaagcccg

SEQ ID NO: 8699 - DNA, 20 bp, synthetic construct
  source 1..20: mol_type = other DNA
gtaccttgaaagttggcata

SEQ ID NO: 8700 - DNA, 20 bp, synthetic construct
  source 1..20: mol_type = other DNA
gaggaggcactggagaagat

SEQ ID NO: 8701 - DNA, 20 bp, synthetic construct
  source 1..20: mol_type = other DNA
gtcaggtacctggataggca

SEQ ID NO: 8702 - DNA, 20 bp, synthetic construct
  source 1..20: mol_type = other DNA
ccccggtcaggtacctggat

SEQ ID NO: 8703 - DNA, 20 bp, synthetic construct
  source 1..20: mol_type = other DNA
gttcttacctctcaatctgc

SEQ ID NO: 8704 - DNA, 20 bp, synthetic construct
  source 1..20: mol_type = other DNA
gactgggtacctgcgggatg

SEQ ID NO: 8705 - DNA, 20 bp, synthetic construct
  source 1..20: mol_type = other DNA
gcccgccatggctccgacgc

SEQ ID NO: 8706 - DNA, 20 bp, synthetic construct
  source 1..20: mol_type = other DNA
ccggtgaggggtgtggcact

SEQ ID NO: 8707 - DNA, 20 bp, synthetic construct
  source 1..20: mol_type = other DNA
cacccctcaccggaaagaga

SEQ ID NO: 8708 - DNA, 20 bp, synthetic construct
  source 1..20: mol_type = other DNA
ctctgaggtttggtttggag

SEQ ID NO: 8709 - DNA, 20 bp, synthetic construct
  source 1..20: mol_type = other DNA
gccctcaacttccagacccc

SEQ ID NO: 8710 - DNA, 20 bp, synthetic construct
  source 1..20: mol_type = other DNA
ctcagatgtggctgtgagca

SEQ ID NO: 8711 - DNA, 20 bp, synthetic construct
  source 1..20: mol_type = other DNA
gctgtcccaggtcaactacc

SEQ ID NO: 8712 - DNA, 20 bp, synthetic construct
  source 1..20: mol_type = other DNA
actggccccctcgatcttgt

SEQ ID NO: 8713 - DNA, 20 bp, synthetic construct
  source 1..20: mol_type = other DNA
tgactacaaggcccagaggg

SEQ ID NO: 8714 - DNA, 20 bp, synthetic construct
  source 1..20: mol_type = other DNA
caaccctggcttctatgtag

SEQ ID NO: 8715 - DNA, 20 bp, synthetic construct
  source 1..20: mol_type = other DNA
ccccgcagcaagtcccctag

SEQ ID NO: 8716 - DNA, 20 bp, synthetic construct
  source 1..20: mol_type = other DNA
cctgaagaacatgctgtccc

SEQ ID NO: 8717 - DNA, 20 bp, synthetic construct
  source 1..20: mol_type = other DNA
cagccagcttcttgtgctgt

SEQ ID NO: 8718 - DNA, 20 bp, synthetic construct
  source 1..20: mol_type = other DNA
gatgaagagagtaagggcca

SEQ ID NO: 8719 - DNA, 20 bp, synthetic construct
  source 1..20: mol_type = other DNA
ctgcaaggtgggagttaagg

SEQ ID NO: 8720 - DNA, 20 bp, synthetic construct
  source 1..20: mol_type = other DNA
cctcacccaaccagcttaag

SEQ ID NO: 8721 - DNA, 20 bp, synthetic construct
  source 1..20: mol_type = other DNA
ggctgatatactgagaaaac

SEQ ID NO: 8722 - DNA, 20 bp, synthetic construct
  source 1..20: mol_type = other DNA
acagcacaagaagctggctg

SEQ ID NO: 8723 - DNA, 20 bp, synthetic construct
  source 1..20: mol_type = other DNA
ccacctcgaggctgcggcag

SEQ ID NO: 8724 - DNA, 20 bp, synthetic construct
  source 1..20: mol_type = other DNA
ctgaacttgtcgtctactgc

SEQ ID NO: 8725 - DNA, 20 bp, synthetic construct
  source 1..20: mol_type = other DNA
cccgcagcaagtcccctagg

SEQ ID NO: 8726 - DNA, 20 bp, synthetic construct
  source 1..20: mol_type = other DNA
actgtccagaaacatgtgga

SEQ ID NO: 8727 - DNA, 20 bp, synthetic construct
  source 1..20: mol_type = other DNA
acatgcgcttcctccgagag

SEQ ID NO: 8728 - DNA, 20 bp, synthetic construct
  source 1..20: mol_type = other DNA
tggagaagcaagagggaggc

SEQ ID NO: 8729 - DNA, 20 bp, synthetic construct
  source 1..20: mol_type = other DNA
gctgctgacctgtcagggga

SEQ ID NO: 8730 - DNA, 20 bp, synthetic construct
  source 1..20: mol_type = other DNA
ggcttccaaggaggactcac

SEQ ID NO: 8731 - DNA, 20 bp, synthetic construct
  source 1..20: mol_type = other DNA
ctgctctgtatcctaggagg

SEQ ID NO: 8732 - DNA, 20 bp, synthetic construct
  source 1..20: mol_type = other DNA
gttctccagtgagtcctcct

SEQ ID NO: 8733 - DNA, 20 bp, synthetic construct
  source 1..20: mol_type = other DNA
tcagcagggaggccaactcc

SEQ ID NO: 8734 - DNA, 20 bp, synthetic construct
  source 1..20: mol_type = other DNA
ctaccccaagggccagcgac

SEQ ID NO: 8735 - DNA, 20 bp, synthetic construct
  source 1..20: mol_type = other DNA
ctctcaatctgcaggggtgt

SEQ ID NO: 8736 - DNA, 20 bp, synthetic construct
  source 1..20: mol_type = other DNA
acctggaaggtcttccgctc

SEQ ID NO: 8737 - DNA, 20 bp, synthetic construct
  source 1..20: mol_type = other DNA
cacaggtggcgaggggacta

SEQ ID NO: 8738 - DNA, 20 bp, synthetic construct
  source 1..20: mol_type = other DNA
agaaggggaggtccatctgc

SEQ ID NO: 8739 - DNA, 20 bp, synthetic construct
  source 1..20: mol_type = other DNA
ctgaggtttggtttggagtg

SEQ ID NO: 8740 - DNA, 20 bp, synthetic construct
  source 1..20: mol_type = other DNA
aagggaagataatggaacgg

SEQ ID NO: 8741 - DNA, 20 bp, synthetic construct
  source 1..20: mol_type = other DNA
ggccgtcccagcagtccact

SEQ ID NO: 8742 - DNA, 20 bp, synthetic construct
  source 1..20: mol_type = other DNA
ataccccctggtagtcaaga

SEQ ID NO: 8743 - DNA, 20 bp, synthetic construct
  source 1..20: mol_type = other DNA
tcttaagctggttgggtgag

SEQ ID NO: 8744 - DNA, 20 bp, synthetic construct
  source 1..20: mol_type = other DNA
gactacggggccctgtatga

SEQ ID NO: 8745 - DNA, 20 bp, synthetic construct
  source 1..20: mol_type = other DNA
ccagggcaacgaggatgagg

SEQ ID NO: 8746 - DNA, 20 bp, synthetic construct
  source 1..20: mol_type = other DNA
cacaggaggagctgcaggac

SEQ ID NO: 8747 - DNA, 20 bp, synthetic construct
  source 1..20: mol_type = other DNA
ctcactctctcgcacgagga

SEQ ID NO: 8748 - DNA, 20 bp, synthetic construct
  source 1..20: mol_type = other DNA
tcatacagggccccgtagtc

SEQ ID NO: 8749 - DNA, 20 bp, synthetic construct
  source 1..20: mol_type = other DNA
cgacaagttcagagagctcc

SEQ ID NO: 8750 - DNA, 20 bp, synthetic construct
  source 1..20: mol_type = other DNA
gtctgtcaagaagaacttgg

SEQ ID NO: 8751 - DNA, 20 bp, synthetic construct
  source 1..20: mol_type = other DNA
ccctttgatgaagagagtaa

SEQ ID NO: 8752 - DNA, 20 bp, synthetic construct
  source 1..20: mol_type = other DNA
gcgccagatcacgtggagcc

SEQ ID NO: 8753 - DNA, 20 bp, synthetic construct
  source 1..20: mol_type = other DNA
ctgcagctcctcctgtgagt

SEQ ID NO: 8754 - DNA, 20 bp, synthetic construct
  source 1..20: mol_type = other DNA
aacagcccacagctcctgat

SEQ ID NO: 8755 - DNA, 20 bp, synthetic construct
  source 1..20: mol_type = other DNA
cacgaggaaggagccgtcag

SEQ ID NO: 8756 - DNA, 20 bp, synthetic construct
  source 1..20: mol_type = other DNA
gaagattggcacagctgtga

SEQ ID NO: 8757 - DNA, 20 bp, synthetic construct
  source 1..20: mol_type = other DNA
cctgtggaagacacagagtg

SEQ ID NO: 8758 - DNA, 20 bp, synthetic construct
  source 1..20: mol_type = other DNA
ttcctggaacagaccaaaga

SEQ ID NO: 8759 - DNA, 20 bp, synthetic construct
  source 1..20: mol_type = other DNA
ctccagtgcctcctcgttga

SEQ ID NO: 8760 - DNA, 20 bp, synthetic construct
  source 1..20: mol_type = other DNA
catggctccgacgctggggg

SEQ ID NO: 8761 - DNA, 20 bp, synthetic construct
  source 1..20: mol_type = other DNA
tggagaactggtccccggtc

SEQ ID NO: 8762 - DNA, 20 bp, synthetic construct
  source 1..20: mol_type = other DNA
gcggcagaggtgcagcacct

SEQ ID NO: 8763 - DNA, 20 bp, synthetic construct
  source 1..20: mol_type = other DNA
ccacactcacgtgttgtgcg

SEQ ID NO: 8764 - DNA, 20 bp, synthetic construct
  source 1..20: mol_type = other DNA
gcgctatcccatcaacgagg

SEQ ID NO: 8765 - DNA, 20 bp, synthetic construct
  source 1..20: mol_type = other DNA
agattggcacagctgtgagg

SEQ ID NO: 8766 - DNA, 20 bp, synthetic construct
  source 1..20: mol_type = other DNA
ctctcggaggaagcgcatgt

SEQ ID NO: 8767 - DNA, 20 bp, synthetic construct
  source 1..20: mol_type = other DNA
gcgagagagtgagaccttcg

SEQ ID NO: 8768 - DNA, 20 bp, synthetic construct
  source 1..20: mol_type = other DNA
tcctaggaggaggaaaagcc

SEQ ID NO: 8769 - DNA, 20 bp, synthetic construct
  source 1..20: mol_type = other DNA
agaacttgatcttggtggta

SEQ ID NO: 8770 - DNA, 20 bp, synthetic construct
  source 1..20: mol_type = other DNA
ttcttgactaccagggggta

SEQ ID NO: 8771 - DNA, 20 bp, synthetic construct
  source 1..20: mol_type = other DNA
agcactgccgtatccactcc

SEQ ID NO: 8772 - DNA, 20 bp, synthetic construct
  source 1..20: mol_type = other DNA
tccctttgatgaagagagta

SEQ ID NO: 8773 - DNA, 20 bp, synthetic construct
  source 1..20: mol_type = other DNA
aggtcagctcgtcctccctc

SEQ ID NO: 8774 - DNA, 20 bp, synthetic construct
  source 1..20: mol_type = other DNA
ccagaatgtggagaagcaag

SEQ ID NO: 8775 - DNA, 20 bp, synthetic construct
  source 1..20: mol_type = other DNA
tctctcgtaaggggtctcgg

SEQ ID NO: 8776 - DNA, 20 bp, synthetic construct
  source 1..20: mol_type = other DNA
cctttgcccatgtggatctg

SEQ ID NO: 8777 - DNA, 20 bp, synthetic construct
  source 1..20: mol_type = other DNA
gggccgtcccagcagtccac

SEQ ID NO: 8778 - DNA, 20 bp, synthetic construct
  source 1..20: mol_type = other DNA
ctccctgcagggctggggag

SEQ ID NO: 8779 - DNA, 20 bp, synthetic construct
  source 1..20: mol_type = other DNA
agaagtcgcagcgacccgag

SEQ ID NO: 8780 - DNA, 20 bp, synthetic construct
  source 1..20: mol_type = other DNA
gaggagaccagcagtgacca

SEQ ID NO: 8781 - DNA, 20 bp, synthetic construct
  source 1..20: mol_type = other DNA
acagcccacagctcctgatg

SEQ ID NO: 8782 - DNA, 20 bp, synthetic construct
  source 1..20: mol_type = other DNA
cagctgagcaaactgcccgt

SEQ ID NO: 8783 - DNA, 20 bp, synthetic construct
  source 1..20: mol_type = other DNA
caactaggaaggtagcaaag

SEQ ID NO: 8784 - DNA, 20 bp, synthetic construct
  source 1..20: mol_type = other DNA
cagcacaagaagctggctga

SEQ ID NO: 8785 - DNA, 20 bp, synthetic construct
  source 1..20: mol_type = other DNA
acctgtaggcagacaaagaa

SEQ ID NO: 8786 - DNA, 20 bp, synthetic construct
  source 1..20: mol_type = other DNA
ccaggaaggccccatcacga

SEQ ID NO: 8787 - DNA, 20 bp, synthetic construct
  source 1..20: mol_type = other DNA
tctcctgcttcaacgaagcc

SEQ ID NO: 8788 - DNA, 20 bp, synthetic construct
  source 1..20: mol_type = other DNA
ctgtggaagacacagagtga

SEQ ID NO: 8789 - DNA, 20 bp, synthetic construct
  source 1..20: mol_type = other DNA
cactcacgtgttgtgcgagg

SEQ ID NO: 8790 - DNA, 20 bp, synthetic construct
  source 1..20: mol_type = other DNA
caggatgactgggtacctgc

SEQ ID NO: 8791 - DNA, 20 bp, synthetic construct
  source 1..20: mol_type = other DNA
ctggtcagaacaaagtagtg

SEQ ID NO: 8792 - DNA, 20 bp, synthetic construct
  source 1..20: mol_type = other DNA
acaggaggagctgcaggact

SEQ ID NO: 8793 - DNA, 20 bp, synthetic construct
  source 1..20: mol_type = other DNA
aaactgcttccggagccacc

SEQ ID NO: 8794 - DNA, 20 bp, synthetic construct
  source 1..20: mol_type = other DNA
ccacagctcctgatggggta

SEQ ID NO: 8795 - DNA, 20 bp, synthetic construct
  source 1..20: mol_type = other DNA
aggaggactcactggagaac

SEQ ID NO: 8796 - DNA, 20 bp, synthetic construct
  source 1..20: mol_type = other DNA
agggccagacagtgatgcta

SEQ ID NO: 8797 - DNA, 20 bp, synthetic construct
  source 1..20: mol_type = other DNA
tggggacccggtagttgacc

SEQ ID NO: 8798 - DNA, 20 bp, synthetic construct
  source 1..20: mol_type = other DNA
agaaggaactgctggaactc

SEQ ID NO: 8799 - DNA, 20 bp, synthetic construct
  source 1..20: mol_type = other DNA
agaccccttacgagagatcg

SEQ ID NO: 8800 - DNA, 20 bp, synthetic construct
  source 1..20: mol_type = other DNA
aagcagaagacagagtttgt

SEQ ID NO: 8801 - DNA, 20 bp, synthetic construct
  source 1..20: mol_type = other DNA
tggctcctcgatctctcgta

SEQ ID NO: 8802 - DNA, 20 bp, synthetic construct
  source 1..20: mol_type = other DNA
gaacttgatcttggtggtaa

SEQ ID NO: 8803 - DNA, 20 bp, synthetic construct
  source 1..20: mol_type = other DNA
ggctcctcgatctctcgtaa

SEQ ID NO: 8804 - DNA, 20 bp, synthetic construct
  source 1..20: mol_type = other DNA
gcactgctctgtatcctagg

SEQ ID NO: 8805 - DNA, 20 bp, synthetic construct
  source 1..20: mol_type = other DNA
cgcacgaggaaggagccgtc

SEQ ID NO: 8806 - DNA, 20 bp, synthetic construct
  source 1..20: mol_type = other DNA
tgaccagaatttcctggctc

SEQ ID NO: 8807 - DNA, 20 bp, synthetic construct
  source 1..20: mol_type = other DNA
cacctgtaggcagacaaaga

SEQ ID NO: 8808 - DNA, 20 bp, synthetic construct
  source 1..20: mol_type = other DNA
tccagtgcctcctcgttgat

SEQ ID NO: 8809 - DNA, 20 bp, synthetic construct
  source 1..20: mol_type = other DNA
ctgactgccacagatccaca

SEQ ID NO: 8810 - DNA, 20 bp, synthetic construct
  source 1..20: mol_type = other DNA
gagatccagtagtgggaaag

SEQ ID NO: 8811 - DNA, 20 bp, synthetic construct
  source 1..20: mol_type = other DNA
cctctgccgcagcctcgagg

SEQ ID NO: 8812 - DNA, 20 bp, synthetic construct
  source 1..20: mol_type = other DNA
gcgtggtaccacctgagaac

SEQ ID NO: 8813 - DNA, 20 bp, synthetic construct
  source 1..20: mol_type = other DNA
ggaactgctggaactcagga

SEQ ID NO: 8814 - DNA, 20 bp, synthetic construct
  source 1..20: mol_type = other DNA
atacaccacgaagcgcagaa

SEQ ID NO: 8815 - DNA, 20 bp, synthetic construct
  source 1..20: mol_type = other DNA
caaggtacagctcaggcctc

SEQ ID NO: 8816 - DNA, 20 bp, synthetic construct
  source 1..20: mol_type = other DNA
ctgagctgtaccttgaaagt

SEQ ID NO: 8817 - DNA, 20 bp, synthetic construct
  source 1..20: mol_type = other DNA
agctcctgatggggtaggga

SEQ ID NO: 8818 - DNA, 20 bp, synthetic construct
  source 1..20: mol_type = other DNA
gtgtccttttgtggagattg

SEQ ID NO: 8819 - DNA, 20 bp, synthetic construct
  source 1..20: mol_type = other DNA
cgccatggctccgacgctgg

SEQ ID NO: 8820 - DNA, 20 bp, synthetic construct
  source 1..20: mol_type = other DNA
atgactgggtacctgcggga

SEQ ID NO: 8821 - DNA, 20 bp, synthetic construct
  source 1..20: mol_type = other DNA
ggatgccagttatttaccat

SEQ ID NO: 8822 - DNA, 20 bp, synthetic construct
  source 1..20: mol_type = other DNA
agcgcagaaaggcaaattca

SEQ ID NO: 8823 - DNA, 20 bp, synthetic construct
  source 1..20: mol_type = other DNA
ccgcccagggaagacctcac

SEQ ID NO: 8824 - DNA, 20 bp, synthetic construct
  source 1..20: mol_type = other DNA
cccccgcagcaagtccccta

SEQ ID NO: 8825 - DNA, 20 bp, synthetic construct
  source 1..20: mol_type = other DNA
ctcggaggaagcgcatgttg

SEQ ID NO: 8826 - DNA, 20 bp, synthetic construct
  source 1..20: mol_type = other DNA
gcccacgagagcaaagagtg

SEQ ID NO: 8827 - DNA, 20 bp, synthetic construct
  source 1..20: mol_type = other DNA
gtcatccttcccggaaacca

SEQ ID NO: 8828 - DNA, 20 bp, synthetic construct
  source 1..20: mol_type = other DNA
tggcccagacagcagacgcc

SEQ ID NO: 8829 - DNA, 20 bp, synthetic construct
  source 1..20: mol_type = other DNA
gacaagttcagagagctcca

SEQ ID NO: 8830 - DNA, 20 bp, synthetic construct
  source 1..20: mol_type = other DNA
gtgagtcggcagcaacatcc

SEQ ID NO: 8831 - DNA, 20 bp, synthetic construct
  source 1..20: mol_type = other DNA
ccgggacatgtcatccttcc

SEQ ID NO: 8832 - DNA, 20 bp, synthetic construct
  source 1..20: mol_type = other DNA
gcagttccttcttgactacc

SEQ ID NO: 8833 - DNA, 20 bp, synthetic construct
  source 1..20: mol_type = other DNA
tgaagtgaacatgtggatca

SEQ ID NO: 8834 - DNA, 20 bp, synthetic construct
  source 1..20: mol_type = other DNA
tgtctggaagaggcagatta

SEQ ID NO: 8835 - DNA, 20 bp, synthetic construct
  source 1..20: mol_type = other DNA
aggaccctgtgaaccacgtg

SEQ ID NO: 8836 - DNA, 20 bp, synthetic construct
  source 1..20: mol_type = other DNA
gctttgactgcacactgcag

SEQ ID NO: 8837 - DNA, 20 bp, synthetic construct
  source 1..20: mol_type = other DNA
ggaatccagtcgctggccct

SEQ ID NO: 8838 - DNA, 20 bp, synthetic construct
  source 1..20: mol_type = other DNA
gcccgacatctgccaaagaa

SEQ ID NO: 8839 - DNA, 20 bp, synthetic construct
  source 1..20: mol_type = other DNA
gctcagcctgtgctctggtc

SEQ ID NO: 8840 - DNA, 20 bp, synthetic construct
  source 1..20: mol_type = other DNA
gtcgaaggcctcatcccgca

SEQ ID NO: 8841 - DNA, 20 bp, synthetic construct
  source 1..20: mol_type = other DNA
ctgtaggggcaaccagaaca

SEQ ID NO: 8842 - DNA, 20 bp, synthetic construct
  source 1..20: mol_type = other DNA
acctcatccaggaagaagta

SEQ ID NO: 8843 - DNA, 20 bp, synthetic construct
  source 1..20: mol_type = other DNA
gaaagagatggcatatgagt

SEQ ID NO: 8844 - DNA, 20 bp, synthetic construct
  source 1..20: mol_type = other DNA
ctctcttcatcaaagggaac

SEQ ID NO: 8845 - DNA, 20 bp, synthetic construct
  source 1..20: mol_type = other DNA
cactcagccttaccagcccc

SEQ ID NO: 8846 - DNA, 20 bp, synthetic construct
  source 1..20: mol_type = other DNA
ccacaagtgaagcagcgtac

SEQ ID NO: 8847 - DNA, 20 bp, synthetic construct
  source 1..20: mol_type = other DNA
agaggaggaggcggaggcgg

SEQ ID NO: 8848 - DNA, 20 bp, synthetic construct
  source 1..20: mol_type = other DNA
ctccagaatggagtcgcagg

SEQ ID NO: 8849 - DNA, 20 bp, synthetic construct
  source 1..20: mol_type = other DNA
tggacagatctattccagag

SEQ ID NO: 8850 - DNA, 20 bp, synthetic construct
  source 1..20: mol_type = other DNA
cagctctccaatctgaaggt

SEQ ID NO: 8851 - DNA, 20 bp, synthetic construct
  source 1..20: mol_type = other DNA
tgagagtgcacagtggagaa

SEQ ID NO: 8852 - DNA, 20 bp, synthetic construct
  source 1..20: mol_type = other DNA
ccccggctctcaagagcacc

SEQ ID NO: 8853 - DNA, 20 bp, synthetic construct
  source 1..20: mol_type = other DNA
aaacactacctggtacacac

SEQ ID NO: 8854 - DNA, 20 bp, synthetic construct
  source 1..20: mol_type = other DNA
atctgtccaaaagagaagac

SEQ ID NO: 8855 - DNA, 20 bp, synthetic construct
  source 1..20: mol_type = other DNA
tgtggcagacctacagtgta

SEQ ID NO: 8856 - DNA, 20 bp, synthetic construct
  source 1..20: mol_type = other DNA
ttgcaagtctgacatttgaa

SEQ ID NO: 8857 - DNA, 20 bp, synthetic construct
  source 1..20: mol_type = other DNA
tgtgctgaaataaagaaaaa

SEQ ID NO: 8858 - DNA, 20 bp, synthetic construct
  source 1..20: mol_type = other DNA
gaaacactacctggtacaca

SEQ ID NO: 8859 - DNA, 20 bp, synthetic construct
  source 1..20: mol_type = other DNA
gccccggctctcaagagcac

SEQ ID NO: 8860 - DNA, 20 bp, synthetic construct
  source 1..20: mol_type = other DNA
tttggacagatctattccag

SEQ ID NO: 8861 - DNA, 20 bp, synthetic construct
  source 1..20: mol_type = other DNA
cggccagctctccaatctga

SEQ ID NO: 8862 - DNA, 20 bp, synthetic construct
  source 1..20: mol_type = other DNA
tggtgctgctaaatctcttg

SEQ ID NO: 8863 - DNA, 20 bp, synthetic construct
  source 1..20: mol_type = other DNA
ccacctgcagaaacactacc

SEQ ID NO: 8864 - DNA, 20 bp, synthetic construct
  source 1..20: mol_type = other DNA
caggtgggtcttgagattgc

SEQ ID NO: 8865 - DNA, 20 bp, synthetic construct
  source 1..20: mol_type = other DNA
ggtccaaaacgtgtgccctt

SEQ ID NO: 8866 - DNA, 20 bp, synthetic construct
  source 1..20: mol_type = other DNA
gaggcttacctcttcactgt

SEQ ID NO: 8867 - DNA, 20 bp, synthetic construct
  source 1..20: mol_type = other DNA
ctgcgcacctggcattcatg

SEQ ID NO: 8868 - DNA, 20 bp, synthetic construct
  source 1..20: mol_type = other DNA
gaaaagcagattccttggta

SEQ ID NO: 8869 - DNA, 20 bp, synthetic construct
  source 1..20: mol_type = other DNA
aataccacacaagaagttcc

SEQ ID NO: 8870 - DNA, 20 bp, synthetic construct
  source 1..20: mol_type = other DNA
gtaccaggtagtgtttctgc

SEQ ID NO: 8871 - DNA, 20 bp, synthetic construct
  source 1..20: mol_type = other DNA
gcttacctcttcactgttgg

SEQ ID NO: 8872 - DNA, 20 bp, synthetic construct
  source 1..20: mol_type = other DNA
caagaagttcctggttggca

SEQ ID NO: 8873 - DNA, 20 bp, synthetic construct
  source 1..20: mol_type = other DNA
ccacacaagaagttcctggt

SEQ ID NO: 8874 - DNA, 20 bp, synthetic construct
  source 1..20: mol_type = other DNA
gggcacaccttgcattggta

SEQ ID NO: 8875 - DNA, 20 bp, synthetic construct
  source 1..20: mol_type = other DNA
ctaccttcagattggagagc

SEQ ID NO: 8876 - DNA, 20 bp, synthetic construct
  source 1..20: mol_type = other DNA
ggagagctggccgaaagtct

SEQ ID NO: 8877 - DNA, 20 bp, synthetic construct
  source 1..20: mol_type = other DNA
gtccacctgagagtgcacag

SEQ ID NO: 8878 - DNA, 20 bp, synthetic construct
  source 1..20: mol_type = other DNA
gcagccaggttttgctcccg

SEQ ID NO: 8879 - DNA, 20 bp, synthetic construct
  source 1..20: mol_type = other DNA
aaatgtcagacttgcaacaa

SEQ ID NO: 8880 - DNA, 20 bp, synthetic construct
  source 1..20: mol_type = other DNA
tccagaatggagtcgcaggt

SEQ ID NO: 8881 - DNA, 20 bp, synthetic construct
  source 1..20: mol_type = other DNA
acccacctgcgactccattc

SEQ ID NO: 8882 - DNA, 20 bp, synthetic construct
  source 1..20: mol_type = other DNA
gtgctgaaataaagaaaaag

SEQ ID NO: 8883 - DNA, 20 bp, synthetic construct
  source 1..20: mol_type = other DNA
gtggcagacctacagtgtag

SEQ ID NO: 8884 - DNA, 20 bp, synthetic construct
  source 1..20: mol_type = other DNA
ctccactgtgcactctcagg

SEQ ID NO: 8885 - DNA, 20 bp, synthetic construct
  source 1..20: mol_type = other DNA
ttggacagatctattccaga

SEQ ID NO: 8886 - DNA, 20 bp, synthetic construct
  source 1..20: mol_type = other DNA
ccaaccaggaacttcttgtg

SEQ ID NO: 8887 - DNA, 20 bp, synthetic construct
  source 1..20: mol_type = other DNA
ttgtgctgaaataaagaaaa

SEQ ID NO: 8888 - DNA, 20 bp, synthetic construct
  source 1..20: mol_type = other DNA
ttgtggcagacctacagtgt

SEQ ID NO: 8889 - DNA, 20 bp, synthetic construct
  source 1..20: mol_type = other DNA
caaatgtcagacttgcaaca

SEQ ID NO: 8890 - DNA, 20 bp, synthetic construct
  source 1..20: mol_type = other DNA
aggcggaggcatccttacca

SEQ ID NO: 8891 - DNA, 20 bp, synthetic construct
  source 1..20: mol_type = other DNA
acctaaacaggaaaaaacac

SEQ ID NO: 8892 - DNA, 20 bp, synthetic construct
  source 1..20: mol_type = other DNA
gctccagccggagcatccca

SEQ ID NO: 8893 - DNA, 20 bp, synthetic construct
  source 1..20: mol_type = other DNA
gcttttctcccgtgtgtacc

SEQ ID NO: 8894 - DNA, 20 bp, synthetic construct
  source 1..20: mol_type = other DNA
gttctccactgtgcactctc

SEQ ID NO: 8895 - DNA, 20 bp, synthetic construct
  source 1..20: mol_type = other DNA
agaaaagccacatgaatgcc

SEQ ID NO: 8896 - DNA, 20 bp, synthetic construct
  source 1..20: mol_type = other DNA
aggaggtggagaaggagaag

SEQ ID NO: 8897 - DNA, 20 bp, synthetic construct
  source 1..20: mol_type = other DNA
tctccccccacatctcctcc

SEQ ID NO: 8898 - DNA, 20 bp, synthetic construct
  source 1..20: mol_type = other DNA
ttcagtttcaccacctggga

SEQ ID NO: 8899 - DNA, 20 bp, synthetic construct
  source 1..20: mol_type = other DNA
tcagtttcaccacctgggaa

SEQ ID NO: 8900 - DNA, 20 bp, synthetic construct
  source 1..20: mol_type = other DNA
cacctggagaaagcaaagat

SEQ ID NO: 8901 - DNA, 20 bp, synthetic construct
  source 1..20: mol_type = other DNA
gggcagaagattgtggtgca

SEQ ID NO: 8902 - DNA, 20 bp, synthetic construct
  source 1..20: mol_type = other DNA
cgcctcctacctttaaccac

SEQ ID NO: 8903 - DNA, 20 bp, synthetic construct
  source 1..20: mol_type = other DNA
tcgcagagaaccatggagtc

SEQ ID NO: 8904 - DNA, 20 bp, synthetic construct
  source 1..20: mol_type = other DNA
agaaggtaaaaataaatgtg

SEQ ID NO: 8905 - DNA, 20 bp, synthetic construct
  source 1..20: mol_type = other DNA
gtccagcttaacgcacttca

SEQ ID NO: 8906 - DNA, 20 bp, synthetic construct
  source 1..20: mol_type = other DNA
tcacctggagaaagcaaaga

SEQ ID NO: 8907 - DNA, 20 bp, synthetic construct
  source 1..20: mol_type = other DNA
ggagaaggtaaaaataaatg

SEQ ID NO: 8908 - DNA, 20 bp, synthetic construct
  source 1..20: mol_type = other DNA
tccagcttaacgcacttcaa

SEQ ID NO: 8909 - DNA, 20 bp, synthetic construct
  source 1..20: mol_type = other DNA
gagaaggtaaaaataaatgt

SEQ ID NO: 8910 - DNA, 20 bp, synthetic construct
  source 1..20: mol_type = other DNA
ataacctagaaaagaactga

SEQ ID NO: 8911 - DNA, 20 bp, synthetic construct
  source 1..20: mol_type = other DNA
ataatcactcaggtgagtga

SEQ ID NO: 8912 - DNA, 20 bp, synthetic construct
  source 1..20: mol_type = other DNA
atgataaaggaatcatctat

SEQ ID NO: 8913 - DNA, 20 bp, synthetic construct
  source 1..20: mol_type = other DNA
tctcctggacaaggcatccc

SEQ ID NO: 8914 - DNA, 20 bp, synthetic construct
  source 1..20: mol_type = other DNA
aacactgtgggaccctgctg

SEQ ID NO: 8915 - DNA, 20 bp, synthetic construct
  source 1..20: mol_type = other DNA
aatacaaccactctgtggac

SEQ ID NO: 8916 - DNA, 20 bp, synthetic construct
  source 1..20: mol_type = other DNA
agaaggtggcagtgaactcg

SEQ ID NO: 8917 - DNA, 20 bp, synthetic construct
  source 1..20: mol_type = other DNA
acaggtaggagcatgtgccg

SEQ ID NO: 8918 - DNA, 20 bp, synthetic construct
  source 1..20: mol_type = other DNA
ccacagtgttcacagaaggt

SEQ ID NO: 8919 - DNA, 20 bp, synthetic construct
  source 1..20: mol_type = other DNA
ttctgccaggaagacctaga

SEQ ID NO: 8920 - DNA, 20 bp, synthetic construct
  source 1..20: mol_type = other DNA
agaggtaggaatgcagtgac

SEQ ID NO: 8921 - DNA, 20 bp, synthetic construct
  source 1..20: mol_type = other DNA
gccgtgccagtccccacagc

SEQ ID NO: 8922 - DNA, 20 bp, synthetic construct
  source 1..20: mol_type = other DNA
ccacggtggtttcagagatg

SEQ ID NO: 8923 - DNA, 20 bp, synthetic construct
  source 1..20: mol_type = other DNA
acagagcaaaatgtgggctg

SEQ ID NO: 8924 - DNA, 20 bp, synthetic construct
  source 1..20: mol_type = other DNA
cgtcagaaacggatgctccc

SEQ ID NO: 8925 - DNA, 20 bp, synthetic construct
  source 1..20: mol_type = other DNA
caggaagacctagaaggaga

SEQ ID NO: 8926 - DNA, 20 bp, synthetic construct
  source 1..20: mol_type = other DNA
cacagtgttcacagaaggtc

SEQ ID NO: 8927 - DNA, 20 bp, synthetic construct
  source 1..20: mol_type = other DNA
acattaagtcccctccgttg

SEQ ID NO: 8928 - DNA, 20 bp, synthetic construct
  source 1..20: mol_type = other DNA
tcagaaatacaaccactctg

SEQ ID NO: 8929 - DNA, 20 bp, synthetic construct
  source 1..20: mol_type = other DNA
gatggagtacctcaacggag

SEQ ID NO: 8930 - DNA, 20 bp, synthetic construct
  source 1..20: mol_type = other DNA
cttccttctccagccaccgt

SEQ ID NO: 8931 - DNA, 20 bp, synthetic construct
  source 1..20: mol_type = other DNA
ttacccacggtggctggaga

SEQ ID NO: 8932 - DNA, 20 bp, synthetic construct
  source 1..20: mol_type = other DNA
tggcagacagagcaaaatgt

SEQ ID NO: 8933 - DNA, 20 bp, synthetic construct
  source 1..20: mol_type = other DNA
cagttgatctcccgaaacaa

SEQ ID NO: 8934 - DNA, 20 bp, synthetic construct
  source 1..20: mol_type = other DNA
gcaagatctgcacaaccaaa

SEQ ID NO: 8935 - DNA, 20 bp, synthetic construct
  source 1..20: mol_type = other DNA
agctctaactggttgggaga

SEQ ID NO: 8936 - DNA, 20 bp, synthetic construct
  source 1..20: mol_type = other DNA
cctcttacgtcgctctggaa

SEQ ID NO: 8937 - DNA, 20 bp, synthetic construct
  source 1..20: mol_type = other DNA
cccacagaaggtattcgtct

SEQ ID NO: 8938 - DNA, 20 bp, synthetic construct
  source 1..20: mol_type = other DNA
agatactttctggaaatgag

SEQ ID NO: 8939 - DNA, 20 bp, synthetic construct
  source 1..20: mol_type = other DNA
tactgtaccagacaaactcg

SEQ ID NO: 8940 - DNA, 20 bp, synthetic construct
  source 1..20: mol_type = other DNA
ggtaaaagggattgtccatg

SEQ ID NO: 8941 - DNA, 20 bp, synthetic construct
  source 1..20: mol_type = other DNA
gtgatggagtacctcaacgg

SEQ ID NO: 8942 - DNA, 20 bp, synthetic construct
  source 1..20: mol_type = other DNA
gaggctctgaaaatgcaagc

SEQ ID NO: 8943 - DNA, 20 bp, synthetic construct
  source 1..20: mol_type = other DNA
cagagcaaaatgtgggctgt

SEQ ID NO: 8944 - DNA, 20 bp, synthetic construct
  source 1..20: mol_type = other DNA
ttacctgtagactattcctt

SEQ ID NO: 8945 - DNA, 20 bp, synthetic construct
  source 1..20: mol_type = other DNA
tttcagcagcataaaacctg

SEQ ID NO: 8946 - DNA, 20 bp, synthetic construct
  source 1..20: mol_type = other DNA
gatttcagcagcataaaacc

SEQ ID NO: 8947 - DNA, 20 bp, synthetic construct
  source 1..20: mol_type = other DNA
cttgaggtttcagctctaac

SEQ ID NO: 8948 - DNA, 20 bp, synthetic construct
  source 1..20: mol_type = other DNA
tcagtcgcctttccacgggc

SEQ ID NO: 8949 - DNA, 20 bp, synthetic construct
  source 1..20: mol_type = other DNA
atcttgcattcattagcatt

SEQ ID NO: 8950 - DNA, 20 bp, synthetic construct
  source 1..20: mol_type = other DNA
cggcaaggactcaagtgtga

SEQ ID NO: 8951 - DNA, 20 bp, synthetic construct
  source 1..20: mol_type = other DNA
gcatcatagatgccagacaa

SEQ ID NO: 8952 - DNA, 20 bp, synthetic construct
  source 1..20: mol_type = other DNA
ggtttcagctctaactggtt

SEQ ID NO: 8953 - DNA, 20 bp, synthetic construct
  source 1..20: mol_type = other DNA
gacaagccaatccgaagaaa

SEQ ID NO: 8954 - DNA, 20 bp, synthetic construct
  source 1..20: mol_type = other DNA
ggtcccacagtgttcacaga

SEQ ID NO: 8955 - DNA, 20 bp, synthetic construct
  source 1..20: mol_type = other DNA
cgaccttctgtgaacactgt

SEQ ID NO: 8956 - DNA, 20 bp, synthetic construct
  source 1..20: mol_type = other DNA
cccaccgttccggccgaaag

SEQ ID NO: 8957 - DNA, 20 bp, synthetic construct
  source 1..20: mol_type = other DNA
tcatagatgccagacaaagg

SEQ ID NO: 8958 - DNA, 20 bp, synthetic construct
  source 1..20: mol_type = other DNA
ttcataaaggagaaccccga

SEQ ID NO: 8959 - DNA, 20 bp, synthetic construct
  source 1..20: mol_type = other DNA
ccgtgccagtccccacagca

SEQ ID NO: 8960 - DNA, 20 bp, synthetic construct
  source 1..20: mol_type = other DNA
gtacattccagaccaaggta

SEQ ID NO: 8961 - DNA, 20 bp, synthetic construct
  source 1..20: mol_type = other DNA
ccaggaagacctagaaggag

SEQ ID NO: 8962 - DNA, 20 bp, synthetic construct
  source 1..20: mol_type = other DNA
tgaactcgtggcacttgacg

SEQ ID NO: 8963 - DNA, 20 bp, synthetic construct
  source 1..20: mol_type = other DNA
tgtggactggtggtccttcg

SEQ ID NO: 8964 - DNA, 20 bp, synthetic construct
  source 1..20: mol_type = other DNA
ttcagcagcataaaacctgg

SEQ ID NO: 8965 - DNA, 20 bp, synthetic construct
  source 1..20: mol_type = other DNA
gctctgaaaatgcaagctgg

SEQ ID NO: 8966 - DNA, 20 bp, synthetic construct
  source 1..20: mol_type = other DNA
ccgaccttctgtgaacactg

SEQ ID NO: 8967 - DNA, 20 bp, synthetic construct
  source 1..20: mol_type = other DNA
atttcagcagcataaaacct

SEQ ID NO: 8968 - DNA, 20 bp, synthetic construct
  source 1..20: mol_type = other DNA
gagaagaggctgggcgtgag

SEQ ID NO: 8969 - DNA, 20 bp, synthetic construct
  source 1..20: mol_type = other DNA
tacaggggcctgaacaaaca

SEQ ID NO: 8970 - DNA, 20 bp, synthetic construct
  source 1..20: mol_type = other DNA
gtggcagacagagcaaaatg

SEQ ID NO: 8971 - DNA, 20 bp, synthetic construct
  source 1..20: mol_type = other DNA
gccacatgctggaaggaaga

SEQ ID NO: 8972 - DNA, 20 bp, synthetic construct
  source 1..20: mol_type = other DNA
gactcccaggaaatgccctg

SEQ ID NO: 8973 - DNA, 20 bp, synthetic construct
  source 1..20: mol_type = other DNA
cactgtgggaccctgctgtg

SEQ ID NO: 8974 - DNA, 20 bp, synthetic construct
  source 1..20: mol_type = other DNA
ctgttgagtgctctcaatca

SEQ ID NO: 8975 - DNA, 20 bp, synthetic construct
  source 1..20: mol_type = other DNA
agccagcgagtagagctcca

SEQ ID NO: 8976 - DNA, 20 bp, synthetic construct
  source 1..20: mol_type = other DNA
aggaccaccagtccacagag

SEQ ID NO: 8977 - DNA, 20 bp, synthetic construct
  source 1..20: mol_type = other DNA
tgggaccctgctgtggggac

SEQ ID NO: 8978 - DNA, 20 bp, synthetic construct
  source 1..20: mol_type = other DNA
cccgaaacaaagggtgctgg

SEQ ID NO: 8979 - DNA, 20 bp, synthetic construct
  source 1..20: mol_type = other DNA
ttcattagcattcggccttg

SEQ ID NO: 8980 - DNA, 20 bp, synthetic construct
  source 1..20: mol_type = other DNA
acaatattgatgatgtagta

SEQ ID NO: 8981 - DNA, 20 bp, synthetic construct
  source 1..20: mol_type = other DNA
gtaaatacattcttcatacc

SEQ ID NO: 8982 - DNA, 20 bp, synthetic construct
  source 1..20: mol_type = other DNA
aatcccatagcaataatgtt

SEQ ID NO: 8983 - DNA, 20 bp, synthetic construct
  source 1..20: mol_type = other DNA
aaaaggatattgtgcaactg

SEQ ID NO: 8984 - DNA, 20 bp, synthetic construct
  source 1..20: mol_type = other DNA
caagttccgccactgaacat

SEQ ID NO: 8985 - DNA, 20 bp, synthetic construct
  source 1..20: mol_type = other DNA
tcatctggattatagaccag

SEQ ID NO: 8986 - DNA, 20 bp, synthetic construct
  source 1..20: mol_type = other DNA
ccacaaactgaggatctgca

SEQ ID NO: 8987 - DNA, 20 bp, synthetic construct
  source 1..20: mol_type = other DNA
ttgatgatggctgtcatgtc

SEQ ID NO: 8988 - DNA, 20 bp, synthetic construct
  source 1..20: mol_type = other DNA
actattccaatgttcagtgg

SEQ ID NO: 8989 - DNA, 20 bp, synthetic construct
  source 1..20: mol_type = other DNA
ccaaatttaattgcagaggt

SEQ ID NO: 8990 - DNA, 20 bp, synthetic construct
  source 1..20: mol_type = other DNA
ttgataagttctagctgtgg

SEQ ID NO: 8991 - DNA, 20 bp, synthetic construct
  source 1..20: mol_type = other DNA
tgggaatagttactccctgg

SEQ ID NO: 8992 - DNA, 20 bp, synthetic construct
  source 1..20: mol_type = other DNA
ccaattcaggacccacacga

SEQ ID NO: 8993 - DNA, 20 bp, synthetic construct
  source 1..20: mol_type = other DNA
gagtaactattcccagtcag

SEQ ID NO: 8994 - DNA, 20 bp, synthetic construct
  source 1..20: mol_type = other DNA
gaaactattccaatgttcag

SEQ ID NO: 8995 - DNA, 20 bp, synthetic construct
  source 1..20: mol_type = other DNA
tgatgatggctgtcatgtct

SEQ ID NO: 8996 - DNA, 20 bp, synthetic construct
  source 1..20: mol_type = other DNA
ccatgcagatcctcagtttg

SEQ ID NO: 8997 - DNA, 20 bp, synthetic construct
  source 1..20: mol_type = other DNA
ttagcatcttgttctgtttg

SEQ ID NO: 8998 - DNA, 20 bp, synthetic construct
  source 1..20: mol_type = other DNA
aaagctggaaagggacgaac

SEQ ID NO: 8999 - DNA, 20 bp, synthetic construct
  source 1..20: mol_type = other DNA
tgtgcatatttattacatcg

SEQ ID NO: 9000 - DNA, 20 bp, synthetic construct
  source 1..20: mol_type = other DNA
tggtcaagatcttcacaaaa

SEQ ID NO: 9001 - DNA, 20 bp, synthetic construct
  source 1..20: mol_type = other DNA
tacttccccatagaaatcta

SEQ ID NO: 9002 - DNA, 20 bp, synthetic construct
  source 1..20: mol_type = other DNA
cacacacaggtaacggctga

SEQ ID NO: 9003 - DNA, 20 bp, synthetic construct
  source 1..20: mol_type = other DNA
gttctagctgtggtgggtta

SEQ ID NO: 9004 - DNA, 20 bp, synthetic construct
  source 1..20: mol_type = other DNA
gtacttcacaaaaacagtag

SEQ ID NO: 9005 - DNA, 20 bp, synthetic construct
  source 1..20: mol_type = other DNA
agaggagccgtcaaatccag

SEQ ID NO: 9006 - DNA, 20 bp, synthetic construct
  source 1..20: mol_type = other DNA
accgccaaatttaattgcag

SEQ ID NO: 9007 - DNA, 20 bp, synthetic construct
  source 1..20: mol_type = other DNA
actttgatatcaccacacac

SEQ ID NO: 9008 - DNA, 20 bp, synthetic construct
  source 1..20: mol_type = other DNA
tacacatagcgcctctgact

SEQ ID NO: 9009 - DNA, 20 bp, synthetic construct
  source 1..20: mol_type = other DNA
tgataagttctagctgtggt

SEQ ID NO: 9010 - DNA, 20 bp, synthetic construct
  source 1..20: mol_type = other DNA
aatatatcttcacctttagc

SEQ ID NO: 9011 - DNA, 20 bp, synthetic construct
  source 1..20: mol_type = other DNA
ccacacacaggtaacggctg

SEQ ID NO: 9012 - DNA, 20 bp, synthetic construct
  source 1..20: mol_type = other DNA
ctgtcatgtctgggagcctg

SEQ ID NO: 9013 - DNA, 20 bp, synthetic construct
  source 1..20: mol_type = other DNA
atacacatagcgcctctgac

SEQ ID NO: 9014 - DNA, 20 bp, synthetic construct
  source 1..20: mol_type = other DNA
caattcaggacccacacgac

SEQ ID NO: 9015 - DNA, 20 bp, synthetic construct
  source 1..20: mol_type = other DNA
aaaaggagatatcaagagga

SEQ ID NO: 9016 - DNA, 20 bp, synthetic construct
  source 1..20: mol_type = other DNA
aaacaaaaggagatatcaag

SEQ ID NO: 9017 - DNA, 20 bp, synthetic construct
  source 1..20: mol_type = other DNA
gctaacgatctctttgatga

SEQ ID NO: 9018 - DNA, 20 bp, synthetic construct
  source 1..20: mol_type = other DNA
atatcaccacacacaggtaa

SEQ ID NO: 9019 - DNA, 20 bp, synthetic construct
  source 1..20: mol_type = other DNA
acgccttcaagtctttctgc

SEQ ID NO: 9020 - DNA, 20 bp, synthetic construct
  source 1..20: mol_type = other DNA
aattcactgtaaagctggaa

SEQ ID NO: 9021 - DNA, 20 bp, synthetic construct
  source 1..20: mol_type = other DNA
attcactgtaaagctggaaa

SEQ ID NO: 9022 - DNA, 20 bp, synthetic construct
  source 1..20: mol_type = other DNA
ggtttgataagttctagctg

SEQ ID NO: 9023 - DNA, 20 bp, synthetic construct
  source 1..20: mol_type = other DNA
gactgggaatagttactccc

SEQ ID NO: 9024 - DNA, 20 bp, synthetic construct
  source 1..20: mol_type = other DNA
ttgacctgtatccatttctg

SEQ ID NO: 9025 - DNA, 20 bp, synthetic construct
  source 1..20: mol_type = other DNA
acagattgtatatcttgtaa

SEQ ID NO: 9026 - DNA, 20 bp, synthetic construct
  source 1..20: mol_type = other DNA
acctctgcaattaaatttgg

SEQ ID NO: 9027 - DNA, 20 bp, synthetic construct
  source 1..20: mol_type = other DNA
cctcagccgttacctgtgtg

SEQ ID NO: 9028 - DNA, 20 bp, synthetic construct
  source 1..20: mol_type = other DNA
ttggtcaagatcttcacaaa

SEQ ID NO: 9029 - DNA, 20 bp, synthetic construct
  source 1..20: mol_type = other DNA
gtttgtggtctgccagctaa

SEQ ID NO: 9030 - DNA, 20 bp, synthetic construct
  source 1..20: mol_type = other DNA
gcactgcagtgcaccacaac

SEQ ID NO: 9031 - DNA, 20 bp, synthetic construct
  source 1..20: mol_type = other DNA
gatgtagtttaatccgacta

SEQ ID NO: 9032 - DNA, 20 bp, synthetic construct
  source 1..20: mol_type = other DNA
gtcacttttgggagatggtg

SEQ ID NO: 9033 - DNA, 20 bp, synthetic construct
  source 1..20: mol_type = other DNA
tacatttccactataccaca

SEQ ID NO: 9034 - DNA, 20 bp, synthetic construct
  source 1..20: mol_type = other DNA
gcaggtatcagccagacaga

SEQ ID NO: 9035 - DNA, 20 bp, synthetic construct
  source 1..20: mol_type = other DNA
gtaggagaagcgcagctggt

SEQ ID NO: 9036 - DNA, 20 bp, synthetic construct
  source 1..20: mol_type = other DNA
gttagaagtcgggtcgtggg

SEQ ID NO: 9037 - DNA, 20 bp, synthetic construct
  source 1..20: mol_type = other DNA
tgaagttagaagtcgggtcg

SEQ ID NO: 9038 - DNA, 20 bp, synthetic construct
  source 1..20: mol_type = other DNA
aagttagaagtcgggtcgtg

SEQ ID NO: 9039 - DNA, 20 bp, synthetic construct
  source 1..20: mol_type = other DNA
gaagttagaagtcgggtcgt

SEQ ID NO: 9040 - DNA, 20 bp, synthetic construct
  source 1..20: mol_type = other DNA
ccgcaccctacggcatcgaa

SEQ ID NO: 9041 - DNA, 20 bp, synthetic construct
  source 1..20: mol_type = other DNA
agttagaagtcgggtcgtgg

SEQ ID NO: 9042 - DNA, 20 bp, synthetic construct
  source 1..20: mol_type = other DNA
gtgcactgcagtgcaggcat

SEQ ID NO: 9043 - DNA, 20 bp, synthetic construct
  source 1..20: mol_type = other DNA
agtggatcaccgcaggccca

SEQ ID NO: 9044 - DNA, 20 bp, synthetic construct
  source 1..20: mol_type = other DNA
atttccatctggtaagaaat

SEQ ID NO: 9045 - DNA, 20 bp, synthetic construct
  source 1..20: mol_type = other DNA
aacctgccaaaactgtgcac

SEQ ID NO: 9046 - DNA, 20 bp, synthetic construct
  source 1..20: mol_type = other DNA
ggggatttctatgacctgta

SEQ ID NO: 9047 - DNA, 20 bp, synthetic construct
  source 1..20: mol_type = other DNA
tctcacaggtgacgcagcca

SEQ ID NO: 9048 - DNA, 20 bp, synthetic construct
  source 1..20: mol_type = other DNA
agaacaagtgtgcagaatac

SEQ ID NO: 9049 - DNA, 20 bp, synthetic construct
  source 1..20: mol_type = other DNA
tccagtttgtatattggtac

SEQ ID NO: 9050 - DNA, 20 bp, synthetic construct
  source 1..20: mol_type = other DNA
gtctcagttcaaagacacga

SEQ ID NO: 9051 - DNA, 20 bp, synthetic construct
  source 1..20: mol_type = other DNA
attacctacagatttcagtg

SEQ ID NO: 9052 - DNA, 20 bp, synthetic construct
  source 1..20: mol_type = other DNA
agacagtcatgttccagacc

SEQ ID NO: 9053 - DNA, 20 bp, synthetic construct
  source 1..20: mol_type = other DNA
tcgatgtgaagaaggaaaca

SEQ ID NO: 9054 - DNA, 20 bp, synthetic construct
  source 1..20: mol_type = other DNA
cagcaggagcttgttgaaag

SEQ ID NO: 9055 - DNA, 20 bp, synthetic construct
  source 1..20: mol_type = other DNA
ctcattcactgcaggtgcgt

SEQ ID NO: 9056 - DNA, 20 bp, synthetic construct
  source 1..20: mol_type = other DNA
agtgaccatgacaataactg

SEQ ID NO: 9057 - DNA, 20 bp, synthetic construct
  source 1..20: mol_type = other DNA
catctgccaaaagtcaccaa

SEQ ID NO: 9058 - DNA, 20 bp, synthetic construct
  source 1..20: mol_type = other DNA
ctacctgcagtgcaccacaa

SEQ ID NO: 9059 - DNA, 20 bp, synthetic construct
  source 1..20: mol_type = other DNA
acctggaattcagcctctag

SEQ ID NO: 9060 - DNA, 20 bp, synthetic construct
  source 1..20: mol_type = other DNA
tctgcgtgcgtgggaaggtg

SEQ ID NO: 9061 - DNA, 20 bp, synthetic construct
  source 1..20: mol_type = other DNA
gtcctccagctcctatatga

SEQ ID NO: 9062 - DNA, 20 bp, synthetic construct
  source 1..20: mol_type = other DNA
ctcgatgtgaagaaggaaac

SEQ ID NO: 9063 - DNA, 20 bp, synthetic construct
  source 1..20: mol_type = other DNA
tacctgcagtgcaccacaat

SEQ ID NO: 9064 - DNA, 20 bp, synthetic construct
  source 1..20: mol_type = other DNA
ttaccacatgttggcttaga

SEQ ID NO: 9065 - DNA, 20 bp, synthetic construct
  source 1..20: mol_type = other DNA
cacctgcagtgaatgagtag

SEQ ID NO: 9066 - DNA, 20 bp, synthetic construct
  source 1..20: mol_type = other DNA
aatagggtttcaaagaaccc

SEQ ID NO: 9067 - DNA, 20 bp, synthetic construct
  source 1..20: mol_type = other DNA
aaaatatgcaaacatcactg

SEQ ID NO: 9068 - DNA, 20 bp, synthetic construct
  source 1..20: mol_type = other DNA
ccaatatacaaactggagtg

SEQ ID NO: 9069 - DNA, 20 bp, synthetic construct
  source 1..20: mol_type = other DNA
ctcagtttgaggagcaagtg

SEQ ID NO: 9070 - DNA, 20 bp, synthetic construct
  source 1..20: mol_type = other DNA
tctcagttcaaagacacgaa

SEQ ID NO: 9071 - DNA, 20 bp, synthetic construct
  source 1..20: mol_type = other DNA
gccagaccacggggtgcctg

SEQ ID NO: 9072 - DNA, 20 bp, synthetic construct
  source 1..20: mol_type = other DNA
tagaccctgcggataggtga

SEQ ID NO: 9073 - DNA, 20 bp, synthetic construct
  source 1..20: mol_type = other DNA
catggctaaggagattggta

SEQ ID NO: 9074 - DNA, 20 bp, synthetic construct
  source 1..20: mol_type = other DNA
agaccctgcggataggtgat

SEQ ID NO: 9075 - DNA, 20 bp, synthetic construct
  source 1..20: mol_type = other DNA
gccgctctcctatccacaga

SEQ ID NO: 9076 - DNA, 20 bp, synthetic construct
  source 1..20: mol_type = other DNA
ggtatttcaccgagtctggt

SEQ ID NO: 9077 - DNA, 20 bp, synthetic construct
  source 1..20: mol_type = other DNA
cacggtggggatgtactctc

SEQ ID NO: 9078 - DNA, 20 bp, synthetic construct
  source 1..20: mol_type = other DNA
tctgtggataggagagcggc

SEQ ID NO: 9079 - DNA, 20 bp, synthetic construct
  source 1..20: mol_type = other DNA
caccaggatgatgggtgtgc

SEQ ID NO: 9080 - DNA, 20 bp, synthetic construct
  source 1..20: mol_type = other DNA
caggccctgcgggtaggtga

SEQ ID NO: 9081 - DNA, 20 bp, synthetic construct
  source 1..20: mol_type = other DNA
ctgaatagttgtcaaacctg

SEQ ID NO: 9082 - DNA, 20 bp, synthetic construct
  source 1..20: mol_type = other DNA
gggcaccaagctggacctgc

SEQ ID NO: 9083 - DNA, 20 bp, synthetic construct
  source 1..20: mol_type = other DNA
gccatcaagtgtgtggtggt

SEQ ID NO: 9084 - DNA, 20 bp, synthetic construct
  source 1..20: mol_type = other DNA
gctggacctgcgggacgaca

SEQ ID NO: 9085 - DNA, 20 bp, synthetic construct
  source 1..20: mol_type = other DNA
ttggccagtgccaggccctg

SEQ ID NO: 9086 - DNA, 20 bp, synthetic construct
  source 1..20: mol_type = other DNA
ataagaggctgggctgacga

SEQ ID NO: 9087 - DNA, 20 bp, synthetic construct
  source 1..20: mol_type = other DNA
tgggcaccaagctggacctg

SEQ ID NO: 9088 - DNA, 20 bp, synthetic construct
  source 1..20: mol_type = other DNA
gcagggcctggcactggcca

SEQ ID NO: 9089 - DNA, 20 bp, synthetic construct
  source 1..20: mol_type = other DNA
cccagtggttcccagaagtg

SEQ ID NO: 9090 - DNA, 20 bp, synthetic construct
  source 1..20: mol_type = other DNA
ccaaggtgagctggacaggg

SEQ ID NO: 9091 - DNA, 20 bp, synthetic construct
  source 1..20: mol_type = other DNA
caaggtgagctggacagggt

SEQ ID NO: 9092 - DNA, 20 bp, synthetic construct
  source 1..20: mol_type = other DNA
aaccactgggcaggtgggtg

SEQ ID NO: 9093 - DNA, 20 bp, synthetic construct
  source 1..20: mol_type = other DNA
agcagatgaggaagacgtcc

SEQ ID NO: 9094 - DNA, 20 bp, synthetic construct
  source 1..20: mol_type = other DNA
gggtgagagctgagcactcc

SEQ ID NO: 9095 - DNA, 20 bp, synthetic construct
  source 1..20: mol_type = other DNA
actggccaaggagattggta

SEQ ID NO: 9096 - DNA, 20 bp, synthetic construct
  source 1..20: mol_type = other DNA
accagactcggtgaaatacc

SEQ ID NO: 9097 - DNA, 20 bp, synthetic construct
  source 1..20: mol_type = other DNA
acagcaagccagtgaacctg

SEQ ID NO: 9098 - DNA, 20 bp, synthetic construct
  source 1..20: mol_type = other DNA
caactattcagccaatgtga

SEQ ID NO: 9099 - DNA, 20 bp, synthetic construct
  source 1..20: mol_type = other DNA
ttgtcaaacctgtggggagc

SEQ ID NO: 9100 - DNA, 20 bp, synthetic construct
  source 1..20: mol_type = other DNA
gtgggacactgctgggcagg

SEQ ID NO: 9101 - DNA, 20 bp, synthetic construct
  source 1..20: mol_type = other DNA
cctgcatcgtgtccggagcc

SEQ ID NO: 9102 - DNA, 20 bp, synthetic construct
  source 1..20: mol_type = other DNA
gataggagagcggccggaga

SEQ ID NO: 9103 - DNA, 20 bp, synthetic construct
  source 1..20: mol_type = other DNA
agcacacccatcatcctggt

SEQ ID NO: 9104 - DNA, 20 bp, synthetic construct
  source 1..20: mol_type = other DNA
tccccaccgtgtgagttcct

SEQ ID NO: 9105 - DNA, 20 bp, synthetic construct
  source 1..20: mol_type = other DNA
cttggtgcccaccaggatga

SEQ ID NO: 9106 - DNA, 20 bp, synthetic construct
  source 1..20: mol_type = other DNA
gcagatgaggaagacgtcct

SEQ ID NO: 9107 - DNA, 20 bp, synthetic construct
  source 1..20: mol_type = other DNA
ggtccagcttggtgcccacc

SEQ ID NO: 9108 - DNA, 20 bp, synthetic construct
  source 1..20: mol_type = other DNA
tctgggaaccactgggcagg

SEQ ID NO: 9109 - DNA, 20 bp, synthetic construct
  source 1..20: mol_type = other DNA
aggagattggtatgggcctc

SEQ ID NO: 9110 - DNA, 20 bp, synthetic construct
  source 1..20: mol_type = other DNA
accactgggcaggtgggtgg

SEQ ID NO: 9111 - DNA, 20 bp, synthetic construct
  source 1..20: mol_type = other DNA
ctgggaaccactgggcaggt

SEQ ID NO: 9112 - DNA, 20 bp, synthetic construct
  source 1..20: mol_type = other DNA
ggctcccatcacctacccgc

SEQ ID NO: 9113 - DNA, 20 bp, synthetic construct
  source 1..20: mol_type = other DNA
gcaggccatcaagtgtgtgg

SEQ ID NO: 9114 - DNA, 20 bp, synthetic construct
  source 1..20: mol_type = other DNA
tcctggggacagagcaagcg

SEQ ID NO: 9115 - DNA, 20 bp, synthetic construct
  source 1..20: mol_type = other DNA
ccccagcacacccatcatcc

SEQ ID NO: 9116 - DNA, 20 bp, synthetic construct
  source 1..20: mol_type = other DNA
aggccctgcgggtaggtgat

SEQ ID NO: 9117 - DNA, 20 bp, synthetic construct
  source 1..20: mol_type = other DNA
gtcgtcccgcaggtccagct

SEQ ID NO: 9118 - DNA, 20 bp, synthetic construct
  source 1..20: mol_type = other DNA
tacaccaccaacgcctttcc

SEQ ID NO: 9119 - DNA, 20 bp, synthetic construct
  source 1..20: mol_type = other DNA
gaggcccataccaatctcct

SEQ ID NO: 9120 - DNA, 20 bp, synthetic construct
  source 1..20: mol_type = other DNA
gaaccactgggcaggtgggt

SEQ ID NO: 9121 - DNA, 20 bp, synthetic construct
  source 1..20: mol_type = other DNA
gtctggttggggagatggac

SEQ ID NO: 9122 - DNA, 20 bp, synthetic construct
  source 1..20: mol_type = other DNA
tgacgagggagaagcagatg

SEQ ID NO: 9123 - DNA, 20 bp, synthetic construct
  source 1..20: mol_type = other DNA
ttatgagaacgtccgcgcca

SEQ ID NO: 9124 - DNA, 20 bp, synthetic construct
  source 1..20: mol_type = other DNA
gggactcttacccctagagg

SEQ ID NO: 9125 - DNA, 20 bp, synthetic construct
  source 1..20: mol_type = other DNA
ccactgggcaggtgggtggg

SEQ ID NO: 9126 - DNA, 20 bp, synthetic construct
  source 1..20: mol_type = other DNA
acggtggggatgtactctcc

SEQ ID NO: 9127 - DNA, 20 bp, synthetic construct
  source 1..20: mol_type = other DNA
gtactctccgggaaaggcgt

SEQ ID NO: 9128 - DNA, 20 bp, synthetic construct
  source 1..20: mol_type = other DNA
cctgtggggagcaggcaagg

SEQ ID NO: 9129 - DNA, 20 bp, synthetic construct
  source 1..20: mol_type = other DNA
ccaggatgatgggtgtgctg

SEQ ID NO: 9130 - DNA, 20 bp, synthetic construct
  source 1..20: mol_type = other DNA
tgcccacggccctgaaagac

SEQ ID NO: 9131 - DNA, 20 bp, synthetic construct
  source 1..20: mol_type = other DNA
ttacccctagaggaggctgc

SEQ ID NO: 9132 - DNA, 20 bp, synthetic construct
  source 1..20: mol_type = other DNA
ccccaccgtgtgagttcctg

SEQ ID NO: 9133 - DNA, 20 bp, synthetic construct
  source 1..20: mol_type = other DNA
gacagcaagccagtgaacct

SEQ ID NO: 9134 - DNA, 20 bp, synthetic construct
  source 1..20: mol_type = other DNA
ggaaccactgggcaggtggg

SEQ ID NO: 9135 - DNA, 20 bp, synthetic construct
  source 1..20: mol_type = other DNA
accgagtctggttggggaga

SEQ ID NO: 9136 - DNA, 20 bp, synthetic construct
  source 1..20: mol_type = other DNA
ctggccaaggagattggtat

SEQ ID NO: 9137 - DNA, 20 bp, synthetic construct
  source 1..20: mol_type = other DNA
gaatagttgtcaaacctgtg

SEQ ID NO: 9138 - DNA, 20 bp, synthetic construct
  source 1..20: mol_type = other DNA
ggccatcaagtgtgtggtgg

SEQ ID NO: 9139 - DNA, 20 bp, synthetic construct
  source 1..20: mol_type = other DNA
ctattcagccaatgtgatgg

SEQ ID NO: 9140 - DNA, 20 bp, synthetic construct
  source 1..20: mol_type = other DNA
tgctgtgccctcagcccacg

SEQ ID NO: 9141 - DNA, 20 bp, synthetic construct
  source 1..20: mol_type = other DNA
ggacagcaagccagtgaacc

SEQ ID NO: 9142 - DNA, 20 bp, synthetic construct
  source 1..20: mol_type = other DNA
cagtgccaggccctgcgggt

SEQ ID NO: 9143 - DNA, 20 bp, synthetic construct
  source 1..20: mol_type = other DNA
agggcacagcacggcccgga

SEQ ID NO: 9144 - DNA, 20 bp, synthetic construct
  source 1..20: mol_type = other DNA
aaacctgtggggagcaggca

SEQ ID NO: 9145 - DNA, 20 bp, synthetic construct
  source 1..20: mol_type = other DNA
gatgcaggccatcaagtgtg

SEQ ID NO: 9146 - DNA, 20 bp, synthetic construct
  source 1..20: mol_type = other DNA
tcccaccaccacacacttga

SEQ ID NO: 9147 - DNA, 20 bp, synthetic construct
  source 1..20: mol_type = other DNA
gcgccaaggtgagctggaca

SEQ ID NO: 9148 - DNA, 20 bp, synthetic construct
  source 1..20: mol_type = other DNA
tcccacagccccaggttcac

SEQ ID NO: 9149 - DNA, 20 bp, synthetic construct
  source 1..20: mol_type = other DNA
atccccaccgtgtgagttcc

SEQ ID NO: 9150 - DNA, 20 bp, synthetic construct
  source 1..20: mol_type = other DNA
gagaaggcaggtcttgccca

SEQ ID NO: 9151 - DNA, 20 bp, synthetic construct
  source 1..20: mol_type = other DNA
tggccagtgccaggccctgc

SEQ ID NO: 9152 - DNA, 20 bp, synthetic construct
  source 1..20: mol_type = other DNA
ggcagtggtgccgcacttct

SEQ ID NO: 9153 - DNA, 20 bp, synthetic construct
  source 1..20: mol_type = other DNA
ctctccgggaaaggcgttgg

SEQ ID NO: 9154 - DNA, 20 bp, synthetic construct
  source 1..20: mol_type = other DNA
ttggtgcccaccaggatgat

SEQ ID NO: 9155 - DNA, 20 bp, synthetic construct
  source 1..20: mol_type = other DNA
tatttcaccgagtctggttg

SEQ ID NO: 9156 - DNA, 20 bp, synthetic construct
  source 1..20: mol_type = other DNA
cgcgccaaggtgagctggac

SEQ ID NO: 9157 - DNA, 20 bp, synthetic construct
  source 1..20: mol_type = other DNA
cagcagtgtcccacagcccc

SEQ ID NO: 9158 - DNA, 20 bp, synthetic construct
  source 1..20: mol_type = other DNA
gcagcacaccgtctgtggat

SEQ ID NO: 9159 - DNA, 20 bp, synthetic construct
  source 1..20: mol_type = other DNA
cataagaggctgggctgacg

SEQ ID NO: 9160 - DNA, 20 bp, synthetic construct
  source 1..20: mol_type = other DNA
accaggatgatgggtgtgct

SEQ ID NO: 9161 - DNA, 20 bp, synthetic construct
  source 1..20: mol_type = other DNA
tccaggtatttcaccgagtc

SEQ ID NO: 9162 - DNA, 20 bp, synthetic construct
  source 1..20: mol_type = other DNA
cagatgaggaagacgtcctg

SEQ ID NO: 9163 - DNA, 20 bp, synthetic construct
  source 1..20: mol_type = other DNA
tgctcagctctcacccagag

SEQ ID NO: 9164 - DNA, 20 bp, synthetic construct
  source 1..20: mol_type = other DNA
ctagagaaactgttgcataa

SEQ ID NO: 9165 - DNA, 20 bp, synthetic construct
  source 1..20: mol_type = other DNA
atttacctgaacctctgaat

SEQ ID NO: 9166 - DNA, 20 bp, synthetic construct
  source 1..20: mol_type = other DNA
tgcagcagcagtcgtacaag

SEQ ID NO: 9167 - DNA, 20 bp, synthetic construct
  source 1..20: mol_type = other DNA
catcatctcatccagacatc

SEQ ID NO: 9168 - DNA, 20 bp, synthetic construct
  source 1..20: mol_type = other DNA
actaagaaaaaacaaacaca

SEQ ID NO: 9169 - DNA, 20 bp, synthetic construct
  source 1..20: mol_type = other DNA
catggcatgccttgatgcta

SEQ ID NO: 9170 - DNA, 20 bp, synthetic construct
  source 1..20: mol_type = other DNA
cctctcatcaagcctggtaa

SEQ ID NO: 9171 - DNA, 20 bp, synthetic construct
  source 1..20: mol_type = other DNA
ttctgtacctcatcaagaat

SEQ ID NO: 9172 - DNA, 20 bp, synthetic construct
  source 1..20: mol_type = other DNA
actacctggctgtttgtggt

SEQ ID NO: 9173 - DNA, 20 bp, synthetic construct
  source 1..20: mol_type = other DNA
ccaagaactaaatggggaaa

SEQ ID NO: 9174 - DNA, 20 bp, synthetic construct
  source 1..20: mol_type = other DNA
gcctgttgactccaattcag

SEQ ID NO: 9175 - DNA, 20 bp, synthetic construct
  source 1..20: mol_type = other DNA
tcatcatctcatccagacat

SEQ ID NO: 9176 - DNA, 20 bp, synthetic construct
  source 1..20: mol_type = other DNA
ttacaaagagatctccgtat

SEQ ID NO: 9177 - DNA, 20 bp, synthetic construct
  source 1..20: mol_type = other DNA
cttctacacagttatttgcc

SEQ ID NO: 9178 - DNA, 20 bp, synthetic construct
  source 1..20: mol_type = other DNA
tcctctcatcaagcctggta

SEQ ID NO: 9179 - DNA, 20 bp, synthetic construct
  source 1..20: mol_type = other DNA
ttgctacagccaagagacaa

SEQ ID NO: 9180 - DNA, 20 bp, synthetic construct
  source 1..20: mol_type = other DNA
tacaaactttgggaagctgg

SEQ ID NO: 9181 - DNA, 20 bp, synthetic construct
  source 1..20: mol_type = other DNA
attacttggaacatcttcat

SEQ ID NO: 9182 - DNA, 20 bp, synthetic construct
  source 1..20: mol_type = other DNA
cagctttggccatttatgag

SEQ ID NO: 9183 - DNA, 20 bp, synthetic construct
  source 1..20: mol_type = other DNA
ggtgcagcagcagtcgtaca

SEQ ID NO: 9184 - DNA, 20 bp, synthetic construct
  source 1..20: mol_type = other DNA
ctgtaccataaatttggacc

SEQ ID NO: 9185 - DNA, 20 bp, synthetic construct
  source 1..20: mol_type = other DNA
ctaggaaaacatcttggact

SEQ ID NO: 9186 - DNA, 20 bp, synthetic construct
  source 1..20: mol_type = other DNA
ttccctggctacccgatgtc

SEQ ID NO: 9187 - DNA, 20 bp, synthetic construct
  source 1..20: mol_type = other DNA
tctcacctaggaaaacatct

SEQ ID NO: 9188 - DNA, 20 bp, synthetic construct
  source 1..20: mol_type = other DNA
gctcaaggaagaactcggat

SEQ ID NO: 9189 - DNA, 20 bp, synthetic construct
  source 1..20: mol_type = other DNA
cccttaccaggcttgatgag

SEQ ID NO: 9190 - DNA, 20 bp, synthetic construct
  source 1..20: mol_type = other DNA
tgactccaattcagaggttc

SEQ ID NO: 9191 - DNA, 20 bp, synthetic construct
  source 1..20: mol_type = other DNA
cacaactacctggctgtttg

SEQ ID NO: 9192 - DNA, 20 bp, synthetic construct
  source 1..20: mol_type = other DNA
cttactgtacaacaagctgc

SEQ ID NO: 9193 - DNA, 20 bp, synthetic construct
  source 1..20: mol_type = other DNA
caagaactaaatggggaaat

SEQ ID NO: 9194 - DNA, 20 bp, synthetic construct
  source 1..20: mol_type = other DNA
gtgcagcagcagtcgtacaa

SEQ ID NO: 9195 - DNA, 20 bp, synthetic construct
  source 1..20: mol_type = other DNA
tgaacacttactggatgatg

SEQ ID NO: 9196 - DNA, 20 bp, synthetic construct
  source 1..20: mol_type = other DNA
gatattggctaaatacagaa

SEQ ID NO: 9197 - DNA, 20 bp, synthetic construct
  source 1..20: mol_type = other DNA
tatttaatcgaagagacccc

SEQ ID NO: 9198 - DNA, 20 bp, synthetic construct
  source 1..20: mol_type = other DNA
tggtcattcctgttccaatg

SEQ ID NO: 9199 - DNA, 20 bp, synthetic construct
  source 1..20: mol_type = other DNA
gtcccagttccaggtagaag

SEQ ID NO: 9200 - DNA, 20 bp, synthetic construct
  source 1..20: mol_type = other DNA
ctagtccaagatgttttcct

SEQ ID NO: 9201 - DNA, 20 bp, synthetic construct
  source 1..20: mol_type = other DNA
tatacaaactttgggaagct

SEQ ID NO: 9202 - DNA, 20 bp, synthetic construct
  source 1..20: mol_type = other DNA
atacaaactttgggaagctg

SEQ ID NO: 9203 - DNA, 20 bp, synthetic construct
  source 1..20: mol_type = other DNA
ggtcgcaaatgaaaagtatg

SEQ ID NO: 9204 - DNA, 20 bp, synthetic construct
  source 1..20: mol_type = other DNA
gactaagaaaaaacaaacac

SEQ ID NO: 9205 - DNA, 20 bp, synthetic construct
  source 1..20: mol_type = other DNA
tttcatccaagaactaaatg

SEQ ID NO: 9206 - DNA, 20 bp, synthetic construct
  source 1..20: mol_type = other DNA
atccagacatcgggtagcca

SEQ ID NO: 9207 - DNA, 20 bp, synthetic construct
  source 1..20: mol_type = other DNA
cgatcctgaaaattgaaaac

SEQ ID NO: 9208 - DNA, 20 bp, synthetic construct
  source 1..20: mol_type = other DNA
catcttagagtttaacagat

SEQ ID NO: 9209 - DNA, 20 bp, synthetic construct
  source 1..20: mol_type = other DNA
tacccttctttcaggtgcac

SEQ ID NO: 9210 - DNA, 20 bp, synthetic construct
  source 1..20: mol_type = other DNA
acctctgaattggagtcaac

SEQ ID NO: 9211 - DNA, 20 bp, synthetic construct
  source 1..20: mol_type = other DNA
cagcccggagccgagtcgga

SEQ ID NO: 9212 - DNA, 20 bp, synthetic construct
  source 1..20: mol_type = other DNA
ccagtggccgctcaggtagg

SEQ ID NO: 9213 - DNA, 20 bp, synthetic construct
  source 1..20: mol_type = other DNA
cagccagtggccgctcaggt

SEQ ID NO: 9214 - DNA, 20 bp, synthetic construct
  source 1..20: mol_type = other DNA
cgctcaggtaggcggacggg

SEQ ID NO: 9215 - DNA, 20 bp, synthetic construct
  source 1..20: mol_type = other DNA
gtaggaagagccgcaccagc

SEQ ID NO: 9216 - DNA, 20 bp, synthetic construct
  source 1..20: mol_type = other DNA
cggacgggtggtagacggtg

SEQ ID NO: 9217 - DNA, 20 bp, synthetic construct
  source 1..20: mol_type = other DNA
catcctggcagtggagaagc

SEQ ID NO: 9218 - DNA, 20 bp, synthetic construct
  source 1..20: mol_type = other DNA
tgaggcgcttctggttgcac

SEQ ID NO: 9219 - DNA, 20 bp, synthetic construct
  source 1..20: mol_type = other DNA
agcacagccagtggccgctc

SEQ ID NO: 9220 - DNA, 20 bp, synthetic construct
  source 1..20: mol_type = other DNA
gcccaaggacggaagcgctt

SEQ ID NO: 9221 - DNA, 20 bp, synthetic construct
  source 1..20: mol_type = other DNA
tctcccggcaaacctcgccc

SEQ ID NO: 9222 - DNA, 20 bp, synthetic construct
  source 1..20: mol_type = other DNA
gtaggcggacgggtggtaga

SEQ ID NO: 9223 - DNA, 20 bp, synthetic construct
  source 1..20: mol_type = other DNA
cacccgtccgcctacctgag

SEQ ID NO: 9224 - DNA, 20 bp, synthetic construct
  source 1..20: mol_type = other DNA
cgagcagcccggagccgagt

SEQ ID NO: 9225 - DNA, 20 bp, synthetic construct
  source 1..20: mol_type = other DNA
ggtagacggtgaggcgcttc

SEQ ID NO: 9226 - DNA, 20 bp, synthetic construct
  source 1..20: mol_type = other DNA
cctccagcttctccactgcc

SEQ ID NO: 9227 - DNA, 20 bp, synthetic construct
  source 1..20: mol_type = other DNA
tgtgtcacagctcaatctcg

SEQ ID NO: 9228 - DNA, 20 bp, synthetic construct
  source 1..20: mol_type = other DNA
tctgttatccaatacctaca

SEQ ID NO: 9229 - DNA, 20 bp, synthetic construct
  source 1..20: mol_type = other DNA
caactcaaatgtgagtgtca

SEQ ID NO: 9230 - DNA, 20 bp, synthetic construct
  source 1..20: mol_type = other DNA
atccaatacctacaaggagg

SEQ ID NO: 9231 - DNA, 20 bp, synthetic construct
  source 1..20: mol_type = other DNA
cactgatggctgtgataggt

SEQ ID NO: 9232 - DNA, 20 bp, synthetic construct
  source 1..20: mol_type = other DNA
cagaatggggatcttgaagt

SEQ ID NO: 9233 - DNA, 20 bp, synthetic construct
  source 1..20: mol_type = other DNA
aaaaactcactggagctctg

SEQ ID NO: 9234 - DNA, 20 bp, synthetic construct
  source 1..20: mol_type = other DNA
tccggaaagacttgaactca

SEQ ID NO: 9235 - DNA, 20 bp, synthetic construct
  source 1..20: mol_type = other DNA
gtaattgtcgtagtttctgg

SEQ ID NO: 9236 - DNA, 20 bp, synthetic construct
  source 1..20: mol_type = other DNA
acaaaaagtgggcttcaggt

SEQ ID NO: 9237 - DNA, 20 bp, synthetic construct
  source 1..20: mol_type = other DNA
actgcagatcaaagcagaac

SEQ ID NO: 9238 - DNA, 20 bp, synthetic construct
  source 1..20: mol_type = other DNA
ctcggagctgcggcgtgggg

SEQ ID NO: 9239 - DNA, 20 bp, synthetic construct
  source 1..20: mol_type = other DNA
acagttcatcccgcagtctg

SEQ ID NO: 9240 - DNA, 20 bp, synthetic construct
  source 1..20: mol_type = other DNA
tgtgcaacggcatctcccag

SEQ ID NO: 9241 - DNA, 20 bp, synthetic construct
  source 1..20: mol_type = other DNA
ttatccaatacctacaagga

SEQ ID NO: 9242 - DNA, 20 bp, synthetic construct
  source 1..20: mol_type = other DNA
ccctacctataaggatgctt

SEQ ID NO: 9243 - DNA, 20 bp, synthetic construct
  source 1..20: mol_type = other DNA
tattgaagttctgtagttgg

SEQ ID NO: 9244 - DNA, 20 bp, synthetic construct
  source 1..20: mol_type = other DNA
aatacactgatggctgtgat

SEQ ID NO: 9245 - DNA, 20 bp, synthetic construct
  source 1..20: mol_type = other DNA
ctcaaggtaggtgaggtgct

SEQ ID NO: 9246 - DNA, 20 bp, synthetic construct
  source 1..20: mol_type = other DNA
caatagatcgctccatggtg

SEQ ID NO: 9247 - DNA, 20 bp, synthetic construct
  source 1..20: mol_type = other DNA
tcacaaacaatgcaaagatc

SEQ ID NO: 9248 - DNA, 20 bp, synthetic construct
  source 1..20: mol_type = other DNA
cgatctattgctctgtgcaa

SEQ ID NO: 9249 - DNA, 20 bp, synthetic construct
  source 1..20: mol_type = other DNA
cagctcaatctcgaggctca

SEQ ID NO: 9250 - DNA, 20 bp, synthetic construct
  source 1..20: mol_type = other DNA
acagaacttcaatacactga

SEQ ID NO: 9251 - DNA, 20 bp, synthetic construct
  source 1..20: mol_type = other DNA
gaaagacttgaactcaaggt

SEQ ID NO: 9252 - DNA, 20 bp, synthetic construct
  source 1..20: mol_type = other DNA
caggaactggtgaaagctaa

SEQ ID NO: 9253 - DNA, 20 bp, synthetic construct
  source 1..20: mol_type = other DNA
gaagcccagtccactactac

SEQ ID NO: 9254 - DNA, 20 bp, synthetic construct
  source 1..20: mol_type = other DNA
tatccaatacctacaaggag

SEQ ID NO: 9255 - DNA, 20 bp, synthetic construct
  source 1..20: mol_type = other DNA
caagtccttgttagcctcca

SEQ ID NO: 9256 - DNA, 20 bp, synthetic construct
  source 1..20: mol_type = other DNA
tgagatgcacacccagaatg

SEQ ID NO: 9257 - DNA, 20 bp, synthetic construct
  source 1..20: mol_type = other DNA
acactgatggctgtgatagg

SEQ ID NO: 9258 - DNA, 20 bp, synthetic construct
  source 1..20: mol_type = other DNA
gttatccaatacctacaagg

SEQ ID NO: 9259 - DNA, 20 bp, synthetic construct
  source 1..20: mol_type = other DNA
ttctgctcggagctgcggcg

SEQ ID NO: 9260 - DNA, 20 bp, synthetic construct
  source 1..20: mol_type = other DNA
cctaaagggaaaggagaatg

SEQ ID NO: 9261 - DNA, 20 bp, synthetic construct
  source 1..20: mol_type = other DNA
gttccagatggtcaaagagc

SEQ ID NO: 9262 - DNA, 20 bp, synthetic construct
  source 1..20: mol_type = other DNA
tcaggaactggtgaaagcta

SEQ ID NO: 9263 - DNA, 20 bp, synthetic construct
  source 1..20: mol_type = other DNA
ttccagatggtcaaagagca

SEQ ID NO: 9264 - DNA, 20 bp, synthetic construct
  source 1..20: mol_type = other DNA
tacttacatccaccatcctc

SEQ ID NO: 9265 - DNA, 20 bp, synthetic construct
  source 1..20: mol_type = other DNA
ctcccagtgggtacaactga

SEQ ID NO: 9266 - DNA, 20 bp, synthetic construct
  source 1..20: mol_type = other DNA
gcacagttgtcacaaaaagt

SEQ ID NO: 9267 - DNA, 20 bp, synthetic construct
  source 1..20: mol_type = other DNA
gacaattaccggcgagccta

SEQ ID NO: 9268 - DNA, 20 bp, synthetic construct
  source 1..20: mol_type = other DNA
tgaccttattgatttcatgt

SEQ ID NO: 9269 - DNA, 20 bp, synthetic construct
  source 1..20: mol_type = other DNA
tttcctatgcccgggaacca

SEQ ID NO: 9270 - DNA, 20 bp, synthetic construct
  source 1..20: mol_type = other DNA
atagctcttctggttccaga

SEQ ID NO: 9271 - DNA, 20 bp, synthetic construct
  source 1..20: mol_type = other DNA
cctggatctttactacactg

SEQ ID NO: 9272 - DNA, 20 bp, synthetic construct
  source 1..20: mol_type = other DNA
ctgaccttattgatttcatg

SEQ ID NO: 9273 - DNA, 20 bp, synthetic construct
  source 1..20: mol_type = other DNA
ctgcagatcaaagcagaaca

SEQ ID NO: 9274 - DNA, 20 bp, synthetic construct
  source 1..20: mol_type = other DNA
gcccagtccactactactgg

SEQ ID NO: 9275 - DNA, 20 bp, synthetic construct
  source 1..20: mol_type = other DNA
tgtatagggccagtagctta

SEQ ID NO: 9276 - DNA, 20 bp, synthetic construct
  source 1..20: mol_type = other DNA
tccctgccggcagatgacca

SEQ ID NO: 9277 - DNA, 20 bp, synthetic construct
  source 1..20: mol_type = other DNA
cttgagatgcacacccagaa

SEQ ID NO: 9278 - DNA, 20 bp, synthetic construct
  source 1..20: mol_type = other DNA
tctgctcggagctgcggcgt

SEQ ID NO: 9279 - DNA, 20 bp, synthetic construct
  source 1..20: mol_type = other DNA
ctcagtgtagtaaagatcca

SEQ ID NO: 9280 - DNA, 20 bp, synthetic construct
  source 1..20: mol_type = other DNA
ccaaggctgtgattcagtct

SEQ ID NO: 9281 - DNA, 20 bp, synthetic construct
  source 1..20: mol_type = other DNA
gtgcaacggcatctcccagt

SEQ ID NO: 9282 - DNA, 20 bp, synthetic construct
  source 1..20: mol_type = other DNA
tctctctgccccgccctggc

SEQ ID NO: 9283 - DNA, 20 bp, synthetic construct
  source 1..20: mol_type = other DNA
tctcgatgtgctccaccacg

SEQ ID NO: 9284 - DNA, 20 bp, synthetic construct
  source 1..20: mol_type = other DNA
ctgtgcatgggtgagggtga

SEQ ID NO: 9285 - DNA, 20 bp, synthetic construct
  source 1..20: mol_type = other DNA
tctgcaccttgtcacacagt

SEQ ID NO: 9286 - DNA, 20 bp, synthetic construct
  source 1..20: mol_type = other DNA
gctgaccttgatggtggggt

SEQ ID NO: 9287 - DNA, 20 bp, synthetic construct
  source 1..20: mol_type = other DNA
tcactgagctcccggtcgga

SEQ ID NO: 9288 - DNA, 20 bp, synthetic construct
  source 1..20: mol_type = other DNA
gcgacctcaccgtccatggc

SEQ ID NO: 9289 - DNA, 20 bp, synthetic construct
  source 1..20: mol_type = other DNA
cctttcctacaagctcgtgg

SEQ ID NO: 9290 - DNA, 20 bp, synthetic construct
  source 1..20: mol_type = other DNA
gaagaagcgggacctggagc

SEQ ID NO: 9291 - DNA, 20 bp, synthetic construct
  source 1..20: mol_type = other DNA
agggagatgcgcactgtccc

SEQ ID NO: 9292 - DNA, 20 bp, synthetic construct
  source 1..20: mol_type = other DNA
tggcaggtactggaattcca

SEQ ID NO: 9293 - DNA, 20 bp, synthetic construct
  source 1..20: mol_type = other DNA
ttccagtacctgccagatac

SEQ ID NO: 9294 - DNA, 20 bp, synthetic construct
  source 1..20: mol_type = other DNA
gagaaaggacaggcggcagg

SEQ ID NO: 9295 - DNA, 20 bp, synthetic construct
  source 1..20: mol_type = other DNA
cgacctcaccgtccatggcc

SEQ ID NO: 9296 - DNA, 20 bp, synthetic construct
  source 1..20: mol_type = other DNA
gacctcacctgtggatgcag

SEQ ID NO: 9297 - DNA, 20 bp, synthetic construct
  source 1..20: mol_type = other DNA
tcaaggtcagcactgcgcca

SEQ ID NO: 9298 - DNA, 20 bp, synthetic construct
  source 1..20: mol_type = other DNA
ggtgcagaaaggtatacatc

SEQ ID NO: 9299 - DNA, 20 bp, synthetic construct
  source 1..20: mol_type = other DNA
gcagtgctgaccttgatggt

SEQ ID NO: 9300 - DNA, 20 bp, synthetic construct
  source 1..20: mol_type = other DNA
attgagcagcccaagcagcg

SEQ ID NO: 9301 - DNA, 20 bp, synthetic construct
  source 1..20: mol_type = other DNA
gcgctcagtttccagaacct

SEQ ID NO: 9302 - DNA, 20 bp, synthetic construct
  source 1..20: mol_type = other DNA
tactcacgattgtcaaagat

SEQ ID NO: 9303 - DNA, 20 bp, synthetic construct
  source 1..20: mol_type = other DNA
gcagaaaggtatacatcagg

SEQ ID NO: 9304 - DNA, 20 bp, synthetic construct
  source 1..20: mol_type = other DNA
tgccagagtttcggttcact

SEQ ID NO: 9305 - DNA, 20 bp, synthetic construct
  source 1..20: mol_type = other DNA
aacaaccccttccaaggtga

SEQ ID NO: 9306 - DNA, 20 bp, synthetic construct
  source 1..20: mol_type = other DNA
gtcctctgcaggagatgcgg

SEQ ID NO: 9307 - DNA, 20 bp, synthetic construct
  source 1..20: mol_type = other DNA
gatgagaaaggacaggcggc

SEQ ID NO: 9308 - DNA, 20 bp, synthetic construct
  source 1..20: mol_type = other DNA
cccccacgagcttgtaggaa

SEQ ID NO: 9309 - DNA, 20 bp, synthetic construct
  source 1..20: mol_type = other DNA
tgccgagtgaaccgaaactc

SEQ ID NO: 9310 - DNA, 20 bp, synthetic construct
  source 1..20: mol_type = other DNA
gtgcacatcagcttgcgaaa

SEQ ID NO: 9311 - DNA, 20 bp, synthetic construct
  source 1..20: mol_type = other DNA
agacgatcgtcaccggattg

SEQ ID NO: 9312 - DNA, 20 bp, synthetic construct
  source 1..20: mol_type = other DNA
ctacaggacccaccgacccc

SEQ ID NO: 9313 - DNA, 20 bp, synthetic construct
  source 1..20: mol_type = other DNA
ggacagatcaatggctacac

SEQ ID NO: 9314 - DNA, 20 bp, synthetic construct
  source 1..20: mol_type = other DNA
gctgtgtacctgtatctggc

SEQ ID NO: 9315 - DNA, 20 bp, synthetic construct
  source 1..20: mol_type = other DNA
tgctgaccttgatggtgggg

SEQ ID NO: 9316 - DNA, 20 bp, synthetic construct
  source 1..20: mol_type = other DNA
agctgcatggagacacgcac

SEQ ID NO: 9317 - DNA, 20 bp, synthetic construct
  source 1..20: mol_type = other DNA
tcattgagcagcccaagcag

SEQ ID NO: 9318 - DNA, 20 bp, synthetic construct
  source 1..20: mol_type = other DNA
ctttcccagacgatcgtcac

SEQ ID NO: 9319 - DNA, 20 bp, synthetic construct
  source 1..20: mol_type = other DNA
atacaggtacacagctgggg

SEQ ID NO: 9320 - DNA, 20 bp, synthetic construct
  source 1..20: mol_type = other DNA
cagtgctgaccttgatggtg

SEQ ID NO: 9321 - DNA, 20 bp, synthetic construct
  source 1..20: mol_type = other DNA
ggcaggtactggaattccat

SEQ ID NO: 9322 - DNA, 20 bp, synthetic construct
  source 1..20: mol_type = other DNA
ggtttgccctcaccttggaa

SEQ ID NO: 9323 - DNA, 20 bp, synthetic construct
  source 1..20: mol_type = other DNA
ctactcacgattgtcaaaga

SEQ ID NO: 9324 - DNA, 20 bp, synthetic construct
  source 1..20: mol_type = other DNA
ggcgctcagtttccagaacc

SEQ ID NO: 9325 - DNA, 20 bp, synthetic construct
  source 1..20: mol_type = other DNA
gatcgtctgggaaagtaagg

SEQ ID NO: 9326 - DNA, 20 bp, synthetic construct
  source 1..20: mol_type = other DNA
gtccatggccggggtcccgg

SEQ ID NO: 9327 - DNA, 20 bp, synthetic construct
  source 1..20: mol_type = other DNA
ggaagatctcatccccaccg

SEQ ID NO: 9328 - DNA, 20 bp, synthetic construct
  source 1..20: mol_type = other DNA
gacattgaggtgtatttcac

SEQ ID NO: 9329 - DNA, 20 bp, synthetic construct
  source 1..20: mol_type = other DNA
cgtccatggccggggtcccg

SEQ ID NO: 9330 - DNA, 20 bp, synthetic construct
  source 1..20: mol_type = other DNA
acctgaggcagtgaaaacaa

SEQ ID NO: 9331 - DNA, 20 bp, synthetic construct
  source 1..20: mol_type = other DNA
aatgtcctctgcaggagatg

SEQ ID NO: 9332 - DNA, 20 bp, synthetic construct
  source 1..20: mol_type = other DNA
acctgtggatgcagcggtcc

SEQ ID NO: 9333 - DNA, 20 bp, synthetic construct
  source 1..20: mol_type = other DNA
gaccccggccatggacggtg

SEQ ID NO: 9334 - DNA, 20 bp, synthetic construct
  source 1..20: mol_type = other DNA
cagatacaggtacacagctg

SEQ ID NO: 9335 - DNA, 20 bp, synthetic construct
  source 1..20: mol_type = other DNA
tacacctcaatgtcctctgc

SEQ ID NO: 9336 - DNA, 20 bp, synthetic construct
  source 1..20: mol_type = other DNA
cacctgtggatgcagcggtc

SEQ ID NO: 9337 - DNA, 20 bp, synthetic construct
  source 1..20: mol_type = other DNA
gtttgccctcaccttggaag

SEQ ID NO: 9338 - DNA, 20 bp, synthetic construct
  source 1..20: mol_type = other DNA
aaaggtatacatcaggaggc

SEQ ID NO: 9339 - DNA, 20 bp, synthetic construct
  source 1..20: mol_type = other DNA
ttgatctgtccaaagtacag

SEQ ID NO: 9340 - DNA, 20 bp, synthetic construct
  source 1..20: mol_type = other DNA
gaatccagtgtgtgaagaag

SEQ ID NO: 9341 - DNA, 20 bp, synthetic construct
  source 1..20: mol_type = other DNA
acggagcagcccaagcagcg

SEQ ID NO: 9342 - DNA, 20 bp, synthetic construct
  source 1..20: mol_type = other DNA
aaaacacatcagtataacat

SEQ ID NO: 9343 - DNA, 20 bp, synthetic construct
  source 1..20: mol_type = other DNA
gacagaaatgcttgacttct

SEQ ID NO: 9344 - DNA, 20 bp, synthetic construct
  source 1..20: mol_type = other DNA
gatccttcttattcccaacc

SEQ ID NO: 9345 - DNA, 20 bp, synthetic construct
  source 1..20: mol_type = other DNA
acagaaatgcttgacttctg

SEQ ID NO: 9346 - DNA, 20 bp, synthetic construct
  source 1..20: mol_type = other DNA
aggaagattatgatcgcctg

SEQ ID NO: 9347 - DNA, 20 bp, synthetic construct
  source 1..20: mol_type = other DNA
atcggtatctgggtaggaga

SEQ ID NO: 9348 - DNA, 20 bp, synthetic construct
  source 1..20: mol_type = other DNA
aacgtgcccatcatcctggt

SEQ ID NO: 9349 - DNA, 20 bp, synthetic construct
  source 1..20: mol_type = other DNA
cagcaaggaccagttcccag

SEQ ID NO: 9350 - DNA, 20 bp, synthetic construct
  source 1..20: mol_type = other DNA
agcatcaagtgcgtggtggt

SEQ ID NO: 9351 - DNA, 20 bp, synthetic construct
  source 1..20: mol_type = other DNA
ggtaggagagtgtacggagg

SEQ ID NO: 9352 - DNA, 20 bp, synthetic construct
  source 1..20: mol_type = other DNA
gccagtgcctggccctgctg

SEQ ID NO: 9353 - DNA, 20 bp, synthetic construct
  source 1..20: mol_type = other DNA
gagggtaggagagtgtacgg

SEQ ID NO: 9354 - DNA, 20 bp, synthetic construct
  source 1..20: mol_type = other DNA
gagcatcaagtgcgtggtgg

SEQ ID NO: 9355 - DNA, 20 bp, synthetic construct
  source 1..20: mol_type = other DNA
tgtgaccctggcacttggct

SEQ ID NO: 9356 - DNA, 20 bp, synthetic construct
  source 1..20: mol_type = other DNA
tgggtggccaccaccagcac

SEQ ID NO: 9357 - DNA, 20 bp, synthetic construct
  source 1..20: mol_type = other DNA
gtgctcagcccttagcaatc

SEQ ID NO: 9358 - DNA, 20 bp, synthetic construct
  source 1..20: mol_type = other DNA
ttccatggcattgacgcagg

SEQ ID NO: 9359 - DNA, 20 bp, synthetic construct
  source 1..20: mol_type = other DNA
caggggccggatgcttctga

SEQ ID NO: 9360 - DNA, 20 bp, synthetic construct
  source 1..20: mol_type = other DNA
caccacgtctgcctgctggt

SEQ ID NO: 9361 - DNA, 20 bp, synthetic construct
  source 1..20: mol_type = other DNA
tgtggggaaaacctctctgt

SEQ ID NO: 9362 - DNA, 20 bp, synthetic construct
  source 1..20: mol_type = other DNA
cacagtgtacgagaacacag

SEQ ID NO: 9363 - DNA, 20 bp, synthetic construct
  source 1..20: mol_type = other DNA
cccttccatggcattgacgc

SEQ ID NO: 9364 - DNA, 20 bp, synthetic construct
  source 1..20: mol_type = other DNA
gctgtactccccgattgcta

SEQ ID NO: 9365 - DNA, 20 bp, synthetic construct
  source 1..20: mol_type = other DNA
tcagcaccacgtctgcctgc

SEQ ID NO: 9366 - DNA, 20 bp, synthetic construct
  source 1..20: mol_type = other DNA
tggccacccagactgaccag

SEQ ID NO: 9367 - DNA, 20 bp, synthetic construct
  source 1..20: mol_type = other DNA
ggccacccagactgaccagc

SEQ ID NO: 9368 - DNA, 20 bp, synthetic construct
  source 1..20: mol_type = other DNA
cggctgtgtcccagaggccc

SEQ ID NO: 9369 - DNA, 20 bp, synthetic construct
  source 1..20: mol_type = other DNA
cagactgaccagcgggagat

SEQ ID NO: 9370 - DNA, 20 bp, synthetic construct
  source 1..20: mol_type = other DNA
tgagcactccaggtagccct

SEQ ID NO: 9371 - DNA, 20 bp, synthetic construct
  source 1..20: mol_type = other DNA
cccagaggcccaggctgatc

SEQ ID NO: 9372 - DNA, 20 bp, synthetic construct
  source 1..20: mol_type = other DNA
ccacagtgtacgagaacaca

SEQ ID NO: 9373 - DNA, 20 bp, synthetic construct
  source 1..20: mol_type = other DNA
ctgtacccctgtgctggtgg

SEQ ID NO: 9374 - DNA, 20 bp, synthetic construct
  source 1..20: mol_type = other DNA
gcccaggatgtcagagccaa

SEQ ID NO: 9375 - DNA, 20 bp, synthetic construct
  source 1..20: mol_type = other DNA
ttccatcaagtgcgtgttgg

SEQ ID NO: 9376 - DNA, 20 bp, synthetic construct
  source 1..20: mol_type = other DNA
cctgctggtaggacaggggc

SEQ ID NO: 9377 - DNA, 20 bp, synthetic construct
  source 1..20: mol_type = other DNA
gtcctaccagcaggcagacg

SEQ ID NO: 9378 - DNA, 20 bp, synthetic construct
  source 1..20: mol_type = other DNA
accaccagcacaggggtaca

SEQ ID NO: 9379 - DNA, 20 bp, synthetic construct
  source 1..20: mol_type = other DNA
cgtctgcctgctggtaggac

SEQ ID NO: 9380 - DNA, 20 bp, synthetic construct
  source 1..20: mol_type = other DNA
ggtgaagcgcaccaacagag

SEQ ID NO: 9381 - DNA, 20 bp, synthetic construct
  source 1..20: mol_type = other DNA
gggtggccaccaccagcaca

SEQ ID NO: 9382 - DNA, 20 bp, synthetic construct
  source 1..20: mol_type = other DNA
agactgaccagcgggagatg

SEQ ID NO: 9383 - DNA, 20 bp, synthetic construct
  source 1..20: mol_type = other DNA
ttgacgcaggaggccctgtg

SEQ ID NO: 9384 - DNA, 20 bp, synthetic construct
  source 1..20: mol_type = other DNA
ctcccgctggtcagtctggg

SEQ ID NO: 9385 - DNA, 20 bp, synthetic construct
  source 1..20: mol_type = other DNA
gccctgtacccctgtgctgg

SEQ ID NO: 9386 - DNA, 20 bp, synthetic construct
  source 1..20: mol_type = other DNA
cttgccctgtacccctgtgc

SEQ ID NO: 9387 - DNA, 20 bp, synthetic construct
  source 1..20: mol_type = other DNA
ggcccaggatgtcagagcca

SEQ ID NO: 9388 - DNA, 20 bp, synthetic construct
  source 1..20: mol_type = other DNA
tgctcagcccttagcaatcg

SEQ ID NO: 9389 - DNA, 20 bp, synthetic construct
  source 1..20: mol_type = other DNA
caccaccagcacaggggtac

SEQ ID NO: 9390 - DNA, 20 bp, synthetic construct
  source 1..20: mol_type = other DNA
gtctgcctgctggtaggaca

SEQ ID NO: 9391 - DNA, 20 bp, synthetic construct
  source 1..20: mol_type = other DNA
gcccaccaacacgcacttga

SEQ ID NO: 9392 - DNA, 20 bp, synthetic construct
  source 1..20: mol_type = other DNA
cattgccggctgtgtcccag

SEQ ID NO: 9393 - DNA, 20 bp, synthetic construct
  source 1..20: mol_type = other DNA
tccacttgttcttcaagttc

SEQ ID NO: 9394 - DNA, 20 bp, synthetic construct
  source 1..20: mol_type = other DNA
ccagactgaccagcgggaga

SEQ ID NO: 9395 - DNA, 20 bp, synthetic construct
  source 1..20: mol_type = other DNA
ccggcccctgtcctaccagc

SEQ ID NO: 9396 - DNA, 20 bp, synthetic construct
  source 1..20: mol_type = other DNA
cccacagtgtacgagaacac

SEQ ID NO: 9397 - DNA, 20 bp, synthetic construct
  source 1..20: mol_type = other DNA
ggtggccaccaccagcacag

SEQ ID NO: 9398 - DNA, 20 bp, synthetic construct
  source 1..20: mol_type = other DNA
tgctaagggctgagcactcc

SEQ ID NO: 9399 - DNA, 20 bp, synthetic construct
  source 1..20: mol_type = other DNA
tctgcctgctggtaggacag

SEQ ID NO: 9400 - DNA, 20 bp, synthetic construct
  source 1..20: mol_type = other DNA
ggccagtttcttcccttcca

SEQ ID NO: 9401 - DNA, 20 bp, synthetic construct
  source 1..20: mol_type = other DNA
cgtccgaactgccgtcaacc

SEQ ID NO: 9402 - DNA, 20 bp, synthetic construct
  source 1..20: mol_type = other DNA
ctgtactccccgattgctaa

SEQ ID NO: 9403 - DNA, 20 bp, synthetic construct
  source 1..20: mol_type = other DNA
attgacgcaggaggccctgt

SEQ ID NO: 9404 - DNA, 20 bp, synthetic construct
  source 1..20: mol_type = other DNA
agtgtacgagaacacagggg

SEQ ID NO: 9405 - DNA, 20 bp, synthetic construct
  source 1..20: mol_type = other DNA
gttcaggaatgagttatggt

SEQ ID NO: 9406 - DNA, 20 bp, synthetic construct
  source 1..20: mol_type = other DNA
tccatcaagtgcgtgttggt

SEQ ID NO: 9407 - DNA, 20 bp, synthetic construct
  source 1..20: mol_type = other DNA
ccatttacctgttggtggca

SEQ ID NO: 9408 - DNA, 20 bp, synthetic construct
  source 1..20: mol_type = other DNA
ggaacactggtggagcgcct

SEQ ID NO: 9409 - DNA, 20 bp, synthetic construct
  source 1..20: mol_type = other DNA
ctgggccagcttccccaccg

SEQ ID NO: 9410 - DNA, 20 bp, synthetic construct
  source 1..20: mol_type = other DNA
tgctgctcctgagctgagac

SEQ ID NO: 9411 - DNA, 20 bp, synthetic construct
  source 1..20: mol_type = other DNA
tcccagacacgcctgcgtag

SEQ ID NO: 9412 - DNA, 20 bp, synthetic construct
  source 1..20: mol_type = other DNA
cccagataatctgatagtgg

SEQ ID NO: 9413 - DNA, 20 bp, synthetic construct
  source 1..20: mol_type = other DNA
gagtcttcagagtcaacacc

SEQ ID NO: 9414 - DNA, 20 bp, synthetic construct
  source 1..20: mol_type = other DNA
tgagtccacctgcttggcca

SEQ ID NO: 9415 - DNA, 20 bp, synthetic construct
  source 1..20: mol_type = other DNA
ttccccagataatctgatag

SEQ ID NO: 9416 - DNA, 20 bp, synthetic construct
  source 1..20: mol_type = other DNA
agccttgcagggcagcctcg

SEQ ID NO: 9417 - DNA, 20 bp, synthetic construct
  source 1..20: mol_type = other DNA
cgcactcgaagcagaaaacg

SEQ ID NO: 9418 - DNA, 20 bp, synthetic construct
  source 1..20: mol_type = other DNA
ggaggagatcaaggagtaca

SEQ ID NO: 9419 - DNA, 20 bp, synthetic construct
  source 1..20: mol_type = other DNA
gcagaaaacgtggaagcact

SEQ ID NO: 9420 - DNA, 20 bp, synthetic construct
  source 1..20: mol_type = other DNA
tctctttctcacgagcagcc

SEQ ID NO: 9421 - DNA, 20 bp, synthetic construct
  source 1..20: mol_type = other DNA
tctcaagacaggcaggccca

SEQ ID NO: 9422 - DNA, 20 bp, synthetic construct
  source 1..20: mol_type = other DNA
caagacgagccgcttcgcaa

SEQ ID NO: 9423 - DNA, 20 bp, synthetic construct
  source 1..20: mol_type = other DNA
caggaagttgagcctctgga

SEQ ID NO: 9424 - DNA, 20 bp, synthetic construct
  source 1..20: mol_type = other DNA
ggtacaggaagttgagcctc

SEQ ID NO: 9425 - DNA, 20 bp, synthetic construct
  source 1..20: mol_type = other DNA
ctgggcaaggacacaatggg

SEQ ID NO: 9426 - DNA, 20 bp, synthetic construct
  source 1..20: mol_type = other DNA
gtgaagaggactctctgtcg

SEQ ID NO: 9427 - DNA, 20 bp, synthetic construct
  source 1..20: mol_type = other DNA
atataaacttacagttcata

SEQ ID NO: 9428 - DNA, 20 bp, synthetic construct
  source 1..20: mol_type = other DNA
tctcagtgaaagtgccaatc

SEQ ID NO: 9429 - DNA, 20 bp, synthetic construct
  source 1..20: mol_type = other DNA
tggtgaggcaggaggtgaat

SEQ ID NO: 9430 - DNA, 20 bp, synthetic construct
  source 1..20: mol_type = other DNA
actcaccgatgagggagttg

SEQ ID NO: 9431 - DNA, 20 bp, synthetic construct
  source 1..20: mol_type = other DNA
ctcaccgatgagggagttga

SEQ ID NO: 9432 - DNA, 20 bp, synthetic construct
  source 1..20: mol_type = other DNA
cgaggcagatggccacccac

SEQ ID NO: 9433 - DNA, 20 bp, synthetic construct
  source 1..20: mol_type = other DNA
gcccagatgaaaacgagaag

SEQ ID NO: 9434 - DNA, 20 bp, synthetic construct
  source 1..20: mol_type = other DNA
ggggagcacgttccacgcga

SEQ ID NO: 9435 - DNA, 20 bp, synthetic construct
  source 1..20: mol_type = other DNA
ccaggtcccaggcttgcctg

SEQ ID NO: 9436 - DNA, 20 bp, synthetic construct
  source 1..20: mol_type = other DNA
tcctgagctcatgaggaggc

SEQ ID NO: 9437 - DNA, 20 bp, synthetic construct
  source 1..20: mol_type = other DNA
tggctcctaccagttctcca

SEQ ID NO: 9438 - DNA, 20 bp, synthetic construct
  source 1..20: mol_type = other DNA
gcagaggaagttggggctgt

SEQ ID NO: 9439 - DNA, 20 bp, synthetic construct
  source 1..20: mol_type = other DNA
tctccagggctgtggttgtc

SEQ ID NO: 9440 - DNA, 20 bp, synthetic construct
  source 1..20: mol_type = other DNA
tctcaagccgtgtgcaccac

SEQ ID NO: 9441 - DNA, 20 bp, synthetic construct
  source 1..20: mol_type = other DNA
tctcggagtgcacaggccga

SEQ ID NO: 9442 - DNA, 20 bp, synthetic construct
  source 1..20: mol_type = other DNA
ctggctctcccggatgagga

SEQ ID NO: 9443 - DNA, 20 bp, synthetic construct
  source 1..20: mol_type = other DNA
tgacagagagtaagagcctg

SEQ ID NO: 9444 - DNA, 20 bp, synthetic construct
  source 1..20: mol_type = other DNA
cggatgaggaaggcccctcc

SEQ ID NO: 9445 - DNA, 20 bp, synthetic construct
  source 1..20: mol_type = other DNA
gggtatgcctgaaaaaggag

SEQ ID NO: 9446 - DNA, 20 bp, synthetic construct
  source 1..20: mol_type = other DNA
tggcggcacagctcctgcag

SEQ ID NO: 9447 - DNA, 20 bp, synthetic construct
  source 1..20: mol_type = other DNA
taggatggtagcacacaacc

SEQ ID NO: 9448 - DNA, 20 bp, synthetic construct
  source 1..20: mol_type = other DNA
agaggcagtcgaagctctcg

SEQ ID NO: 9449 - DNA, 20 bp, synthetic construct
  source 1..20: mol_type = other DNA
agtgctccagcagctcgaag

SEQ ID NO: 9450 - DNA, 20 bp, synthetic construct
  source 1..20: mol_type = other DNA
gggcccccagtagaatccgc

SEQ ID NO: 9451 - DNA, 20 bp, synthetic construct
  source 1..20: mol_type = other DNA
gctcctgcagcggccgcacg

SEQ ID NO: 9452 - DNA, 20 bp, synthetic construct
  source 1..20: mol_type = other DNA
gggcgaaaaagcagttccgc

SEQ ID NO: 9453 - DNA, 20 bp, synthetic construct
  source 1..20: mol_type = other DNA
tgcggaagtgcgtgtcgccg

SEQ ID NO: 9454 - DNA, 20 bp, synthetic construct
  source 1..20: mol_type = other DNA
caggaaggtgcccacgggct

SEQ ID NO: 9455 - DNA, 20 bp, synthetic construct
  source 1..20: mol_type = other DNA
gcaggcgtccaggagcgcgc

SEQ ID NO: 9456 - DNA, 20 bp, synthetic construct
  source 1..20: mol_type = other DNA
cgcaccaggaaggtgcccac

SEQ ID NO: 9457 - DNA, 20 bp, synthetic construct
  source 1..20: mol_type = other DNA
agaggggccggctcaacacc

SEQ ID NO: 9458 - DNA, 20 bp, synthetic construct
  source 1..20: mol_type = other DNA
agctgaaggtcttgaggcgc

SEQ ID NO: 9459 - DNA, 20 bp, synthetic construct
  source 1..20: mol_type = other DNA
tgacgctgagcgtgaagaag

SEQ ID NO: 9460 - DNA, 20 bp, synthetic construct
  source 1..20: mol_type = other DNA
aacctgcgcatccagtgtga

SEQ ID NO: 9461 - DNA, 20 bp, synthetic construct
  source 1..20: mol_type = other DNA
agacggctgctcgggcacct

SEQ ID NO: 9462 - DNA, 20 bp, synthetic construct
  source 1..20: mol_type = other DNA
tcttggagctgaaggtcttg

SEQ ID NO: 9463 - DNA, 20 bp, synthetic construct
  source 1..20: mol_type = other DNA
cggatcagaaaggtgccggc

SEQ ID NO: 9464 - DNA, 20 bp, synthetic construct
  source 1..20: mol_type = other DNA
caggttcttggtcccagact

SEQ ID NO: 9465 - DNA, 20 bp, synthetic construct
  source 1..20: mol_type = other DNA
gcttgagcacgcagtcgaag

SEQ ID NO: 9466 - DNA, 20 bp, synthetic construct
  source 1..20: mol_type = other DNA
ttgagcacgcagtcgaagcg

SEQ ID NO: 9467 - DNA, 20 bp, synthetic construct
  source 1..20: mol_type = other DNA
tcagcgtcaagacccagtct

SEQ ID NO: 9468 - DNA, 20 bp, synthetic construct
  source 1..20: mol_type = other DNA
ctgctcagtgccgagcccgc

SEQ ID NO: 9469 - DNA, 20 bp, synthetic construct
  source 1..20: mol_type = other DNA
caagagcgagtaccagctgg

SEQ ID NO: 9470 - DNA, 20 bp, synthetic construct
  source 1..20: mol_type = other DNA
ccgtctgcccagccactccc

SEQ ID NO: 9471 - DNA, 20 bp, synthetic construct
  source 1..20: mol_type = other DNA
cgagctgtcgcggatcagaa

SEQ ID NO: 9472 - DNA, 20 bp, synthetic construct
  source 1..20: mol_type = other DNA
gcaggttcttggtcccagac

SEQ ID NO: 9473 - DNA, 20 bp, synthetic construct
  source 1..20: mol_type = other DNA
acgcagtcgaagcggggcac

SEQ ID NO: 9474 - DNA, 20 bp, synthetic construct
  source 1..20: mol_type = other DNA
cagggggatcttctcgcccc

SEQ ID NO: 9475 - DNA, 20 bp, synthetic construct
  source 1..20: mol_type = other DNA
cagcaggttcgcctcgccgc

SEQ ID NO: 9476 - DNA, 20 bp, synthetic construct
  source 1..20: mol_type = other DNA
cctgcgcatccagtgtgagg

SEQ ID NO: 9477 - DNA, 20 bp, synthetic construct
  source 1..20: mol_type = other DNA
caccactacatgccgccccc

SEQ ID NO: 9478 - DNA, 20 bp, synthetic construct
  source 1..20: mol_type = other DNA
ctgcgcatccagtgtgaggg

SEQ ID NO: 9479 - DNA, 20 bp, synthetic construct
  source 1..20: mol_type = other DNA
acctgcgcatccagtgtgag

SEQ ID NO: 9480 - DNA, 20 bp, synthetic construct
  source 1..20: mol_type = other DNA
agaagctgcccccctcacac

SEQ ID NO: 9481 - DNA, 20 bp, synthetic construct
  source 1..20: mol_type = other DNA
cttgagcacgcagtcgaagc

SEQ ID NO: 9482 - DNA, 20 bp, synthetic construct
  source 1..20: mol_type = other DNA
ttctactggagcgcagtgac

SEQ ID NO: 9483 - DNA, 20 bp, synthetic construct
  source 1..20: mol_type = other DNA
tgcaggagagcggcttctac

SEQ ID NO: 9484 - DNA, 20 bp, synthetic construct
  source 1..20: mol_type = other DNA
cacgcagtcgaagcggggca

SEQ ID NO: 9485 - DNA, 20 bp, synthetic construct
  source 1..20: mol_type = other DNA
gcggatcagaaaggtgccgg

SEQ ID NO: 9486 - DNA, 20 bp, synthetic construct
  source 1..20: mol_type = other DNA
cttaaagcggggcatcgtac

SEQ ID NO: 9487 - DNA, 20 bp, synthetic construct
  source 1..20: mol_type = other DNA
cagaaaggtgccggcgggct

SEQ ID NO: 9488 - DNA, 20 bp, synthetic construct
  source 1..20: mol_type = other DNA
cgtctgcccagccactccct

SEQ ID NO: 9489 - DNA, 20 bp, synthetic construct
  source 1..20: mol_type = other DNA
caccagctggtactcgctct

SEQ ID NO: 9490 - DNA, 20 bp, synthetic construct
  source 1..20: mol_type = other DNA
tgagcgtgaagaagtggcgc

SEQ ID NO: 9491 - DNA, 20 bp, synthetic construct
  source 1..20: mol_type = other DNA
gtcgcggatcagaaaggtgc

SEQ ID NO: 9492 - DNA, 20 bp, synthetic construct
  source 1..20: mol_type = other DNA
tctcgtggtggtaataaggg

SEQ ID NO: 9493 - DNA, 20 bp, synthetic construct
  source 1..20: mol_type = other DNA
tctcgagcatacgattcata

SEQ ID NO: 9494 - DNA, 20 bp, synthetic construct
  source 1..20: mol_type = other DNA
acgttggagatcaccacaac

SEQ ID NO: 9495 - DNA, 20 bp, synthetic construct
  source 1..20: mol_type = other DNA
gtccaccaatggcagtctgg

SEQ ID NO: 9496 - DNA, 20 bp, synthetic construct
  source 1..20: mol_type = other DNA
ctgtgaagttgaggtaacaa

SEQ ID NO: 9497 - DNA, 20 bp, synthetic construct
  source 1..20: mol_type = other DNA
agagcagctgaccatcatcc

SEQ ID NO: 9498 - DNA, 20 bp, synthetic construct
  source 1..20: mol_type = other DNA
tcctggccctttggaacgaa

SEQ ID NO: 9499 - DNA, 20 bp, synthetic construct
  source 1..20: mol_type = other DNA
ggccatcctgctaaaatcag

SEQ ID NO: 9500 - DNA, 20 bp, synthetic construct
  source 1..20: mol_type = other DNA
ggacgccggtcttgatgacg

SEQ ID NO: 9501 - DNA, 20 bp, synthetic construct
  source 1..20: mol_type = other DNA
tctacagactgcagccactg

SEQ ID NO: 9502 - DNA, 20 bp, synthetic construct
  source 1..20: mol_type = other DNA
ttcagctgctgctttgtgta

SEQ ID NO: 9503 - DNA, 20 bp, synthetic construct
  source 1..20: mol_type = other DNA
cggcccctcgtcatcaagac

SEQ ID NO: 9504 - DNA, 20 bp, synthetic construct
  source 1..20: mol_type = other DNA
tggcaagggcttctccttct

SEQ ID NO: 9505 - DNA, 20 bp, synthetic construct
  source 1..20: mol_type = other DNA
gtgattcttcccacaggcac

SEQ ID NO: 9506 - DNA, 20 bp, synthetic construct
  source 1..20: mol_type = other DNA
cggtgtcacacagataaact

SEQ ID NO: 9507 - DNA, 20 bp, synthetic construct
  source 1..20: mol_type = other DNA
gacgccggtcttgatgacga

SEQ ID NO: 9508 - DNA, 20 bp, synthetic construct
  source 1..20: mol_type = other DNA
accagttttctagccgatct

SEQ ID NO: 9509 - DNA, 20 bp, synthetic construct
  source 1..20: mol_type = other DNA
atgcccttactctccgcatc

SEQ ID NO: 9510 - DNA, 20 bp, synthetic construct
  source 1..20: mol_type = other DNA
agtgtttgaattctgcagag

SEQ ID NO: 9511 - DNA, 20 bp, synthetic construct
  source 1..20: mol_type = other DNA
tcaacaaattaagaaactgg

SEQ ID NO: 9512 - DNA, 20 bp, synthetic construct
  source 1..20: mol_type = other DNA
ttatcagtaaggagcgggag

SEQ ID NO: 9513 - DNA, 20 bp, synthetic construct
  source 1..20: mol_type = other DNA
tgatgtacctggagccaagg

SEQ ID NO: 9514 - DNA, 20 bp, synthetic construct
  source 1..20: mol_type = other DNA
tatctgtgtgacaccgtaag

SEQ ID NO: 9515 - DNA, 20 bp, synthetic construct
  source 1..20: mol_type = other DNA
ctgtaagaaaagaaaaaggc

SEQ ID NO: 9516 - DNA, 20 bp, synthetic construct
  source 1..20: mol_type = other DNA
cttagcaggaaggtgcctgg

SEQ ID NO: 9517 - DNA, 20 bp, synthetic construct
  source 1..20: mol_type = other DNA
ccttgtgaaaaagtacatcc

SEQ ID NO: 9518 - DNA, 20 bp, synthetic construct
  source 1..20: mol_type = other DNA
aatcttgactctcaatccaa

SEQ ID NO: 9519 - DNA, 20 bp, synthetic construct
  source 1..20: mol_type = other DNA
cggcaacagattgcctgcat

SEQ ID NO: 9520 - DNA, 20 bp, synthetic construct
  source 1..20: mol_type = other DNA
ggggacgttgcagctctcag

SEQ ID NO: 9521 - DNA, 20 bp, synthetic construct
  source 1..20: mol_type = other DNA
tgatcccaggttccaattgg

SEQ ID NO: 9522 - DNA, 20 bp, synthetic construct
  source 1..20: mol_type = other DNA
tttccgggatctgaatcaca

SEQ ID NO: 9523 - DNA, 20 bp, synthetic construct
  source 1..20: mol_type = other DNA
tccagttcactactaaagtc

SEQ ID NO: 9524 - DNA, 20 bp, synthetic construct
  source 1..20: mol_type = other DNA
tggaggagaactgccagctc

SEQ ID NO: 9525 - DNA, 20 bp, synthetic construct
  source 1..20: mol_type = other DNA
taagacccagatccagtccg

SEQ ID NO: 9526 - DNA, 20 bp, synthetic construct
  source 1..20: mol_type = other DNA
aggatggacgcccaggcatt

SEQ ID NO: 9527 - DNA, 20 bp, synthetic construct
  source 1..20: mol_type = other DNA
gcatcacctgcactctcttc

SEQ ID NO: 9528 - DNA, 20 bp, synthetic construct
  source 1..20: mol_type = other DNA
acgccggtcttgatgacgag

SEQ ID NO: 9529 - DNA, 20 bp, synthetic construct
  source 1..20: mol_type = other DNA
aagatacctgctctataagt

SEQ ID NO: 9530 - DNA, 20 bp, synthetic construct
  source 1..20: mol_type = other DNA
ggaagcctacagtaacgaga

SEQ ID NO: 9531 - DNA, 20 bp, synthetic construct
  source 1..20: mol_type = other DNA
tcaccacaactggcaaggag

SEQ ID NO: 9532 - DNA, 20 bp, synthetic construct
  source 1..20: mol_type = other DNA
ttccgggatctgaatcacag

SEQ ID NO: 9533 - DNA, 20 bp, synthetic construct
  source 1..20: mol_type = other DNA
gtacgtgcagaaaactctca

SEQ ID NO: 9534 - DNA, 20 bp, synthetic construct
  source 1..20: mol_type = other DNA
tgggccatcctgctaaaatc

SEQ ID NO: 9535 - DNA, 20 bp, synthetic construct
  source 1..20: mol_type = other DNA
gcaaaaagtttcctacaaag

SEQ ID NO: 9536 - DNA, 20 bp, synthetic construct
  source 1..20: mol_type = other DNA
caggcaccgggccacaatcc

SEQ ID NO: 9537 - DNA, 20 bp, synthetic construct
  source 1..20: mol_type = other DNA
acctgactttagtagtgaac

SEQ ID NO: 9538 - DNA, 20 bp, synthetic construct
  source 1..20: mol_type = other DNA
tctctatcctgacattccca

SEQ ID NO: 9539 - DNA, 20 bp, synthetic construct
  source 1..20: mol_type = other DNA
aggcgtcactttcacttggg

SEQ ID NO: 9540 - DNA, 20 bp, synthetic construct
  source 1..20: mol_type = other DNA
agaagccaatggagattgcc

SEQ ID NO: 9541 - DNA, 20 bp, synthetic construct
  source 1..20: mol_type = other DNA
aacttacatcacaattggct

SEQ ID NO: 9542 - DNA, 20 bp, synthetic construct
  source 1..20: mol_type = other DNA
tgcggcagtttctggcccct

SEQ ID NO: 9543 - DNA, 20 bp, synthetic construct
  source 1..20: mol_type = other DNA
agcagcaccttcaggatgtc

SEQ ID NO: 9544 - DNA, 20 bp, synthetic construct
  source 1..20: mol_type = other DNA
ccatgatgtacctggagcca

SEQ ID NO: 9545 - DNA, 20 bp, synthetic construct
  source 1..20: mol_type = other DNA
ggatgtccggaagagagtgc

SEQ ID NO: 9546 - DNA, 20 bp, synthetic construct
  source 1..20: mol_type = other DNA
ttcagtgaaagcagcaaaga

SEQ ID NO: 9547 - DNA, 20 bp, synthetic construct
  source 1..20: mol_type = other DNA
gagaaggacatcagcggtaa

SEQ ID NO: 9548 - DNA, 20 bp, synthetic construct
  source 1..20: mol_type = other DNA
aatcttagcaggaaggtgcc

SEQ ID NO: 9549 - DNA, 20 bp, synthetic construct
  source 1..20: mol_type = other DNA
caatcttgactctcaatcca

SEQ ID NO: 9550 - DNA, 20 bp, synthetic construct
  source 1..20: mol_type = other DNA
caggcagaagatgcagcagc

SEQ ID NO: 9551 - DNA, 20 bp, synthetic construct
  source 1..20: mol_type = other DNA
atgttggagatcaccacaac

SEQ ID NO: 9552 - DNA, 20 bp, synthetic construct
  source 1..20: mol_type = other DNA
tcctgacattcccaaggagg

SEQ ID NO: 9553 - DNA, 20 bp, synthetic construct
  source 1..20: mol_type = other DNA
gtcgttctgtaggaaatggg

SEQ ID NO: 9554 - DNA, 20 bp, synthetic construct
  source 1..20: mol_type = other DNA
tgggtggagaaggacatcag

SEQ ID NO: 9555 - DNA, 20 bp, synthetic construct
  source 1..20: mol_type = other DNA
ttcagggtgtcagatcacat

SEQ ID NO: 9556 - DNA, 20 bp, synthetic construct
  source 1..20: mol_type = other DNA
cagcaaaaagtttcctacaa

SEQ ID NO: 9557 - DNA, 20 bp, synthetic construct
  source 1..20: mol_type = other DNA
tcaggtatgatgagaaactg

SEQ ID NO: 9558 - DNA, 20 bp, synthetic construct
  source 1..20: mol_type = other DNA
ccagctcactcacgatgctc

SEQ ID NO: 9559 - DNA, 20 bp, synthetic construct
  source 1..20: mol_type = other DNA
ttcctggagaaaagagtaat

SEQ ID NO: 9560 - DNA, 20 bp, synthetic construct
  source 1..20: mol_type = other DNA
gtaccacaggatggacgccc

SEQ ID NO: 9561 - DNA, 20 bp, synthetic construct
  source 1..20: mol_type = other DNA
gaaacaaccagtcagtgacc

SEQ ID NO: 9562 - DNA, 20 bp, synthetic construct
  source 1..20: mol_type = other DNA
aggaggcgtcactttcactt

SEQ ID NO: 9563 - DNA, 20 bp, synthetic construct
  source 1..20: mol_type = other DNA
tcttacctgtcacaggacat

SEQ ID NO: 9564 - DNA, 20 bp, synthetic construct
  source 1..20: mol_type = other DNA
gcagcttgacacacggtacc

SEQ ID NO: 9565 - DNA, 20 bp, synthetic construct
  source 1..20: mol_type = other DNA
tctagaacagaaaatgaaag

SEQ ID NO: 9566 - DNA, 20 bp, synthetic construct
  source 1..20: mol_type = other DNA
ggagcagagatgtgggaatg

SEQ ID NO: 9567 - DNA, 20 bp, synthetic construct
  source 1..20: mol_type = other DNA
gccgcatatgccctaggaaa

SEQ ID NO: 9568 - DNA, 20 bp, synthetic construct
  source 1..20: mol_type = other DNA
ttacctctaggtcaatcttg

SEQ ID NO: 9569 - DNA, 20 bp, synthetic construct
  source 1..20: mol_type = other DNA
tttcctcagtgcctttgtgg

SEQ ID NO: 9570 - DNA, 20 bp, synthetic construct
  source 1..20: mol_type = other DNA
tctgtcagatgccaaatgcc

SEQ ID NO: 9571 - DNA, 20 bp, synthetic construct
  source 1..20: mol_type = other DNA
aggcctcaagattgacctag

SEQ ID NO: 9572 - DNA, 20 bp, synthetic construct
  source 1..20: mol_type = other DNA
tgattcttcccacaggcacc

SEQ ID NO: 9573 - DNA, 20 bp, synthetic construct
  source 1..20: mol_type = other DNA
ggagatcaccacaactggca

SEQ ID NO: 9574 - DNA, 20 bp, synthetic construct
  source 1..20: mol_type = other DNA
acaggcaccgggccacaatc

SEQ ID NO: 9575 - DNA, 20 bp, synthetic construct
  source 1..20: mol_type = other DNA
gaactgccagctcaggacct

SEQ ID NO: 9576 - DNA, 20 bp, synthetic construct
  source 1..20: mol_type = other DNA
gtcttacctgtcacaggaca

SEQ ID NO: 9577 - DNA, 20 bp, synthetic construct
  source 1..20: mol_type = other DNA
gacggagaagcagcagatgc

SEQ ID NO: 9578 - DNA, 20 bp, synthetic construct
  source 1..20: mol_type = other DNA
ggaacagatgctcactgcgc

SEQ ID NO: 9579 - DNA, 20 bp, synthetic construct
  source 1..20: mol_type = other DNA
gataaagcccatgatgtacc

SEQ ID NO: 9580 - DNA, 20 bp, synthetic construct
  source 1..20: mol_type = other DNA
tcaggtatggggcagcgcct

SEQ ID NO: 9581 - DNA, 20 bp, synthetic construct
  source 1..20: mol_type = other DNA
gcactgaggaaagagaagat

SEQ ID NO: 9582 - DNA, 20 bp, synthetic construct
  source 1..20: mol_type = other DNA
caacagattgcctgcattgg

SEQ ID NO: 9583 - DNA, 20 bp, synthetic construct
  source 1..20: mol_type = other DNA
gcagaaaactctcacggacg

SEQ ID NO: 9584 - DNA, 20 bp, synthetic construct
  source 1..20: mol_type = other DNA
ggagaaggacatcagcggta

SEQ ID NO: 9585 - DNA, 20 bp, synthetic construct
  source 1..20: mol_type = other DNA
cagctcctcagtcacaatca

SEQ ID NO: 9586 - DNA, 20 bp, synthetic construct
  source 1..20: mol_type = other DNA
agggagcagagatgtgggaa

SEQ ID NO: 9587 - DNA, 20 bp, synthetic construct
  source 1..20: mol_type = other DNA
gatgcggagagtaagggcat

SEQ ID NO: 9588 - DNA, 20 bp, synthetic construct
  source 1..20: mol_type = other DNA
ccagagcatcgtgagtgagc

SEQ ID NO: 9589 - DNA, 20 bp, synthetic construct
  source 1..20: mol_type = other DNA
tgctttcactgaatcttagc

SEQ ID NO: 9590 - DNA, 20 bp, synthetic construct
  source 1..20: mol_type = other DNA
agctacagcagcttgacaca

SEQ ID NO: 9591 - DNA, 20 bp, synthetic construct
  source 1..20: mol_type = other DNA
ctatcctgacattcccaagg

SEQ ID NO: 9592 - DNA, 20 bp, synthetic construct
  source 1..20: mol_type = other DNA
taaacttggtcttcaggtat

SEQ ID NO: 9593 - DNA, 20 bp, synthetic construct
  source 1..20: mol_type = other DNA
ctgtcagatgccaaatgcct

SEQ ID NO: 9594 - DNA, 20 bp, synthetic construct
  source 1..20: mol_type = other DNA
tttctccaggaaaacatggc

SEQ ID NO: 9595 - DNA, 20 bp, synthetic construct
  source 1..20: mol_type = other DNA
caggtatcttgagaagccaa

SEQ ID NO: 9596 - DNA, 20 bp, synthetic construct
  source 1..20: mol_type = other DNA
tggaccagatgcggagagta

SEQ ID NO: 9597 - DNA, 20 bp, synthetic construct
  source 1..20: mol_type = other DNA
ggccctttggaacgaagggt

SEQ ID NO: 9598 - DNA, 20 bp, synthetic construct
  source 1..20: mol_type = other DNA
ttgtgtatggttccacggac

SEQ ID NO: 9599 - DNA, 20 bp, synthetic construct
  source 1..20: mol_type = other DNA
ttcactgaatcttagcagga

SEQ ID NO: 9600 - DNA, 20 bp, synthetic construct
  source 1..20: mol_type = other DNA
ggcactgaggaaagagaaga

SEQ ID NO: 9601 - DNA, 20 bp, synthetic construct
  source 1..20: mol_type = other DNA
ccctgagggagcagagatgt

SEQ ID NO: 9602 - DNA, 20 bp, synthetic construct
  source 1..20: mol_type = other DNA
ggcaaggagtgggtctgcgg

SEQ ID NO: 9603 - DNA, 20 bp, synthetic construct
  source 1..20: mol_type = other DNA
tggttccacggactggatct

SEQ ID NO: 9604 - DNA, 20 bp, synthetic construct
  source 1..20: mol_type = other DNA
gggccatcctgctaaaatca

SEQ ID NO: 9605 - DNA, 20 bp, synthetic construct
  source 1..20: mol_type = other DNA
caacctacccttcgttccaa

SEQ ID NO: 9606 - DNA, 20 bp, synthetic construct
  source 1..20: mol_type = other DNA
ttgatcccaggttccaattg

SEQ ID NO: 9607 - DNA, 20 bp, synthetic construct
  source 1..20: mol_type = other DNA
agtggcatgtgattctttgc

SEQ ID NO: 9608 - DNA, 20 bp, synthetic construct
  source 1..20: mol_type = other DNA
attgtccagccagacccaga

SEQ ID NO: 9609 - DNA, 20 bp, synthetic construct
  source 1..20: mol_type = other DNA
atgcctgggcgtccatcctg

SEQ ID NO: 9610 - DNA, 20 bp, synthetic construct
  source 1..20: mol_type = other DNA
acttgcctccttgactcttg

SEQ ID NO: 9611 - DNA, 20 bp, synthetic construct
  source 1..20: mol_type = other DNA
caggaaaacatggctggcaa

SEQ ID NO: 9612 - DNA, 20 bp, synthetic construct
  source 1..20: mol_type = other DNA
cggagagtaagggcataggt

SEQ ID NO: 9613 - DNA, 20 bp, synthetic construct
  source 1..20: mol_type = other DNA
gagcagagatgtgggaatgg

SEQ ID NO: 9614 - DNA, 20 bp, synthetic construct
  source 1..20: mol_type = other DNA
gcaaggagtgggtctgcgga

SEQ ID NO: 9615 - DNA, 20 bp, synthetic construct
  source 1..20: mol_type = other DNA
cactttcacttgggtggaga

SEQ ID NO: 9616 - DNA, 20 bp, synthetic construct
  source 1..20: mol_type = other DNA
ttcaggtatggggcagcgcc

SEQ ID NO: 9617 - DNA, 20 bp, synthetic construct
  source 1..20: mol_type = other DNA
tcagtgcctttgtggtggag

SEQ ID NO: 9618 - DNA, 20 bp, synthetic construct
  source 1..20: mol_type = other DNA
ataaacttggtcttcaggta

SEQ ID NO: 9619 - DNA, 20 bp, synthetic construct
  source 1..20: mol_type = other DNA
agtgaaagcagcaaagaagg

SEQ ID NO: 9620 - DNA, 20 bp, synthetic construct
  source 1..20: mol_type = other DNA
ggaccagatgcggagagtaa

SEQ ID NO: 9621 - DNA, 20 bp, synthetic construct
  source 1..20: mol_type = other DNA
gggtctgtaagaaaagaaaa

SEQ ID NO: 9622 - DNA, 20 bp, synthetic construct
  source 1..20: mol_type = other DNA
tgtacagcaccggccgatgc

SEQ ID NO: 9623 - DNA, 20 bp, synthetic construct
  source 1..20: mol_type = other DNA
gggaccccattgtacagcac

SEQ ID NO: 9624 - DNA, 20 bp, synthetic construct
  source 1..20: mol_type = other DNA
cttgcctccttgactcttga

SEQ ID NO: 9625 - DNA, 20 bp, synthetic construct
  source 1..20: mol_type = other DNA
gggagcagagatgtgggaat

SEQ ID NO: 9626 - DNA, 20 bp, synthetic construct
  source 1..20: mol_type = other DNA
caactacctgggtcagcttc

SEQ ID NO: 9627 - DNA, 20 bp, synthetic construct
  source 1..20: mol_type = other DNA
gggacgttgcagctctcaga

SEQ ID NO: 9628 - DNA, 20 bp, synthetic construct
  source 1..20: mol_type = other DNA
catcgagcagctgactacac

SEQ ID NO: 9629 - DNA, 20 bp, synthetic construct
  source 1..20: mol_type = other DNA
atcttgactctcaatccaag

SEQ ID NO: 9630 - DNA, 20 bp, synthetic construct
  source 1..20: mol_type = other DNA
tatcagtaaggagcgggagc

SEQ ID NO: 9631 - DNA, 20 bp, synthetic construct
  source 1..20: mol_type = other DNA
ccgtcaacaaattaagaaac

SEQ ID NO: 9632 - DNA, 20 bp, synthetic construct
  source 1..20: mol_type = other DNA
accctgagggagcagagatg

SEQ ID NO: 9633 - DNA, 20 bp, synthetic construct
  source 1..20: mol_type = other DNA
tgcggccacagcactttgtc

SEQ ID NO: 9634 - DNA, 20 bp, synthetic construct
  source 1..20: mol_type = other DNA
cgtgcacatgaatccccccc

SEQ ID NO: 9635 - DNA, 20 bp, synthetic construct
  source 1..20: mol_type = other DNA
cctcaccatgttcctgaagt

SEQ ID NO: 9636 - DNA, 20 bp, synthetic construct
  source 1..20: mol_type = other DNA
tcaggatggagaattcgacc

SEQ ID NO: 9637 - DNA, 20 bp, synthetic construct
  source 1..20: mol_type = other DNA
gatcaagcgtgctgaccggc

SEQ ID NO: 9638 - DNA, 20 bp, synthetic construct
  source 1..20: mol_type = other DNA
gcgcaacaagaaggtcccgt

SEQ ID NO: 9639 - DNA, 20 bp, synthetic construct
  source 1..20: mol_type = other DNA
ccgtggacgatgacaaccac

SEQ ID NO: 9640 - DNA, 20 bp, synthetic construct
  source 1..20: mol_type = other DNA
aagaaggcggagcaccaggt

SEQ ID NO: 9641 - DNA, 20 bp, synthetic construct
  source 1..20: mol_type = other DNA
acgcagctccaggtgggtgt

SEQ ID NO: 9642 - DNA, 20 bp, synthetic construct
  source 1..20: mol_type = other DNA
cagccaggaccacaatgcca

SEQ ID NO: 9643 - DNA, 20 bp, synthetic construct
  source 1..20: mol_type = other DNA
ggagtcaaacttccaggcga

SEQ ID NO: 9644 - DNA, 20 bp, synthetic construct
  source 1..20: mol_type = other DNA
tacgccacgcagctccaggt

SEQ ID NO: 9645 - DNA, 20 bp, synthetic construct
  source 1..20: mol_type = other DNA
tcacggactctgcaccccgc

SEQ ID NO: 9646 - DNA, 20 bp, synthetic construct
  source 1..20: mol_type = other DNA
caagccacccagctcctgga

SEQ ID NO: 9647 - DNA, 20 bp, synthetic construct
  source 1..20: mol_type = other DNA
gaaaccacagatcaagcaag

SEQ ID NO: 9648 - DNA, 20 bp, synthetic construct
  source 1..20: mol_type = other DNA
gaaggcggagcaccaggtgg

SEQ ID NO: 9649 - DNA, 20 bp, synthetic construct
  source 1..20: mol_type = other DNA
ggaccagctccagggggcag

SEQ ID NO: 9650 - DNA, 20 bp, synthetic construct
  source 1..20: mol_type = other DNA
tacacccacctggagctgcg

SEQ ID NO: 9651 - DNA, 20 bp, synthetic construct
  source 1..20: mol_type = other DNA
ctacgccacgcagctccagg

SEQ ID NO: 9652 - DNA, 20 bp, synthetic construct
  source 1..20: mol_type = other DNA
gacgatgacaaccacaggta

SEQ ID NO: 9653 - DNA, 20 bp, synthetic construct
  source 1..20: mol_type = other DNA
ggaactacaccttctggcag

SEQ ID NO: 9654 - DNA, 20 bp, synthetic construct
  source 1..20: mol_type = other DNA
gctgtggccgcagctgtgtg

SEQ ID NO: 9655 - DNA, 20 bp, synthetic construct
  source 1..20: mol_type = other DNA
ctccaggtgggtgtaggctc

SEQ ID NO: 9656 - DNA, 20 bp, synthetic construct
  source 1..20: mol_type = other DNA
gcagaagaaggcggagcacc

SEQ ID NO: 9657 - DNA, 20 bp, synthetic construct
  source 1..20: mol_type = other DNA
gaagaaggcggagcaccagg

SEQ ID NO: 9658 - DNA, 20 bp, synthetic construct
  source 1..20: mol_type = other DNA
atcaagcgtgctgaccggcg

SEQ ID NO: 9659 - DNA, 20 bp, synthetic construct
  source 1..20: mol_type = other DNA
tcctcaccatgttcctgaag

SEQ ID NO: 9660 - DNA, 20 bp, synthetic construct
  source 1..20: mol_type = other DNA
agaaggcggagcaccaggtg

SEQ ID NO: 9661 - DNA, 20 bp, synthetic construct
  source 1..20: mol_type = other DNA
ggaccgaatggagaagtctc

SEQ ID NO: 9662 - DNA, 20 bp, synthetic construct
  source 1..20: mol_type = other DNA
gggatccactgactgtccat

SEQ ID NO: 9663 - DNA, 20 bp, synthetic construct
  source 1..20: mol_type = other DNA
caggccctccaggagctggg

SEQ ID NO: 9664 - DNA, 20 bp, synthetic construct
  source 1..20: mol_type = other DNA
ggatccaaggtgaggcgcgg

SEQ ID NO: 9665 - DNA, 20 bp, synthetic construct
  source 1..20: mol_type = other DNA
tccaaggtgaggcgcggtgg

SEQ ID NO: 9666 - DNA, 20 bp, synthetic construct
  source 1..20: mol_type = other DNA
cttcaggaatatggtgaggg

SEQ ID NO: 9667 - DNA, 20 bp, synthetic construct
  source 1..20: mol_type = other DNA
gtggccttaatgttctcctg

SEQ ID NO: 9668 - DNA, 20 bp, synthetic construct
  source 1..20: mol_type = other DNA
ggagctgcgactggtcacgc

SEQ ID NO: 9669 - DNA, 20 bp, synthetic construct
  source 1..20: mol_type = other DNA
gccgaagtgcagagcaaccg

SEQ ID NO: 9670 - DNA, 20 bp, synthetic construct
  source 1..20: mol_type = other DNA
agcattgtcccagagaacag

SEQ ID NO: 9671 - DNA, 20 bp, synthetic construct
  source 1..20: mol_type = other DNA
gctcctcaccctgttgaact

SEQ ID NO: 9672 - DNA, 20 bp, synthetic construct
  source 1..20: mol_type = other DNA
tcccagggtagctctccagc

SEQ ID NO: 9673 - DNA, 20 bp, synthetic construct
  source 1..20: mol_type = other DNA
gcagaagcaggtgtctctgg

SEQ ID NO: 9674 - DNA, 20 bp, synthetic construct
  source 1..20: mol_type = other DNA
agcagtaccgcgtggtgagt

SEQ ID NO: 9675 - DNA, 20 bp, synthetic construct
  source 1..20: mol_type = other DNA
caccctgttgaactgggacc

SEQ ID NO: 9676 - DNA, 20 bp, synthetic construct
  source 1..20: mol_type = other DNA
acagtcctggtaatggtgtg

SEQ ID NO: 9677 - DNA, 20 bp, synthetic construct
  source 1..20: mol_type = other DNA
tgtcctggtcccagttcaac

SEQ ID NO: 9678 - DNA, 20 bp, synthetic construct
  source 1..20: mol_type = other DNA
tcctcaggctctcctggtac

SEQ ID NO: 9679 - DNA, 20 bp, synthetic construct
  source 1..20: mol_type = other DNA
ccatgaacgatcaccaccac

SEQ ID NO: 9680 - DNA, 20 bp, synthetic construct
  source 1..20: mol_type = other DNA
ggtcccagttcaacagggtg

SEQ ID NO: 9681 - DNA, 20 bp, synthetic construct
  source 1..20: mol_type = other DNA
aggccgaagtgcagagcaac

SEQ ID NO: 9682 - DNA, 20 bp, synthetic construct
  source 1..20: mol_type = other DNA
cctcaccatattcctgaagt

SEQ ID NO: 9683 - DNA, 20 bp, synthetic construct
  source 1..20: mol_type = other DNA
gttcattgtacaatatatgg

SEQ ID NO: 9684 - DNA, 20 bp, synthetic construct
  source 1..20: mol_type = other DNA
accaggactgtagcacgtcc

SEQ ID NO: 9685 - DNA, 20 bp, synthetic construct
  source 1..20: mol_type = other DNA
acacctgcacgagagcccca

SEQ ID NO: 9686 - DNA, 20 bp, synthetic construct
  source 1..20: mol_type = other DNA
tctagctcagtttggcccgc

SEQ ID NO: 9687 - DNA, 20 bp, synthetic construct
  source 1..20: mol_type = other DNA
gacggccctccagcagaagc

SEQ ID NO: 9688 - DNA, 20 bp, synthetic construct
  source 1..20: mol_type = other DNA
tggtccctgagtaagtgtcc

SEQ ID NO: 9689 - DNA, 20 bp, synthetic construct
  source 1..20: mol_type = other DNA
gacactgcagcagtaccgcg

SEQ ID NO: 9690 - DNA, 20 bp, synthetic construct
  source 1..20: mol_type = other DNA
cagcagtcacctggtcacca

SEQ ID NO: 9691 - DNA, 20 bp, synthetic construct
  source 1..20: mol_type = other DNA
gtcctggtaatggtgtgggg

SEQ ID NO: 9692 - DNA, 20 bp, synthetic construct
  source 1..20: mol_type = other DNA
ggctcctcaccctgttgaac

SEQ ID NO: 9693 - DNA, 20 bp, synthetic construct
  source 1..20: mol_type = other DNA
gggaccacttgcttgatctg

SEQ ID NO: 9694 - DNA, 20 bp, synthetic construct
  source 1..20: mol_type = other DNA
ccagcagaagcaggtgtctc

SEQ ID NO: 9695 - DNA, 20 bp, synthetic construct
  source 1..20: mol_type = other DNA
gattgaaagccaagcatggt

SEQ ID NO: 9696 - DNA, 20 bp, synthetic construct
  source 1..20: mol_type = other DNA
ccagtggtggtgatcgttca

SEQ ID NO: 9697 - DNA, 20 bp, synthetic construct
  source 1..20: mol_type = other DNA
gctcctgcaccaggccctcc

SEQ ID NO: 9698 - DNA, 20 bp, synthetic construct
  source 1..20: mol_type = other DNA
gccccggttgctctgcactt

SEQ ID NO: 9699 - DNA, 20 bp, synthetic construct
  source 1..20: mol_type = other DNA
cagcagtaccgcgtggtgag

SEQ ID NO: 9700 - DNA, 20 bp, synthetic construct
  source 1..20: mol_type = other DNA
tgatggtggccttcacctgg

SEQ ID NO: 9701 - DNA, 20 bp, synthetic construct
  source 1..20: mol_type = other DNA
cccggctcagacgctcctgg

SEQ ID NO: 9702 - DNA, 20 bp, synthetic construct
  source 1..20: mol_type = other DNA
ctccaggtgggtgtgggctc

SEQ ID NO: 9703 - DNA, 20 bp, synthetic construct
  source 1..20: mol_type = other DNA
tgatgatggtggccttcacc

SEQ ID NO: 9704 - DNA, 20 bp, synthetic construct
  source 1..20: mol_type = other DNA
acaggccactgtagtcctcc

SEQ ID NO: 9705 - DNA, 20 bp, synthetic construct
  source 1..20: mol_type = other DNA
agctgatccagtggaagcgg

SEQ ID NO: 9706 - DNA, 20 bp, synthetic construct
  source 1..20: mol_type = other DNA
aaggccacccagctcctgga

SEQ ID NO: 9707 - DNA, 20 bp, synthetic construct
  source 1..20: mol_type = other DNA
tcaccgactctgccccacga

SEQ ID NO: 9708 - DNA, 20 bp, synthetic construct
  source 1..20: mol_type = other DNA
cagaaagtgtaattccgtcc

SEQ ID NO: 9709 - DNA, 20 bp, synthetic construct
  source 1..20: mol_type = other DNA
agtggattgaaagccaagca

SEQ ID NO: 9710 - DNA, 20 bp, synthetic construct
  source 1..20: mol_type = other DNA
ctacagtcctggtaatggtg

SEQ ID NO: 9711 - DNA, 20 bp, synthetic construct
  source 1..20: mol_type = other DNA
ctcaagcctcattggaatga

SEQ ID NO: 9712 - DNA, 20 bp, synthetic construct
  source 1..20: mol_type = other DNA
tggccgtcgcattgttgtcc

SEQ ID NO: 9713 - DNA, 20 bp, synthetic construct
  source 1..20: mol_type = other DNA
ccagagacacctgcttctgc

SEQ ID NO: 9714 - DNA, 20 bp, synthetic construct
  source 1..20: mol_type = other DNA
gaagcagcagaccatcatcc

SEQ ID NO: 9715 - DNA, 20 bp, synthetic construct
  source 1..20: mol_type = other DNA
cgtgcacatgaacccccccc

SEQ ID NO: 9716 - DNA, 20 bp, synthetic construct
  source 1..20: mol_type = other DNA
caccatcatcagtgagcagc

SEQ ID NO: 9717 - DNA, 20 bp, synthetic construct
  source 1..20: mol_type = other DNA
ctcgtgcaggtgtgagaagt

SEQ ID NO: 9718 - DNA, 20 bp, synthetic construct
  source 1..20: mol_type = other DNA
cattaaggccacccagctcc

SEQ ID NO: 9719 - DNA, 20 bp, synthetic construct
  source 1..20: mol_type = other DNA
ccaggtgggtgtgggctctg

SEQ ID NO: 9720 - DNA, 20 bp, synthetic construct
  source 1..20: mol_type = other DNA
taagaggtcagaccgtcgtg

SEQ ID NO: 9721 - DNA, 20 bp, synthetic construct
  source 1..20: mol_type = other DNA
tcttctgcagctcctgcacc

SEQ ID NO: 9722 - DNA, 20 bp, synthetic construct
  source 1..20: mol_type = other DNA
agattcagtgactcagaaat

SEQ ID NO: 9723 - DNA, 20 bp, synthetic construct
  source 1..20: mol_type = other DNA
ttaagaggtcagaccgtcgt

SEQ ID NO: 9724 - DNA, 20 bp, synthetic construct
  source 1..20: mol_type = other DNA
tccagtaccaggagagcctg

SEQ ID NO: 9725 - DNA, 20 bp, synthetic construct
  source 1..20: mol_type = other DNA
aacgatcaccaccactggca

SEQ ID NO: 9726 - DNA, 20 bp, synthetic construct
  source 1..20: mol_type = other DNA
ggccgaagtgcagagcaacc

SEQ ID NO: 9727 - DNA, 20 bp, synthetic construct
  source 1..20: mol_type = other DNA
caggagagcctgaggatcca

SEQ ID NO: 9728 - DNA, 20 bp, synthetic construct
  source 1..20: mol_type = other DNA
tgggtcttcaggacctgagg

SEQ ID NO: 9729 - DNA, 20 bp, synthetic construct
  source 1..20: mol_type = other DNA
ccgaatggagaagtctctgg

SEQ ID NO: 9730 - DNA, 20 bp, synthetic construct
  source 1..20: mol_type = other DNA
attcaagtctcccaagcggt

SEQ ID NO: 9731 - DNA, 20 bp, synthetic construct
  source 1..20: mol_type = other DNA
tgaggatccaaggtgaggcg

SEQ ID NO: 9732 - DNA, 20 bp, synthetic construct
  source 1..20: mol_type = other DNA
gcagcagtcacctggtcacc

SEQ ID NO: 9733 - DNA, 20 bp, synthetic construct
  source 1..20: mol_type = other DNA
gcagaagaaggcagagcacc

SEQ ID NO: 9734 - DNA, 20 bp, synthetic construct
  source 1..20: mol_type = other DNA
gcggtcggctagggaccgaa

SEQ ID NO: 9735 - DNA, 20 bp, synthetic construct
  source 1..20: mol_type = other DNA
gctggcccagctgagccccc

SEQ ID NO: 9736 - DNA, 20 bp, synthetic construct
  source 1..20: mol_type = other DNA
gaaccggcagcagatccgca

SEQ ID NO: 9737 - DNA, 20 bp, synthetic construct
  source 1..20: mol_type = other DNA
gaagaaggcagagcaccagg

SEQ ID NO: 9738 - DNA, 20 bp, synthetic construct
  source 1..20: mol_type = other DNA
gtctcccaagcggtcggcta

SEQ ID NO: 9739 - DNA, 20 bp, synthetic construct
  source 1..20: mol_type = other DNA
ggtaattcaagtctcccaag

SEQ ID NO: 9740 - DNA, 20 bp, synthetic construct
  source 1..20: mol_type = other DNA
cacacccacctggagctgtg

SEQ ID NO: 9741 - DNA, 20 bp, synthetic construct
  source 1..20: mol_type = other DNA
cacgtatgaccgctgcccca

SEQ ID NO: 9742 - DNA, 20 bp, synthetic construct
  source 1..20: mol_type = other DNA
aagaaggcagagcaccaggt

SEQ ID NO: 9743 - DNA, 20 bp, synthetic construct
  source 1..20: mol_type = other DNA
caccaggccctccaggagct

SEQ ID NO: 9744 - DNA, 20 bp, synthetic construct
  source 1..20: mol_type = other DNA
gcagtaccgcgtggtgagtg

SEQ ID NO: 9745 - DNA, 20 bp, synthetic construct
  source 1..20: mol_type = other DNA
ggggtcacgattgtgcgtgc

SEQ ID NO: 9746 - DNA, 20 bp, synthetic construct
  source 1..20: mol_type = other DNA
taaggccacccagctcctgg

SEQ ID NO: 9747 - DNA, 20 bp, synthetic construct
  source 1..20: mol_type = other DNA
agcaccaggtgggggaagat

SEQ ID NO: 9748 - DNA, 20 bp, synthetic construct
  source 1..20: mol_type = other DNA
gatgatggtggccttcacct

SEQ ID NO: 9749 - DNA, 20 bp, synthetic construct
  source 1..20: mol_type = other DNA
tgtggccacagcactttgtc

SEQ ID NO: 9750 - DNA, 20 bp, synthetic construct
  source 1..20: mol_type = other DNA
gtagcagactcgcagggaac

SEQ ID NO: 9751 - DNA, 20 bp, synthetic construct
  source 1..20: mol_type = other DNA
caggaacacgaggttctcct

SEQ ID NO: 9752 - DNA, 20 bp, synthetic construct
  source 1..20: mol_type = other DNA
ctcggccagctcctgaggga

SEQ ID NO: 9753 - DNA, 20 bp, synthetic construct
  source 1..20: mol_type = other DNA
gtctaaaaagacacaagaga

SEQ ID NO: 9754 - DNA, 20 bp, synthetic construct
  source 1..20: mol_type = other DNA
gaacgatcaccaccactggc

SEQ ID NO: 9755 - DNA, 20 bp, synthetic construct
  source 1..20: mol_type = other DNA
ccacttcaggaatatggtga

SEQ ID NO: 9756 - DNA, 20 bp, synthetic construct
  source 1..20: mol_type = other DNA
gtcactgaatctcaggagga

SEQ ID NO: 9757 - DNA, 20 bp, synthetic construct
  source 1..20: mol_type = other DNA
acacgaggttctccttggtc

SEQ ID NO: 9758 - DNA, 20 bp, synthetic construct
  source 1..20: mol_type = other DNA
ttgagcgcctcacacagctg

SEQ ID NO: 9759 - DNA, 20 bp, synthetic construct
  source 1..20: mol_type = other DNA
ttatctcagccctggtgacc

SEQ ID NO: 9760 - DNA, 20 bp, synthetic construct
  source 1..20: mol_type = other DNA
gagaagtctctggtggtaaa

SEQ ID NO: 9761 - DNA, 20 bp, synthetic construct
  source 1..20: mol_type = other DNA
caccaccactggcagggaca

SEQ ID NO: 9762 - DNA, 20 bp, synthetic construct
  source 1..20: mol_type = other DNA
agtccctgaaacgaattaag

SEQ ID NO: 9763 - DNA, 20 bp, synthetic construct
  source 1..20: mol_type = other DNA
ggtgcaggagctgcagaaga

SEQ ID NO: 9764 - DNA, 20 bp, synthetic construct
  source 1..20: mol_type = other DNA
tgcgacggccactgttctct

SEQ ID NO: 9765 - DNA, 20 bp, synthetic construct
  source 1..20: mol_type = other DNA
gttaccagtagcagactcgc

SEQ ID NO: 9766 - DNA, 20 bp, synthetic construct
  source 1..20: mol_type = other DNA
atgatggtggccttcacctg

SEQ ID NO: 9767 - DNA, 20 bp, synthetic construct
  source 1..20: mol_type = other DNA
gtcgcagctcctcaaacgtc

SEQ ID NO: 9768 - DNA, 20 bp, synthetic construct
  source 1..20: mol_type = other DNA
attaagaggtcagaccgtcg

SEQ ID NO: 9769 - DNA, 20 bp, synthetic construct
  source 1..20: mol_type = other DNA
gcaatggtttgacggtgtga

SEQ ID NO: 9770 - DNA, 20 bp, synthetic construct
  source 1..20: mol_type = other DNA
taatccacaggagaacatta

SEQ ID NO: 9771 - DNA, 20 bp, synthetic construct
  source 1..20: mol_type = other DNA
tcaagcctcattggaatgat

SEQ ID NO: 9772 - DNA, 20 bp, synthetic construct
  source 1..20: mol_type = other DNA
gtttctgcgccaggaacacg

SEQ ID NO: 9773 - DNA, 20 bp, synthetic construct
  source 1..20: mol_type = other DNA
catctggcttgttaatgagt

SEQ ID NO: 9774 - DNA, 20 bp, synthetic construct
  source 1..20: mol_type = other DNA
accaggagaatttaccagga

SEQ ID NO: 9775 - DNA, 20 bp, synthetic construct
  source 1..20: mol_type = other DNA
gcaccaggccctccaggagc

SEQ ID NO: 9776 - DNA, 20 bp, synthetic construct
  source 1..20: mol_type = other DNA
tcccggctcagacgctcctg

SEQ ID NO: 9777 - DNA, 20 bp, synthetic construct
  source 1..20: mol_type = other DNA
ggaccagctccatggggcag

SEQ ID NO: 9778 - DNA, 20 bp, synthetic construct
  source 1..20: mol_type = other DNA
gtcctggtcccagttcaaca

SEQ ID NO: 9779 - DNA, 20 bp, synthetic construct
  source 1..20: mol_type = other DNA
agtctcccaagcggtcggct

SEQ ID NO: 9780 - DNA, 20 bp, synthetic construct
  source 1..20: mol_type = other DNA
tccgtcctggtaaattctcc

SEQ ID NO: 9781 - DNA, 20 bp, synthetic construct
  source 1..20: mol_type = other DNA
gccagctcctgagggaaggg

SEQ ID NO: 9782 - DNA, 20 bp, synthetic construct
  source 1..20: mol_type = other DNA
gctaccctgggaacatatgg

SEQ ID NO: 9783 - DNA, 20 bp, synthetic construct
  source 1..20: mol_type = other DNA
tcggccagctcctgagggaa

SEQ ID NO: 9784 - DNA, 20 bp, synthetic construct
  source 1..20: mol_type = other DNA
agaagaccctgcagctgctg

SEQ ID NO: 9785 - DNA, 20 bp, synthetic construct
  source 1..20: mol_type = other DNA
ccacagcactttgtcaggca

SEQ ID NO: 9786 - DNA, 20 bp, synthetic construct
  source 1..20: mol_type = other DNA
gcagcagctgcagggtcttc

SEQ ID NO: 9787 - DNA, 20 bp, synthetic construct
  source 1..20: mol_type = other DNA
ccctggatcaccaaggacaa

SEQ ID NO: 9788 - DNA, 20 bp, synthetic construct
  source 1..20: mol_type = other DNA
tgcggcattatttatcccag

SEQ ID NO: 9789 - DNA, 20 bp, synthetic construct
  source 1..20: mol_type = other DNA
gaagccacagatcaagcaag

SEQ ID NO: 9790 - DNA, 20 bp, synthetic construct
  source 1..20: mol_type = other DNA
ttcagtgactcagaaattgg

SEQ ID NO: 9791 - DNA, 20 bp, synthetic construct
  source 1..20: mol_type = other DNA
ttggcagctaaagctgttga

SEQ ID NO: 9792 - DNA, 20 bp, synthetic construct
  source 1..20: mol_type = other DNA
cacccagctcctggagggcc

SEQ ID NO: 9793 - DNA, 20 bp, synthetic construct
  source 1..20: mol_type = other DNA
agaaccggcagcagatccgc

SEQ ID NO: 9794 - DNA, 20 bp, synthetic construct
  source 1..20: mol_type = other DNA
gcccaccagcaggcgcacag

SEQ ID NO: 9795 - DNA, 20 bp, synthetic construct
  source 1..20: mol_type = other DNA
ttaccagtagcagactcgca

SEQ ID NO: 9796 - DNA, 20 bp, synthetic construct
  source 1..20: mol_type = other DNA
tacagtcctggtaatggtgt

SEQ ID NO: 9797 - DNA, 20 bp, synthetic construct
  source 1..20: mol_type = other DNA
ccgtgcctgacaaagtgctg

SEQ ID NO: 9798 - DNA, 20 bp, synthetic construct
  source 1..20: mol_type = other DNA
tccctgagtaagtgtccagg

SEQ ID NO: 9799 - DNA, 20 bp, synthetic construct
  source 1..20: mol_type = other DNA
tatgccacacagctccaggt

SEQ ID NO: 9800 - DNA, 20 bp, synthetic construct
  source 1..20: mol_type = other DNA
cccacttcaggaatatggtg

SEQ ID NO: 9801 - DNA, 20 bp, synthetic construct
  source 1..20: mol_type = other DNA
ctcaggaggaaggtcccatc

SEQ ID NO: 9802 - DNA, 20 bp, synthetic construct
  source 1..20: mol_type = other DNA
ccctcaccatattcctgaag

SEQ ID NO: 9803 - DNA, 20 bp, synthetic construct
  source 1..20: mol_type = other DNA
agaccgtcgtggggcagagt

SEQ ID NO: 9804 - DNA, 20 bp, synthetic construct
  source 1..20: mol_type = other DNA
tcctggtaaattctcctggt

SEQ ID NO: 9805 - DNA, 20 bp, synthetic construct
  source 1..20: mol_type = other DNA
cagccaggacaacaatgcga

SEQ ID NO: 9806 - DNA, 20 bp, synthetic construct
  source 1..20: mol_type = other DNA
gaatcccagttcagtgttgg

SEQ ID NO: 9807 - DNA, 20 bp, synthetic construct
  source 1..20: mol_type = other DNA
tcaccaccactggcagggac

SEQ ID NO: 9808 - DNA, 20 bp, synthetic construct
  source 1..20: mol_type = other DNA
ctgagtcactgaatctcagg

SEQ ID NO: 9809 - DNA, 20 bp, synthetic construct
  source 1..20: mol_type = other DNA
cagcagctggccgggaacgg

SEQ ID NO: 9810 - DNA, 20 bp, synthetic construct
  source 1..20: mol_type = other DNA
gtcctggtcgcagttcaaca

SEQ ID NO: 9811 - DNA, 20 bp, synthetic construct
  source 1..20: mol_type = other DNA
ccatcagtttgtggatgtta

SEQ ID NO: 9812 - DNA, 20 bp, synthetic construct
  source 1..20: mol_type = other DNA
ggatgtggaagaaagtgatg

SEQ ID NO: 9813 - DNA, 20 bp, synthetic construct
  source 1..20: mol_type = other DNA
catgcagactctgctcagct

SEQ ID NO: 9814 - DNA, 20 bp, synthetic construct
  source 1..20: mol_type = other DNA
tcttccctcaggaactgcaa

SEQ ID NO: 9815 - DNA, 20 bp, synthetic construct
  source 1..20: mol_type = other DNA
gtcttccctcaggaactgca

SEQ ID NO: 9816 - DNA, 20 bp, synthetic construct
  source 1..20: mol_type = other DNA
tgccaatggtgatgtggatg

SEQ ID NO: 9817 - DNA, 20 bp, synthetic construct
  source 1..20: mol_type = other DNA
cgatgatgccaatggtgatg

SEQ ID NO: 9818 - DNA, 20 bp, synthetic construct
  source 1..20: mol_type = other DNA
ttccacatccacatcaccat

SEQ ID NO: 9819 - DNA, 20 bp, synthetic construct
  source 1..20: mol_type = other DNA
ggtgaaggtggtggtggtgg

SEQ ID NO: 9820 - DNA, 20 bp, synthetic construct
  source 1..20: mol_type = other DNA
tgatgagcttatcctcacca

SEQ ID NO: 9821 - DNA, 20 bp, synthetic construct
  source 1..20: mol_type = other DNA
gaaaatgttctatagttttc

SEQ ID NO: 9822 - DNA, 20 bp, synthetic construct
  source 1..20: mol_type = other DNA
ttctaatatttaaataaaaa

SEQ ID NO: 9823 - DNA, 20 bp, synthetic construct
  source 1..20: mol_type = other DNA
cctagcactttgggaggctg

SEQ ID NO: 9824 - DNA, 20 bp, synthetic construct
  source 1..20: mol_type = other DNA
ttaagcagtcaatgtcaatc

SEQ ID NO: 9825 - DNA, 20 bp, synthetic construct
  source 1..20: mol_type = other DNA
gcaggtacaaggcgcgttcc

SEQ ID NO: 9826 - DNA, 20 bp, synthetic construct
  source 1..20: mol_type = other DNA
tctcaggtcagggagccgca

SEQ ID NO: 9827 - DNA, 20 bp, synthetic construct
  source 1..20: mol_type = other DNA
cgctcaacaaccacctgttg

SEQ ID NO: 9828 - DNA, 20 bp, synthetic construct
  source 1..20: mol_type = other DNA
ccgcactcaccgtccctgct

SEQ ID NO: 9829 - DNA, 20 bp, synthetic construct
  source 1..20: mol_type = other DNA
ggacggtgagtgcggcgcgc

SEQ ID NO: 9830 - DNA, 20 bp, synthetic construct
  source 1..20: mol_type = other DNA
gagatgatcatcaccaagca

SEQ ID NO: 9831 - DNA, 20 bp, synthetic construct
  source 1..20: mol_type = other DNA
actgcacccacttgccgctc

SEQ ID NO: 9832 - DNA, 20 bp, synthetic construct
  source 1..20: mol_type = other DNA
catccagtgcgctcctgtgt

SEQ ID NO: 9833 - DNA, 20 bp, synthetic construct
  source 1..20: mol_type = other DNA
atccagtgcgctcctgtgtt

SEQ ID NO: 9834 - DNA, 20 bp, synthetic construct
  source 1..20: mol_type = other DNA
cttacgactcaaagttctcc

SEQ ID NO: 9835 - DNA, 20 bp, synthetic construct
  source 1..20: mol_type = other DNA
cctaccagaatgccgaggtg

SEQ ID NO: 9836 - DNA, 20 bp, synthetic construct
  source 1..20: mol_type = other DNA
caggacgcggacgagcgtcg

SEQ ID NO: 9837 - DNA, 20 bp, synthetic construct
  source 1..20: mol_type = other DNA
ccaagcagggacggtgagtg

SEQ ID NO: 9838 - DNA, 20 bp, synthetic construct
  source 1..20: mol_type = other DNA
gactgcctaccagaatgccg

SEQ ID NO: 9839 - DNA, 20 bp, synthetic construct
  source 1..20: mol_type = other DNA
gagggctaccagccgggcga

SEQ ID NO: 9840 - DNA, 20 bp, synthetic construct
  source 1..20: mol_type = other DNA
ggcggtaccagagcggcaag

SEQ ID NO: 9841 - DNA, 20 bp, synthetic construct
  source 1..20: mol_type = other DNA
tccagtgcgctcctgtgttg

SEQ ID NO: 9842 - DNA, 20 bp, synthetic construct
  source 1..20: mol_type = other DNA
agagatgatcatcaccaagc

SEQ ID NO: 9843 - DNA, 20 bp, synthetic construct
  source 1..20: mol_type = other DNA
gggagtccgggtggacgtac

SEQ ID NO: 9844 - DNA, 20 bp, synthetic construct
  source 1..20: mol_type = other DNA
taaacttggaccacaacagg

SEQ ID NO: 9845 - DNA, 20 bp, synthetic construct
  source 1..20: mol_type = other DNA
gcggtaccagagcggcaagt

SEQ ID NO: 9846 - DNA, 20 bp, synthetic construct
  source 1..20: mol_type = other DNA
ctaccagaatgccgaggtga

SEQ ID NO: 9847 - DNA, 20 bp, synthetic construct
  source 1..20: mol_type = other DNA
cccattcctgtcatttactg

SEQ ID NO: 9848 - DNA, 20 bp, synthetic construct
  source 1..20: mol_type = other DNA
tccccaggcttactggctgg

SEQ ID NO: 9849 - DNA, 20 bp, synthetic construct
  source 1..20: mol_type = other DNA
cgcacctggcatgctgccct

SEQ ID NO: 9850 - DNA, 20 bp, synthetic construct
  source 1..20: mol_type = other DNA
tggtgatgatcatctctgtc

SEQ ID NO: 9851 - DNA, 20 bp, synthetic construct
  source 1..20: mol_type = other DNA
ccagtgcgctcctgtgttgg

SEQ ID NO: 9852 - DNA, 20 bp, synthetic construct
  source 1..20: mol_type = other DNA
gccccggctgcatatcgttg

SEQ ID NO: 9853 - DNA, 20 bp, synthetic construct
  source 1..20: mol_type = other DNA
gtgcagtgtggaaaggccga

SEQ ID NO: 9854 - DNA, 20 bp, synthetic construct
  source 1..20: mol_type = other DNA
tgccaggtgcgcgcgcccct

SEQ ID NO: 9855 - DNA, 20 bp, synthetic construct
  source 1..20: mol_type = other DNA
tctcttaaggcaggctgctt

SEQ ID NO: 9856 - DNA, 20 bp, synthetic construct
  source 1..20: mol_type = other DNA
ttctataaataaaaaaagaa

SEQ ID NO: 9857 - DNA, 20 bp, synthetic construct
  source 1..20: mol_type = other DNA
gcagagaattgcttgaaccc

SEQ ID NO: 9858 - DNA, 20 bp, synthetic construct
  source 1..20: mol_type = other DNA
tctcaagctgcacggactcc

SEQ ID NO: 9859 - DNA, 20 bp, synthetic construct
  source 1..20: mol_type = other DNA
tctcatagatcagaacatcc

SEQ ID NO: 9860 - DNA, 20 bp, synthetic construct
  source 1..20: mol_type = other DNA
gcgcgggcgggagggcggcg

SEQ ID NO: 9861 - DNA, 20 bp, synthetic construct
  source 1..20: mol_type = other DNA
tctcgtggtcgctcagccct

SEQ ID NO: 9862 - DNA, 20 bp, synthetic construct
  source 1..20: mol_type = other DNA
tgcaggcttgagtttccacc

SEQ ID NO: 9863 - DNA, 20 bp, synthetic construct
  source 1..20: mol_type = other DNA
gctcagcgcgcagtaccagc

SEQ ID NO: 9864 - DNA, 20 bp, synthetic construct
  source 1..20: mol_type = other DNA
catacacccagctctggaac

SEQ ID NO: 9865 - DNA, 20 bp, synthetic construct
  source 1..20: mol_type = other DNA
cctactcaccagagctacag

SEQ ID NO: 9866 - DNA, 20 bp, synthetic construct
  source 1..20: mol_type = other DNA
cgggcctgcaggtgcagatg

SEQ ID NO: 9867 - DNA, 20 bp, synthetic construct
  source 1..20: mol_type = other DNA
tgcagcacatctgagctgtc

SEQ ID NO: 9868 - DNA, 20 bp, synthetic construct
  source 1..20: mol_type = other DNA
cggcatgtgctcccgggctc

SEQ ID NO: 9869 - DNA, 20 bp, synthetic construct
  source 1..20: mol_type = other DNA
gtcacccacctgggcgggca

SEQ ID NO: 9870 - DNA, 20 bp, synthetic construct
  source 1..20: mol_type = other DNA
gagccacagctcaagcactc

SEQ ID NO: 9871 - DNA, 20 bp, synthetic construct
  source 1..20: mol_type = other DNA
gcggttctgttcccgagtgc

SEQ ID NO: 9872 - DNA, 20 bp, synthetic construct
  source 1..20: mol_type = other DNA
gcatgtgctcccgggctccg

SEQ ID NO: 9873 - DNA, 20 bp, synthetic construct
  source 1..20: mol_type = other DNA
ggtctagagcagcgagaggg

SEQ ID NO: 9874 - DNA, 20 bp, synthetic construct
  source 1..20: mol_type = other DNA
ggagaacgtccccggggcac

SEQ ID NO: 9875 - DNA, 20 bp, synthetic construct
  source 1..20: mol_type = other DNA
cgggcgccatgggtgcgggc

SEQ ID NO: 9876 - DNA, 20 bp, synthetic construct
  source 1..20: mol_type = other DNA
ctcctccagctgtaacgtgg

SEQ ID NO: 9877 - DNA, 20 bp, synthetic construct
  source 1..20: mol_type = other DNA
ggagccacagctcaagcact

SEQ ID NO: 9878 - DNA, 20 bp, synthetic construct
  source 1..20: mol_type = other DNA
gcccaggtgggtgactcgcg

SEQ ID NO: 9879 - DNA, 20 bp, synthetic construct
  source 1..20: mol_type = other DNA
gagaacgtccccggggcaca

SEQ ID NO: 9880 - DNA, 20 bp, synthetic construct
  source 1..20: mol_type = other DNA
ctactcaccagagctacagc

SEQ ID NO: 9881 - DNA, 20 bp, synthetic construct
  source 1..20: mol_type = other DNA
ggagtcacacacggtgtccg

SEQ ID NO: 9882 - DNA, 20 bp, synthetic construct
  source 1..20: mol_type = other DNA
agcccagagctccagtccga

SEQ ID NO: 9883 - DNA, 20 bp, synthetic construct
  source 1..20: mol_type = other DNA
ggtgtatgtgctgtcctcac

SEQ ID NO: 9884 - DNA, 20 bp, synthetic construct
  source 1..20: mol_type = other DNA
gtcctcacaggagtcacaca

SEQ ID NO: 9885 - DNA, 20 bp, synthetic construct
  source 1..20: mol_type = other DNA
cctgaggaaacaagggccag

SEQ ID NO: 9886 - DNA, 20 bp, synthetic construct
  source 1..20: mol_type = other DNA
tctcctggggctgcgtggct

SEQ ID NO: 9887 - DNA, 20 bp, synthetic construct
  source 1..20: mol_type = other DNA
tctctgcaaggcaaaaggat

SEQ ID NO: 9888 - DNA, 20 bp, synthetic construct
  source 1..20: mol_type = other DNA
tctccagcgcaggtggacaa

SEQ ID NO: 9889 - DNA, 20 bp, synthetic construct
  source 1..20: mol_type = other DNA
tctcttgctgttgctgatgg

SEQ ID NO: 9890 - DNA, 20 bp, synthetic construct
  source 1..20: mol_type = other DNA
aggctggctgtaaagggaca

SEQ ID NO: 9891 - DNA, 20 bp, synthetic construct
  source 1..20: mol_type = other DNA
gcccgaagcagaccgagtgt

SEQ ID NO: 9892 - DNA, 20 bp, synthetic construct
  source 1..20: mol_type = other DNA
acacttgtacttgtcctcca

SEQ ID NO: 9893 - DNA, 20 bp, synthetic construct
  source 1..20: mol_type = other DNA
tgccagggtctacctgaacg

SEQ ID NO: 9894 - DNA, 20 bp, synthetic construct
  source 1..20: mol_type = other DNA
gcagaagcggtgcccacact

SEQ ID NO: 9895 - DNA, 20 bp, synthetic construct
  source 1..20: mol_type = other DNA
tcctcccagttctgccggaa

SEQ ID NO: 9896 - DNA, 20 bp, synthetic construct
  source 1..20: mol_type = other DNA
cttaaacggccaaggaagca

SEQ ID NO: 9897 - DNA, 20 bp, synthetic construct
  source 1..20: mol_type = other DNA
gtagaaaggctggctgtaaa

SEQ ID NO: 9898 - DNA, 20 bp, synthetic construct
  source 1..20: mol_type = other DNA
agcgcaggtccatgtcggct

SEQ ID NO: 9899 - DNA, 20 bp, synthetic construct
  source 1..20: mol_type = other DNA
tggctcttcagatctattgt

SEQ ID NO: 9900 - DNA, 20 bp, synthetic construct
  source 1..20: mol_type = other DNA
agcccgaagcagaccgagtg

SEQ ID NO: 9901 - DNA, 20 bp, synthetic construct
  source 1..20: mol_type = other DNA
tctccaggacctggaagcgc

SEQ ID NO: 9902 - DNA, 20 bp, synthetic construct
  source 1..20: mol_type = other DNA
ccatgcagctctcgcagaag

SEQ ID NO: 9903 - DNA, 20 bp, synthetic construct
  source 1..20: mol_type = other DNA
tggctataagatgtgtgcca

SEQ ID NO: 9904 - DNA, 20 bp, synthetic construct
  source 1..20: mol_type = other DNA
tctctcaggtactcagacaa

SEQ ID NO: 9905 - DNA, 20 bp, synthetic construct
  source 1..20: mol_type = other DNA
tctcacagtagacactctcc

SEQ ID NO: 9906 - DNA, 20 bp, synthetic construct
  source 1..20: mol_type = other DNA
gattctacactggcaaaccc

SEQ ID NO: 9907 - DNA, 20 bp, synthetic construct
  source 1..20: mol_type = other DNA
tccagcgacccacaatccca

SEQ ID NO: 9908 - DNA, 20 bp, synthetic construct
  source 1..20: mol_type = other DNA
aagacaagaccatcaaatcc

SEQ ID NO: 9909 - DNA, 20 bp, synthetic construct
  source 1..20: mol_type = other DNA
aatatgacagccacctccct

SEQ ID NO: 9910 - DNA, 20 bp, synthetic construct
  source 1..20: mol_type = other DNA
aggcgtattgtaccctggaa

SEQ ID NO: 9911 - DNA, 20 bp, synthetic construct
  source 1..20: mol_type = other DNA
aaggcgtattgtaccctgga

SEQ ID NO: 9912 - DNA, 20 bp, synthetic construct
  source 1..20: mol_type = other DNA
acattctgaaggattgtcca

SEQ ID NO: 9913 - DNA, 20 bp, synthetic construct
  source 1..20: mol_type = other DNA
ggattctacactggcaaacc

SEQ ID NO: 9914 - DNA, 20 bp, synthetic construct
  source 1..20: mol_type = other DNA
tgcaggctttgcagaaccta

SEQ ID NO: 9915 - DNA, 20 bp, synthetic construct
  source 1..20: mol_type = other DNA
cgcatgcacagtttgtaccc

SEQ ID NO: 9916 - DNA, 20 bp, synthetic construct
  source 1..20: mol_type = other DNA
tgcaaacgccatgcggccat

SEQ ID NO: 9917 - DNA, 20 bp, synthetic construct
  source 1..20: mol_type = other DNA
gcattcatacttgctttcca

SEQ ID NO: 9918 - DNA, 20 bp, synthetic construct
  source 1..20: mol_type = other DNA
cattcatacttgctttccag

SEQ ID NO: 9919 - DNA, 20 bp, synthetic construct
  source 1..20: mol_type = other DNA
catagccctggattctacac

SEQ ID NO: 9920 - DNA, 20 bp, synthetic construct
  source 1..20: mol_type = other DNA
ttgtaccctggaagggccaa

SEQ ID NO: 9921 - DNA, 20 bp, synthetic construct
  source 1..20: mol_type = other DNA
ttctatatgaaaatcaagac

SEQ ID NO: 9922 - DNA, 20 bp, synthetic construct
  source 1..20: mol_type = other DNA
ggcgggtacctggaggcgca

SEQ ID NO: 9923 - DNA, 20 bp, synthetic construct
  source 1..20: mol_type = other DNA
catgcaccacctgctgctgg

SEQ ID NO: 9924 - DNA, 20 bp, synthetic construct
  source 1..20: mol_type = other DNA
ttctcacctccagcagcagg

SEQ ID NO: 9925 - DNA, 20 bp, synthetic construct
  source 1..20: mol_type = other DNA
gcagcatgttggggatcccg

SEQ ID NO: 9926 - DNA, 20 bp, synthetic construct
  source 1..20: mol_type = other DNA
ctgtctcgtagaaggcctgt

SEQ ID NO: 9927 - DNA, 20 bp, synthetic construct
  source 1..20: mol_type = other DNA
aggatcactcagcttgatga

SEQ ID NO: 9928 - DNA, 20 bp, synthetic construct
  source 1..20: mol_type = other DNA
tctcctgaggtgggcaggag

SEQ ID NO: 9929 - DNA, 20 bp, synthetic construct
  source 1..20: mol_type = other DNA
agaggtactcaaatgaggct

SEQ ID NO: 9930 - DNA, 20 bp, synthetic construct
  source 1..20: mol_type = other DNA
ggtggaagctgagctggctg

SEQ ID NO: 9931 - DNA, 20 bp, synthetic construct
  source 1..20: mol_type = other DNA
tggcaaaaccatcacccttg

SEQ ID NO: 9932 - DNA, 20 bp, synthetic construct
  source 1..20: mol_type = other DNA
caggcgcaacaccaggtgca

SEQ ID NO: 9933 - DNA, 20 bp, synthetic construct
  source 1..20: mol_type = other DNA
gcgcaacaccaggtgcaggg

SEQ ID NO: 9934 - DNA, 20 bp, synthetic construct
  source 1..20: mol_type = other DNA
tctcaaggtaagccatgcac

SEQ ID NO: 9935 - DNA, 20 bp, synthetic construct
  source 1..20: mol_type = other DNA
ggtagagattggctgcgcca

SEQ ID NO: 9936 - DNA, 20 bp, synthetic construct
  source 1..20: mol_type = other DNA
gaccagtctctggctcacta

SEQ ID NO: 9937 - DNA, 20 bp, synthetic construct
  source 1..20: mol_type = other DNA
cttccagatgttctcctttg

SEQ ID NO: 9938 - DNA, 20 bp, synthetic construct
  source 1..20: mol_type = other DNA
tgttctcagagagccaacaa

SEQ ID NO: 9939 - DNA, 20 bp, synthetic construct
  source 1..20: mol_type = other DNA
cgtgcagatgaagctggagg

SEQ ID NO: 9940 - DNA, 20 bp, synthetic construct
  source 1..20: mol_type = other DNA
gaaagtcccgtccgagcggt

SEQ ID NO: 9941 - DNA, 20 bp, synthetic construct
  source 1..20: mol_type = other DNA
cgcccagccaccgcgtgacc

SEQ ID NO: 9942 - DNA, 20 bp, synthetic construct
  source 1..20: mol_type = other DNA
ctatgaggacctcatgcgct

SEQ ID NO: 9943 - DNA, 20 bp, synthetic construct
  source 1..20: mol_type = other DNA
gttctcagagagccaacaac

SEQ ID NO: 9944 - DNA, 20 bp, synthetic construct
  source 1..20: mol_type = other DNA
tgagccaggtcctggggagg

SEQ ID NO: 9945 - DNA, 20 bp, synthetic construct
  source 1..20: mol_type = other DNA
acagcaaggctggtggcgag

SEQ ID NO: 9946 - DNA, 20 bp, synthetic construct
  source 1..20: mol_type = other DNA
ttcaagaaatgctgcgggga

SEQ ID NO: 9947 - DNA, 20 bp, synthetic construct
  source 1..20: mol_type = other DNA
cagggtgaacctcccgttgt

SEQ ID NO: 9948 - DNA, 20 bp, synthetic construct
  source 1..20: mol_type = other DNA
caccatcagcaggtcccgca

SEQ ID NO: 9949 - DNA, 20 bp, synthetic construct
  source 1..20: mol_type = other DNA
tcccaggtcacgcggtggct

SEQ ID NO: 9950 - DNA, 20 bp, synthetic construct
  source 1..20: mol_type = other DNA
ccatgagggtgagtgggtgt

SEQ ID NO: 9951 - DNA, 20 bp, synthetic construct
  source 1..20: mol_type = other DNA
gaggccgaacttctcacagc

SEQ ID NO: 9952 - DNA, 20 bp, synthetic construct
  source 1..20: mol_type = other DNA
ctcctagaaggcggaccaca

SEQ ID NO: 9953 - DNA, 20 bp, synthetic construct
  source 1..20: mol_type = other DNA
gagccgtagaaagggtccaa

SEQ ID NO: 9954 - DNA, 20 bp, synthetic construct
  source 1..20: mol_type = other DNA
cggacgggactttcttggtg

SEQ ID NO: 9955 - DNA, 20 bp, synthetic construct
  source 1..20: mol_type = other DNA
gcaggccccatggagcgggc

SEQ ID NO: 9956 - DNA, 20 bp, synthetic construct
  source 1..20: mol_type = other DNA
tggtagagattggctgcgcc

SEQ ID NO: 9957 - DNA, 20 bp, synthetic construct
  source 1..20: mol_type = other DNA
gtccctccatgtggccgaca

SEQ ID NO: 9958 - DNA, 20 bp, synthetic construct
  source 1..20: mol_type = other DNA
ctggaagtcatgcccgttgg

SEQ ID NO: 9959 - DNA, 20 bp, synthetic construct
  source 1..20: mol_type = other DNA
ttaccagcagaactctctaa

SEQ ID NO: 9960 - DNA, 20 bp, synthetic construct
  source 1..20: mol_type = other DNA
agaattgaagaagaagtgga

SEQ ID NO: 9961 - DNA, 20 bp, synthetic construct
  source 1..20: mol_type = other DNA
ccctgtaggttcctcgtcta

SEQ ID NO: 9962 - DNA, 20 bp, synthetic construct
  source 1..20: mol_type = other DNA
acctccatcttgggcagacc

SEQ ID NO: 9963 - DNA, 20 bp, synthetic construct
  source 1..20: mol_type = other DNA
aggtgtttcaggaatactac

SEQ ID NO: 9964 - DNA, 20 bp, synthetic construct
  source 1..20: mol_type = other DNA
gcaccatcagcaggtcccgc

SEQ ID NO: 9965 - DNA, 20 bp, synthetic construct
  source 1..20: mol_type = other DNA
gcaaggtacgagtgggaggg

SEQ ID NO: 9966 - DNA, 20 bp, synthetic construct
  source 1..20: mol_type = other DNA
ctactcatctgtaagcgcag

SEQ ID NO: 9967 - DNA, 20 bp, synthetic construct
  source 1..20: mol_type = other DNA
gtagagattggctgcgccag

SEQ ID NO: 9968 - DNA, 20 bp, synthetic construct
  source 1..20: mol_type = other DNA
ggaggcgcccacctgctgga

SEQ ID NO: 9969 - DNA, 20 bp, synthetic construct
  source 1..20: mol_type = other DNA
cttgggcagacctggaggac

SEQ ID NO: 9970 - DNA, 20 bp, synthetic construct
  source 1..20: mol_type = other DNA
acaccctgtctgctctgtcc

SEQ ID NO: 9971 - DNA, 20 bp, synthetic construct
  source 1..20: mol_type = other DNA
gtgaactggcccaggccctc

SEQ ID NO: 9972 - DNA, 20 bp, synthetic construct
  source 1..20: mol_type = other DNA
atcccaggtcacgcggtggc

SEQ ID NO: 9973 - DNA, 20 bp, synthetic construct
  source 1..20: mol_type = other DNA
acgttatatctggaaccaga

SEQ ID NO: 9974 - DNA, 20 bp, synthetic construct
  source 1..20: mol_type = other DNA
ggtccaggacagagcagaca

SEQ ID NO: 9975 - DNA, 20 bp, synthetic construct
  source 1..20: mol_type = other DNA
ggtcctatgcagtaggcagg

SEQ ID NO: 9976 - DNA, 20 bp, synthetic construct
  source 1..20: mol_type = other DNA
gtacgcaggccccatggagc

SEQ ID NO: 9977 - DNA, 20 bp, synthetic construct
  source 1..20: mol_type = other DNA
gacatgggcaaggtacgagt

SEQ ID NO: 9978 - DNA, 20 bp, synthetic construct
  source 1..20: mol_type = other DNA
tgaggctgaacagaactggt

SEQ ID NO: 9979 - DNA, 20 bp, synthetic construct
  source 1..20: mol_type = other DNA
tgggcaaggtacgagtggga

SEQ ID NO: 9980 - DNA, 20 bp, synthetic construct
  source 1..20: mol_type = other DNA
ttcctgggaaatctacggga

SEQ ID NO: 9981 - DNA, 20 bp, synthetic construct
  source 1..20: mol_type = other DNA
gtcccaggtgagccctccgc

SEQ ID NO: 9982 - DNA, 20 bp, synthetic construct
  source 1..20: mol_type = other DNA
cttggtgcggcagagggtga

SEQ ID NO: 9983 - DNA, 20 bp, synthetic construct
  source 1..20: mol_type = other DNA
tgctgcttaggtgagaatct

SEQ ID NO: 9984 - DNA, 20 bp, synthetic construct
  source 1..20: mol_type = other DNA
cttgaaggggaactgcaagg

SEQ ID NO: 9985 - DNA, 20 bp, synthetic construct
  source 1..20: mol_type = other DNA
tccaggtctgcccaagatgg

SEQ ID NO: 9986 - DNA, 20 bp, synthetic construct
  source 1..20: mol_type = other DNA
cgtgacctgggatggggctc

SEQ ID NO: 9987 - DNA, 20 bp, synthetic construct
  source 1..20: mol_type = other DNA
tgaactggcccaggccctcc

SEQ ID NO: 9988 - DNA, 20 bp, synthetic construct
  source 1..20: mol_type = other DNA
gctaccgctgccatcggtgc

SEQ ID NO: 9989 - DNA, 20 bp, synthetic construct
  source 1..20: mol_type = other DNA
ccgtctgctggatctcccgc

SEQ ID NO: 9990 - DNA, 20 bp, synthetic construct
  source 1..20: mol_type = other DNA
cctcccgggctgcggccaca

SEQ ID NO: 9991 - DNA, 20 bp, synthetic construct
  source 1..20: mol_type = other DNA
gtgagaagttcggcctcaag

SEQ ID NO: 9992 - DNA, 20 bp, synthetic construct
  source 1..20: mol_type = other DNA
cagcatctgacaggccttgc

SEQ ID NO: 9993 - DNA, 20 bp, synthetic construct
  source 1..20: mol_type = other DNA
tgtcccaggtgagccctccg

SEQ ID NO: 9994 - DNA, 20 bp, synthetic construct
  source 1..20: mol_type = other DNA
tctactcatctgtaagcgca

SEQ ID NO: 9995 - DNA, 20 bp, synthetic construct
  source 1..20: mol_type = other DNA
gcaggatgtggtctcctcaa

SEQ ID NO: 9996 - DNA, 20 bp, synthetic construct
  source 1..20: mol_type = other DNA
cgaagcaggtcctactcgga

SEQ ID NO: 9997 - DNA, 20 bp, synthetic construct
  source 1..20: mol_type = other DNA
tcgctgtgggttgtgaggtc

SEQ ID NO: 9998 - DNA, 20 bp, synthetic construct
  source 1..20: mol_type = other DNA
cctcgatcaggaggaacatg

SEQ ID NO: 9999 - DNA, 20 bp, synthetic construct
  source 1..20: mol_type = other DNA
tgtacttctcctccgtctgc

SEQ ID NO: 10000 - DNA, 20 bp, synthetic construct
  source 1..20: mol_type = other DNA
ccatgccatcaacctgcgtg

SEQ ID NO: 10001 - DNA, 20 bp, synthetic construct
  source 1..20: mol_type = other DNA
gccaccgcgtgacctgggat

SEQ ID NO: 10002 - DNA, 20 bp, synthetic construct
  source 1..20: mol_type = other DNA
ccatagacgaggaacctaca

SEQ ID NO: 10003 - DNA, 20 bp, synthetic construct
  source 1..20: mol_type = other DNA
ggacagcaaggctggtggcg

SEQ ID NO: 10004 - DNA, 20 bp, synthetic construct
  source 1..20: mol_type = other DNA
tgacccttaccgtaagcccc

SEQ ID NO: 10005 - DNA, 20 bp, synthetic construct
  source 1..20: mol_type = other DNA
tccatggctaccgcctgccc

SEQ ID NO: 10006 - DNA, 20 bp, synthetic construct
  source 1..20: mol_type = other DNA
gaagggcctggggggtcagg

SEQ ID NO: 10007 - DNA, 20 bp, synthetic construct
  source 1..20: mol_type = other DNA
cagcaaacacctggaccgtg

SEQ ID NO: 10008 - DNA, 20 bp, synthetic construct
  source 1..20: mol_type = other DNA
ggaaatctacgggagggtaa

SEQ ID NO: 10009 - DNA, 20 bp, synthetic construct
  source 1..20: mol_type = other DNA
gggctcacctgggacatctg

SEQ ID NO: 10010 - DNA, 20 bp, synthetic construct
  source 1..20: mol_type = other DNA
cctgcgggagatccagcaga

SEQ ID NO: 10011 - DNA, 20 bp, synthetic construct
  source 1..20: mol_type = other DNA
agaccgagacaacaagaagg

SEQ ID NO: 10012 - DNA, 20 bp, synthetic construct
  source 1..20: mol_type = other DNA
cccaccgaggaggagagtgt

SEQ ID NO: 10013 - DNA, 20 bp, synthetic construct
  source 1..20: mol_type = other DNA
tatggccggcccaagatcga

SEQ ID NO: 10014 - DNA, 20 bp, synthetic construct
  source 1..20: mol_type = other DNA
ccttgcccatgtcggccaca

SEQ ID NO: 10015 - DNA, 20 bp, synthetic construct
  source 1..20: mol_type = other DNA
gtcgagcaggaaggcatacc

SEQ ID NO: 10016 - DNA, 20 bp, synthetic construct
  source 1..20: mol_type = other DNA
tatttctgccctaaacaccc

SEQ ID NO: 10017 - DNA, 20 bp, synthetic construct
  source 1..20: mol_type = other DNA
ggaactcaagatcacctcgg

SEQ ID NO: 10018 - DNA, 20 bp, synthetic construct
  source 1..20: mol_type = other DNA
cgatgtgcaggattttggca

SEQ ID NO: 10019 - DNA, 20 bp, synthetic construct
  source 1..20: mol_type = other DNA
aaactccaccagctcctaga

SEQ ID NO: 10020 - DNA, 20 bp, synthetic construct
  source 1..20: mol_type = other DNA
acacaaggagtgtctgggga

SEQ ID NO: 10021 - DNA, 20 bp, synthetic construct
  source 1..20: mol_type = other DNA
ctgcacgtcctcccgggctg

SEQ ID NO: 10022 - DNA, 20 bp, synthetic construct
  source 1..20: mol_type = other DNA
ggctggccctggatgccatg

SEQ ID NO: 10023 - DNA, 20 bp, synthetic construct
  source 1..20: mol_type = other DNA
gcgctccaagatggacaggt

SEQ ID NO: 10024 - DNA, 20 bp, synthetic construct
  source 1..20: mol_type = other DNA
tttcccaggaactatgaaga

SEQ ID NO: 10025 - DNA, 20 bp, synthetic construct
  source 1..20: mol_type = other DNA
tggtggcgaggggagatcta

SEQ ID NO: 10026 - DNA, 20 bp, synthetic construct
  source 1..20: mol_type = other DNA
ccgcctcaccaggttctcaa

SEQ ID NO: 10027 - DNA, 20 bp, synthetic construct
  source 1..20: mol_type = other DNA
cctgggacatctgggggcgc

SEQ ID NO: 10028 - DNA, 20 bp, synthetic construct
  source 1..20: mol_type = other DNA
ctggtcctatgcagtaggca

SEQ ID NO: 10029 - DNA, 20 bp, synthetic construct
  source 1..20: mol_type = other DNA
tctcaatgtcttgaggtttc

SEQ ID NO: 10030 - DNA, 20 bp, synthetic construct
  source 1..20: mol_type = other DNA
tccccctgttctgggcgatc

SEQ ID NO: 10031 - DNA, 20 bp, synthetic construct
  source 1..20: mol_type = other DNA
tgagtagagctttgtcgagc

SEQ ID NO: 10032 - DNA, 20 bp, synthetic construct
  source 1..20: mol_type = other DNA
tagagctttgtcgagcagga

SEQ ID NO: 10033 - DNA, 20 bp, synthetic construct
  source 1..20: mol_type = other DNA
catctggaagtcatgcccgt

SEQ ID NO: 10034 - DNA, 20 bp, synthetic construct
  source 1..20: mol_type = other DNA
ccggcactggatgagccagt

SEQ ID NO: 10035 - DNA, 20 bp, synthetic construct
  source 1..20: mol_type = other DNA
gagcactcactcgatctggt

SEQ ID NO: 10036 - DNA, 20 bp, synthetic construct
  source 1..20: mol_type = other DNA
cctacctgctggcctgctga

SEQ ID NO: 10037 - DNA, 20 bp, synthetic construct
  source 1..20: mol_type = other DNA
tcacgcaccggcatggacac

SEQ ID NO: 10038 - DNA, 20 bp, synthetic construct
  source 1..20: mol_type = other DNA
caggccccatggagcgggca

SEQ ID NO: 10039 - DNA, 20 bp, synthetic construct
  source 1..20: mol_type = other DNA
ggttgatggcatggggtagc

SEQ ID NO: 10040 - DNA, 20 bp, synthetic construct
  source 1..20: mol_type = other DNA
ttaccttcttcatagttcct

SEQ ID NO: 10041 - DNA, 20 bp, synthetic construct
  source 1..20: mol_type = other DNA
ctggttccctgccaactacg

SEQ ID NO: 10042 - DNA, 20 bp, synthetic construct
  source 1..20: mol_type = other DNA
tcaggtgtgtgaactggccc

SEQ ID NO: 10043 - DNA, 20 bp, synthetic construct
  source 1..20: mol_type = other DNA
gtgcagatgaagctggaggt

SEQ ID NO: 10044 - DNA, 20 bp, synthetic construct
  source 1..20: mol_type = other DNA
cacgctgggctccatccagc

SEQ ID NO: 10045 - DNA, 20 bp, synthetic construct
  source 1..20: mol_type = other DNA
atcgaggaccaaggtgccca

SEQ ID NO: 10046 - DNA, 20 bp, synthetic construct
  source 1..20: mol_type = other DNA
atgggcaaggtacgagtggg

SEQ ID NO: 10047 - DNA, 20 bp, synthetic construct
  source 1..20: mol_type = other DNA
atctggaaccagatggtcac

SEQ ID NO: 10048 - DNA, 20 bp, synthetic construct
  source 1..20: mol_type = other DNA
cctggggaatcagagaacaa

SEQ ID NO: 10049 - DNA, 20 bp, synthetic construct
  source 1..20: mol_type = other DNA
gatgaagacctggtagagat

SEQ ID NO: 10050 - DNA, 20 bp, synthetic construct
  source 1..20: mol_type = other DNA
tctgcacacaaggagtgtct

SEQ ID NO: 10051 - DNA, 20 bp, synthetic construct
  source 1..20: mol_type = other DNA
tgaggcactcacatggacat

SEQ ID NO: 10052 - DNA, 20 bp, synthetic construct
  source 1..20: mol_type = other DNA
tggttccagatataacgtcg

SEQ ID NO: 10053 - DNA, 20 bp, synthetic construct
  source 1..20: mol_type = other DNA
cctgcgcccccagatgtccc

SEQ ID NO: 10054 - DNA, 20 bp, synthetic construct
  source 1..20: mol_type = other DNA
ccccaggcccttccccaccg

SEQ ID NO: 10055 - DNA, 20 bp, synthetic construct
  source 1..20: mol_type = other DNA
cagagaaaaaggctttccgg

SEQ ID NO: 10056 - DNA, 20 bp, synthetic construct
  source 1..20: mol_type = other DNA
ctccaagatggacaggtggg

SEQ ID NO: 10057 - DNA, 20 bp, synthetic construct
  source 1..20: mol_type = other DNA
cttaaggcacaggaactgtg

SEQ ID NO: 10058 - DNA, 20 bp, synthetic construct
  source 1..20: mol_type = other DNA
cactgagccaggtcctgggg

SEQ ID NO: 10059 - DNA, 20 bp, synthetic construct
  source 1..20: mol_type = other DNA
gaggcactcacatggacata

SEQ ID NO: 10060 - DNA, 20 bp, synthetic construct
  source 1..20: mol_type = other DNA
gttgacctcacgcaggttga

SEQ ID NO: 10061 - DNA, 20 bp, synthetic construct
  source 1..20: mol_type = other DNA
cccgaacctggaagctgtgc

SEQ ID NO: 10062 - DNA, 20 bp, synthetic construct
  source 1..20: mol_type = other DNA
ggatgagccagtgggtgcat

SEQ ID NO: 10063 - DNA, 20 bp, synthetic construct
  source 1..20: mol_type = other DNA
agccaacctggaaacagacg

SEQ ID NO: 10064 - DNA, 20 bp, synthetic construct
  source 1..20: mol_type = other DNA
gaccccgatcgcccagaaca

SEQ ID NO: 10065 - DNA, 20 bp, synthetic construct
  source 1..20: mol_type = other DNA
cgacatgggcaaggtacgag

SEQ ID NO: 10066 - DNA, 20 bp, synthetic construct
  source 1..20: mol_type = other DNA
cactcgtaccttgcccatgt

SEQ ID NO: 10067 - DNA, 20 bp, synthetic construct
  source 1..20: mol_type = other DNA
ccccgatcgcccagaacagg

SEQ ID NO: 10068 - DNA, 20 bp, synthetic construct
  source 1..20: mol_type = other DNA
acaggtgggtggagtcaaca

SEQ ID NO: 10069 - DNA, 20 bp, synthetic construct
  source 1..20: mol_type = other DNA
ggaccccgatcgcccagaac

SEQ ID NO: 10070 - DNA, 20 bp, synthetic construct
  source 1..20: mol_type = other DNA
tgagctccacaatgtctcca

SEQ ID NO: 10071 - DNA, 20 bp, synthetic construct
  source 1..20: mol_type = other DNA
caacgggaggttcaccctgc

SEQ ID NO: 10072 - DNA, 20 bp, synthetic construct
  source 1..20: mol_type = other DNA
caggtcacgcggtggctggg

SEQ ID NO: 10073 - DNA, 20 bp, synthetic construct
  source 1..20: mol_type = other DNA
cttggagcgccgttccaccg

SEQ ID NO: 10074 - DNA, 20 bp, synthetic construct
  source 1..20: mol_type = other DNA
gagccccatcccaggtcacg

SEQ ID NO: 10075 - DNA, 20 bp, synthetic construct
  source 1..20: mol_type = other DNA
ctcagagagccaacaacggg

SEQ ID NO: 10076 - DNA, 20 bp, synthetic construct
  source 1..20: mol_type = other DNA
tggctggtttccttgtaaca

SEQ ID NO: 10077 - DNA, 20 bp, synthetic construct
  source 1..20: mol_type = other DNA
gaggtttcaggaaccgttgc

SEQ ID NO: 10078 - DNA, 20 bp, synthetic construct
  source 1..20: mol_type = other DNA
ggaaggttctaatgttctta

SEQ ID NO: 10079 - DNA, 20 bp, synthetic construct
  source 1..20: mol_type = other DNA
gcaggtttacaaagtccttg

SEQ ID NO: 10080 - DNA, 20 bp, synthetic construct
  source 1..20: mol_type = other DNA
gacacagaaggacaccatcc

SEQ ID NO: 10081 - DNA, 20 bp, synthetic construct
  source 1..20: mol_type = other DNA
caggcccttccccaccgagg

SEQ ID NO: 10082 - DNA, 20 bp, synthetic construct
  source 1..20: mol_type = other DNA
ctactcggagggaagggtga

SEQ ID NO: 10083 - DNA, 20 bp, synthetic construct
  source 1..20: mol_type = other DNA
tggccgctactgcagccagg

SEQ ID NO: 10084 - DNA, 20 bp, synthetic construct
  source 1..20: mol_type = other DNA
ccacagcgacacggtggagg

SEQ ID NO: 10085 - DNA, 20 bp, synthetic construct
  source 1..20: mol_type = other DNA
tcagcaggccagcaggtagg

SEQ ID NO: 10086 - DNA, 20 bp, synthetic construct
  source 1..20: mol_type = other DNA
gaagaacagctcatagccct

SEQ ID NO: 10087 - DNA, 20 bp, synthetic construct
  source 1..20: mol_type = other DNA
ggctctctgagaacattcct

SEQ ID NO: 10088 - DNA, 20 bp, synthetic construct
  source 1..20: mol_type = other DNA
cacgcactgagccaggtcct

SEQ ID NO: 10089 - DNA, 20 bp, synthetic construct
  source 1..20: mol_type = other DNA
acgaagcaggtcctactcgg

SEQ ID NO: 10090 - DNA, 20 bp, synthetic construct
  source 1..20: mol_type = other DNA
gcaggtcctactcggaggga

SEQ ID NO: 10091 - DNA, 20 bp, synthetic construct
  source 1..20: mol_type = other DNA
ctggcccaggccctccggga

SEQ ID NO: 10092 - DNA, 20 bp, synthetic construct
  source 1..20: mol_type = other DNA
gccgaacttctcacagcagg

SEQ ID NO: 10093 - DNA, 20 bp, synthetic construct
  source 1..20: mol_type = other DNA
aaggagaggtgagacccagc

SEQ ID NO: 10094 - DNA, 20 bp, synthetic construct
  source 1..20: mol_type = other DNA
tgtccattgagaacctggtg

SEQ ID NO: 10095 - DNA, 20 bp, synthetic construct
  source 1..20: mol_type = other DNA
ggtggctgggcggcagcacc

SEQ ID NO: 10096 - DNA, 20 bp, synthetic construct
  source 1..20: mol_type = other DNA
aaggaagccctgggcacccc

SEQ ID NO: 10097 - DNA, 20 bp, synthetic construct
  source 1..20: mol_type = other DNA
tcacttcctaaaggagatga

SEQ ID NO: 10098 - DNA, 20 bp, synthetic construct
  source 1..20: mol_type = other DNA
ggaacctacagggagaagac

SEQ ID NO: 10099 - DNA, 20 bp, synthetic construct
  source 1..20: mol_type = other DNA
ccacatgttcctcctgatcg

SEQ ID NO: 10100 - DNA, 20 bp, synthetic construct
  source 1..20: mol_type = other DNA
tagggcttcaccctgttaca

SEQ ID NO: 10101 - DNA, 20 bp, synthetic construct
  source 1..20: mol_type = other DNA
aagatgatctcaatgtcttg

SEQ ID NO: 10102 - DNA, 20 bp, synthetic construct
  source 1..20: mol_type = other DNA
aaggagttacttaatgctga

SEQ ID NO: 10103 - DNA, 19 bp, synthetic construct
  source 1..19: mol_type = other DNA
tcaccagagatgaacagac

SEQ ID NO: 10104 - DNA, 20 bp, synthetic construct
  source 1..20: mol_type = other DNA
cttcctccacgtagttggca

SEQ ID NO: 10105 - DNA, 20 bp, synthetic construct
  source 1..20: mol_type = other DNA
acaagaagggacagcaaggc

SEQ ID NO: 10106 - DNA, 20 bp, synthetic construct
  source 1..20: mol_type = other DNA
tggcatccagggccagccgc

SEQ ID NO: 10107 - DNA, 20 bp, synthetic construct
  source 1..20: mol_type = other DNA
tggggctcaggtgtgtgaac

SEQ ID NO: 10108 - DNA, 20 bp, synthetic construct
  source 1..20: mol_type = other DNA
ccaccgcgtgacctgggatg

SEQ ID NO: 10109 - DNA, 20 bp, synthetic construct
  source 1..20: mol_type = other DNA
ttgcaggtacgcaggcccca

SEQ ID NO: 10110 - DNA, 20 bp, synthetic construct
  source 1..20: mol_type = other DNA
tcttcatcaaatacaaggag

SEQ ID NO: 10111 - DNA, 20 bp, synthetic construct
  source 1..20: mol_type = other DNA
gaagtcatgcccgttggcgg

SEQ ID NO: 10112 - DNA, 20 bp, synthetic construct
  source 1..20: mol_type = other DNA
cagaaggacaccatcccgga

SEQ ID NO: 10113 - DNA, 20 bp, synthetic construct
  source 1..20: mol_type = other DNA
ccatcagcaggccagcaggt

SEQ ID NO: 10114 - DNA, 20 bp, synthetic construct
  source 1..20: mol_type = other DNA
ctccttgaaggggaactgca

SEQ ID NO: 10115 - DNA, 20 bp, synthetic construct
  source 1..20: mol_type = other DNA
ggaggacgtgcagatgaagc

SEQ ID NO: 10116 - DNA, 20 bp, synthetic construct
  source 1..20: mol_type = other DNA
agggctcacctgggacatct

SEQ ID NO: 10117 - DNA, 20 bp, synthetic construct
  source 1..20: mol_type = other DNA
tcacctaagcagcatctgac

SEQ ID NO: 10118 - DNA, 20 bp, synthetic construct
  source 1..20: mol_type = other DNA
gactttcttggtgcggcaga

SEQ ID NO: 10119 - DNA, 20 bp, synthetic construct
  source 1..20: mol_type = other DNA
aacggcgctccaagatggac

SEQ ID NO: 10120 - DNA, 20 bp, synthetic construct
  source 1..20: mol_type = other DNA
gatgacctgtgacggggcag

SEQ ID NO: 10121 - DNA, 20 bp, synthetic construct
  source 1..20: mol_type = other DNA
aggcctgtcagatgctgctt

SEQ ID NO: 10122 - DNA, 20 bp, synthetic construct
  source 1..20: mol_type = other DNA
ccaggtcttcatcaaataca

SEQ ID NO: 10123 - DNA, 20 bp, synthetic construct
  source 1..20: mol_type = other DNA
tcacatgatccccctgttct

SEQ ID NO: 10124 - DNA, 20 bp, synthetic construct
  source 1..20: mol_type = other DNA
agatgaacagacaggtcctg

SEQ ID NO: 10125 - DNA, 20 bp, synthetic construct
  source 1..20: mol_type = other DNA
agagactggtcctatgcagt

SEQ ID NO: 10126 - DNA, 20 bp, synthetic construct
  source 1..20: mol_type = other DNA
gcagcggtagccctgataga

SEQ ID NO: 10127 - DNA, 20 bp, synthetic construct
  source 1..20: mol_type = other DNA
gttccctgccaactacgtgg

SEQ ID NO: 10128 - DNA, 20 bp, synthetic construct
  source 1..20: mol_type = other DNA
ggaaggcatacctggaagga

SEQ ID NO: 10129 - DNA, 20 bp, synthetic construct
  source 1..20: mol_type = other DNA
acttctcacagcaggtggac

SEQ ID NO: 10130 - DNA, 20 bp, synthetic construct
  source 1..20: mol_type = other DNA
ggaacatgtggctccactgc

SEQ ID NO: 10131 - DNA, 20 bp, synthetic construct
  source 1..20: mol_type = other DNA
tatttgagaactcgctgcat

SEQ ID NO: 10132 - DNA, 20 bp, synthetic construct
  source 1..20: mol_type = other DNA
gtggatggagcagtttgaga

SEQ ID NO: 10133 - DNA, 20 bp, synthetic construct
  source 1..20: mol_type = other DNA
caccctgcgggacctgctga

SEQ ID NO: 10134 - DNA, 20 bp, synthetic construct
  source 1..20: mol_type = other DNA
ctcactcgatctggtcggac

SEQ ID NO: 10135 - DNA, 20 bp, synthetic construct
  source 1..20: mol_type = other DNA
tgggcggcagcacccggcac

SEQ ID NO: 10136 - DNA, 20 bp, synthetic construct
  source 1..20: mol_type = other DNA
caggtcctactcggagggaa

SEQ ID NO: 10137 - DNA, 20 bp, synthetic construct
  source 1..20: mol_type = other DNA
gccatagacgaggaacctac

SEQ ID NO: 10138 - DNA, 20 bp, synthetic construct
  source 1..20: mol_type = other DNA
ttgggcagacctggaggaca

SEQ ID NO: 10139 - DNA, 20 bp, synthetic construct
  source 1..20: mol_type = other DNA
gcattggcgccacagctcca

SEQ ID NO: 10140 - DNA, 20 bp, synthetic construct
  source 1..20: mol_type = other DNA
actggtcctatgcagtaggc

SEQ ID NO: 10141 - DNA, 20 bp, synthetic construct
  source 1..20: mol_type = other DNA
gctggccctggatgccatga

SEQ ID NO: 10142 - DNA, 20 bp, synthetic construct
  source 1..20: mol_type = other DNA
ccagctgtccattgagaacc

SEQ ID NO: 10143 - DNA, 20 bp, synthetic construct
  source 1..20: mol_type = other DNA
gcgaggggagatctatggcc

SEQ ID NO: 10144 - DNA, 20 bp, synthetic construct
  source 1..20: mol_type = other DNA
ctgagccaggtcctggggag

SEQ ID NO: 10145 - DNA, 20 bp, synthetic construct
  source 1..20: mol_type = other DNA
aacccacagcgacacggtgg

SEQ ID NO: 10146 - DNA, 20 bp, synthetic construct
  source 1..20: mol_type = other DNA
ccaagaaagtcccgtccgag

SEQ ID NO: 10147 - DNA, 20 bp, synthetic construct
  source 1..20: mol_type = other DNA
gggagatctatggccgggtg

SEQ ID NO: 10148 - DNA, 20 bp, synthetic construct
  source 1..20: mol_type = other DNA
cacgcaggaggcgatggaga

SEQ ID NO: 10149 - DNA, 20 bp, synthetic construct
  source 1..20: mol_type = other DNA
gtgcagatgcccggcaccga

SEQ ID NO: 10150 - DNA, 20 bp, synthetic construct
  source 1..20: mol_type = other DNA
gtgagctccacaatgtctcc

SEQ ID NO: 10151 - DNA, 20 bp, synthetic construct
  source 1..20: mol_type = other DNA
gaacatgtggctccactgca

SEQ ID NO: 10152 - DNA, 20 bp, synthetic construct
  source 1..20: mol_type = other DNA
ccgtgtcgctgtgggttgtg

SEQ ID NO: 10153 - DNA, 20 bp, synthetic construct
  source 1..20: mol_type = other DNA
atcagggctaccgctgccat

SEQ ID NO: 10154 - DNA, 20 bp, synthetic construct
  source 1..20: mol_type = other DNA
cgggtgaggcaggcagggct

SEQ ID NO: 10155 - DNA, 20 bp, synthetic construct
  source 1..20: mol_type = other DNA
agacattgtggagctcacga

SEQ ID NO: 10156 - DNA, 20 bp, synthetic construct
  source 1..20: mol_type = other DNA
aaggagatgaaggaagccct

SEQ ID NO: 10157 - DNA, 20 bp, synthetic construct
  source 1..20: mol_type = other DNA
ccgatcagagctgtcgctca

SEQ ID NO: 10158 - DNA, 20 bp, synthetic construct
  source 1..20: mol_type = other DNA
gaaggtacctctgagatgca

SEQ ID NO: 10159 - DNA, 20 bp, synthetic construct
  source 1..20: mol_type = other DNA
gaccgagacaacaagaaggt

SEQ ID NO: 10160 - DNA, 20 bp, synthetic construct
  source 1..20: mol_type = other DNA
ctcaatggacagctggaaat

SEQ ID NO: 10161 - DNA, 20 bp, synthetic construct
  source 1..20: mol_type = other DNA
acaacgggaggttcaccctg

SEQ ID NO: 10162 - DNA, 20 bp, synthetic construct
  source 1..20: mol_type = other DNA
gcccagccaccgcgtgacct

SEQ ID NO: 10163 - DNA, 20 bp, synthetic construct
  source 1..20: mol_type = other DNA
gggtgtagatgacctgtgac

SEQ ID NO: 10164 - DNA, 20 bp, synthetic construct
  source 1..20: mol_type = other DNA
tggtcctatgcagtaggcag

SEQ ID NO: 10165 - DNA, 20 bp, synthetic construct
  source 1..20: mol_type = other DNA
gacaaaaagaggaatgagct

SEQ ID NO: 10166 - DNA, 20 bp, synthetic construct
  source 1..20: mol_type = other DNA
agaaggtggggctttgacgc

SEQ ID NO: 10167 - DNA, 20 bp, synthetic construct
  source 1..20: mol_type = other DNA
gagaagtacactgacacgct

SEQ ID NO: 10168 - DNA, 20 bp, synthetic construct
  source 1..20: mol_type = other DNA
tgccagctccaacatctatc

SEQ ID NO: 10169 - DNA, 20 bp, synthetic construct
  source 1..20: mol_type = other DNA
ttctaatgttcttaaggcac

SEQ ID NO: 10170 - DNA, 20 bp, synthetic construct
  source 1..20: mol_type = other DNA
agacctggaggacagggtac

SEQ ID NO: 10171 - DNA, 20 bp, synthetic construct
  source 1..20: mol_type = other DNA
tgcagtagcggccatagacg

SEQ ID NO: 10172 - DNA, 20 bp, synthetic construct
  source 1..20: mol_type = other DNA
cctggctcagtgcgtgaacg

SEQ ID NO: 10173 - DNA, 20 bp, synthetic construct
  source 1..20: mol_type = other DNA
ctgcacacaaggagtgtctg

SEQ ID NO: 10174 - DNA, 20 bp, synthetic construct
  source 1..20: mol_type = other DNA
acagaactggtgggaggtac

SEQ ID NO: 10175 - DNA, 20 bp, synthetic construct
  source 1..20: mol_type = other DNA
ccggagaatgccaccgccaa

SEQ ID NO: 10176 - DNA, 20 bp, synthetic construct
  source 1..20: mol_type = other DNA
aggtttcaggaaccgttgca

SEQ ID NO: 10177 - DNA, 20 bp, synthetic construct
  source 1..20: mol_type = other DNA
atgcccggcaccgatggcag

SEQ ID NO: 10178 - DNA, 20 bp, synthetic construct
  source 1..20: mol_type = other DNA
ggtttcaggaaccgttgcag

SEQ ID NO: 10179 - DNA, 20 bp, synthetic construct
  source 1..20: mol_type = other DNA
actccacctggctgcagtag

SEQ ID NO: 10180 - DNA, 20 bp, synthetic construct
  source 1..20: mol_type = other DNA
tccaggacaaactacatcgc

SEQ ID NO: 10181 - DNA, 20 bp, synthetic construct
  source 1..20: mol_type = other DNA
cggagaatgccaccgccaac

SEQ ID NO: 10182 - DNA, 20 bp, synthetic construct
  source 1..20: mol_type = other DNA
ggtgtagatgacctgtgacg

SEQ ID NO: 10183 - DNA, 20 bp, synthetic construct
  source 1..20: mol_type = other DNA
tccctccatgtggccgacat

SEQ ID NO: 10184 - DNA, 20 bp, synthetic construct
  source 1..20: mol_type = other DNA
ggcgaggggagatctatggc

SEQ ID NO: 10185 - DNA, 20 bp, synthetic construct
  source 1..20: mol_type = other DNA
agcaggaaggcatacctgga

SEQ ID NO: 10186 - DNA, 20 bp, synthetic construct
  source 1..20: mol_type = other DNA
tcctccaggtctgcccaaga

SEQ ID NO: 10187 - DNA, 20 bp, synthetic construct
  source 1..20: mol_type = other DNA
ctgaggctgaacagaactgg

SEQ ID NO: 10188 - DNA, 20 bp, synthetic construct
  source 1..20: mol_type = other DNA
gcagaagtcatagcgggctt

SEQ ID NO: 10189 - DNA, 20 bp, synthetic construct
  source 1..20: mol_type = other DNA
atgaagctggaggtgggcgc

SEQ ID NO: 10190 - DNA, 20 bp, synthetic construct
  source 1..20: mol_type = other DNA
ctgacaggccttgcaggatg

SEQ ID NO: 10191 - DNA, 20 bp, synthetic construct
  source 1..20: mol_type = other DNA
ctacgggagggtaaaggaaa

SEQ ID NO: 10192 - DNA, 20 bp, synthetic construct
  source 1..20: mol_type = other DNA
catcttgggctgagagcgag

SEQ ID NO: 10193 - DNA, 20 bp, synthetic construct
  source 1..20: mol_type = other DNA
gcgggagatccagcagacgg

SEQ ID NO: 10194 - DNA, 20 bp, synthetic construct
  source 1..20: mol_type = other DNA
caccttgcagttccccttca

SEQ ID NO: 10195 - DNA, 20 bp, synthetic construct
  source 1..20: mol_type = other DNA
tcaagatcacctcggtggaa

SEQ ID NO: 10196 - DNA, 20 bp, synthetic construct
  source 1..20: mol_type = other DNA
ggctcacctgggacatctgg

SEQ ID NO: 10197 - DNA, 20 bp, synthetic construct
  source 1..20: mol_type = other DNA
catctactaatgaaattggc

SEQ ID NO: 10198 - DNA, 20 bp, synthetic construct
  source 1..20: mol_type = other DNA
gtacctgcaaagagacacca

SEQ ID NO: 10199 - DNA, 20 bp, synthetic construct
  source 1..20: mol_type = other DNA
acgcactgagccaggtcctg

SEQ ID NO: 10200 - DNA, 20 bp, synthetic construct
  source 1..20: mol_type = other DNA
tgtggcgccaatgcacccac

SEQ ID NO: 10201 - DNA, 20 bp, synthetic construct
  source 1..20: mol_type = other DNA
tctggaaccagatggtcacc

SEQ ID NO: 10202 - DNA, 20 bp, synthetic construct
  source 1..20: mol_type = other DNA
tcggtggggaagggcctggg

SEQ ID NO: 10203 - DNA, 20 bp, synthetic construct
  source 1..20: mol_type = other DNA
aatacatctactaatgaaat

SEQ ID NO: 10204 - DNA, 20 bp, synthetic construct
  source 1..20: mol_type = other DNA
caggttcgggatgactcttc

SEQ ID NO: 10205 - DNA, 20 bp, synthetic construct
  source 1..20: mol_type = other DNA
cccggcactggatgagccag

SEQ ID NO: 10206 - DNA, 20 bp, synthetic construct
  source 1..20: mol_type = other DNA
ctctactcatctgtaagcgc

SEQ ID NO: 10207 - DNA, 20 bp, synthetic construct
  source 1..20: mol_type = other DNA
aggagaccgagacaacaaga

SEQ ID NO: 10208 - DNA, 20 bp, synthetic construct
  source 1..20: mol_type = other DNA
ccctttctacggctcaaccc

SEQ ID NO: 10209 - DNA, 20 bp, synthetic construct
  source 1..20: mol_type = other DNA
gagggctcacctgggacatc

SEQ ID NO: 10210 - DNA, 20 bp, synthetic construct
  source 1..20: mol_type = other DNA
actgagccaggtcctgggga

SEQ ID NO: 10211 - DNA, 20 bp, synthetic construct
  source 1..20: mol_type = other DNA
cccactggctcatccagtgc

SEQ ID NO: 10212 - DNA, 20 bp, synthetic construct
  source 1..20: mol_type = other DNA
accccgatcgcccagaacag

SEQ ID NO: 10213 - DNA, 20 bp, synthetic construct
  source 1..20: mol_type = other DNA
cacacaaggagtgtctgggg

SEQ ID NO: 10214 - DNA, 20 bp, synthetic construct
  source 1..20: mol_type = other DNA
accgagacaacaagaaggtg

SEQ ID NO: 10215 - DNA, 20 bp, synthetic construct
  source 1..20: mol_type = other DNA
tggcagggaaccagccaacc

SEQ ID NO: 10216 - DNA, 20 bp, synthetic construct
  source 1..20: mol_type = other DNA
gctctctgagaacattcctg

SEQ ID NO: 10217 - DNA, 20 bp, synthetic construct
  source 1..20: mol_type = other DNA
gacagcaaggctggtggcga

SEQ ID NO: 10218 - DNA, 20 bp, synthetic construct
  source 1..20: mol_type = other DNA
gggtccaggacagagcagac

SEQ ID NO: 10219 - DNA, 20 bp, synthetic construct
  source 1..20: mol_type = other DNA
gcagggctcaggacaaaaag

SEQ ID NO: 10220 - DNA, 20 bp, synthetic construct
  source 1..20: mol_type = other DNA
ctcacagcaggtggacagga

SEQ ID NO: 10221 - DNA, 20 bp, synthetic construct
  source 1..20: mol_type = other DNA
gtttgctggctgactccacc

SEQ ID NO: 10222 - DNA, 20 bp, synthetic construct
  source 1..20: mol_type = other DNA
gtcacgcaccggcatggaca

SEQ ID NO: 10223 - DNA, 20 bp, synthetic construct
  source 1..20: mol_type = other DNA
accagatcgagtgagtgctc

SEQ ID NO: 10224 - DNA, 20 bp, synthetic construct
  source 1..20: mol_type = other DNA
gttccccgtcgatcttgggc

SEQ ID NO: 10225 - DNA, 20 bp, synthetic construct
  source 1..20: mol_type = other DNA
ctccaccagctcctagaagg

SEQ ID NO: 10226 - DNA, 20 bp, synthetic construct
  source 1..20: mol_type = other DNA
gtattcttagggccctcctc

SEQ ID NO: 10227 - DNA, 20 bp, synthetic construct
  source 1..20: mol_type = other DNA
ggcgctccaagatggacagg

SEQ ID NO: 10228 - DNA, 20 bp, synthetic construct
  source 1..20: mol_type = other DNA
ccatggctaccgcctgccca

SEQ ID NO: 10229 - DNA, 20 bp, synthetic construct
  source 1..20: mol_type = other DNA
gaaacacacgcaggaggcga

SEQ ID NO: 10230 - DNA, 20 bp, synthetic construct
  source 1..20: mol_type = other DNA
ccaggacaaactacatcgca

SEQ ID NO: 10231 - DNA, 20 bp, synthetic construct
  source 1..20: mol_type = other DNA
ccactggctcatccagtgcc

SEQ ID NO: 10232 - DNA, 20 bp, synthetic construct
  source 1..20: mol_type = other DNA
cgacagctctgatcggtctc

SEQ ID NO: 10233 - DNA, 20 bp, synthetic construct
  source 1..20: mol_type = other DNA
actcaccctcatggcatcca

SEQ ID NO: 10234 - DNA, 20 bp, synthetic construct
  source 1..20: mol_type = other DNA
caagagaattgaagaagaag

SEQ ID NO: 10235 - DNA, 20 bp, synthetic construct
  source 1..20: mol_type = other DNA
ggctgaacagaactggtggg

SEQ ID NO: 10236 - DNA, 20 bp, synthetic construct
  source 1..20: mol_type = other DNA
ggacaaaaagaggaatgagc

SEQ ID NO: 10237 - DNA, 20 bp, synthetic construct
  source 1..20: mol_type = other DNA
tgttcatactcacttcctaa

SEQ ID NO: 10238 - DNA, 20 bp, synthetic construct
  source 1..20: mol_type = other DNA
gatcgaggaccaaggtgccc

SEQ ID NO: 10239 - DNA, 20 bp, synthetic construct
  source 1..20: mol_type = other DNA
gttcctgggaaatctacggg

SEQ ID NO: 10240 - DNA, 20 bp, synthetic construct
  source 1..20: mol_type = other DNA
tgggctgagagcgaggggag

SEQ ID NO: 10241 - DNA, 20 bp, synthetic construct
  source 1..20: mol_type = other DNA
gcttcatctgcacgtcctcc

SEQ ID NO: 10242 - DNA, 20 bp, synthetic construct
  source 1..20: mol_type = other DNA
tggatgccatgagggtgagt

SEQ ID NO: 10243 - DNA, 20 bp, synthetic construct
  source 1..20: mol_type = other DNA
aggacctgtctgttcatctc

SEQ ID NO: 10244 - DNA, 20 bp, synthetic construct
  source 1..20: mol_type = other DNA
ggagaagtacactgacacgc

SEQ ID NO: 10245 - DNA, 20 bp, synthetic construct
  source 1..20: mol_type = other DNA
gctgggctccatccagcagg

SEQ ID NO: 10246 - DNA, 20 bp, synthetic construct
  source 1..20: mol_type = other DNA
cgaagagctcgctccgcttg

SEQ ID NO: 10247 - DNA, 20 bp, synthetic construct
  source 1..20: mol_type = other DNA
ggacgtgcagatgaagctgg

SEQ ID NO: 10248 - DNA, 20 bp, synthetic construct
  source 1..20: mol_type = other DNA
ctcacatgatccccctgttc

SEQ ID NO: 10249 - DNA, 20 bp, synthetic construct
  source 1..20: mol_type = other DNA
agaaggtacctctgagatgc

SEQ ID NO: 10250 - DNA, 20 bp, synthetic construct
  source 1..20: mol_type = other DNA
tgaagaacagctcatagccc

SEQ ID NO: 10251 - DNA, 20 bp, synthetic construct
  source 1..20: mol_type = other DNA
acagaaggacaccatcccgg

SEQ ID NO: 10252 - DNA, 20 bp, synthetic construct
  source 1..20: mol_type = other DNA
tgttaagcagctgacacaga

SEQ ID NO: 10253 - DNA, 20 bp, synthetic construct
  source 1..20: mol_type = other DNA
ggcgcaggttgacctcacgc

SEQ ID NO: 10254 - DNA, 20 bp, synthetic construct
  source 1..20: mol_type = other DNA
tggccggcccaagatcgacg

SEQ ID NO: 10255 - DNA, 20 bp, synthetic construct
  source 1..20: mol_type = other DNA
caggtgccaggcacatctct

SEQ ID NO: 10256 - DNA, 20 bp, synthetic construct
  source 1..20: mol_type = other DNA
agtctctggctcactatggc

SEQ ID NO: 10257 - DNA, 20 bp, synthetic construct
  source 1..20: mol_type = other DNA
agaagggacagcaaggctgg

SEQ ID NO: 10258 - DNA, 20 bp, synthetic construct
  source 1..20: mol_type = other DNA
agccaccgcgtgacctggga

SEQ ID NO: 10259 - DNA, 20 bp, synthetic construct
  source 1..20: mol_type = other DNA
ggcaggggcagagagcatcc

SEQ ID NO: 10260 - DNA, 20 bp, synthetic construct
  source 1..20: mol_type = other DNA
tcttcctccacgtagttggc

SEQ ID NO: 10261 - DNA, 20 bp, synthetic construct
  source 1..20: mol_type = other DNA
cactcaccctcatggcatcc

SEQ ID NO: 10262 - DNA, 20 bp, synthetic construct
  source 1..20: mol_type = other DNA
caaatatcacctccttctcc

SEQ ID NO: 10263 - DNA, 20 bp, synthetic construct
  source 1..20: mol_type = other DNA
ggactttcttggtgcggcag

SEQ ID NO: 10264 - DNA, 20 bp, synthetic construct
  source 1..20: mol_type = other DNA
gcaggtaggaggtctcagac

SEQ ID NO: 10265 - DNA, 20 bp, synthetic construct
  source 1..20: mol_type = other DNA
caggtaggaggtctcagact

SEQ ID NO: 10266 - DNA, 20 bp, synthetic construct
  source 1..20: mol_type = other DNA
cttcatctgcacgtcctccc

SEQ ID NO: 10267 - DNA, 20 bp, synthetic construct
  source 1..20: mol_type = other DNA
cgctgtgggttgtgaggtca

SEQ ID NO: 10268 - DNA, 20 bp, synthetic construct
  source 1..20: mol_type = other DNA
tcaagaaatgctgcggggaa

SEQ ID NO: 10269 - DNA, 20 bp, synthetic construct
  source 1..20: mol_type = other DNA
gcgacagctctgatcggtct

SEQ ID NO: 10270 - DNA, 20 bp, synthetic construct
  source 1..20: mol_type = other DNA
ccccatcccaggtcacgcgg

SEQ ID NO: 10271 - DNA, 20 bp, synthetic construct
  source 1..20: mol_type = other DNA
ggcattctccggatagatgt

SEQ ID NO: 10272 - DNA, 20 bp, synthetic construct
  source 1..20: mol_type = other DNA
tgcttaggtgagaatctggg

SEQ ID NO: 10273 - DNA, 20 bp, synthetic construct
  source 1..20: mol_type = other DNA
aagaaggtaagactttcccg

SEQ ID NO: 10274 - DNA, 20 bp, synthetic construct
  source 1..20: mol_type = other DNA
ctcagaggtaccttctatca

SEQ ID NO: 10275 - DNA, 20 bp, synthetic construct
  source 1..20: mol_type = other DNA
tcacgcactgagccaggtcc

SEQ ID NO: 10276 - DNA, 20 bp, synthetic construct
  source 1..20: mol_type = other DNA
cctccaccccctggagccat

SEQ ID NO: 10277 - DNA, 20 bp, synthetic construct
  source 1..20: mol_type = other DNA
cgagtgagtgctcaggcctg

SEQ ID NO: 10278 - DNA, 20 bp, synthetic construct
  source 1..20: mol_type = other DNA
cccgtatggctcaacttcga

SEQ ID NO: 10279 - DNA, 20 bp, synthetic construct
  source 1..20: mol_type = other DNA
ggcccgtacctcggtagctg

SEQ ID NO: 10280 - DNA, 20 bp, synthetic construct
  source 1..20: mol_type = other DNA
tacctcggtagctgtggatg

SEQ ID NO: 10281 - DNA, 20 bp, synthetic construct
  source 1..20: mol_type = other DNA
catacgggcagcacgacgcg

SEQ ID NO: 10282 - DNA, 20 bp, synthetic construct
  source 1..20: mol_type = other DNA
atccacagctaccgaggtac

SEQ ID NO: 10283 - DNA, 20 bp, synthetic construct
  source 1..20: mol_type = other DNA
ctaggctccggacaacctgg

SEQ ID NO: 10284 - DNA, 20 bp, synthetic construct
  source 1..20: mol_type = other DNA
agtacctggcagtgtgatat

SEQ ID NO: 10285 - DNA, 20 bp, synthetic construct
  source 1..20: mol_type = other DNA
aagagccaaaggtgacctat

SEQ ID NO: 10286 - DNA, 20 bp, synthetic construct
  source 1..20: mol_type = other DNA
tgacctatcgggacaagcaa

SEQ ID NO: 10287 - DNA, 20 bp, synthetic construct
  source 1..20: mol_type = other DNA
catccacagctaccgaggta

SEQ ID NO: 10288 - DNA, 20 bp, synthetic construct
  source 1..20: mol_type = other DNA
ttgcagaagatgacctggga

SEQ ID NO: 10289 - DNA, 20 bp, synthetic construct
  source 1..20: mol_type = other DNA
ttggtccagtgctcagctcc

SEQ ID NO: 10290 - DNA, 20 bp, synthetic construct
  source 1..20: mol_type = other DNA
ggctctcacttgaatccact

SEQ ID NO: 10291 - DNA, 20 bp, synthetic construct
  source 1..20: mol_type = other DNA
cccaggcatgtcagccacgt

SEQ ID NO: 10292 - DNA, 20 bp, synthetic construct
  source 1..20: mol_type = other DNA
gtggaggtgaggaggccaca

SEQ ID NO: 10293 - DNA, 20 bp, synthetic construct
  source 1..20: mol_type = other DNA
ggtccagtgctcagctccag

SEQ ID NO: 10294 - DNA, 20 bp, synthetic construct
  source 1..20: mol_type = other DNA
cagctcaccggaggagtgga

SEQ ID NO: 10295 - DNA, 20 bp, synthetic construct
  source 1..20: mol_type = other DNA
agcgaaggtgtggaagaagg

SEQ ID NO: 10296 - DNA, 20 bp, synthetic construct
  source 1..20: mol_type = other DNA
tcacgtcaaatccattctgg

SEQ ID NO: 10297 - DNA, 20 bp, synthetic construct
  source 1..20: mol_type = other DNA
tatgtgcaggactgccaagc

SEQ ID NO: 10298 - DNA, 20 bp, synthetic construct
  source 1..20: mol_type = other DNA
gccgtaaaggcggatgaagt

SEQ ID NO: 10299 - DNA, 20 bp, synthetic construct
  source 1..20: mol_type = other DNA
ggtgtggaagaagggggtgg

SEQ ID NO: 10300 - DNA, 20 bp, synthetic construct
  source 1..20: mol_type = other DNA
cagtggccagcgtctgggag

SEQ ID NO: 10301 - DNA, 20 bp, synthetic construct
  source 1..20: mol_type = other DNA
agatacaaaaaaggaatcag

SEQ ID NO: 10302 - DNA, 20 bp, synthetic construct
  source 1..20: mol_type = other DNA
ggtggcggtggtggcggtgg

SEQ ID NO: 10303 - DNA, 20 bp, synthetic construct
  source 1..20: mol_type = other DNA
tgtcccaggctggagtacag

SEQ ID NO: 10304 - DNA, 20 bp, synthetic construct
  source 1..20: mol_type = other DNA
cggcaggagatgaggcgcca

SEQ ID NO: 10305 - DNA, 20 bp, synthetic construct
  source 1..20: mol_type = other DNA
cagcgaaggtgtggaagaag

SEQ ID NO: 10306 - DNA, 20 bp, synthetic construct
  source 1..20: mol_type = other DNA
ggggcagatcgcttgagccc

SEQ ID NO: 10307 - DNA, 20 bp, synthetic construct
  source 1..20: mol_type = other DNA
agcactctgggaggctgagg

SEQ ID NO: 10308 - DNA, 20 bp, synthetic construct
  source 1..20: mol_type = other DNA
gtccagtgctcagctccagg

SEQ ID NO: 10309 - DNA, 20 bp, synthetic construct
  source 1..20: mol_type = other DNA
ggatgaagtaggacttctgg

SEQ ID NO: 10310 - DNA, 20 bp, synthetic construct
  source 1..20: mol_type = other DNA
ttacatctccagcgaaggtg

SEQ ID NO: 10311 - DNA, 20 bp, synthetic construct
  source 1..20: mol_type = other DNA
gcagtcctgcacataccttg

SEQ ID NO: 10312 - DNA, 20 bp, synthetic construct
  source 1..20: mol_type = other DNA
cggatgaagtaggacttctg

SEQ ID NO: 10313 - DNA, 20 bp, synthetic construct
  source 1..20: mol_type = other DNA
gcggatgaagtaggacttct

SEQ ID NO: 10314 - DNA, 20 bp, synthetic construct
  source 1..20: mol_type = other DNA
cgaaaatgcttggtgagctg

SEQ ID NO: 10315 - DNA, 20 bp, synthetic construct
  source 1..20: mol_type = other DNA
caaagagtcgctggttctcg

SEQ ID NO: 10316 - DNA, 20 bp, synthetic construct
  source 1..20: mol_type = other DNA
tggaggtgaggaggccacag

SEQ ID NO: 10317 - DNA, 20 bp, synthetic construct
  source 1..20: mol_type = other DNA
cagcgactctttgagatgct

SEQ ID NO: 10318 - DNA, 20 bp, synthetic construct
  source 1..20: mol_type = other DNA
atcacttacatctccagcga

SEQ ID NO: 10319 - DNA, 20 bp, synthetic construct
  source 1..20: mol_type = other DNA
tggtccagtgctcagctcca

SEQ ID NO: 10320 - DNA, 20 bp, synthetic construct
  source 1..20: mol_type = other DNA
tcccaggcatgtcagccacg

SEQ ID NO: 10321 - DNA, 20 bp, synthetic construct
  source 1..20: mol_type = other DNA
atgtgcaggactgccaagcg

SEQ ID NO: 10322 - DNA, 20 bp, synthetic construct
  source 1..20: mol_type = other DNA
gtacagctgaacaactgcag

SEQ ID NO: 10323 - DNA, 20 bp, synthetic construct
  source 1..20: mol_type = other DNA
ctggaccaaggagcattgtg

SEQ ID NO: 10324 - DNA, 20 bp, synthetic construct
  source 1..20: mol_type = other DNA
ggcggatgaagtaggacttc

SEQ ID NO: 10325 - DNA, 20 bp, synthetic construct
  source 1..20: mol_type = other DNA
gggtcacctgaaggccgtaa

SEQ ID NO: 10326 - DNA, 20 bp, synthetic construct
  source 1..20: mol_type = other DNA
ctcacgtcaaatccattctg

SEQ ID NO: 10327 - DNA, 20 bp, synthetic construct
  source 1..20: mol_type = other DNA
tcacctgaaggccgtaaagg

SEQ ID NO: 10328 - DNA, 20 bp, synthetic construct
  source 1..20: mol_type = other DNA
cgaccagcctggagaggtgt

SEQ ID NO: 10329 - DNA, 20 bp, synthetic construct
  source 1..20: mol_type = other DNA
tatttcctggatgcgaagac

SEQ ID NO: 10330 - DNA, 20 bp, synthetic construct
  source 1..20: mol_type = other DNA
caaggtgctgaagcagggca

SEQ ID NO: 10331 - DNA, 20 bp, synthetic construct
  source 1..20: mol_type = other DNA
ggccatcaaggtgctgaagc

SEQ ID NO: 10332 - DNA, 20 bp, synthetic construct
  source 1..20: mol_type = other DNA
tacgccaagatcagcgactt

SEQ ID NO: 10333 - DNA, 20 bp, synthetic construct
  source 1..20: mol_type = other DNA
tacagtgtagtagctgtcgt

SEQ ID NO: 10334 - DNA, 20 bp, synthetic construct
  source 1..20: mol_type = other DNA
caagtgagtgccagtgggga

SEQ ID NO: 10335 - DNA, 20 bp, synthetic construct
  source 1..20: mol_type = other DNA
ctgctgagcgggcctgggga

SEQ ID NO: 10336 - DNA, 20 bp, synthetic construct
  source 1..20: mol_type = other DNA
ggtggagtatctgaagctga

SEQ ID NO: 10337 - DNA, 20 bp, synthetic construct
  source 1..20: mol_type = other DNA
cgacggcaagttcctgtatg

SEQ ID NO: 10338 - DNA, 20 bp, synthetic construct
  source 1..20: mol_type = other DNA
tgctgccgtagaagaagggc

SEQ ID NO: 10339 - DNA, 20 bp, synthetic construct
  source 1..20: mol_type = other DNA
aggttgcagggcagcccgtc

SEQ ID NO: 10340 - DNA, 20 bp, synthetic construct
  source 1..20: mol_type = other DNA
cggcacccagtgctttggag

SEQ ID NO: 10341 - DNA, 20 bp, synthetic construct
  source 1..20: mol_type = other DNA
cggcccacgagcggatgccc

SEQ ID NO: 10342 - DNA, 20 bp, synthetic construct
  source 1..20: mol_type = other DNA
gggcacggagaaggcagaca

SEQ ID NO: 10343 - DNA, 20 bp, synthetic construct
  source 1..20: mol_type = other DNA
ccgaccaggaacttgtgcag

SEQ ID NO: 10344 - DNA, 20 bp, synthetic construct
  source 1..20: mol_type = other DNA
ctgctccacggtcaggaagt

SEQ ID NO: 10345 - DNA, 20 bp, synthetic construct
  source 1..20: mol_type = other DNA
ctcaggtgacggcagcaggc

SEQ ID NO: 10346 - DNA, 20 bp, synthetic construct
  source 1..20: mol_type = other DNA
ggacacctggtgcagcagct

SEQ ID NO: 10347 - DNA, 20 bp, synthetic construct
  source 1..20: mol_type = other DNA
tatctgaagctgaaggcgga

SEQ ID NO: 10348 - DNA, 20 bp, synthetic construct
  source 1..20: mol_type = other DNA
ccgcggcctcagcctggcag

SEQ ID NO: 10349 - DNA, 20 bp, synthetic construct
  source 1..20: mol_type = other DNA
cagcgatgtctggagctatg

SEQ ID NO: 10350 - DNA, 20 bp, synthetic construct
  source 1..20: mol_type = other DNA
tgctccacggtcaggaagtc

SEQ ID NO: 10351 - DNA, 20 bp, synthetic construct
  source 1..20: mol_type = other DNA
gcagaagatgaaagggccgg

SEQ ID NO: 10352 - DNA, 20 bp, synthetic construct
  source 1..20: mol_type = other DNA
caatgagccgcacgatgtag

SEQ ID NO: 10353 - DNA, 20 bp, synthetic construct
  source 1..20: mol_type = other DNA
gcatgcgctgctccacggtc

SEQ ID NO: 10354 - DNA, 20 bp, synthetic construct
  source 1..20: mol_type = other DNA
cgaaacctgcgggttcacag

SEQ ID NO: 10355 - DNA, 20 bp, synthetic construct
  source 1..20: mol_type = other DNA
cacggcttgcgcaggttgca

SEQ ID NO: 10356 - DNA, 20 bp, synthetic construct
  source 1..20: mol_type = other DNA
cctcatcagccaagacaagg

SEQ ID NO: 10357 - DNA, 20 bp, synthetic construct
  source 1..20: mol_type = other DNA
agcgcaggcactggcgcagc

SEQ ID NO: 10358 - DNA, 20 bp, synthetic construct
  source 1..20: mol_type = other DNA
cgccagtgcctgcgctcgct

SEQ ID NO: 10359 - DNA, 20 bp, synthetic construct
  source 1..20: mol_type = other DNA
ggcgctcgatgggaaagtgg

SEQ ID NO: 10360 - DNA, 20 bp, synthetic construct
  source 1..20: mol_type = other DNA
catcgagcagggcaagcgga

SEQ ID NO: 10361 - DNA, 20 bp, synthetic construct
  source 1..20: mol_type = other DNA
tctacaagtgagtgccagtg

SEQ ID NO: 10362 - DNA, 20 bp, synthetic construct
  source 1..20: mol_type = other DNA
ggagaagctcattgctacga

SEQ ID NO: 10363 - DNA, 20 bp, synthetic construct
  source 1..20: mol_type = other DNA
gcagctctgaggcccacggt

SEQ ID NO: 10364 - DNA, 20 bp, synthetic construct
  source 1..20: mol_type = other DNA
gagctatggggtcaccatgt

SEQ ID NO: 10365 - DNA, 20 bp, synthetic construct
  source 1..20: mol_type = other DNA
tgaggaggttatcgcgcttc

SEQ ID NO: 10366 - DNA, 20 bp, synthetic construct
  source 1..20: mol_type = other DNA
ctcatgagtgcgtacagttc

SEQ ID NO: 10367 - DNA, 20 bp, synthetic construct
  source 1..20: mol_type = other DNA
gcgagcctgttactacagcc

SEQ ID NO: 10368 - DNA, 20 bp, synthetic construct
  source 1..20: mol_type = other DNA
cctgaagctggcgggcatgg

SEQ ID NO: 10369 - DNA, 20 bp, synthetic construct
  source 1..20: mol_type = other DNA
catcatcagccaggccccgc

SEQ ID NO: 10370 - DNA, 20 bp, synthetic construct
  source 1..20: mol_type = other DNA
tcacatgagtcaacgtggat

SEQ ID NO: 10371 - DNA, 20 bp, synthetic construct
  source 1..20: mol_type = other DNA
ggccgaggagcacctgaagc

SEQ ID NO: 10372 - DNA, 20 bp, synthetic construct
  source 1..20: mol_type = other DNA
gggcaggaagcagatcgacg

SEQ ID NO: 10373 - DNA, 20 bp, synthetic construct
  source 1..20: mol_type = other DNA
cgcaggcagtcgaagacccc

SEQ ID NO: 10374 - DNA, 20 bp, synthetic construct
  source 1..20: mol_type = other DNA
gcagatcgacgtggccatca

SEQ ID NO: 10375 - DNA, 20 bp, synthetic construct
  source 1..20: mol_type = other DNA
gccatcaaggtgctgaagca

SEQ ID NO: 10376 - DNA, 20 bp, synthetic construct
  source 1..20: mol_type = other DNA
ctgccagagcgtgtcaaact

SEQ ID NO: 10377 - DNA, 20 bp, synthetic construct
  source 1..20: mol_type = other DNA
gctgaagcagggcacggaga

SEQ ID NO: 10378 - DNA, 20 bp, synthetic construct
  source 1..20: mol_type = other DNA
cctgagctcccgctgcccag

SEQ ID NO: 10379 - DNA, 20 bp, synthetic construct
  source 1..20: mol_type = other DNA
gcctcgccctagaaaaggag

SEQ ID NO: 10380 - DNA, 20 bp, synthetic construct
  source 1..20: mol_type = other DNA
tcctcccacctgtggggcgt

SEQ ID NO: 10381 - DNA, 20 bp, synthetic construct
  source 1..20: mol_type = other DNA
ccagggcctcgccctagaaa

SEQ ID NO: 10382 - DNA, 20 bp, synthetic construct
  source 1..20: mol_type = other DNA
gcgcacgtagtcacgcacca

SEQ ID NO: 10383 - DNA, 20 bp, synthetic construct
  source 1..20: mol_type = other DNA
gaagaagggcaggtgcgccg

SEQ ID NO: 10384 - DNA, 20 bp, synthetic construct
  source 1..20: mol_type = other DNA
cgtcaggctgctgtggtacc

SEQ ID NO: 10385 - DNA, 20 bp, synthetic construct
  source 1..20: mol_type = other DNA
cacggaagagatgatgcgcg

SEQ ID NO: 10386 - DNA, 20 bp, synthetic construct
  source 1..20: mol_type = other DNA
tcgggtgcgtaccacttgag

SEQ ID NO: 10387 - DNA, 20 bp, synthetic construct
  source 1..20: mol_type = other DNA
acgcactcatgagtgactgc

SEQ ID NO: 10388 - DNA, 20 bp, synthetic construct
  source 1..20: mol_type = other DNA
tgagcagaagatgaaagggc

SEQ ID NO: 10389 - DNA, 20 bp, synthetic construct
  source 1..20: mol_type = other DNA
tcatggagatggctgggggc

SEQ ID NO: 10390 - DNA, 20 bp, synthetic construct
  source 1..20: mol_type = other DNA
ctttgtgcaccgtgacctgg

SEQ ID NO: 10391 - DNA, 20 bp, synthetic construct
  source 1..20: mol_type = other DNA
ggcggcccgcaacgtcctgc

SEQ ID NO: 10392 - DNA, 20 bp, synthetic construct
  source 1..20: mol_type = other DNA
gccgtcacctgaggcgttgc

SEQ ID NO: 10393 - DNA, 20 bp, synthetic construct
  source 1..20: mol_type = other DNA
cttcaggtgctcctcggcct

SEQ ID NO: 10394 - DNA, 20 bp, synthetic construct
  source 1..20: mol_type = other DNA
ccaactcacatgagtcaacg

SEQ ID NO: 10395 - DNA, 20 bp, synthetic construct
  source 1..20: mol_type = other DNA
tacagttcgggtggacactc

SEQ ID NO: 10396 - DNA, 20 bp, synthetic construct
  source 1..20: mol_type = other DNA
ctccaggtacttcatcccca

SEQ ID NO: 10397 - DNA, 20 bp, synthetic construct
  source 1..20: mol_type = other DNA
ctatggggtcaccatgtggg

SEQ ID NO: 10398 - DNA, 20 bp, synthetic construct
  source 1..20: mol_type = other DNA
tcttcccatagatgagggac

SEQ ID NO: 10399 - DNA, 20 bp, synthetic construct
  source 1..20: mol_type = other DNA
ctccccaggcccgctcagca

SEQ ID NO: 10400 - DNA, 20 bp, synthetic construct
  source 1..20: mol_type = other DNA
cctgcgggttcacagagggt

SEQ ID NO: 10401 - DNA, 20 bp, synthetic construct
  source 1..20: mol_type = other DNA
gcctgagctcccgctgccca

SEQ ID NO: 10402 - DNA, 20 bp, synthetic construct
  source 1..20: mol_type = other DNA
gcgccagacgtggaagctgg

SEQ ID NO: 10403 - DNA, 20 bp, synthetic construct
  source 1..20: mol_type = other DNA
ggcacctacgccattgccgg

SEQ ID NO: 10404 - DNA, 20 bp, synthetic construct
  source 1..20: mol_type = other DNA
gcaggtttcgggaggcccag

SEQ ID NO: 10405 - DNA, 20 bp, synthetic construct
  source 1..20: mol_type = other DNA
ccatctccatgaccagcatg

SEQ ID NO: 10406 - DNA, 20 bp, synthetic construct
  source 1..20: mol_type = other DNA
cgtgcgccagacgtggaagc

SEQ ID NO: 10407 - DNA, 20 bp, synthetic construct
  source 1..20: mol_type = other DNA
gcctggtgtctgctgagctc

SEQ ID NO: 10408 - DNA, 20 bp, synthetic construct
  source 1..20: mol_type = other DNA
cagcagcctgacgcgtgagg

SEQ ID NO: 10409 - DNA, 20 bp, synthetic construct
  source 1..20: mol_type = other DNA
cgcagcgatgtctggagcta

SEQ ID NO: 10410 - DNA, 20 bp, synthetic construct
  source 1..20: mol_type = other DNA
ctacctcatcagccaagaca

SEQ ID NO: 10411 - DNA, 20 bp, synthetic construct
  source 1..20: mol_type = other DNA
gctgctgcaccaggtgtcca

SEQ ID NO: 10412 - DNA, 20 bp, synthetic construct
  source 1..20: mol_type = other DNA
ggagctatggggtcaccatg

SEQ ID NO: 10413 - DNA, 20 bp, synthetic construct
  source 1..20: mol_type = other DNA
gagatgctgccgtagaagaa

SEQ ID NO: 10414 - DNA, 20 bp, synthetic construct
  source 1..20: mol_type = other DNA
tggcgtaggtgccgttgagc

SEQ ID NO: 10415 - DNA, 20 bp, synthetic construct
  source 1..20: mol_type = other DNA
ttcctgcccgacccggccac

SEQ ID NO: 10416 - DNA, 20 bp, synthetic construct
  source 1..20: mol_type = other DNA
cgcccagcgagcgcaggcac

SEQ ID NO: 10417 - DNA, 20 bp, synthetic construct
  source 1..20: mol_type = other DNA
tccgcggcctcagcctggca

SEQ ID NO: 10418 - DNA, 20 bp, synthetic construct
  source 1..20: mol_type = other DNA
tgagccaggtgagcgggcag

SEQ ID NO: 10419 - DNA, 20 bp, synthetic construct
  source 1..20: mol_type = other DNA
gccaatgagccgcacgatgt

SEQ ID NO: 10420 - DNA, 20 bp, synthetic construct
  source 1..20: mol_type = other DNA
tgcctgagctcccgctgccc

SEQ ID NO: 10421 - DNA, 20 bp, synthetic construct
  source 1..20: mol_type = other DNA
cttgtagggcttctggccgt

SEQ ID NO: 10422 - DNA, 20 bp, synthetic construct
  source 1..20: mol_type = other DNA
gggcaagtactgcattcccg

SEQ ID NO: 10423 - DNA, 20 bp, synthetic construct
  source 1..20: mol_type = other DNA
ctgaggccgcggaaggagca

SEQ ID NO: 10424 - DNA, 20 bp, synthetic construct
  source 1..20: mol_type = other DNA
ctgcccgctcacctggctca

SEQ ID NO: 10425 - DNA, 20 bp, synthetic construct
  source 1..20: mol_type = other DNA
ccgcttgccctgctcgatga

SEQ ID NO: 10426 - DNA, 20 bp, synthetic construct
  source 1..20: mol_type = other DNA
gctccagacatcgctgcggc

SEQ ID NO: 10427 - DNA, 20 bp, synthetic construct
  source 1..20: mol_type = other DNA
acggcaagttcctgtatgtg

SEQ ID NO: 10428 - DNA, 20 bp, synthetic construct
  source 1..20: mol_type = other DNA
ccgccttgtcttggctgatg

SEQ ID NO: 10429 - DNA, 20 bp, synthetic construct
  source 1..20: mol_type = other DNA
gctccacggtcaggaagtcg

SEQ ID NO: 10430 - DNA, 20 bp, synthetic construct
  source 1..20: mol_type = other DNA
gatgaaagggccggaggtca

SEQ ID NO: 10431 - DNA, 20 bp, synthetic construct
  source 1..20: mol_type = other DNA
gccaggtgagcgggcagagg

SEQ ID NO: 10432 - DNA, 20 bp, synthetic construct
  source 1..20: mol_type = other DNA
gcacggcttgcgcaggttgc

SEQ ID NO: 10433 - DNA, 20 bp, synthetic construct
  source 1..20: mol_type = other DNA
tcatacacgctcgtgtccat

SEQ ID NO: 10434 - DNA, 20 bp, synthetic construct
  source 1..20: mol_type = other DNA
cttcctgcccgacccggcca

SEQ ID NO: 10435 - DNA, 20 bp, synthetic construct
  source 1..20: mol_type = other DNA
cttcccatagatgagggaca

SEQ ID NO: 10436 - DNA, 20 bp, synthetic construct
  source 1..20: mol_type = other DNA
ttcatcttctgctcaagccg

SEQ ID NO: 10437 - DNA, 20 bp, synthetic construct
  source 1..20: mol_type = other DNA
tacgccctgtccctcatcta

SEQ ID NO: 10438 - DNA, 20 bp, synthetic construct
  source 1..20: mol_type = other DNA
ccttcatcgagcagggcaag

SEQ ID NO: 10439 - DNA, 20 bp, synthetic construct
  source 1..20: mol_type = other DNA
gctggtcatggagatggctg

SEQ ID NO: 10440 - DNA, 20 bp, synthetic construct
  source 1..20: mol_type = other DNA
atgagtgcgtacagttcggg

SEQ ID NO: 10441 - DNA, 20 bp, synthetic construct
  source 1..20: mol_type = other DNA
gtgtcaaacttggtgccctc

SEQ ID NO: 10442 - DNA, 20 bp, synthetic construct
  source 1..20: mol_type = other DNA
tcgccccgacttcctgaccg

SEQ ID NO: 10443 - DNA, 20 bp, synthetic construct
  source 1..20: mol_type = other DNA
cgcaggtttcgggaggccca

SEQ ID NO: 10444 - DNA, 20 bp, synthetic construct
  source 1..20: mol_type = other DNA
tactctggggcgcagaccga

SEQ ID NO: 10445 - DNA, 20 bp, synthetic construct
  source 1..20: mol_type = other DNA
ggccagaagccctacaaggc

SEQ ID NO: 10446 - DNA, 20 bp, synthetic construct
  source 1..20: mol_type = other DNA
tttcatcttctgctcaagcc

SEQ ID NO: 10447 - DNA, 20 bp, synthetic construct
  source 1..20: mol_type = other DNA
gcctcagcctggcaggggaa

SEQ ID NO: 10448 - DNA, 20 bp, synthetic construct
  source 1..20: mol_type = other DNA
ctcatcagccaagacaaggc

SEQ ID NO: 10449 - DNA, 20 bp, synthetic construct
  source 1..20: mol_type = other DNA
ccaatgagccgcacgatgta

SEQ ID NO: 10450 - DNA, 20 bp, synthetic construct
  source 1..20: mol_type = other DNA
gcacaaagttcttctcctcc

SEQ ID NO: 10451 - DNA, 20 bp, synthetic construct
  source 1..20: mol_type = other DNA
ccgccatgcccgccagcttc

SEQ ID NO: 10452 - DNA, 20 bp, synthetic construct
  source 1..20: mol_type = other DNA
gcaagaggtgagcaccgggt

SEQ ID NO: 10453 - DNA, 20 bp, synthetic construct
  source 1..20: mol_type = other DNA
aagaagggcaggtgcgccgc

SEQ ID NO: 10454 - DNA, 20 bp, synthetic construct
  source 1..20: mol_type = other DNA
atctgaagctgaaggcggac

SEQ ID NO: 10455 - DNA, 20 bp, synthetic construct
  source 1..20: mol_type = other DNA
gaggccaaagtcgctgatct

SEQ ID NO: 10456 - DNA, 20 bp, synthetic construct
  source 1..20: mol_type = other DNA
gcctggccagcaaggtggaa

SEQ ID NO: 10457 - DNA, 20 bp, synthetic construct
  source 1..20: mol_type = other DNA
ctagaaaaggagaggcgagg

SEQ ID NO: 10458 - DNA, 20 bp, synthetic construct
  source 1..20: mol_type = other DNA
ggtaccagggcatccgctcg

SEQ ID NO: 10459 - DNA, 20 bp, synthetic construct
  source 1..20: mol_type = other DNA
ggcaagtactgcattcccga

SEQ ID NO: 10460 - DNA, 20 bp, synthetic construct
  source 1..20: mol_type = other DNA
aatgagcttctccacctgcg

SEQ ID NO: 10461 - DNA, 20 bp, synthetic construct
  source 1..20: mol_type = other DNA
cgggctcatctactgcctga

SEQ ID NO: 10462 - DNA, 20 bp, synthetic construct
  source 1..20: mol_type = other DNA
ccctacatcgtgcggctcat

SEQ ID NO: 10463 - DNA, 20 bp, synthetic construct
  source 1..20: mol_type = other DNA
tacaaggcaggcgcgggcag

SEQ ID NO: 10464 - DNA, 20 bp, synthetic construct
  source 1..20: mol_type = other DNA
cgtgtcaaacttggtgccct

SEQ ID NO: 10465 - DNA, 20 bp, synthetic construct
  source 1..20: mol_type = other DNA
ctggtcatggagatggctgg

SEQ ID NO: 10466 - DNA, 20 bp, synthetic construct
  source 1..20: mol_type = other DNA
cagggaagtggccgctcaag

SEQ ID NO: 10467 - DNA, 20 bp, synthetic construct
  source 1..20: mol_type = other DNA
tcacctccagcttccacgtc

SEQ ID NO: 10468 - DNA, 20 bp, synthetic construct
  source 1..20: mol_type = other DNA
catgagtcaacgtggatggg

SEQ ID NO: 10469 - DNA, 20 bp, synthetic construct
  source 1..20: mol_type = other DNA
gtaggacaaggcctcccaca

SEQ ID NO: 10470 - DNA, 20 bp, synthetic construct
  source 1..20: mol_type = other DNA
caggttgcagggcagcccgt

SEQ ID NO: 10471 - DNA, 20 bp, synthetic construct
  source 1..20: mol_type = other DNA
ccacagcagcctgacgcgtg

SEQ ID NO: 10472 - DNA, 20 bp, synthetic construct
  source 1..20: mol_type = other DNA
tcagatactccaccagctgc

SEQ ID NO: 10473 - DNA, 20 bp, synthetic construct
  source 1..20: mol_type = other DNA
agtacttgcccgccttgtct

SEQ ID NO: 10474 - DNA, 20 bp, synthetic construct
  source 1..20: mol_type = other DNA
cgccagcttcaggtgctcct

SEQ ID NO: 10475 - DNA, 20 bp, synthetic construct
  source 1..20: mol_type = other DNA
acgccctgtccctcatctat

SEQ ID NO: 10476 - DNA, 20 bp, synthetic construct
  source 1..20: mol_type = other DNA
tccacagtgcgctttgccgc

SEQ ID NO: 10477 - DNA, 20 bp, synthetic construct
  source 1..20: mol_type = other DNA
gtcatggagatggctggggg

SEQ ID NO: 10478 - DNA, 20 bp, synthetic construct
  source 1..20: mol_type = other DNA
cggccacttccctgctgagc

SEQ ID NO: 10479 - DNA, 20 bp, synthetic construct
  source 1..20: mol_type = other DNA
gaaacctgcgggttcacaga

SEQ ID NO: 10480 - DNA, 20 bp, synthetic construct
  source 1..20: mol_type = other DNA
tagaactcgcagagctctgc

SEQ ID NO: 10481 - DNA, 20 bp, synthetic construct
  source 1..20: mol_type = other DNA
ggcaagaggtgagcaccggg

SEQ ID NO: 10482 - DNA, 20 bp, synthetic construct
  source 1..20: mol_type = other DNA
ggcctcagcctggcagggga

SEQ ID NO: 10483 - DNA, 20 bp, synthetic construct
  source 1..20: mol_type = other DNA
gcgccagtgcctgcgctcgc

SEQ ID NO: 10484 - DNA, 20 bp, synthetic construct
  source 1..20: mol_type = other DNA
ctttcatcttctgctcaagc

SEQ ID NO: 10485 - DNA, 20 bp, synthetic construct
  source 1..20: mol_type = other DNA
ggagtatctgaagctgaagg

SEQ ID NO: 10486 - DNA, 20 bp, synthetic construct
  source 1..20: mol_type = other DNA
gctcatctactgcctgaagg

SEQ ID NO: 10487 - DNA, 20 bp, synthetic construct
  source 1..20: mol_type = other DNA
ggtgtatccatctgagttga

SEQ ID NO: 10488 - DNA, 20 bp, synthetic construct
  source 1..20: mol_type = other DNA
caggtgagcgggcagaggtg

SEQ ID NO: 10489 - DNA, 20 bp, synthetic construct
  source 1..20: mol_type = other DNA
ccgctgcacaagttcctggt

SEQ ID NO: 10490 - DNA, 20 bp, synthetic construct
  source 1..20: mol_type = other DNA
ccaggccgaggccctcatgc

SEQ ID NO: 10491 - DNA, 20 bp, synthetic construct
  source 1..20: mol_type = other DNA
actcatgagtgcgtacagtt

SEQ ID NO: 10492 - DNA, 20 bp, synthetic construct
  source 1..20: mol_type = other DNA
ttgctacgacggcccacgag

SEQ ID NO: 10493 - DNA, 20 bp, synthetic construct
  source 1..20: mol_type = other DNA
ccagcatgagggcctcggcc

SEQ ID NO: 10494 - DNA, 20 bp, synthetic construct
  source 1..20: mol_type = other DNA
aagccctacaaggcaggcgc

SEQ ID NO: 10495 - DNA, 20 bp, synthetic construct
  source 1..20: mol_type = other DNA
cgctgcggctggagaacttg

SEQ ID NO: 10496 - DNA, 20 bp, synthetic construct
  source 1..20: mol_type = other DNA
tgctggtcatggagatggct

SEQ ID NO: 10497 - DNA, 20 bp, synthetic construct
  source 1..20: mol_type = other DNA
gtccctcatctatgggaaga

SEQ ID NO: 10498 - DNA, 20 bp, synthetic construct
  source 1..20: mol_type = other DNA
cggggcgatcctcccacctg

SEQ ID NO: 10499 - DNA, 20 bp, synthetic construct
  source 1..20: mol_type = other DNA
gggcgatcctcccacctgtg

SEQ ID NO: 10500 - DNA, 20 bp, synthetic construct
  source 1..20: mol_type = other DNA
gtaccagggcatccgctcgt

SEQ ID NO: 10501 - DNA, 20 bp, synthetic construct
  source 1..20: mol_type = other DNA
ggggcgatcctcccacctgt

SEQ ID NO: 10502 - DNA, 20 bp, synthetic construct
  source 1..20: mol_type = other DNA
gctggccaggctgtagtaac

SEQ ID NO: 10503 - DNA, 20 bp, synthetic construct
  source 1..20: mol_type = other DNA
caagttcaatgtcagctatg

SEQ ID NO: 10504 - DNA, 20 bp, synthetic construct
  source 1..20: mol_type = other DNA
tctgcccgctcacctggctc

SEQ ID NO: 10505 - DNA, 20 bp, synthetic construct
  source 1..20: mol_type = other DNA
ctgcccgacccggccacggg

SEQ ID NO: 10506 - DNA, 20 bp, synthetic construct
  source 1..20: mol_type = other DNA
gacggcaagttcctgtatgt

SEQ ID NO: 10507 - DNA, 20 bp, synthetic construct
  source 1..20: mol_type = other DNA
ctcacatgagtcaacgtgga

SEQ ID NO: 10508 - DNA, 20 bp, synthetic construct
  source 1..20: mol_type = other DNA
catggggatgaagtacctgg

SEQ ID NO: 10509 - DNA, 20 bp, synthetic construct
  source 1..20: mol_type = other DNA
acttcatccccatggacacc

SEQ ID NO: 10510 - DNA, 20 bp, synthetic construct
  source 1..20: mol_type = other DNA
atctacaagtgagtgccagt

SEQ ID NO: 10511 - DNA, 20 bp, synthetic construct
  source 1..20: mol_type = other DNA
agaagggcaggtgcgccgcg

SEQ ID NO: 10512 - DNA, 20 bp, synthetic construct
  source 1..20: mol_type = other DNA
ggcgcagatcatgcaccagc

SEQ ID NO: 10513 - DNA, 20 bp, synthetic construct
  source 1..20: mol_type = other DNA
ccaggtgagcgggcagaggt

SEQ ID NO: 10514 - DNA, 20 bp, synthetic construct
  source 1..20: mol_type = other DNA
tgctgcaccaggtgtccatg

SEQ ID NO: 10515 - DNA, 20 bp, synthetic construct
  source 1..20: mol_type = other DNA
gcaccaagtttgacacgctc

SEQ ID NO: 10516 - DNA, 20 bp, synthetic construct
  source 1..20: mol_type = other DNA
cctcacgcgtcaggctgctg

SEQ ID NO: 10517 - DNA, 20 bp, synthetic construct
  source 1..20: mol_type = other DNA
tttgacacgctctggcaggt

SEQ ID NO: 10518 - DNA, 20 bp, synthetic construct
  source 1..20: mol_type = other DNA
cctggatgcgaagacaggaa

SEQ ID NO: 10519 - DNA, 20 bp, synthetic construct
  source 1..20: mol_type = other DNA
ctacggccagaagccctaca

SEQ ID NO: 10520 - DNA, 20 bp, synthetic construct
  source 1..20: mol_type = other DNA
ggctcgcatgcgctgctcca

SEQ ID NO: 10521 - DNA, 20 bp, synthetic construct
  source 1..20: mol_type = other DNA
cgttgcgggccgccaggtca

SEQ ID NO: 10522 - DNA, 20 bp, synthetic construct
  source 1..20: mol_type = other DNA
catagctccagacatcgctg

SEQ ID NO: 10523 - DNA, 20 bp, synthetic construct
  source 1..20: mol_type = other DNA
tggacaacccctacatcgtg

SEQ ID NO: 10524 - DNA, 20 bp, synthetic construct
  source 1..20: mol_type = other DNA
ctccaccagctgcagggagc

SEQ ID NO: 10525 - DNA, 20 bp, synthetic construct
  source 1..20: mol_type = other DNA
gccctagaaaaggagaggcg

SEQ ID NO: 10526 - DNA, 20 bp, synthetic construct
  source 1..20: mol_type = other DNA
gctcggcctcctcacgcgtc

SEQ ID NO: 10527 - DNA, 20 bp, synthetic construct
  source 1..20: mol_type = other DNA
cgctgatcttggcgtagtgc

SEQ ID NO: 10528 - DNA, 20 bp, synthetic construct
  source 1..20: mol_type = other DNA
tctctgaggctaaaggccac

SEQ ID NO: 10529 - DNA, 20 bp, synthetic construct
  source 1..20: mol_type = other DNA
tgccaggctgaggccgcgga

SEQ ID NO: 10530 - DNA, 20 bp, synthetic construct
  source 1..20: mol_type = other DNA
ttctactcgcgcgaccccga

SEQ ID NO: 10531 - DNA, 20 bp, synthetic construct
  source 1..20: mol_type = other DNA
gtcaggctgctgtggtacca

SEQ ID NO: 10532 - DNA, 20 bp, synthetic construct
  source 1..20: mol_type = other DNA
cggggtctggcatcgcccct

SEQ ID NO: 10533 - DNA, 20 bp, synthetic construct
  source 1..20: mol_type = other DNA
catagccgcccagcgagcgc

SEQ ID NO: 10534 - DNA, 20 bp, synthetic construct
  source 1..20: mol_type = other DNA
gatctacaagtgagtgccag

SEQ ID NO: 10535 - DNA, 20 bp, synthetic construct
  source 1..20: mol_type = other DNA
cacatacaggaacttgccgt

SEQ ID NO: 10536 - DNA, 20 bp, synthetic construct
  source 1..20: mol_type = other DNA
caatgagcttctccacctgc

SEQ ID NO: 10537 - DNA, 20 bp, synthetic construct
  source 1..20: mol_type = other DNA
gggtgtatccatctgagttg

SEQ ID NO: 10538 - DNA, 20 bp, synthetic construct
  source 1..20: mol_type = other DNA
cacccctgagccaggtgagc

SEQ ID NO: 10539 - DNA, 20 bp, synthetic construct
  source 1..20: mol_type = other DNA
gcaatgagcttctccacctg

SEQ ID NO: 10540 - DNA, 20 bp, synthetic construct
  source 1..20: mol_type = other DNA
cgagatgctgccgtagaaga

SEQ ID NO: 10541 - DNA, 20 bp, synthetic construct
  source 1..20: mol_type = other DNA
gaagccctacaaggcaggcg

SEQ ID NO: 10542 - DNA, 20 bp, synthetic construct
  source 1..20: mol_type = other DNA
gttaaccagcaggacgttgc

SEQ ID NO: 10543 - DNA, 20 bp, synthetic construct
  source 1..20: mol_type = other DNA
gtgactacgtgcgccagacg

SEQ ID NO: 10544 - DNA, 20 bp, synthetic construct
  source 1..20: mol_type = other DNA
gccagcaacgcctcaggtga

SEQ ID NO: 10545 - DNA, 20 bp, synthetic construct
  source 1..20: mol_type = other DNA
tgcccgctcacctggctcag

SEQ ID NO: 10546 - DNA, 20 bp, synthetic construct
  source 1..20: mol_type = other DNA
gtccatggggatgaagtacc

SEQ ID NO: 10547 - DNA, 20 bp, synthetic construct
  source 1..20: mol_type = other DNA
cagatactccaccagctgca

SEQ ID NO: 10548 - DNA, 20 bp, synthetic construct
  source 1..20: mol_type = other DNA
gcggccacttccctgctgag

SEQ ID NO: 10549 - DNA, 20 bp, synthetic construct
  source 1..20: mol_type = other DNA
catcagccaggccccgcagg

SEQ ID NO: 10550 - DNA, 20 bp, synthetic construct
  source 1..20: mol_type = other DNA
cagcgacccagaggagctca

SEQ ID NO: 10551 - DNA, 20 bp, synthetic construct
  source 1..20: mol_type = other DNA
tgctgagcgggcctggggag

SEQ ID NO: 10552 - DNA, 20 bp, synthetic construct
  source 1..20: mol_type = other DNA
tcgatgaaggccatgacctc

SEQ ID NO: 10553 - DNA, 20 bp, synthetic construct
  source 1..20: mol_type = other DNA
catctccatgaccagcatga

SEQ ID NO: 10554 - DNA, 20 bp, synthetic construct
  source 1..20: mol_type = other DNA
ctgctgcaccaggtgtccat

SEQ ID NO: 10555 - DNA, 20 bp, synthetic construct
  source 1..20: mol_type = other DNA
atgagtcaacgtggatgggt

SEQ ID NO: 10556 - DNA, 20 bp, synthetic construct
  source 1..20: mol_type = other DNA
ccgcaggtttcgggaggccc

SEQ ID NO: 10557 - DNA, 20 bp, synthetic construct
  source 1..20: mol_type = other DNA
gcggggtctggcatcgcccc

SEQ ID NO: 10558 - DNA, 20 bp, synthetic construct
  source 1..20: mol_type = other DNA
cccagagtaaagtttgcgct

SEQ ID NO: 10559 - DNA, 20 bp, synthetic construct
  source 1..20: mol_type = other DNA
cctgctgagcgggcctgggg

SEQ ID NO: 10560 - DNA, 20 bp, synthetic construct
  source 1..20: mol_type = other DNA
gctgaggccgcggaaggagc

SEQ ID NO: 10561 - DNA, 20 bp, synthetic construct
  source 1..20: mol_type = other DNA
cagtgcctgcgctcgctggg

SEQ ID NO: 10562 - DNA, 20 bp, synthetic construct
  source 1..20: mol_type = other DNA
cctcaggtgacggcagcagg

SEQ ID NO: 10563 - DNA, 20 bp, synthetic construct
  source 1..20: mol_type = other DNA
gccggttgcacggcttgcgc

SEQ ID NO: 10564 - DNA, 20 bp, synthetic construct
  source 1..20: mol_type = other DNA
taggaagtacgagtgtgagt

SEQ ID NO: 10565 - DNA, 20 bp, synthetic construct
  source 1..20: mol_type = other DNA
tgcagtcatggcgcaggaag

SEQ ID NO: 10566 - DNA, 20 bp, synthetic construct
  source 1..20: mol_type = other DNA
gaagtacgagtgtgagtagg

SEQ ID NO: 10567 - DNA, 20 bp, synthetic construct
  source 1..20: mol_type = other DNA
cggcccagtgggtcatcagg

SEQ ID NO: 10568 - DNA, 20 bp, synthetic construct
  source 1..20: mol_type = other DNA
tctcgaggtggaaaggcagg

SEQ ID NO: 10569 - DNA, 20 bp, synthetic construct
  source 1..20: mol_type = other DNA
agtggcagcggggcccgtag

SEQ ID NO: 10570 - DNA, 20 bp, synthetic construct
  source 1..20: mol_type = other DNA
cccgtaggggcaaaagccga

SEQ ID NO: 10571 - DNA, 20 bp, synthetic construct
  source 1..20: mol_type = other DNA
ccgccaccccaagtacaaga

SEQ ID NO: 10572 - DNA, 20 bp, synthetic construct
  source 1..20: mol_type = other DNA
cagctcggtcttgtagcgcg

SEQ ID NO: 10573 - DNA, 20 bp, synthetic construct
  source 1..20: mol_type = other DNA
gctacaagaccgagctgtgc

SEQ ID NO: 10574 - DNA, 20 bp, synthetic construct
  source 1..20: mol_type = other DNA
cacagctcggtcttgtactt

SEQ ID NO: 10575 - DNA, 20 bp, synthetic construct
  source 1..20: mol_type = other DNA
tctccgacgactgaggcaag

SEQ ID NO: 10576 - DNA, 20 bp, synthetic construct
  source 1..20: mol_type = other DNA
cccataggggcagaagccga

SEQ ID NO: 10577 - DNA, 20 bp, synthetic construct
  source 1..20: mol_type = other DNA
tctcatagatcagaacatcc

SEQ ID NO: 10578 - DNA, 20 bp, synthetic construct
  source 1..20: mol_type = other DNA
tctcggaggcggcgcgcagc

SEQ ID NO: 10579 - DNA, 20 bp, synthetic construct
  source 1..20: mol_type = other DNA
tctctgggcctgacctgctt

SEQ ID NO: 10580 - DNA, 20 bp, synthetic construct
  source 1..20: mol_type = other DNA
gagcagcggctgtacaaggt

SEQ ID NO: 10581 - DNA, 20 bp, synthetic construct
  source 1..20: mol_type = other DNA
agacgttcagctgctgtcct

SEQ ID NO: 10582 - DNA, 20 bp, synthetic construct
  source 1..20: mol_type = other DNA
cgagcagcggctgtacaagg

SEQ ID NO: 10583 - DNA, 20 bp, synthetic construct
  source 1..20: mol_type = other DNA
cgcagccgtcccagttgcag

SEQ ID NO: 10584 - DNA, 20 bp, synthetic construct
  source 1..20: mol_type = other DNA
gctgtacaaggtgggtcccg

SEQ ID NO: 10585 - DNA, 20 bp, synthetic construct
  source 1..20: mol_type = other DNA
gggcagtcctgcagaaggac

SEQ ID NO: 10586 - DNA, 20 bp, synthetic construct
  source 1..20: mol_type = other DNA
gcgccactaccgaaagcaca

SEQ ID NO: 10587 - DNA, 20 bp, synthetic construct
  source 1..20: mol_type = other DNA
tcgcacagatggcactggaa

SEQ ID NO: 10588 - DNA, 20 bp, synthetic construct
  source 1..20: mol_type = other DNA
ctgtacaaggtgggtcccgc

SEQ ID NO: 10589 - DNA, 20 bp, synthetic construct
  source 1..20: mol_type = other DNA
tctcttcgccgctcggcctc

SEQ ID NO: 10590 - DNA, 20 bp, synthetic construct
  source 1..20: mol_type = other DNA
cttcagttcgaacaccgtgc

SEQ ID NO: 10591 - DNA, 20 bp, synthetic construct
  source 1..20: mol_type = other DNA
tacagccgctgctcgtcagg

SEQ ID NO: 10592 - DNA, 20 bp, synthetic construct
  source 1..20: mol_type = other DNA
gatggcactggaatggccgg

SEQ ID NO: 10593 - DNA, 20 bp, synthetic construct
  source 1..20: mol_type = other DNA
ttgtacagccgctgctcgtc

SEQ ID NO: 10594 - DNA, 20 bp, synthetic construct
  source 1..20: mol_type = other DNA
ggcagtcctgcagaaggaca

SEQ ID NO: 10595 - DNA, 20 bp, synthetic construct
  source 1..20: mol_type = other DNA
cgccactaccgaaagcacac

SEQ ID NO: 10596 - DNA, 20 bp, synthetic construct
  source 1..20: mol_type = other DNA
agacgtcccaccaagggtct

SEQ ID NO: 10597 - DNA, 20 bp, synthetic construct
  source 1..20: mol_type = other DNA
tcctcaggatgaccaactct

SEQ ID NO: 10598 - DNA, 20 bp, synthetic construct
  source 1..20: mol_type = other DNA
gaactgaagcgcatcgtcga

SEQ ID NO: 10599 - DNA, 20 bp, synthetic construct
  source 1..20: mol_type = other DNA
tcatgaggaacacgtcctgg

SEQ ID NO: 10600 - DNA, 20 bp, synthetic construct
  source 1..20: mol_type = other DNA
tacacatagcgcctctgact

SEQ ID NO: 10601 - DNA, 20 bp, synthetic construct
  source 1..20: mol_type = other DNA
atcatgaggaacacgtcctg

SEQ ID NO: 10602 - DNA, 20 bp, synthetic construct
  source 1..20: mol_type = other DNA
accaggaaggccccatcacg

SEQ ID NO: 10603 - DNA, 20 bp, synthetic construct
  source 1..20: mol_type = other DNA
ccggaaggccagccccactg

SEQ ID NO: 10604 - DNA, 20 bp, synthetic construct
  source 1..20: mol_type = other DNA
tctcagtgaaagtgccaatc

SEQ ID NO: 10605 - DNA, 20 bp, synthetic construct
  source 1..20: mol_type = other DNA
gcgatggtgagcgggcgtgg

SEQ ID NO: 10606 - DNA, 20 bp, synthetic construct
  source 1..20: mol_type = other DNA
tcttccctcaggaactgcaa

SEQ ID NO: 10607 - DNA, 20 bp, synthetic construct
  source 1..20: mol_type = other DNA
tctcctgcacagccagaata

SEQ ID NO: 10608 - DNA, 20 bp, synthetic construct
  source 1..20: mol_type = other DNA
agacgcgctcaaactccgtc

SEQ ID NO: 10609 - DNA, 20 bp, synthetic construct
  source 1..20: mol_type = other DNA
ccaggaaggccccatcacga

SEQ ID NO: 10610 - DNA, 20 bp, synthetic construct
  source 1..20: mol_type = other DNA
gtatgagcacgagaaggacc

SEQ ID NO: 10611 - DNA, 20 bp, synthetic construct
  source 1..20: mol_type = other DNA
aaacaaaaggagatatcaag

SEQ ID NO: 10612 - DNA, 20 bp, synthetic construct
  source 1..20: mol_type = other DNA
cgcgatggtgagcgggcgtg

SEQ ID NO: 10613 - DNA, 20 bp, synthetic construct
  source 1..20: mol_type = other DNA
ctccacagatgacacctttg

SEQ ID NO: 10614 - DNA, 20 bp, synthetic construct
  source 1..20: mol_type = other DNA
agaaggcacgatcgcacaga

SEQ ID NO: 10615 - DNA, 20 bp, synthetic construct
  source 1..20: mol_type = other DNA
tctctgggttctgaagttct

SEQ ID NO: 10616 - DNA, 20 bp, synthetic construct
  source 1..20: mol_type = other DNA
catgcagactctgctcagct

SEQ ID NO: 10617 - DNA, 20 bp, synthetic construct
  source 1..20: mol_type = other DNA
aaaaggagatatcaagagga

SEQ ID NO: 10618 - DNA, 20 bp, synthetic construct
  source 1..20: mol_type = other DNA
cctcatcttcagccacatgc

SEQ ID NO: 10619 - DNA, 20 bp, synthetic construct
  source 1..20: mol_type = other DNA
ggtttgataagttctagctg

SEQ ID NO: 10620 - DNA, 20 bp, synthetic construct
  source 1..20: mol_type = other DNA
gccgcgatggtgagcgggcg

SEQ ID NO: 10621 - DNA, 20 bp, synthetic construct
  source 1..20: mol_type = other DNA
acctctgcaattaaatttgg

SEQ ID NO: 10622 - DNA, 20 bp, synthetic construct
  source 1..20: mol_type = other DNA
cacacacaggtaacggctga

SEQ ID NO: 10623 - DNA, 20 bp, synthetic construct
  source 1..20: mol_type = other DNA
ccgtgaagatggtggtcttg

SEQ ID NO: 10624 - DNA, 20 bp, synthetic construct
  source 1..20: mol_type = other DNA
gcagaggaagttggggctgt

SEQ ID NO: 10625 - DNA, 20 bp, synthetic construct
  source 1..20: mol_type = other DNA
ccgcgatggtgagcgggcgt

SEQ ID NO: 10626 - DNA, 20 bp, synthetic construct
  source 1..20: mol_type = other DNA
tgaccagaatttcctggctc

SEQ ID NO: 10627 - DNA, 20 bp, synthetic construct
  source 1..20: mol_type = other DNA
tctcaggtgtgcgaagtccc

SEQ ID NO: 10628 - DNA, 20 bp, synthetic construct
  source 1..20: mol_type = other DNA
gtacttcacaaaaacagtag

SEQ ID NO: 10629 - DNA, 20 bp, synthetic construct
  source 1..20: mol_type = other DNA
gatcatgaggaacacgtcct

SEQ ID NO: 10630 - DNA, 20 bp, synthetic construct
  source 1..20: mol_type = other DNA
ccacacacaggtaacggctg

SEQ ID NO: 10631 - DNA, 20 bp, synthetic construct
  source 1..20: mol_type = other DNA
gtagctgcaggtgtgagtgg

SEQ ID NO: 10632 - DNA, 20 bp, synthetic construct
  source 1..20: mol_type = other DNA
acagatggcactggaatggc

SEQ ID NO: 10633 - DNA, 20 bp, synthetic construct
  source 1..20: mol_type = other DNA
gactgggaatagttactccc

SEQ ID NO: 10634 - DNA, 20 bp, synthetic construct
  source 1..20: mol_type = other DNA
agacgatcgtcaccggattg

SEQ ID NO: 10635 - DNA, 20 bp, synthetic construct
  source 1..20: mol_type = other DNA
atacacatagcgcctctgac

SEQ ID NO: 10636 - DNA, 20 bp, synthetic construct
  source 1..20: mol_type = other DNA
agacgaggaggacggggaac

SEQ ID NO: 10637 - DNA, 20 bp, synthetic construct
  source 1..20: mol_type = other DNA
cctcagccgttacctgtgtg

SEQ ID NO: 10638 - DNA, 20 bp, synthetic construct
  source 1..20: mol_type = other DNA
attcactgtaaagctggaaa

SEQ ID NO: 10639 - DNA, 20 bp, synthetic construct
  source 1..20: mol_type = other DNA
tctcaatgtcttgaggtttc

SEQ ID NO: 10640 - DNA, 20 bp, synthetic construct
  source 1..20: mol_type = other DNA
tctcttcctagtctctcaca

SEQ ID NO: 10641 - DNA, 20 bp, synthetic construct
  source 1..20: mol_type = other DNA
ttgacctgtatccatttctg

SEQ ID NO: 10642 - DNA, 20 bp, synthetic construct
  source 1..20: mol_type = other DNA
tctctgaaattacaaagtaa

SEQ ID NO: 10643 - DNA, 20 bp, synthetic construct
  source 1..20: mol_type = other DNA
tctccaactttaaatcctgt

SEQ ID NO: 10644 - DNA, 20 bp, synthetic construct
  source 1..20: mol_type = other DNA
tctcagctcctgtagcagct

SEQ ID NO: 10645 - DNA, 20 bp, synthetic construct
  source 1..20: mol_type = other DNA
tgggaatagttactccctgg

SEQ ID NO: 10646 - DNA, 20 bp, synthetic construct
  source 1..20: mol_type = other DNA
tctcataggatcccccggct

SEQ ID NO: 10647 - DNA, 20 bp, synthetic construct
  source 1..20: mol_type = other DNA
tctcttaaggcaggctgctt

SEQ ID NO: 10648 - DNA, 20 bp, synthetic construct
  source 1..20: mol_type = other DNA
ctggcacttcgagttggaac

SEQ ID NO: 10649 - DNA, 20 bp, synthetic construct
  source 1..20: mol_type = other DNA
tctctgctccttttggtgac

SEQ ID NO: 10650 - DNA, 20 bp, synthetic construct
  source 1..20: mol_type = other DNA
tctcggagtgcacaggccga

SEQ ID NO: 10651 - DNA, 20 bp, synthetic construct
  source 1..20: mol_type = other DNA
tgttgcagaggaagttctcc

SEQ ID NO: 10652 - DNA, 20 bp, synthetic construct
  source 1..20: mol_type = other DNA
gttctagctgtggtgggtta

SEQ ID NO: 10653 - DNA, 20 bp, synthetic construct
  source 1..20: mol_type = other DNA
tccaagagttggtcatcctg

SEQ ID NO: 10654 - DNA, 20 bp, synthetic construct
  source 1..20: mol_type = other DNA
tctctctgttgtccgaggcc

SEQ ID NO: 10655 - DNA, 20 bp, synthetic construct
  source 1..20: mol_type = other DNA
tctcgtggtggtaataaggg

SEQ ID NO: 10656 - DNA, 20 bp, synthetic construct
  source 1..20: mol_type = other DNA
ccgtcccagttgcagtggta

SEQ ID NO: 10657 - DNA, 20 bp, synthetic construct
  source 1..20: mol_type = other DNA
tctcccggcaaacctcgccc

SEQ ID NO: 10658 - DNA, 20 bp, synthetic construct
  source 1..20: mol_type = other DNA
atatcaccacacacaggtaa

SEQ ID NO: 10659 - DNA, 20 bp, synthetic construct
  source 1..20: mol_type = other DNA
tctcgaagtgtgggaggtac

SEQ ID NO: 10660 - DNA, 20 bp, synthetic construct
  source 1..20: mol_type = other DNA
tctcccaaagttcgtggcac

SEQ ID NO: 10661 - DNA, 20 bp, synthetic construct
  source 1..20: mol_type = other DNA
atcttccattggattggcaa

SEQ ID NO: 10662 - DNA, 20 bp, synthetic construct
  source 1..20: mol_type = other DNA
tctcacctaggaaaacatct

SEQ ID NO: 10663 - DNA, 20 bp, synthetic construct
  source 1..20: mol_type = other DNA
tctcgacacagcaggtcaag

SEQ ID NO: 10664 - DNA, 20 bp, synthetic construct
  source 1..20: mol_type = other DNA
aattcactgtaaagctggaa

SEQ ID NO: 10665 - DNA, 20 bp, synthetic construct
  source 1..20: mol_type = other DNA
tctcacagtagacactctcc

SEQ ID NO: 10666 - DNA, 20 bp, synthetic construct
  source 1..20: mol_type = other DNA
tctctttctgaaggagacac

SEQ ID NO: 10667 - DNA, 20 bp, synthetic construct
  source 1..20: mol_type = other DNA
tctctttgatctgcgccttg

SEQ ID NO: 10668 - DNA, 20 bp, synthetic construct
  source 1..20: mol_type = other DNA
tagcagatgattgagctctg

SEQ ID NO: 10669 - DNA, 20 bp, synthetic construct
  source 1..20: mol_type = other DNA
agcggcctcctgacgagcag

SEQ ID NO: 10670 - DNA, 20 bp, synthetic construct
  source 1..20: mol_type = other DNA
tctctcggcggaagtcgctc

SEQ ID NO: 10671 - DNA, 20 bp, synthetic construct
  source 1..20: mol_type = other DNA
ccacaaactgaggatctgca

SEQ ID NO: 10672 - DNA, 20 bp, synthetic construct
  source 1..20: mol_type = other DNA
tctcccttggatggtcggcg

SEQ ID NO: 10673 - DNA, 20 bp, synthetic construct
  source 1..20: mol_type = other DNA
ggagctgtatgagcacgaga

SEQ ID NO: 10674 - DNA, 20 bp, synthetic construct
  source 1..20: mol_type = other DNA
tgggacactgaggagacaga

SEQ ID NO: 10675 - DNA, 20 bp, synthetic construct
  source 1..20: mol_type = other DNA
tctccgccgaggaggtgaca

SEQ ID NO: 10676 - DNA, 20 bp, synthetic construct
  source 1..20: mol_type = other DNA
aatcccatagcaataatgtt

SEQ ID NO: 10677 - DNA, 20 bp, synthetic construct
  source 1..20: mol_type = other DNA
ccagcatgtggctgaagatg

SEQ ID NO: 10678 - DNA, 20 bp, synthetic construct
  source 1..20: mol_type = other DNA
ctggaggtctacctcaagga

SEQ ID NO: 10679 - DNA, 20 bp, synthetic construct
  source 1..20: mol_type = other DNA
tctctcctggcctcagcgac

SEQ ID NO: 10680 - DNA, 20 bp, synthetic construct
  source 1..20: mol_type = other DNA
tccattggattggcaagggc

SEQ ID NO: 10681 - DNA, 20 bp, synthetic construct
  source 1..20: mol_type = other DNA
aggccagccccactgtggct

SEQ ID NO: 10682 - DNA, 20 bp, synthetic construct
  source 1..20: mol_type = other DNA
tctccaggctggtgcgcgag

SEQ ID NO: 10683 - DNA, 20 bp, synthetic construct
  source 1..20: mol_type = other DNA
gcgcatctgcgcacgcacac

SEQ ID NO: 10684 - DNA, 20 bp, synthetic construct
  source 1..20: mol_type = other DNA
catccccagcaggtacaagg

SEQ ID NO: 10685 - DNA, 20 bp, synthetic construct
  source 1..20: mol_type = other DNA
actcacccagcatccccagc

SEQ ID NO: 10686 - DNA, 20 bp, synthetic construct
  source 1..20: mol_type = other DNA
ggcaagacactgggcgagtg

SEQ ID NO: 10687 - DNA, 20 bp, synthetic construct
  source 1..20: mol_type = other DNA
gggacactgaggagacagaa

SEQ ID NO: 10688 - DNA, 20 bp, synthetic construct
  source 1..20: mol_type = other DNA
ccgccgccctcacctcctgc

SEQ ID NO: 10689 - DNA, 20 bp, synthetic construct
  source 1..20: mol_type = other DNA
cacactggaggttgttgcag

SEQ ID NO: 10690 - DNA, 20 bp, synthetic construct
  source 1..20: mol_type = other DNA
tctcaggctccgattattca

SEQ ID NO: 10691 - DNA, 20 bp, synthetic construct
  source 1..20: mol_type = other DNA
tctccttgatgccagctcac

SEQ ID NO: 10692 - DNA, 20 bp, synthetic construct
  source 1..20: mol_type = other DNA
cagaagtctgtgcagaacag

SEQ ID NO: 10693 - DNA, 20 bp, synthetic construct
  source 1..20: mol_type = other DNA
aggggcaggatggcaacagg

SEQ ID NO: 10694 - DNA, 20 bp, synthetic construct
  source 1..20: mol_type = other DNA
tgttcaggaaaacaacacac

SEQ ID NO: 10695 - DNA, 20 bp, synthetic construct
  source 1..20: mol_type = other DNA
cactgggacagcttctgatg

SEQ ID NO: 10696 - DNA, 20 bp, synthetic construct
  source 1..20: mol_type = other DNA
gctgcagcctgggaggagct

SEQ ID NO: 10697 - DNA, 20 bp, synthetic construct
  source 1..20: mol_type = other DNA
tctcctggcatgtctcagca

SEQ ID NO: 10698 - DNA, 20 bp, synthetic construct
  source 1..20: mol_type = other DNA
tctctcaggtactcagacaa

SEQ ID NO: 10699 - DNA, 20 bp, synthetic construct
  source 1..20: mol_type = other DNA
agcgccatggccgggacccg

SEQ ID NO: 10700 - DNA, 20 bp, synthetic construct
  source 1..20: mol_type = other DNA
cgtgaggctgcaagcttgca

SEQ ID NO: 10701 - DNA, 20 bp, synthetic construct
  source 1..20: mol_type = other DNA
tctccaaagaagcagaaaaa

SEQ ID NO: 10702 - DNA, 20 bp, synthetic construct
  source 1..20: mol_type = other DNA
ggcagccagcatgatgagac

SEQ ID NO: 10703 - DNA, 20 bp, synthetic construct
  source 1..20: mol_type = other DNA
tctcctctgccccagggggc

SEQ ID NO: 10704 - DNA, 20 bp, synthetic construct
  source 1..20: mol_type = other DNA
tttctcagctggataaggtc

SEQ ID NO: 10705 - DNA, 20 bp, synthetic construct
  source 1..20: mol_type = other DNA
tctcacaggtgacgcagcca

SEQ ID NO: 10706 - DNA, 20 bp, synthetic construct
  source 1..20: mol_type = other DNA
tgaggaacacgtcctggggg

SEQ ID NO: 10707 - DNA, 20 bp, synthetic construct
  source 1..20: mol_type = other DNA
tgctgctcctgagctgagac

SEQ ID NO: 10708 - DNA, 20 bp, synthetic construct
  source 1..20: mol_type = other DNA
gggaggtacagcttgagttc

SEQ ID NO: 10709 - DNA, 20 bp, synthetic construct
  source 1..20: mol_type = other DNA
ctggctcacctgaccacgtt

SEQ ID NO: 10710 - DNA, 20 bp, synthetic construct
  source 1..20: mol_type = other DNA
ggtgcagcagcagtcgtaca

SEQ ID NO: 10711 - DNA, 20 bp, synthetic construct
  source 1..20: mol_type = other DNA
cccttaccaggcttgatgag

SEQ ID NO: 10712 - DNA, 20 bp, synthetic construct
  source 1..20: mol_type = other DNA
tctccaggacctggaagcgc

SEQ ID NO: 10713 - DNA, 20 bp, synthetic construct
  source 1..20: mol_type = other DNA
agaggaagttctccaggtcc

SEQ ID NO: 10714 - DNA, 20 bp, synthetic construct
  source 1..20: mol_type = other DNA
agacgcccccgggcccagcc

SEQ ID NO: 10715 - DNA, 20 bp, synthetic construct
  source 1..20: mol_type = other DNA
ccttgaggtagacctccagc

SEQ ID NO: 10716 - DNA, 20 bp, synthetic construct
  source 1..20: mol_type = other DNA
gttctacagcggcagcctgg

SEQ ID NO: 10717 - DNA, 20 bp, synthetic construct
  source 1..20: mol_type = other DNA
gtagttgttgaagacatcca

SEQ ID NO: 10718 - DNA, 20 bp, synthetic construct
  source 1..20: mol_type = other DNA
tctcgctccaatgtcgacac

SEQ ID NO: 10719 - DNA, 20 bp, synthetic construct
  source 1..20: mol_type = other DNA
tctctgcaaggcaaaaggat

SEQ ID NO: 10720 - DNA, 20 bp, synthetic construct
  source 1..20: mol_type = other DNA
tgcagcagcagtcgtacaag

SEQ ID NO: 10721 - DNA, 20 bp, synthetic construct
  source 1..20: mol_type = other DNA
gctaacgatctctttgatga

SEQ ID NO: 10722 - DNA, 20 bp, synthetic construct
  source 1..20: mol_type = other DNA
caggtgatcggagcgcgaga

SEQ ID NO: 10723 - DNA, 20 bp, synthetic construct
  source 1..20: mol_type = other DNA
gatcttccattggattggca

SEQ ID NO: 10724 - DNA, 20 bp, synthetic construct
  source 1..20: mol_type = other DNA
ccaaatttaattgcagaggt

SEQ ID NO: 10725 - DNA, 20 bp, synthetic construct
  source 1..20: mol_type = other DNA
tctccgacgactgaggcaag

SEQ ID NO: 10726 - DNA, 20 bp, synthetic construct
  source 1..20: mol_type = other DNA
cctggcacttcgagttggaa

SEQ ID NO: 10727 - DNA, 20 bp, synthetic construct
  source 1..20: mol_type = other DNA
tctccaccacggctttctgg

SEQ ID NO: 10728 - DNA, 20 bp, synthetic construct
  source 1..20: mol_type = other DNA
gcactgggacagcttctgat

SEQ ID NO: 10729 - DNA, 20 bp, synthetic construct
  source 1..20: mol_type = other DNA
cataccagctgagccgtccg

SEQ ID NO: 10730 - DNA, 20 bp, synthetic construct
  source 1..20: mol_type = other DNA
agacggctgctcgggcacct

SEQ ID NO: 10731 - DNA, 20 bp, synthetic construct
  source 1..20: mol_type = other DNA
tctctgggttggcctctggg

SEQ ID NO: 10732 - DNA, 20 bp, synthetic construct
  source 1..20: mol_type = other DNA
tctcgtggtcgctcagccct

SEQ ID NO: 10733 - DNA, 20 bp, synthetic construct
  source 1..20: mol_type = other DNA
tctccaagaacggtaagcaa

SEQ ID NO: 10734 - DNA, 20 bp, synthetic construct
  source 1..20: mol_type = other DNA
agcaaaggagggcaagaact

SEQ ID NO: 10735 - DNA, 20 bp, synthetic construct
  source 1..20: mol_type = other DNA
ccccgcagcaagtcccctag

SEQ ID NO: 10736 - DNA, 20 bp, synthetic construct
  source 1..20: mol_type = other DNA
gtaaatacattcttcatacc

SEQ ID NO: 10737 - DNA, 20 bp, synthetic construct
  source 1..20: mol_type = other DNA
gctgtagaactccaccacgc

SEQ ID NO: 10738 - DNA, 20 bp, synthetic construct
  source 1..20: mol_type = other DNA
agtggcagcggggcccgtag

SEQ ID NO: 10739 - DNA, 20 bp, synthetic construct
  source 1..20: mol_type = other DNA
cgccttcagatgcgaactct

SEQ ID NO: 10740 - DNA, 20 bp, synthetic construct
  source 1..20: mol_type = other DNA
tggctcacctgaccacgttg

SEQ ID NO: 10741 - DNA, 20 bp, synthetic construct
  source 1..20: mol_type = other DNA
gccgtcccagttgcagtggt

SEQ ID NO: 10742 - DNA, 20 bp, synthetic construct
  source 1..20: mol_type = other DNA
tctctggagggacagtcgcc

SEQ ID NO: 10743 - DNA, 20 bp, synthetic construct
  source 1..20: mol_type = other DNA
ttcaggaaaacaacacactg

SEQ ID NO: 10744 - DNA, 20 bp, synthetic construct
  source 1..20: mol_type = other DNA
caccagacggctctgcacct

SEQ ID NO: 10745 - DNA, 20 bp, synthetic construct
  source 1..20: mol_type = other DNA
tctcctgccacggaaagaga

SEQ ID NO: 10746 - DNA, 20 bp, synthetic construct
  source 1..20: mol_type = other DNA
cccgcagcaagtcccctagg

SEQ ID NO: 10747 - DNA, 20 bp, synthetic construct
  source 1..20: mol_type = other DNA
gcctcagcaccgccacctcg

SEQ ID NO: 10748 - DNA, 20 bp, synthetic construct
  source 1..20: mol_type = other DNA
atataaacttacagttcata

SEQ ID NO: 10749 - DNA, 20 bp, synthetic construct
  source 1..20: mol_type = other DNA
tctcaaggtaagccatgcac

SEQ ID NO: 10750 - DNA, 20 bp, synthetic construct
  source 1..20: mol_type = other DNA
tctcctgaggtgggcaggag

SEQ ID NO: 10751 - DNA, 20 bp, synthetic construct
  source 1..20: mol_type = other DNA
cagtcgcttcctgcctcgga

SEQ ID NO: 10752 - DNA, 20 bp, synthetic construct
  source 1..20: mol_type = other DNA
gacccccagatttccaggca

SEQ ID NO: 10753 - DNA, 20 bp, synthetic construct
  source 1..20: mol_type = other DNA
ggcactgggacagcttctga

SEQ ID NO: 10754 - DNA, 20 bp, synthetic construct
  source 1..20: mol_type = other DNA
accgccaaatttaattgcag

SEQ ID NO: 10755 - DNA, 20 bp, synthetic construct
  source 1..20: mol_type = other DNA
gcagagaattgcttgaaccc

SEQ ID NO: 10756 - DNA, 20 bp, synthetic construct
  source 1..20: mol_type = other DNA
ttccacatccacatcaccat

SEQ ID NO: 10757 - DNA, 20 bp, synthetic construct
  source 1..20: mol_type = other DNA
caattcaggacccacacgac

SEQ ID NO: 10758 - DNA, 20 bp, synthetic construct
  source 1..20: mol_type = other DNA
tgtctcacatgaccagcgtc

SEQ ID NO: 10759 - DNA, 20 bp, synthetic construct
  source 1..20: mol_type = other DNA
tctccccccacatctcctcc

SEQ ID NO: 10760 - DNA, 20 bp, synthetic construct
  source 1..20: mol_type = other DNA
tctcaagccgtgtgcaccac

SEQ ID NO: 10761 - DNA, 20 bp, synthetic construct
  source 1..20: mol_type = other DNA
tctctgggccgtagaggaaa

SEQ ID NO: 10762 - DNA, 20 bp, synthetic construct
  source 1..20: mol_type = other DNA
agacggtgagtagtggcgcg

SEQ ID NO: 10763 - DNA, 20 bp, synthetic construct
  source 1..20: mol_type = other DNA
agaagccctaccactgcaac

SEQ ID NO: 10764 - DNA, 20 bp, synthetic construct
  source 1..20: mol_type = other DNA
tctccatttacaaaaactga

SEQ ID NO: 10765 - DNA, 20 bp, synthetic construct
  source 1..20: mol_type = other DNA
tctcctgcttcaacgaagcc

SEQ ID NO: 10766 - DNA, 20 bp, synthetic construct
  source 1..20: mol_type = other DNA
ttgataagttctagctgtgg

SEQ ID NO: 10767 - DNA, 20 bp, synthetic construct
  source 1..20: mol_type = other DNA
ttgatgatggctgtcatgtc

SEQ ID NO: 10768 - DNA, 20 bp, synthetic construct
  source 1..20: mol_type = other DNA
tctcgaggtggaaaggcagg

SEQ ID NO: 10769 - DNA, 20 bp, synthetic construct
  source 1..20: mol_type = other DNA
tctcctggacaaggcatccc

SEQ ID NO: 10770 - DNA, 20 bp, synthetic construct
  source 1..20: mol_type = other DNA
tctcatcagctgtcataaac

SEQ ID NO: 10771 - DNA, 20 bp, synthetic construct
  source 1..20: mol_type = other DNA
tcagcgccatggccgggacc

SEQ ID NO: 10772 - DNA, 20 bp, synthetic construct
  source 1..20: mol_type = other DNA
cctgaagcaatgctccaggg

SEQ ID NO: 10773 - DNA, 20 bp, synthetic construct
  source 1..20: mol_type = other DNA
catgtgcagcgccaggtgat

SEQ ID NO: 10774 - DNA, 20 bp, synthetic construct
  source 1..20: mol_type = other DNA
tgataagttctagctgtggt

SEQ ID NO: 10775 - DNA, 20 bp, synthetic construct
  source 1..20: mol_type = other DNA
actattccaatgttcagtgg

SEQ ID NO: 10776 - DNA, 20 bp, synthetic construct
  source 1..20: mol_type = other DNA
ctcccaccgcagcgagctcc

SEQ ID NO: 10777 - DNA, 20 bp, synthetic construct
  source 1..20: mol_type = other DNA
tctcctggggctgcgtggct

SEQ ID NO: 10778 - DNA, 20 bp, synthetic construct
  source 1..20: mol_type = other DNA
gtgcagcagcagtcgtacaa

SEQ ID NO: 10779 - DNA, 20 bp, synthetic construct
  source 1..20: mol_type = other DNA
cccccgcagcaagtccccta

SEQ ID NO: 10780 - DNA, 20 bp, synthetic construct
  source 1..20: mol_type = other DNA
cgtggaactccagggtgacg

SEQ ID NO: 10781 - DNA, 20 bp, synthetic construct
  source 1..20: mol_type = other DNA
tctctgctgccctgcgctcc

SEQ ID NO: 10782 - DNA, 20 bp, synthetic construct
  source 1..20: mol_type = other DNA
tatgccaaggagctggatca

SEQ ID NO: 10783 - DNA, 20 bp, synthetic construct
  source 1..20: mol_type = other DNA
cattgcaggtcgtcacgctg

SEQ ID NO: 10784 - DNA, 20 bp, synthetic construct
  source 1..20: mol_type = other DNA
tgatgatggctgtcatgtct

SEQ ID NO: 10785 - DNA, 20 bp, synthetic construct
  source 1..20: mol_type = other DNA
ccaggggcaggatggcaaca

SEQ ID NO: 10786 - DNA, 20 bp, synthetic construct
  source 1..20: mol_type = other DNA
tctctcgccagtcagacgtc

SEQ ID NO: 10787 - DNA, 20 bp, synthetic construct
  source 1..20: mol_type = other DNA
tacccttctttcaggtgcac

SEQ ID NO: 10788 - DNA, 20 bp, synthetic construct
  source 1..20: mol_type = other DNA
tctcttcccacattgtccgg

SEQ ID NO: 10789 - DNA, 20 bp, synthetic construct
  source 1..20: mol_type = other DNA
agaggatccagcccacctgg

SEQ ID NO: 10790 - DNA, 20 bp, synthetic construct
  source 1..20: mol_type = other DNA
atttacctgaacctctgaat

SEQ ID NO: 10791 - DNA, 20 bp, synthetic construct
  source 1..20: mol_type = other DNA
tctctagattgttggtgacg

SEQ ID NO: 10792 - DNA, 20 bp, synthetic construct
  source 1..20: mol_type = other DNA
cggccagcactgtgccggcg

SEQ ID NO: 10793 - DNA, 20 bp, synthetic construct
  source 1..20: mol_type = other DNA
agttccacgagtctcgaggt

SEQ ID NO: 10794 - DNA, 20 bp, synthetic construct
  source 1..20: mol_type = other DNA
aaaactcacctgggatgtgc

SEQ ID NO: 10795 - DNA, 20 bp, synthetic construct
  source 1..20: mol_type = other DNA
tctccgagagctcgtagaag

SEQ ID NO: 10796 - DNA, 20 bp, synthetic construct
  source 1..20: mol_type = other DNA
ggccagccccactgtggctg

SEQ ID NO: 10797 - DNA, 20 bp, synthetic construct
  source 1..20: mol_type = other DNA
tctccgacagttcacctctg

SEQ ID NO: 10798 - DNA, 20 bp, synthetic construct
  source 1..20: mol_type = other DNA
gtggaactccagggtgacgt

SEQ ID NO: 10799 - DNA, 20 bp, synthetic construct
  source 1..20: mol_type = other DNA
cctggctcacctgaccacgt

SEQ ID NO: 10800 - DNA, 20 bp, synthetic construct
  source 1..20: mol_type = other DNA
tgaagcaggacaccttgctg

SEQ ID NO: 10801 - DNA, 20 bp, synthetic construct
  source 1..20: mol_type = other DNA
ttctacagcggcagcctggg

SEQ ID NO: 10802 - DNA, 20 bp, synthetic construct
  source 1..20: mol_type = other DNA
cagcaaggggtcatagacaa

SEQ ID NO: 10803 - DNA, 20 bp, synthetic construct
  source 1..20: mol_type = other DNA
cttggtgatgaggtcggcgt

SEQ ID NO: 10804 - DNA, 20 bp, synthetic construct
  source 1..20: mol_type = other DNA
cttgcaccacgagcagctga

SEQ ID NO: 10805 - DNA, 20 bp, synthetic construct
  source 1..20: mol_type = other DNA
actacctggctgtttgtggt

SEQ ID NO: 10806 - DNA, 20 bp, synthetic construct
  source 1..20: mol_type = other DNA
gaacacgtcctgggggcggc

SEQ ID NO: 10807 - DNA, 20 bp, synthetic construct
  source 1..20: mol_type = other DNA
tctccccacgggagttgact

SEQ ID NO: 10808 - DNA, 20 bp, synthetic construct
  source 1..20: mol_type = other DNA
taagattctctcgaatctac

SEQ ID NO: 10809 - DNA, 20 bp, synthetic construct
  source 1..20: mol_type = other DNA
tctctatcctgacattccca

SEQ ID NO: 10810 - DNA, 20 bp, synthetic construct
  source 1..20: mol_type = other DNA
ggaacacgtcctgggggcgg

SEQ ID NO: 10811 - DNA, 20 bp, synthetic construct
  source 1..20: mol_type = other DNA
tacttccccatagaaatcta

SEQ ID NO: 10812 - DNA, 20 bp, synthetic construct
  source 1..20: mol_type = other DNA
tctcctcagactgggggggc

SEQ ID NO: 10813 - DNA, 20 bp, synthetic construct
  source 1..20: mol_type = other DNA
aagtcgttgccagtacccag

SEQ ID NO: 10814 - DNA, 20 bp, synthetic construct
  source 1..20: mol_type = other DNA
tctccggccgggccaacgcg

SEQ ID NO: 10815 - DNA, 20 bp, synthetic construct
  source 1..20: mol_type = other DNA
gaaccaactggggagcagca

SEQ ID NO: 10816 - DNA, 20 bp, synthetic construct
  source 1..20: mol_type = other DNA
ggaacaggcctgtctccggc

SEQ ID NO: 10817 - DNA, 20 bp, synthetic construct
  source 1..20: mol_type = other DNA
actttgatatcaccacacac

SEQ ID NO: 10818 - DNA, 20 bp, synthetic construct
  source 1..20: mol_type = other DNA
gagtaactattcccagtcag

SEQ ID NO: 10819 - DNA, 20 bp, synthetic construct
  source 1..20: mol_type = other DNA
tctctgaggctaaaggccac

SEQ ID NO: 10820 - DNA, 20 bp, synthetic construct
  source 1..20: mol_type = other DNA
tctctaggatctgaggaagt

SEQ ID NO: 10821 - DNA, 20 bp, synthetic construct
  source 1..20: mol_type = other DNA
tctccagggctgtggttgtc

SEQ ID NO: 10822 - DNA, 20 bp, synthetic construct
  source 1..20: mol_type = other DNA
tatggtcatgctgtagagac

SEQ ID NO: 10823 - DNA, 20 bp, synthetic construct
  source 1..20: mol_type = other DNA
atgttgcacttgggacactg

SEQ ID NO: 10824 - DNA, 20 bp, synthetic construct
  source 1..20: mol_type = other DNA
tctcctcacacagtgcgccc

SEQ ID NO: 10825 - DNA, 20 bp, synthetic construct
  source 1..20: mol_type = other DNA
ccctaccactgcaactggga

SEQ ID NO: 10826 - DNA, 20 bp, synthetic construct
  source 1..20: mol_type = other DNA
tgatgaggtcggcgtaggac

SEQ ID NO: 10827 - DNA, 20 bp, synthetic construct
  source 1..20: mol_type = other DNA
gcacggtgagctccccgcat

SEQ ID NO: 10828 - DNA, 20 bp, synthetic construct
  source 1..20: mol_type = other DNA
tgcttaccccaccccagttg

SEQ ID NO: 10829 - DNA, 20 bp, synthetic construct
  source 1..20: mol_type = other DNA
ctaggaaaacatcttggact

SEQ ID NO: 10830 - DNA, 20 bp, synthetic construct
  source 1..20: mol_type = other DNA
cccataggggcagaagccga

SEQ ID NO: 10831 - DNA, 20 bp, synthetic construct
  source 1..20: mol_type = other DNA
cttactgtacaacaagctgc

SEQ ID NO: 10832 - DNA, 20 bp, synthetic construct
  source 1..20: mol_type = other DNA
gagaggatccagcccacctg

SEQ ID NO: 10833 - DNA, 20 bp, synthetic construct
  source 1..20: mol_type = other DNA
gtttgtggtctgccagctaa

SEQ ID NO: 10834 - DNA, 20 bp, synthetic construct
  source 1..20: mol_type = other DNA
tctccaaggggggtgagcga

SEQ ID NO: 10835 - DNA, 20 bp, synthetic construct
  source 1..20: mol_type = other DNA
cggatcagaaaggtgccggc

SEQ ID NO: 10836 - DNA, 20 bp, synthetic construct
  source 1..20: mol_type = other DNA
gactaagaaaaaacaaacac

SEQ ID NO: 10837 - DNA, 20 bp, synthetic construct
  source 1..20: mol_type = other DNA
tctcagttcaaagacacgaa

SEQ ID NO: 10838 - DNA, 20 bp, synthetic construct
  source 1..20: mol_type = other DNA
agtagtggggataccattcc

SEQ ID NO: 10839 - DNA, 20 bp, synthetic construct
  source 1..20: mol_type = other DNA
ggatgtggaagaaagtgatg

SEQ ID NO: 10840 - DNA, 20 bp, synthetic construct
  source 1..20: mol_type = other DNA
aagagggagaggcgggagac

SEQ ID NO: 10841 - DNA, 20 bp, synthetic construct
  source 1..20: mol_type = other DNA
ttctgtacctcatcaagaat

SEQ ID NO: 10842 - DNA, 20 bp, synthetic construct
  source 1..20: mol_type = other DNA
aggagtagatttcccagaga

SEQ ID NO: 10843 - DNA, 20 bp, synthetic construct
  source 1..20: mol_type = other DNA
cgggagagcaccaactaccc

SEQ ID NO: 10844 - DNA, 20 bp, synthetic construct
  source 1..20: mol_type = other DNA
tctctctcaggtctggctgt

SEQ ID NO: 10845 - DNA, 20 bp, synthetic construct
  source 1..20: mol_type = other DNA
caagttccgccactgaacat

SEQ ID NO: 10846 - DNA, 20 bp, synthetic construct
  source 1..20: mol_type = other DNA
gaacttactagcatcttcag

SEQ ID NO: 10847 - DNA, 20 bp, synthetic construct
  source 1..20: mol_type = other DNA
cgctccagtccactgtactc

SEQ ID NO: 10848 - DNA, 20 bp, synthetic construct
  source 1..20: mol_type = other DNA
tgacgagcagcggctgtaca

SEQ ID NO: 10849 - DNA, 20 bp, synthetic construct
  source 1..20: mol_type = other DNA
gaagccctaccactgcaact

SEQ ID NO: 10850 - DNA, 20 bp, synthetic construct
  source 1..20: mol_type = other DNA
tctcgttcacctcctccctg

SEQ ID NO: 10851 - DNA, 20 bp, synthetic construct
  source 1..20: mol_type = other DNA
tctcctagccgctcactcag

SEQ ID NO: 10852 - DNA, 20 bp, synthetic construct
  source 1..20: mol_type = other DNA
tctcacccacacagcacgcc

SEQ ID NO: 10853 - DNA, 20 bp, synthetic construct
  source 1..20: mol_type = other DNA
gttcagcggatgagagagac

SEQ ID NO: 10854 - DNA, 20 bp, synthetic construct
  source 1..20: mol_type = other DNA
tctcttgctgttgctgatgg

SEQ ID NO: 10855 - DNA, 20 bp, synthetic construct
  source 1..20: mol_type = other DNA
tctcaggtcagggagccgca

SEQ ID NO: 10856 - DNA, 20 bp, synthetic construct
  source 1..20: mol_type = other DNA
aaagagatggcatatgagtt

SEQ ID NO: 10857 - DNA, 20 bp, synthetic construct
  source 1..20: mol_type = other DNA
tctccttcttgacacagctt

SEQ ID NO: 10858 - DNA, 20 bp, synthetic construct
  source 1..20: mol_type = other DNA
gacacatgtcatttctgctg

SEQ ID NO: 10859 - DNA, 20 bp, synthetic construct
  source 1..20: mol_type = other DNA
gttcaggaaaacaacacact

SEQ ID NO: 10860 - DNA, 20 bp, synthetic construct
  source 1..20: mol_type = other DNA
tctccttgtgatgtttttca

SEQ ID NO: 10861 - DNA, 20 bp, synthetic construct
  source 1..20: mol_type = other DNA
acgcagtcgaagcggggcac

SEQ ID NO: 10862 - DNA, 20 bp, synthetic construct
  source 1..20: mol_type = other DNA
tctctctgccccgccctggc

SEQ ID NO: 10863 - DNA, 20 bp, synthetic construct
  source 1..20: mol_type = other DNA
agcacgagaaggacctggtg

SEQ ID NO: 10864 - DNA, 20 bp, synthetic construct
  source 1..20: mol_type = other DNA
caagtcgttgccagtaccca

SEQ ID NO: 10865 - DNA, 20 bp, synthetic construct
  source 1..20: mol_type = other DNA
cacgcacagcgtgtagtctc

SEQ ID NO: 10866 - DNA, 20 bp, synthetic construct
  source 1..20: mol_type = other DNA
tacccccagagatgtctgcg

SEQ ID NO: 10867 - DNA, 20 bp, synthetic construct
  source 1..20: mol_type = other DNA
ctcaggtcgaagacttgtcg

SEQ ID NO: 10868 - DNA, 20 bp, synthetic construct
  source 1..20: mol_type = other DNA
acgcacagcgtgtagtctcc

SEQ ID NO: 10869 - DNA, 20 bp, synthetic construct
  source 1..20: mol_type = other DNA
ctggccctggcacttcgagt

SEQ ID NO: 10870 - DNA, 20 bp, synthetic construct
  source 1..20: mol_type = other DNA
tctgcagtcgcttcctgcct

SEQ ID NO: 10871 - DNA, 20 bp, synthetic construct
  source 1..20: mol_type = other DNA
tctccacaccttgagggctc

SEQ ID NO: 10872 - DNA, 20 bp, synthetic construct
  source 1..20: mol_type = other DNA
tctctgtgaattcttttgca

SEQ ID NO: 10873 - DNA, 20 bp, synthetic construct
  source 1..20: mol_type = other DNA
tctctgtcatggtcaaaatc

SEQ ID NO: 10874 - DNA, 20 bp, synthetic construct
  source 1..20: mol_type = other DNA
ccaattcaggacccacacga

SEQ ID NO: 10875 - DNA, 20 bp, synthetic construct
  source 1..20: mol_type = other DNA
tctcttggaattggtggtgg

SEQ ID NO: 10876 - DNA, 20 bp, synthetic construct
  source 1..20: mol_type = other DNA
gaaaactcacctgggatgtg

SEQ ID NO: 10877 - DNA, 20 bp, synthetic construct
  source 1..20: mol_type = other DNA
ccagctgagccgtccgaggc

SEQ ID NO: 10878 - DNA, 20 bp, synthetic construct
  source 1..20: mol_type = other DNA
tctcaagacaggcaggccca

SEQ ID NO: 10879 - DNA, 20 bp, synthetic construct
  source 1..20: mol_type = other DNA
tctctgtcagctcccggcgt

SEQ ID NO: 10880 - DNA, 20 bp, synthetic construct
  source 1..20: mol_type = other DNA
tcgagactcgtggaactcca

SEQ ID NO: 10881 - DNA, 20 bp, synthetic construct
  source 1..20: mol_type = other DNA
acgccttcaagtctttctgc

SEQ ID NO: 10882 - DNA, 20 bp, synthetic construct
  source 1..20: mol_type = other DNA
gctgtacaagttatagggct

SEQ ID NO: 10883 - DNA, 20 bp, synthetic construct
  source 1..20: mol_type = other DNA
accaggaacaggcctgtctc

SEQ ID NO: 10884 - DNA, 20 bp, synthetic construct
  source 1..20: mol_type = other DNA
gcatgacgacggctacctcg

SEQ ID NO: 10885 - DNA, 20 bp, synthetic construct
  source 1..20: mol_type = other DNA
gtgctggaggacaatgacta

SEQ ID NO: 10886 - DNA, 20 bp, synthetic construct
  source 1..20: mol_type = other DNA
cagcgccatggccgggaccc

SEQ ID NO: 10887 - DNA, 20 bp, synthetic construct
  source 1..20: mol_type = other DNA
atgataaaggaatcatctat

SEQ ID NO: 10888 - DNA, 20 bp, synthetic construct
  source 1..20: mol_type = other DNA
tgacatcttctcaggagctc

SEQ ID NO: 10889 - DNA, 20 bp, synthetic construct
  source 1..20: mol_type = other DNA
tctcaagctgcacggactcc

SEQ ID NO: 10890 - DNA, 20 bp, synthetic construct
  source 1..20: mol_type = other DNA
tcgcagacatctctgggggt

SEQ ID NO: 10891 - DNA, 20 bp, synthetic construct
  source 1..20: mol_type = other DNA
ctgtcatgtctgggagcctg

SEQ ID NO: 10892 - DNA, 20 bp, synthetic construct
  source 1..20: mol_type = other DNA
gacgtactcgctgtgcaggg

SEQ ID NO: 10893 - DNA, 20 bp, synthetic construct
  source 1..20: mol_type = other DNA
ccggtgaggggtgtggcact

SEQ ID NO: 10894 - DNA, 20 bp, synthetic construct
  source 1..20: mol_type = other DNA
gtcgttctcagagtacatca

SEQ ID NO: 10895 - DNA, 20 bp, synthetic construct
  source 1..20: mol_type = other DNA
cagctggtggcacagtctgg

SEQ ID NO: 10896 - DNA, 20 bp, synthetic construct
  source 1..20: mol_type = other DNA
tctgccagcggctgaactgt

SEQ ID NO: 10897 - DNA, 20 bp, synthetic construct
  source 1..20: mol_type = other DNA
tgagaggtattcaggagacc

SEQ ID NO: 10898 - DNA, 20 bp, synthetic construct
  source 1..20: mol_type = other DNA
gccgcagcccgcgtagctgc

SEQ ID NO: 10899 - DNA, 20 bp, synthetic construct
  source 1..20: mol_type = other DNA
cagggcgatgcggatgcgtg

SEQ ID NO: 10900 - DNA, 20 bp, synthetic construct
  source 1..20: mol_type = other DNA
gagaaggtagaccttgggct

SEQ ID NO: 10901 - DNA, 20 bp, synthetic construct
  source 1..20: mol_type = other DNA
cgatgatgccaatggtgatg

SEQ ID NO: 10902 - DNA, 20 bp, synthetic construct
  source 1..20: mol_type = other DNA
gcgcgggcgggagggcggcg

SEQ ID NO: 10903 - DNA, 20 bp, synthetic construct
  source 1..20: mol_type = other DNA
agaggggccggctcaacacc

SEQ ID NO: 10904 - DNA, 20 bp, synthetic construct
  source 1..20: mol_type = other DNA
gccaccagctgcagcctggg

SEQ ID NO: 10905 - DNA, 20 bp, synthetic construct
  source 1..20: mol_type = other DNA
catcacactggaggcgggcg

SEQ ID NO: 10906 - DNA, 20 bp, synthetic construct
  source 1..20: mol_type = other DNA
gactgggcaagagacaagaa

SEQ ID NO: 10907 - DNA, 20 bp, synthetic construct
  source 1..20: mol_type = other DNA
aaccagagagccattcacag

SEQ ID NO: 10908 - DNA, 20 bp, synthetic construct
  source 1..20: mol_type = other DNA
ggtagacctccagctggccc

SEQ ID NO: 10909 - DNA, 20 bp, synthetic construct
  source 1..20: mol_type = other DNA
tctcgagcatacgattcata

SEQ ID NO: 10910 - DNA, 20 bp, synthetic construct
  source 1..20: mol_type = other DNA
tcactcacagcgagaacttg

SEQ ID NO: 10911 - DNA, 20 bp, synthetic construct
  source 1..20: mol_type = other DNA
agcccgaggtgagcagccgc

SEQ ID NO: 10912 - DNA, 20 bp, synthetic construct
  source 1..20: mol_type = other DNA
gcagaagtccccggacacgt

SEQ ID NO: 10913 - DNA, 20 bp, synthetic construct
  source 1..20: mol_type = other DNA
ggaaccaactggggagcagc

SEQ ID NO: 10914 - DNA, 20 bp, synthetic construct
  source 1..20: mol_type = other DNA
gcaggttcttggtcccagac

SEQ ID NO: 10915 - DNA, 20 bp, synthetic construct
  source 1..20: mol_type = other DNA
agtcagagaaagctgtctgt

SEQ ID NO: 10916 - DNA, 20 bp, synthetic construct
  source 1..20: mol_type = other DNA
cggcgggggcggcggcaggg

SEQ ID NO: 10917 - DNA, 20 bp, synthetic construct
  source 1..20: mol_type = other DNA
ccaagtcgttgccagtaccc

SEQ ID NO: 10918 - DNA, 20 bp, synthetic construct
  source 1..20: mol_type = other DNA
tgggacgtactcgctgtgca

SEQ ID NO: 10919 - DNA, 20 bp, synthetic construct
  source 1..20: mol_type = other DNA
ggctggaaggtgagtggact

SEQ ID NO: 10920 - DNA, 20 bp, synthetic construct
  source 1..20: mol_type = other DNA
gtcgcggatcagaaaggtgc

SEQ ID NO: 10921 - DNA, 20 bp, synthetic construct
  source 1..20: mol_type = other DNA
gatagcgcagcttcatcttg

SEQ ID NO: 10922 - DNA, 20 bp, synthetic construct
  source 1..20: mol_type = other DNA
tttctctaccagatcctcag

SEQ ID NO: 10923 - DNA, 20 bp, synthetic construct
  source 1..20: mol_type = other DNA
ggagaggatccagcccacct

SEQ ID NO: 10924 - DNA, 20 bp, synthetic construct
  source 1..20: mol_type = other DNA
ggaggaggaggacgaggagg

SEQ ID NO: 10925 - DNA, 20 bp, synthetic construct
  source 1..20: mol_type = other DNA
gtctcacatgaccagcgtcc

SEQ ID NO: 10926 - DNA, 20 bp, synthetic construct
  source 1..20: mol_type = other DNA
cccagctactcgggaggctg

SEQ ID NO: 10927 - DNA, 20 bp, synthetic construct
  source 1..20: mol_type = other DNA
accgaaagcacacgggccac

SEQ ID NO: 10928 - DNA, 20 bp, synthetic construct
  source 1..20: mol_type = other DNA
cgtaatactgctccagatat

SEQ ID NO: 10929 - DNA, 20 bp, synthetic construct
  source 1..20: mol_type = other DNA
ggacgtactcgctgtgcagg

SEQ ID NO: 10930 - DNA, 20 bp, synthetic construct
  source 1..20: mol_type = other DNA
ccatggtggcctggttgcgc

SEQ ID NO: 10931 - DNA, 20 bp, synthetic construct
  source 1..20: mol_type = other DNA
gcccgaaccctcaactgggg

SEQ ID NO: 10932 - DNA, 20 bp, synthetic construct
  source 1..20: mol_type = other DNA
ccaccacgccggcacagtgc

SEQ ID NO: 10933 - DNA, 20 bp, synthetic construct
  source 1..20: mol_type = other DNA
tgaagtccagcacgctgttg

SEQ ID NO: 10934 - DNA, 20 bp, synthetic construct
  source 1..20: mol_type = other DNA
cgcacagtacctgcaaaggc

SEQ ID NO: 10935 - DNA, 20 bp, synthetic construct
  source 1..20: mol_type = other DNA
ccacaggccgcgctgcaggt

SEQ ID NO: 10936 - DNA, 20 bp, synthetic construct
  source 1..20: mol_type = other DNA
aggtgcatgatcgtccacca

SEQ ID NO: 10937 - DNA, 20 bp, synthetic construct
  source 1..20: mol_type = other DNA
gcggatcagaaaggtgccgg

SEQ ID NO: 10938 - DNA, 20 bp, synthetic construct
  source 1..20: mol_type = other DNA
tgaacatccccaggtgagga

SEQ ID NO: 10939 - DNA, 20 bp, synthetic construct
  source 1..20: mol_type = other DNA
gctcaggtcgaagacttgtc

SEQ ID NO: 10940 - DNA, 20 bp, synthetic construct
  source 1..20: mol_type = other DNA
tctccagcgcaggtggacaa

SEQ ID NO: 10941 - DNA, 20 bp, synthetic construct
  source 1..20: mol_type = other DNA
tctctttctcacgagcagcc

SEQ ID NO: 10942 - DNA, 20 bp, synthetic construct
  source 1..20: mol_type = other DNA
ctttgacgcccacgtcaccc

SEQ ID NO: 10943 - DNA, 20 bp, synthetic construct
  source 1..20: mol_type = other DNA
cagctcggtcttgtagcgcg

SEQ ID NO: 10944 - DNA, 20 bp, synthetic construct
  source 1..20: mol_type = other DNA
ggccagcgctgcgggcgaca

SEQ ID NO: 10945 - DNA, 20 bp, synthetic construct
  source 1..20: mol_type = other DNA
gtgcagagccgtctggtggg

SEQ ID NO: 10946 - DNA, 20 bp, synthetic construct
  source 1..20: mol_type = other DNA
gcttgagcacgcagtcgaag

SEQ ID NO: 10947 - DNA, 20 bp, synthetic construct
  source 1..20: mol_type = other DNA
gatccttcttattcccaacc

SEQ ID NO: 10948 - DNA, 20 bp, synthetic construct
  source 1..20: mol_type = other DNA
cacgcagtcgaagcggggca

SEQ ID NO: 10949 - DNA, 20 bp, synthetic construct
  source 1..20: mol_type = other DNA
tctctcgtaaggggtctcgg

SEQ ID NO: 10950 - DNA, 20 bp, synthetic construct
  source 1..20: mol_type = other DNA
tctccgcctggggcagagag

SEQ ID NO: 10951 - DNA, 20 bp, synthetic construct
  source 1..20: mol_type = other DNA
caagctcagcatcgacgagg

SEQ ID NO: 10952 - DNA, 20 bp, synthetic construct
  source 1..20: mol_type = other DNA
catggcatgccttgatgcta

SEQ ID NO: 10953 - DNA, 20 bp, synthetic construct
  source 1..20: mol_type = other DNA
cctctcatcaagcctggtaa

SEQ ID NO: 10954 - DNA, 20 bp, synthetic construct
  source 1..20: mol_type = other DNA
tctcgatgtgctccaccacg

SEQ ID NO: 10955 - DNA, 20 bp, synthetic construct
  source 1..20: mol_type = other DNA
caggttcttggtcccagact

SEQ ID NO: 10956 - DNA, 20 bp, synthetic construct
  source 1..20: mol_type = other DNA
ttggagggcttgacatctgc

SEQ ID NO: 10957 - DNA, 20 bp, synthetic construct
  source 1..20: mol_type = other DNA
cagccccaccttctctctca

SEQ ID NO: 10958 - DNA, 20 bp, synthetic construct
  source 1..20: mol_type = other DNA
agcgactgcagaaagaagag

SEQ ID NO: 10959 - DNA, 20 bp, synthetic construct
  source 1..20: mol_type = other DNA
tgggagaggatcttggacac

SEQ ID NO: 10960 - DNA, 20 bp, synthetic construct
  source 1..20: mol_type = other DNA
ggaggaggaggaggagtgga

SEQ ID NO: 10961 - DNA, 20 bp, synthetic construct
  source 1..20: mol_type = other DNA
ttctactggagcgcagtgac

SEQ ID NO: 10962 - DNA, 20 bp, synthetic construct
  source 1..20: mol_type = other DNA
agcaaaataatatagttgtc

SEQ ID NO: 10963 - DNA, 20 bp, synthetic construct
  source 1..20: mol_type = other DNA
cgcactcgaagcagaaaacg

SEQ ID NO: 10964 - DNA, 20 bp, synthetic construct
  source 1..20: mol_type = other DNA
tcgagcaccccaacgtggtc

SEQ ID NO: 10965 - DNA, 20 bp, synthetic construct
  source 1..20: mol_type = other DNA
tagataggtatggatatcca

SEQ ID NO: 10966 - DNA, 20 bp, synthetic construct
  source 1..20: mol_type = other DNA
aggaacaggcctgtctccgg

SEQ ID NO: 10967 - DNA, 20 bp, synthetic construct
  source 1..20: mol_type = other DNA
ttcaacaggagtctcttgca

SEQ ID NO: 10968 - DNA, 20 bp, synthetic construct
  source 1..20: mol_type = other DNA
gccgtgagtaccacgaggag

SEQ ID NO: 10969 - DNA, 20 bp, synthetic construct
  source 1..20: mol_type = other DNA
caggggcaggatggcaacag

SEQ ID NO: 10970 - DNA, 20 bp, synthetic construct
  source 1..20: mol_type = other DNA
atccagcagtgcctccaagt

SEQ ID NO: 10971 - DNA, 20 bp, synthetic construct
  source 1..20: mol_type = other DNA
cactacacctcagacgcaga

SEQ ID NO: 10972 - DNA, 20 bp, synthetic construct
  source 1..20: mol_type = other DNA
cagcaggttcgcctcgccgc

SEQ ID NO: 10973 - DNA, 20 bp, synthetic construct
  source 1..20: mol_type = other DNA
acagagtccatctgcgtctg

SEQ ID NO: 10974 - DNA, 20 bp, synthetic construct
  source 1..20: mol_type = other DNA
tgagcgtgaagaagtggcgc

SEQ ID NO: 10975 - DNA, 20 bp, synthetic construct
  source 1..20: mol_type = other DNA
aggtgcagagccgtctggtg

SEQ ID NO: 10976 - DNA, 20 bp, synthetic construct
  source 1..20: mol_type = other DNA
tgacgctgagcgtgaagaag

SEQ ID NO: 10977 - DNA, 20 bp, synthetic construct
  source 1..20: mol_type = other DNA
ggctaggagtcagcgacata

SEQ ID NO: 10978 - DNA, 20 bp, synthetic construct
  source 1..20: mol_type = other DNA
ggttctgcaatgagacactc

SEQ ID NO: 10979 - DNA, 20 bp, synthetic construct
  source 1..20: mol_type = other DNA
gaaactattccaatgttcag

SEQ ID NO: 10980 - DNA, 20 bp, synthetic construct
  source 1..20: mol_type = other DNA
aatactgctccagatatggg

SEQ ID NO: 10981 - DNA, 20 bp, synthetic construct
  source 1..20: mol_type = other DNA
tcgtaatactgctccagata

SEQ ID NO: 10982 - DNA, 20 bp, synthetic construct
  source 1..20: mol_type = other DNA
ccatgcagatcctcagtttg

SEQ ID NO: 10983 - DNA, 20 bp, synthetic construct
  source 1..20: mol_type = other DNA
gcgcggaggatccaggtggg

SEQ ID NO: 10984 - DNA, 20 bp, synthetic construct
  source 1..20: mol_type = other DNA
ggtcgcaaatgaaaagtatg

SEQ ID NO: 10985 - DNA, 20 bp, synthetic construct
  source 1..20: mol_type = other DNA
gctcttgctgctccgctgtc

SEQ ID NO: 10986 - DNA, 20 bp, synthetic construct
  source 1..20: mol_type = other DNA
tgaacacttactggatgatg

SEQ ID NO: 10987 - DNA, 20 bp, synthetic construct
  source 1..20: mol_type = other DNA
ggctcaggtcgaagacttgt

SEQ ID NO: 10988 - DNA, 20 bp, synthetic construct
  source 1..20: mol_type = other DNA
cagcagcagcagcagcagcg

SEQ ID NO: 10989 - DNA, 20 bp, synthetic construct
  source 1..20: mol_type = other DNA
gggcccccagtagaatccgc

SEQ ID NO: 10990 - DNA, 20 bp, synthetic construct
  source 1..20: mol_type = other DNA
ctaggagtcagcgacatatg

SEQ ID NO: 10991 - DNA, 20 bp, synthetic construct
  source 1..20: mol_type = other DNA
cagcaggggcttcatgagcg

SEQ ID NO: 10992 - DNA, 20 bp, synthetic construct
  source 1..20: mol_type = other DNA
ggaataagatgttctacgcc

SEQ ID NO: 10993 - DNA, 20 bp, synthetic construct
  source 1..20: mol_type = other DNA
gaataagatgttctacgccg

SEQ ID NO: 10994 - DNA, 20 bp, synthetic construct
  source 1..20: mol_type = other DNA
tggacaggtaaggtatttgg

SEQ ID NO: 10995 - DNA, 20 bp, synthetic construct
  source 1..20: mol_type = other DNA
agtgctccagcagctcgaag

SEQ ID NO: 10996 - DNA, 20 bp, synthetic construct
  source 1..20: mol_type = other DNA
gggacgtactcgctgtgcag

SEQ ID NO: 10997 - DNA, 20 bp, synthetic construct
  source 1..20: mol_type = other DNA
agtgaccatgacaataactg

SEQ ID NO: 10998 - DNA, 20 bp, synthetic construct
  source 1..20: mol_type = other DNA
cacccctcaccggaaagaga

SEQ ID NO: 10999 - DNA, 20 bp, synthetic construct
  source 1..20: mol_type = other DNA
tagccgtcgtcatgccgctg

SEQ ID NO: 11000 - DNA, 20 bp, synthetic construct
  source 1..20: mol_type = other DNA
gcttacctggataagctgac

SEQ ID NO: 11001 - DNA, 20 bp, synthetic construct
  source 1..20: mol_type = other DNA
cagtcaaacagcacggccac

SEQ ID NO: 11002 - DNA, 20 bp, synthetic construct
  source 1..20: mol_type = other DNA
agataccttggccaagagct

SEQ ID NO: 11003 - DNA, 20 bp, synthetic construct
  source 1..20: mol_type = other DNA
ggaggatggggaggaggagg

SEQ ID NO: 11004 - DNA, 20 bp, synthetic construct
  source 1..20: mol_type = other DNA
gtctgccagcggctgaactg

SEQ ID NO: 11005 - DNA, 20 bp, synthetic construct
  source 1..20: mol_type = other DNA
tcacctccaccagctgcatg

SEQ ID NO: 11006 - DNA, 20 bp, synthetic construct
  source 1..20: mol_type = other DNA
cccgtaggggcaaaagccga

SEQ ID NO: 11007 - DNA, 20 bp, synthetic construct
  source 1..20: mol_type = other DNA
gtcttcctcttctgtccagg

SEQ ID NO: 11008 - DNA, 20 bp, synthetic construct
  source 1..20: mol_type = other DNA
tcgagagctcggcggagaag

SEQ ID NO: 11009 - DNA, 20 bp, synthetic construct
  source 1..20: mol_type = other DNA
tacaaattgacatgcagtgg

SEQ ID NO: 11010 - DNA, 20 bp, synthetic construct
  source 1..20: mol_type = other DNA
tgaccagcagtacgaatgcg

SEQ ID NO: 11011 - DNA, 20 bp, synthetic construct
  source 1..20: mol_type = other DNA
atcggtatctgggtaggaga

SEQ ID NO: 11012 - DNA, 20 bp, synthetic construct
  source 1..20: mol_type = other DNA
tcccccagccaacctttgta

SEQ ID NO: 11013 - DNA, 20 bp, synthetic construct
  source 1..20: mol_type = other DNA
ctgcgcatccagtgtgaggg

SEQ ID NO: 11014 - DNA, 20 bp, synthetic construct
  source 1..20: mol_type = other DNA
ctatcaacagaagatcaagg

SEQ ID NO: 11015 - DNA, 20 bp, synthetic construct
  source 1..20: mol_type = other DNA
actaagaaaaaacaaacaca

SEQ ID NO: 11016 - DNA, 20 bp, synthetic construct
  source 1..20: mol_type = other DNA
actccagagatccacggggg

SEQ ID NO: 11017 - DNA, 20 bp, synthetic construct
  source 1..20: mol_type = other DNA
tttatatatataagatcttt

SEQ ID NO: 11018 - DNA, 20 bp, synthetic construct
  source 1..20: mol_type = other DNA
accagcaggggcttcatgag

SEQ ID NO: 11019 - DNA, 20 bp, synthetic construct
  source 1..20: mol_type = other DNA
cggaataagatgttctacgc

SEQ ID NO: 11020 - DNA, 20 bp, synthetic construct
  source 1..20: mol_type = other DNA
gatggccttggtgatgaggt

SEQ ID NO: 11021 - DNA, 20 bp, synthetic construct
  source 1..20: mol_type = other DNA
ccacctggatggacacgctg

SEQ ID NO: 11022 - DNA, 20 bp, synthetic construct
  source 1..20: mol_type = other DNA
tacttacagaatctataaat

SEQ ID NO: 11023 - DNA, 20 bp, synthetic construct
  source 1..20: mol_type = other DNA
tacccagtggtgccgtacaa

SEQ ID NO: 11024 - DNA, 20 bp, synthetic construct
  source 1..20: mol_type = other DNA
agccttgcagggcagcctcg

SEQ ID NO: 11025 - DNA, 20 bp, synthetic construct
  source 1..20: mol_type = other DNA
agaagctgcccccctcacac

SEQ ID NO: 11026 - DNA, 20 bp, synthetic construct
  source 1..20: mol_type = other DNA
tacctggataagctgacagg

SEQ ID NO: 11027 - DNA, 20 bp, synthetic construct
  source 1..20: mol_type = other DNA
ggtgtatccatctgagttga

SEQ ID NO: 11028 - DNA, 20 bp, synthetic construct
  source 1..20: mol_type = other DNA
gcttcaccagtcaaacagca

SEQ ID NO: 11029 - DNA, 20 bp, synthetic construct
  source 1..20: mol_type = other DNA
caggtaacggggagccgggc

SEQ ID NO: 11030 - DNA, 20 bp, synthetic construct
  source 1..20: mol_type = other DNA
tcccccaggctggagtgcag

SEQ ID NO: 11031 - DNA, 20 bp, synthetic construct
  source 1..20: mol_type = other DNA
aaagctggaaagggacgaac

SEQ ID NO: 11032 - DNA, 20 bp, synthetic construct
  source 1..20: mol_type = other DNA
atatgccaaggagctggatc

SEQ ID NO: 11033 - DNA, 20 bp, synthetic construct
  source 1..20: mol_type = other DNA
acaatattgatgatgtagta

SEQ ID NO: 11034 - DNA, 20 bp, synthetic construct
  source 1..20: mol_type = other DNA
accagcccttgccaatccaa

SEQ ID NO: 11035 - DNA, 20 bp, synthetic construct
  source 1..20: mol_type = other DNA
gtcccagttccaggtagaag

SEQ ID NO: 11036 - DNA, 20 bp, synthetic construct
  source 1..20: mol_type = other DNA
gctgtggctgcagttggaga

SEQ ID NO: 11037 - DNA, 20 bp, synthetic construct
  source 1..20: mol_type = other DNA
tgtagcgtgattggactccc

SEQ ID NO: 11038 - DNA, 20 bp, synthetic construct
  source 1..20: mol_type = other DNA
gtcgcagatctacgagtgga

SEQ ID NO: 11039 - DNA, 20 bp, synthetic construct
  source 1..20: mol_type = other DNA
caggcgtagctggtccaggg

SEQ ID NO: 11040 - DNA, 20 bp, synthetic construct
  source 1..20: mol_type = other DNA
tacacactgcacagtggtga

SEQ ID NO: 11041 - DNA, 20 bp, synthetic construct
  source 1..20: mol_type = other DNA
caccagctggtactcgctct

SEQ ID NO: 11042 - DNA, 20 bp, synthetic construct
  source 1..20: mol_type = other DNA
ctgccagcggctgaactgtg

SEQ ID NO: 11043 - DNA, 20 bp, synthetic construct
  source 1..20: mol_type = other DNA
ggccaggatccaaaccccgc

SEQ ID NO: 11044 - DNA, 20 bp, synthetic construct
  source 1..20: mol_type = other DNA
ttgtcctccagcacctgcac

SEQ ID NO: 11045 - DNA, 20 bp, synthetic construct
  source 1..20: mol_type = other DNA
gagccccagcggcatgacga

SEQ ID NO: 11046 - DNA, 20 bp, synthetic construct
  source 1..20: mol_type = other DNA
agcaggtacaaggtggccag

SEQ ID NO: 11047 - DNA, 20 bp, synthetic construct
  source 1..20: mol_type = other DNA
cacgatcgcacagatggcac

SEQ ID NO: 11048 - DNA, 20 bp, synthetic construct
  source 1..20: mol_type = other DNA
tgccaatggtgatgtggatg

SEQ ID NO: 11049 - DNA, 20 bp, synthetic construct
  source 1..20: mol_type = other DNA
caggggcttcatgagcgggg

SEQ ID NO: 11050 - DNA, 20 bp, synthetic construct
  source 1..20: mol_type = other DNA
gagtcttcagagtcaacacc

SEQ ID NO: 11051 - DNA, 20 bp, synthetic construct
  source 1..20: mol_type = other DNA
cacggaaggacggcttacag

SEQ ID NO: 11052 - DNA, 20 bp, synthetic construct
  source 1..20: mol_type = other DNA
ttccctggctacccgatgtc

SEQ ID NO: 11053 - DNA, 20 bp, synthetic construct
  source 1..20: mol_type = other DNA
tcctcccaggctgcagctgg

SEQ ID NO: 11054 - DNA, 20 bp, synthetic construct
  source 1..20: mol_type = other DNA
caaggacccttgatgagctc

SEQ ID NO: 11055 - DNA, 20 bp, synthetic construct
  source 1..20: mol_type = other DNA
tctggcggccagcactgtgc

SEQ ID NO: 11056 - DNA, 20 bp, synthetic construct
  source 1..20: mol_type = other DNA
atacctgagtgctcttccca

SEQ ID NO: 11057 - DNA, 20 bp, synthetic construct
  source 1..20: mol_type = other DNA
gcagacttttgacgcttgac

SEQ ID NO: 11058 - DNA, 20 bp, synthetic construct
  source 1..20: mol_type = other DNA
actgcagaaagaagagagga

SEQ ID NO: 11059 - DNA, 20 bp, synthetic construct
  source 1..20: mol_type = other DNA
cgggtgcagaccggcgagga

SEQ ID NO: 11060 - DNA, 20 bp, synthetic construct
  source 1..20: mol_type = other DNA
caatggggcagtcctgcaga

SEQ ID NO: 11061 - DNA, 20 bp, synthetic construct
  source 1..20: mol_type = other DNA
gccagaagaagcagcgccag

SEQ ID NO: 11062 - DNA, 20 bp, synthetic construct
  source 1..20: mol_type = other DNA
aactggatataaatcccagt

SEQ ID NO: 11063 - DNA, 20 bp, synthetic construct
  source 1..20: mol_type = other DNA
gctgacaggccagagagagt

SEQ ID NO: 11064 - DNA, 20 bp, synthetic construct
  source 1..20: mol_type = other DNA
ccagcagtacgaatgcgtgg

SEQ ID NO: 11065 - DNA, 20 bp, synthetic construct
  source 1..20: mol_type = other DNA
ccagcaggggcttcatgagc

SEQ ID NO: 11066 - DNA, 20 bp, synthetic construct
  source 1..20: mol_type = other DNA
taccagcttcttcctgggtc

SEQ ID NO: 11067 - DNA, 20 bp, synthetic construct
  source 1..20: mol_type = other DNA
atacacactgcacagtggtg

SEQ ID NO: 11068 - DNA, 20 bp, synthetic construct
  source 1..20: mol_type = other DNA
cacactggggtttcaggtcc

SEQ ID NO: 11069 - DNA, 20 bp, synthetic construct
  source 1..20: mol_type = other DNA
gctcctgcagcggccgcacg

SEQ ID NO: 11070 - DNA, 20 bp, synthetic construct
  source 1..20: mol_type = other DNA
ccaagaactaaatggggaaa

SEQ ID NO: 11071 - DNA, 20 bp, synthetic construct
  source 1..20: mol_type = other DNA
tccagccgctctgacaccag

SEQ ID NO: 11072 - DNA, 20 bp, synthetic construct
  source 1..20: mol_type = other DNA
gctcaaggaagaactcggat

SEQ ID NO: 11073 - DNA, 20 bp, synthetic construct
  source 1..20: mol_type = other DNA
gggcgaaaaagcagttccgc

SEQ ID NO: 11074 - DNA, 20 bp, synthetic construct
  source 1..20: mol_type = other DNA
gtagccgtcgtcatgccgct

SEQ ID NO: 11075 - DNA, 20 bp, synthetic construct
  source 1..20: mol_type = other DNA
tccgcaggttgtgcactttg

SEQ ID NO: 11076 - DNA, 20 bp, synthetic construct
  source 1..20: mol_type = other DNA
cgcacagcgtgtagtctccg

SEQ ID NO: 11077 - DNA, 20 bp, synthetic construct
  source 1..20: mol_type = other DNA
agaacttactagcatcttca

SEQ ID NO: 11078 - DNA, 20 bp, synthetic construct
  source 1..20: mol_type = other DNA
gtgagccttgcctggaaatc

SEQ ID NO: 11079 - DNA, 20 bp, synthetic construct
  source 1..20: mol_type = other DNA
acctgcgcatccagtgtgag

SEQ ID NO: 11080 - DNA, 20 bp, synthetic construct
  source 1..20: mol_type = other DNA
acctgtgggctctggagttg

SEQ ID NO: 11081 - DNA, 20 bp, synthetic construct
  source 1..20: mol_type = other DNA
gggttaccttcaacaatgct

SEQ ID NO: 11082 - DNA, 20 bp, synthetic construct
  source 1..20: mol_type = other DNA
gcagccgcaggtagaccaca

SEQ ID NO: 11083 - DNA, 20 bp, synthetic construct
  source 1..20: mol_type = other DNA
caagaactaaatggggaaat

SEQ ID NO: 11084 - DNA, 20 bp, synthetic construct
  source 1..20: mol_type = other DNA
ccccactcacgtcatgactg

SEQ ID NO: 11085 - DNA, 20 bp, synthetic construct
  source 1..20: mol_type = other DNA
atacaccacgaagcgcagaa

SEQ ID NO: 11086 - DNA, 20 bp, synthetic construct
  source 1..20: mol_type = other DNA
ggccagcaggtcggcgacag

SEQ ID NO: 11087 - DNA, 20 bp, synthetic construct
  source 1..20: mol_type = other DNA
cttgagcacgcagtcgaagc

SEQ ID NO: 11088 - DNA, 20 bp, synthetic construct
  source 1..20: mol_type = other DNA
tcaagtccattccatcacac

SEQ ID NO: 11089 - DNA, 20 bp, synthetic construct
  source 1..20: mol_type = other DNA
ttacaaagagatctccgtat

SEQ ID NO: 11090 - DNA, 20 bp, synthetic construct
  source 1..20: mol_type = other DNA
ccagctggaggtctacctca

SEQ ID NO: 11091 - DNA, 20 bp, synthetic construct
  source 1..20: mol_type = other DNA
tatttaatcgaagagacccc

SEQ ID NO: 11092 - DNA, 20 bp, synthetic construct
  source 1..20: mol_type = other DNA
tgaagaggaggaagaggagg

SEQ ID NO: 11093 - DNA, 20 bp, synthetic construct
  source 1..20: mol_type = other DNA
actggaattctacaatgcgt

SEQ ID NO: 11094 - DNA, 20 bp, synthetic construct
  source 1..20: mol_type = other DNA
ttggatgatggcaagacact

SEQ ID NO: 11095 - DNA, 20 bp, synthetic construct
  source 1..20: mol_type = other DNA
aaaacacatcagtataacat

SEQ ID NO: 11096 - DNA, 20 bp, synthetic construct
  source 1..20: mol_type = other DNA
ttagcatcttgttctgtttg

SEQ ID NO: 11097 - DNA, 20 bp, synthetic construct
  source 1..20: mol_type = other DNA
ctgttttggttcattcccgt

SEQ ID NO: 11098 - DNA, 20 bp, synthetic construct
  source 1..20: mol_type = other DNA
ctgggtggagacaagcagtg

SEQ ID NO: 11099 - DNA, 20 bp, synthetic construct
  source 1..20: mol_type = other DNA
gctgctgcagaccatcggga

SEQ ID NO: 11100 - DNA, 20 bp, synthetic construct
  source 1..20: mol_type = other DNA
taggccagtcttcttctcct

SEQ ID NO: 11101 - DNA, 20 bp, synthetic construct
  source 1..20: mol_type = other DNA
cccgaaccctcaactggggt

SEQ ID NO: 11102 - DNA, 20 bp, synthetic construct
  source 1..20: mol_type = other DNA
cccgcaggcgcccggctccg

SEQ ID NO: 11103 - DNA, 20 bp, synthetic construct
  source 1..20: mol_type = other DNA
cttcagagtgttgaagatgg

SEQ ID NO: 11104 - DNA, 20 bp, synthetic construct
  source 1..20: mol_type = other DNA
tcagcgtcaagacccagtct

SEQ ID NO: 11105 - DNA, 20 bp, synthetic construct
  source 1..20: mol_type = other DNA
aagaagcagcgccagtggat

SEQ ID NO: 11106 - DNA, 20 bp, synthetic construct
  source 1..20: mol_type = other DNA
ggcggcggcggaggcggcgg

SEQ ID NO: 11107 - DNA, 20 bp, synthetic construct
  source 1..20: mol_type = other DNA
cagtggtccactgcaggcag

SEQ ID NO: 11108 - DNA, 20 bp, synthetic construct
  source 1..20: mol_type = other DNA
tgagaaggaaaagcgaataa

SEQ ID NO: 11109 - DNA, 20 bp, synthetic construct
  source 1..20: mol_type = other DNA
gaacaccgtgctggactcct

SEQ ID NO: 11110 - DNA, 20 bp, synthetic construct
  source 1..20: mol_type = other DNA
gttctcagcatgggatcgga

SEQ ID NO: 11111 - DNA, 20 bp, synthetic construct
  source 1..20: mol_type = other DNA
tggtcaagatcttcacaaaa

SEQ ID NO: 11112 - DNA, 20 bp, synthetic construct
  source 1..20: mol_type = other DNA
tggagaggatccagcccacc

SEQ ID NO: 11113 - DNA, 20 bp, synthetic construct
  source 1..20: mol_type = other DNA
tacaaggtgggtcccgcggg

SEQ ID NO: 11114 - DNA, 20 bp, synthetic construct
  source 1..20: mol_type = other DNA
cgaactgaagcgcatcgtcg

SEQ ID NO: 11115 - DNA, 20 bp, synthetic construct
  source 1..20: mol_type = other DNA
ccacaagtgaagcagcgtac

SEQ ID NO: 11116 - DNA, 20 bp, synthetic construct
  source 1..20: mol_type = other DNA
tacaaactttgggaagctgg

SEQ ID NO: 11117 - DNA, 20 bp, synthetic construct
  source 1..20: mol_type = other DNA
cagaagagcccccgggatgt

SEQ ID NO: 11118 - DNA, 20 bp, synthetic construct
  source 1..20: mol_type = other DNA
ctgtgcatgggtgagggtga

SEQ ID NO: 11119 - DNA, 20 bp, synthetic construct
  source 1..20: mol_type = other DNA
tggctgggatgatgccctca

SEQ ID NO: 11120 - DNA, 20 bp, synthetic construct
  source 1..20: mol_type = other DNA
tgccttaccagcttcttcct

SEQ ID NO: 11121 - DNA, 20 bp, synthetic construct
  source 1..20: mol_type = other DNA
tagaggatatcgtagtgtcc

SEQ ID NO: 11122 - DNA, 20 bp, synthetic construct
  source 1..20: mol_type = other DNA
agaacaagtgtgcagaatac

SEQ ID NO: 11123 - DNA, 20 bp, synthetic construct
  source 1..20: mol_type = other DNA
tctgggtggagacaagcagt

SEQ ID NO: 11124 - DNA, 20 bp, synthetic construct
  source 1..20: mol_type = other DNA
tggtgaagccaatgacctcg

SEQ ID NO: 11125 - DNA, 20 bp, synthetic construct
  source 1..20: mol_type = other DNA
caggtggagtacatggaccg

SEQ ID NO: 11126 - DNA, 20 bp, synthetic construct
  source 1..20: mol_type = other DNA
cctcccactgcttggagctc

SEQ ID NO: 11127 - DNA, 20 bp, synthetic construct
  source 1..20: mol_type = other DNA
tcttggagctgaaggtcttg

SEQ ID NO: 11128 - DNA, 20 bp, synthetic construct
  source 1..20: mol_type = other DNA
caccaagaagaagtccaaga

SEQ ID NO: 11129 - DNA, 20 bp, synthetic construct
  source 1..20: mol_type = other DNA
gacgccaggacggcaagtgt

SEQ ID NO: 11130 - DNA, 20 bp, synthetic construct
  source 1..20: mol_type = other DNA
agtagttgttgaagacatcc

SEQ ID NO: 11131 - DNA, 20 bp, synthetic construct
  source 1..20: mol_type = other DNA
atactcacaattcttggata

SEQ ID NO: 11132 - DNA, 20 bp, synthetic construct
  source 1..20: mol_type = other DNA
ccaggtcctgggtcttgtcc

SEQ ID NO: 11133 - DNA, 20 bp, synthetic construct
  source 1..20: mol_type = other DNA
cagaaaggtgccggcgggct

SEQ ID NO: 11134 - DNA, 20 bp, synthetic construct
  source 1..20: mol_type = other DNA
ctgctgcagaccatcgggaa

SEQ ID NO: 11135 - DNA, 20 bp, synthetic construct
  source 1..20: mol_type = other DNA
cctgggtactggcaacgact

SEQ ID NO: 11136 - DNA, 20 bp, synthetic construct
  source 1..20: mol_type = other DNA
ggttccacggcaagatcaca

SEQ ID NO: 11137 - DNA, 20 bp, synthetic construct
  source 1..20: mol_type = other DNA
aataggtatgtagttacctc

SEQ ID NO: 11138 - DNA, 20 bp, synthetic construct
  source 1..20: mol_type = other DNA
tacaggtaccacaggggtga

SEQ ID NO: 11139 - DNA, 20 bp, synthetic construct
  source 1..20: mol_type = other DNA
agccacagccgccttcaaca

SEQ ID NO: 11140 - DNA, 20 bp, synthetic construct
  source 1..20: mol_type = other DNA
aatgaagaaagtccagacct

SEQ ID NO: 11141 - DNA, 20 bp, synthetic construct
  source 1..20: mol_type = other DNA
cagcgatgtggagcagcagg

SEQ ID NO: 11142 - DNA, 20 bp, synthetic construct
  source 1..20: mol_type = other DNA
cgtgcacatgaatccccccc

SEQ ID NO: 11143 - DNA, 20 bp, synthetic construct
  source 1..20: mol_type = other DNA
ccgcacagtacctgcaaagg

SEQ ID NO: 11144 - DNA, 20 bp, synthetic construct
  source 1..20: mol_type = other DNA
ctgctcagtgccgagcccgc

SEQ ID NO: 11145 - DNA, 20 bp, synthetic construct
  source 1..20: mol_type = other DNA
agcactctgggaggctgagg

SEQ ID NO: 11146 - DNA, 20 bp, synthetic construct
  source 1..20: mol_type = other DNA
gcaccccacagttcagccgc

SEQ ID NO: 11147 - DNA, 20 bp, synthetic construct
  source 1..20: mol_type = other DNA
caaggtgcagagccgtctgg

SEQ ID NO: 11148 - DNA, 20 bp, synthetic construct
  source 1..20: mol_type = other DNA
agaggaggaggcggaggcgg

SEQ ID NO: 11149 - DNA, 20 bp, synthetic construct
  source 1..20: mol_type = other DNA
ccatcagtttgtggatgtta

SEQ ID NO: 11150 - DNA, 20 bp, synthetic construct
  source 1..20: mol_type = other DNA
gatattggctaaatacagaa

SEQ ID NO: 11151 - DNA, 20 bp, synthetic construct
  source 1..20: mol_type = other DNA
ctttcagaggaagcttggaa

SEQ ID NO: 11152 - DNA, 20 bp, synthetic construct
  source 1..20: mol_type = other DNA
aaggtgcatgatcgtccacc

SEQ ID NO: 11153 - DNA, 20 bp, synthetic construct
  source 1..20: mol_type = other DNA
tggaggacaatgactatggc

SEQ ID NO: 11154 - DNA, 20 bp, synthetic construct
  source 1..20: mol_type = other DNA
gcctgttgactccaattcag

SEQ ID NO: 11155 - DNA, 20 bp, synthetic construct
  source 1..20: mol_type = other DNA
agttctacagcggcagcctg

SEQ ID NO: 11156 - DNA, 20 bp, synthetic construct
  source 1..20: mol_type = other DNA
cctctcaggtttccagccca

SEQ ID NO: 11157 - DNA, 20 bp, synthetic construct
  source 1..20: mol_type = other DNA
tggagttgaaggtagtttcg

SEQ ID NO: 11158 - DNA, 20 bp, synthetic construct
  source 1..20: mol_type = other DNA
accgaattcagcaagaggtg

SEQ ID NO: 11159 - DNA, 20 bp, synthetic construct
  source 1..20: mol_type = other DNA
ctaggccagtcttcttctcc

SEQ ID NO: 11160 - DNA, 20 bp, synthetic construct
  source 1..20: mol_type = other DNA
caagagcggcggccgcgctt

SEQ ID NO: 11161 - DNA, 20 bp, synthetic construct
  source 1..20: mol_type = other DNA
tgtgcatatttattacatcg

SEQ ID NO: 11162 - DNA, 20 bp, synthetic construct
  source 1..20: mol_type = other DNA
cctcctgcaggccgcgctcg

SEQ ID NO: 11163 - DNA, 20 bp, synthetic construct
  source 1..20: mol_type = other DNA
agctgaaggtcttgaggcgc

SEQ ID NO: 11164 - DNA, 20 bp, synthetic construct
  source 1..20: mol_type = other DNA
aagtcagagaaagctgtctg

SEQ ID NO: 11165 - DNA, 20 bp, synthetic construct
  source 1..20: mol_type = other DNA
tagaccgcaggtagtccaca

SEQ ID NO: 11166 - DNA, 20 bp, synthetic construct
  source 1..20: mol_type = other DNA
cctcttcagagtgttgaaga

SEQ ID NO: 11167 - DNA, 20 bp, synthetic construct
  source 1..20: mol_type = other DNA
gatacctttatggtttcagt

SEQ ID NO: 11168 - DNA, 20 bp, synthetic construct
  source 1..20: mol_type = other DNA
gcggcagatccggagtacag

SEQ ID NO: 11169 - DNA, 20 bp, synthetic construct
  source 1..20: mol_type = other DNA
cctgcgcatccagtgtgagg

SEQ ID NO: 11170 - DNA, 20 bp, synthetic construct
  source 1..20: mol_type = other DNA
agtagaataagtacttcttg

SEQ ID NO: 11171 - DNA, 20 bp, synthetic construct
  source 1..20: mol_type = other DNA
gttacccacctaagcaggtc

SEQ ID NO: 11172 - DNA, 20 bp, synthetic construct
  source 1..20: mol_type = other DNA
cgagctgtcgcggatcagaa

SEQ ID NO: 11173 - DNA, 20 bp, synthetic construct
  source 1..20: mol_type = other DNA
ctcgtgcagtttctcatacc

SEQ ID NO: 11174 - DNA, 20 bp, synthetic construct
  source 1..20: mol_type = other DNA
ggtgcagagccgtctggtgg

SEQ ID NO: 11175 - DNA, 20 bp, synthetic construct
  source 1..20: mol_type = other DNA
gagccctgagagaggagggg

SEQ ID NO: 11176 - DNA, 20 bp, synthetic construct
  source 1..20: mol_type = other DNA
tggcggcacagctcctgcag

SEQ ID NO: 11177 - DNA, 20 bp, synthetic construct
  source 1..20: mol_type = other DNA
ctggcaggcctctatctcca

SEQ ID NO: 11178 - DNA, 20 bp, synthetic construct
  source 1..20: mol_type = other DNA
gcgggtgcagaccggcgagg

SEQ ID NO: 11179 - DNA, 20 bp, synthetic construct
  source 1..20: mol_type = other DNA
gcagaagggcaggtcctgct

SEQ ID NO: 11180 - DNA, 20 bp, synthetic construct
  source 1..20: mol_type = other DNA
gcttaccccaccccagttga

SEQ ID NO: 11181 - DNA, 20 bp, synthetic construct
  source 1..20: mol_type = other DNA
taagatccccaaaccagaag

SEQ ID NO: 11182 - DNA, 20 bp, synthetic construct
  source 1..20: mol_type = other DNA
ggcacggtgagctccccgca

SEQ ID NO: 11183 - DNA, 20 bp, synthetic construct
  source 1..20: mol_type = other DNA
acagaaatgcttgacttctg

SEQ ID NO: 11184 - DNA, 20 bp, synthetic construct
  source 1..20: mol_type = other DNA
gcggctgacgcagtgtcgcg

SEQ ID NO: 11185 - DNA, 20 bp, synthetic construct
  source 1..20: mol_type = other DNA
ttctctaccagatcctcaga

SEQ ID NO: 11186 - DNA, 20 bp, synthetic construct
  source 1..20: mol_type = other DNA
aggagcaggtgctggtctgg

SEQ ID NO: 11187 - DNA, 20 bp, synthetic construct
  source 1..20: mol_type = other DNA
cagatgcgaactcttggtgt

SEQ ID NO: 11188 - DNA, 20 bp, synthetic construct
  source 1..20: mol_type = other DNA
caccactacatgccgccccc

SEQ ID NO: 11189 - DNA, 20 bp, synthetic construct
  source 1..20: mol_type = other DNA
ttgctacagccaagagacaa

SEQ ID NO: 11190 - DNA, 20 bp, synthetic construct
  source 1..20: mol_type = other DNA
cacagcgtgacgacctgcaa

SEQ ID NO: 11191 - DNA, 20 bp, synthetic construct
  source 1..20: mol_type = other DNA
cgatcctgaaaattgaaaac

SEQ ID NO: 11192 - DNA, 20 bp, synthetic construct
  source 1..20: mol_type = other DNA
gaaaagatcacttttctctt

SEQ ID NO: 11193 - DNA, 20 bp, synthetic construct
  source 1..20: mol_type = other DNA
cagagctcaatcatctgcta

SEQ ID NO: 11194 - DNA, 20 bp, synthetic construct
  source 1..20: mol_type = other DNA
tgcccgcacagtacctgcaa

SEQ ID NO: 11195 - DNA, 20 bp, synthetic construct
  source 1..20: mol_type = other DNA
ccgtctgcccagccactccc

SEQ ID NO: 11196 - DNA, 20 bp, synthetic construct
  source 1..20: mol_type = other DNA
tgagccttgcctggaaatct

SEQ ID NO: 11197 - DNA, 20 bp, synthetic construct
  source 1..20: mol_type = other DNA
accatggtggcggatggcgg

SEQ ID NO: 11198 - DNA, 20 bp, synthetic construct
  source 1..20: mol_type = other DNA
aacactccagagatccacgg

SEQ ID NO: 11199 - DNA, 20 bp, synthetic construct
  source 1..20: mol_type = other DNA
cagacttttgacgcttgact

SEQ ID NO: 11200 - DNA, 20 bp, synthetic construct
  source 1..20: mol_type = other DNA
ccgggcggcgggggctgcgg

SEQ ID NO: 11201 - DNA, 20 bp, synthetic construct
  source 1..20: mol_type = other DNA
gtaggaagagccgcaccagc

SEQ ID NO: 11202 - DNA, 20 bp, synthetic construct
  source 1..20: mol_type = other DNA
ctggactggagcaagacttc

SEQ ID NO: 11203 - DNA, 20 bp, synthetic construct
  source 1..20: mol_type = other DNA
ctgaacatccccaggtgagg

SEQ ID NO: 11204 - DNA, 20 bp, synthetic construct
  source 1..20: mol_type = other DNA
ctctcctcagtaccacagca

SEQ ID NO: 11205 - DNA, 20 bp, synthetic construct
  source 1..20: mol_type = other DNA
gctcgccatccacctgcacc

SEQ ID NO: 11206 - DNA, 20 bp, synthetic construct
  source 1..20: mol_type = other DNA
tgatgagcttatcctcacca

SEQ ID NO: 11207 - DNA, 20 bp, synthetic construct
  source 1..20: mol_type = other DNA
tgtggaaggtgaacttctgc

SEQ ID NO: 11208 - DNA, 20 bp, synthetic construct
  source 1..20: mol_type = other DNA
ctgagatcgaaaacctctca

SEQ ID NO: 11209 - DNA, 20 bp, synthetic construct
  source 1..20: mol_type = other DNA
taccttggtgacggccacaa

SEQ ID NO: 11210 - DNA, 20 bp, synthetic construct
  source 1..20: mol_type = other DNA
agaggagccgtcaaatccag

SEQ ID NO: 11211 - DNA, 20 bp, synthetic construct
  source 1..20: mol_type = other DNA
cttaaagcggggcatcgtac

SEQ ID NO: 11212 - DNA, 20 bp, synthetic construct
  source 1..20: mol_type = other DNA
gctgttgaatttctctgggt

SEQ ID NO: 11213 - DNA, 20 bp, synthetic construct
  source 1..20: mol_type = other DNA
cgcggaggatccaggtgggc

SEQ ID NO: 11214 - DNA, 20 bp, synthetic construct
  source 1..20: mol_type = other DNA
taccatcagctatgaggccc

SEQ ID NO: 11215 - DNA, 20 bp, synthetic construct
  source 1..20: mol_type = other DNA
ttccctagcatgtttcgcca

SEQ ID NO: 11216 - DNA, 20 bp, synthetic construct
  source 1..20: mol_type = other DNA
tgtgcacatgaggtgtccac

SEQ ID NO: 11217 - DNA, 20 bp, synthetic construct
  source 1..20: mol_type = other DNA
gtctcagttcaaagacacga

SEQ ID NO: 11218 - DNA, 20 bp, synthetic construct
  source 1..20: mol_type = other DNA
gctccccgttacctgtgccg

SEQ ID NO: 11219 - DNA, 20 bp, synthetic construct
  source 1..20: mol_type = other DNA
cactgcaacctcctcctccc

SEQ ID NO: 11220 - DNA, 20 bp, synthetic construct
  source 1..20: mol_type = other DNA
ccagcgcaatgatgtggatg

SEQ ID NO: 11221 - DNA, 20 bp, synthetic construct
  source 1..20: mol_type = other DNA
catgcagatgagtgccctgg

SEQ ID NO: 11222 - DNA, 20 bp, synthetic construct
  source 1..20: mol_type = other DNA
tccgcgaggtggcggtgctg

SEQ ID NO: 11223 - DNA, 20 bp, synthetic construct
  source 1..20: mol_type = other DNA
cgtgcgggtgcagaccggcg

SEQ ID NO: 11224 - DNA, 20 bp, synthetic construct
  source 1..20: mol_type = other DNA
cttggcccgaaccctcaact

SEQ ID NO: 11225 - DNA, 20 bp, synthetic construct
  source 1..20: mol_type = other DNA
ggcaggatggcaacaggggg

SEQ ID NO: 11226 - DNA, 20 bp, synthetic construct
  source 1..20: mol_type = other DNA
gttctacgccggggtgagtg

SEQ ID NO: 11227 - DNA, 20 bp, synthetic construct
  source 1..20: mol_type = other DNA
catggtggcctggttgcgca

SEQ ID NO: 11228 - DNA, 20 bp, synthetic construct
  source 1..20: mol_type = other DNA
gatatgaattatgagaccat

SEQ ID NO: 11229 - DNA, 20 bp, synthetic construct
  source 1..20: mol_type = other DNA
gaaagagatggcatatgagt

SEQ ID NO: 11230 - DNA, 20 bp, synthetic construct
  source 1..20: mol_type = other DNA
tttcatccaagaactaaatg

SEQ ID NO: 11231 - DNA, 20 bp, synthetic construct
  source 1..20: mol_type = other DNA
gtacaaagccaaaaacaagg

SEQ ID NO: 11232 - DNA, 20 bp, synthetic construct
  source 1..20: mol_type = other DNA
tcagggactatgtggaggta

SEQ ID NO: 11233 - DNA, 20 bp, synthetic construct
  source 1..20: mol_type = other DNA
ccgccaccccaagtacaaga

SEQ ID NO: 11234 - DNA, 20 bp, synthetic construct
  source 1..20: mol_type = other DNA
acaggtacgtgtgctccccg

SEQ ID NO: 11235 - DNA, 20 bp, synthetic construct
  source 1..20: mol_type = other DNA
tctaggggtcggtcagtgct

SEQ ID NO: 11236 - DNA, 20 bp, synthetic construct
  source 1..20: mol_type = other DNA
tcatcatctcatccagacat

SEQ ID NO: 11237 - DNA, 20 bp, synthetic construct
  source 1..20: mol_type = other DNA
ccgggcggcggcgggggcgg

SEQ ID NO: 11238 - DNA, 20 bp, synthetic construct
  source 1..20: mol_type = other DNA
acctggcgctgcacatgaaa

SEQ ID NO: 11239 - DNA, 20 bp, synthetic construct
  source 1..20: mol_type = other DNA
gctgcagctccagcagggcg

SEQ ID NO: 11240 - DNA, 20 bp, synthetic construct
  source 1..20: mol_type = other DNA
aaggtgcagagccgtctggt

SEQ ID NO: 11241 - DNA, 20 bp, synthetic construct
  source 1..20: mol_type = other DNA
gctaggagtcagcgacatat

SEQ ID NO: 11242 - DNA, 20 bp, synthetic construct
  source 1..20: mol_type = other DNA
tcttcgacctgagccaggga

SEQ ID NO: 11243 - DNA, 20 bp, synthetic construct
  source 1..20: mol_type = other DNA
cagccaactacgtccagaag

SEQ ID NO: 11244 - DNA, 20 bp, synthetic construct
  source 1..20: mol_type = other DNA
gctggactggagcaagactt

SEQ ID NO: 11245 - DNA, 20 bp, synthetic construct
  source 1..20: mol_type = other DNA
ggctgagggcagtgcctacg

SEQ ID NO: 11246 - DNA, 20 bp, synthetic construct
  source 1..20: mol_type = other DNA
ctcagtttgaggagcaagtg

SEQ ID NO: 11247 - DNA, 20 bp, synthetic construct
  source 1..20: mol_type = other DNA
ttggacaggtaaggtatttg

SEQ ID NO: 11248 - DNA, 20 bp, synthetic construct
  source 1..20: mol_type = other DNA
ccttgaacctgggggtggga

SEQ ID NO: 11249 - DNA, 20 bp, synthetic construct
  source 1..20: mol_type = other DNA
ctcgagactcgtggaactcc

SEQ ID NO: 11250 - DNA, 20 bp, synthetic construct
  source 1..20: mol_type = other DNA
tcaagaaggagccacactgg

SEQ ID NO: 11251 - DNA, 20 bp, synthetic construct
  source 1..20: mol_type = other DNA
catcttagagtttaacagat

SEQ ID NO: 11252 - DNA, 20 bp, synthetic construct
  source 1..20: mol_type = other DNA
acagattgtatatcttgtaa

SEQ ID NO: 11253 - DNA, 20 bp, synthetic construct
  source 1..20: mol_type = other DNA
ttctccagctgctcgatgca

SEQ ID NO: 11254 - DNA, 20 bp, synthetic construct
  source 1..20: mol_type = other DNA
gttccacggcaagatcacac

SEQ ID NO: 11255 - DNA, 20 bp, synthetic construct
  source 1..20: mol_type = other DNA
gaggaggagtggatggagga

SEQ ID NO: 11256 - DNA, 20 bp, synthetic construct
  source 1..20: mol_type = other DNA
cctgggccagcgcaatgatg

SEQ ID NO: 11257 - DNA, 20 bp, synthetic construct
  source 1..20: mol_type = other DNA
tcctctcatcaagcctggta

SEQ ID NO: 11258 - DNA, 20 bp, synthetic construct
  source 1..20: mol_type = other DNA
caagagcgagtaccagctgg

SEQ ID NO: 11259 - DNA, 20 bp, synthetic construct
  source 1..20: mol_type = other DNA
gactgcagaaagaagagagg

SEQ ID NO: 11260 - DNA, 20 bp, synthetic construct
  source 1..20: mol_type = other DNA
ggcggcggcggaggaggagg

SEQ ID NO: 11261 - DNA, 20 bp, synthetic construct
  source 1..20: mol_type = other DNA
catctgcgcacgcacacagg

SEQ ID NO: 11262 - DNA, 20 bp, synthetic construct
  source 1..20: mol_type = other DNA
ctatgaggacctcatgcgct

SEQ ID NO: 11263 - DNA, 20 bp, synthetic construct
  source 1..20: mol_type = other DNA
ttgtaccagttggggtcctg

SEQ ID NO: 11264 - DNA, 20 bp, synthetic construct
  source 1..20: mol_type = other DNA
gggaggaggaggttgcagtg

SEQ ID NO: 11265 - DNA, 20 bp, synthetic construct
  source 1..20: mol_type = other DNA
gggtgtatccatctgagttg

SEQ ID NO: 11266 - DNA, 20 bp, synthetic construct
  source 1..20: mol_type = other DNA
aaaatatgcaaacatcactg

SEQ ID NO: 11267 - DNA, 20 bp, synthetic construct
  source 1..20: mol_type = other DNA
tccccagtctcttgtgtgcc

SEQ ID NO: 11268 - DNA, 20 bp, synthetic construct
  source 1..20: mol_type = other DNA
tgacgtgggcgtcaaagccc

SEQ ID NO: 11269 - DNA, 20 bp, synthetic construct
  source 1..20: mol_type = other DNA
tatcaacagaagatcaaggt

SEQ ID NO: 11270 - DNA, 20 bp, synthetic construct
  source 1..20: mol_type = other DNA
tcacgcccaggagctgcacc

SEQ ID NO: 11271 - DNA, 20 bp, synthetic construct
  source 1..20: mol_type = other DNA
ggggcagatcgcttgagccc

SEQ ID NO: 11272 - DNA, 20 bp, synthetic construct
  source 1..20: mol_type = other DNA
tggtgcagaaggccaagcgg

SEQ ID NO: 11273 - DNA, 20 bp, synthetic construct
  source 1..20: mol_type = other DNA
cacaactacctggctgtttg

SEQ ID NO: 11274 - DNA, 20 bp, synthetic construct
  source 1..20: mol_type = other DNA
ccgaattcagcaagaggtga

SEQ ID NO: 11275 - DNA, 20 bp, synthetic construct
  source 1..20: mol_type = other DNA
ctagagaaactgttgcataa

SEQ ID NO: 11276 - DNA, 20 bp, synthetic construct
  source 1..20: mol_type = other DNA
gtagaataagtacttcttga

SEQ ID NO: 11277 - DNA, 20 bp, synthetic construct
  source 1..20: mol_type = other DNA
gtaccagcctcagccttgag

SEQ ID NO: 11278 - DNA, 20 bp, synthetic construct
  source 1..20: mol_type = other DNA
gtgtcctacctgaaagagtc

SEQ ID NO: 11279 - DNA, 20 bp, synthetic construct
  source 1..20: mol_type = other DNA
gggttccatgatataatccc

SEQ ID NO: 11280 - DNA, 20 bp, synthetic construct
  source 1..20: mol_type = other DNA
gccacaggccccagccacag

SEQ ID NO: 11281 - DNA, 20 bp, synthetic construct
  source 1..20: mol_type = other DNA
taatagtcctctatgtcccc

SEQ ID NO: 11282 - DNA, 20 bp, synthetic construct
  source 1..20: mol_type = other DNA
atccagcgtaagaataacag

SEQ ID NO: 11283 - DNA, 20 bp, synthetic construct
  source 1..20: mol_type = other DNA
aggacctggtgtggaagctg

SEQ ID NO: 11284 - DNA, 20 bp, synthetic construct
  source 1..20: mol_type = other DNA
ggtgtagtgctgcagggtgt

SEQ ID NO: 11285 - DNA, 20 bp, synthetic construct
  source 1..20: mol_type = other DNA
gtgcacatgaggtgtccaca

SEQ ID NO: 11286 - DNA, 20 bp, synthetic construct
  source 1..20: mol_type = other DNA
ccatgtgccatccgtccttg

SEQ ID NO: 11287 - DNA, 20 bp, synthetic construct
  source 1..20: mol_type = other DNA
gcatgtcgacttctcctcgg

SEQ ID NO: 11288 - DNA, 20 bp, synthetic construct
  source 1..20: mol_type = other DNA
ctgcagctggtggcacagtc

SEQ ID NO: 11289 - DNA, 20 bp, synthetic construct
  source 1..20: mol_type = other DNA
ggctcgccatccacctgcac

SEQ ID NO: 11290 - DNA, 20 bp, synthetic construct
  source 1..20: mol_type = other DNA
ccatcacactggaggcgggc

SEQ ID NO: 11291 - DNA, 20 bp, synthetic construct
  source 1..20: mol_type = other DNA
cccgtggatctctggagtgt

SEQ ID NO: 11292 - DNA, 20 bp, synthetic construct
  source 1..20: mol_type = other DNA
tgcaccgattgcactgtact

SEQ ID NO: 11293 - DNA, 20 bp, synthetic construct
  source 1..20: mol_type = other DNA
ccatgaactgcagccacgga

SEQ ID NO: 11294 - DNA, 20 bp, synthetic construct
  source 1..20: mol_type = other DNA
aggtgtagtgctgcagggtg

SEQ ID NO: 11295 - DNA, 20 bp, synthetic construct
  source 1..20: mol_type = other DNA
tgagctgctgcgacccgagc

SEQ ID NO: 11296 - DNA, 20 bp, synthetic construct
  source 1..20: mol_type = other DNA
gccctacagtccctcgcctg

SEQ ID NO: 11297 - DNA, 20 bp, synthetic construct
  source 1..20: mol_type = other DNA
ggatcatgaggaacacgtcc

SEQ ID NO: 11298 - DNA, 20 bp, synthetic construct
  source 1..20: mol_type = other DNA
caacactccagagatccacg

SEQ ID NO: 11299 - DNA, 20 bp, synthetic construct
  source 1..20: mol_type = other DNA
tatacaaactttgggaagct

SEQ ID NO: 11300 - DNA, 20 bp, synthetic construct
  source 1..20: mol_type = other DNA
gggcaactggaaaaaggtca

SEQ ID NO: 11301 - DNA, 20 bp, synthetic construct
  source 1..20: mol_type = other DNA
agaacatcttattccgaaag

SEQ ID NO: 11302 - DNA, 20 bp, synthetic construct
  source 1..20: mol_type = other DNA
ttccccagataatctgatag

SEQ ID NO: 11303 - DNA, 20 bp, synthetic construct
  source 1..20: mol_type = other DNA
gacgtccagcacctgcgtgg

SEQ ID NO: 11304 - DNA, 20 bp, synthetic construct
  source 1..20: mol_type = other DNA
tggcttcaccatgacgtcgt

SEQ ID NO: 11305 - DNA, 20 bp, synthetic construct
  source 1..20: mol_type = other DNA
ctcagacaccagcacattgc

SEQ ID NO: 11306 - DNA, 20 bp, synthetic construct
  source 1..20: mol_type = other DNA
cgcgcttcaacgccacgaaa

SEQ ID NO: 11307 - DNA, 20 bp, synthetic construct
  source 1..20: mol_type = other DNA
caggcgcaacaccaggtgca

SEQ ID NO: 11308 - DNA, 20 bp, synthetic construct
  source 1..20: mol_type = other DNA
ggttgccccacgcgttgcgg

SEQ ID NO: 11309 - DNA, 20 bp, synthetic construct
  source 1..20: mol_type = other DNA
cacagctcggtcttgtactt

SEQ ID NO: 11310 - DNA, 20 bp, synthetic construct
  source 1..20: mol_type = other DNA
ttcaggtgttgagccagtgc

SEQ ID NO: 11311 - DNA, 20 bp, synthetic construct
  source 1..20: mol_type = other DNA
gccatggcgcggcgggcgcg

SEQ ID NO: 11312 - DNA, 20 bp, synthetic construct
  source 1..20: mol_type = other DNA
cagaagttaagaaaacctcc

SEQ ID NO: 11313 - DNA, 20 bp, synthetic construct
  source 1..20: mol_type = other DNA
gatgaccaactcttggatga

SEQ ID NO: 11314 - DNA, 20 bp, synthetic construct
  source 1..20: mol_type = other DNA
ctggaagtatgggtgagaca

SEQ ID NO: 11315 - DNA, 20 bp, synthetic construct
  source 1..20: mol_type = other DNA
gtgtccgcccacctgcagcg

SEQ ID NO: 11316 - DNA, 20 bp, synthetic construct
  source 1..20: mol_type = other DNA
acacactgcacagtggtgag

SEQ ID NO: 11317 - DNA, 20 bp, synthetic construct
  source 1..20: mol_type = other DNA
cctagcactttgggaggctg

SEQ ID NO: 11318 - DNA, 20 bp, synthetic construct
  source 1..20: mol_type = other DNA
tgcaggtgaagagctgattg

SEQ ID NO: 11319 - DNA, 20 bp, synthetic construct
  source 1..20: mol_type = other DNA
catcatctcatccagacatc

SEQ ID NO: 11320 - DNA, 20 bp, synthetic construct
  source 1..20: mol_type = other DNA
gaggagaccagcagtgacca

SEQ ID NO: 11321 - DNA, 20 bp, synthetic construct
  source 1..20: mol_type = other DNA
accaggcacacaagagactg

SEQ ID NO: 11322 - DNA, 20 bp, synthetic construct
  source 1..20: mol_type = other DNA
cacagtgcgccctgggggag

SEQ ID NO: 11323 - DNA, 20 bp, synthetic construct
  source 1..20: mol_type = other DNA
acctctgaattggagtcaac

SEQ ID NO: 11324 - DNA, 20 bp, synthetic construct
  source 1..20: mol_type = other DNA
gttcttgccctcctttgctc

SEQ ID NO: 11325 - DNA, 20 bp, synthetic construct
  source 1..20: mol_type = other DNA
cacctggatggacacgctga

SEQ ID NO: 11326 - DNA, 20 bp, synthetic construct
  source 1..20: mol_type = other DNA
cctgtgggcacaggaagctt

SEQ ID NO: 11327 - DNA, 20 bp, synthetic construct
  source 1..20: mol_type = other DNA
tgtatacctgtattattggt

SEQ ID NO: 11328 - DNA, 20 bp, synthetic construct
  source 1..20: mol_type = other DNA
tcctatcgagtgctggacgc

SEQ ID NO: 11329 - DNA, 20 bp, synthetic construct
  source 1..20: mol_type = other DNA
accaaaacagtaagtgtccc

SEQ ID NO: 11330 - DNA, 20 bp, synthetic construct
  source 1..20: mol_type = other DNA
aggctggtactggccctctg

SEQ ID NO: 11331 - DNA, 20 bp, synthetic construct
  source 1..20: mol_type = other DNA
cttacctggatatagtcaac

SEQ ID NO: 11332 - DNA, 20 bp, synthetic construct
  source 1..20: mol_type = other DNA
gctgactcctagccacggga

SEQ ID NO: 11333 - DNA, 20 bp, synthetic construct
  source 1..20: mol_type = other DNA
ggatgatctggccccctccg

SEQ ID NO: 11334 - DNA, 20 bp, synthetic construct
  source 1..20: mol_type = other DNA
gctgcgggcgacagggcaat

SEQ ID NO: 11335 - DNA, 20 bp, synthetic construct
  source 1..20: mol_type = other DNA
ccaggtgggcgggatgacca

SEQ ID NO: 11336 - DNA, 20 bp, synthetic construct
  source 1..20: mol_type = other DNA
aacatccccaggtgaggagg

SEQ ID NO: 11337 - DNA, 20 bp, synthetic construct
  source 1..20: mol_type = other DNA
ttgacatgaccgctaaagaa

SEQ ID NO: 11338 - DNA, 20 bp, synthetic construct
  source 1..20: mol_type = other DNA
gggagtcaatgaggttgatg

SEQ ID NO: 11339 - DNA, 20 bp, synthetic construct
  source 1..20: mol_type = other DNA
ttggcccgaaccctcaactg

SEQ ID NO: 11340 - DNA, 20 bp, synthetic construct
  source 1..20: mol_type = other DNA
acctagaagaaaaaacaaag

SEQ ID NO: 11341 - DNA, 20 bp, synthetic construct
  source 1..20: mol_type = other DNA
cttacaagttcaaccggagg

SEQ ID NO: 11342 - DNA, 20 bp, synthetic construct
  source 1..20: mol_type = other DNA
aaggacccttgatgagctca

SEQ ID NO: 11343 - DNA, 20 bp, synthetic construct
  source 1..20: mol_type = other DNA
cacaggccccagccacagtg

SEQ ID NO: 11344 - DNA, 20 bp, synthetic construct
  source 1..20: mol_type = other DNA
gccgctgtcgcagcacccgc

SEQ ID NO: 11345 - DNA, 20 bp, synthetic construct
  source 1..20: mol_type = other DNA
aggaggcctgtgagtgcggt

SEQ ID NO: 11346 - DNA, 20 bp, synthetic construct
  source 1..20: mol_type = other DNA
tgcaggagagcggcttctac

SEQ ID NO: 11347 - DNA, 20 bp, synthetic construct
  source 1..20: mol_type = other DNA
caagtgaactggtactcctc

SEQ ID NO: 11348 - DNA, 20 bp, synthetic construct
  source 1..20: mol_type = other DNA
cccatgcagatgagtgccct

SEQ ID NO: 11349 - DNA, 20 bp, synthetic construct
  source 1..20: mol_type = other DNA
cttctacacagttatttgcc

SEQ ID NO: 11350 - DNA, 20 bp, synthetic construct
  source 1..20: mol_type = other DNA
gtacacagacgacgccagga

SEQ ID NO: 11351 - DNA, 20 bp, synthetic construct
  source 1..20: mol_type = other DNA
ggcagcagcggcggcggcgg

SEQ ID NO: 11352 - DNA, 20 bp, synthetic construct
  source 1..20: mol_type = other DNA
ctgactcctagccacgggat

SEQ ID NO: 11353 - DNA, 20 bp, synthetic construct
  source 1..20: mol_type = other DNA
gcatgagaatcacttgaacc

SEQ ID NO: 11354 - DNA, 20 bp, synthetic construct
  source 1..20: mol_type = other DNA
ttcctgaacatccccaggtg

SEQ ID NO: 11355 - DNA, 20 bp, synthetic construct
  source 1..20: mol_type = other DNA
ctgggaagggcaacatctct

SEQ ID NO: 11356 - DNA, 20 bp, synthetic construct
  source 1..20: mol_type = other DNA
gtctctgaaattacaaagta

SEQ ID NO: 11357 - DNA, 20 bp, synthetic construct
  source 1..20: mol_type = other DNA
gtatgagaaactgcacgagt

SEQ ID NO: 11358 - DNA, 20 bp, synthetic construct
  source 1..20: mol_type = other DNA
ggaagacagaattatttacc

SEQ ID NO: 11359 - DNA, 20 bp, synthetic construct
  source 1..20: mol_type = other DNA
ccaggagctgcaccgagctg

SEQ ID NO: 11360 - DNA, 20 bp, synthetic construct
  source 1..20: mol_type = other DNA
gggggctacggaggagctgg

SEQ ID NO: 11361 - DNA, 20 bp, synthetic construct
  source 1..20: mol_type = other DNA
aggaggtggagaaggagaag

SEQ ID NO: 11362 - DNA, 20 bp, synthetic construct
  source 1..20: mol_type = other DNA
gacagaaatgcttgacttct

SEQ ID NO: 11363 - DNA, 20 bp, synthetic construct
  source 1..20: mol_type = other DNA
cagctttggccatttatgag

SEQ ID NO: 11364 - DNA, 20 bp, synthetic construct
  source 1..20: mol_type = other DNA
acgaatacagccaacctccc

SEQ ID NO: 11365 - DNA, 20 bp, synthetic construct
  source 1..20: mol_type = other DNA
gtcggggattgagataccag

SEQ ID NO: 11366 - DNA, 20 bp, synthetic construct
  source 1..20: mol_type = other DNA
cgggctggcgaaagtggaga

SEQ ID NO: 11367 - DNA, 20 bp, synthetic construct
  source 1..20: mol_type = other DNA
caggagctgcaccgagctgg

SEQ ID NO: 11368 - DNA, 20 bp, synthetic construct
  source 1..20: mol_type = other DNA
ggcccagactgtgaacctgc

SEQ ID NO: 11369 - DNA, 20 bp, synthetic construct
  source 1..20: mol_type = other DNA
tggcaaaaccatcacccttg

SEQ ID NO: 11370 - DNA, 20 bp, synthetic construct
  source 1..20: mol_type = other DNA
cttaccaaaggtgctgctct

SEQ ID NO: 11371 - DNA, 20 bp, synthetic construct
  source 1..20: mol_type = other DNA
gaacgccgacgagcggatga

SEQ ID NO: 11372 - DNA, 20 bp, synthetic construct
  source 1..20: mol_type = other DNA
ataagatacctgctttgtag

SEQ ID NO: 11373 - DNA, 20 bp, synthetic construct
  source 1..20: mol_type = other DNA
agaggcagtcgaagctctcg

SEQ ID NO: 11374 - DNA, 20 bp, synthetic construct
  source 1..20: mol_type = other DNA
gtattacgacccgagtgacg

SEQ ID NO: 11375 - DNA, 20 bp, synthetic construct
  source 1..20: mol_type = other DNA
cctggttgcccccactcttg

SEQ ID NO: 11376 - DNA, 20 bp, synthetic construct
  source 1..20: mol_type = other DNA
ggatccagcccacctggggg

SEQ ID NO: 11377 - DNA, 20 bp, synthetic construct
  source 1..20: mol_type = other DNA
cctggggcctccgggcgcgg

SEQ ID NO: 11378 - DNA, 20 bp, synthetic construct
  source 1..20: mol_type = other DNA
ccatagaagcccacgatgta

SEQ ID NO: 11379 - DNA, 20 bp, synthetic construct
  source 1..20: mol_type = other DNA
ctagcttcttgtaggcaagg

SEQ ID NO: 11380 - DNA, 20 bp, synthetic construct
  source 1..20: mol_type = other DNA
caaagtcgtggtgctcccca

SEQ ID NO: 11381 - DNA, 20 bp, synthetic construct
  source 1..20: mol_type = other DNA
cgatgctgagcttgctggca

SEQ ID NO: 11382 - DNA, 20 bp, synthetic construct
  source 1..20: mol_type = other DNA
gtaccattcagcatcttgta

SEQ ID NO: 11383 - DNA, 20 bp, synthetic construct
  source 1..20: mol_type = other DNA
caccatcttcacggacgcca

SEQ ID NO: 11384 - DNA, 20 bp, synthetic construct
  source 1..20: mol_type = other DNA
agtactcacctggggcctcc

SEQ ID NO: 11385 - DNA, 20 bp, synthetic construct
  source 1..20: mol_type = other DNA
ctgcaaggcaggtgacacgt

SEQ ID NO: 11386 - DNA, 20 bp, synthetic construct
  source 1..20: mol_type = other DNA
caggaaggtgcccacgggct

SEQ ID NO: 11387 - DNA, 20 bp, synthetic construct
  source 1..20: mol_type = other DNA
tgccgtgagtaccacgagga

SEQ ID NO: 11388 - DNA, 20 bp, synthetic construct
  source 1..20: mol_type = other DNA
cttaccggtgcatctgccac

SEQ ID NO: 11389 - DNA, 20 bp, synthetic construct
  source 1..20: mol_type = other DNA
tgagtccacctgcttggcca

SEQ ID NO: 11390 - DNA, 20 bp, synthetic construct
  source 1..20: mol_type = other DNA
cgtctgcccagccactccct

SEQ ID NO: 11391 - DNA, 20 bp, synthetic construct
  source 1..20: mol_type = other DNA
gacggcaagtgtcggcactg

SEQ ID NO: 11392 - DNA, 20 bp, synthetic construct
  source 1..20: mol_type = other DNA
ctggtacaaagccaaaaaca

SEQ ID NO: 11393 - DNA, 20 bp, synthetic construct
  source 1..20: mol_type = other DNA
gctacaagaccgagctgtgc

SEQ ID NO: 11394 - DNA, 20 bp, synthetic construct
  source 1..20: mol_type = other DNA
ttactataacaacagtacca

SEQ ID NO: 11395 - DNA, 20 bp, synthetic construct
  source 1..20: mol_type = other DNA
ggaggagatcaaggagtaca

SEQ ID NO: 11396 - DNA, 20 bp, synthetic construct
  source 1..20: mol_type = other DNA
gtccagctacgccacccccg

SEQ ID NO: 11397 - DNA, 20 bp, synthetic construct
  source 1..20: mol_type = other DNA
tcgtgcatgcgaggtcccgg

SEQ ID NO: 11398 - DNA, 20 bp, synthetic construct
  source 1..20: mol_type = other DNA
tgtgggctctggagttgtgg

SEQ ID NO: 11399 - DNA, 20 bp, synthetic construct
  source 1..20: mol_type = other DNA
ctagtccaagatgttttcct

SEQ ID NO: 11400 - DNA, 20 bp, synthetic construct
  source 1..20: mol_type = other DNA
ctggcgaaagtggagaagga

SEQ ID NO: 11401 - DNA, 20 bp, synthetic construct
  source 1..20: mol_type = other DNA
tcccagacacgcctgcgtag

SEQ ID NO: 11402 - DNA, 20 bp, synthetic construct
  source 1..20: mol_type = other DNA
caggacaataagtcgagtta

SEQ ID NO: 11403 - DNA, 20 bp, synthetic construct
  source 1..20: mol_type = other DNA
caccaagagttcgcatctga

SEQ ID NO: 11404 - DNA, 20 bp, synthetic construct
  source 1..20: mol_type = other DNA
ctacgccgacctcatcacca

SEQ ID NO: 11405 - DNA, 20 bp, synthetic construct
  source 1..20: mol_type = other DNA
gagttctacagcggcagcct

SEQ ID NO: 11406 - DNA, 20 bp, synthetic construct
  source 1..20: mol_type = other DNA
gcaggcgtccaggagcgcgc

SEQ ID NO: 11407 - DNA, 20 bp, synthetic construct
  source 1..20: mol_type = other DNA
gcggctgcggaaccggctgg

SEQ ID NO: 11408 - DNA, 20 bp, synthetic construct
  source 1..20: mol_type = other DNA
cccacctgcagcgcggcctg

SEQ ID NO: 11409 - DNA, 20 bp, synthetic construct
  source 1..20: mol_type = other DNA
ataatcactcaggtgagtga

SEQ ID NO: 11410 - DNA, 20 bp, synthetic construct
  source 1..20: mol_type = other DNA
ttggtcaagatcttcacaaa

SEQ ID NO: 11411 - DNA, 20 bp, synthetic construct
  source 1..20: mol_type = other DNA
tgcacagtggtgagggggat

SEQ ID NO: 11412 - DNA, 20 bp, synthetic construct
  source 1..20: mol_type = other DNA
cagtgactatgatctgcatg

SEQ ID NO: 11413 - DNA, 20 bp, synthetic construct
  source 1..20: mol_type = other DNA
attacttggaacatcttcat

SEQ ID NO: 11414 - DNA, 20 bp, synthetic construct
  source 1..20: mol_type = other DNA
gccgtcacaggtgcagctcg

SEQ ID NO: 11415 - DNA, 20 bp, synthetic construct
  source 1..20: mol_type = other DNA
agctgtctgtgggagacaga

SEQ ID NO: 11416 - DNA, 20 bp, synthetic construct
  source 1..20: mol_type = other DNA
ggagaattggaaaacaatgt

SEQ ID NO: 11417 - DNA, 20 bp, synthetic construct
  source 1..20: mol_type = other DNA
gaaaatgttctatagttttc

SEQ ID NO: 11418 - DNA, 20 bp, synthetic construct
  source 1..20: mol_type = other DNA
ccggctcaccgtggtccagc

SEQ ID NO: 11419 - DNA, 20 bp, synthetic construct
  source 1..20: mol_type = other DNA
gtgggtagatgagggcctga

SEQ ID NO: 11420 - DNA, 20 bp, synthetic construct
  source 1..20: mol_type = other DNA
ccgcaccctacggcatcgaa

SEQ ID NO: 11421 - DNA, 20 bp, synthetic construct
  source 1..20: mol_type = other DNA
gtgggacgtactcgctgtgc

SEQ ID NO: 11422 - DNA, 20 bp, synthetic construct
  source 1..20: mol_type = other DNA
cgcaccaggaaggtgcccac

SEQ ID NO: 11423 - DNA, 20 bp, synthetic construct
  source 1..20: mol_type = other DNA
ctgtgagtgaagcagcctct

SEQ ID NO: 11424 - DNA, 20 bp, synthetic construct
  source 1..20: mol_type = other DNA
ccccgcacgccaggatccgc

SEQ ID NO: 11425 - DNA, 20 bp, synthetic construct
  source 1..20: mol_type = other DNA
ctgaggctaaacggaagagt

SEQ ID NO: 11426 - DNA, 20 bp, synthetic construct
  source 1..20: mol_type = other DNA
tgtcccagtgccacgaactt

SEQ ID NO: 11427 - DNA, 20 bp, synthetic construct
  source 1..20: mol_type = other DNA
taaggtctcacctgaaactt

SEQ ID NO: 11428 - DNA, 20 bp, synthetic construct
  source 1..20: mol_type = other DNA
tcaggttatctgagaaagag

SEQ ID NO: 11429 - DNA, 20 bp, synthetic construct
  source 1..20: mol_type = other DNA
ggaggaggcagcggaggagg

SEQ ID NO: 11430 - DNA, 20 bp, synthetic construct
  source 1..20: mol_type = other DNA
tacaagatggatgcccccga

SEQ ID NO: 11431 - DNA, 20 bp, synthetic construct
  source 1..20: mol_type = other DNA
gtgaagaaatgtaggtgtca

SEQ ID NO: 11432 - DNA, 20 bp, synthetic construct
  source 1..20: mol_type = other DNA
ccgctccttgtagccaatga

SEQ ID NO: 11433 - DNA, 20 bp, synthetic construct
  source 1..20: mol_type = other DNA
cctcaccaaccacctgcacc

SEQ ID NO: 11434 - DNA, 20 bp, synthetic construct
  source 1..20: mol_type = other DNA
ccacaggccccagccacagt

SEQ ID NO: 11435 - DNA, 20 bp, synthetic construct
  source 1..20: mol_type = other DNA
ctgtaccataaatttggacc

SEQ ID NO: 11436 - DNA, 20 bp, synthetic construct
  source 1..20: mol_type = other DNA
caagagactggggaacagat

SEQ ID NO: 11437 - DNA, 20 bp, synthetic construct
  source 1..20: mol_type = other DNA
ctggcagcttgcccgtgtcc

SEQ ID NO: 11438 - DNA, 20 bp, synthetic construct
  source 1..20: mol_type = other DNA
taccaggcacacaagagact

SEQ ID NO: 11439 - DNA, 20 bp, synthetic construct
  source 1..20: mol_type = other DNA
cagtggtgccgtacaaaggt

SEQ ID NO: 11440 - DNA, 20 bp, synthetic construct
  source 1..20: mol_type = other DNA
tgtcagcattgaagcttcct

SEQ ID NO: 11441 - DNA, 20 bp, synthetic construct
  source 1..20: mol_type = other DNA
tgaataccagcaggctcagc

SEQ ID NO: 11442 - DNA, 20 bp, synthetic construct
  source 1..20: mol_type = other DNA
cccacaggccgcgctgcagg

SEQ ID NO: 11443 - DNA, 20 bp, synthetic construct
  source 1..20: mol_type = other DNA
acagctcaactccctgccac

SEQ ID NO: 11444 - DNA, 20 bp, synthetic construct
  source 1..20: mol_type = other DNA
aataggtactattaccaaag

SEQ ID NO: 11445 - DNA, 20 bp, synthetic construct
  source 1..20: mol_type = other DNA
ccatttacctgttggtggca

SEQ ID NO: 11446 - DNA, 20 bp, synthetic construct
  source 1..20: mol_type = other DNA
cagggggatcttctcgcccc

SEQ ID NO: 11447 - DNA, 20 bp, synthetic construct
  source 1..20: mol_type = other DNA
gcgctatcccatcaacgagg

SEQ ID NO: 11448 - DNA, 20 bp, synthetic construct
  source 1..20: mol_type = other DNA
ggcgcgcggcgcggcggcgg

SEQ ID NO: 11449 - DNA, 20 bp, synthetic construct
  source 1..20: mol_type = other DNA
aatatatcttcacctttagc

SEQ ID NO: 11450 - DNA, 20 bp, synthetic construct
  source 1..20: mol_type = other DNA
ggcaactggaaaaaggtcaa

SEQ ID NO: 11451 - DNA, 20 bp, synthetic construct
  source 1..20: mol_type = other DNA
tcaaactgtataggcagagc

SEQ ID NO: 11452 - DNA, 20 bp, synthetic construct
  source 1..20: mol_type = other DNA
ctcctgggagacaaggtgag

SEQ ID NO: 11453 - DNA, 20 bp, synthetic construct
  source 1..20: mol_type = other DNA
gcaatacattctgtaccgga

SEQ ID NO: 11454 - DNA, 20 bp, synthetic construct
  source 1..20: mol_type = other DNA
gcaggcgcccggctccgtgg

SEQ ID NO: 11455 - DNA, 20 bp, synthetic construct
  source 1..20: mol_type = other DNA
ttgagcacgcagtcgaagcg

SEQ ID NO: 11456 - DNA, 20 bp, synthetic construct
  source 1..20: mol_type = other DNA
ctcattcactgcaggtgcgt

SEQ ID NO: 11457 - DNA, 20 bp, synthetic construct
  source 1..20: mol_type = other DNA
cccggtcagcagcgcgaaca

SEQ ID NO: 11458 - DNA, 20 bp, synthetic construct
  source 1..20: mol_type = other DNA
aaaaggatattgtgcaactg

SEQ ID NO: 11459 - DNA, 20 bp, synthetic construct
  source 1..20: mol_type = other DNA
gcagaaaacgtggaagcact

SEQ ID NO: 11460 - DNA, 20 bp, synthetic construct
  source 1..20: mol_type = other DNA
ctcagataacctgaggacca

SEQ ID NO: 11461 - DNA, 20 bp, synthetic construct
  source 1..20: mol_type = other DNA
gggtatgcctgaaaaaggag

SEQ ID NO: 11462 - DNA, 20 bp, synthetic construct
  source 1..20: mol_type = other DNA
agggttccatgatataatcc

SEQ ID NO: 11463 - DNA, 20 bp, synthetic construct
  source 1..20: mol_type = other DNA
gccagtacccaggggcagga

SEQ ID NO: 11464 - DNA, 20 bp, synthetic construct
  source 1..20: mol_type = other DNA
ctcagtcatgacgtgagtgg

SEQ ID NO: 11465 - DNA, 20 bp, synthetic construct
  source 1..20: mol_type = other DNA
ttcaaacgctaaatcaagct

SEQ ID NO: 11466 - DNA, 20 bp, synthetic construct
  source 1..20: mol_type = other DNA
cactagcttcttgtaggcaa

SEQ ID NO: 11467 - DNA, 20 bp, synthetic construct
  source 1..20: mol_type = other DNA
aagcgtcaaaagtctgccag

SEQ ID NO: 11468 - DNA, 20 bp, synthetic construct
  source 1..20: mol_type = other DNA
gacacttacgttaaaagctg

SEQ ID NO: 11469 - DNA, 20 bp, synthetic construct
  source 1..20: mol_type = other DNA
gcccacgagagcaaagagtg

SEQ ID NO: 11470 - DNA, 20 bp, synthetic construct
  source 1..20: mol_type = other DNA
tgtagtgctgcagggtgtgg

SEQ ID NO: 11471 - DNA, 20 bp, synthetic construct
  source 1..20: mol_type = other DNA
tggtcattcctgttccaatg

SEQ ID NO: 11472 - DNA, 20 bp, synthetic construct
  source 1..20: mol_type = other DNA
taagacaggatgtgcacatg

SEQ ID NO: 11473 - DNA, 20 bp, synthetic construct
  source 1..20: mol_type = other DNA
ggaggtggaagaggaagagg

SEQ ID NO: 11474 - DNA, 20 bp, synthetic construct
  source 1..20: mol_type = other DNA
gcgggatgaccacggctgcg

SEQ ID NO: 11475 - DNA, 20 bp, synthetic construct
  source 1..20: mol_type = other DNA
caaggccatcgagagctcgg

SEQ ID NO: 11476 - DNA, 20 bp, synthetic construct
  source 1..20: mol_type = other DNA
catcagcctccagttcagca

SEQ ID NO: 11477 - DNA, 20 bp, synthetic construct
  source 1..20: mol_type = other DNA
tcaaagtcgtggtgctcccc

SEQ ID NO: 11478 - DNA, 20 bp, synthetic construct
  source 1..20: mol_type = other DNA
agaggaggaagaggaggagg

SEQ ID NO: 11479 - DNA, 20 bp, synthetic construct
  source 1..20: mol_type = other DNA
ccatgacgtcgttggtgagt

SEQ ID NO: 11480 - DNA, 20 bp, synthetic construct
  source 1..20: mol_type = other DNA
tgagctggaggaggaggagg

SEQ ID NO: 11481 - DNA, 20 bp, synthetic construct
  source 1..20: mol_type = other DNA
gcaacaggaagaggccgagg

SEQ ID NO: 11482 - DNA, 20 bp, synthetic construct
  source 1..20: mol_type = other DNA
gtctaggggtcggtcagtgc

SEQ ID NO: 11483 - DNA, 20 bp, synthetic construct
  source 1..20: mol_type = other DNA
ccatgcagatgagtgccctg

SEQ ID NO: 11484 - DNA, 20 bp, synthetic construct
  source 1..20: mol_type = other DNA
gtcttccctcaggaactgca

SEQ ID NO: 11485 - DNA, 20 bp, synthetic construct
  source 1..20: mol_type = other DNA
cactgcggtagaactcatcc

SEQ ID NO: 11486 - DNA, 20 bp, synthetic construct
  source 1..20: mol_type = other DNA
tggtgcaagcaggcagtgag

SEQ ID NO: 11487 - DNA, 20 bp, synthetic construct
  source 1..20: mol_type = other DNA
cagcaatacaggtaccacag

SEQ ID NO: 11488 - DNA, 20 bp, synthetic construct
  source 1..20: mol_type = other DNA
cgggcatgtcgacttctcct

SEQ ID NO: 11489 - DNA, 20 bp, synthetic construct
  source 1..20: mol_type = other DNA
atacaaactttgggaagctg

SEQ ID NO: 11490 - DNA, 20 bp, synthetic construct
  source 1..20: mol_type = other DNA
tgacgacctgcaatggcaag

SEQ ID NO: 11491 - DNA, 20 bp, synthetic construct
  source 1..20: mol_type = other DNA
tgaggagaccagcagtgacc

SEQ ID NO: 11492 - DNA, 20 bp, synthetic construct
  source 1..20: mol_type = other DNA
tagggaacaagggagccgtg

SEQ ID NO: 11493 - DNA, 20 bp, synthetic construct
  source 1..20: mol_type = other DNA
tctggtcagggctcggacac

SEQ ID NO: 11494 - DNA, 20 bp, synthetic construct
  source 1..20: mol_type = other DNA
tctgcgtgcgtgggaaggtg

SEQ ID NO: 11495 - DNA, 20 bp, synthetic construct
  source 1..20: mol_type = other DNA
ctgggccagcttccccaccg

SEQ ID NO: 11496 - DNA, 20 bp, synthetic construct
  source 1..20: mol_type = other DNA
acaggtaaggtatttggggg

SEQ ID NO: 11497 - DNA, 20 bp, synthetic construct
  source 1..20: mol_type = other DNA
gatgcttgccaccgtgcctg

SEQ ID NO: 11498 - DNA, 20 bp, synthetic construct
  source 1..20: mol_type = other DNA
cacgccgacgccatccaccg

SEQ ID NO: 11499 - DNA, 20 bp, synthetic construct
  source 1..20: mol_type = other DNA
ttaagcagtcaatgtcaatc

SEQ ID NO: 11500 - DNA, 20 bp, synthetic construct
  source 1..20: mol_type = other DNA
ccacctggatcctccgcgcc

SEQ ID NO: 11501 - DNA, 20 bp, synthetic construct
  source 1..20: mol_type = other DNA
catagctgatggtacccccc

SEQ ID NO: 11502 - DNA, 20 bp, synthetic construct
  source 1..20: mol_type = other DNA
acaaggtgggtcccgcgggc

SEQ ID NO: 11503 - DNA, 20 bp, synthetic construct
  source 1..20: mol_type = other DNA
tccgaccccatggtgcaggt

SEQ ID NO: 11504 - DNA, 20 bp, synthetic construct
  source 1..20: mol_type = other DNA
ttaccacatgttggcttaga

SEQ ID NO: 11505 - DNA, 20 bp, synthetic construct
  source 1..20: mol_type = other DNA
gctcgtcaggaggccgcttg

SEQ ID NO: 11506 - DNA, 20 bp, synthetic construct
  source 1..20: mol_type = other DNA
tttgcaccctggatgggatg

SEQ ID NO: 11507 - DNA, 20 bp, synthetic construct
  source 1..20: mol_type = other DNA
agctcctcccaggctgcagc

SEQ ID NO: 11508 - DNA, 20 bp, synthetic construct
  source 1..20: mol_type = other DNA
ggaggaggagtggatggagg

SEQ ID NO: 11509 - DNA, 20 bp, synthetic construct
  source 1..20: mol_type = other DNA
catctgccaaaagtcaccaa

SEQ ID NO: 11510 - DNA, 20 bp, synthetic construct
  source 1..20: mol_type = other DNA
tggattctaaagcagtgtcc

SEQ ID NO: 11511 - DNA, 20 bp, synthetic construct
  source 1..20: mol_type = other DNA
cgctgtcgcagatctacgag

SEQ ID NO: 11512 - DNA, 20 bp, synthetic construct
  source 1..20: mol_type = other DNA
cggatgaggaaggcccctcc

SEQ ID NO: 11513 - DNA, 20 bp, synthetic construct
  source 1..20: mol_type = other DNA
gaggaagttctccaggtcct

SEQ ID NO: 11514 - DNA, 20 bp, synthetic construct
  source 1..20: mol_type = other DNA
aacctgccaaaactgtgcac

SEQ ID NO: 11515 - DNA, 20 bp, synthetic construct
  source 1..20: mol_type = other DNA
cctctcaggtaggcaggcgt

SEQ ID NO: 11516 - DNA, 20 bp, synthetic construct
  source 1..20: mol_type = other DNA
gggacccgccagagcgcagg

SEQ ID NO: 11517 - DNA, 20 bp, synthetic construct
  source 1..20: mol_type = other DNA
acagattcacaagtttgccc

SEQ ID NO: 11518 - DNA, 20 bp, synthetic construct
  source 1..20: mol_type = other DNA
atactgctccagatatgggt

SEQ ID NO: 11519 - DNA, 20 bp, synthetic construct
  source 1..20: mol_type = other DNA
attacctacagatttcagtg

SEQ ID NO: 11520 - DNA, 20 bp, synthetic construct
  source 1..20: mol_type = other DNA
acctgtctgaatgagccact

SEQ ID NO: 11521 - DNA, 20 bp, synthetic construct
  source 1..20: mol_type = other DNA
tccccagagagctggagcgg

SEQ ID NO: 11522 - DNA, 20 bp, synthetic construct
  source 1..20: mol_type = other DNA
ttctataaataaaaaaagaa

SEQ ID NO: 11523 - DNA, 20 bp, synthetic construct
  source 1..20: mol_type = other DNA
gcgctgcaggtgggcggaca

SEQ ID NO: 11524 - DNA, 20 bp, synthetic construct
  source 1..20: mol_type = other DNA
tctggattggcttcaggtag

SEQ ID NO: 11525 - DNA, 20 bp, synthetic construct
  source 1..20: mol_type = other DNA
cccaggggcaggatggcaac

SEQ ID NO: 11526 - DNA, 20 bp, synthetic construct
  source 1..20: mol_type = other DNA
gcttttctcccgtgtgtacc

SEQ ID NO: 11527 - DNA, 20 bp, synthetic construct
  source 1..20: mol_type = other DNA
ggtggtggcggcggcggcgg

SEQ ID NO: 11528 - DNA, 20 bp, synthetic construct
  source 1..20: mol_type = other DNA
gcgtgaggctgcaagcttgc

SEQ ID NO: 11529 - DNA, 20 bp, synthetic construct
  source 1..20: mol_type = other DNA
gtgggctctggagttgtggt

SEQ ID NO: 11530 - DNA, 20 bp, synthetic construct
  source 1..20: mol_type = other DNA
tcaatgcagatgttgcactt

SEQ ID NO: 11531 - DNA, 20 bp, synthetic construct
  source 1..20: mol_type = other DNA
cacactggaggcgggcgggg

SEQ ID NO: 11532 - DNA, 20 bp, synthetic construct
  source 1..20: mol_type = other DNA
atctgcattgagaagaatgg

SEQ ID NO: 11533 - DNA, 20 bp, synthetic construct
  source 1..20: mol_type = other DNA
acagggacatcaaggtggtc

SEQ ID NO: 11534 - DNA, 20 bp, synthetic construct
  source 1..20: mol_type = other DNA
ccccccgcagcaagtcccct

SEQ ID NO: 11535 - DNA, 20 bp, synthetic construct
  source 1..20: mol_type = other DNA
ctcccaaactgacctctagg

SEQ ID NO: 11536 - DNA, 20 bp, synthetic construct
  source 1..20: mol_type = other DNA
tcatctggattatagaccag

SEQ ID NO: 11537 - DNA, 20 bp, synthetic construct
  source 1..20: mol_type = other DNA
gtacattgtataaagaccac

SEQ ID NO: 11538 - DNA, 20 bp, synthetic construct
  source 1..20: mol_type = other DNA
caagtccttgttagcctcca

SEQ ID NO: 11539 - DNA, 20 bp, synthetic construct
  source 1..20: mol_type = other DNA
agcggctgttgaatttctct

SEQ ID NO: 11540 - DNA, 20 bp, synthetic construct
  source 1..20: mol_type = other DNA
taggatggtagcacacaacc

SEQ ID NO: 11541 - DNA, 20 bp, synthetic construct
  source 1..20: mol_type = other DNA
gaatgatcatcaaacagcta

SEQ ID NO: 11542 - DNA, 20 bp, synthetic construct
  source 1..20: mol_type = other DNA
ttcccgttgggccaatccac

SEQ ID NO: 11543 - DNA, 20 bp, synthetic construct
  source 1..20: mol_type = other DNA
ggtgaaggtggtggtggtgg

SEQ ID NO: 11544 - DNA, 20 bp, synthetic construct
  source 1..20: mol_type = other DNA
ccgctccttggggaaggggt

SEQ ID NO: 11545 - DNA, 20 bp, synthetic construct
  source 1..20: mol_type = other DNA
aacctgcgcatccagtgtga

SEQ ID NO: 11546 - DNA, 20 bp, synthetic construct
  source 1..20: mol_type = other DNA
gctgtattcgttatccacgt

SEQ ID NO: 11547 - DNA, 20 bp, synthetic construct
  source 1..20: mol_type = other DNA
ttctacttagccaaacacag

SEQ ID NO: 11548 - DNA, 20 bp, synthetic construct
  source 1..20: mol_type = other DNA
tgacatccacattcagtctg

SEQ ID NO: 11549 - DNA, 20 bp, synthetic construct
  source 1..20: mol_type = other DNA
aggaccctgtgaaccacgtg

SEQ ID NO: 11550 - DNA, 20 bp, synthetic construct
  source 1..20: mol_type = other DNA
gactctgtgaacacaccaag

SEQ ID NO: 11551 - DNA, 20 bp, synthetic construct
  source 1..20: mol_type = other DNA
agtggagaatttctgccatg

SEQ ID NO: 11552 - DNA, 20 bp, synthetic construct
  source 1..20: mol_type = other DNA
gggacatcaaggtggtctgg

SEQ ID NO: 11553 - DNA, 20 bp, synthetic construct
  source 1..20: mol_type = other DNA
aacctgagaggggaagcaat

SEQ ID NO: 11554 - DNA, 20 bp, synthetic construct
  source 1..20: mol_type = other DNA
gcgccatggcccgaagaccc

SEQ ID NO: 11555 - DNA, 20 bp, synthetic construct
  source 1..20: mol_type = other DNA
agtggatcaccgcaggccca

SEQ ID NO: 11556 - DNA, 20 bp, synthetic construct
  source 1..20: mol_type = other DNA
cattttgtgcttcagaaatg

SEQ ID NO: 11557 - DNA, 20 bp, synthetic construct
  source 1..20: mol_type = other DNA
gagggagatggcactgatgg

SEQ ID NO: 11558 - DNA, 20 bp, synthetic construct
  source 1..20: mol_type = other DNA
atgtgcagtgccagcaccga

SEQ ID NO: 11559 - DNA, 20 bp, synthetic construct
  source 1..20: mol_type = other DNA
cccactcaccaacgacgtca

SEQ ID NO: 11560 - DNA, 20 bp, synthetic construct
  source 1..20: mol_type = other DNA
cgacaaggagcagctcaagg

SEQ ID NO: 11561 - DNA, 20 bp, synthetic construct
  source 1..20: mol_type = other DNA
cacaaggctcccctgggggc

SEQ ID NO: 11562 - DNA, 20 bp, synthetic construct
  source 1..20: mol_type = other DNA
catctatcaacagaagatca

SEQ ID NO: 11563 - DNA, 20 bp, synthetic construct
  source 1..20: mol_type = other DNA
acaccaagcagaaagcgaca

SEQ ID NO: 11564 - DNA, 20 bp, synthetic construct
  source 1..20: mol_type = other DNA
gtcccagatctacgagtgga

SEQ ID NO: 11565 - DNA, 20 bp, synthetic construct
  source 1..20: mol_type = other DNA
caaacaggtctccccgctgg

SEQ ID NO: 11566 - DNA, 20 bp, synthetic construct
  source 1..20: mol_type = other DNA
atttccatctggtaagaaat

SEQ ID NO: 11567 - DNA, 20 bp, synthetic construct
  source 1..20: mol_type = other DNA
agtccattccatcacactgg

SEQ ID NO: 11568 - DNA, 20 bp, synthetic construct
  source 1..20: mol_type = other DNA
cgctacaaaagaaccacaca

SEQ ID NO: 11569 - DNA, 20 bp, synthetic construct
  source 1..20: mol_type = other DNA
tgacatgaccgctaaagaac

SEQ ID NO: 11570 - DNA, 20 bp, synthetic construct
  source 1..20: mol_type = other DNA
cgtgtgcagaatgaaggaac

SEQ ID NO: 11571 - DNA, 20 bp, synthetic construct
  source 1..20: mol_type = other DNA
cagcaccaccaggagcacca

SEQ ID NO: 11572 - DNA, 20 bp, synthetic construct
  source 1..20: mol_type = other DNA
tgcaaataggccagtccctg

SEQ ID NO: 11573 - DNA, 20 bp, synthetic construct
  source 1..20: mol_type = other DNA
cggcccagtgggtcatcagg

SEQ ID NO: 11574 - DNA, 20 bp, synthetic construct
  source 1..20: mol_type = other DNA
ggtatgagaaactgcacgag

SEQ ID NO: 11575 - DNA, 20 bp, synthetic construct
  source 1..20: mol_type = other DNA
tgactccaattcagaggttc

SEQ ID NO: 11576 - DNA, 20 bp, synthetic construct
  source 1..20: mol_type = other DNA
tgatggtgcccgtcttcacc

SEQ ID NO: 11577 - DNA, 20 bp, synthetic construct
  source 1..20: mol_type = other DNA
tgttttggttcattcccgtt

SEQ ID NO: 11578 - DNA, 20 bp, synthetic construct
  source 1..20: mol_type = other DNA
cttggatgatggcaagacac

SEQ ID NO: 11579 - DNA, 20 bp, synthetic construct
  source 1..20: mol_type = other DNA
tccaggagctgcaccgagct

SEQ ID NO: 11580 - DNA, 20 bp, synthetic construct
  source 1..20: mol_type = other DNA
gaccacgttggggtgctcga

SEQ ID NO: 11581 - DNA, 20 bp, synthetic construct
  source 1..20: mol_type = other DNA
acggcaagtgtcggcactgt

SEQ ID NO: 11582 - DNA, 20 bp, synthetic construct
  source 1..20: mol_type = other DNA
ggcaagcatcatcctggccc

SEQ ID NO: 11583 - DNA, 20 bp, synthetic construct
  source 1..20: mol_type = other DNA
cagctgctcgtggtgcaagc

SEQ ID NO: 11584 - DNA, 20 bp, synthetic construct
  source 1..20: mol_type = other DNA
ccagcactgtgccggcgtgg

SEQ ID NO: 11585 - DNA, 20 bp, synthetic construct
  source 1..20: mol_type = other DNA
ttctaatatttaaataaaaa

SEQ ID NO: 11586 - DNA, 20 bp, synthetic construct
  source 1..20: mol_type = other DNA
gtgtagtgctgcagggtgtg

SEQ ID NO: 11587 - DNA, 20 bp, synthetic construct
  source 1..20: mol_type = other DNA
tttacataggtatctttagg

SEQ ID NO: 11588 - DNA, 20 bp, synthetic construct
  source 1..20: mol_type = other DNA
agaggaggaggatgaagagg

SEQ ID NO: 11589 - DNA, 20 bp, synthetic construct
  source 1..20: mol_type = other DNA
cgttgccagtacccaggggc

SEQ ID NO: 11590 - DNA, 20 bp, synthetic construct
  source 1..20: mol_type = other DNA
tgagataccagaggaaagac

SEQ ID NO: 11591 - DNA, 20 bp, synthetic construct
  source 1..20: mol_type = other DNA
ggctccacctcctgtggcac

SEQ ID NO: 11592 - DNA, 20 bp, synthetic construct
  source 1..20: mol_type = other DNA
cccagataatctgatagtgg

SEQ ID NO: 11593 - DNA, 20 bp, synthetic construct
  source 1..20: mol_type = other DNA
gcaagtgaactggtactcct

SEQ ID NO: 11594 - DNA, 20 bp, synthetic construct
  source 1..20: mol_type = other DNA
cgtgcacatgaacccccccc

SEQ ID NO: 11595 - DNA, 20 bp, synthetic construct
  source 1..20: mol_type = other DNA
aggctccaggaatgtccgcg

SEQ ID NO: 11596 - DNA, 20 bp, synthetic construct
  source 1..20: mol_type = other DNA
gaaggtaacccttaaatgtg

SEQ ID NO: 11597 - DNA, 20 bp, synthetic construct
  source 1..20: mol_type = other DNA
caggcagagcccaagaccca

SEQ ID NO: 11598 - DNA, 20 bp, synthetic construct
  source 1..20: mol_type = other DNA
gcgcaacaccaggtgcaggg

SEQ ID NO: 11599 - DNA, 20 bp, synthetic construct
  source 1..20: mol_type = other DNA
tgcggatgttccagagcgtg

SEQ ID NO: 11600 - DNA, 20 bp, synthetic construct
  source 1..20: mol_type = other DNA
caacttacaagttcaaccgg

SEQ ID NO: 11601 - DNA, 20 bp, synthetic construct
  source 1..20: mol_type = other DNA
acaataagaatattttcatt

SEQ ID NO: 11602 - DNA, 20 bp, synthetic construct
  source 1..20: mol_type = other DNA
tgcggaagtgcgtgtcgccg

SEQ ID NO: 11603 - DNA, 20 bp, synthetic construct
  source 1..20: mol_type = other DNA
tgtcccaggctggagtacag

SEQ ID NO: 11604 - DNA, 20 bp, synthetic construct
  source 1..20: mol_type = other DNA
atccagacatcgggtagcca

SEQ ID NO: 11605 - DNA, 20 bp, synthetic construct
  source 1..20: mol_type = other DNA
ggcggcggcggcggaggagg

SEQ ID NO: 11606 - DNA, 20 bp, synthetic construct
  source 1..20: mol_type = other DNA
agacagtcatgttccagacc

SEQ ID NO: 11607 - DNA, 20 bp, synthetic construct
  source 1..20: mol_type = other DNA
ctcaccatggtggcggatgg

SEQ ID NO: 11608 - DNA, 20 bp, synthetic construct
  source 1..20: mol_type = other DNA
ggcagcggaggaggaggagg

SEQ ID NO: 11609 - DNA, 20 bp, synthetic construct
  source 1..20: mol_type = other DNA
ccttcaggggctgtggccag

SEQ ID NO: 11610 - DNA, 20 bp, synthetic construct
  source 1..20: mol_type = other DNA
caggacctgcccttctgcaa

SEQ ID NO: 11611 - DNA, 20 bp, synthetic construct
  source 1..20: mol_type = other DNA
tgacagagagtaagagcctg

SEQ ID NO: 11612 - DNA, 20 bp, synthetic construct
  source 1..20: mol_type = other DNA
acagtgaaatctcgatggag

SEQ ID NO: 11613 - DNA, 20 bp, synthetic construct
  source 1..20: mol_type = other DNA
tgcctggggcaggacgagag

SEQ ID NO: 11614 - DNA, 20 bp, synthetic construct
  source 1..20: mol_type = other DNA
aaggccagccccactgtggc

SEQ ID NO: 11615 - DNA, 20 bp, synthetic construct
  source 1..20: mol_type = other DNA
cacactgcacagtggtgagg

SEQ ID NO: 11616 - DNA, 20 bp, synthetic construct
  source 1..20: mol_type = other DNA
ccttttgagtgcaacatgtg

SEQ ID NO: 11617 - DNA, 20 bp, synthetic construct
  source 1..20: mol_type = other DNA
gggcccagccgcctgtgggg

SEQ ID NO: 11618 - DNA, 20 bp, synthetic construct
  source 1..20: mol_type = other DNA
aggcttaaaagaaatagatg

SEQ ID NO: 11619 - DNA, 20 bp, synthetic construct
  source 1..20: mol_type = other DNA
ggctgtattcgttatccacg

SEQ ID NO: 11620 - DNA, 20 bp, synthetic construct
  source 1..20: mol_type = other DNA
gcagcacaatgttctagtag

SEQ ID NO: 11621 - DNA, 20 bp, synthetic construct
  source 1..20: mol_type = other DNA
taccttgccagtaggcggtg

SEQ ID NO: 11622 - DNA, 20 bp, synthetic construct
  source 1..20: mol_type = other DNA
tacgaaacatcatgggttcc

SEQ ID NO: 11623 - DNA, 20 bp, synthetic construct
  source 1..20: mol_type = other DNA
ggacttcttcacggccacag

SEQ ID NO: 11624 - DNA, 20 bp, synthetic construct
  source 1..20: mol_type = other DNA
ccagaagcgggagggcgtga

SEQ ID NO: 11625 - DNA, 20 bp, synthetic construct
  source 1..20: mol_type = other DNA
ggtggcggtggtggcggtgg

SEQ ID NO: 11626 - DNA, 20 bp, synthetic construct
  source 1..20: mol_type = other DNA
cgaacaggaaggttatctgc

SEQ ID NO: 11627 - DNA, 20 bp, synthetic construct
  source 1..20: mol_type = other DNA
tatacagtttgaataccagc

SEQ ID NO: 11628 - DNA, 20 bp, synthetic construct
  source 1..20: mol_type = other DNA
gaataggtactattaccaaa

SEQ ID NO: 11629 - DNA, 20 bp, synthetic construct
  source 1..20: mol_type = other DNA
agggcttctcacctgcaggg

SEQ ID NO: 11630 - DNA, 20 bp, synthetic construct
  source 1..20: mol_type = other DNA
tggagcagctgagctcaggc

SEQ ID NO: 11631 - DNA, 20 bp, synthetic construct
  source 1..20: mol_type = other DNA
ggccaagcacatccgagtgg

SEQ ID NO: 11632 - DNA, 20 bp, synthetic construct
  source 1..20: mol_type = other DNA
ggaacactggtggagcgcct

SEQ ID NO: 11633 - DNA, 20 bp, synthetic construct
  source 1..20: mol_type = other DNA
tcgcagccttctgctgggca

SEQ ID NO: 11634 - DNA, 20 bp, synthetic construct
  source 1..20: mol_type = other DNA
cctgggcaaagaggtgctcc

SEQ ID NO: 11635 - DNA, 20 bp, synthetic construct
  source 1..20: mol_type = other DNA
caccatcttggtgaaggagt

SEQ ID NO: 11636 - DNA, 20 bp, synthetic construct
  source 1..20: mol_type = other DNA
ggcaggactgggcatagccg

SEQ ID NO: 11637 - DNA, 20 bp, synthetic construct
  source 1..20: mol_type = other DNA
ttgattttggccactttctg

SEQ ID NO: 11638 - DNA, 20 bp, synthetic construct
  source 1..20: mol_type = other DNA
gtgcagccccccatcccagc

SEQ ID NO: 11639 - DNA, 20 bp, synthetic construct
  source 1..20: mol_type = other DNA
ccacttacggttcgggctcc

SEQ ID NO: 11640 - DNA, 20 bp, synthetic construct
  source 1..20: mol_type = other DNA
ggatggactatttgggttct

SEQ ID NO: 11641 - DNA, 20 bp, synthetic construct
  source 1..20: mol_type = other DNA
cagtacagatgtggctgatc

SEQ ID NO: 11642 - DNA, 20 bp, synthetic construct
  source 1..20: mol_type = other DNA
tctgcagttcctgcagaaga

SEQ ID NO: 11643 - DNA, 20 bp, synthetic construct
  source 1..20: mol_type = other DNA
gcagtcctgcacataccttg

SEQ ID NO: 11644 - DNA, 20 bp, synthetic construct
  source 1..20: mol_type = other DNA
attgaaaatcagaaggaagc

SEQ ID NO: 11645 - DNA, 20 bp, synthetic construct
  source 1..20: mol_type = other DNA
gtgctcagcattggagtgaa

SEQ ID NO: 11646 - DNA, 20 bp, synthetic construct
  source 1..20: mol_type = other DNA
gccctgagggaagaagcaga

SEQ ID NO: 11647 - DNA, 20 bp, synthetic construct
  source 1..20: mol_type = other DNA
ctcaaggtaggtgaggtgct

SEQ ID NO: 11648 - DNA, 20 bp, synthetic construct
  source 1..20: mol_type = other DNA
gtggaccagctgcgcatgca

SEQ ID NO: 11649 - DNA, 20 bp, synthetic construct
  source 1..20: mol_type = other DNA
ttgaccagaagggcccggtt

SEQ ID NO: 11650 - DNA, 20 bp, synthetic construct
  source 1..20: mol_type = other DNA
agacattgtggagctcacga

SEQ ID NO: 11651 - DNA, 20 bp, synthetic construct
  source 1..20: mol_type = other DNA
gctgagaagacagaggaatg

SEQ ID NO: 11652 - DNA, 20 bp, synthetic construct
  source 1..20: mol_type = other DNA
cctcaggtgacggcagcagg

SEQ ID NO: 11653 - DNA, 20 bp, synthetic construct
  source 1..20: mol_type = other DNA
taaggaacgtgggcatgacc

SEQ ID NO: 11654 - DNA, 20 bp, synthetic construct
  source 1..20: mol_type = other DNA
gagctaaaaagagaaagaac

SEQ ID NO: 11655 - DNA, 20 bp, synthetic construct
  source 1..20: mol_type = other DNA
gttttagctcgttcctcctc

SEQ ID NO: 11656 - DNA, 20 bp, synthetic construct
  source 1..20: mol_type = other DNA
aacgggtatttatagtggca

SEQ ID NO: 11657 - DNA, 20 bp, synthetic construct
  source 1..20: mol_type = other DNA
gccgtaaaggcggatgaagt

SEQ ID NO: 11658 - DNA, 20 bp, synthetic construct
  source 1..20: mol_type = other DNA
ctcggatgcgcatgagaccc

SEQ ID NO: 11659 - DNA, 20 bp, synthetic construct
  source 1..20: mol_type = other DNA
cctccatggcccactcctgg

SEQ ID NO: 11660 - DNA, 20 bp, synthetic construct
  source 1..20: mol_type = other DNA
cagccaggaccacaatgcca

SEQ ID NO: 11661 - DNA, 20 bp, synthetic construct
  source 1..20: mol_type = other DNA
cgaaatcatggtgcttcctt

SEQ ID NO: 11662 - DNA, 20 bp, synthetic construct
  source 1..20: mol_type = other DNA
gaatccagtgtgtgaagaag

SEQ ID NO: 11663 - DNA, 20 bp, synthetic construct
  source 1..20: mol_type = other DNA
ctgtgcgaatcgctcagacc

SEQ ID NO: 11664 - DNA, 20 bp, synthetic construct
  source 1..20: mol_type = other DNA
cagcgcaggatgaacctgaa

SEQ ID NO: 11665 - DNA, 20 bp, synthetic construct
  source 1..20: mol_type = other DNA
tacaaaaacttcagaggcag

SEQ ID NO: 11666 - DNA, 20 bp, synthetic construct
  source 1..20: mol_type = other DNA
taaataactggcatcccatc

SEQ ID NO: 11667 - DNA, 20 bp, synthetic construct
  source 1..20: mol_type = other DNA
ttacctgtagactattcctt

SEQ ID NO: 11668 - DNA, 20 bp, synthetic construct
  source 1..20: mol_type = other DNA
acaggcaccgggccacaatc

SEQ ID NO: 11669 - DNA, 20 bp, synthetic construct
  source 1..20: mol_type = other DNA
ggagctggaaggtgaaggga

SEQ ID NO: 11670 - DNA, 20 bp, synthetic construct
  source 1..20: mol_type = other DNA
ggtactggggagatatctcg

SEQ ID NO: 11671 - DNA, 20 bp, synthetic construct
  source 1..20: mol_type = other DNA
gcagccccccatgattcggc

SEQ ID NO: 11672 - DNA, 20 bp, synthetic construct
  source 1..20: mol_type = other DNA
tcctactcctgaagacaaca

SEQ ID NO: 11673 - DNA, 20 bp, synthetic construct
  source 1..20: mol_type = other DNA
atgtacagcaacgaggaggc

SEQ ID NO: 11674 - DNA, 20 bp, synthetic construct
  source 1..20: mol_type = other DNA
cctacctgtgtagccagcta

SEQ ID NO: 11675 - DNA, 20 bp, synthetic construct
  source 1..20: mol_type = other DNA
aatggaccatggtcaggtga

SEQ ID NO: 11676 - DNA, 20 bp, synthetic construct
  source 1..20: mol_type = other DNA
actgcagatcaaagcagaac

SEQ ID NO: 11677 - DNA, 20 bp, synthetic construct
  source 1..20: mol_type = other DNA
caggggagctcggagcaggc

SEQ ID NO: 11678 - DNA, 20 bp, synthetic construct
  source 1..20: mol_type = other DNA
ggcgcgtcttccaggtggga

SEQ ID NO: 11679 - DNA, 20 bp, synthetic construct
  source 1..20: mol_type = other DNA
gaaatagtcagcaaggctgt

SEQ ID NO: 11680 - DNA, 20 bp, synthetic construct
  source 1..20: mol_type = other DNA
tggtgatgatcatctctgtc

SEQ ID NO: 11681 - DNA, 20 bp, synthetic construct
  source 1..20: mol_type = other DNA
gagttcttggagggacaagt

SEQ ID NO: 11682 - DNA, 20 bp, synthetic construct
  source 1..20: mol_type = other DNA
agcgcaagcggctgcggaac

SEQ ID NO: 11683 - DNA, 20 bp, synthetic construct
  source 1..20: mol_type = other DNA
gggacagcgccacctgctga

SEQ ID NO: 11684 - DNA, 20 bp, synthetic construct
  source 1..20: mol_type = other DNA
gttgacccctcacctgacca

SEQ ID NO: 11685 - DNA, 20 bp, synthetic construct
  source 1..20: mol_type = other DNA
gtgagctggcatcaaggaga

SEQ ID NO: 11686 - DNA, 20 bp, synthetic construct
  source 1..20: mol_type = other DNA
ccatgaccccgtggccctgg

SEQ ID NO: 11687 - DNA, 20 bp, synthetic construct
  source 1..20: mol_type = other DNA
ctgtctcgtagaaggcctgt

SEQ ID NO: 11688 - DNA, 20 bp, synthetic construct
  source 1..20: mol_type = other DNA
catccgggccaggtccaaca

SEQ ID NO: 11689 - DNA, 20 bp, synthetic construct
  source 1..20: mol_type = other DNA
ggccctttggaacgaagggt

SEQ ID NO: 11690 - DNA, 20 bp, synthetic construct
  source 1..20: mol_type = other DNA
gccctagaaaaggagaggcg

SEQ ID NO: 11691 - DNA, 20 bp, synthetic construct
  source 1..20: mol_type = other DNA
atccgatggcacaatcaggt

SEQ ID NO: 11692 - DNA, 20 bp, synthetic construct
  source 1..20: mol_type = other DNA
ccatcaagtctctgcaacac

SEQ ID NO: 11693 - DNA, 20 bp, synthetic construct
  source 1..20: mol_type = other DNA
ggtgaagctgtagccgcgct

SEQ ID NO: 11694 - DNA, 20 bp, synthetic construct
  source 1..20: mol_type = other DNA
cccggagtgcccgcagggtg

SEQ ID NO: 11695 - DNA, 20 bp, synthetic construct
  source 1..20: mol_type = other DNA
gtttgatgaggagcgagccc

SEQ ID NO: 11696 - DNA, 20 bp, synthetic construct
  source 1..20: mol_type = other DNA
ccagggcaacgaggatgagg

SEQ ID NO: 11697 - DNA, 20 bp, synthetic construct
  source 1..20: mol_type = other DNA
cagcttctttgatattactg

SEQ ID NO: 11698 - DNA, 20 bp, synthetic construct
  source 1..20: mol_type = other DNA
tgacgcggaggcgtattcgg

SEQ ID NO: 11699 - DNA, 20 bp, synthetic construct
  source 1..20: mol_type = other DNA
aggcctcaagattgacctag

SEQ ID NO: 11700 - DNA, 20 bp, synthetic construct
  source 1..20: mol_type = other DNA
tctaggccgatacaaagcag

SEQ ID NO: 11701 - DNA, 20 bp, synthetic construct
  source 1..20: mol_type = other DNA
gggtcgagcacttgagctcc

SEQ ID NO: 11702 - DNA, 20 bp, synthetic construct
  source 1..20: mol_type = other DNA
cgatgggtagtcctggagag

SEQ ID NO: 11703 - DNA, 20 bp, synthetic construct
  source 1..20: mol_type = other DNA
ggtccccaaaggagaaagat

SEQ ID NO: 11704 - DNA, 20 bp, synthetic construct
  source 1..20: mol_type = other DNA
cggggtctggcatcgcccct

SEQ ID NO: 11705 - DNA, 20 bp, synthetic construct
  source 1..20: mol_type = other DNA
cctgcagggaaggaaggcgc

SEQ ID NO: 11706 - DNA, 20 bp, synthetic construct
  source 1..20: mol_type = other DNA
atgtgcaaggccggcttcgc

SEQ ID NO: 11707 - DNA, 20 bp, synthetic construct
  source 1..20: mol_type = other DNA
gggcgccgacaagatcgagg

SEQ ID NO: 11708 - DNA, 20 bp, synthetic construct
  source 1..20: mol_type = other DNA
agacagtcaagatagcaaga

SEQ ID NO: 11709 - DNA, 20 bp, synthetic construct
  source 1..20: mol_type = other DNA
ctgtgaagttgaggtaacaa

SEQ ID NO: 11710 - DNA, 20 bp, synthetic construct
  source 1..20: mol_type = other DNA
ccctcaccagcagcagctgg

SEQ ID NO: 11711 - DNA, 20 bp, synthetic construct
  source 1..20: mol_type = other DNA
gctcagcgagctcctggatc

SEQ ID NO: 11712 - DNA, 20 bp, synthetic construct
  source 1..20: mol_type = other DNA
gctgccgctccgcgtccttg

SEQ ID NO: 11713 - DNA, 20 bp, synthetic construct
  source 1..20: mol_type = other DNA
gatgccccgtctgattgcca

SEQ ID NO: 11714 - DNA, 20 bp, synthetic construct
  source 1..20: mol_type = other DNA
gtacattccagaccaaggta

SEQ ID NO: 11715 - DNA, 20 bp, synthetic construct
  source 1..20: mol_type = other DNA
gaaagacaagacgctgattg

SEQ ID NO: 11716 - DNA, 20 bp, synthetic construct
  source 1..20: mol_type = other DNA
cgaggccatggaggtgacgg

SEQ ID NO: 11717 - DNA, 20 bp, synthetic construct
  source 1..20: mol_type = other DNA
gtgcaggccgggcttttcca

SEQ ID NO: 11718 - DNA, 20 bp, synthetic construct
  source 1..20: mol_type = other DNA
cagcatccaggacaacaatg

SEQ ID NO: 11719 - DNA, 20 bp, synthetic construct
  source 1..20: mol_type = other DNA
catcagccaggccccgcagg

SEQ ID NO: 11720 - DNA, 20 bp, synthetic construct
  source 1..20: mol_type = other DNA
tcacaaagtctggaaggaaa

SEQ ID NO: 11721 - DNA, 20 bp, synthetic construct
  source 1..20: mol_type = other DNA
tcccgcccccaccagccggc

SEQ ID NO: 11722 - DNA, 20 bp, synthetic construct
  source 1..20: mol_type = other DNA
actggagtatctgtttgctc

SEQ ID NO: 11723 - DNA, 20 bp, synthetic construct
  source 1..20: mol_type = other DNA
tgacctatcgggacaagcaa

SEQ ID NO: 11724 - DNA, 20 bp, synthetic construct
  source 1..20: mol_type = other DNA
cttacctgttaagattattg

SEQ ID NO: 11725 - DNA, 20 bp, synthetic construct
  source 1..20: mol_type = other DNA
aatgtcctctgcaggagatg

SEQ ID NO: 11726 - DNA, 20 bp, synthetic construct
  source 1..20: mol_type = other DNA
ggaatcgagggctgcaagac

SEQ ID NO: 11727 - DNA, 20 bp, synthetic construct
  source 1..20: mol_type = other DNA
gagggctaccagccgggcga

SEQ ID NO: 11728 - DNA, 20 bp, synthetic construct
  source 1..20: mol_type = other DNA
aggatggacgcccaggcatt

SEQ ID NO: 11729 - DNA, 20 bp, synthetic construct
  source 1..20: mol_type = other DNA
gcagcagctgcagggtcttc

SEQ ID NO: 11730 - DNA, 20 bp, synthetic construct
  source 1..20: mol_type = other DNA
cccccagcaccgcagtgacc

SEQ ID NO: 11731 - DNA, 20 bp, synthetic construct
  source 1..20: mol_type = other DNA
ggtggaagctgagctggctg

SEQ ID NO: 11732 - DNA, 20 bp, synthetic construct
  source 1..20: mol_type = other DNA
aacgtgcccatcatcctggt

SEQ ID NO: 11733 - DNA, 20 bp, synthetic construct
  source 1..20: mol_type = other DNA
cggcggccctccttggagct

SEQ ID NO: 11734 - DNA, 20 bp, synthetic construct
  source 1..20: mol_type = other DNA
gctgctgacctgtcagggga

SEQ ID NO: 11735 - DNA, 20 bp, synthetic construct
  source 1..20: mol_type = other DNA
accagcagtgctgtgaaaag

SEQ ID NO: 11736 - DNA, 20 bp, synthetic construct
  source 1..20: mol_type = other DNA
gatcaagcgtgctgaccggc

SEQ ID NO: 11737 - DNA, 20 bp, synthetic construct
  source 1..20: mol_type = other DNA
cgagaaagcagtctttaccc

SEQ ID NO: 11738 - DNA, 20 bp, synthetic construct
  source 1..20: mol_type = other DNA
cagggacccccatattccat

SEQ ID NO: 11739 - DNA, 20 bp, synthetic construct
  source 1..20: mol_type = other DNA
ccctacatcgtgcggctcat

SEQ ID NO: 11740 - DNA, 20 bp, synthetic construct
  source 1..20: mol_type = other DNA
tggcgtaggtgccgttgagc

SEQ ID NO: 11741 - DNA, 20 bp, synthetic construct
  source 1..20: mol_type = other DNA
cacttccacccctggctcag

SEQ ID NO: 11742 - DNA, 20 bp, synthetic construct
  source 1..20: mol_type = other DNA
ggggcagggcctgcatgtga

SEQ ID NO: 11743 - DNA, 20 bp, synthetic construct
  source 1..20: mol_type = other DNA
gaggagactggcggagctgg

SEQ ID NO: 11744 - DNA, 20 bp, synthetic construct
  source 1..20: mol_type = other DNA
gacaggcagagctggaagga

SEQ ID NO: 11745 - DNA, 20 bp, synthetic construct
  source 1..20: mol_type = other DNA
atggggcagtcctgcgggca

SEQ ID NO: 11746 - DNA, 20 bp, synthetic construct
  source 1..20: mol_type = other DNA
cagggaccacagggacacag

SEQ ID NO: 11747 - DNA, 20 bp, synthetic construct
  source 1..20: mol_type = other DNA
gctcttcacacccaccgtgc

SEQ ID NO: 11748 - DNA, 20 bp, synthetic construct
  source 1..20: mol_type = other DNA
gatcagagggccaaccacga

SEQ ID NO: 11749 - DNA, 20 bp, synthetic construct
  source 1..20: mol_type = other DNA
gaacaagagcaatgactttg

SEQ ID NO: 11750 - DNA, 20 bp, synthetic construct
  source 1..20: mol_type = other DNA
ccttggtccagaattccatg

SEQ ID NO: 11751 - DNA, 20 bp, synthetic construct
  source 1..20: mol_type = other DNA
tggcatcaacagtatggact

SEQ ID NO: 11752 - DNA, 20 bp, synthetic construct
  source 1..20: mol_type = other DNA
cggagagcagagccgaggtc

SEQ ID NO: 11753 - DNA, 20 bp, synthetic construct
  source 1..20: mol_type = other DNA
cagcaaggaccagttcccag

SEQ ID NO: 11754 - DNA, 20 bp, synthetic construct
  source 1..20: mol_type = other DNA
aaggaagccctgggcacccc

SEQ ID NO: 11755 - DNA, 20 bp, synthetic construct
  source 1..20: mol_type = other DNA
aggtcctaggaagcaaatac

SEQ ID NO: 11756 - DNA, 20 bp, synthetic construct
  source 1..20: mol_type = other DNA
gcaggtacaaggcgcgttcc

SEQ ID NO: 11757 - DNA, 20 bp, synthetic construct
  source 1..20: mol_type = other DNA
ctccaggtgggtgtaggctc

SEQ ID NO: 11758 - DNA, 20 bp, synthetic construct
  source 1..20: mol_type = other DNA
caagatgtgccaattctgcg

SEQ ID NO: 11759 - DNA, 20 bp, synthetic construct
  source 1..20: mol_type = other DNA
cgtcccgccccacctggtcc

SEQ ID NO: 11760 - DNA, 20 bp, synthetic construct
  source 1..20: mol_type = other DNA
actcacctgactgaggttga

SEQ ID NO: 11761 - DNA, 20 bp, synthetic construct
  source 1..20: mol_type = other DNA
cttgagatgcacacccagaa

SEQ ID NO: 11762 - DNA, 20 bp, synthetic construct
  source 1..20: mol_type = other DNA
cttgggtcaggacatcaact

SEQ ID NO: 11763 - DNA, 20 bp, synthetic construct
  source 1..20: mol_type = other DNA
caggcccttccccaccgagg

SEQ ID NO: 11764 - DNA, 20 bp, synthetic construct
  source 1..20: mol_type = other DNA
tctgcaccttgtcacacagt

SEQ ID NO: 11765 - DNA, 20 bp, synthetic construct
  source 1..20: mol_type = other DNA
caagatgtatacaaccagta

SEQ ID NO: 11766 - DNA, 20 bp, synthetic construct
  source 1..20: mol_type = other DNA
gacgctccatcccatcagct

SEQ ID NO: 11767 - DNA, 20 bp, synthetic construct
  source 1..20: mol_type = other DNA
caagccacccagctcctgga

SEQ ID NO: 11768 - DNA, 20 bp, synthetic construct
  source 1..20: mol_type = other DNA
ggcccccagcaacagcttca

SEQ ID NO: 11769 - DNA, 20 bp, synthetic construct
  source 1..20: mol_type = other DNA
caaggggcaaaggggctatg

SEQ ID NO: 11770 - DNA, 20 bp, synthetic construct
  source 1..20: mol_type = other DNA
tattaatccagatgagcccc

SEQ ID NO: 11771 - DNA, 20 bp, synthetic construct
  source 1..20: mol_type = other DNA
gaaaaggggattatcctggt

SEQ ID NO: 11772 - DNA, 20 bp, synthetic construct
  source 1..20: mol_type = other DNA
tatttcaccgagtctggttg

SEQ ID NO: 11773 - DNA, 20 bp, synthetic construct
  source 1..20: mol_type = other DNA
gcctggccagcaaggtggaa

SEQ ID NO: 11774 - DNA, 20 bp, synthetic construct
  source 1..20: mol_type = other DNA
atggctttgaatgtggcgtg

SEQ ID NO: 11775 - DNA, 20 bp, synthetic construct
  source 1..20: mol_type = other DNA
gagactggaaggctgtctgg

SEQ ID NO: 11776 - DNA, 20 bp, synthetic construct
  source 1..20: mol_type = other DNA
cttcatcttggagtccatga

SEQ ID NO: 11777 - DNA, 20 bp, synthetic construct
  source 1..20: mol_type = other DNA
aagcgagccctggaatggct

SEQ ID NO: 11778 - DNA, 20 bp, synthetic construct
  source 1..20: mol_type = other DNA
gagcatcaagtgcgtggtgg

SEQ ID NO: 11779 - DNA, 20 bp, synthetic construct
  source 1..20: mol_type = other DNA
cactgtgggaccctgctgtg

SEQ ID NO: 11780 - DNA, 20 bp, synthetic construct
  source 1..20: mol_type = other DNA
aagtcccagctcaaggtgag

SEQ ID NO: 11781 - DNA, 20 bp, synthetic construct
  source 1..20: mol_type = other DNA
gctctgaaaatgcaagctgg

SEQ ID NO: 11782 - DNA, 20 bp, synthetic construct
  source 1..20: mol_type = other DNA
catggcggacaacaaagccc

SEQ ID NO: 11783 - DNA, 20 bp, synthetic construct
  source 1..20: mol_type = other DNA
gaacaagcactgcctgctgg

SEQ ID NO: 11784 - DNA, 20 bp, synthetic construct
  source 1..20: mol_type = other DNA
ccttcttcagagccaccttc

SEQ ID NO: 11785 - DNA, 20 bp, synthetic construct
  source 1..20: mol_type = other DNA
cttctgcccttctctctgga

SEQ ID NO: 11786 - DNA, 20 bp, synthetic construct
  source 1..20: mol_type = other DNA
cttgccctgtacccctgtgc

SEQ ID NO: 11787 - DNA, 20 bp, synthetic construct
  source 1..20: mol_type = other DNA
ggaggtgaggggcaggatgg

SEQ ID NO: 11788 - DNA, 20 bp, synthetic construct
  source 1..20: mol_type = other DNA
tgcaaacgccatgcggccat

SEQ ID NO: 11789 - DNA, 20 bp, synthetic construct
  source 1..20: mol_type = other DNA
gaagctttacctgatgtcct

SEQ ID NO: 11790 - DNA, 20 bp, synthetic construct
  source 1..20: mol_type = other DNA
ccaacctcactctgcattat

SEQ ID NO: 11791 - DNA, 20 bp, synthetic construct
  source 1..20: mol_type = other DNA
gaatcccagttcagtgttgg

SEQ ID NO: 11792 - DNA, 20 bp, synthetic construct
  source 1..20: mol_type = other DNA
gggactgctcacgttcatca

SEQ ID NO: 11793 - DNA, 20 bp, synthetic construct
  source 1..20: mol_type = other DNA
ctgcagtacctggtaagaag

SEQ ID NO: 11794 - DNA, 20 bp, synthetic construct
  source 1..20: mol_type = other DNA
tccagcttaacgcacttcaa

SEQ ID NO: 11795 - DNA, 20 bp, synthetic construct
  source 1..20: mol_type = other DNA
cctccagggccacggggtca

SEQ ID NO: 11796 - DNA, 20 bp, synthetic construct
  source 1..20: mol_type = other DNA
atgaagacgcacgggcagat

SEQ ID NO: 11797 - DNA, 20 bp, synthetic construct
  source 1..20: mol_type = other DNA
cggagaatgccaccgccaac

SEQ ID NO: 11798 - DNA, 20 bp, synthetic construct
  source 1..20: mol_type = other DNA
aaactgcttccggagccacc

SEQ ID NO: 11799 - DNA, 20 bp, synthetic construct
  source 1..20: mol_type = other DNA
ggaactacaccttctggcag

SEQ ID NO: 11800 - DNA, 20 bp, synthetic construct
  source 1..20: mol_type = other DNA
tggtgaggcaggaggtgaat

SEQ ID NO: 11801 - DNA, 20 bp, synthetic construct
  source 1..20: mol_type = other DNA
gccatcaacaagctcaagac

SEQ ID NO: 11802 - DNA, 20 bp, synthetic construct
  source 1..20: mol_type = other DNA
tgtcatggagtgcattgagt

SEQ ID NO: 11803 - DNA, 20 bp, synthetic construct
  source 1..20: mol_type = other DNA
gtactcacattgacctccat

SEQ ID NO: 11804 - DNA, 20 bp, synthetic construct
  source 1..20: mol_type = other DNA
ccaccgcttcgggctacgca

SEQ ID NO: 11805 - DNA, 20 bp, synthetic construct
  source 1..20: mol_type = other DNA
caaactcgtggaggcctgcg

SEQ ID NO: 11806 - DNA, 20 bp, synthetic construct
  source 1..20: mol_type = other DNA
ggccgctccatggggcggga

SEQ ID NO: 11807 - DNA, 20 bp, synthetic construct
  source 1..20: mol_type = other DNA
agaacttgatcttggtggta

SEQ ID NO: 11808 - DNA, 20 bp, synthetic construct
  source 1..20: mol_type = other DNA
cagctggacatgctgtggag

SEQ ID NO: 11809 - DNA, 20 bp, synthetic construct
  source 1..20: mol_type = other DNA
catcacgccctgggaaggaa

SEQ ID NO: 11810 - DNA, 20 bp, synthetic construct
  source 1..20: mol_type = other DNA
gcagccgctggtggagcagc

SEQ ID NO: 11811 - DNA, 20 bp, synthetic construct
  source 1..20: mol_type = other DNA
cagcagtcaaatgccttggt

SEQ ID NO: 11812 - DNA, 20 bp, synthetic construct
  source 1..20: mol_type = other DNA
agctgtgcagagcgataacc

SEQ ID NO: 11813 - DNA, 20 bp, synthetic construct
  source 1..20: mol_type = other DNA
gcagaagcggtgcccacact

SEQ ID NO: 11814 - DNA, 20 bp, synthetic construct
  source 1..20: mol_type = other DNA
tttaaaggaaagttccgaga

SEQ ID NO: 11815 - DNA, 20 bp, synthetic construct
  source 1..20: mol_type = other DNA
aagtgaggtcaagaggcgtg

SEQ ID NO: 11816 - DNA, 20 bp, synthetic construct
  source 1..20: mol_type = other DNA
catgcaccacctgctgctgg

SEQ ID NO: 11817 - DNA, 20 bp, synthetic construct
  source 1..20: mol_type = other DNA
cagatacaggtacacagctg

SEQ ID NO: 11818 - DNA, 20 bp, synthetic construct
  source 1..20: mol_type = other DNA
agtaggcatgtgcaagggct

SEQ ID NO: 11819 - DNA, 20 bp, synthetic construct
  source 1..20: mol_type = other DNA
agtgcctgccgggcaagatg

SEQ ID NO: 11820 - DNA, 20 bp, synthetic construct
  source 1..20: mol_type = other DNA
cagccggatcgccatctgga

SEQ ID NO: 11821 - DNA, 20 bp, synthetic construct
  source 1..20: mol_type = other DNA
gaaggcggagcaccaggtgg

SEQ ID NO: 11822 - DNA, 20 bp, synthetic construct
  source 1..20: mol_type = other DNA
cccaccgttccggccgaaag

SEQ ID NO: 11823 - DNA, 20 bp, synthetic construct
  source 1..20: mol_type = other DNA
gacacacagcagttcttgtc

SEQ ID NO: 11824 - DNA, 20 bp, synthetic construct
  source 1..20: mol_type = other DNA
cacggaagagatgatgcgcg

SEQ ID NO: 11825 - DNA, 20 bp, synthetic construct
  source 1..20: mol_type = other DNA
tactcacattgacctccata

SEQ ID NO: 11826 - DNA, 20 bp, synthetic construct
  source 1..20: mol_type = other DNA
atgagcagctcaacttgcgt

SEQ ID NO: 11827 - DNA, 20 bp, synthetic construct
  source 1..20: mol_type = other DNA
ggggagcacgttccacgcga

SEQ ID NO: 11828 - DNA, 20 bp, synthetic construct
  source 1..20: mol_type = other DNA
gtccacgtcacacttcatga

SEQ ID NO: 11829 - DNA, 20 bp, synthetic construct
  source 1..20: mol_type = other DNA
ccacggtggtttcagagatg

SEQ ID NO: 11830 - DNA, 20 bp, synthetic construct
  source 1..20: mol_type = other DNA
cccaggccagctcgatgtgg

SEQ ID NO: 11831 - DNA, 20 bp, synthetic construct
  source 1..20: mol_type = other DNA
gggaccaccacagtgcccag

SEQ ID NO: 11832 - DNA, 20 bp, synthetic construct
  source 1..20: mol_type = other DNA
tctgcccgtgcgtcttcatg

SEQ ID NO: 11833 - DNA, 20 bp, synthetic construct
  source 1..20: mol_type = other DNA
aagtaggcatcagtgttcag

SEQ ID NO: 11834 - DNA, 20 bp, synthetic construct
  source 1..20: mol_type = other DNA
ccaccagggcgagcagtggg

SEQ ID NO: 11835 - DNA, 20 bp, synthetic construct
  source 1..20: mol_type = other DNA
gcgcacgtagtcacgcacca

SEQ ID NO: 11836 - DNA, 20 bp, synthetic construct
  source 1..20: mol_type = other DNA
gacgatgacaaccacaggta

SEQ ID NO: 11837 - DNA, 20 bp, synthetic construct
  source 1..20: mol_type = other DNA
gaaggaggcggctggcatcg

SEQ ID NO: 11838 - DNA, 20 bp, synthetic construct
  source 1..20: mol_type = other DNA
ttacccacggtggctggaga

SEQ ID NO: 11839 - DNA, 20 bp, synthetic construct
  source 1..20: mol_type = other DNA
cgaccttctgtgaacactgt

SEQ ID NO: 11840 - DNA, 20 bp, synthetic construct
  source 1..20: mol_type = other DNA
gagcccaggtgagcgattgc

SEQ ID NO: 11841 - DNA, 20 bp, synthetic construct
  source 1..20: mol_type = other DNA
acttgtcagcagccacactc

SEQ ID NO: 11842 - DNA, 20 bp, synthetic construct
  source 1..20: mol_type = other DNA
gaggatcaggttgcaggccc

SEQ ID NO: 11843 - DNA, 20 bp, synthetic construct
  source 1..20: mol_type = other DNA
aagagacaggtaaagctctc

SEQ ID NO: 11844 - DNA, 20 bp, synthetic construct
  source 1..20: mol_type = other DNA
aaatccactagactccctgt

SEQ ID NO: 11845 - DNA, 20 bp, synthetic construct
  source 1..20: mol_type = other DNA
tgcagtcatggcgcaggaag

SEQ ID NO: 11846 - DNA, 20 bp, synthetic construct
  source 1..20: mol_type = other DNA
ctccgtggccagagcaaaga

SEQ ID NO: 11847 - DNA, 20 bp, synthetic construct
  source 1..20: mol_type = other DNA
caggaggcagaaggcaatgc

SEQ ID NO: 11848 - DNA, 20 bp, synthetic construct
  source 1..20: mol_type = other DNA
ggggccagtggaggcagcga

SEQ ID NO: 11849 - DNA, 20 bp, synthetic construct
  source 1..20: mol_type = other DNA
cggcagactgctggaagagg

SEQ ID NO: 11850 - DNA, 20 bp, synthetic construct
  source 1..20: mol_type = other DNA
ggtgctgaggttggcattgc

SEQ ID NO: 11851 - DNA, 20 bp, synthetic construct
  source 1..20: mol_type = other DNA
agagtcaagtggtcatagtc

SEQ ID NO: 11852 - DNA, 20 bp, synthetic construct
  source 1..20: mol_type = other DNA
gatttcagcagcataaaacc

SEQ ID NO: 11853 - DNA, 20 bp, synthetic construct
  source 1..20: mol_type = other DNA
cagccattgggcccatacgt

SEQ ID NO: 11854 - DNA, 20 bp, synthetic construct
  source 1..20: mol_type = other DNA
ggtggaagaacagctgcggg

SEQ ID NO: 11855 - DNA, 20 bp, synthetic construct
  source 1..20: mol_type = other DNA
gaggcagaaggcaatgcagg

SEQ ID NO: 11856 - DNA, 20 bp, synthetic construct
  source 1..20: mol_type = other DNA
ggcaggggcagagagcatcc

SEQ ID NO: 11857 - DNA, 20 bp, synthetic construct
  source 1..20: mol_type = other DNA
gttgtccgagagggattcgg

SEQ ID NO: 11858 - DNA, 20 bp, synthetic construct
  source 1..20: mol_type = other DNA
tagtctgggttgggaacagg

SEQ ID NO: 11859 - DNA, 20 bp, synthetic construct
  source 1..20: mol_type = other DNA
cctccaccccctggagccat

SEQ ID NO: 11860 - DNA, 20 bp, synthetic construct
  source 1..20: mol_type = other DNA
tggctcctcgatctctcgta

SEQ ID NO: 11861 - DNA, 20 bp, synthetic construct
  source 1..20: mol_type = other DNA
ggcgtcgcggcacttcatga

SEQ ID NO: 11862 - DNA, 20 bp, synthetic construct
  source 1..20: mol_type = other DNA
ccagtccggcgcgggcccca

SEQ ID NO: 11863 - DNA, 20 bp, synthetic construct
  source 1..20: mol_type = other DNA
agttgaggtgctcctgtggg

SEQ ID NO: 11864 - DNA, 20 bp, synthetic construct
  source 1..20: mol_type = other DNA
cctgaggaaacaagggccag

SEQ ID NO: 11865 - DNA, 20 bp, synthetic construct
  source 1..20: mol_type = other DNA
aaaaattgttccactcttcc

SEQ ID NO: 11866 - DNA, 20 bp, synthetic construct
  source 1..20: mol_type = other DNA
tacatttccactataccaca

SEQ ID NO: 11867 - DNA, 20 bp, synthetic construct
  source 1..20: mol_type = other DNA
ccaggtcgcggtgcacgcag

SEQ ID NO: 11868 - DNA, 20 bp, synthetic construct
  source 1..20: mol_type = other DNA
ataatagtgagaaatttgaa

SEQ ID NO: 11869 - DNA, 20 bp, synthetic construct
  source 1..20: mol_type = other DNA
gatggctaggtgcagtggtc

SEQ ID NO: 11870 - DNA, 20 bp, synthetic construct
  source 1..20: mol_type = other DNA
gaactccctgccagatatcg

SEQ ID NO: 11871 - DNA, 20 bp, synthetic construct
  source 1..20: mol_type = other DNA
gatctggtgcaggtgagtca

SEQ ID NO: 11872 - DNA, 20 bp, synthetic construct
  source 1..20: mol_type = other DNA
gggccgctccatggggcggg

SEQ ID NO: 11873 - DNA, 20 bp, synthetic construct
  source 1..20: mol_type = other DNA
gtgacagtcccggcccttag

SEQ ID NO: 11874 - DNA, 20 bp, synthetic construct
  source 1..20: mol_type = other DNA
gcacctgggatagagtagag

SEQ ID NO: 11875 - DNA, 20 bp, synthetic construct
  source 1..20: mol_type = other DNA
tctagctcagtttggcccgc

SEQ ID NO: 11876 - DNA, 20 bp, synthetic construct
  source 1..20: mol_type = other DNA
tgaccaggtgtttgagatcc

SEQ ID NO: 11877 - DNA, 20 bp, synthetic construct
  source 1..20: mol_type = other DNA
aagacaagaccatcaaatcc

SEQ ID NO: 11878 - DNA, 20 bp, synthetic construct
  source 1..20: mol_type = other DNA
cacggtggaacctgacatgt

SEQ ID NO: 11879 - DNA, 20 bp, synthetic construct
  source 1..20: mol_type = other DNA
ctctgaccttagcaggatcc

SEQ ID NO: 11880 - DNA, 20 bp, synthetic construct
  source 1..20: mol_type = other DNA
gcgaatcgctcagaccaggt

SEQ ID NO: 11881 - DNA, 20 bp, synthetic construct
  source 1..20: mol_type = other DNA
ggagtcacacacggtgtccg

SEQ ID NO: 11882 - DNA, 20 bp, synthetic construct
  source 1..20: mol_type = other DNA
aaagggcctacaccatcctg

SEQ ID NO: 11883 - DNA, 20 bp, synthetic construct
  source 1..20: mol_type = other DNA
ttattatattatgcaggaca

SEQ ID NO: 11884 - DNA, 20 bp, synthetic construct
  source 1..20: mol_type = other DNA
ctacaggatcgaccgagccc

SEQ ID NO: 11885 - DNA, 20 bp, synthetic construct
  source 1..20: mol_type = other DNA
ccgccaggtgcaggggcgtc

SEQ ID NO: 11886 - DNA, 20 bp, synthetic construct
  source 1..20: mol_type = other DNA
agtggcatgtgattctttgc

SEQ ID NO: 11887 - DNA, 20 bp, synthetic construct
  source 1..20: mol_type = other DNA
cagccatagggggtcatcct

SEQ ID NO: 11888 - DNA, 20 bp, synthetic construct
  source 1..20: mol_type = other DNA
gtccttcaccaagatttacc

SEQ ID NO: 11889 - DNA, 20 bp, synthetic construct
  source 1..20: mol_type = other DNA
tatctgtgtgacaccgtaag

SEQ ID NO: 11890 - DNA, 20 bp, synthetic construct
  source 1..20: mol_type = other DNA
caacccaggctacctgtgag

SEQ ID NO: 11891 - DNA, 20 bp, synthetic construct
  source 1..20: mol_type = other DNA
ccaggtgggtgtgggctctg

SEQ ID NO: 11892 - DNA, 20 bp, synthetic construct
  source 1..20: mol_type = other DNA
ggccttgcagaagaagctgg

SEQ ID NO: 11893 - DNA, 20 bp, synthetic construct
  source 1..20: mol_type = other DNA
cttcgctcagcagcgcttcg

SEQ ID NO: 11894 - DNA, 20 bp, synthetic construct
  source 1..20: mol_type = other DNA
cagcgacgaatcctatggta

SEQ ID NO: 11895 - DNA, 20 bp, synthetic construct
  source 1..20: mol_type = other DNA
gcaggagagccagagtcgct

SEQ ID NO: 11896 - DNA, 20 bp, synthetic construct
  source 1..20: mol_type = other DNA
ggtgacgatgccgtgctcga

SEQ ID NO: 11897 - DNA, 20 bp, synthetic construct
  source 1..20: mol_type = other DNA
ctgcctcgaagaaggcctgt

SEQ ID NO: 11898 - DNA, 20 bp, synthetic construct
  source 1..20: mol_type = other DNA
gatgagccccgggatttggt

SEQ ID NO: 11899 - DNA, 20 bp, synthetic construct
  source 1..20: mol_type = other DNA
ggcccagcatgtcctgtgga

SEQ ID NO: 11900 - DNA, 20 bp, synthetic construct
  source 1..20: mol_type = other DNA
gttttacagtgtgttgctgt

SEQ ID NO: 11901 - DNA, 20 bp, synthetic construct
  source 1..20: mol_type = other DNA
ggcgcaaagaagaagaggag

SEQ ID NO: 11902 - DNA, 20 bp, synthetic construct
  source 1..20: mol_type = other DNA
ccaatatacaaactggagtg

SEQ ID NO: 11903 - DNA, 20 bp, synthetic construct
  source 1..20: mol_type = other DNA
acacttgtacttgtcctcca

SEQ ID NO: 11904 - DNA, 20 bp, synthetic construct
  source 1..20: mol_type = other DNA
tcctctaggttcttcagggt

SEQ ID NO: 11905 - DNA, 20 bp, synthetic construct
  source 1..20: mol_type = other DNA
atctgcagctgcctgcacag

SEQ ID NO: 11906 - DNA, 20 bp, synthetic construct
  source 1..20: mol_type = other DNA
tccgtcctggtaaattctcc

SEQ ID NO: 11907 - DNA, 20 bp, synthetic construct
  source 1..20: mol_type = other DNA
caggttcgggatgactcttc

SEQ ID NO: 11908 - DNA, 20 bp, synthetic construct
  source 1..20: mol_type = other DNA
ggcgccgcagcttgctctcc

SEQ ID NO: 11909 - DNA, 20 bp, synthetic construct
  source 1..20: mol_type = other DNA
caaggtgcgagggggcgccc

SEQ ID NO: 11910 - DNA, 20 bp, synthetic construct
  source 1..20: mol_type = other DNA
gtgaactgggaagtgcctgc

SEQ ID NO: 11911 - DNA, 20 bp, synthetic construct
  source 1..20: mol_type = other DNA
ccagctccaccttccaccag

SEQ ID NO: 11912 - DNA, 20 bp, synthetic construct
  source 1..20: mol_type = other DNA
aagagggcctggacgtatgt

SEQ ID NO: 11913 - DNA, 20 bp, synthetic construct
  source 1..20: mol_type = other DNA
acgcagcagtgtgcatccag

SEQ ID NO: 11914 - DNA, 20 bp, synthetic construct
  source 1..20: mol_type = other DNA
tcttcccctgctgaatcaca

SEQ ID NO: 11915 - DNA, 20 bp, synthetic construct
  source 1..20: mol_type = other DNA
gagcctgcgggcagagctca

SEQ ID NO: 11916 - DNA, 20 bp, synthetic construct
  source 1..20: mol_type = other DNA
gcagtgctgaccttgatggt

SEQ ID NO: 11917 - DNA, 20 bp, synthetic construct
  source 1..20: mol_type = other DNA
tcagggacccccatattcca

SEQ ID NO: 11918 - DNA, 20 bp, synthetic construct
  source 1..20: mol_type = other DNA
ccctctcacgacggagatct

SEQ ID NO: 11919 - DNA, 20 bp, synthetic construct
  source 1..20: mol_type = other DNA
agctgcaagattgcagactt

SEQ ID NO: 11920 - DNA, 20 bp, synthetic construct
  source 1..20: mol_type = other DNA
tccttacatgatggtgtcac

SEQ ID NO: 11921 - DNA, 20 bp, synthetic construct
  source 1..20: mol_type = other DNA
ctgggcaaggacacaatggg

SEQ ID NO: 11922 - DNA, 20 bp, synthetic construct
  source 1..20: mol_type = other DNA
gtcctctgcaggagatgcgg

SEQ ID NO: 11923 - DNA, 20 bp, synthetic construct
  source 1..20: mol_type = other DNA
gggcaaagaaggagccttca

SEQ ID NO: 11924 - DNA, 20 bp, synthetic construct
  source 1..20: mol_type = other DNA
gagcaggagggcttcgccga

SEQ ID NO: 11925 - DNA, 20 bp, synthetic construct
  source 1..20: mol_type = other DNA
ctgctaaaggagtgcaggag

SEQ ID NO: 11926 - DNA, 20 bp, synthetic construct
  source 1..20: mol_type = other DNA
gccgcggccgccgcgcagag

SEQ ID NO: 11927 - DNA, 20 bp, synthetic construct
  source 1..20: mol_type = other DNA
cagctgagctcagagcatgg

SEQ ID NO: 11928 - DNA, 20 bp, synthetic construct
  source 1..20: mol_type = other DNA
cgccagcttcaggtgctcct

SEQ ID NO: 11929 - DNA, 20 bp, synthetic construct
  source 1..20: mol_type = other DNA
ggccctgaagctgttgctgg

SEQ ID NO: 11930 - DNA, 20 bp, synthetic construct
  source 1..20: mol_type = other DNA
gtcgtcccgcaggtccagct

SEQ ID NO: 11931 - DNA, 20 bp, synthetic construct
  source 1..20: mol_type = other DNA
tacgccacgcagctccaggt

SEQ ID NO: 11932 - DNA, 20 bp, synthetic construct
  source 1..20: mol_type = other DNA
ccgtaggcgccggagcccac

SEQ ID NO: 11933 - DNA, 20 bp, synthetic construct
  source 1..20: mol_type = other DNA
gtcctggtaatggtgtgggg

SEQ ID NO: 11934 - DNA, 20 bp, synthetic construct
  source 1..20: mol_type = other DNA
ggagactggcggagctggcg

SEQ ID NO: 11935 - DNA, 20 bp, synthetic construct
  source 1..20: mol_type = other DNA
agacaaggcctgcggatccc

SEQ ID NO: 11936 - DNA, 20 bp, synthetic construct
  source 1..20: mol_type = other DNA
caatttgggttggtgcatct

SEQ ID NO: 11937 - DNA, 20 bp, synthetic construct
  source 1..20: mol_type = other DNA
cgtgatggactccggtgacg

SEQ ID NO: 11938 - DNA, 20 bp, synthetic construct
  source 1..20: mol_type = other DNA
caagttgatgtcctgaccca

SEQ ID NO: 11939 - DNA, 20 bp, synthetic construct
  source 1..20: mol_type = other DNA
agcacaaagtacgggccagg

SEQ ID NO: 11940 - DNA, 20 bp, synthetic construct
  source 1..20: mol_type = other DNA
aaaaactttaaagaattttg

SEQ ID NO: 11941 - DNA, 20 bp, synthetic construct
  source 1..20: mol_type = other DNA
cttccttctccagccaccgt

SEQ ID NO: 11942 - DNA, 20 bp, synthetic construct
  source 1..20: mol_type = other DNA
ataacctagaaaagaactga

SEQ ID NO: 11943 - DNA, 20 bp, synthetic construct
  source 1..20: mol_type = other DNA
ccaggtcccaggcttgcctg

SEQ ID NO: 11944 - DNA, 20 bp, synthetic construct
  source 1..20: mol_type = other DNA
ccctggatcaccaaggacaa

SEQ ID NO: 11945 - DNA, 20 bp, synthetic construct
  source 1..20: mol_type = other DNA
tgccatctctttccggtgag

SEQ ID NO: 11946 - DNA, 20 bp, synthetic construct
  source 1..20: mol_type = other DNA
ggcaagcaatgctcggagct

SEQ ID NO: 11947 - DNA, 20 bp, synthetic construct
  source 1..20: mol_type = other DNA
cgtccaggaagcaccacttg

SEQ ID NO: 11948 - DNA, 20 bp, synthetic construct
  source 1..20: mol_type = other DNA
ccgagtatatgaacaaaggt

SEQ ID NO: 11949 - DNA, 20 bp, synthetic construct
  source 1..20: mol_type = other DNA
gctaccctgggaacatatgg

SEQ ID NO: 11950 - DNA, 20 bp, synthetic construct
  source 1..20: mol_type = other DNA
accattcccccaaggcctcg

SEQ ID NO: 11951 - DNA, 20 bp, synthetic construct
  source 1..20: mol_type = other DNA
gagccacagctcaagcactc

SEQ ID NO: 11952 - DNA, 20 bp, synthetic construct
  source 1..20: mol_type = other DNA
acactcactgatcccaaact

SEQ ID NO: 11953 - DNA, 20 bp, synthetic construct
  source 1..20: mol_type = other DNA
tgtgaccctggcacttggct

SEQ ID NO: 11954 - DNA, 20 bp, synthetic construct
  source 1..20: mol_type = other DNA
gtcatgtacgagatgatgtg

SEQ ID NO: 11955 - DNA, 20 bp, synthetic construct
  source 1..20: mol_type = other DNA
ctgccagacgctgagccccc

SEQ ID NO: 11956 - DNA, 20 bp, synthetic construct
  source 1..20: mol_type = other DNA
tcatttctatttaagggagg

SEQ ID NO: 11957 - DNA, 20 bp, synthetic construct
  source 1..20: mol_type = other DNA
ccatgagctggatcatctgc

SEQ ID NO: 11958 - DNA, 20 bp, synthetic construct
  source 1..20: mol_type = other DNA
aatttcaggtggccaggaga

SEQ ID NO: 11959 - DNA, 20 bp, synthetic construct
  source 1..20: mol_type = other DNA
cctcactcacggttctcaaa

SEQ ID NO: 11960 - DNA, 20 bp, synthetic construct
  source 1..20: mol_type = other DNA
tcggccagcgttaggtggtg

SEQ ID NO: 11961 - DNA, 20 bp, synthetic construct
  source 1..20: mol_type = other DNA
gccgaggctgctggaggaag

SEQ ID NO: 11962 - DNA, 20 bp, synthetic construct
  source 1..20: mol_type = other DNA
tcatctcttcaggtgcccgc

SEQ ID NO: 11963 - DNA, 20 bp, synthetic construct
  source 1..20: mol_type = other DNA
acgcagctccaggtgggtgt

SEQ ID NO: 11964 - DNA, 20 bp, synthetic construct
  source 1..20: mol_type = other DNA
atcgatctgtaacaggacaa

SEQ ID NO: 11965 - DNA, 20 bp, synthetic construct
  source 1..20: mol_type = other DNA
cctcctccatcctcgccatg

SEQ ID NO: 11966 - DNA, 20 bp, synthetic construct
  source 1..20: mol_type = other DNA
cagctcaccggaggagtgga

SEQ ID NO: 11967 - DNA, 20 bp, synthetic construct
  source 1..20: mol_type = other DNA
agccagcgagtagagctcca

SEQ ID NO: 11968 - DNA, 20 bp, synthetic construct
  source 1..20: mol_type = other DNA
taaggagtattacaccgtca

SEQ ID NO: 11969 - DNA, 20 bp, synthetic construct
  source 1..20: mol_type = other DNA
aaagggcttgaagtcctgga

SEQ ID NO: 11970 - DNA, 20 bp, synthetic construct
  source 1..20: mol_type = other DNA
gtgtccttttgtggagattg

SEQ ID NO: 11971 - DNA, 20 bp, synthetic construct
  source 1..20: mol_type = other DNA
ctttgtgcaccgtgacctgg

SEQ ID NO: 11972 - DNA, 20 bp, synthetic construct
  source 1..20: mol_type = other DNA
catgacaccagtaggttcct

SEQ ID NO: 11973 - DNA, 20 bp, synthetic construct
  source 1..20: mol_type = other DNA
agaccgtcgtggggcagagt

SEQ ID NO: 11974 - DNA, 20 bp, synthetic construct
  source 1..20: mol_type = other DNA
cctctcaatctgcaggggtg

SEQ ID NO: 11975 - DNA, 20 bp, synthetic construct
  source 1..20: mol_type = other DNA
gaagttagaagtcgggtcgt

SEQ ID NO: 11976 - DNA, 20 bp, synthetic construct
  source 1..20: mol_type = other DNA
atgcagatccgacactggaa

SEQ ID NO: 11977 - DNA, 20 bp, synthetic construct
  source 1..20: mol_type = other DNA
caggctacgtggccactagg

SEQ ID NO: 11978 - DNA, 20 bp, synthetic construct
  source 1..20: mol_type = other DNA
gcccaaggacggaagcgctt

SEQ ID NO: 11979 - DNA, 20 bp, synthetic construct
  source 1..20: mol_type = other DNA
accctggtggttggtgtcgt

SEQ ID NO: 11980 - DNA, 20 bp, synthetic construct
  source 1..20: mol_type = other DNA
ccagagacacctgcttctgc

SEQ ID NO: 11981 - DNA, 20 bp, synthetic construct
  source 1..20: mol_type = other DNA
gcaatacgttcaccgggact

SEQ ID NO: 11982 - DNA, 20 bp, synthetic construct
  source 1..20: mol_type = other DNA
ggtcccagttcaacagggtg

SEQ ID NO: 11983 - DNA, 20 bp, synthetic construct
  source 1..20: mol_type = other DNA
gtagaaaggctggctgtaaa

SEQ ID NO: 11984 - DNA, 20 bp, synthetic construct
  source 1..20: mol_type = other DNA
agctcaaggtgaggggcacc

SEQ ID NO: 11985 - DNA, 20 bp, synthetic construct
  source 1..20: mol_type = other DNA
cagcagctggccgggaacgg

SEQ ID NO: 11986 - DNA, 20 bp, synthetic construct
  source 1..20: mol_type = other DNA
ttgtaccctggaagggccaa

SEQ ID NO: 11987 - DNA, 20 bp, synthetic construct
  source 1..20: mol_type = other DNA
ccagggtccacagagccacc

SEQ ID NO: 11988 - DNA, 20 bp, synthetic construct
  source 1..20: mol_type = other DNA
gttgatgcaggtgaacacat

SEQ ID NO: 11989 - DNA, 20 bp, synthetic construct
  source 1..20: mol_type = other DNA
tgccagagtttcggttcact

SEQ ID NO: 11990 - DNA, 20 bp, synthetic construct
  source 1..20: mol_type = other DNA
tgtccagatgaggtatctat

SEQ ID NO: 11991 - DNA, 20 bp, synthetic construct
  source 1..20: mol_type = other DNA
gcagcagtcacctggtcacc

SEQ ID NO: 11992 - DNA, 20 bp, synthetic construct
  source 1..20: mol_type = other DNA
atactgtccctaggagcaag

SEQ ID NO: 11993 - DNA, 20 bp, synthetic construct
  source 1..20: mol_type = other DNA
tagggggtcatcctaggcaa

SEQ ID NO: 11994 - DNA, 20 bp, synthetic construct
  source 1..20: mol_type = other DNA
acaggaggagctgcaggact

SEQ ID NO: 11995 - DNA, 20 bp, synthetic construct
  source 1..20: mol_type = other DNA
agatgtgagtagcccaccca

SEQ ID NO: 11996 - DNA, 20 bp, synthetic construct
  source 1..20: mol_type = other DNA
cataaaattggagtttctga

SEQ ID NO: 11997 - DNA, 20 bp, synthetic construct
  source 1..20: mol_type = other DNA
caagcctatgcagatgaacc

SEQ ID NO: 11998 - DNA, 20 bp, synthetic construct
  source 1..20: mol_type = other DNA
tccaccgtggcgtacaggca

SEQ ID NO: 11999 - DNA, 20 bp, synthetic construct
  source 1..20: mol_type = other DNA
tcctgagctcatgaggaggc

SEQ ID NO: 12000 - DNA, 20 bp, synthetic construct
  source 1..20: mol_type = other DNA
ttgcagaagatgacctggga

SEQ ID NO: 12001 - DNA, 20 bp, synthetic construct
  source 1..20: mol_type = other DNA
acagaacttcaatacactga

SEQ ID NO: 12002 - DNA, 20 bp, synthetic construct
  source 1..20: mol_type = other DNA
cgcagccttctgctgggcac

SEQ ID NO: 12003 - DNA, 20 bp, synthetic construct
  source 1..20: mol_type = other DNA
tcagcgtcttgtctttcaag

SEQ ID NO: 12004 - DNA, 20 bp, synthetic construct
  source 1..20: mol_type = other DNA
tccttcgctcagcagcgctt

SEQ ID NO: 12005 - DNA, 20 bp, synthetic construct
  source 1..20: mol_type = other DNA
cagtggccagcgtctgggag

SEQ ID NO: 12006 - DNA, 20 bp, synthetic construct
  source 1..20: mol_type = other DNA
tcgcagagaaccatggagtc

SEQ ID NO: 12007 - DNA, 20 bp, synthetic construct
  source 1..20: mol_type = other DNA
caaggcctctgtgaaagccc

SEQ ID NO: 12008 - DNA, 20 bp, synthetic construct
  source 1..20: mol_type = other DNA
gcagctggatgcagtatgcc

SEQ ID NO: 12009 - DNA, 20 bp, synthetic construct
  source 1..20: mol_type = other DNA
aaggccacccagctcctgga

SEQ ID NO: 12010 - DNA, 20 bp, synthetic construct
  source 1..20: mol_type = other DNA
gtgcaggaatttgtacacct

SEQ ID NO: 12011 - DNA, 20 bp, synthetic construct
  source 1..20: mol_type = other DNA
caatctcaacacatttgatt

SEQ ID NO: 12012 - DNA, 20 bp, synthetic construct
  source 1..20: mol_type = other DNA
aagatacctgctctataagt

SEQ ID NO: 12013 - DNA, 20 bp, synthetic construct
  source 1..20: mol_type = other DNA
caccaaattcccggtgaagt

SEQ ID NO: 12014 - DNA, 20 bp, synthetic construct
  source 1..20: mol_type = other DNA
tcctgacattcccaaggagg

SEQ ID NO: 12015 - DNA, 20 bp, synthetic construct
  source 1..20: mol_type = other DNA
atttcagcagcataaaacct

SEQ ID NO: 12016 - DNA, 20 bp, synthetic construct
  source 1..20: mol_type = other DNA
atcttgcattcattagcatt

SEQ ID NO: 12017 - DNA, 20 bp, synthetic construct
  source 1..20: mol_type = other DNA
acactgatggctgtgatagg

SEQ ID NO: 12018 - DNA, 20 bp, synthetic construct
  source 1..20: mol_type = other DNA
ttcccctacccagaggacaa

SEQ ID NO: 12019 - DNA, 20 bp, synthetic construct
  source 1..20: mol_type = other DNA
cgctgccaaagttgccctgg

SEQ ID NO: 12020 - DNA, 20 bp, synthetic construct
  source 1..20: mol_type = other DNA
tatttgagaactcgctgcat

SEQ ID NO: 12021 - DNA, 20 bp, synthetic construct
  source 1..20: mol_type = other DNA
gtcgagtggggactgcaggt

SEQ ID NO: 12022 - DNA, 20 bp, synthetic construct
  source 1..20: mol_type = other DNA
gcagctctgaggcccacggt

SEQ ID NO: 12023 - DNA, 20 bp, synthetic construct
  source 1..20: mol_type = other DNA
tcctggtaaattctcctggt

SEQ ID NO: 12024 - DNA, 20 bp, synthetic construct
  source 1..20: mol_type = other DNA
gcagcgaggtatggactccg

SEQ ID NO: 12025 - DNA, 20 bp, synthetic construct
  source 1..20: mol_type = other DNA
ccggttgaataagatggagg

SEQ ID NO: 12026 - DNA, 20 bp, synthetic construct
  source 1..20: mol_type = other DNA
ggacaagtaccctctgatca

SEQ ID NO: 12027 - DNA, 20 bp, synthetic construct
  source 1..20: mol_type = other DNA
aacggagtaccacctcaatg

SEQ ID NO: 12028 - DNA, 20 bp, synthetic construct
  source 1..20: mol_type = other DNA
ttggccagctccttcaggta

SEQ ID NO: 12029 - DNA, 20 bp, synthetic construct
  source 1..20: mol_type = other DNA
cggcaaggactcaagtgtga

SEQ ID NO: 12030 - DNA, 20 bp, synthetic construct
  source 1..20: mol_type = other DNA
ctggccaaggagattggtat

SEQ ID NO: 12031 - DNA, 20 bp, synthetic construct
  source 1..20: mol_type = other DNA
aagatccgtaatctggacaa

SEQ ID NO: 12032 - DNA, 20 bp, synthetic construct
  source 1..20: mol_type = other DNA
gccccggtaaatcttggtga

SEQ ID NO: 12033 - DNA, 20 bp, synthetic construct
  source 1..20: mol_type = other DNA
tcggggggaaccagcaggac

SEQ ID NO: 12034 - DNA, 20 bp, synthetic construct
  source 1..20: mol_type = other DNA
gcctgagctcccgctgccca

SEQ ID NO: 12035 - DNA, 20 bp, synthetic construct
  source 1..20: mol_type = other DNA
cgaactggaggagaagaggg

SEQ ID NO: 12036 - DNA, 20 bp, synthetic construct
  source 1..20: mol_type = other DNA
cggcaggagatgaggcgcca

SEQ ID NO: 12037 - DNA, 20 bp, synthetic construct
  source 1..20: mol_type = other DNA
cgcgccaaggtgagctggac

SEQ ID NO: 12038 - DNA, 20 bp, synthetic construct
  source 1..20: mol_type = other DNA
agaggtaggaatgcagtgac

SEQ ID NO: 12039 - DNA, 20 bp, synthetic construct
  source 1..20: mol_type = other DNA
agggatgtgaatggtaatga

SEQ ID NO: 12040 - DNA, 20 bp, synthetic construct
  source 1..20: mol_type = other DNA
agtgagctggcatcaaggag

SEQ ID NO: 12041 - DNA, 20 bp, synthetic construct
  source 1..20: mol_type = other DNA
cttcaggaatatggtgaggg

SEQ ID NO: 12042 - DNA, 20 bp, synthetic construct
  source 1..20: mol_type = other DNA
ggcaggcatgagtacctgta

SEQ ID NO: 12043 - DNA, 20 bp, synthetic construct
  source 1..20: mol_type = other DNA
gccagcaacgcctcaggtga

SEQ ID NO: 12044 - DNA, 20 bp, synthetic construct
  source 1..20: mol_type = other DNA
gcggcaagaaggaagcgagg

SEQ ID NO: 12045 - DNA, 20 bp, synthetic construct
  source 1..20: mol_type = other DNA
ccagcagaagcaggtgtctc

SEQ ID NO: 12046 - DNA, 20 bp, synthetic construct
  source 1..20: mol_type = other DNA
agcagaggcggtcgtgggtc

SEQ ID NO: 12047 - DNA, 20 bp, synthetic construct
  source 1..20: mol_type = other DNA
gcagggccccaacggcggga

SEQ ID NO: 12048 - DNA, 20 bp, synthetic construct
  source 1..20: mol_type = other DNA
aactacacttcccagacctg

SEQ ID NO: 12049 - DNA, 20 bp, synthetic construct
  source 1..20: mol_type = other DNA
ggagtcaaacttccaggcga

SEQ ID NO: 12050 - DNA, 20 bp, synthetic construct
  source 1..20: mol_type = other DNA
caggaagttgagcctctgga

SEQ ID NO: 12051 - DNA, 20 bp, synthetic construct
  source 1..20: mol_type = other DNA
gctcaaggtgaggggcaccc

SEQ ID NO: 12052 - DNA, 20 bp, synthetic construct
  source 1..20: mol_type = other DNA
aggaggcgtcactttcactt

SEQ ID NO: 12053 - DNA, 20 bp, synthetic construct
  source 1..20: mol_type = other DNA
cactacctgtgcaacgcctg

SEQ ID NO: 12054 - DNA, 20 bp, synthetic construct
  source 1..20: mol_type = other DNA
ggcagtaaaagcatctactg

SEQ ID NO: 12055 - DNA, 20 bp, synthetic construct
  source 1..20: mol_type = other DNA
atgaggttggcccaggcaat

SEQ ID NO: 12056 - DNA, 20 bp, synthetic construct
  source 1..20: mol_type = other DNA
ccgtgcctgacaaagtgctg

SEQ ID NO: 12057 - DNA, 20 bp, synthetic construct
  source 1..20: mol_type = other DNA
gaggctctgaaaatgcaagc

SEQ ID NO: 12058 - DNA, 20 bp, synthetic construct
  source 1..20: mol_type = other DNA
ccactgtgggacggaagaga

SEQ ID NO: 12059 - DNA, 20 bp, synthetic construct
  source 1..20: mol_type = other DNA
agccgtgcctgtgttctctg

SEQ ID NO: 12060 - DNA, 20 bp, synthetic construct
  source 1..20: mol_type = other DNA
gggcagggcctgcatgtgaa

SEQ ID NO: 12061 - DNA, 20 bp, synthetic construct
  source 1..20: mol_type = other DNA
aatgaggcctgtgcggtccc

SEQ ID NO: 12062 - DNA, 20 bp, synthetic construct
  source 1..20: mol_type = other DNA
tgacggccaagaagaactat

SEQ ID NO: 12063 - DNA, 20 bp, synthetic construct
  source 1..20: mol_type = other DNA
agtacctggcagtgtgatat

SEQ ID NO: 12064 - DNA, 20 bp, synthetic construct
  source 1..20: mol_type = other DNA
tcaccttgatagagacaatg

SEQ ID NO: 12065 - DNA, 20 bp, synthetic construct
  source 1..20: mol_type = other DNA
cattaaggccacccagctcc

SEQ ID NO: 12066 - DNA, 20 bp, synthetic construct
  source 1..20: mol_type = other DNA
gaaccagggtacacgcagag

SEQ ID NO: 12067 - DNA, 20 bp, synthetic construct
  source 1..20: mol_type = other DNA
ctccctgccagatatcgagg

SEQ ID NO: 12068 - DNA, 20 bp, synthetic construct
  source 1..20: mol_type = other DNA
gtgaagaggactctctgtcg

SEQ ID NO: 12069 - DNA, 20 bp, synthetic construct
  source 1..20: mol_type = other DNA
cttggagcgccgttccaccg

SEQ ID NO: 12070 - DNA, 20 bp, synthetic construct
  source 1..20: mol_type = other DNA
ctatgcaggatctgcaggaa

SEQ ID NO: 12071 - DNA, 20 bp, synthetic construct
  source 1..20: mol_type = other DNA
caactacctgggtcagcttc

SEQ ID NO: 12072 - DNA, 20 bp, synthetic construct
  source 1..20: mol_type = other DNA
acgccggtcttgatgacgag

SEQ ID NO: 12073 - DNA, 20 bp, synthetic construct
  source 1..20: mol_type = other DNA
gcactgcagtgcaccacaac

SEQ ID NO: 12074 - DNA, 20 bp, synthetic construct
  source 1..20: mol_type = other DNA
atgcagttctgacacactgt

SEQ ID NO: 12075 - DNA, 20 bp, synthetic construct
  source 1..20: mol_type = other DNA
accagcatcacatgggtaga

SEQ ID NO: 12076 - DNA, 20 bp, synthetic construct
  source 1..20: mol_type = other DNA
cgcggttggccttggggttc

SEQ ID NO: 12077 - DNA, 20 bp, synthetic construct
  source 1..20: mol_type = other DNA
gaagtacgagtgtgagtagg

SEQ ID NO: 12078 - DNA, 20 bp, synthetic construct
  source 1..20: mol_type = other DNA
gggtgagagctgagcactcc

SEQ ID NO: 12079 - DNA, 20 bp, synthetic construct
  source 1..20: mol_type = other DNA
ctagagggagaagtaggcaa

SEQ ID NO: 12080 - DNA, 20 bp, synthetic construct
  source 1..20: mol_type = other DNA
caatgagctgaggtataacc

SEQ ID NO: 12081 - DNA, 20 bp, synthetic construct
  source 1..20: mol_type = other DNA
tccggaaagacttgaactca

SEQ ID NO: 12082 - DNA, 20 bp, synthetic construct
  source 1..20: mol_type = other DNA
tcaaactcattacagcgcag

SEQ ID NO: 12083 - DNA, 20 bp, synthetic construct
  source 1..20: mol_type = other DNA
cactcagtttgtgaagtgtt

SEQ ID NO: 12084 - DNA, 20 bp, synthetic construct
  source 1..20: mol_type = other DNA
cctttcctacaagctcgtgg

SEQ ID NO: 12085 - DNA, 20 bp, synthetic construct
  source 1..20: mol_type = other DNA
aatacactgatggctgtgat

SEQ ID NO: 12086 - DNA, 20 bp, synthetic construct
  source 1..20: mol_type = other DNA
ccatgcagctctcgcagaag

SEQ ID NO: 12087 - DNA, 20 bp, synthetic construct
  source 1..20: mol_type = other DNA
tagaggctatctgcagagaa

SEQ ID NO: 12088 - DNA, 20 bp, synthetic construct
  source 1..20: mol_type = other DNA
tcagtcgcctttccacgggc

SEQ ID NO: 12089 - DNA, 20 bp, synthetic construct
  source 1..20: mol_type = other DNA
cgagagcaccgcgggtgagc

SEQ ID NO: 12090 - DNA, 20 bp, synthetic construct
  source 1..20: mol_type = other DNA
gcagaggaagtggaggaaga

SEQ ID NO: 12091 - DNA, 20 bp, synthetic construct
  source 1..20: mol_type = other DNA
actaaagaacagcaacgact

SEQ ID NO: 12092 - DNA, 20 bp, synthetic construct
  source 1..20: mol_type = other DNA
aaagacgcgggacgactctg

SEQ ID NO: 12093 - DNA, 20 bp, synthetic construct
  source 1..20: mol_type = other DNA
ttagaaggtccgggaaatag

SEQ ID NO: 12094 - DNA, 20 bp, synthetic construct
  source 1..20: mol_type = other DNA
gcttcatcagcaccttcatg

SEQ ID NO: 12095 - DNA, 20 bp, synthetic construct
  source 1..20: mol_type = other DNA
tcaccgagcaacagctccgg

SEQ ID NO: 12096 - DNA, 20 bp, synthetic construct
  source 1..20: mol_type = other DNA
ggcggatgaagtaggacttc

SEQ ID NO: 12097 - DNA, 20 bp, synthetic construct
  source 1..20: mol_type = other DNA
aggcggaggcatccttacca

SEQ ID NO: 12098 - DNA, 20 bp, synthetic construct
  source 1..20: mol_type = other DNA
tcacaaacaatgcaaagatc

SEQ ID NO: 12099 - DNA, 20 bp, synthetic construct
  source 1..20: mol_type = other DNA
caagtggggcttcggcgcca

SEQ ID NO: 12100 - DNA, 20 bp, synthetic construct
  source 1..20: mol_type = other DNA
ctactcggagggaagggtga

SEQ ID NO: 12101 - DNA, 20 bp, synthetic construct
  source 1..20: mol_type = other DNA
actcaaacaccaggcagatg

SEQ ID NO: 12102 - DNA, 20 bp, synthetic construct
  source 1..20: mol_type = other DNA
ccaattctcatcagtgacac

SEQ ID NO: 12103 - DNA, 20 bp, synthetic construct
  source 1..20: mol_type = other DNA
tccagtgcctcctcgttgat

SEQ ID NO: 12104 - DNA, 20 bp, synthetic construct
  source 1..20: mol_type = other DNA
tgagggtcgcgccggccgga

SEQ ID NO: 12105 - DNA, 20 bp, synthetic construct
  source 1..20: mol_type = other DNA
caactcactgtggacttgga

SEQ ID NO: 12106 - DNA, 20 bp, synthetic construct
  source 1..20: mol_type = other DNA
cctggatctttactacactg

SEQ ID NO: 12107 - DNA, 20 bp, synthetic construct
  source 1..20: mol_type = other DNA
tggctcctaccagttctcca

SEQ ID NO: 12108 - DNA, 20 bp, synthetic construct
  source 1..20: mol_type = other DNA
gctgctctcgcggatgagga

SEQ ID NO: 12109 - DNA, 20 bp, synthetic construct
  source 1..20: mol_type = other DNA
ctctctgcagctaaaaggga

SEQ ID NO: 12110 - DNA, 20 bp, synthetic construct
  source 1..20: mol_type = other DNA
cagcagtgtcccacagcccc

SEQ ID NO: 12111 - DNA, 20 bp, synthetic construct
  source 1..20: mol_type = other DNA
gtgggccaaggctcatggta

SEQ ID NO: 12112 - DNA, 20 bp, synthetic construct
  source 1..20: mol_type = other DNA
gcatcatagatgccagacaa

SEQ ID NO: 12113 - DNA, 20 bp, synthetic construct
  source 1..20: mol_type = other DNA
gccagtgacaccatcatgta

SEQ ID NO: 12114 - DNA, 20 bp, synthetic construct
  source 1..20: mol_type = other DNA
gatggtaagcctcatcacag

SEQ ID NO: 12115 - DNA, 20 bp, synthetic construct
  source 1..20: mol_type = other DNA
ggtcggaccagaagaagtcg

SEQ ID NO: 12116 - DNA, 20 bp, synthetic construct
  source 1..20: mol_type = other DNA
ggctccggcatgtgcaaggc

SEQ ID NO: 12117 - DNA, 20 bp, synthetic construct
  source 1..20: mol_type = other DNA
tgccatgagtgcaacttgcc

SEQ ID NO: 12118 - DNA, 20 bp, synthetic construct
  source 1..20: mol_type = other DNA
ctgtgatgtggcgatctaca

SEQ ID NO: 12119 - DNA, 20 bp, synthetic construct
  source 1..20: mol_type = other DNA
ttctgatgaaatcagtaaca

SEQ ID NO: 12120 - DNA, 20 bp, synthetic construct
  source 1..20: mol_type = other DNA
gctggcccagctgagccccc

SEQ ID NO: 12121 - DNA, 20 bp, synthetic construct
  source 1..20: mol_type = other DNA
caagcggcagcagcttagct

SEQ ID NO: 12122 - DNA, 20 bp, synthetic construct
  source 1..20: mol_type = other DNA
cgggcctgcaggtgcagatg

SEQ ID NO: 12123 - DNA, 20 bp, synthetic construct
  source 1..20: mol_type = other DNA
tctgtagagaatagtgacag

SEQ ID NO: 12124 - DNA, 20 bp, synthetic construct
  source 1..20: mol_type = other DNA
cttgggcagacctggaggac

SEQ ID NO: 12125 - DNA, 20 bp, synthetic construct
  source 1..20: mol_type = other DNA
gctaaagctcagctctgtga

SEQ ID NO: 12126 - DNA, 20 bp, synthetic construct
  source 1..20: mol_type = other DNA
ggtgtggaagaagggggtgg

SEQ ID NO: 12127 - DNA, 20 bp, synthetic construct
  source 1..20: mol_type = other DNA
caccagtcaaaccaagcacg

SEQ ID NO: 12128 - DNA, 20 bp, synthetic construct
  source 1..20: mol_type = other DNA
gtacatggccggggtgttga

SEQ ID NO: 12129 - DNA, 20 bp, synthetic construct
  source 1..20: mol_type = other DNA
tttaccaatgtcactcagca

SEQ ID NO: 12130 - DNA, 20 bp, synthetic construct
  source 1..20: mol_type = other DNA
gccttccacgtcttgggatc

SEQ ID NO: 12131 - DNA, 20 bp, synthetic construct
  source 1..20: mol_type = other DNA
gcaagtcgaccacctcaagc

SEQ ID NO: 12132 - DNA, 20 bp, synthetic construct
  source 1..20: mol_type = other DNA
tccaccattgccacctgcgg

SEQ ID NO: 12133 - DNA, 20 bp, synthetic construct
  source 1..20: mol_type = other DNA
gccgtcttcccctccatcgt

SEQ ID NO: 12134 - DNA, 20 bp, synthetic construct
  source 1..20: mol_type = other DNA
aagtggagcgcaagcggctg

SEQ ID NO: 12135 - DNA, 20 bp, synthetic construct
  source 1..20: mol_type = other DNA
accactggtagtgaggaata

SEQ ID NO: 12136 - DNA, 20 bp, synthetic construct
  source 1..20: mol_type = other DNA
ttctgctcggagctgcggcg

SEQ ID NO: 12137 - DNA, 20 bp, synthetic construct
  source 1..20: mol_type = other DNA
cgctgcttccaggaatgact

SEQ ID NO: 12138 - DNA, 20 bp, synthetic construct
  source 1..20: mol_type = other DNA
atgggcaaggtacgagtggg

SEQ ID NO: 12139 - DNA, 20 bp, synthetic construct
  source 1..20: mol_type = other DNA
agcagaaacggcgcgagcag

SEQ ID NO: 12140 - DNA, 20 bp, synthetic construct
  source 1..20: mol_type = other DNA
tcacggctccttcctcatcc

SEQ ID NO: 12141 - DNA, 20 bp, synthetic construct
  source 1..20: mol_type = other DNA
ccccctgcagctggagccct

SEQ ID NO: 12142 - DNA, 20 bp, synthetic construct
  source 1..20: mol_type = other DNA
gtcgaacatcaagtagaaaa

SEQ ID NO: 12143 - DNA, 20 bp, synthetic construct
  source 1..20: mol_type = other DNA
gccagcgtatcgtagaggac

SEQ ID NO: 12144 - DNA, 20 bp, synthetic construct
  source 1..20: mol_type = other DNA
gtttgctggctgactccacc

SEQ ID NO: 12145 - DNA, 20 bp, synthetic construct
  source 1..20: mol_type = other DNA
gagcacctctttgcccaggt

SEQ ID NO: 12146 - DNA, 20 bp, synthetic construct
  source 1..20: mol_type = other DNA
gcgcaacaagaaggtcccgt

SEQ ID NO: 12147 - DNA, 20 bp, synthetic construct
  source 1..20: mol_type = other DNA
caccaccgctctcggttccg

SEQ ID NO: 12148 - DNA, 20 bp, synthetic construct
  source 1..20: mol_type = other DNA
tagccagaccgcagtgcaag

SEQ ID NO: 12149 - DNA, 20 bp, synthetic construct
  source 1..20: mol_type = other DNA
tcccaggcatgtcagccacg

SEQ ID NO: 12150 - DNA, 20 bp, synthetic construct
  source 1..20: mol_type = other DNA
tccaggtcggtctactgcta

SEQ ID NO: 12151 - DNA, 20 bp, synthetic construct
  source 1..20: mol_type = other DNA
tcacactttagttttccgtt

SEQ ID NO: 12152 - DNA, 20 bp, synthetic construct
  source 1..20: mol_type = other DNA
ttatgggcgaagtcctttgg

SEQ ID NO: 12153 - DNA, 20 bp, synthetic construct
  source 1..20: mol_type = other DNA
cgccagtgcctgcgctcgct

SEQ ID NO: 12154 - DNA, 20 bp, synthetic construct
  source 1..20: mol_type = other DNA
ttctcacctccagcagcagg

SEQ ID NO: 12155 - DNA, 20 bp, synthetic construct
  source 1..20: mol_type = other DNA
ccaggtggcccagaccaccg

SEQ ID NO: 12156 - DNA, 20 bp, synthetic construct
  source 1..20: mol_type = other DNA
taaggccacccagctcctgg

SEQ ID NO: 12157 - DNA, 20 bp, synthetic construct
  source 1..20: mol_type = other DNA
tgtcctggtcccagttcaac

SEQ ID NO: 12158 - DNA, 20 bp, synthetic construct
  source 1..20: mol_type = other DNA
actgagtacatggccaaggt

SEQ ID NO: 12159 - DNA, 20 bp, synthetic construct
  source 1..20: mol_type = other DNA
acctgcaggccgcgagcccg

SEQ ID NO: 12160 - DNA, 20 bp, synthetic construct
  source 1..20: mol_type = other DNA
aatctcaacacatttgattc

SEQ ID NO: 12161 - DNA, 20 bp, synthetic construct
  source 1..20: mol_type = other DNA
gcgagagcaccgcgggtgag

SEQ ID NO: 12162 - DNA, 20 bp, synthetic construct
  source 1..20: mol_type = other DNA
atgcctgggcgtccatcctg

SEQ ID NO: 12163 - DNA, 20 bp, synthetic construct
  source 1..20: mol_type = other DNA
gagcaggcgaccgcgcagcg

SEQ ID NO: 12164 - DNA, 20 bp, synthetic construct
  source 1..20: mol_type = other DNA
gccttccttcttcatagtca

SEQ ID NO: 12165 - DNA, 20 bp, synthetic construct
  source 1..20: mol_type = other DNA
cccgccggcagcagctgggc

SEQ ID NO: 12166 - DNA, 20 bp, synthetic construct
  source 1..20: mol_type = other DNA
gtattcttagggccctcctc

SEQ ID NO: 12167 - DNA, 20 bp, synthetic construct
  source 1..20: mol_type = other DNA
tatttcctggatgcgaagac

SEQ ID NO: 12168 - DNA, 20 bp, synthetic construct
  source 1..20: mol_type = other DNA
cccactgaccttctccaggg

SEQ ID NO: 12169 - DNA, 20 bp, synthetic construct
  source 1..20: mol_type = other DNA
gctcagcgcgcagtaccagc

SEQ ID NO: 12170 - DNA, 20 bp, synthetic construct
  source 1..20: mol_type = other DNA
tgtcggtgcgcgagctgaac

SEQ ID NO: 12171 - DNA, 20 bp, synthetic construct
  source 1..20: mol_type = other DNA
tcagggacacagggcacggg

SEQ ID NO: 12172 - DNA, 20 bp, synthetic construct
  source 1..20: mol_type = other DNA
ctagagattcattccggtag

SEQ ID NO: 12173 - DNA, 20 bp, synthetic construct
  source 1..20: mol_type = other DNA
ttgggaaggacaccattccg

SEQ ID NO: 12174 - DNA, 20 bp, synthetic construct
  source 1..20: mol_type = other DNA
ggacgccggtcttgatgacg

SEQ ID NO: 12175 - DNA, 20 bp, synthetic construct
  source 1..20: mol_type = other DNA
tgtgctgcaagacacaaggg

SEQ ID NO: 12176 - DNA, 20 bp, synthetic construct
  source 1..20: mol_type = other DNA
ttcagtttcaccacctggga

SEQ ID NO: 12177 - DNA, 20 bp, synthetic construct
  source 1..20: mol_type = other DNA
ctcgtagctcgccacactgt

SEQ ID NO: 12178 - DNA, 20 bp, synthetic construct
  source 1..20: mol_type = other DNA
aggacaaagcctgcaggtac

SEQ ID NO: 12179 - DNA, 20 bp, synthetic construct
  source 1..20: mol_type = other DNA
ggtctagagcagcgagaggg

SEQ ID NO: 12180 - DNA, 20 bp, synthetic construct
  source 1..20: mol_type = other DNA
gcaaaggtagctctgccgag

SEQ ID NO: 12181 - DNA, 20 bp, synthetic construct
  source 1..20: mol_type = other DNA
ccagtggtggtgatcgttca

SEQ ID NO: 12182 - DNA, 20 bp, synthetic construct
  source 1..20: mol_type = other DNA
ccctttctacggctcaaccc

SEQ ID NO: 12183 - DNA, 20 bp, synthetic construct
  source 1..20: mol_type = other DNA
catggctccgacgctggggg

SEQ ID NO: 12184 - DNA, 20 bp, synthetic construct
  source 1..20: mol_type = other DNA
atcctgcacccactaaaatc

SEQ ID NO: 12185 - DNA, 20 bp, synthetic construct
  source 1..20: mol_type = other DNA
ctgtgtgaatggcccagctc

SEQ ID NO: 12186 - DNA, 20 bp, synthetic construct
  source 1..20: mol_type = other DNA
gtgccaattctgcgaggagg

SEQ ID NO: 12187 - DNA, 20 bp, synthetic construct
  source 1..20: mol_type = other DNA
ccatcatggcctgctggacc

SEQ ID NO: 12188 - DNA, 20 bp, synthetic construct
  source 1..20: mol_type = other DNA
ccgccatgcccgccagcttc

SEQ ID NO: 12189 - DNA, 20 bp, synthetic construct
  source 1..20: mol_type = other DNA
caagcaggacaacaagaaaa

SEQ ID NO: 12190 - DNA, 20 bp, synthetic construct
  source 1..20: mol_type = other DNA
gtgcactgccacagactgcc

SEQ ID NO: 12191 - DNA, 20 bp, synthetic construct
  source 1..20: mol_type = other DNA
gaacagctcatcgtccctgc

SEQ ID NO: 12192 - DNA, 20 bp, synthetic construct
  source 1..20: mol_type = other DNA
tgcctggggtcaccttgcag

SEQ ID NO: 12193 - DNA, 20 bp, synthetic construct
  source 1..20: mol_type = other DNA
tcttcaggatgttggtggaa

SEQ ID NO: 12194 - DNA, 20 bp, synthetic construct
  source 1..20: mol_type = other DNA
tggatagcaacgtacatggc

SEQ ID NO: 12195 - DNA, 20 bp, synthetic construct
  source 1..20: mol_type = other DNA
tcgagaccccaagaccgagc

SEQ ID NO: 12196 - DNA, 20 bp, synthetic construct
  source 1..20: mol_type = other DNA
aggaactcctggagccaagg

SEQ ID NO: 12197 - DNA, 20 bp, synthetic construct
  source 1..20: mol_type = other DNA
aaccactgggcaggtgggtg

SEQ ID NO: 12198 - DNA, 20 bp, synthetic construct
  source 1..20: mol_type = other DNA
cagggccagctctgtccact

SEQ ID NO: 12199 - DNA, 20 bp, synthetic construct
  source 1..20: mol_type = other DNA
tcccggctcagacgctcctg

SEQ ID NO: 12200 - DNA, 20 bp, synthetic construct
  source 1..20: mol_type = other DNA
agcagcgcttcggggccatg

SEQ ID NO: 12201 - DNA, 20 bp, synthetic construct
  source 1..20: mol_type = other DNA
tgcttgcccgcgtgcttcca

SEQ ID NO: 12202 - DNA, 20 bp, synthetic construct
  source 1..20: mol_type = other DNA
attgggccatgtttctctgc

SEQ ID NO: 12203 - DNA, 20 bp, synthetic construct
  source 1..20: mol_type = other DNA
tacaagatgctgaatggtac

SEQ ID NO: 12204 - DNA, 20 bp, synthetic construct
  source 1..20: mol_type = other DNA
aactccaattttatgaggac

SEQ ID NO: 12205 - DNA, 20 bp, synthetic construct
  source 1..20: mol_type = other DNA
catgcacctggatgcccttc

SEQ ID NO: 12206 - DNA, 20 bp, synthetic construct
  source 1..20: mol_type = other DNA
atcctcatccgcatcctcac

SEQ ID NO: 12207 - DNA, 20 bp, synthetic construct
  source 1..20: mol_type = other DNA
gccgcatatgccctaggaaa

SEQ ID NO: 12208 - DNA, 20 bp, synthetic construct
  source 1..20: mol_type = other DNA
ctccttgaaggggaactgca

SEQ ID NO: 12209 - DNA, 20 bp, synthetic construct
  source 1..20: mol_type = other DNA
ccgggcagagacattgccat

SEQ ID NO: 12210 - DNA, 20 bp, synthetic construct
  source 1..20: mol_type = other DNA
cagaatctaaagggcagaag

SEQ ID NO: 12211 - DNA, 20 bp, synthetic construct
  source 1..20: mol_type = other DNA
attgttccttgaggagaaag

SEQ ID NO: 12212 - DNA, 20 bp, synthetic construct
  source 1..20: mol_type = other DNA
gcagaagaaggcagagcacc

SEQ ID NO: 12213 - DNA, 20 bp, synthetic construct
  source 1..20: mol_type = other DNA
ttcattagcattcggccttg

SEQ ID NO: 12214 - DNA, 20 bp, synthetic construct
  source 1..20: mol_type = other DNA
gctggccccagactttgttg

SEQ ID NO: 12215 - DNA, 20 bp, synthetic construct
  source 1..20: mol_type = other DNA
tcatccaggtgagggcctgg

SEQ ID NO: 12216 - DNA, 20 bp, synthetic construct
  source 1..20: mol_type = other DNA
tgccacctgtggatacaggc

SEQ ID NO: 12217 - DNA, 20 bp, synthetic construct
  source 1..20: mol_type = other DNA
tttcccaggaactatgaaga

SEQ ID NO: 12218 - DNA, 20 bp, synthetic construct
  source 1..20: mol_type = other DNA
gctggagacagaaagaagaa

SEQ ID NO: 12219 - DNA, 20 bp, synthetic construct
  source 1..20: mol_type = other DNA
agcatcaagtgcgtggtggt

SEQ ID NO: 12220 - DNA, 20 bp, synthetic construct
  source 1..20: mol_type = other DNA
gacctgtggagttcaggaaa

SEQ ID NO: 12221 - DNA, 20 bp, synthetic construct
  source 1..20: mol_type = other DNA
taaaagccctaacacacgga

SEQ ID NO: 12222 - DNA, 20 bp, synthetic construct
  source 1..20: mol_type = other DNA
gcggttctgttcccgagtgc

SEQ ID NO: 12223 - DNA, 20 bp, synthetic construct
  source 1..20: mol_type = other DNA
gagactgaccagccttcaga

SEQ ID NO: 12224 - DNA, 20 bp, synthetic construct
  source 1..20: mol_type = other DNA
gtctgtaccagcatcgggtg

SEQ ID NO: 12225 - DNA, 20 bp, synthetic construct
  source 1..20: mol_type = other DNA
gttacttggcttaacccttc

SEQ ID NO: 12226 - DNA, 20 bp, synthetic construct
  source 1..20: mol_type = other DNA
gctgcaggaggcgcagcggc

SEQ ID NO: 12227 - DNA, 20 bp, synthetic construct
  source 1..20: mol_type = other DNA
aaaaactcactggagctctg

SEQ ID NO: 12228 - DNA, 20 bp, synthetic construct
  source 1..20: mol_type = other DNA
actgcacccacttgccgctc

SEQ ID NO: 12229 - DNA, 20 bp, synthetic construct
  source 1..20: mol_type = other DNA
cagcccggagccgagtcgga

SEQ ID NO: 12230 - DNA, 20 bp, synthetic construct
  source 1..20: mol_type = other DNA
acaggttgtgggacagcacc

SEQ ID NO: 12231 - DNA, 20 bp, synthetic construct
  source 1..20: mol_type = other DNA
tcagcaggccagcaggtagg

SEQ ID NO: 12232 - DNA, 20 bp, synthetic construct
  source 1..20: mol_type = other DNA
gtcgttctgtaggaaatggg

SEQ ID NO: 12233 - DNA, 20 bp, synthetic construct
  source 1..20: mol_type = other DNA
gtacgcaggccccatggagc

SEQ ID NO: 12234 - DNA, 20 bp, synthetic construct
  source 1..20: mol_type = other DNA
ggcctaaaagacataaaata

SEQ ID NO: 12235 - DNA, 20 bp, synthetic construct
  source 1..20: mol_type = other DNA
ccttaccaatctcctagctc

SEQ ID NO: 12236 - DNA, 20 bp, synthetic construct
  source 1..20: mol_type = other DNA
ggggccgccattacatccac

SEQ ID NO: 12237 - DNA, 20 bp, synthetic construct
  source 1..20: mol_type = other DNA
agtggattgaaagccaagca

SEQ ID NO: 12238 - DNA, 20 bp, synthetic construct
  source 1..20: mol_type = other DNA
tccagcgacccacaatccca

SEQ ID NO: 12239 - DNA, 20 bp, synthetic construct
  source 1..20: mol_type = other DNA
gtgatggagtacctcaacgg

SEQ ID NO: 12240 - DNA, 20 bp, synthetic construct
  source 1..20: mol_type = other DNA
atgagccgcatttaccccaa

SEQ ID NO: 12241 - DNA, 20 bp, synthetic construct
  source 1..20: mol_type = other DNA
agatacaaaaaaggaatcag

SEQ ID NO: 12242 - DNA, 20 bp, synthetic construct
  source 1..20: mol_type = other DNA
ttggggaagtaaaagctgtg

SEQ ID NO: 12243 - DNA, 20 bp, synthetic construct
  source 1..20: mol_type = other DNA
ctgtaaacaagaggggcaca

SEQ ID NO: 12244 - DNA, 20 bp, synthetic construct
  source 1..20: mol_type = other DNA
ctggctcaggggtgggtagg

SEQ ID NO: 12245 - DNA, 20 bp, synthetic construct
  source 1..20: mol_type = other DNA
tttcctatgcccgggaacca

SEQ ID NO: 12246 - DNA, 20 bp, synthetic construct
  source 1..20: mol_type = other DNA
ggttctcatgctgaatggtg

SEQ ID NO: 12247 - DNA, 20 bp, synthetic construct
  source 1..20: mol_type = other DNA
gggcacaccttgcattggta

SEQ ID NO: 12248 - DNA, 20 bp, synthetic construct
  source 1..20: mol_type = other DNA
ctggaccaaggagcattgtg

SEQ ID NO: 12249 - DNA, 20 bp, synthetic construct
  source 1..20: mol_type = other DNA
tggcaaagtccagactgtgg

SEQ ID NO: 12250 - DNA, 20 bp, synthetic construct
  source 1..20: mol_type = other DNA
gtccagcttaacgcacttca

SEQ ID NO: 12251 - DNA, 20 bp, synthetic construct
  source 1..20: mol_type = other DNA
ccgcacatgttgcactcaaa

SEQ ID NO: 12252 - DNA, 20 bp, synthetic construct
  source 1..20: mol_type = other DNA
tgatgccaagtttcttctcc

SEQ ID NO: 12253 - DNA, 20 bp, synthetic construct
  source 1..20: mol_type = other DNA
gcccactcaccaggtcactg

SEQ ID NO: 12254 - DNA, 20 bp, synthetic construct
  source 1..20: mol_type = other DNA
gggttccccaccagaaaatg

SEQ ID NO: 12255 - DNA, 20 bp, synthetic construct
  source 1..20: mol_type = other DNA
gaaataggaaggtcactcct

SEQ ID NO: 12256 - DNA, 20 bp, synthetic construct
  source 1..20: mol_type = other DNA
agaggtactcaaatgaggct

SEQ ID NO: 12257 - DNA, 20 bp, synthetic construct
  source 1..20: mol_type = other DNA
gtcagacgtctggagcttcg

SEQ ID NO: 12258 - DNA, 20 bp, synthetic construct
  source 1..20: mol_type = other DNA
tgtccattgagaacctggtg

SEQ ID NO: 12259 - DNA, 20 bp, synthetic construct
  source 1..20: mol_type = other DNA
acctgtttatgcacatctgt

SEQ ID NO: 12260 - DNA, 20 bp, synthetic construct
  source 1..20: mol_type = other DNA
gccccggttgctctgcactt

SEQ ID NO: 12261 - DNA, 20 bp, synthetic construct
  source 1..20: mol_type = other DNA
gggctaccagggctaccccg

SEQ ID NO: 12262 - DNA, 20 bp, synthetic construct
  source 1..20: mol_type = other DNA
ttcctggagaaaagagtaat

SEQ ID NO: 12263 - DNA, 20 bp, synthetic construct
  source 1..20: mol_type = other DNA
cctcaccgagcaacagctcc

SEQ ID NO: 12264 - DNA, 20 bp, synthetic construct
  source 1..20: mol_type = other DNA
ggtactccatgccctgcggg

SEQ ID NO: 12265 - DNA, 20 bp, synthetic construct
  source 1..20: mol_type = other DNA
cgtggtgtcagctatggccc

SEQ ID NO: 12266 - DNA, 20 bp, synthetic construct
  source 1..20: mol_type = other DNA
gagcggcagctcctggcgcc

SEQ ID NO: 12267 - DNA, 20 bp, synthetic construct
  source 1..20: mol_type = other DNA
ctgtcaggagtcggccaggt

SEQ ID NO: 12268 - DNA, 20 bp, synthetic construct
  source 1..20: mol_type = other DNA
cggtgaggtccccactgacc

SEQ ID NO: 12269 - DNA, 20 bp, synthetic construct
  source 1..20: mol_type = other DNA
ttacatctccagcgaaggtg

SEQ ID NO: 12270 - DNA, 20 bp, synthetic construct
  source 1..20: mol_type = other DNA
ccactactttgaaagacacc

SEQ ID NO: 12271 - DNA, 20 bp, synthetic construct
  source 1..20: mol_type = other DNA
gtggagctctgtgggcgggt

SEQ ID NO: 12272 - DNA, 20 bp, synthetic construct
  source 1..20: mol_type = other DNA
ggccgggaaaagtgattcga

SEQ ID NO: 12273 - DNA, 20 bp, synthetic construct
  source 1..20: mol_type = other DNA
tggaggtgaggaggccacag

SEQ ID NO: 12274 - DNA, 20 bp, synthetic construct
  source 1..20: mol_type = other DNA
caagaagcagatcctgcgca

SEQ ID NO: 12275 - DNA, 20 bp, synthetic construct
  source 1..20: mol_type = other DNA
caaaggtagctctgccgagt

SEQ ID NO: 12276 - DNA, 20 bp, synthetic construct
  source 1..20: mol_type = other DNA
cggagctgggccattcacac

SEQ ID NO: 12277 - DNA, 20 bp, synthetic construct
  source 1..20: mol_type = other DNA
ccaaccaggcctggcatgcg

SEQ ID NO: 12278 - DNA, 20 bp, synthetic construct
  source 1..20: mol_type = other DNA
ctcaccgatgagggagttga

SEQ ID NO: 12279 - DNA, 20 bp, synthetic construct
  source 1..20: mol_type = other DNA
acaggcagagctggaaggac

SEQ ID NO: 12280 - DNA, 20 bp, synthetic construct
  source 1..20: mol_type = other DNA
acctgcagaattgttggcca

SEQ ID NO: 12281 - DNA, 20 bp, synthetic construct
  source 1..20: mol_type = other DNA
cagttgatctcccgaaacaa

SEQ ID NO: 12282 - DNA, 20 bp, synthetic construct
  source 1..20: mol_type = other DNA
caagggattaatagtatggc

SEQ ID NO: 12283 - DNA, 20 bp, synthetic construct
  source 1..20: mol_type = other DNA
cgtgatccaggaagagcacc

SEQ ID NO: 12284 - DNA, 20 bp, synthetic construct
  source 1..20: mol_type = other DNA
caccgtgctggccaagacgc

SEQ ID NO: 12285 - DNA, 20 bp, synthetic construct
  source 1..20: mol_type = other DNA
tgcagtccatcatccaggtg

SEQ ID NO: 12286 - DNA, 20 bp, synthetic construct
  source 1..20: mol_type = other DNA
cgccgcagtgcgagttcctg

SEQ ID NO: 12287 - DNA, 20 bp, synthetic construct
  source 1..20: mol_type = other DNA
ggcaaggagtgggtctgcgg

SEQ ID NO: 12288 - DNA, 20 bp, synthetic construct
  source 1..20: mol_type = other DNA
agcccagagctccagtccga

SEQ ID NO: 12289 - DNA, 20 bp, synthetic construct
  source 1..20: mol_type = other DNA
ccgtgccagtccccacagca

SEQ ID NO: 12290 - DNA, 20 bp, synthetic construct
  source 1..20: mol_type = other DNA
gcatgctgccaagcatggct

SEQ ID NO: 12291 - DNA, 20 bp, synthetic construct
  source 1..20: mol_type = other DNA
atcaacagcaacagcaggtg

SEQ ID NO: 12292 - DNA, 20 bp, synthetic construct
  source 1..20: mol_type = other DNA
tttccgggatctgaatcaca

SEQ ID NO: 12293 - DNA, 20 bp, synthetic construct
  source 1..20: mol_type = other DNA
tcataaaattggagtttctg

SEQ ID NO: 12294 - DNA, 20 bp, synthetic construct
  source 1..20: mol_type = other DNA
gtggaggtgaggaggccaca

SEQ ID NO: 12295 - DNA, 20 bp, synthetic construct
  source 1..20: mol_type = other DNA
ctccacgtccagcgcggtaa

SEQ ID NO: 12296 - DNA, 20 bp, synthetic construct
  source 1..20: mol_type = other DNA
gcagcatgttggggatcccg

SEQ ID NO: 12297 - DNA, 20 bp, synthetic construct
  source 1..20: mol_type = other DNA
gcaggtgagtcacggctgca

SEQ ID NO: 12298 - DNA, 20 bp, synthetic construct
  source 1..20: mol_type = other DNA
gacggccctccagcagaagc

SEQ ID NO: 12299 - DNA, 20 bp, synthetic construct
  source 1..20: mol_type = other DNA
tatctcatcattggcatatg

SEQ ID NO: 12300 - DNA, 20 bp, synthetic construct
  source 1..20: mol_type = other DNA
gggagtccgggtggacgtac

SEQ ID NO: 12301 - DNA, 20 bp, synthetic construct
  source 1..20: mol_type = other DNA
ccgcagctgcagctgctgag

SEQ ID NO: 12302 - DNA, 20 bp, synthetic construct
  source 1..20: mol_type = other DNA
ggcacggtaagaggcgagac

SEQ ID NO: 12303 - DNA, 20 bp, synthetic construct
  source 1..20: mol_type = other DNA
agcccgaagcagaccgagtg

SEQ ID NO: 12304 - DNA, 20 bp, synthetic construct
  source 1..20: mol_type = other DNA
tagagcactgcagtgagggc

SEQ ID NO: 12305 - DNA, 20 bp, synthetic construct
  source 1..20: mol_type = other DNA
atttcaggtggccaggagat

SEQ ID NO: 12306 - DNA, 20 bp, synthetic construct
  source 1..20: mol_type = other DNA
gcggagctggcggggagtcg

SEQ ID NO: 12307 - DNA, 20 bp, synthetic construct
  source 1..20: mol_type = other DNA
atcaccgagtccggccgcat

SEQ ID NO: 12308 - DNA, 20 bp, synthetic construct
  source 1..20: mol_type = other DNA
ggaaggtgaagctctcctgt

SEQ ID NO: 12309 - DNA, 20 bp, synthetic construct
  source 1..20: mol_type = other DNA
gaacgatcaccaccactggc

SEQ ID NO: 12310 - DNA, 20 bp, synthetic construct
  source 1..20: mol_type = other DNA
acctgaggacgcactccggt

SEQ ID NO: 12311 - DNA, 20 bp, synthetic construct
  source 1..20: mol_type = other DNA
cgagagagtgggcaggtaca

SEQ ID NO: 12312 - DNA, 20 bp, synthetic construct
  source 1..20: mol_type = other DNA
ggtgagtgggcgcctccccg

SEQ ID NO: 12313 - DNA, 20 bp, synthetic construct
  source 1..20: mol_type = other DNA
atcaagcgtgctgaccggcg

SEQ ID NO: 12314 - DNA, 20 bp, synthetic construct
  source 1..20: mol_type = other DNA
actcaccgatgagggagttg

SEQ ID NO: 12315 - DNA, 20 bp, synthetic construct
  source 1..20: mol_type = other DNA
cagtctgcagccaggagagc

SEQ ID NO: 12316 - DNA, 20 bp, synthetic construct
  source 1..20: mol_type = other DNA
tggcgtgtgggatctctggc

SEQ ID NO: 12317 - DNA, 20 bp, synthetic construct
  source 1..20: mol_type = other DNA
cagcgtcttggccagcacgg

SEQ ID NO: 12318 - DNA, 20 bp, synthetic construct
  source 1..20: mol_type = other DNA
cagttccttgcgcagggcca

SEQ ID NO: 12319 - DNA, 20 bp, synthetic construct
  source 1..20: mol_type = other DNA
ccaaggggcagggaaagacg

SEQ ID NO: 12320 - DNA, 20 bp, synthetic construct
  source 1..20: mol_type = other DNA
ccaaggctgtgattcagtct

SEQ ID NO: 12321 - DNA, 20 bp, synthetic construct
  source 1..20: mol_type = other DNA
gaaggtgaagctctcctgtg

SEQ ID NO: 12322 - DNA, 20 bp, synthetic construct
  source 1..20: mol_type = other DNA
caggaactggtgaaagctaa

SEQ ID NO: 12323 - DNA, 20 bp, synthetic construct
  source 1..20: mol_type = other DNA
gcccagatgaaaacgagaag

SEQ ID NO: 12324 - DNA, 20 bp, synthetic construct
  source 1..20: mol_type = other DNA
tcagccacatagtatcgctt

SEQ ID NO: 12325 - DNA, 20 bp, synthetic construct
  source 1..20: mol_type = other DNA
tgaggatccaaggtgaggcg

SEQ ID NO: 12326 - DNA, 20 bp, synthetic construct
  source 1..20: mol_type = other DNA
ggtgcctcttcctcctcatt

SEQ ID NO: 12327 - DNA, 20 bp, synthetic construct
  source 1..20: mol_type = other DNA
gtcctccagctcctatatga

SEQ ID NO: 12328 - DNA, 20 bp, synthetic construct
  source 1..20: mol_type = other DNA
catccacagctaccgaggta

SEQ ID NO: 12329 - DNA, 20 bp, synthetic construct
  source 1..20: mol_type = other DNA
acttcctccagcagcctcgg

SEQ ID NO: 12330 - DNA, 20 bp, synthetic construct
  source 1..20: mol_type = other DNA
cgagtgagtgctcaggcctg

SEQ ID NO: 12331 - DNA, 20 bp, synthetic construct
  source 1..20: mol_type = other DNA
ctccagtgcctcctcgttga

SEQ ID NO: 12332 - DNA, 20 bp, synthetic construct
  source 1..20: mol_type = other DNA
agcagtaccgcgtggtgagt

SEQ ID NO: 12333 - DNA, 20 bp, synthetic construct
  source 1..20: mol_type = other DNA
agcgcttttcaaaatgtgtg

SEQ ID NO: 12334 - DNA, 20 bp, synthetic construct
  source 1..20: mol_type = other DNA
gaggaagatcctcatcaagg

SEQ ID NO: 12335 - DNA, 20 bp, synthetic construct
  source 1..20: mol_type = other DNA
tcttccccagcgaccacttt

SEQ ID NO: 12336 - DNA, 20 bp, synthetic construct
  source 1..20: mol_type = other DNA
tctgttatccaatacctaca

SEQ ID NO: 12337 - DNA, 20 bp, synthetic construct
  source 1..20: mol_type = other DNA
aaaggaagtggccgatcttg

SEQ ID NO: 12338 - DNA, 20 bp, synthetic construct
  source 1..20: mol_type = other DNA
tcaccttggtgctgcaagtg

SEQ ID NO: 12339 - DNA, 20 bp, synthetic construct
  source 1..20: mol_type = other DNA
gggagtggatacggcagtgc

SEQ ID NO: 12340 - DNA, 20 bp, synthetic construct
  source 1..20: mol_type = other DNA
ggcccggatggcgcgagagc

SEQ ID NO: 12341 - DNA, 20 bp, synthetic construct
  source 1..20: mol_type = other DNA
atcatatcagtactcaggat

SEQ ID NO: 12342 - DNA, 20 bp, synthetic construct
  source 1..20: mol_type = other DNA
ctgcagggaaggaaggcgct

SEQ ID NO: 12343 - DNA, 20 bp, synthetic construct
  source 1..20: mol_type = other DNA
ggctgagatggagctgaagg

SEQ ID NO: 12344 - DNA, 20 bp, synthetic construct
  source 1..20: mol_type = other DNA
gggcatggcctacctggaag

SEQ ID NO: 12345 - DNA, 20 bp, synthetic construct
  source 1..20: mol_type = other DNA
ctcatcagccaagacaaggc

SEQ ID NO: 12346 - DNA, 20 bp, synthetic construct
  source 1..20: mol_type = other DNA
cttgaggtttcagctctaac

SEQ ID NO: 12347 - DNA, 20 bp, synthetic construct
  source 1..20: mol_type = other DNA
tgaaaaggggattatcctgg

SEQ ID NO: 12348 - DNA, 20 bp, synthetic construct
  source 1..20: mol_type = other DNA
acagcactcaacgggtatag

SEQ ID NO: 12349 - DNA, 20 bp, synthetic construct
  source 1..20: mol_type = other DNA
gcagcagcagcacagcgtgc

SEQ ID NO: 12350 - DNA, 20 bp, synthetic construct
  source 1..20: mol_type = other DNA
aacgatcctgaatgaatgaa

SEQ ID NO: 12351 - DNA, 20 bp, synthetic construct
  source 1..20: mol_type = other DNA
acattctgaaggattgtcca

SEQ ID NO: 12352 - DNA, 20 bp, synthetic construct
  source 1..20: mol_type = other DNA
ggggctaccagggctacccc

SEQ ID NO: 12353 - DNA, 20 bp, synthetic construct
  source 1..20: mol_type = other DNA
gcggggtctggcatcgcccc

SEQ ID NO: 12354 - DNA, 20 bp, synthetic construct
  source 1..20: mol_type = other DNA
tgaatttccatggtgtggta

SEQ ID NO: 12355 - DNA, 20 bp, synthetic construct
  source 1..20: mol_type = other DNA
gctacaggccctgccgccct

SEQ ID NO: 12356 - DNA, 20 bp, synthetic construct
  source 1..20: mol_type = other DNA
ttctcatgctgaatggtgag

SEQ ID NO: 12357 - DNA, 20 bp, synthetic construct
  source 1..20: mol_type = other DNA
cacgtaggcaacagagggcc

SEQ ID NO: 12358 - DNA, 20 bp, synthetic construct
  source 1..20: mol_type = other DNA
cagccgagatgctaagagca

SEQ ID NO: 12359 - DNA, 20 bp, synthetic construct
  source 1..20: mol_type = other DNA
gcaccatacccagctacagc

SEQ ID NO: 12360 - DNA, 20 bp, synthetic construct
  source 1..20: mol_type = other DNA
cacccagctcctggagggcc

SEQ ID NO: 12361 - DNA, 20 bp, synthetic construct
  source 1..20: mol_type = other DNA
tgggaccctgctgtggggac

SEQ ID NO: 12362 - DNA, 20 bp, synthetic construct
  source 1..20: mol_type = other DNA
tgtgactgtcatctggccat

SEQ ID NO: 12363 - DNA, 20 bp, synthetic construct
  source 1..20: mol_type = other DNA
catgcagatccgacactgga

SEQ ID NO: 12364 - DNA, 20 bp, synthetic construct
  source 1..20: mol_type = other DNA
tgaagttagaagtcgggtcg

SEQ ID NO: 12365 - DNA, 20 bp, synthetic construct
  source 1..20: mol_type = other DNA
caggatgtacttgttgaggt

SEQ ID NO: 12366 - DNA, 20 bp, synthetic construct
  source 1..20: mol_type = other DNA
gcccagtccactactactgg

SEQ ID NO: 12367 - DNA, 20 bp, synthetic construct
  source 1..20: mol_type = other DNA
ttgctcagcaaggcaccatg

SEQ ID NO: 12368 - DNA, 20 bp, synthetic construct
  source 1..20: mol_type = other DNA
ggcagtggtgccgcacttct

SEQ ID NO: 12369 - DNA, 20 bp, synthetic construct
  source 1..20: mol_type = other DNA
ctacctgcagtgcaccacaa

SEQ ID NO: 12370 - DNA, 20 bp, synthetic construct
  source 1..20: mol_type = other DNA
tgccactctgctccttgctt

SEQ ID NO: 12371 - DNA, 20 bp, synthetic construct
  source 1..20: mol_type = other DNA
tgaatatgatcccaccatag

SEQ ID NO: 12372 - DNA, 20 bp, synthetic construct
  source 1..20: mol_type = other DNA
tacaaggaccagcttaagac

SEQ ID NO: 12373 - DNA, 20 bp, synthetic construct
  source 1..20: mol_type = other DNA
aattgaacttcaccacccag

SEQ ID NO: 12374 - DNA, 20 bp, synthetic construct
  source 1..20: mol_type = other DNA
agaacacaggcacggctgag

SEQ ID NO: 12375 - DNA, 20 bp, synthetic construct
  source 1..20: mol_type = other DNA
cttgagcagttccttgcgca

SEQ ID NO: 12376 - DNA, 20 bp, synthetic construct
  source 1..20: mol_type = other DNA
acaaaaagtgggcttcaggt

SEQ ID NO: 12377 - DNA, 20 bp, synthetic construct
  source 1..20: mol_type = other DNA
atctcggaagtgttcctcca

SEQ ID NO: 12378 - DNA, 20 bp, synthetic construct
  source 1..20: mol_type = other DNA
tagccttaccttgcgagaga

SEQ ID NO: 12379 - DNA, 20 bp, synthetic construct
  source 1..20: mol_type = other DNA
gctcttccgagctgatggga

SEQ ID NO: 12380 - DNA, 20 bp, synthetic construct
  source 1..20: mol_type = other DNA
atgagtccttcagcagctcc

SEQ ID NO: 12381 - DNA, 20 bp, synthetic construct
  source 1..20: mol_type = other DNA
tcaaaccacacctagaacac

SEQ ID NO: 12382 - DNA, 20 bp, synthetic construct
  source 1..20: mol_type = other DNA
cacaccgagtacttgcgctc

SEQ ID NO: 12383 - DNA, 20 bp, synthetic construct
  source 1..20: mol_type = other DNA
accaaggctgttgtaaggta

SEQ ID NO: 12384 - DNA, 20 bp, synthetic construct
  source 1..20: mol_type = other DNA
gggggtcatcctaggcaagg

SEQ ID NO: 12385 - DNA, 20 bp, synthetic construct
  source 1..20: mol_type = other DNA
gcccaggatgcttgactcac

SEQ ID NO: 12386 - DNA, 20 bp, synthetic construct
  source 1..20: mol_type = other DNA
aagctcctttccaccagttg

SEQ ID NO: 12387 - DNA, 20 bp, synthetic construct
  source 1..20: mol_type = other DNA
tcttggaagccagtactctg

SEQ ID NO: 12388 - DNA, 20 bp, synthetic construct
  source 1..20: mol_type = other DNA
ccacctctttgccctgatgc

SEQ ID NO: 12389 - DNA, 20 bp, synthetic construct
  source 1..20: mol_type = other DNA
atccagtgcgctcctgtgtt

SEQ ID NO: 12390 - DNA, 20 bp, synthetic construct
  source 1..20: mol_type = other DNA
caactgaaacgcaagcgagg

SEQ ID NO: 12391 - DNA, 20 bp, synthetic construct
  source 1..20: mol_type = other DNA
gcagtaaaagcatctactgg

SEQ ID NO: 12392 - DNA, 20 bp, synthetic construct
  source 1..20: mol_type = other DNA
acagttcacctattaccctc

SEQ ID NO: 12393 - DNA, 20 bp, synthetic construct
  source 1..20: mol_type = other DNA
gcaagcaatgctcggagctg

SEQ ID NO: 12394 - DNA, 20 bp, synthetic construct
  source 1..20: mol_type = other DNA
catcatggcctgctggacca

SEQ ID NO: 12395 - DNA, 20 bp, synthetic construct
  source 1..20: mol_type = other DNA
ggctgggggccggggaagca

SEQ ID NO: 12396 - DNA, 20 bp, synthetic construct
  source 1..20: mol_type = other DNA
ctacgccacgcagctccagg

SEQ ID NO: 12397 - DNA, 20 bp, synthetic construct
  source 1..20: mol_type = other DNA
gggaccccattgtacagcac

SEQ ID NO: 12398 - DNA, 20 bp, synthetic construct
  source 1..20: mol_type = other DNA
agtgacaatgatgccagcca

SEQ ID NO: 12399 - DNA, 20 bp, synthetic construct
  source 1..20: mol_type = other DNA
aaaaaccaggatgtccccca

SEQ ID NO: 12400 - DNA, 20 bp, synthetic construct
  source 1..20: mol_type = other DNA
cagactccccagacaggccc

SEQ ID NO: 12401 - DNA, 20 bp, synthetic construct
  source 1..20: mol_type = other DNA
tcaaggtcagcactgcgcca

SEQ ID NO: 12402 - DNA, 20 bp, synthetic construct
  source 1..20: mol_type = other DNA
ccctggcgctgtgcaacgac

SEQ ID NO: 12403 - DNA, 20 bp, synthetic construct
  source 1..20: mol_type = other DNA
ttctatatgaaaatcaagac

SEQ ID NO: 12404 - DNA, 20 bp, synthetic construct
  source 1..20: mol_type = other DNA
ctcaagcctcattggaatga

SEQ ID NO: 12405 - DNA, 20 bp, synthetic construct
  source 1..20: mol_type = other DNA
cagtatctcaaggtatgtgc

SEQ ID NO: 12406 - DNA, 20 bp, synthetic construct
  source 1..20: mol_type = other DNA
ttctactcgcgcgaccccga

SEQ ID NO: 12407 - DNA, 20 bp, synthetic construct
  source 1..20: mol_type = other DNA
tcacggactctgcaccccgc

SEQ ID NO: 12408 - DNA, 20 bp, synthetic construct
  source 1..20: mol_type = other DNA
gttgtgcaaatgtagctgga

SEQ ID NO: 12409 - DNA, 20 bp, synthetic construct
  source 1..20: mol_type = other DNA
ccgaccttctgtgaacactg

SEQ ID NO: 12410 - DNA, 20 bp, synthetic construct
  source 1..20: mol_type = other DNA
cagcgactctttgagatgct

SEQ ID NO: 12411 - DNA, 20 bp, synthetic construct
  source 1..20: mol_type = other DNA
tgcaactagaggtgaaagct

SEQ ID NO: 12412 - DNA, 20 bp, synthetic construct
  source 1..20: mol_type = other DNA
acaggtgggtggagtcaaca

SEQ ID NO: 12413 - DNA, 20 bp, synthetic construct
  source 1..20: mol_type = other DNA
cccaggtgacgtccttgctc

SEQ ID NO: 12414 - DNA, 20 bp, synthetic construct
  source 1..20: mol_type = other DNA
tccagatgagccccgggatt

SEQ ID NO: 12415 - DNA, 20 bp, synthetic construct
  source 1..20: mol_type = other DNA
taaacaggtacccagggcta

SEQ ID NO: 12416 - DNA, 20 bp, synthetic construct
  source 1..20: mol_type = other DNA
cgcggtgccacagcagctgg

SEQ ID NO: 12417 - DNA, 20 bp, synthetic construct
  source 1..20: mol_type = other DNA
tcctggccctttggaacgaa

SEQ ID NO: 12418 - DNA, 20 bp, synthetic construct
  source 1..20: mol_type = other DNA
cagctgtccactcctggcgc

SEQ ID NO: 12419 - DNA, 20 bp, synthetic construct
  source 1..20: mol_type = other DNA
gctgtggccgcagctgtgtg

SEQ ID NO: 12420 - DNA, 20 bp, synthetic construct
  source 1..20: mol_type = other DNA
gatcttctggtctctggaga

SEQ ID NO: 12421 - DNA, 20 bp, synthetic construct
  source 1..20: mol_type = other DNA
aggcgctcatctcatacgtg

SEQ ID NO: 12422 - DNA, 20 bp, synthetic construct
  source 1..20: mol_type = other DNA
accgggacagccctgtgttt

SEQ ID NO: 12423 - DNA, 20 bp, synthetic construct
  source 1..20: mol_type = other DNA
aaacttggcccctaaggagg

SEQ ID NO: 12424 - DNA, 20 bp, synthetic construct
  source 1..20: mol_type = other DNA
cgtgttggacctggcccgga

SEQ ID NO: 12425 - DNA, 20 bp, synthetic construct
  source 1..20: mol_type = other DNA
tggcgaggatggaggaggaa

SEQ ID NO: 12426 - DNA, 20 bp, synthetic construct
  source 1..20: mol_type = other DNA
aggctacagcttcaccacca

SEQ ID NO: 12427 - DNA, 20 bp, synthetic construct
  source 1..20: mol_type = other DNA
cagcaaggcaccatgtggca

SEQ ID NO: 12428 - DNA, 20 bp, synthetic construct
  source 1..20: mol_type = other DNA
gctgtcccacaacctgtaca

SEQ ID NO: 12429 - DNA, 20 bp, synthetic construct
  source 1..20: mol_type = other DNA
gacgccggtcttgatgacga

SEQ ID NO: 12430 - DNA, 20 bp, synthetic construct
  source 1..20: mol_type = other DNA
cgaaaatgcttggtgagctg

SEQ ID NO: 12431 - DNA, 20 bp, synthetic construct
  source 1..20: mol_type = other DNA
caaagcaggtgacggtcatg

SEQ ID NO: 12432 - DNA, 20 bp, synthetic construct
  source 1..20: mol_type = other DNA
attaccttggcaatcagacg

SEQ ID NO: 12433 - DNA, 20 bp, synthetic construct
  source 1..20: mol_type = other DNA
agaaccccacctgggcaaag

SEQ ID NO: 12434 - DNA, 20 bp, synthetic construct
  source 1..20: mol_type = other DNA
gaaaccacagatcaagcaag

SEQ ID NO: 12435 - DNA, 20 bp, synthetic construct
  source 1..20: mol_type = other DNA
gagttcaccatctgcaagtc

SEQ ID NO: 12436 - DNA, 20 bp, synthetic construct
  source 1..20: mol_type = other DNA
ggcctgtgcggtccccggtg

SEQ ID NO: 12437 - DNA, 20 bp, synthetic construct
  source 1..20: mol_type = other DNA
gtggcctcagagtgagtcgg

SEQ ID NO: 12438 - DNA, 20 bp, synthetic construct
  source 1..20: mol_type = other DNA
gaagcccagtccactactac

SEQ ID NO: 12439 - DNA, 20 bp, synthetic construct
  source 1..20: mol_type = other DNA
gatggccaggtcatcaccat

SEQ ID NO: 12440 - DNA, 20 bp, synthetic construct
  source 1..20: mol_type = other DNA
aatatgacagccacctccct

SEQ ID NO: 12441 - DNA, 20 bp, synthetic construct
  source 1..20: mol_type = other DNA
cctcgggcaggcagatgagc

SEQ ID NO: 12442 - DNA, 20 bp, synthetic construct
  source 1..20: mol_type = other DNA
tggggacccggtagttgacc

SEQ ID NO: 12443 - DNA, 20 bp, synthetic construct
  source 1..20: mol_type = other DNA
gcatcagggcaaagaggtgg

SEQ ID NO: 12444 - DNA, 20 bp, synthetic construct
  source 1..20: mol_type = other DNA
tcctgggttcccgtgggtcc

SEQ ID NO: 12445 - DNA, 20 bp, synthetic construct
  source 1..20: mol_type = other DNA
cccagtgtaggagtccgtcc

SEQ ID NO: 12446 - DNA, 20 bp, synthetic construct
  source 1..20: mol_type = other DNA
gaggcctgtgcggtccccgg

SEQ ID NO: 12447 - DNA, 20 bp, synthetic construct
  source 1..20: mol_type = other DNA
gatttctgtggaagagattg

SEQ ID NO: 12448 - DNA, 20 bp, synthetic construct
  source 1..20: mol_type = other DNA
caggatgctgagtggtactg

SEQ ID NO: 12449 - DNA, 20 bp, synthetic construct
  source 1..20: mol_type = other DNA
tcatccagtagtagtcttcc

SEQ ID NO: 12450 - DNA, 20 bp, synthetic construct
  source 1..20: mol_type = other DNA
cgaaaaggagaaactgatat

SEQ ID NO: 12451 - DNA, 20 bp, synthetic construct
  source 1..20: mol_type = other DNA
cgggcgccatgggtgcgggc

SEQ ID NO: 12452 - DNA, 20 bp, synthetic construct
  source 1..20: mol_type = other DNA
tgcaggaatttgtacacctg

SEQ ID NO: 12453 - DNA, 20 bp, synthetic construct
  source 1..20: mol_type = other DNA
agttcatgcagcgggtcatg

SEQ ID NO: 12454 - DNA, 20 bp, synthetic construct
  source 1..20: mol_type = other DNA
ccgccttgtagatatccgcc

SEQ ID NO: 12455 - DNA, 20 bp, synthetic construct
  source 1..20: mol_type = other DNA
ccgctgcgtgcaccgcgacc

SEQ ID NO: 12456 - DNA, 20 bp, synthetic construct
  source 1..20: mol_type = other DNA
atctgaggagggaaggggac

SEQ ID NO: 12457 - DNA, 20 bp, synthetic construct
  source 1..20: mol_type = other DNA
catatttacaacagagtacc

SEQ ID NO: 12458 - DNA, 20 bp, synthetic construct
  source 1..20: mol_type = other DNA
cactgaccttctccagggcg

SEQ ID NO: 12459 - DNA, 20 bp, synthetic construct
  source 1..20: mol_type = other DNA
ctcgatgtgaagaaggaaac

SEQ ID NO: 12460 - DNA, 20 bp, synthetic construct
  source 1..20: mol_type = other DNA
ggaactccttctcctccctc

SEQ ID NO: 12461 - DNA, 20 bp, synthetic construct
  source 1..20: mol_type = other DNA
atccaggactgtatgtggag

SEQ ID NO: 12462 - DNA, 20 bp, synthetic construct
  source 1..20: mol_type = other DNA
aagttagaagtcgggtcgtg

SEQ ID NO: 12463 - DNA, 20 bp, synthetic construct
  source 1..20: mol_type = other DNA
acagtcggtacatattccga

SEQ ID NO: 12464 - DNA, 20 bp, synthetic construct
  source 1..20: mol_type = other DNA
gggactcttacccctagagg

SEQ ID NO: 12465 - DNA, 20 bp, synthetic construct
  source 1..20: mol_type = other DNA
tgtaaggccgctcgccggtg

SEQ ID NO: 12466 - DNA, 20 bp, synthetic construct
  source 1..20: mol_type = other DNA
ctgcggcgctcacctcagca

SEQ ID NO: 12467 - DNA, 20 bp, synthetic construct
  source 1..20: mol_type = other DNA
cagcagcctgacgcgtgagg

SEQ ID NO: 12468 - DNA, 20 bp, synthetic construct
  source 1..20: mol_type = other DNA
gctagctgcaaaagagagga

SEQ ID NO: 12469 - DNA, 20 bp, synthetic construct
  source 1..20: mol_type = other DNA
ctcctgtgctggctattgtg

SEQ ID NO: 12470 - DNA, 20 bp, synthetic construct
  source 1..20: mol_type = other DNA
tcgggggcatacctggagag

SEQ ID NO: 12471 - DNA, 20 bp, synthetic construct
  source 1..20: mol_type = other DNA
acaccagcagttacttggcg

SEQ ID NO: 12472 - DNA, 20 bp, synthetic construct
  source 1..20: mol_type = other DNA
tcaccagacttcagccagca

SEQ ID NO: 12473 - DNA, 20 bp, synthetic construct
  source 1..20: mol_type = other DNA
acccggcagactgctggaag

SEQ ID NO: 12474 - DNA, 20 bp, synthetic construct
  source 1..20: mol_type = other DNA
ccaagaaggactcgggtcaa

SEQ ID NO: 12475 - DNA, 20 bp, synthetic construct
  source 1..20: mol_type = other DNA
cgctgccggctctcacgatc

SEQ ID NO: 12476 - DNA, 20 bp, synthetic construct
  source 1..20: mol_type = other DNA
ctgcatgtgaagggcgtcgt

SEQ ID NO: 12477 - DNA, 20 bp, synthetic construct
  source 1..20: mol_type = other DNA
gtaggcggacgggtggtaga

SEQ ID NO: 12478 - DNA, 20 bp, synthetic construct
  source 1..20: mol_type = other DNA
aaggcgtattgtaccctgga

SEQ ID NO: 12479 - DNA, 20 bp, synthetic construct
  source 1..20: mol_type = other DNA
gggcagtaaaagcatctact

SEQ ID NO: 12480 - DNA, 20 bp, synthetic construct
  source 1..20: mol_type = other DNA
gtggttcaaaatgaataaag

SEQ ID NO: 12481 - DNA, 20 bp, synthetic construct
  source 1..20: mol_type = other DNA
cctaggcgctggtacatgct

SEQ ID NO: 12482 - DNA, 20 bp, synthetic construct
  source 1..20: mol_type = other DNA
tcacctggagaaagcaaaga

SEQ ID NO: 12483 - DNA, 20 bp, synthetic construct
  source 1..20: mol_type = other DNA
tgcctcttcctcctcattgg

SEQ ID NO: 12484 - DNA, 20 bp, synthetic construct
  source 1..20: mol_type = other DNA
tccccaggcttactggctgg

SEQ ID NO: 12485 - DNA, 20 bp, synthetic construct
  source 1..20: mol_type = other DNA
gcaaggagtgggtctgcgga

SEQ ID NO: 12486 - DNA, 20 bp, synthetic construct
  source 1..20: mol_type = other DNA
ggtcctaggaagcaaataca

SEQ ID NO: 12487 - DNA, 20 bp, synthetic construct
  source 1..20: mol_type = other DNA
tggaacaccaaggaacctac

SEQ ID NO: 12488 - DNA, 20 bp, synthetic construct
  source 1..20: mol_type = other DNA
acctgaggcagtgaaaacaa

SEQ ID NO: 12489 - DNA, 20 bp, synthetic construct
  source 1..20: mol_type = other DNA
catttcttgctgccaagtcc

SEQ ID NO: 12490 - DNA, 20 bp, synthetic construct
  source 1..20: mol_type = other DNA
gagcgggtccgcatcatctc

SEQ ID NO: 12491 - DNA, 20 bp, synthetic construct
  source 1..20: mol_type = other DNA
cctgtttgcattggaagccg

SEQ ID NO: 12492 - DNA, 20 bp, synthetic construct
  source 1..20: mol_type = other DNA
ttgagatgtccaaacaccca

SEQ ID NO: 12493 - DNA, 20 bp, synthetic construct
  source 1..20: mol_type = other DNA
tggctcttcagatctattgt

SEQ ID NO: 12494 - DNA, 20 bp, synthetic construct
  source 1..20: mol_type = other DNA
tagcggtcatgtcaatggtt

SEQ ID NO: 12495 - DNA, 20 bp, synthetic construct
  source 1..20: mol_type = other DNA
ccggaagtagccatctacca

SEQ ID NO: 12496 - DNA, 20 bp, synthetic construct
  source 1..20: mol_type = other DNA
ctaggctccggacaacctgg

SEQ ID NO: 12497 - DNA, 20 bp, synthetic construct
  source 1..20: mol_type = other DNA
catccatataaggtctgatg

SEQ ID NO: 12498 - DNA, 20 bp, synthetic construct
  source 1..20: mol_type = other DNA
ccagggcctcgccctagaaa

SEQ ID NO: 12499 - DNA, 20 bp, synthetic construct
  source 1..20: mol_type = other DNA
tccacccacatcttcctctc

SEQ ID NO: 12500 - DNA, 20 bp, synthetic construct
  source 1..20: mol_type = other DNA
gagagacagattggttcctg

SEQ ID NO: 12501 - DNA, 20 bp, synthetic construct
  source 1..20: mol_type = other DNA
agaaggaggcgggtgagggt

SEQ ID NO: 12502 - DNA, 20 bp, synthetic construct
  source 1..20: mol_type = other DNA
gacctacctttggagcctgt

SEQ ID NO: 12503 - DNA, 20 bp, synthetic construct
  source 1..20: mol_type = other DNA
cagagccccattttctggtg

SEQ ID NO: 12504 - DNA, 20 bp, synthetic construct
  source 1..20: mol_type = other DNA
cgtacagggatagcacagcc

SEQ ID NO: 12505 - DNA, 20 bp, synthetic construct
  source 1..20: mol_type = other DNA
gagggtaggagagtgtacgg

SEQ ID NO: 12506 - DNA, 20 bp, synthetic construct
  source 1..20: mol_type = other DNA
gtaattgtcgtagtttctgg

SEQ ID NO: 12507 - DNA, 20 bp, synthetic construct
  source 1..20: mol_type = other DNA
ggcaatcagttctccaccca

SEQ ID NO: 12508 - DNA, 20 bp, synthetic construct
  source 1..20: mol_type = other DNA
gtgggtaggcaggtggccag

SEQ ID NO: 12509 - DNA, 20 bp, synthetic construct
  source 1..20: mol_type = other DNA
cagaaacccatgttcgggac

SEQ ID NO: 12510 - DNA, 20 bp, synthetic construct
  source 1..20: mol_type = other DNA
gtatgatttggtgaaatgcc

SEQ ID NO: 12511 - DNA, 20 bp, synthetic construct
  source 1..20: mol_type = other DNA
ctacatcatcactgaataca

SEQ ID NO: 12512 - DNA, 20 bp, synthetic construct
  source 1..20: mol_type = other DNA
gctatattggctggtgagtg

SEQ ID NO: 12513 - DNA, 20 bp, synthetic construct
  source 1..20: mol_type = other DNA
cattcttggttggatcatat

SEQ ID NO: 12514 - DNA, 20 bp, synthetic construct
  source 1..20: mol_type = other DNA
ccgcagggcatggagtacct

SEQ ID NO: 12515 - DNA, 20 bp, synthetic construct
  source 1..20: mol_type = other DNA
catgtgtctggatgtgtgtg

SEQ ID NO: 12516 - DNA, 20 bp, synthetic construct
  source 1..20: mol_type = other DNA
cgaatatgatccaacaatag

SEQ ID NO: 12517 - DNA, 20 bp, synthetic construct
  source 1..20: mol_type = other DNA
ggcgggtacctggaggcgca

SEQ ID NO: 12518 - DNA, 20 bp, synthetic construct
  source 1..20: mol_type = other DNA
gctcctacctgtgctggacc

SEQ ID NO: 12519 - DNA, 20 bp, synthetic construct
  source 1..20: mol_type = other DNA
ctcgtggatggccatgctga

SEQ ID NO: 12520 - DNA, 20 bp, synthetic construct
  source 1..20: mol_type = other DNA
tgcttgttctgcgggcacag

SEQ ID NO: 12521 - DNA, 20 bp, synthetic construct
  source 1..20: mol_type = other DNA
tgcgcatgcagatccgacac

SEQ ID NO: 12522 - DNA, 20 bp, synthetic construct
  source 1..20: mol_type = other DNA
ctcgagctacgggccacaga

SEQ ID NO: 12523 - DNA, 20 bp, synthetic construct
  source 1..20: mol_type = other DNA
tggagatctcctgcttgagg

SEQ ID NO: 12524 - DNA, 20 bp, synthetic construct
  source 1..20: mol_type = other DNA
tgcgacggccactgttctct

SEQ ID NO: 12525 - DNA, 20 bp, synthetic construct
  source 1..20: mol_type = other DNA
aaatagtcagcaaggctgtc

SEQ ID NO: 12526 - DNA, 20 bp, synthetic construct
  source 1..20: mol_type = other DNA
agaaggcggagcaccaggtg

SEQ ID NO: 12527 - DNA, 20 bp, synthetic construct
  source 1..20: mol_type = other DNA
aacgaaggtgaggaagatgg

SEQ ID NO: 12528 - DNA, 20 bp, synthetic construct
  source 1..20: mol_type = other DNA
ctgaagagatgaggctattg

SEQ ID NO: 12529 - DNA, 20 bp, synthetic construct
  source 1..20: mol_type = other DNA
ctggagacagaaagaagaaa

SEQ ID NO: 12530 - DNA, 20 bp, synthetic construct
  source 1..20: mol_type = other DNA
ccagaaggaaggttcctgtg

SEQ ID NO: 12531 - DNA, 20 bp, synthetic construct
  source 1..20: mol_type = other DNA
gcaggtattccacctggagc

SEQ ID NO: 12532 - DNA, 20 bp, synthetic construct
  source 1..20: mol_type = other DNA
ccttacctcatgcctggcaa

SEQ ID NO: 12533 - DNA, 20 bp, synthetic construct
  source 1..20: mol_type = other DNA
cctggatgcgaagacaggaa

SEQ ID NO: 12534 - DNA, 20 bp, synthetic construct
  source 1..20: mol_type = other DNA
cagaaaatggggctctggcc

SEQ ID NO: 12535 - DNA, 20 bp, synthetic construct
  source 1..20: mol_type = other DNA
ccagcgcaggatgaacctga

SEQ ID NO: 12536 - DNA, 20 bp, synthetic construct
  source 1..20: mol_type = other DNA
tgtgtagagccctgtatccc

SEQ ID NO: 12537 - DNA, 20 bp, synthetic construct
  source 1..20: mol_type = other DNA
gacccccaagccccagacca

SEQ ID NO: 12538 - DNA, 20 bp, synthetic construct
  source 1..20: mol_type = other DNA
ctcccagtgggtacaactga

SEQ ID NO: 12539 - DNA, 20 bp, synthetic construct
  source 1..20: mol_type = other DNA
cacggatactcacagtctag

SEQ ID NO: 12540 - DNA, 20 bp, synthetic construct
  source 1..20: mol_type = other DNA
ggggctgcggcggagaacat

SEQ ID NO: 12541 - DNA, 20 bp, synthetic construct
  source 1..20: mol_type = other DNA
gcagcagatggctgaggaca

SEQ ID NO: 12542 - DNA, 20 bp, synthetic construct
  source 1..20: mol_type = other DNA
cccataagtgtcaatttccg

SEQ ID NO: 12543 - DNA, 20 bp, synthetic construct
  source 1..20: mol_type = other DNA
tcaggatggagaattcgacc

SEQ ID NO: 12544 - DNA, 20 bp, synthetic construct
  source 1..20: mol_type = other DNA
ggattcatacctgctgatgt

SEQ ID NO: 12545 - DNA, 20 bp, synthetic construct
  source 1..20: mol_type = other DNA
ttacctccctctccggctcc

SEQ ID NO: 12546 - DNA, 20 bp, synthetic construct
  source 1..20: mol_type = other DNA
tttcatcttctgctcaagcc

SEQ ID NO: 12547 - DNA, 20 bp, synthetic construct
  source 1..20: mol_type = other DNA
accaccgctctcggttccgg

SEQ ID NO: 12548 - DNA, 20 bp, synthetic construct
  source 1..20: mol_type = other DNA
aaggagttacttaatgctga

SEQ ID NO: 12549 - DNA, 20 bp, synthetic construct
  source 1..20: mol_type = other DNA
cagctatgattttctcacac

SEQ ID NO: 12550 - DNA, 20 bp, synthetic construct
  source 1..20: mol_type = other DNA
ccttgccagtggtggccgcg

SEQ ID NO: 12551 - DNA, 20 bp, synthetic construct
  source 1..20: mol_type = other DNA
ctgcagctggaaccagcgtt

SEQ ID NO: 12552 - DNA, 20 bp, synthetic construct
  source 1..20: mol_type = other DNA
ccgcccagggaagacctcac

SEQ ID NO: 12553 - DNA, 20 bp, synthetic construct
  source 1..20: mol_type = other DNA
ccagctgtcaggagtcggcc

SEQ ID NO: 12554 - DNA, 20 bp, synthetic construct
  source 1..20: mol_type = other DNA
gcaacttgacggtgcaccgg

SEQ ID NO: 12555 - DNA, 20 bp, synthetic construct
  source 1..20: mol_type = other DNA
gcactcaccattgtatgtgg

SEQ ID NO: 12556 - DNA, 20 bp, synthetic construct
  source 1..20: mol_type = other DNA
tgccctggatgagctcgatg

SEQ ID NO: 12557 - DNA, 20 bp, synthetic construct
  source 1..20: mol_type = other DNA
tgtaccagcatcgggtgagg

SEQ ID NO: 12558 - DNA, 20 bp, synthetic construct
  source 1..20: mol_type = other DNA
gcccccagctggacatgctg

SEQ ID NO: 12559 - DNA, 20 bp, synthetic construct
  source 1..20: mol_type = other DNA
ctccgagatgcacgtgccgt

SEQ ID NO: 12560 - DNA, 20 bp, synthetic construct
  source 1..20: mol_type = other DNA
acaggtaggagcatgtgccg

SEQ ID NO: 12561 - DNA, 20 bp, synthetic construct
  source 1..20: mol_type = other DNA
aatacatctactaatgaaat

SEQ ID NO: 12562 - DNA, 20 bp, synthetic construct
  source 1..20: mol_type = other DNA
gtcctgcagaaggacagggc

SEQ ID NO: 12563 - DNA, 20 bp, synthetic construct
  source 1..20: mol_type = other DNA
ggagatgctgcagcgaggta

SEQ ID NO: 12564 - DNA, 20 bp, synthetic construct
  source 1..20: mol_type = other DNA
aaagcaccggttgaataaga

SEQ ID NO: 12565 - DNA, 20 bp, synthetic construct
  source 1..20: mol_type = other DNA
acctcatgcctggcaatggg

SEQ ID NO: 12566 - DNA, 20 bp, synthetic construct
  source 1..20: mol_type = other DNA
cttacgactcaaagttctcc

SEQ ID NO: 12567 - DNA, 20 bp, synthetic construct
  source 1..20: mol_type = other DNA
gtgactacgtgcgccagacg

SEQ ID NO: 12568 - DNA, 20 bp, synthetic construct
  source 1..20: mol_type = other DNA
agatccccgcagccccttgg

SEQ ID NO: 12569 - DNA, 20 bp, synthetic construct
  source 1..20: mol_type = other DNA
ggccaagtacatcatggacc

SEQ ID NO: 12570 - DNA, 20 bp, synthetic construct
  source 1..20: mol_type = other DNA
gccttgccagtggtggccgc

SEQ ID NO: 12571 - DNA, 20 bp, synthetic construct
  source 1..20: mol_type = other DNA
ggtagacggtgaggcgcttc

SEQ ID NO: 12572 - DNA, 20 bp, synthetic construct
  source 1..20: mol_type = other DNA
tcctgcagattctcgtaatc

SEQ ID NO: 12573 - DNA, 20 bp, synthetic construct
  source 1..20: mol_type = other DNA
gctgcttccaggaatgactg

SEQ ID NO: 12574 - DNA, 20 bp, synthetic construct
  source 1..20: mol_type = other DNA
gcgccagtgcctgcgctcgc

SEQ ID NO: 12575 - DNA, 20 bp, synthetic construct
  source 1..20: mol_type = other DNA
cagtccggcgcgggccccat

SEQ ID NO: 12576 - DNA, 20 bp, synthetic construct
  source 1..20: mol_type = other DNA
caggcctggtgactcgactc

SEQ ID NO: 12577 - DNA, 20 bp, synthetic construct
  source 1..20: mol_type = other DNA
aggagccctgtaccacctag

SEQ ID NO: 12578 - DNA, 20 bp, synthetic construct
  source 1..20: mol_type = other DNA
ccttgtgaaaaagtacatcc

SEQ ID NO: 12579 - DNA, 20 bp, synthetic construct
  source 1..20: mol_type = other DNA
cgatctctcgtaaggggtct

SEQ ID NO: 12580 - DNA, 20 bp, synthetic construct
  source 1..20: mol_type = other DNA
caaaaggaagagaagtggga

SEQ ID NO: 12581 - DNA, 20 bp, synthetic construct
  source 1..20: mol_type = other DNA
acaggtggaagaacagctgc

SEQ ID NO: 12582 - DNA, 20 bp, synthetic construct
  source 1..20: mol_type = other DNA
cctggggaatcagagaacaa

SEQ ID NO: 12583 - DNA, 20 bp, synthetic construct
  source 1..20: mol_type = other DNA
caccatcatcagtgagcagc

SEQ ID NO: 12584 - DNA, 20 bp, synthetic construct
  source 1..20: mol_type = other DNA
cgttacctcatagtctgggt

SEQ ID NO: 12585 - DNA, 20 bp, synthetic construct
  source 1..20: mol_type = other DNA
tcctaggaggaggaaaagcc

SEQ ID NO: 12586 - DNA, 20 bp, synthetic construct
  source 1..20: mol_type = other DNA
tgcctgagctcccgctgccc

SEQ ID NO: 12587 - DNA, 20 bp, synthetic construct
  source 1..20: mol_type = other DNA
caggatctacaacctgcagg

SEQ ID NO: 12588 - DNA, 20 bp, synthetic construct
  source 1..20: mol_type = other DNA
accctgggtcggggaaggga

SEQ ID NO: 12589 - DNA, 20 bp, synthetic construct
  source 1..20: mol_type = other DNA
aaccatgaagaaggtaccgt

SEQ ID NO: 12590 - DNA, 20 bp, synthetic construct
  source 1..20: mol_type = other DNA
agcctggatagcaacgtaca

SEQ ID NO: 12591 - DNA, 20 bp, synthetic construct
  source 1..20: mol_type = other DNA
ctctaggccgatacaaagca

SEQ ID NO: 12592 - DNA, 20 bp, synthetic construct
  source 1..20: mol_type = other DNA
tggagagtccaggacaggaa

SEQ ID NO: 12593 - DNA, 20 bp, synthetic construct
  source 1..20: mol_type = other DNA
aagagctggaggacgagcaa

SEQ ID NO: 12594 - DNA, 20 bp, synthetic construct
  source 1..20: mol_type = other DNA
aatacgccatcaataaattg

SEQ ID NO: 12595 - DNA, 20 bp, synthetic construct
  source 1..20: mol_type = other DNA
ccgacagaggcagacacaga

SEQ ID NO: 12596 - DNA, 20 bp, synthetic construct
  source 1..20: mol_type = other DNA
ccgagccaggagcaccttcc

SEQ ID NO: 12597 - DNA, 20 bp, synthetic construct
  source 1..20: mol_type = other DNA
gacggccaggtcatcaccat

SEQ ID NO: 12598 - DNA, 20 bp, synthetic construct
  source 1..20: mol_type = other DNA
gcaaggaggccctggaggac

SEQ ID NO: 12599 - DNA, 20 bp, synthetic construct
  source 1..20: mol_type = other DNA
tgcggatatgggtggtgagg

SEQ ID NO: 12600 - DNA, 20 bp, synthetic construct
  source 1..20: mol_type = other DNA
tctggacagttaggtgggca

SEQ ID NO: 12601 - DNA, 20 bp, synthetic construct
  source 1..20: mol_type = other DNA
ggtaaaagggattgtccatg

SEQ ID NO: 12602 - DNA, 20 bp, synthetic construct
  source 1..20: mol_type = other DNA
tgatcaccttgtaccagctg

SEQ ID NO: 12603 - DNA, 20 bp, synthetic construct
  source 1..20: mol_type = other DNA
cacccctgagccaggtgagc

SEQ ID NO: 12604 - DNA, 20 bp, synthetic construct
  source 1..20: mol_type = other DNA
caggaaaacatggctggcaa

SEQ ID NO: 12605 - DNA, 20 bp, synthetic construct
  source 1..20: mol_type = other DNA
ccagtgcagctccaggcggc

SEQ ID NO: 12606 - DNA, 20 bp, synthetic construct
  source 1..20: mol_type = other DNA
tgaggcgcttctggttgcac

SEQ ID NO: 12607 - DNA, 20 bp, synthetic construct
  source 1..20: mol_type = other DNA
tggcaagggcttctccttct

SEQ ID NO: 12608 - DNA, 20 bp, synthetic construct
  source 1..20: mol_type = other DNA
agacagcgtgtccatggctg

SEQ ID NO: 12609 - DNA, 20 bp, synthetic construct
  source 1..20: mol_type = other DNA
tctgcccgctcacctggctc

SEQ ID NO: 12610 - DNA, 20 bp, synthetic construct
  source 1..20: mol_type = other DNA
gagaaagcagtctttaccca

SEQ ID NO: 12611 - DNA, 20 bp, synthetic construct
  source 1..20: mol_type = other DNA
ccggcggcgctcgcagtaga

SEQ ID NO: 12612 - DNA, 20 bp, synthetic construct
  source 1..20: mol_type = other DNA
tgctctcgctctcccggatg

SEQ ID NO: 12613 - DNA, 20 bp, synthetic construct
  source 1..20: mol_type = other DNA
cccgtatggctcaacttcga

SEQ ID NO: 12614 - DNA, 20 bp, synthetic construct
  source 1..20: mol_type = other DNA
ccgtcttcccctccatcgtg

SEQ ID NO: 12615 - DNA, 20 bp, synthetic construct
  source 1..20: mol_type = other DNA
atcctggaggcctactgcag

SEQ ID NO: 12616 - DNA, 20 bp, synthetic construct
  source 1..20: mol_type = other DNA
gactcccaggaaatgccctg

SEQ ID NO: 12617 - DNA, 20 bp, synthetic construct
  source 1..20: mol_type = other DNA
ctgccagagcgtgtcaaact

SEQ ID NO: 12618 - DNA, 20 bp, synthetic construct
  source 1..20: mol_type = other DNA
taagacccagatccagtccg

SEQ ID NO: 12619 - DNA, 20 bp, synthetic construct
  source 1..20: mol_type = other DNA
tcctcaccgagcaacagctc

SEQ ID NO: 12620 - DNA, 20 bp, synthetic construct
  source 1..20: mol_type = other DNA
caatagatggacgacctcag

SEQ ID NO: 12621 - DNA, 20 bp, synthetic construct
  source 1..20: mol_type = other DNA
ttgcagaaaaagaaagaaga

SEQ ID NO: 12622 - DNA, 20 bp, synthetic construct
  source 1..20: mol_type = other DNA
gaatagttgtcaaacctgtg

SEQ ID NO: 12623 - DNA, 20 bp, synthetic construct
  source 1..20: mol_type = other DNA
gtccaggaagcaccacttgg

SEQ ID NO: 12624 - DNA, 20 bp, synthetic construct
  source 1..20: mol_type = other DNA
acagtcctggtaatggtgtg

SEQ ID NO: 12625 - DNA, 20 bp, synthetic construct
  source 1..20: mol_type = other DNA
tgaagtgaacatgtggatca

SEQ ID NO: 12626 - DNA, 20 bp, synthetic construct
  source 1..20: mol_type = other DNA
cacttgggacagcagaagtc

SEQ ID NO: 12627 - DNA, 20 bp, synthetic construct
  source 1..20: mol_type = other DNA
gccccggctgcatatcgttg

SEQ ID NO: 12628 - DNA, 20 bp, synthetic construct
  source 1..20: mol_type = other DNA
cctaaggaggaggcagagtg

SEQ ID NO: 12629 - DNA, 20 bp, synthetic construct
  source 1..20: mol_type = other DNA
acgacaatgagcagtcagtg

SEQ ID NO: 12630 - DNA, 20 bp, synthetic construct
  source 1..20: mol_type = other DNA
gtccagacgcaggatggcat

SEQ ID NO: 12631 - DNA, 20 bp, synthetic construct
  source 1..20: mol_type = other DNA
gactgggtacctgcgggatg

SEQ ID NO: 12632 - DNA, 20 bp, synthetic construct
  source 1..20: mol_type = other DNA
ctgaggcttctcttcacctg

SEQ ID NO: 12633 - DNA, 20 bp, synthetic construct
  source 1..20: mol_type = other DNA
caacctacccttcgttccaa

SEQ ID NO: 12634 - DNA, 20 bp, synthetic construct
  source 1..20: mol_type = other DNA
gccgacgagcggatgaaggt

SEQ ID NO: 12635 - DNA, 20 bp, synthetic construct
  source 1..20: mol_type = other DNA
aatcttgactctcaatccaa

SEQ ID NO: 12636 - DNA, 20 bp, synthetic construct
  source 1..20: mol_type = other DNA
tccactcacctccatagcat

SEQ ID NO: 12637 - DNA, 20 bp, synthetic construct
  source 1..20: mol_type = other DNA
atatgagatgcgtaatgctg

SEQ ID NO: 12638 - DNA, 20 bp, synthetic construct
  source 1..20: mol_type = other DNA
ctcctgagatcatgctgaac

SEQ ID NO: 12639 - DNA, 20 bp, synthetic construct
  source 1..20: mol_type = other DNA
caccctgcagatacatgtca

SEQ ID NO: 12640 - DNA, 20 bp, synthetic construct
  source 1..20: mol_type = other DNA
ggaagtgcgtgaggccctcg

SEQ ID NO: 12641 - DNA, 20 bp, synthetic construct
  source 1..20: mol_type = other DNA
ggagctgcgactggtcacgc

SEQ ID NO: 12642 - DNA, 20 bp, synthetic construct
  source 1..20: mol_type = other DNA
gagctctcgaagactgctgt

SEQ ID NO: 12643 - DNA, 20 bp, synthetic construct
  source 1..20: mol_type = other DNA
ggagctcttgattctcctcc

SEQ ID NO: 12644 - DNA, 20 bp, synthetic construct
  source 1..20: mol_type = other DNA
catttggtttatgcctccac

SEQ ID NO: 12645 - DNA, 20 bp, synthetic construct
  source 1..20: mol_type = other DNA
ttaggtaaagcttccctcac

SEQ ID NO: 12646 - DNA, 20 bp, synthetic construct
  source 1..20: mol_type = other DNA
gtgcacatcagcttgcgaaa

SEQ ID NO: 12647 - DNA, 20 bp, synthetic construct
  source 1..20: mol_type = other DNA
agccgctttaacccactctg

SEQ ID NO: 12648 - DNA, 20 bp, synthetic construct
  source 1..20: mol_type = other DNA
cctgttgtgccaaggagaag

SEQ ID NO: 12649 - DNA, 20 bp, synthetic construct
  source 1..20: mol_type = other DNA
tcttctggtttgcttcctct

SEQ ID NO: 12650 - DNA, 20 bp, synthetic construct
  source 1..20: mol_type = other DNA
gagaagcaggaaggtacatg

SEQ ID NO: 12651 - DNA, 20 bp, synthetic construct
  source 1..20: mol_type = other DNA
gcccaggtgggtgactcgcg

SEQ ID NO: 12652 - DNA, 20 bp, synthetic construct
  source 1..20: mol_type = other DNA
cagctcctcagtcacaatca

SEQ ID NO: 12653 - DNA, 20 bp, synthetic construct
  source 1..20: mol_type = other DNA
gacaagcaggaagtgaatgt

SEQ ID NO: 12654 - DNA, 20 bp, synthetic construct
  source 1..20: mol_type = other DNA
cctcctccagcagttccaag

SEQ ID NO: 12655 - DNA, 20 bp, synthetic construct
  source 1..20: mol_type = other DNA
cccgaaacaaagggtgctgg

SEQ ID NO: 12656 - DNA, 20 bp, synthetic construct
  source 1..20: mol_type = other DNA
cccgcagcagctgaaccccg

SEQ ID NO: 12657 - DNA, 20 bp, synthetic construct
  source 1..20: mol_type = other DNA
gggtgcggatgtgggtggtg

SEQ ID NO: 12658 - DNA, 20 bp, synthetic construct
  source 1..20: mol_type = other DNA
gtttctgcgccaggaacacg

SEQ ID NO: 12659 - DNA, 20 bp, synthetic construct
  source 1..20: mol_type = other DNA
gcatgtgctcccgggctccg

SEQ ID NO: 12660 - DNA, 20 bp, synthetic construct
  source 1..20: mol_type = other DNA
ccgtgtcgctgtgggttgtg

SEQ ID NO: 12661 - DNA, 20 bp, synthetic construct
  source 1..20: mol_type = other DNA
gcattcatacttgctttcca

SEQ ID NO: 12662 - DNA, 20 bp, synthetic construct
  source 1..20: mol_type = other DNA
tcaaccgagcaggtaacctt

SEQ ID NO: 12663 - DNA, 20 bp, synthetic construct
  source 1..20: mol_type = other DNA
agacagaacccgagaagacc

SEQ ID NO: 12664 - DNA, 20 bp, synthetic construct
  source 1..20: mol_type = other DNA
gcacggcttgcgcaggttgc

SEQ ID NO: 12665 - DNA, 20 bp, synthetic construct
  source 1..20: mol_type = other DNA
ccagccaatgaggcccgagt

SEQ ID NO: 12666 - DNA, 20 bp, synthetic construct
  source 1..20: mol_type = other DNA
ggttgatggcatggggtagc

SEQ ID NO: 12667 - DNA, 20 bp, synthetic construct
  source 1..20: mol_type = other DNA
gggcctcagtctcaaggagc

SEQ ID NO: 12668 - DNA, 20 bp, synthetic construct
  source 1..20: mol_type = other DNA
gggatccactgactgtccat

SEQ ID NO: 12669 - DNA, 20 bp, synthetic construct
  source 1..20: mol_type = other DNA
tggatcggaatcgtgaggat

SEQ ID NO: 12670 - DNA, 20 bp, synthetic construct
  source 1..20: mol_type = other DNA
aacaaccccttccaaggtga

SEQ ID NO: 12671 - DNA, 20 bp, synthetic construct
  source 1..20: mol_type = other DNA
cttgcaaccaacctcaatgt

SEQ ID NO: 12672 - DNA, 20 bp, synthetic construct
  source 1..20: mol_type = other DNA
tgactgggaaagagcccact

SEQ ID NO: 12673 - DNA, 20 bp, synthetic construct
  source 1..20: mol_type = other DNA
gaatgtccaacagccggcct

SEQ ID NO: 12674 - DNA, 20 bp, synthetic construct
  source 1..20: mol_type = other DNA
gaactgccagctcaggacct

SEQ ID NO: 12675 - DNA, 20 bp, synthetic construct
  source 1..20: mol_type = other DNA
tcttgaaattccccagaaag

SEQ ID NO: 12676 - DNA, 20 bp, synthetic construct
  source 1..20: mol_type = other DNA
tggcagacagagcaaaatgt

SEQ ID NO: 12677 - DNA, 20 bp, synthetic construct
  source 1..20: mol_type = other DNA
cgcagcgatgtctggagcta

SEQ ID NO: 12678 - DNA, 20 bp, synthetic construct
  source 1..20: mol_type = other DNA
gttctctttggagaacagga

SEQ ID NO: 12679 - DNA, 20 bp, synthetic construct
  source 1..20: mol_type = other DNA
aggtgaacacataggcctcg

SEQ ID NO: 12680 - DNA, 20 bp, synthetic construct
  source 1..20: mol_type = other DNA
cagattcttgaaccactgtt

SEQ ID NO: 12681 - DNA, 20 bp, synthetic construct
  source 1..20: mol_type = other DNA
agtgattccggccggctggt

SEQ ID NO: 12682 - DNA, 20 bp, synthetic construct
  source 1..20: mol_type = other DNA
caccaccccgccgtgctcaa

SEQ ID NO: 12683 - DNA, 20 bp, synthetic construct
  source 1..20: mol_type = other DNA
gctgaaccggcagctgcgcg

SEQ ID NO: 12684 - DNA, 20 bp, synthetic construct
  source 1..20: mol_type = other DNA
ctaccagaatgccgaggtga

SEQ ID NO: 12685 - DNA, 20 bp, synthetic construct
  source 1..20: mol_type = other DNA
gtccaccaatggcagtctgg

SEQ ID NO: 12686 - DNA, 20 bp, synthetic construct
  source 1..20: mol_type = other DNA
gcggatgatgggatgtgagc

SEQ ID NO: 12687 - DNA, 20 bp, synthetic construct
  source 1..20: mol_type = other DNA
ctgggtcatcttctcgcggt

SEQ ID NO: 12688 - DNA, 20 bp, synthetic construct
  source 1..20: mol_type = other DNA
atggaccatggtcaggtgag

SEQ ID NO: 12689 - DNA, 20 bp, synthetic construct
  source 1..20: mol_type = other DNA
caagcaggagatctccaggc

SEQ ID NO: 12690 - DNA, 20 bp, synthetic construct
  source 1..20: mol_type = other DNA
acctaaacaggaaaaaacac

SEQ ID NO: 12691 - DNA, 20 bp, synthetic construct
  source 1..20: mol_type = other DNA
agtccctgaaacgaattaag

SEQ ID NO: 12692 - DNA, 20 bp, synthetic construct
  source 1..20: mol_type = other DNA
aacctcctcctggcccgtga

SEQ ID NO: 12693 - DNA, 20 bp, synthetic construct
  source 1..20: mol_type = other DNA
tccctgccggcagatgacca

SEQ ID NO: 12694 - DNA, 20 bp, synthetic construct
  source 1..20: mol_type = other DNA
acgctgccaaagttgccctg

SEQ ID NO: 12695 - DNA, 20 bp, synthetic construct
  source 1..20: mol_type = other DNA
agctgatccagtggaagcgg

SEQ ID NO: 12696 - DNA, 20 bp, synthetic construct
  source 1..20: mol_type = other DNA
cacctgcatcaaccagacag

SEQ ID NO: 12697 - DNA, 20 bp, synthetic construct
  source 1..20: mol_type = other DNA
ctgccaccatacttctctca

SEQ ID NO: 12698 - DNA, 20 bp, synthetic construct
  source 1..20: mol_type = other DNA
caccgacaggatcccctggg

SEQ ID NO: 12699 - DNA, 20 bp, synthetic construct
  source 1..20: mol_type = other DNA
agcaaggcaccatgtggcag

SEQ ID NO: 12700 - DNA, 20 bp, synthetic construct
  source 1..20: mol_type = other DNA
ccgatgactactgcaaactg

SEQ ID NO: 12701 - DNA, 20 bp, synthetic construct
  source 1..20: mol_type = other DNA
acttcttaccaggtactgca

SEQ ID NO: 12702 - DNA, 20 bp, synthetic construct
  source 1..20: mol_type = other DNA
gtagcagactcgcagggaac

SEQ ID NO: 12703 - DNA, 20 bp, synthetic construct
  source 1..20: mol_type = other DNA
tcacgtcaaatccattctgg

SEQ ID NO: 12704 - DNA, 20 bp, synthetic construct
  source 1..20: mol_type = other DNA
ggtgggtaggaggtgacagg

SEQ ID NO: 12705 - DNA, 20 bp, synthetic construct
  source 1..20: mol_type = other DNA
gacatgtatctgcgaaaacg

SEQ ID NO: 12706 - DNA, 20 bp, synthetic construct
  source 1..20: mol_type = other DNA
tgcagcacatctgagctgtc

SEQ ID NO: 12707 - DNA, 20 bp, synthetic construct
  source 1..20: mol_type = other DNA
cacctgcaggccgcgagccc

SEQ ID NO: 12708 - DNA, 20 bp, synthetic construct
  source 1..20: mol_type = other DNA
gtgcaacggcatctcccagt

SEQ ID NO: 12709 - DNA, 20 bp, synthetic construct
  source 1..20: mol_type = other DNA
tgagctggcatcaaggagag

SEQ ID NO: 12710 - DNA, 20 bp, synthetic construct
  source 1..20: mol_type = other DNA
ctcgtgacaaggagatggaa

SEQ ID NO: 12711 - DNA, 20 bp, synthetic construct
  source 1..20: mol_type = other DNA
ggtacaaggtgatcagaagc

SEQ ID NO: 12712 - DNA, 20 bp, synthetic construct
  source 1..20: mol_type = other DNA
cctcttcaacttcctgtctg

SEQ ID NO: 12713 - DNA, 20 bp, synthetic construct
  source 1..20: mol_type = other DNA
acttgagcagttccttgcgc

SEQ ID NO: 12714 - DNA, 20 bp, synthetic construct
  source 1..20: mol_type = other DNA
agcccctcacccaggccagc

SEQ ID NO: 12715 - DNA, 20 bp, synthetic construct
  source 1..20: mol_type = other DNA
atccgtaatctggacaacgg

SEQ ID NO: 12716 - DNA, 20 bp, synthetic construct
  source 1..20: mol_type = other DNA
cgctgaggcccacgaggagg

SEQ ID NO: 12717 - DNA, 20 bp, synthetic construct
  source 1..20: mol_type = other DNA
gttagaagtcgggtcgtggg

SEQ ID NO: 12718 - DNA, 20 bp, synthetic construct
  source 1..20: mol_type = other DNA
agcgacgaatcctatggtaa

SEQ ID NO: 12719 - DNA, 20 bp, synthetic construct
  source 1..20: mol_type = other DNA
ggagaacgtccccggggcac

SEQ ID NO: 12720 - DNA, 20 bp, synthetic construct
  source 1..20: mol_type = other DNA
gcacagttgtcacaaaaagt

SEQ ID NO: 12721 - DNA, 20 bp, synthetic construct
  source 1..20: mol_type = other DNA
tgcggatgtgggtggtgagg

SEQ ID NO: 12722 - DNA, 20 bp, synthetic construct
  source 1..20: mol_type = other DNA
cgaccagcctggagaggtgt

SEQ ID NO: 12723 - DNA, 20 bp, synthetic construct
  source 1..20: mol_type = other DNA
ctgttgagtgctctcaatca

SEQ ID NO: 12724 - DNA, 20 bp, synthetic construct
  source 1..20: mol_type = other DNA
gaggcccataccaatctcct

SEQ ID NO: 12725 - DNA, 20 bp, synthetic construct
  source 1..20: mol_type = other DNA
tccccatcctggtcatcatt

SEQ ID NO: 12726 - DNA, 20 bp, synthetic construct
  source 1..20: mol_type = other DNA
tcctccttctttgaggagaa

SEQ ID NO: 12727 - DNA, 20 bp, synthetic construct
  source 1..20: mol_type = other DNA
cccacttcaggaatatggtg

SEQ ID NO: 12728 - DNA, 20 bp, synthetic construct
  source 1..20: mol_type = other DNA
cccaggcatgtcagccacgt

SEQ ID NO: 12729 - DNA, 20 bp, synthetic construct
  source 1..20: mol_type = other DNA
ctcccagctcaccctgctgg

SEQ ID NO: 12730 - DNA, 20 bp, synthetic construct
  source 1..20: mol_type = other DNA
aggagcagcgcaagaccatc

SEQ ID NO: 12731 - DNA, 20 bp, synthetic construct
  source 1..20: mol_type = other DNA
catgcagatccggcactgga

SEQ ID NO: 12732 - DNA, 20 bp, synthetic construct
  source 1..20: mol_type = other DNA
gacattgaggtgtatttcac

SEQ ID NO: 12733 - DNA, 20 bp, synthetic construct
  source 1..20: mol_type = other DNA
ttgtgctgaaataaagaaaa

SEQ ID NO: 12734 - DNA, 20 bp, synthetic construct
  source 1..20: mol_type = other DNA
ctccaggtccatgatgtact

SEQ ID NO: 12735 - DNA, 20 bp, synthetic construct
  source 1..20: mol_type = other DNA
gcaggcctttgtcctcctaa

SEQ ID NO: 12736 - DNA, 20 bp, synthetic construct
  source 1..20: mol_type = other DNA
cccttggtgagtgcctgggg

SEQ ID NO: 12737 - DNA, 20 bp, synthetic construct
  source 1..20: mol_type = other DNA
ggtgcagaaaggtatacatc

SEQ ID NO: 12738 - DNA, 20 bp, synthetic construct
  source 1..20: mol_type = other DNA
tccctctacccatgtgatgc

SEQ ID NO: 12739 - DNA, 20 bp, synthetic construct
  source 1..20: mol_type = other DNA
ctcagtgtagtaaagatcca

SEQ ID NO: 12740 - DNA, 20 bp, synthetic construct
  source 1..20: mol_type = other DNA
atcttgactctcaatccaag

SEQ ID NO: 12741 - DNA, 20 bp, synthetic construct
  source 1..20: mol_type = other DNA
cagaggaagtggaggaagag

SEQ ID NO: 12742 - DNA, 20 bp, synthetic construct
  source 1..20: mol_type = other DNA
ctggggcgccccacgatgga

SEQ ID NO: 12743 - DNA, 20 bp, synthetic construct
  source 1..20: mol_type = other DNA
cgtaagtggggacccgtcgt

SEQ ID NO: 12744 - DNA, 20 bp, synthetic construct
  source 1..20: mol_type = other DNA
cagactgaccagcgggagat

SEQ ID NO: 12745 - DNA, 20 bp, synthetic construct
  source 1..20: mol_type = other DNA
tcaccaggtcactgcggtgc

SEQ ID NO: 12746 - DNA, 20 bp, synthetic construct
  source 1..20: mol_type = other DNA
tgggctgagagcgaggggag

SEQ ID NO: 12747 - DNA, 20 bp, synthetic construct
  source 1..20: mol_type = other DNA
tgtctgtgcgcgagctgaac

SEQ ID NO: 12748 - DNA, 20 bp, synthetic construct
  source 1..20: mol_type = other DNA
acctgcagcttccagctggc

SEQ ID NO: 12749 - DNA, 20 bp, synthetic construct
  source 1..20: mol_type = other DNA
gggcagaagattgtggtgca

SEQ ID NO: 12750 - DNA, 20 bp, synthetic construct
  source 1..20: mol_type = other DNA
gtcaggcctagaaattggga

SEQ ID NO: 12751 - DNA, 20 bp, synthetic construct
  source 1..20: mol_type = other DNA
gtgcagatgcccggcaccga

SEQ ID NO: 12752 - DNA, 20 bp, synthetic construct
  source 1..20: mol_type = other DNA
agggagcagagatgtgggaa

SEQ ID NO: 12753 - DNA, 20 bp, synthetic construct
  source 1..20: mol_type = other DNA
gagcgccatcatccagaatg

SEQ ID NO: 12754 - DNA, 20 bp, synthetic construct
  source 1..20: mol_type = other DNA
tttcagcagcataaaacctg

SEQ ID NO: 12755 - DNA, 20 bp, synthetic construct
  source 1..20: mol_type = other DNA
agtgtacgagaacacagggg

SEQ ID NO: 12756 - DNA, 20 bp, synthetic construct
  source 1..20: mol_type = other DNA
cctcaaatgtggcaaagaca

SEQ ID NO: 12757 - DNA, 20 bp, synthetic construct
  source 1..20: mol_type = other DNA
gctcctgctgctgcccatcc

SEQ ID NO: 12758 - DNA, 20 bp, synthetic construct
  source 1..20: mol_type = other DNA
agcacctctttgcccaggtg

SEQ ID NO: 12759 - DNA, 20 bp, synthetic construct
  source 1..20: mol_type = other DNA
gccagtgcctggccctgctg

SEQ ID NO: 12760 - DNA, 20 bp, synthetic construct
  source 1..20: mol_type = other DNA
gcagccaggttttgctcccg

SEQ ID NO: 12761 - DNA, 20 bp, synthetic construct
  source 1..20: mol_type = other DNA
cctgcaggccgcgagcccgg

SEQ ID NO: 12762 - DNA, 20 bp, synthetic construct
  source 1..20: mol_type = other DNA
gaagcagcagaccatcatcc

SEQ ID NO: 12763 - DNA, 20 bp, synthetic construct
  source 1..20: mol_type = other DNA
cctcttcctccgcgggggat

SEQ ID NO: 12764 - DNA, 20 bp, synthetic construct
  source 1..20: mol_type = other DNA
atacttcaagaaggtgctgg

SEQ ID NO: 12765 - DNA, 20 bp, synthetic construct
  source 1..20: mol_type = other DNA
gacggagaagcagcagatgc

SEQ ID NO: 12766 - DNA, 20 bp, synthetic construct
  source 1..20: mol_type = other DNA
cggagcgtgatgaatccagt

SEQ ID NO: 12767 - DNA, 20 bp, synthetic construct
  source 1..20: mol_type = other DNA
caacgggcacacgaaggtgg

SEQ ID NO: 12768 - DNA, 20 bp, synthetic construct
  source 1..20: mol_type = other DNA
gctcactcaccaggggcggg

SEQ ID NO: 12769 - DNA, 20 bp, synthetic construct
  source 1..20: mol_type = other DNA
gggagatctatggccgggtg

SEQ ID NO: 12770 - DNA, 20 bp, synthetic construct
  source 1..20: mol_type = other DNA
tcttcagatcgagcttctcc

SEQ ID NO: 12771 - DNA, 20 bp, synthetic construct
  source 1..20: mol_type = other DNA
gctaccggaggtgccagaaa

SEQ ID NO: 12772 - DNA, 20 bp, synthetic construct
  source 1..20: mol_type = other DNA
tcttctaagattgaagaatt

SEQ ID NO: 12773 - DNA, 20 bp, synthetic construct
  source 1..20: mol_type = other DNA
ggccttcctccactgtggag

SEQ ID NO: 12774 - DNA, 20 bp, synthetic construct
  source 1..20: mol_type = other DNA
tccaaaatccagaatctaaa

SEQ ID NO: 12775 - DNA, 20 bp, synthetic construct
  source 1..20: mol_type = other DNA
tataggtcagtgggacagca

SEQ ID NO: 12776 - DNA, 20 bp, synthetic construct
  source 1..20: mol_type = other DNA
catgcagaatcacattcctc

SEQ ID NO: 12777 - DNA, 20 bp, synthetic construct
  source 1..20: mol_type = other DNA
cttaaacggccaaggaagca

SEQ ID NO: 12778 - DNA, 20 bp, synthetic construct
  source 1..20: mol_type = other DNA
cactctcaggacggccttcg

SEQ ID NO: 12779 - DNA, 20 bp, synthetic construct
  source 1..20: mol_type = other DNA
cactcacccgcagggaggag

SEQ ID NO: 12780 - DNA, 20 bp, synthetic construct
  source 1..20: mol_type = other DNA
ctcccttgagaagagattgt

SEQ ID NO: 12781 - DNA, 20 bp, synthetic construct
  source 1..20: mol_type = other DNA
tggaggagaactgccagctc

SEQ ID NO: 12782 - DNA, 20 bp, synthetic construct
  source 1..20: mol_type = other DNA
ttaccttcttcatagttcct

SEQ ID NO: 12783 - DNA, 20 bp, synthetic construct
  source 1..20: mol_type = other DNA
agttagaacaagagggccca

SEQ ID NO: 12784 - DNA, 20 bp, synthetic construct
  source 1..20: mol_type = other DNA
ctacctgctgtgtataagag

SEQ ID NO: 12785 - DNA, 20 bp, synthetic construct
  source 1..20: mol_type = other DNA
tcatcaggaaccatgatcag

SEQ ID NO: 12786 - DNA, 20 bp, synthetic construct
  source 1..20: mol_type = other DNA
catacacccagctctggaac

SEQ ID NO: 12787 - DNA, 20 bp, synthetic construct
  source 1..20: mol_type = other DNA
ggtgtatgtgctgtcctcac

SEQ ID NO: 12788 - DNA, 20 bp, synthetic construct
  source 1..20: mol_type = other DNA
ttcacaaagtctggaaggaa

SEQ ID NO: 12789 - DNA, 20 bp, synthetic construct
  source 1..20: mol_type = other DNA
ccaccacctctgagttgctt

SEQ ID NO: 12790 - DNA, 20 bp, synthetic construct
  source 1..20: mol_type = other DNA
tgtatagggccagtagctta

SEQ ID NO: 12791 - DNA, 20 bp, synthetic construct
  source 1..20: mol_type = other DNA
ctccagggccacggggtcat

SEQ ID NO: 12792 - DNA, 20 bp, synthetic construct
  source 1..20: mol_type = other DNA
cgtcggtgcagaggtaatga

SEQ ID NO: 12793 - DNA, 20 bp, synthetic construct
  source 1..20: mol_type = other DNA
ctgcaggtatgaccccgaag

SEQ ID NO: 12794 - DNA, 20 bp, synthetic construct
  source 1..20: mol_type = other DNA
aggccgaagtgcagagcaac

SEQ ID NO: 12795 - DNA, 20 bp, synthetic construct
  source 1..20: mol_type = other DNA
cgaccgcaaggaggccctgg

SEQ ID NO: 12796 - DNA, 20 bp, synthetic construct
  source 1..20: mol_type = other DNA
ggaccgaatggagaagtctc

SEQ ID NO: 12797 - DNA, 20 bp, synthetic construct
  source 1..20: mol_type = other DNA
ttcacacactccctgccttc

SEQ ID NO: 12798 - DNA, 20 bp, synthetic construct
  source 1..20: mol_type = other DNA
cgcctcctacctttaaccac

SEQ ID NO: 12799 - DNA, 20 bp, synthetic construct
  source 1..20: mol_type = other DNA
cctcctccatcttattcaac

SEQ ID NO: 12800 - DNA, 20 bp, synthetic construct
  source 1..20: mol_type = other DNA
cttcagaaggaggcgggtga

SEQ ID NO: 12801 - DNA, 20 bp, synthetic construct
  source 1..20: mol_type = other DNA
atctcttctcaagggagttc

SEQ ID NO: 12802 - DNA, 20 bp, synthetic construct
  source 1..20: mol_type = other DNA
ctggggcgcccgacgatgga

SEQ ID NO: 12803 - DNA, 20 bp, synthetic construct
  source 1..20: mol_type = other DNA
gtaggcatgtgcaagggctt

SEQ ID NO: 12804 - DNA, 20 bp, synthetic construct
  source 1..20: mol_type = other DNA
tgtatccctggctggacaca

SEQ ID NO: 12805 - DNA, 20 bp, synthetic construct
  source 1..20: mol_type = other DNA
gctcacttacagcactcaac

SEQ ID NO: 12806 - DNA, 20 bp, synthetic construct
  source 1..20: mol_type = other DNA
tgccacttctgctcattgat

SEQ ID NO: 12807 - DNA, 20 bp, synthetic construct
  source 1..20: mol_type = other DNA
cgatctattgctctgtgcaa

SEQ ID NO: 12808 - DNA, 20 bp, synthetic construct
  source 1..20: mol_type = other DNA
ccccagcacacccatcatcc

SEQ ID NO: 12809 - DNA, 20 bp, synthetic construct
  source 1..20: mol_type = other DNA
caggtgagtgagcaaaaggg

SEQ ID NO: 12810 - DNA, 20 bp, synthetic construct
  source 1..20: mol_type = other DNA
gagggattcgggggcatacc

SEQ ID NO: 12811 - DNA, 20 bp, synthetic construct
  source 1..20: mol_type = other DNA
atcaatgtggaacagctgag

SEQ ID NO: 12812 - DNA, 20 bp, synthetic construct
  source 1..20: mol_type = other DNA
ccattatcccatagtcccac

SEQ ID NO: 12813 - DNA, 20 bp, synthetic construct
  source 1..20: mol_type = other DNA
gcaccaaattcccggtgaag

SEQ ID NO: 12814 - DNA, 20 bp, synthetic construct
  source 1..20: mol_type = other DNA
gggagaatgtggagtgtaac

SEQ ID NO: 12815 - DNA, 20 bp, synthetic construct
  source 1..20: mol_type = other DNA
ctcctcaatggctcgatcca

SEQ ID NO: 12816 - DNA, 20 bp, synthetic construct
  source 1..20: mol_type = other DNA
aatcagacaggcacgaaggg

SEQ ID NO: 12817 - DNA, 20 bp, synthetic construct
  source 1..20: mol_type = other DNA
gcttgcccgcgtgcttccag

SEQ ID NO: 12818 - DNA, 20 bp, synthetic construct
  source 1..20: mol_type = other DNA
ttgagggtcgcgccggccgg

SEQ ID NO: 12819 - DNA, 20 bp, synthetic construct
  source 1..20: mol_type = other DNA
cctaaagggaaaggagaatg

SEQ ID NO: 12820 - DNA, 20 bp, synthetic construct
  source 1..20: mol_type = other DNA
caatagatcgctccatggtg

SEQ ID NO: 12821 - DNA, 20 bp, synthetic construct
  source 1..20: mol_type = other DNA
cccccacgagcttgtaggaa

SEQ ID NO: 12822 - DNA, 20 bp, synthetic construct
  source 1..20: mol_type = other DNA
ggtaggagagtgtacggagg

SEQ ID NO: 12823 - DNA, 20 bp, synthetic construct
  source 1..20: mol_type = other DNA
gaatggaccatggtcaggtg

SEQ ID NO: 12824 - DNA, 20 bp, synthetic construct
  source 1..20: mol_type = other DNA
agcccagctctccatcctcc

SEQ ID NO: 12825 - DNA, 20 bp, synthetic construct
  source 1..20: mol_type = other DNA
ttgcaggactccctggcact

SEQ ID NO: 12826 - DNA, 20 bp, synthetic construct
  source 1..20: mol_type = other DNA
atctgaagctgaaggcggac

SEQ ID NO: 12827 - DNA, 20 bp, synthetic construct
  source 1..20: mol_type = other DNA
gattgctcctgagtgtgttg

SEQ ID NO: 12828 - DNA, 20 bp, synthetic construct
  source 1..20: mol_type = other DNA
acgaggaggtggccgagcca

SEQ ID NO: 12829 - DNA, 20 bp, synthetic construct
  source 1..20: mol_type = other DNA
gccaccattgtctttcctag

SEQ ID NO: 12830 - DNA, 20 bp, synthetic construct
  source 1..20: mol_type = other DNA
cggacgggtggtagacggtg

SEQ ID NO: 12831 - DNA, 20 bp, synthetic construct
  source 1..20: mol_type = other DNA
gaatgctccaggcatgtgag

SEQ ID NO: 12832 - DNA, 20 bp, synthetic construct
  source 1..20: mol_type = other DNA
tcctcccagttctgccggaa

SEQ ID NO: 12833 - DNA, 20 bp, synthetic construct
  source 1..20: mol_type = other DNA
tctgtctacaccaagtgagt

SEQ ID NO: 12834 - DNA, 20 bp, synthetic construct
  source 1..20: mol_type = other DNA
gcgtgacttccacatgagcg

SEQ ID NO: 12835 - DNA, 20 bp, synthetic construct
  source 1..20: mol_type = other DNA
atagtggacatctgcatcac

SEQ ID NO: 12836 - DNA, 20 bp, synthetic construct
  source 1..20: mol_type = other DNA
aaatccttacctctttccct

SEQ ID NO: 12837 - DNA, 20 bp, synthetic construct
  source 1..20: mol_type = other DNA
ccgcccagaagagccgacag

SEQ ID NO: 12838 - DNA, 20 bp, synthetic construct
  source 1..20: mol_type = other DNA
atagctccaacccatcctgg

SEQ ID NO: 12839 - DNA, 20 bp, synthetic construct
  source 1..20: mol_type = other DNA
ctgcccgacccggccacggg

SEQ ID NO: 12840 - DNA, 20 bp, synthetic construct
  source 1..20: mol_type = other DNA
cgaggcagatggccacccac

SEQ ID NO: 12841 - DNA, 20 bp, synthetic construct
  source 1..20: mol_type = other DNA
actgggtacctgcgggatgg

SEQ ID NO: 12842 - DNA, 20 bp, synthetic construct
  source 1..20: mol_type = other DNA
aacttacctctcccaagtca

SEQ ID NO: 12843 - DNA, 20 bp, synthetic construct
  source 1..20: mol_type = other DNA
ctacgggagggtaaaggaaa

SEQ ID NO: 12844 - DNA, 20 bp, synthetic construct
  source 1..20: mol_type = other DNA
ttgtgcaagagattggcagt

SEQ ID NO: 12845 - DNA, 20 bp, synthetic construct
  source 1..20: mol_type = other DNA
cgcggtaaaggcgtaccaga

SEQ ID NO: 12846 - DNA, 20 bp, synthetic construct
  source 1..20: mol_type = other DNA
ccatgcccaccatcacgccc

SEQ ID NO: 12847 - DNA, 20 bp, synthetic construct
  source 1..20: mol_type = other DNA
tggtgatagttgatgagaag

SEQ ID NO: 12848 - DNA, 20 bp, synthetic construct
  source 1..20: mol_type = other DNA
ccaccattgccacctgcggg

SEQ ID NO: 12849 - DNA, 20 bp, synthetic construct
  source 1..20: mol_type = other DNA
ttggtgcccaccaggatgat

SEQ ID NO: 12850 - DNA, 20 bp, synthetic construct
  source 1..20: mol_type = other DNA
gctggtcatggagatggctg

SEQ ID NO: 12851 - DNA, 20 bp, synthetic construct
  source 1..20: mol_type = other DNA
cctggatgagcatcttgcgc

SEQ ID NO: 12852 - DNA, 20 bp, synthetic construct
  source 1..20: mol_type = other DNA
ttctgccaggaagacctaga

SEQ ID NO: 12853 - DNA, 20 bp, synthetic construct
  source 1..20: mol_type = other DNA
agctcctgatggggtaggga

SEQ ID NO: 12854 - DNA, 20 bp, synthetic construct
  source 1..20: mol_type = other DNA
ctccaggtgggtgtgggctc

SEQ ID NO: 12855 - DNA, 20 bp, synthetic construct
  source 1..20: mol_type = other DNA
taatccacaggagaacatta

SEQ ID NO: 12856 - DNA, 20 bp, synthetic construct
  source 1..20: mol_type = other DNA
gacaattaccggcgagccta

SEQ ID NO: 12857 - DNA, 20 bp, synthetic construct
  source 1..20: mol_type = other DNA
caaggtcatgcgagacaaca

SEQ ID NO: 12858 - DNA, 20 bp, synthetic construct
  source 1..20: mol_type = other DNA
catggaacaggggaagggcc

SEQ ID NO: 12859 - DNA, 20 bp, synthetic construct
  source 1..20: mol_type = other DNA
ggtcccacagtgttcacaga

SEQ ID NO: 12860 - DNA, 20 bp, synthetic construct
  source 1..20: mol_type = other DNA
cctgcaccagatccttcttg

SEQ ID NO: 12861 - DNA, 20 bp, synthetic construct
  source 1..20: mol_type = other DNA
gactgaaagagaaaacctct

SEQ ID NO: 12862 - DNA, 20 bp, synthetic construct
  source 1..20: mol_type = other DNA
caggcagagctggaaggacg

SEQ ID NO: 12863 - DNA, 20 bp, synthetic construct
  source 1..20: mol_type = other DNA
acttctcacagcaggtggac

SEQ ID NO: 12864 - DNA, 20 bp, synthetic construct
  source 1..20: mol_type = other DNA
tagggcttcaccctgttaca

SEQ ID NO: 12865 - DNA, 20 bp, synthetic construct
  source 1..20: mol_type = other DNA
gattcatacctgctgatgtg

SEQ ID NO: 12866 - DNA, 20 bp, synthetic construct
  source 1..20: mol_type = other DNA
tgccatcaagcagtgccggc

SEQ ID NO: 12867 - DNA, 20 bp, synthetic construct
  source 1..20: mol_type = other DNA
tccatgcctgaaatgaatta

SEQ ID NO: 12868 - DNA, 20 bp, synthetic construct
  source 1..20: mol_type = other DNA
caaggaccagcttaagaccg

SEQ ID NO: 12869 - DNA, 20 bp, synthetic construct
  source 1..20: mol_type = other DNA
gtgggagagggcctctaggt

SEQ ID NO: 12870 - DNA, 20 bp, synthetic construct
  source 1..20: mol_type = other DNA
gctcgcttcttggtaagctc

SEQ ID NO: 12871 - DNA, 20 bp, synthetic construct
  source 1..20: mol_type = other DNA
gcttcttgaggtggctcatg

SEQ ID NO: 12872 - DNA, 20 bp, synthetic construct
  source 1..20: mol_type = other DNA
tccccctgttctgggcgatc

SEQ ID NO: 12873 - DNA, 20 bp, synthetic construct
  source 1..20: mol_type = other DNA
ccggaaggtgctcctggctc

SEQ ID NO: 12874 - DNA, 20 bp, synthetic construct
  source 1..20: mol_type = other DNA
aacagctcatcgtccctgca

SEQ ID NO: 12875 - DNA, 20 bp, synthetic construct
  source 1..20: mol_type = other DNA
aggcgtattgtaccctggaa

SEQ ID NO: 12876 - DNA, 20 bp, synthetic construct
  source 1..20: mol_type = other DNA
cagcgaaggtgtggaagaag

SEQ ID NO: 12877 - DNA, 20 bp, synthetic construct
  source 1..20: mol_type = other DNA
atcacttacatctccagcga

SEQ ID NO: 12878 - DNA, 20 bp, synthetic construct
  source 1..20: mol_type = other DNA
atgatggtggccttcacctg

SEQ ID NO: 12879 - DNA, 20 bp, synthetic construct
  source 1..20: mol_type = other DNA
agatactttctggaaatgag

SEQ ID NO: 12880 - DNA, 20 bp, synthetic construct
  source 1..20: mol_type = other DNA
gccccggctctcaagagcac

SEQ ID NO: 12881 - DNA, 20 bp, synthetic construct
  source 1..20: mol_type = other DNA
gggccaagtttcccattaag

SEQ ID NO: 12882 - DNA, 20 bp, synthetic construct
  source 1..20: mol_type = other DNA
cggctgtgtcccagaggccc

SEQ ID NO: 12883 - DNA, 20 bp, synthetic construct
  source 1..20: mol_type = other DNA
accaaaatcttgtttcctgg

SEQ ID NO: 12884 - DNA, 20 bp, synthetic construct
  source 1..20: mol_type = other DNA
agcgcaggtccatgtcggct

SEQ ID NO: 12885 - DNA, 20 bp, synthetic construct
  source 1..20: mol_type = other DNA
ctgctggaaggtggacagtg

SEQ ID NO: 12886 - DNA, 20 bp, synthetic construct
  source 1..20: mol_type = other DNA
catagccctggattctacac

SEQ ID NO: 12887 - DNA, 20 bp, synthetic construct
  source 1..20: mol_type = other DNA
tggtggcgaggggagatcta

SEQ ID NO: 12888 - DNA, 20 bp, synthetic construct
  source 1..20: mol_type = other DNA
gaagggcctggggggtcagg

SEQ ID NO: 12889 - DNA, 20 bp, synthetic construct
  source 1..20: mol_type = other DNA
aaacacatcgtgtacctcta

SEQ ID NO: 12890 - DNA, 20 bp, synthetic construct
  source 1..20: mol_type = other DNA
aaatcaacaagaacgaagag

SEQ ID NO: 12891 - DNA, 20 bp, synthetic construct
  source 1..20: mol_type = other DNA
ggattctacactggcaaacc

SEQ ID NO: 12892 - DNA, 20 bp, synthetic construct
  source 1..20: mol_type = other DNA
tcaccacaactggcaaggag

SEQ ID NO: 12893 - DNA, 20 bp, synthetic construct
  source 1..20: mol_type = other DNA
aggctggctgtaaagggaca

SEQ ID NO: 12894 - DNA, 20 bp, synthetic construct
  source 1..20: mol_type = other DNA
acatggaaagctcatcttag

SEQ ID NO: 12895 - DNA, 20 bp, synthetic construct
  source 1..20: mol_type = other DNA
cccactggcacacctgagag

SEQ ID NO: 12896 - DNA, 20 bp, synthetic construct
  source 1..20: mol_type = other DNA
cccgctgaaagtccctctgc

SEQ ID NO: 12897 - DNA, 20 bp, synthetic construct
  source 1..20: mol_type = other DNA
acttctactcactctcatga

SEQ ID NO: 12898 - DNA, 20 bp, synthetic construct
  source 1..20: mol_type = other DNA
ttccctcagtgctcaccgac

SEQ ID NO: 12899 - DNA, 20 bp, synthetic construct
  source 1..20: mol_type = other DNA
caggtagggtggctcccttc

SEQ ID NO: 12900 - DNA, 20 bp, synthetic construct
  source 1..20: mol_type = other DNA
tcaggtccacattgttgtcc

SEQ ID NO: 12901 - DNA, 20 bp, synthetic construct
  source 1..20: mol_type = other DNA
caggcctttgtcctcctaag

SEQ ID NO: 12902 - DNA, 20 bp, synthetic construct
  source 1..20: mol_type = other DNA
aatcttcatcttgtgatagg

SEQ ID NO: 12903 - DNA, 20 bp, synthetic construct
  source 1..20: mol_type = other DNA
ccaaacaaccagcgccggag

SEQ ID NO: 12904 - DNA, 20 bp, synthetic construct
  source 1..20: mol_type = other DNA
gctgaccacgtccagccccg

SEQ ID NO: 12905 - DNA, 20 bp, synthetic construct
  source 1..20: mol_type = other DNA
gaactgtacaaactggtgac

SEQ ID NO: 12906 - DNA, 20 bp, synthetic construct
  source 1..20: mol_type = other DNA
gccagcttcctcctgaggaa

SEQ ID NO: 12907 - DNA, 20 bp, synthetic construct
  source 1..20: mol_type = other DNA
cgccgacgagcggatgaagg

SEQ ID NO: 12908 - DNA, 20 bp, synthetic construct
  source 1..20: mol_type = other DNA
catcaggaaccatgatcaga

SEQ ID NO: 12909 - DNA, 20 bp, synthetic construct
  source 1..20: mol_type = other DNA
gacagcggagcagcaagagc

SEQ ID NO: 12910 - DNA, 20 bp, synthetic construct
  source 1..20: mol_type = other DNA
tgccagggtctacctgaacg

SEQ ID NO: 12911 - DNA, 20 bp, synthetic construct
  source 1..20: mol_type = other DNA
gggctctggggagcgaagag

SEQ ID NO: 12912 - DNA, 20 bp, synthetic construct
  source 1..20: mol_type = other DNA
ctcttcctccgcgggggatg

SEQ ID NO: 12913 - DNA, 20 bp, synthetic construct
  source 1..20: mol_type = other DNA
caccttgcagttccccttca

SEQ ID NO: 12914 - DNA, 20 bp, synthetic construct
  source 1..20: mol_type = other DNA
cccagcccagctgctgccgg

SEQ ID NO: 12915 - DNA, 20 bp, synthetic construct
  source 1..20: mol_type = other DNA
cggacagacggtgagtccac

SEQ ID NO: 12916 - DNA, 20 bp, synthetic construct
  source 1..20: mol_type = other DNA
gttacctcatagtctgggtt

SEQ ID NO: 12917 - DNA, 20 bp, synthetic construct
  source 1..20: mol_type = other DNA
acacttcatgatggagttga

SEQ ID NO: 12918 - DNA, 20 bp, synthetic construct
  source 1..20: mol_type = other DNA
cgccaggtgcaggggcgtct

SEQ ID NO: 12919 - DNA, 20 bp, synthetic construct
  source 1..20: mol_type = other DNA
gggagcagagatgtgggaat

SEQ ID NO: 12920 - DNA, 20 bp, synthetic construct
  source 1..20: mol_type = other DNA
cggggaggcgcccactcacc

SEQ ID NO: 12921 - DNA, 20 bp, synthetic construct
  source 1..20: mol_type = other DNA
cggagagtaagggcataggt

SEQ ID NO: 12922 - DNA, 20 bp, synthetic construct
  source 1..20: mol_type = other DNA
ccttcattgggtacaaggag

SEQ ID NO: 12923 - DNA, 20 bp, synthetic construct
  source 1..20: mol_type = other DNA
tgctgcttaggtgagaatct

SEQ ID NO: 12924 - DNA, 20 bp, synthetic construct
  source 1..20: mol_type = other DNA
ggtcgagtggggactgcagg

SEQ ID NO: 12925 - DNA, 20 bp, synthetic construct
  source 1..20: mol_type = other DNA
cctggtgcaggtggttggtg

SEQ ID NO: 12926 - DNA, 20 bp, synthetic construct
  source 1..20: mol_type = other DNA
cagagaaaaaggctttccgg

SEQ ID NO: 12927 - DNA, 20 bp, synthetic construct
  source 1..20: mol_type = other DNA
ccaactcaacaagagcaaca

SEQ ID NO: 12928 - DNA, 20 bp, synthetic construct
  source 1..20: mol_type = other DNA
atggactgaatgcgaatgat

SEQ ID NO: 12929 - DNA, 20 bp, synthetic construct
  source 1..20: mol_type = other DNA
gcagtcagacatctggagca

SEQ ID NO: 12930 - DNA, 20 bp, synthetic construct
  source 1..20: mol_type = other DNA
acacccatccaacctgatgc

SEQ ID NO: 12931 - DNA, 20 bp, synthetic construct
  source 1..20: mol_type = other DNA
gcttacctcactctgtcata

SEQ ID NO: 12932 - DNA, 20 bp, synthetic construct
  source 1..20: mol_type = other DNA
ggtaaaggccagtctagtgg

SEQ ID NO: 12933 - DNA, 20 bp, synthetic construct
  source 1..20: mol_type = other DNA
gcagctccttgatatcctgc

SEQ ID NO: 12934 - DNA, 20 bp, synthetic construct
  source 1..20: mol_type = other DNA
gatctgcgccttgggggcca

SEQ ID NO: 12935 - DNA, 20 bp, synthetic construct
  source 1..20: mol_type = other DNA
gtcctttgtgagtatggtgt

SEQ ID NO: 12936 - DNA, 20 bp, synthetic construct
  source 1..20: mol_type = other DNA
catctgtaggtctgagattg

SEQ ID NO: 12937 - DNA, 20 bp, synthetic construct
  source 1..20: mol_type = other DNA
gaccttacactgacgcaggt

SEQ ID NO: 12938 - DNA, 20 bp, synthetic construct
  source 1..20: mol_type = other DNA
aagactagatgttcctgaaa

SEQ ID NO: 12939 - DNA, 20 bp, synthetic construct
  source 1..20: mol_type = other DNA
gcttcaggtttactcaaaaa

SEQ ID NO: 12940 - DNA, 20 bp, synthetic construct
  source 1..20: mol_type = other DNA
caaactggtgcagctgtatg

SEQ ID NO: 12941 - DNA, 20 bp, synthetic construct
  source 1..20: mol_type = other DNA
ggtggagtatctgaagctga

SEQ ID NO: 12942 - DNA, 20 bp, synthetic construct
  source 1..20: mol_type = other DNA
atacaggtacacagctgggg

SEQ ID NO: 12943 - DNA, 20 bp, synthetic construct
  source 1..20: mol_type = other DNA
gcagctgaaccccgaggcgc

SEQ ID NO: 12944 - DNA, 20 bp, synthetic construct
  source 1..20: mol_type = other DNA
ccatggctgaggcgcccgcc

SEQ ID NO: 12945 - DNA, 20 bp, synthetic construct
  source 1..20: mol_type = other DNA
cagcgacccagaggagctca

SEQ ID NO: 12946 - DNA, 20 bp, synthetic construct
  source 1..20: mol_type = other DNA
tcatccggtagtggagccgg

SEQ ID NO: 12947 - DNA, 20 bp, synthetic construct
  source 1..20: mol_type = other DNA
ctctctttctgtaaacaaga

SEQ ID NO: 12948 - DNA, 20 bp, synthetic construct
  source 1..20: mol_type = other DNA
atcgtgatggactccggtga

SEQ ID NO: 12949 - DNA, 20 bp, synthetic construct
  source 1..20: mol_type = other DNA
gtagtgctttggcatatgct

SEQ ID NO: 12950 - DNA, 20 bp, synthetic construct
  source 1..20: mol_type = other DNA
caggcatgagcgccacggtg

SEQ ID NO: 12951 - DNA, 20 bp, synthetic construct
  source 1..20: mol_type = other DNA
ttacctgaagtgaaggccct

SEQ ID NO: 12952 - DNA, 20 bp, synthetic construct
  source 1..20: mol_type = other DNA
caccaagtggaacaagcatg

SEQ ID NO: 12953 - DNA, 20 bp, synthetic construct
  source 1..20: mol_type = other DNA
ccaagactgcctttgactct

SEQ ID NO: 12954 - DNA, 20 bp, synthetic construct
  source 1..20: mol_type = other DNA
gtccttgctcggggagctgc

SEQ ID NO: 12955 - DNA, 20 bp, synthetic construct
  source 1..20: mol_type = other DNA
caggacgcggacgagcgtcg

SEQ ID NO: 12956 - DNA, 20 bp, synthetic construct
  source 1..20: mol_type = other DNA
tcacctttgaattcagccag

SEQ ID NO: 12957 - DNA, 20 bp, synthetic construct
  source 1..20: mol_type = other DNA
ccagtcaaccagcagttcca

SEQ ID NO: 12958 - DNA, 20 bp, synthetic construct
  source 1..20: mol_type = other DNA
tcggtggggaagggcctggg

SEQ ID NO: 12959 - DNA, 20 bp, synthetic construct
  source 1..20: mol_type = other DNA
ctcaccagacttcagccagc

SEQ ID NO: 12960 - DNA, 20 bp, synthetic construct
  source 1..20: mol_type = other DNA
ctacgggccacagagggcgt

SEQ ID NO: 12961 - DNA, 20 bp, synthetic construct
  source 1..20: mol_type = other DNA
ttgctacgacggcccacgag

SEQ ID NO: 12962 - DNA, 20 bp, synthetic construct
  source 1..20: mol_type = other DNA
aaggagaaagataggcgctg

SEQ ID NO: 12963 - DNA, 20 bp, synthetic construct
  source 1..20: mol_type = other DNA
caagctgcagcagcagatga

SEQ ID NO: 12964 - DNA, 20 bp, synthetic construct
  source 1..20: mol_type = other DNA
gatcaacgggggggccacgt

SEQ ID NO: 12965 - DNA, 20 bp, synthetic construct
  source 1..20: mol_type = other DNA
gagaaggctggccgatcttc

SEQ ID NO: 12966 - DNA, 20 bp, synthetic construct
  source 1..20: mol_type = other DNA
ggcacaggcctacaacccga

SEQ ID NO: 12967 - DNA, 20 bp, synthetic construct
  source 1..20: mol_type = other DNA
ggatcaggcgcccgagggcc

SEQ ID NO: 12968 - DNA, 20 bp, synthetic construct
  source 1..20: mol_type = other DNA
gcaagtaccccgggctggtg

SEQ ID NO: 12969 - DNA, 20 bp, synthetic construct
  source 1..20: mol_type = other DNA
ggcactgaggaaagagaaga

SEQ ID NO: 12970 - DNA, 20 bp, synthetic construct
  source 1..20: mol_type = other DNA
ctgaccttattgatttcatg

SEQ ID NO: 12971 - DNA, 20 bp, synthetic construct
  source 1..20: mol_type = other DNA
ctggcgcccgggaacactca

SEQ ID NO: 12972 - DNA, 20 bp, synthetic construct
  source 1..20: mol_type = other DNA
cgaagctcaggccctggatc

SEQ ID NO: 12973 - DNA, 20 bp, synthetic construct
  source 1..20: mol_type = other DNA
ccagggccacggggtcatgg

SEQ ID NO: 12974 - DNA, 20 bp, synthetic construct
  source 1..20: mol_type = other DNA
gcggttggccttggggttca

SEQ ID NO: 12975 - DNA, 20 bp, synthetic construct
  source 1..20: mol_type = other DNA
acaagaagggacagcaaggc

SEQ ID NO: 12976 - DNA, 20 bp, synthetic construct
  source 1..20: mol_type = other DNA
atccaggtgcatgggtgtgg

SEQ ID NO: 12977 - DNA, 20 bp, synthetic construct
  source 1..20: mol_type = other DNA
caaagagtcgctggttctcg

SEQ ID NO: 12978 - DNA, 20 bp, synthetic construct
  source 1..20: mol_type = other DNA
atctcggagctggaaggtga

SEQ ID NO: 12979 - DNA, 20 bp, synthetic construct
  source 1..20: mol_type = other DNA
gcgatgcattcgaacgcgtt

SEQ ID NO: 12980 - DNA, 20 bp, synthetic construct
  source 1..20: mol_type = other DNA
gccttccactgtggggagat

SEQ ID NO: 12981 - DNA, 20 bp, synthetic construct
  source 1..20: mol_type = other DNA
tcgtcccccctgccgctctg

SEQ ID NO: 12982 - DNA, 20 bp, synthetic construct
  source 1..20: mol_type = other DNA
agaaggtggcagtgaactcg

SEQ ID NO: 12983 - DNA, 20 bp, synthetic construct
  source 1..20: mol_type = other DNA
tggatgccatgagggtgagt

SEQ ID NO: 12984 - DNA, 20 bp, synthetic construct
  source 1..20: mol_type = other DNA
ggcccagcaggagcgcaggg

SEQ ID NO: 12985 - DNA, 20 bp, synthetic construct
  source 1..20: mol_type = other DNA
agaattcattaaatgaagag

SEQ ID NO: 12986 - DNA, 20 bp, synthetic construct
  source 1..20: mol_type = other DNA
ttgtagatgacattgaggtt

SEQ ID NO: 12987 - DNA, 20 bp, synthetic construct
  source 1..20: mol_type = other DNA
agcgaaggtgtggaagaagg

SEQ ID NO: 12988 - DNA, 20 bp, synthetic construct
  source 1..20: mol_type = other DNA
ggaagttgaagaggcaccag

SEQ ID NO: 12989 - DNA, 20 bp, synthetic construct
  source 1..20: mol_type = other DNA
agtacttgcccgccttgtct

SEQ ID NO: 12990 - DNA, 20 bp, synthetic construct
  source 1..20: mol_type = other DNA
tgtcaaggacaagatcggcg

SEQ ID NO: 12991 - DNA, 20 bp, synthetic construct
  source 1..20: mol_type = other DNA
agagatgatcatcaccaagc

SEQ ID NO: 12992 - DNA, 20 bp, synthetic construct
  source 1..20: mol_type = other DNA
caggggccggatgcttctga

SEQ ID NO: 12993 - DNA, 20 bp, synthetic construct
  source 1..20: mol_type = other DNA
acatcacccagtcccgaaca

SEQ ID NO: 12994 - DNA, 20 bp, synthetic construct
  source 1..20: mol_type = other DNA
tggcctagcacgcctcattg

SEQ ID NO: 12995 - DNA, 20 bp, synthetic construct
  source 1..20: mol_type = other DNA
gggccctgaccacgctcatg

SEQ ID NO: 12996 - DNA, 20 bp, synthetic construct
  source 1..20: mol_type = other DNA
agctgtggagtgggggatga

SEQ ID NO: 12997 - DNA, 20 bp, synthetic construct
  source 1..20: mol_type = other DNA
cacctgcagtgaatgagtag

SEQ ID NO: 12998 - DNA, 20 bp, synthetic construct
  source 1..20: mol_type = other DNA
ccccgctgaggcccacgagg

SEQ ID NO: 12999 - DNA, 20 bp, synthetic construct
  source 1..20: mol_type = other DNA
ggcgtctggggatgaaagca

SEQ ID NO: 13000 - DNA, 20 bp, synthetic construct
  source 1..20: mol_type = other DNA
cagagacattgccatggggc

SEQ ID NO: 13001 - DNA, 20 bp, synthetic construct
  source 1..20: mol_type = other DNA
ccaggtacgaggagtcatga

SEQ ID NO: 13002 - DNA, 20 bp, synthetic construct
  source 1..20: mol_type = other DNA
tattgacctaggatatgcca

SEQ ID NO: 13003 - DNA, 20 bp, synthetic construct
  source 1..20: mol_type = other DNA
tgctgcctgtaaggaacagt

SEQ ID NO: 13004 - DNA, 20 bp, synthetic construct
  source 1..20: mol_type = other DNA
acattaagtcccctccgttg

SEQ ID NO: 13005 - DNA, 20 bp, synthetic construct
  source 1..20: mol_type = other DNA
ctacagtcctggtaatggtg

SEQ ID NO: 13006 - DNA, 20 bp, synthetic construct
  source 1..20: mol_type = other DNA
agaccaggtgccccagcatg

SEQ ID NO: 13007 - DNA, 20 bp, synthetic construct
  source 1..20: mol_type = other DNA
ggggacccggtagttgacct

SEQ ID NO: 13008 - DNA, 20 bp, synthetic construct
  source 1..20: mol_type = other DNA
cacccgtccgcctacctgag

SEQ ID NO: 13009 - DNA, 20 bp, synthetic construct
  source 1..20: mol_type = other DNA
cgatgcattcgaacgcgttg

SEQ ID NO: 13010 - DNA, 20 bp, synthetic construct
  source 1..20: mol_type = other DNA
atctctcagactccccagac

SEQ ID NO: 13011 - DNA, 20 bp, synthetic construct
  source 1..20: mol_type = other DNA
gctcctgcaccaggccctcc

SEQ ID NO: 13012 - DNA, 20 bp, synthetic construct
  source 1..20: mol_type = other DNA
ggtacaggaagttgagcctc

SEQ ID NO: 13013 - DNA, 20 bp, synthetic construct
  source 1..20: mol_type = other DNA
gatgtccccaacaaagtctg

SEQ ID NO: 13014 - DNA, 20 bp, synthetic construct
  source 1..20: mol_type = other DNA
ttacaccgtcaaggatgacc

SEQ ID NO: 13015 - DNA, 20 bp, synthetic construct
  source 1..20: mol_type = other DNA
caggaagcagatccgcgagc

SEQ ID NO: 13016 - DNA, 20 bp, synthetic construct
  source 1..20: mol_type = other DNA
gcagaaggagatcactgccc

SEQ ID NO: 13017 - DNA, 20 bp, synthetic construct
  source 1..20: mol_type = other DNA
tgaggtagtcggtcaggtcc

SEQ ID NO: 13018 - DNA, 20 bp, synthetic construct
  source 1..20: mol_type = other DNA
gctctccacgaggatgtttc

SEQ ID NO: 13019 - DNA, 20 bp, synthetic construct
  source 1..20: mol_type = other DNA
ccgccttaaaccactcctct

SEQ ID NO: 13020 - DNA, 20 bp, synthetic construct
  source 1..20: mol_type = other DNA
tattgaagttctgtagttgg

SEQ ID NO: 13021 - DNA, 20 bp, synthetic construct
  source 1..20: mol_type = other DNA
agaagaggacttcatagagg

SEQ ID NO: 13022 - DNA, 20 bp, synthetic construct
  source 1..20: mol_type = other DNA
cctgagctcacctgaggcgg

SEQ ID NO: 13023 - DNA, 20 bp, synthetic construct
  source 1..20: mol_type = other DNA
tgggtgccacgtagttggca

SEQ ID NO: 13024 - DNA, 20 bp, synthetic construct
  source 1..20: mol_type = other DNA
ccaagtaaggagactgggga

SEQ ID NO: 13025 - DNA, 20 bp, synthetic construct
  source 1..20: mol_type = other DNA
ctggtaaaggagacacagct

SEQ ID NO: 13026 - DNA, 20 bp, synthetic construct
  source 1..20: mol_type = other DNA
cctgagctcccgctgcccag

SEQ ID NO: 13027 - DNA, 20 bp, synthetic construct
  source 1..20: mol_type = other DNA
agggaccagtacatgaggac

SEQ ID NO: 13028 - DNA, 20 bp, synthetic construct
  source 1..20: mol_type = other DNA
acccacatccgcacccacac

SEQ ID NO: 13029 - DNA, 20 bp, synthetic construct
  source 1..20: mol_type = other DNA
ctgagactgcaagggaagga

SEQ ID NO: 13030 - DNA, 20 bp, synthetic construct
  source 1..20: mol_type = other DNA
ggctcccatcacctacccgc

SEQ ID NO: 13031 - DNA, 20 bp, synthetic construct
  source 1..20: mol_type = other DNA
cttcaggtttactcaaaaac

SEQ ID NO: 13032 - DNA, 20 bp, synthetic construct
  source 1..20: mol_type = other DNA
ctcccgctggtcagtctggg

SEQ ID NO: 13033 - DNA, 20 bp, synthetic construct
  source 1..20: mol_type = other DNA
gaagcagatccgcgagctgg

SEQ ID NO: 13034 - DNA, 20 bp, synthetic construct
  source 1..20: mol_type = other DNA
agcaccaggtgggggaagat

SEQ ID NO: 13035 - DNA, 20 bp, synthetic construct
  source 1..20: mol_type = other DNA
cctccttctttgaggagaaa

SEQ ID NO: 13036 - DNA, 20 bp, synthetic construct
  source 1..20: mol_type = other DNA
ggaggaggcccgccaggcag

SEQ ID NO: 13037 - DNA, 20 bp, synthetic construct
  source 1..20: mol_type = other DNA
tggaagcatgctgccaagca

SEQ ID NO: 13038 - DNA, 20 bp, synthetic construct
  source 1..20: mol_type = other DNA
gaaagtggccaaaatcaatg

SEQ ID NO: 13039 - DNA, 20 bp, synthetic construct
  source 1..20: mol_type = other DNA
actgggccagcttcctcctg

SEQ ID NO: 13040 - DNA, 20 bp, synthetic construct
  source 1..20: mol_type = other DNA
caagtgagtgccagtgggga

SEQ ID NO: 13041 - DNA, 20 bp, synthetic construct
  source 1..20: mol_type = other DNA
catctcttcaggtgcccgct

SEQ ID NO: 13042 - DNA, 20 bp, synthetic construct
  source 1..20: mol_type = other DNA
agcacccacctcaatagaga

SEQ ID NO: 13043 - DNA, 20 bp, synthetic construct
  source 1..20: mol_type = other DNA
cagcgaggtgagcccatgcg

SEQ ID NO: 13044 - DNA, 20 bp, synthetic construct
  source 1..20: mol_type = other DNA
gcgctggacgtggagaagag

SEQ ID NO: 13045 - DNA, 20 bp, synthetic construct
  source 1..20: mol_type = other DNA
ctgagcgcaagtactccgtg

SEQ ID NO: 13046 - DNA, 20 bp, synthetic construct
  source 1..20: mol_type = other DNA
tgttcatgtagtcactgtgc

SEQ ID NO: 13047 - DNA, 20 bp, synthetic construct
  source 1..20: mol_type = other DNA
ctatagcttgctagtaacag

SEQ ID NO: 13048 - DNA, 20 bp, synthetic construct
  source 1..20: mol_type = other DNA
ctgaatagttgtcaaacctg

SEQ ID NO: 13049 - DNA, 20 bp, synthetic construct
  source 1..20: mol_type = other DNA
gtggcagacagagcaaaatg

SEQ ID NO: 13050 - DNA, 20 bp, synthetic construct
  source 1..20: mol_type = other DNA
ccagggcgctgaatgatggc

SEQ ID NO: 13051 - DNA, 20 bp, synthetic construct
  source 1..20: mol_type = other DNA
cgagaggcagagtgtcccgt

SEQ ID NO: 13052 - DNA, 20 bp, synthetic construct
  source 1..20: mol_type = other DNA
ttcataaaggagaaccccga

SEQ ID NO: 13053 - DNA, 20 bp, synthetic construct
  source 1..20: mol_type = other DNA
caagaagttcctggttggca

SEQ ID NO: 13054 - DNA, 20 bp, synthetic construct
  source 1..20: mol_type = other DNA
gcccaggtgacgtccttgct

SEQ ID NO: 13055 - DNA, 20 bp, synthetic construct
  source 1..20: mol_type = other DNA
catccagtgcgctcctgtgt

SEQ ID NO: 13056 - DNA, 20 bp, synthetic construct
  source 1..20: mol_type = other DNA
ccaagcagggacggtgagtg

SEQ ID NO: 13057 - DNA, 20 bp, synthetic construct
  source 1..20: mol_type = other DNA
cctgctggtagtgcgtgatg

SEQ ID NO: 13058 - DNA, 20 bp, synthetic construct
  source 1..20: mol_type = other DNA
gccacgaacgacagagcctc

SEQ ID NO: 13059 - DNA, 20 bp, synthetic construct
  source 1..20: mol_type = other DNA
taaatctgagaagagagaat

SEQ ID NO: 13060 - DNA, 20 bp, synthetic construct
  source 1..20: mol_type = other DNA
gcagtcggacatctggagca

SEQ ID NO: 13061 - DNA, 20 bp, synthetic construct
  source 1..20: mol_type = other DNA
ttccaagaccagtctctgcg

SEQ ID NO: 13062 - DNA, 20 bp, synthetic construct
  source 1..20: mol_type = other DNA
gccgtgccagtccccacagc

SEQ ID NO: 13063 - DNA, 20 bp, synthetic construct
  source 1..20: mol_type = other DNA
catacgggcagcacgacgcg

SEQ ID NO: 13064 - DNA, 20 bp, synthetic construct
  source 1..20: mol_type = other DNA
acaaggaccagcttaagacc

SEQ ID NO: 13065 - DNA, 20 bp, synthetic construct
  source 1..20: mol_type = other DNA
gtactctccgggaaaggcgt

SEQ ID NO: 13066 - DNA, 20 bp, synthetic construct
  source 1..20: mol_type = other DNA
cacttcaaggtgctccgaga

SEQ ID NO: 13067 - DNA, 20 bp, synthetic construct
  source 1..20: mol_type = other DNA
tgcggcattatttatcccag

SEQ ID NO: 13068 - DNA, 20 bp, synthetic construct
  source 1..20: mol_type = other DNA
ggcaagaaggaagcgaggag

SEQ ID NO: 13069 - DNA, 20 bp, synthetic construct
  source 1..20: mol_type = other DNA
ccaccaggcgcaggacgggc

SEQ ID NO: 13070 - DNA, 20 bp, synthetic construct
  source 1..20: mol_type = other DNA
cggagtcgagtcaccaggcc

SEQ ID NO: 13071 - DNA, 20 bp, synthetic construct
  source 1..20: mol_type = other DNA
caaaggactggatagtgctg

SEQ ID NO: 13072 - DNA, 20 bp, synthetic construct
  source 1..20: mol_type = other DNA
ttacctctaggtcaatcttg

SEQ ID NO: 13073 - DNA, 20 bp, synthetic construct
  source 1..20: mol_type = other DNA
cagcaaaaagtttcctacaa

SEQ ID NO: 13074 - DNA, 20 bp, synthetic construct
  source 1..20: mol_type = other DNA
tggaggctttaagcttggcg

SEQ ID NO: 13075 - DNA, 20 bp, synthetic construct
  source 1..20: mol_type = other DNA
ttcaagaaatgctgcgggga

SEQ ID NO: 13076 - DNA, 20 bp, synthetic construct
  source 1..20: mol_type = other DNA
gcgagtgagtgcgaccactg

SEQ ID NO: 13077 - DNA, 20 bp, synthetic construct
  source 1..20: mol_type = other DNA
tcaggaggagcaatgatctg

SEQ ID NO: 13078 - DNA, 20 bp, synthetic construct
  source 1..20: mol_type = other DNA
gctgggctccatccagcagg

SEQ ID NO: 13079 - DNA, 20 bp, synthetic construct
  source 1..20: mol_type = other DNA
gtcgtttcccgggggctcgg

SEQ ID NO: 13080 - DNA, 20 bp, synthetic construct
  source 1..20: mol_type = other DNA
acttcccaaaagctgatgcc

SEQ ID NO: 13081 - DNA, 20 bp, synthetic construct
  source 1..20: mol_type = other DNA
ctacagctggtggtgcaggc

SEQ ID NO: 13082 - DNA, 20 bp, synthetic construct
  source 1..20: mol_type = other DNA
agtcagacaccttgatgact

SEQ ID NO: 13083 - DNA, 20 bp, synthetic construct
  source 1..20: mol_type = other DNA
atcaggtgagtaggatggag

SEQ ID NO: 13084 - DNA, 20 bp, synthetic construct
  source 1..20: mol_type = other DNA
ccagacgctgagccccccgg

SEQ ID NO: 13085 - DNA, 20 bp, synthetic construct
  source 1..20: mol_type = other DNA
ggacggagggccacatgtag

SEQ ID NO: 13086 - DNA, 20 bp, synthetic construct
  source 1..20: mol_type = other DNA
cacttaccgtcagccgctct

SEQ ID NO: 13087 - DNA, 20 bp, synthetic construct
  source 1..20: mol_type = other DNA
agtcccaatgatgaccagga

SEQ ID NO: 13088 - DNA, 20 bp, synthetic construct
  source 1..20: mol_type = other DNA
cacctggagaaagcaaagat

SEQ ID NO: 13089 - DNA, 20 bp, synthetic construct
  source 1..20: mol_type = other DNA
ggtagggatccatgaagcag

SEQ ID NO: 13090 - DNA, 20 bp, synthetic construct
  source 1..20: mol_type = other DNA
tctgtgatgtggcgatctac

SEQ ID NO: 13091 - DNA, 20 bp, synthetic construct
  source 1..20: mol_type = other DNA
tccaggacccacgggaaccc

SEQ ID NO: 13092 - DNA, 20 bp, synthetic construct
  source 1..20: mol_type = other DNA
cccgcagctgcagctgctga

SEQ ID NO: 13093 - DNA, 20 bp, synthetic construct
  source 1..20: mol_type = other DNA
ggctctcacttgaatccact

SEQ ID NO: 13094 - DNA, 20 bp, synthetic construct
  source 1..20: mol_type = other DNA
atcttctggtttgcttcctc

SEQ ID NO: 13095 - DNA, 20 bp, synthetic construct
  source 1..20: mol_type = other DNA
ttttcagcaggtattccacc

SEQ ID NO: 13096 - DNA, 20 bp, synthetic construct
  source 1..20: mol_type = other DNA
cgggcagagctcagggtgac

SEQ ID NO: 13097 - DNA, 20 bp, synthetic construct
  source 1..20: mol_type = other DNA
ttctgggagtcaaaggtcag

SEQ ID NO: 13098 - DNA, 20 bp, synthetic construct
  source 1..20: mol_type = other DNA
gacaagccaatccgaagaaa

SEQ ID NO: 13099 - DNA, 20 bp, synthetic construct
  source 1..20: mol_type = other DNA
cagcttgttgtgcaggcggc

SEQ ID NO: 13100 - DNA, 20 bp, synthetic construct
  source 1..20: mol_type = other DNA
aggaacgtgggcatgacctg

SEQ ID NO: 13101 - DNA, 20 bp, synthetic construct
  source 1..20: mol_type = other DNA
tattactgtggttccagaga

SEQ ID NO: 13102 - DNA, 20 bp, synthetic construct
  source 1..20: mol_type = other DNA
accaggtcactgcggtgctg

SEQ ID NO: 13103 - DNA, 20 bp, synthetic construct
  source 1..20: mol_type = other DNA
tacaagcttcacaatgtaag

SEQ ID NO: 13104 - DNA, 20 bp, synthetic construct
  source 1..20: mol_type = other DNA
gatggcaagggcacggtaag

SEQ ID NO: 13105 - DNA, 20 bp, synthetic construct
  source 1..20: mol_type = other DNA
cctcagacaggaagttgaag

SEQ ID NO: 13106 - DNA, 20 bp, synthetic construct
  source 1..20: mol_type = other DNA
ctttgagcttggggtgctcc

SEQ ID NO: 13107 - DNA, 20 bp, synthetic construct
  source 1..20: mol_type = other DNA
aagcttgtagtagagcccac

SEQ ID NO: 13108 - DNA, 20 bp, synthetic construct
  source 1..20: mol_type = other DNA
cactgatggctgtgataggt

SEQ ID NO: 13109 - DNA, 20 bp, synthetic construct
  source 1..20: mol_type = other DNA
ccatcaacaagctcaagact

SEQ ID NO: 13110 - DNA, 20 bp, synthetic construct
  source 1..20: mol_type = other DNA
gcactgaggaaagagaagat

SEQ ID NO: 13111 - DNA, 20 bp, synthetic construct
  source 1..20: mol_type = other DNA
catctggcttgttaatgagt

SEQ ID NO: 13112 - DNA, 20 bp, synthetic construct
  source 1..20: mol_type = other DNA
cgtcagagcgggagaaccgc

SEQ ID NO: 13113 - DNA, 20 bp, synthetic construct
  source 1..20: mol_type = other DNA
gaaatgataaattctctctg

SEQ ID NO: 13114 - DNA, 20 bp, synthetic construct
  source 1..20: mol_type = other DNA
ggagccacagctcaagcact

SEQ ID NO: 13115 - DNA, 20 bp, synthetic construct
  source 1..20: mol_type = other DNA
gacaatgatgccagccacgg

SEQ ID NO: 13116 - DNA, 20 bp, synthetic construct
  source 1..20: mol_type = other DNA
acctccaccattgccacctg

SEQ ID NO: 13117 - DNA, 20 bp, synthetic construct
  source 1..20: mol_type = other DNA
tgagatgcacacccagaatg

SEQ ID NO: 13118 - DNA, 20 bp, synthetic construct
  source 1..20: mol_type = other DNA
gtgcactgcagtgcaggcat

SEQ ID NO: 13119 - DNA, 20 bp, synthetic construct
  source 1..20: mol_type = other DNA
tatgtgcaggactgccaagc

SEQ ID NO: 13120 - DNA, 20 bp, synthetic construct
  source 1..20: mol_type = other DNA
agacccagtgcagctccagg

SEQ ID NO: 13121 - DNA, 20 bp, synthetic construct
  source 1..20: mol_type = other DNA
ttcagggtgtcagatcacat

SEQ ID NO: 13122 - DNA, 20 bp, synthetic construct
  source 1..20: mol_type = other DNA
gctaatccacatctgctgga

SEQ ID NO: 13123 - DNA, 20 bp, synthetic construct
  source 1..20: mol_type = other DNA
cccaccgaggaggagagtgt

SEQ ID NO: 13124 - DNA, 20 bp, synthetic construct
  source 1..20: mol_type = other DNA
tcattgtctaggtaaggagg

SEQ ID NO: 13125 - DNA, 20 bp, synthetic construct
  source 1..20: mol_type = other DNA
aagagccaaaggtgacctat

SEQ ID NO: 13126 - DNA, 20 bp, synthetic construct
  source 1..20: mol_type = other DNA
acgcaggatggcatggggga

SEQ ID NO: 13127 - DNA, 20 bp, synthetic construct
  source 1..20: mol_type = other DNA
tacctcggtagctgtggatg

SEQ ID NO: 13128 - DNA, 20 bp, synthetic construct
  source 1..20: mol_type = other DNA
ctcattgatgggaaaaaccg

SEQ ID NO: 13129 - DNA, 20 bp, synthetic construct
  source 1..20: mol_type = other DNA
tccaaggtgaggcgcggtgg

SEQ ID NO: 13130 - DNA, 20 bp, synthetic construct
  source 1..20: mol_type = other DNA
tccacggagaagatgtggct

SEQ ID NO: 13131 - DNA, 20 bp, synthetic construct
  source 1..20: mol_type = other DNA
cgatcttctggtctctggag

SEQ ID NO: 13132 - DNA, 20 bp, synthetic construct
  source 1..20: mol_type = other DNA
acagcaacagcaggtgagga

SEQ ID NO: 13133 - DNA, 20 bp, synthetic construct
  source 1..20: mol_type = other DNA
cgccccatggagcggccccc

SEQ ID NO: 13134 - DNA, 20 bp, synthetic construct
  source 1..20: mol_type = other DNA
ccgcaggacaaaacaaggag

SEQ ID NO: 13135 - DNA, 20 bp, synthetic construct
  source 1..20: mol_type = other DNA
ttcctacaatctcttctcaa

SEQ ID NO: 13136 - DNA, 20 bp, synthetic construct
  source 1..20: mol_type = other DNA
tcatagatgccagacaaagg

SEQ ID NO: 13137 - DNA, 20 bp, synthetic construct
  source 1..20: mol_type = other DNA
ccccggctctcaagagcacc

SEQ ID NO: 13138 - DNA, 20 bp, synthetic construct
  source 1..20: mol_type = other DNA
tggagtgggtaagaggccct

SEQ ID NO: 13139 - DNA, 20 bp, synthetic construct
  source 1..20: mol_type = other DNA
gccccatggagcggcccccg

SEQ ID NO: 13140 - DNA, 20 bp, synthetic construct
  source 1..20: mol_type = other DNA
atgtatccctggctggacac

SEQ ID NO: 13141 - DNA, 20 bp, synthetic construct
  source 1..20: mol_type = other DNA
tgtggcgagctacgagaacg

SEQ ID NO: 13142 - DNA, 20 bp, synthetic construct
  source 1..20: mol_type = other DNA
ctgcagatcaaagcagaaca

SEQ ID NO: 13143 - DNA, 20 bp, synthetic construct
  source 1..20: mol_type = other DNA
ttgccaggcggatatctaca

SEQ ID NO: 13144 - DNA, 20 bp, synthetic construct
  source 1..20: mol_type = other DNA
tgaggtagggcatgtatccc

SEQ ID NO: 13145 - DNA, 20 bp, synthetic construct
  source 1..20: mol_type = other DNA
cttcgagcaagagatggcca

SEQ ID NO: 13146 - DNA, 20 bp, synthetic construct
  source 1..20: mol_type = other DNA
acctcttcctccgcggggga

SEQ ID NO: 13147 - DNA, 20 bp, synthetic construct
  source 1..20: mol_type = other DNA
cttgcatctagccacagaga

SEQ ID NO: 13148 - DNA, 20 bp, synthetic construct
  source 1..20: mol_type = other DNA
agcggagcagcaagagctgg

SEQ ID NO: 13149 - DNA, 20 bp, synthetic construct
  source 1..20: mol_type = other DNA
ggatgccagttatttaccat

SEQ ID NO: 13150 - DNA, 20 bp, synthetic construct
  source 1..20: mol_type = other DNA
ggtggcccccgagtgtctcc

SEQ ID NO: 13151 - DNA, 20 bp, synthetic construct
  source 1..20: mol_type = other DNA
tgcagtacctggtaagaagt

SEQ ID NO: 13152 - DNA, 20 bp, synthetic construct
  source 1..20: mol_type = other DNA
ggtttcagctctaactggtt

SEQ ID NO: 13153 - DNA, 20 bp, synthetic construct
  source 1..20: mol_type = other DNA
aggttgcagggcagcccgtc

SEQ ID NO: 13154 - DNA, 20 bp, synthetic construct
  source 1..20: mol_type = other DNA
ccaagaggcggcagagggcg

SEQ ID NO: 13155 - DNA, 20 bp, synthetic construct
  source 1..20: mol_type = other DNA
gtgcctcttcctcctcattg

SEQ ID NO: 13156 - DNA, 20 bp, synthetic construct
  source 1..20: mol_type = other DNA
gagcctgggaaagagagggc

SEQ ID NO: 13157 - DNA, 20 bp, synthetic construct
  source 1..20: mol_type = other DNA
tgatgctgctgcggctccgg

SEQ ID NO: 13158 - DNA, 20 bp, synthetic construct
  source 1..20: mol_type = other DNA
cctgcagcctctgtcagggg

SEQ ID NO: 13159 - DNA, 20 bp, synthetic construct
  source 1..20: mol_type = other DNA
ggacggtgagtgcggcgcgc

SEQ ID NO: 13160 - DNA, 20 bp, synthetic construct
  source 1..20: mol_type = other DNA
gtcctcacaggagtcacaca

SEQ ID NO: 13161 - DNA, 20 bp, synthetic construct
  source 1..20: mol_type = other DNA
cgacagcactatccctatgg

SEQ ID NO: 13162 - DNA, 20 bp, synthetic construct
  source 1..20: mol_type = other DNA
cacccagaggaagtacttcc

SEQ ID NO: 13163 - DNA, 20 bp, synthetic construct
  source 1..20: mol_type = other DNA
gctccagccggagcatccca

SEQ ID NO: 13164 - DNA, 20 bp, synthetic construct
  source 1..20: mol_type = other DNA
cacctggagagagaagcctg

SEQ ID NO: 13165 - DNA, 20 bp, synthetic construct
  source 1..20: mol_type = other DNA
acatcatgatccgagagagt

SEQ ID NO: 13166 - DNA, 20 bp, synthetic construct
  source 1..20: mol_type = other DNA
ccctgccaacattgaagctg

SEQ ID NO: 13167 - DNA, 20 bp, synthetic construct
  source 1..20: mol_type = other DNA
tcgatgaaggccatgacctc

SEQ ID NO: 13168 - DNA, 20 bp, synthetic construct
  source 1..20: mol_type = other DNA
ttatctcagccctggtgacc

SEQ ID NO: 13169 - DNA, 20 bp, synthetic construct
  source 1..20: mol_type = other DNA
ggagaaggtgggggggttcc

SEQ ID NO: 13170 - DNA, 20 bp, synthetic construct
  source 1..20: mol_type = other DNA
gtcggccagggcgagcgcgg

SEQ ID NO: 13171 - DNA, 20 bp, synthetic construct
  source 1..20: mol_type = other DNA
ttccagtacctgccagatac

SEQ ID NO: 13172 - DNA, 20 bp, synthetic construct
  source 1..20: mol_type = other DNA
ctccaaagcatagagtcacc

SEQ ID NO: 13173 - DNA, 20 bp, synthetic construct
  source 1..20: mol_type = other DNA
tgagccaggtgagcgggcag

SEQ ID NO: 13174 - DNA, 20 bp, synthetic construct
  source 1..20: mol_type = other DNA
ggacagctacaatgacgagc

SEQ ID NO: 13175 - DNA, 20 bp, synthetic construct
  source 1..20: mol_type = other DNA
agcccctaccagtccggcgc

SEQ ID NO: 13176 - DNA, 20 bp, synthetic construct
  source 1..20: mol_type = other DNA
ggcaccgccgaggctgctgg

SEQ ID NO: 13177 - DNA, 20 bp, synthetic construct
  source 1..20: mol_type = other DNA
ggatgtgcaggaccgtgtac

SEQ ID NO: 13178 - DNA, 20 bp, synthetic construct
  source 1..20: mol_type = other DNA
attcaagtctcccaagcggt

SEQ ID NO: 13179 - DNA, 20 bp, synthetic construct
  source 1..20: mol_type = other DNA
cagctccagggcggcttcga

SEQ ID NO: 13180 - DNA, 20 bp, synthetic construct
  source 1..20: mol_type = other DNA
cctaccgaatcctgtacagc

SEQ ID NO: 13181 - DNA, 20 bp, synthetic construct
  source 1..20: mol_type = other DNA
gggggttccagggcctgtct

SEQ ID NO: 13182 - DNA, 20 bp, synthetic construct
  source 1..20: mol_type = other DNA
ggcgcagcagctggccgcgg

SEQ ID NO: 13183 - DNA, 20 bp, synthetic construct
  source 1..20: mol_type = other DNA
gcaggcagcggcggcagcgt

SEQ ID NO: 13184 - DNA, 20 bp, synthetic construct
  source 1..20: mol_type = other DNA
ggacgccttgtgggagaatg

SEQ ID NO: 13185 - DNA, 20 bp, synthetic construct
  source 1..20: mol_type = other DNA
gtcacccacctgggcgggca

SEQ ID NO: 13186 - DNA, 20 bp, synthetic construct
  source 1..20: mol_type = other DNA
tacacccacctggagctgcg

SEQ ID NO: 13187 - DNA, 20 bp, synthetic construct
  source 1..20: mol_type = other DNA
tcagtttcaccacctgggaa

SEQ ID NO: 13188 - DNA, 20 bp, synthetic construct
  source 1..20: mol_type = other DNA
actgaccagccttcagaagg

SEQ ID NO: 13189 - DNA, 20 bp, synthetic construct
  source 1..20: mol_type = other DNA
gcagagacacgtcctggagt

SEQ ID NO: 13190 - DNA, 20 bp, synthetic construct
  source 1..20: mol_type = other DNA
attaagaggtcagaccgtcg

SEQ ID NO: 13191 - DNA, 20 bp, synthetic construct
  source 1..20: mol_type = other DNA
gtcctgcaaacaaatcacag

SEQ ID NO: 13192 - DNA, 20 bp, synthetic construct
  source 1..20: mol_type = other DNA
tccagggccacggggtcatg

SEQ ID NO: 13193 - DNA, 20 bp, synthetic construct
  source 1..20: mol_type = other DNA
ggtctggctggctcaggggt

SEQ ID NO: 13194 - DNA, 20 bp, synthetic construct
  source 1..20: mol_type = other DNA
atactcccggctgccatctg

SEQ ID NO: 13195 - DNA, 20 bp, synthetic construct
  source 1..20: mol_type = other DNA
tgccgccgtcaccagccacg

SEQ ID NO: 13196 - DNA, 20 bp, synthetic construct
  source 1..20: mol_type = other DNA
gatcgtctgggaaagtaagg

SEQ ID NO: 13197 - DNA, 20 bp, synthetic construct
  source 1..20: mol_type = other DNA
ccatggggcgggagggcaag

SEQ ID NO: 13198 - DNA, 20 bp, synthetic construct
  source 1..20: mol_type = other DNA
tcccaggtcggcccaggccc

SEQ ID NO: 13199 - DNA, 20 bp, synthetic construct
  source 1..20: mol_type = other DNA
ctacctctctgcgtgtaccc

SEQ ID NO: 13200 - DNA, 20 bp, synthetic construct
  source 1..20: mol_type = other DNA
atacctgcttgatggtgctg

SEQ ID NO: 13201 - DNA, 20 bp, synthetic construct
  source 1..20: mol_type = other DNA
caccaaaatcttgtttcctg

SEQ ID NO: 13202 - DNA, 20 bp, synthetic construct
  source 1..20: mol_type = other DNA
ggtgatagttgatgagaaga

SEQ ID NO: 13203 - DNA, 20 bp, synthetic construct
  source 1..20: mol_type = other DNA
aatacaaccactctgtggac

SEQ ID NO: 13204 - DNA, 20 bp, synthetic construct
  source 1..20: mol_type = other DNA
tggagaagcaagagggaggc

SEQ ID NO: 13205 - DNA, 20 bp, synthetic construct
  source 1..20: mol_type = other DNA
gaaccactgggcaggtgggt

SEQ ID NO: 13206 - DNA, 20 bp, synthetic construct
  source 1..20: mol_type = other DNA
gtgacgatatctgcagagag

SEQ ID NO: 13207 - DNA, 20 bp, synthetic construct
  source 1..20: mol_type = other DNA
cggcatctcgtgctgctcca

SEQ ID NO: 13208 - DNA, 20 bp, synthetic construct
  source 1..20: mol_type = other DNA
caggcagatgagcagggcag

SEQ ID NO: 13209 - DNA, 20 bp, synthetic construct
  source 1..20: mol_type = other DNA
ccttaccattttcacaagct

SEQ ID NO: 13210 - DNA, 20 bp, synthetic construct
  source 1..20: mol_type = other DNA
gcagagtgaggttggtaggc

SEQ ID NO: 13211 - DNA, 20 bp, synthetic construct
  source 1..20: mol_type = other DNA
tctgctcggagctgcggcgt

SEQ ID NO: 13212 - DNA, 20 bp, synthetic construct
  source 1..20: mol_type = other DNA
tctgagactgcaagggaagg

SEQ ID NO: 13213 - DNA, 20 bp, synthetic construct
  source 1..20: mol_type = other DNA
gtggatggagcagtttgaga

SEQ ID NO: 13214 - DNA, 20 bp, synthetic construct
  source 1..20: mol_type = other DNA
aaattactcacctatctccc

SEQ ID NO: 13215 - DNA, 20 bp, synthetic construct
  source 1..20: mol_type = other DNA
cggaatgcagcttgatgtgc

SEQ ID NO: 13216 - DNA, 20 bp, synthetic construct
  source 1..20: mol_type = other DNA
cagacccgtacaaagtgtac

SEQ ID NO: 13217 - DNA, 20 bp, synthetic construct
  source 1..20: mol_type = other DNA
cgctcaacaaccacctgttg

SEQ ID NO: 13218 - DNA, 20 bp, synthetic construct
  source 1..20: mol_type = other DNA
tacttacatccaccatcctc

SEQ ID NO: 13219 - DNA, 20 bp, synthetic construct
  source 1..20: mol_type = other DNA
gatgccagtggtacggccag

SEQ ID NO: 13220 - DNA, 20 bp, synthetic construct
  source 1..20: mol_type = other DNA
tccaaaagaccagacgtcag

SEQ ID NO: 13221 - DNA, 20 bp, synthetic construct
  source 1..20: mol_type = other DNA
gagaagaggctgggcgtgag

SEQ ID NO: 13222 - DNA, 20 bp, synthetic construct
  source 1..20: mol_type = other DNA
cagcatctgacaggccttgc

SEQ ID NO: 13223 - DNA, 20 bp, synthetic construct
  source 1..20: mol_type = other DNA
cgcgaccctcaaccgcctgc

SEQ ID NO: 13224 - DNA, 20 bp, synthetic construct
  source 1..20: mol_type = other DNA
cctaccagaatgccgaggtg

SEQ ID NO: 13225 - DNA, 20 bp, synthetic construct
  source 1..20: mol_type = other DNA
tgagctcctggtagacctcg

SEQ ID NO: 13226 - DNA, 20 bp, synthetic construct
  source 1..20: mol_type = other DNA
ctcgcaggacgcgctccgcg

SEQ ID NO: 13227 - DNA, 20 bp, synthetic construct
  source 1..20: mol_type = other DNA
gtgctcagcccttagcaatc

SEQ ID NO: 13228 - DNA, 20 bp, synthetic construct
  source 1..20: mol_type = other DNA
ggcgctcagtttccagaacc

SEQ ID NO: 13229 - DNA, 20 bp, synthetic construct
  source 1..20: mol_type = other DNA
ggagaaggtaaaaataaatg

SEQ ID NO: 13230 - DNA, 20 bp, synthetic construct
  source 1..20: mol_type = other DNA
tcagaaatacaaccactctg

SEQ ID NO: 13231 - DNA, 20 bp, synthetic construct
  source 1..20: mol_type = other DNA
tgctttcactgaatcttagc

SEQ ID NO: 13232 - DNA, 20 bp, synthetic construct
  source 1..20: mol_type = other DNA
caactcaaatgtgagtgtca

SEQ ID NO: 13233 - DNA, 20 bp, synthetic construct
  source 1..20: mol_type = other DNA
cccagaggcccaggctgatc

SEQ ID NO: 13234 - DNA, 20 bp, synthetic construct
  source 1..20: mol_type = other DNA
ggggcgccgacaagatcgag

SEQ ID NO: 13235 - DNA, 20 bp, synthetic construct
  source 1..20: mol_type = other DNA
atacccagctacagccggtg

SEQ ID NO: 13236 - DNA, 20 bp, synthetic construct
  source 1..20: mol_type = other DNA
gttaaccagcaggacgttgc

SEQ ID NO: 13237 - DNA, 20 bp, synthetic construct
  source 1..20: mol_type = other DNA
cagcagtcttcgagagctcc

SEQ ID NO: 13238 - DNA, 20 bp, synthetic construct
  source 1..20: mol_type = other DNA
ctgtctacaccaagtgagtt

SEQ ID NO: 13239 - DNA, 20 bp, synthetic construct
  source 1..20: mol_type = other DNA
gtcgcagctcctcaaacgtc

SEQ ID NO: 13240 - DNA, 20 bp, synthetic construct
  source 1..20: mol_type = other DNA
cctgcatcgtgtccggagcc

SEQ ID NO: 13241 - DNA, 20 bp, synthetic construct
  source 1..20: mol_type = other DNA
catcctggaggcctactgca

SEQ ID NO: 13242 - DNA, 20 bp, synthetic construct
  source 1..20: mol_type = other DNA
catgagccccagcaaccaga

SEQ ID NO: 13243 - DNA, 20 bp, synthetic construct
  source 1..20: mol_type = other DNA
gatgccaagtttcttctcca

SEQ ID NO: 13244 - DNA, 20 bp, synthetic construct
  source 1..20: mol_type = other DNA
agcattgtcccagagaacag

SEQ ID NO: 13245 - DNA, 20 bp, synthetic construct
  source 1..20: mol_type = other DNA
atgccaggggtgctgagtgc

SEQ ID NO: 13246 - DNA, 20 bp, synthetic construct
  source 1..20: mol_type = other DNA
aggatcactcagcttgatga

SEQ ID NO: 13247 - DNA, 20 bp, synthetic construct
  source 1..20: mol_type = other DNA
atcatcttcatcctgggaag

SEQ ID NO: 13248 - DNA, 20 bp, synthetic construct
  source 1..20: mol_type = other DNA
gcagatgacgctgacgcgcg

SEQ ID NO: 13249 - DNA, 20 bp, synthetic construct
  source 1..20: mol_type = other DNA
tctgggaaccactgggcagg

SEQ ID NO: 13250 - DNA, 20 bp, synthetic construct
  source 1..20: mol_type = other DNA
cctaaagaggatccgtgact

SEQ ID NO: 13251 - DNA, 20 bp, synthetic construct
  source 1..20: mol_type = other DNA
cagagcaaaatgtgggctgt

SEQ ID NO: 13252 - DNA, 20 bp, synthetic construct
  source 1..20: mol_type = other DNA
ctgctggaaggtggacagcg

SEQ ID NO: 13253 - DNA, 20 bp, synthetic construct
  source 1..20: mol_type = other DNA
cacctgctttgagaagtctg

SEQ ID NO: 13254 - DNA, 20 bp, synthetic construct
  source 1..20: mol_type = other DNA
gaagatccccgcagcccctt

SEQ ID NO: 13255 - DNA, 20 bp, synthetic construct
  source 1..20: mol_type = other DNA
tggctggtttccttgtaaca

SEQ ID NO: 13256 - DNA, 20 bp, synthetic construct
  source 1..20: mol_type = other DNA
caggttgtgggacagcacct

SEQ ID NO: 13257 - DNA, 20 bp, synthetic construct
  source 1..20: mol_type = other DNA
gagacctccaactcgaggtg

SEQ ID NO: 13258 - DNA, 20 bp, synthetic construct
  source 1..20: mol_type = other DNA
gctcactttcgagatggcag

SEQ ID NO: 13259 - DNA, 20 bp, synthetic construct
  source 1..20: mol_type = other DNA
ggtggctgggcggcagcacc

SEQ ID NO: 13260 - DNA, 20 bp, synthetic construct
  source 1..20: mol_type = other DNA
gtagtcatcggcgtggccca

SEQ ID NO: 13261 - DNA, 20 bp, synthetic construct
  source 1..20: mol_type = other DNA
gcgcaggaaaggcatgacaa

SEQ ID NO: 13262 - DNA, 20 bp, synthetic construct
  source 1..20: mol_type = other DNA
gtcttccaccaacaacatgg

SEQ ID NO: 13263 - DNA, 20 bp, synthetic construct
  source 1..20: mol_type = other DNA
atagctcttctggttccaga

SEQ ID NO: 13264 - DNA, 20 bp, synthetic construct
  source 1..20: mol_type = other DNA
aggtagggcgtgagcttggc

SEQ ID NO: 13265 - DNA, 20 bp, synthetic construct
  source 1..20: mol_type = other DNA
cctccagggccactttggga

SEQ ID NO: 13266 - DNA, 20 bp, synthetic construct
  source 1..20: mol_type = other DNA
aacagcccacagctcctgat

SEQ ID NO: 13267 - DNA, 20 bp, synthetic construct
  source 1..20: mol_type = other DNA
tacgtgaacgttccggagag

SEQ ID NO: 13268 - DNA, 20 bp, synthetic construct
  source 1..20: mol_type = other DNA
ggcattcctcctccagagtg

SEQ ID NO: 13269 - DNA, 20 bp, synthetic construct
  source 1..20: mol_type = other DNA
acatgcgcttcctccgagag

SEQ ID NO: 13270 - DNA, 20 bp, synthetic construct
  source 1..20: mol_type = other DNA
caggggtgtgtttcccgcaa

SEQ ID NO: 13271 - DNA, 20 bp, synthetic construct
  source 1..20: mol_type = other DNA
tccctcagggcgagcacctt

SEQ ID NO: 13272 - DNA, 20 bp, synthetic construct
  source 1..20: mol_type = other DNA
gcactgctctgtatcctagg

SEQ ID NO: 13273 - DNA, 20 bp, synthetic construct
  source 1..20: mol_type = other DNA
agaactggtctgacacgctg

SEQ ID NO: 13274 - DNA, 20 bp, synthetic construct
  source 1..20: mol_type = other DNA
agtagtcatcggcgtggccc

SEQ ID NO: 13275 - DNA, 20 bp, synthetic construct
  source 1..20: mol_type = other DNA
agattcagtgactcagaaat

SEQ ID NO: 13276 - DNA, 20 bp, synthetic construct
  source 1..20: mol_type = other DNA
catgccacatctcatgccag

SEQ ID NO: 13277 - DNA, 20 bp, synthetic construct
  source 1..20: mol_type = other DNA
gcaatgtcccgccgcaaaca

SEQ ID NO: 13278 - DNA, 20 bp, synthetic construct
  source 1..20: mol_type = other DNA
gtcatggagtacctgcccag

SEQ ID NO: 13279 - DNA, 20 bp, synthetic construct
  source 1..20: mol_type = other DNA
ggagccaacagagataacca

SEQ ID NO: 13280 - DNA, 20 bp, synthetic construct
  source 1..20: mol_type = other DNA
tgacccagatgaggtaagga

SEQ ID NO: 13281 - DNA, 20 bp, synthetic construct
  source 1..20: mol_type = other DNA
tcaagatcacctcggtggaa

SEQ ID NO: 13282 - DNA, 20 bp, synthetic construct
  source 1..20: mol_type = other DNA
tggccagctcacggagaacc

SEQ ID NO: 13283 - DNA, 20 bp, synthetic construct
  source 1..20: mol_type = other DNA
tcactgagctcccggtcgga

SEQ ID NO: 13284 - DNA, 20 bp, synthetic construct
  source 1..20: mol_type = other DNA
ccagcttcctcctgaggaaa

SEQ ID NO: 13285 - DNA, 20 bp, synthetic construct
  source 1..20: mol_type = other DNA
tacctcatgcctggcaatgg

SEQ ID NO: 13286 - DNA, 20 bp, synthetic construct
  source 1..20: mol_type = other DNA
gtacagctgaacaactgcag

SEQ ID NO: 13287 - DNA, 20 bp, synthetic construct
  source 1..20: mol_type = other DNA
gccccagtcccaggcggcgg

SEQ ID NO: 13288 - DNA, 20 bp, synthetic construct
  source 1..20: mol_type = other DNA
ttccatggcattgacgcagg

SEQ ID NO: 13289 - DNA, 20 bp, synthetic construct
  source 1..20: mol_type = other DNA
cccacagaaggtattcgtct

SEQ ID NO: 13290 - DNA, 20 bp, synthetic construct
  source 1..20: mol_type = other DNA
cacggagaagatgtggctcg

SEQ ID NO: 13291 - DNA, 20 bp, synthetic construct
  source 1..20: mol_type = other DNA
gtcacttttgggagatggtg

SEQ ID NO: 13292 - DNA, 20 bp, synthetic construct
  source 1..20: mol_type = other DNA
gtttgccctcaccttggaag

SEQ ID NO: 13293 - DNA, 20 bp, synthetic construct
  source 1..20: mol_type = other DNA
agttgtagaagcatgtgaac

SEQ ID NO: 13294 - DNA, 20 bp, synthetic construct
  source 1..20: mol_type = other DNA
ggcccagctccggaacaaac

SEQ ID NO: 13295 - DNA, 20 bp, synthetic construct
  source 1..20: mol_type = other DNA
ctgctgcaccaggtgtccat

SEQ ID NO: 13296 - DNA, 20 bp, synthetic construct
  source 1..20: mol_type = other DNA
aagacgagggagaagctcta

SEQ ID NO: 13297 - DNA, 20 bp, synthetic construct
  source 1..20: mol_type = other DNA
cagcgatgtctggagctatg

SEQ ID NO: 13298 - DNA, 20 bp, synthetic construct
  source 1..20: mol_type = other DNA
ccagcccctcctgcttccac

SEQ ID NO: 13299 - DNA, 20 bp, synthetic construct
  source 1..20: mol_type = other DNA
ggtttgccctcaccttggaa

SEQ ID NO: 13300 - DNA, 20 bp, synthetic construct
  source 1..20: mol_type = other DNA
cggcatgtgctcccgggctc

SEQ ID NO: 13301 - DNA, 20 bp, synthetic construct
  source 1..20: mol_type = other DNA
gctcaactcgggaggtgcca

SEQ ID NO: 13302 - DNA, 20 bp, synthetic construct
  source 1..20: mol_type = other DNA
gtcactgaatctcaggagga

SEQ ID NO: 13303 - DNA, 20 bp, synthetic construct
  source 1..20: mol_type = other DNA
cactcaccacacagagccat

SEQ ID NO: 13304 - DNA, 20 bp, synthetic construct
  source 1..20: mol_type = other DNA
cctgtggggagcaggcaagg

SEQ ID NO: 13305 - DNA, 20 bp, synthetic construct
  source 1..20: mol_type = other DNA
cataagaggctgggctgacg

SEQ ID NO: 13306 - DNA, 20 bp, synthetic construct
  source 1..20: mol_type = other DNA
gcaggaatttgtacacctgg

SEQ ID NO: 13307 - DNA, 20 bp, synthetic construct
  source 1..20: mol_type = other DNA
ttccagatggtcaaagagca

SEQ ID NO: 13308 - DNA, 20 bp, synthetic construct
  source 1..20: mol_type = other DNA
acctggaattcagcctctag

SEQ ID NO: 13309 - DNA, 20 bp, synthetic construct
  source 1..20: mol_type = other DNA
gggcacggagaaggcagaca

SEQ ID NO: 13310 - DNA, 20 bp, synthetic construct
  source 1..20: mol_type = other DNA
ttatcagtaaggagcgggag

SEQ ID NO: 13311 - DNA, 20 bp, synthetic construct
  source 1..20: mol_type = other DNA
cgatgtgcaggattttggca

SEQ ID NO: 13312 - DNA, 20 bp, synthetic construct
  source 1..20: mol_type = other DNA
cggttggccttggggttcag

SEQ ID NO: 13313 - DNA, 20 bp, synthetic construct
  source 1..20: mol_type = other DNA
accttcttcgcaggaatggg

SEQ ID NO: 13314 - DNA, 20 bp, synthetic construct
  source 1..20: mol_type = other DNA
ggacctggagcagcgcagcg

SEQ ID NO: 13315 - DNA, 20 bp, synthetic construct
  source 1..20: mol_type = other DNA
ggtccagcatcaggttggat

SEQ ID NO: 13316 - DNA, 20 bp, synthetic construct
  source 1..20: mol_type = other DNA
cacctgtggatgcagcggtc

SEQ ID NO: 13317 - DNA, 20 bp, synthetic construct
  source 1..20: mol_type = other DNA
tcaatcaccgccgagccccc

SEQ ID NO: 13318 - DNA, 20 bp, synthetic construct
  source 1..20: mol_type = other DNA
ggaaggtggacagcgaggcc

SEQ ID NO: 13319 - DNA, 20 bp, synthetic construct
  source 1..20: mol_type = other DNA
ttcaaggtaagggcctacta

SEQ ID NO: 13320 - DNA, 20 bp, synthetic construct
  source 1..20: mol_type = other DNA
cctccagcttctccactgcc

SEQ ID NO: 13321 - DNA, 20 bp, synthetic construct
  source 1..20: mol_type = other DNA
cggtacatgcccaggaactg

SEQ ID NO: 13322 - DNA, 20 bp, synthetic construct
  source 1..20: mol_type = other DNA
tggccaaggcaagcagcgcg

SEQ ID NO: 13323 - DNA, 20 bp, synthetic construct
  source 1..20: mol_type = other DNA
tggtagagattggctgcgcc

SEQ ID NO: 13324 - DNA, 20 bp, synthetic construct
  source 1..20: mol_type = other DNA
cgagcagcccggagccgagt

SEQ ID NO: 13325 - DNA, 20 bp, synthetic construct
  source 1..20: mol_type = other DNA
gcagaagaaggcggagcacc

SEQ ID NO: 13326 - DNA, 20 bp, synthetic construct
  source 1..20: mol_type = other DNA
gaagaaggcggagcaccagg

SEQ ID NO: 13327 - DNA, 20 bp, synthetic construct
  source 1..20: mol_type = other DNA
tggcagtgggcaatttgggt

SEQ ID NO: 13328 - DNA, 20 bp, synthetic construct
  source 1..20: mol_type = other DNA
gaagccacagatcaagcaag

SEQ ID NO: 13329 - DNA, 20 bp, synthetic construct
  source 1..20: mol_type = other DNA
ttacctgttttggatagagt

SEQ ID NO: 13330 - DNA, 20 bp, synthetic construct
  source 1..20: mol_type = other DNA
ctcctccagctgtaacgtgg

SEQ ID NO: 13331 - DNA, 20 bp, synthetic construct
  source 1..20: mol_type = other DNA
cctcccagcccagctgctgc

SEQ ID NO: 13332 - DNA, 20 bp, synthetic construct
  source 1..20: mol_type = other DNA
agacctccaactcgaggtga

SEQ ID NO: 13333 - DNA, 20 bp, synthetic construct
  source 1..20: mol_type = other DNA
cgaaggcctctctcgacacc

SEQ ID NO: 13334 - DNA, 20 bp, synthetic construct
  source 1..20: mol_type = other DNA
gcggtgccacagcagctgga

SEQ ID NO: 13335 - DNA, 20 bp, synthetic construct
  source 1..20: mol_type = other DNA
agggctggggagaaggtggg

SEQ ID NO: 13336 - DNA, 20 bp, synthetic construct
  source 1..20: mol_type = other DNA
ttcagcagcataaaacctgg

SEQ ID NO: 13337 - DNA, 20 bp, synthetic construct
  source 1..20: mol_type = other DNA
ctatcctgacattcccaagg

SEQ ID NO: 13338 - DNA, 20 bp, synthetic construct
  source 1..20: mol_type = other DNA
gacggacaggatgtatgctg

SEQ ID NO: 13339 - DNA, 20 bp, synthetic construct
  source 1..20: mol_type = other DNA
cccagtatgagtttcaggtg

SEQ ID NO: 13340 - DNA, 20 bp, synthetic construct
  source 1..20: mol_type = other DNA
gcaaagaggttgtgacaaag

SEQ ID NO: 13341 - DNA, 20 bp, synthetic construct
  source 1..20: mol_type = other DNA
ctggtacgcctttaccgcgc

SEQ ID NO: 13342 - DNA, 20 bp, synthetic construct
  source 1..20: mol_type = other DNA
ggaccgcagccagcccggcc

SEQ ID NO: 13343 - DNA, 20 bp, synthetic construct
  source 1..20: mol_type = other DNA
ggagtagaacaaagtcatga

SEQ ID NO: 13344 - DNA, 20 bp, synthetic construct
  source 1..20: mol_type = other DNA
gcccagctctccatcctcct

SEQ ID NO: 13345 - DNA, 20 bp, synthetic construct
  source 1..20: mol_type = other DNA
agactatgagtcccccaatg

SEQ ID NO: 13346 - DNA, 20 bp, synthetic construct
  source 1..20: mol_type = other DNA
cctccgtggccagagcaaag

SEQ ID NO: 13347 - DNA, 20 bp, synthetic construct
  source 1..20: mol_type = other DNA
agagcagctgaccatcatcc

SEQ ID NO: 13348 - DNA, 20 bp, synthetic construct
  source 1..20: mol_type = other DNA
caaccttcccaaagtggccc

SEQ ID NO: 13349 - DNA, 20 bp, synthetic construct
  source 1..20: mol_type = other DNA
catgtagaggcagcgttccc

SEQ ID NO: 13350 - DNA, 20 bp, synthetic construct
  source 1..20: mol_type = other DNA
gatgtagtttaatccgacta

SEQ ID NO: 13351 - DNA, 20 bp, synthetic construct
  source 1..20: mol_type = other DNA
gaagcagtgtggcggcagct

SEQ ID NO: 13352 - DNA, 20 bp, synthetic construct
  source 1..20: mol_type = other DNA
tggaagtctgtgttgtatat

SEQ ID NO: 13353 - DNA, 20 bp, synthetic construct
  source 1..20: mol_type = other DNA
cctacctttggagcctgtag

SEQ ID NO: 13354 - DNA, 20 bp, synthetic construct
  source 1..20: mol_type = other DNA
cgctcaggtaggcggacggg

SEQ ID NO: 13355 - DNA, 20 bp, synthetic construct
  source 1..20: mol_type = other DNA
caagctgcggcgcctctcca

SEQ ID NO: 13356 - DNA, 20 bp, synthetic construct
  source 1..20: mol_type = other DNA
gtcaatcaccgccgagcccc

SEQ ID NO: 13357 - DNA, 20 bp, synthetic construct
  source 1..20: mol_type = other DNA
tgcaggctttgcagaaccta

SEQ ID NO: 13358 - DNA, 20 bp, synthetic construct
  source 1..20: mol_type = other DNA
tgacgatgccgtgctcgatg

SEQ ID NO: 13359 - DNA, 20 bp, synthetic construct
  source 1..20: mol_type = other DNA
cggggcgcagatggccgcca

SEQ ID NO: 13360 - DNA, 20 bp, synthetic construct
  source 1..20: mol_type = other DNA
taggaagtacgagtgtgagt

SEQ ID NO: 13361 - DNA, 20 bp, synthetic construct
  source 1..20: mol_type = other DNA
ccaagtcccagctcaaggtg

SEQ ID NO: 13362 - DNA, 20 bp, synthetic construct
  source 1..20: mol_type = other DNA
ggctcctcgatctctcgtaa

SEQ ID NO: 13363 - DNA, 20 bp, synthetic construct
  source 1..20: mol_type = other DNA
gaaaagcagattccttggta

SEQ ID NO: 13364 - DNA, 20 bp, synthetic construct
  source 1..20: mol_type = other DNA
gaacatcaagaggttcaggt

SEQ ID NO: 13365 - DNA, 20 bp, synthetic construct
  source 1..20: mol_type = other DNA
tggacttcagccagttgagc

SEQ ID NO: 13366 - DNA, 20 bp, synthetic construct
  source 1..20: mol_type = other DNA
aaagctccaataatcaacag

SEQ ID NO: 13367 - DNA, 20 bp, synthetic construct
  source 1..20: mol_type = other DNA
ttacctcatgcctggcaatg

SEQ ID NO: 13368 - DNA, 20 bp, synthetic construct
  source 1..20: mol_type = other DNA
ctgagtcactgaatctcagg

SEQ ID NO: 13369 - DNA, 20 bp, synthetic construct
  source 1..20: mol_type = other DNA
gtcccaatgatgaccaggat

SEQ ID NO: 13370 - DNA, 20 bp, synthetic construct
  source 1..20: mol_type = other DNA
cagtactccatggccagcag

SEQ ID NO: 13371 - DNA, 20 bp, synthetic construct
  source 1..20: mol_type = other DNA
aagctttacttacacgttgg

SEQ ID NO: 13372 - DNA, 20 bp, synthetic construct
  source 1..20: mol_type = other DNA
ggttggccttggggttcagg

SEQ ID NO: 13373 - DNA, 20 bp, synthetic construct
  source 1..20: mol_type = other DNA
aggagaccgagacaacaaga

SEQ ID NO: 13374 - DNA, 20 bp, synthetic construct
  source 1..20: mol_type = other DNA
tcccaccgtgtgcatgctgg

SEQ ID NO: 13375 - DNA, 20 bp, synthetic construct
  source 1..20: mol_type = other DNA
ggcggagccacaccggcgag

SEQ ID NO: 13376 - DNA, 20 bp, synthetic construct
  source 1..20: mol_type = other DNA
tacacctcaatgtcctctgc

SEQ ID NO: 13377 - DNA, 20 bp, synthetic construct
  source 1..20: mol_type = other DNA
gatgagaaaggacaggcggc

SEQ ID NO: 13378 - DNA, 20 bp, synthetic construct
  source 1..20: mol_type = other DNA
agggtcactcagcttgatga

SEQ ID NO: 13379 - DNA, 20 bp, synthetic construct
  source 1..20: mol_type = other DNA
gcaatgatctgaggagggaa

SEQ ID NO: 13380 - DNA, 20 bp, synthetic construct
  source 1..20: mol_type = other DNA
cttcccatagatgagggaca

SEQ ID NO: 13381 - DNA, 20 bp, synthetic construct
  source 1..20: mol_type = other DNA
tctggagcccaggggatcac

SEQ ID NO: 13382 - DNA, 20 bp, synthetic construct
  source 1..20: mol_type = other DNA
ctgggtaagggatgcggccg

SEQ ID NO: 13383 - DNA, 20 bp, synthetic construct
  source 1..20: mol_type = other DNA
ggatgaagtggaccagatgt

SEQ ID NO: 13384 - DNA, 20 bp, synthetic construct
  source 1..20: mol_type = other DNA
cctgtgggcgagcaggacat

SEQ ID NO: 13385 - DNA, 20 bp, synthetic construct
  source 1..20: mol_type = other DNA
tgatggagaagacgaagagc

SEQ ID NO: 13386 - DNA, 20 bp, synthetic construct
  source 1..20: mol_type = other DNA
cagcaggagcttgttgaaag

SEQ ID NO: 13387 - DNA, 20 bp, synthetic construct
  source 1..20: mol_type = other DNA
gtgacgatgccgtgctcgat

SEQ ID NO: 13388 - DNA, 20 bp, synthetic construct
  source 1..20: mol_type = other DNA
ggcccgtacctcggtagctg

SEQ ID NO: 13389 - DNA, 20 bp, synthetic construct
  source 1..20: mol_type = other DNA
ggaggaggtggagcgggagc

SEQ ID NO: 13390 - DNA, 20 bp, synthetic construct
  source 1..20: mol_type = other DNA
ctcaccgaccctccagagcc

SEQ ID NO: 13391 - DNA, 20 bp, synthetic construct
  source 1..20: mol_type = other DNA
cccaccagaaaatggggctc

SEQ ID NO: 13392 - DNA, 20 bp, synthetic construct
  source 1..20: mol_type = other DNA
gaccacagggacacagagga

SEQ ID NO: 13393 - DNA, 20 bp, synthetic construct
  source 1..20: mol_type = other DNA
aggaagtctcactctcagga

SEQ ID NO: 13394 - DNA, 20 bp, synthetic construct
  source 1..20: mol_type = other DNA
tcaggaactggtgaaagcta

SEQ ID NO: 13395 - DNA, 20 bp, synthetic construct
  source 1..20: mol_type = other DNA
cgaggatggcggcctccaca

SEQ ID NO: 13396 - DNA, 20 bp, synthetic construct
  source 1..20: mol_type = other DNA
ccaccagctgtagaaggtgc

SEQ ID NO: 13397 - DNA, 20 bp, synthetic construct
  source 1..20: mol_type = other DNA
tggagcacttggtgcagtac

SEQ ID NO: 13398 - DNA, 20 bp, synthetic construct
  source 1..20: mol_type = other DNA
tcctcaatggacaggatgac

SEQ ID NO: 13399 - DNA, 20 bp, synthetic construct
  source 1..20: mol_type = other DNA
ttcttatattacccgaccag

SEQ ID NO: 13400 - DNA, 20 bp, synthetic construct
  source 1..20: mol_type = other DNA
ccggggctggaggagactgg

SEQ ID NO: 13401 - DNA, 20 bp, synthetic construct
  source 1..20: mol_type = other DNA
aaccaatccatatgtcctca

SEQ ID NO: 13402 - DNA, 20 bp, synthetic construct
  source 1..20: mol_type = other DNA
caggatgaggccgaagcgca

SEQ ID NO: 13403 - DNA, 20 bp, synthetic construct
  source 1..20: mol_type = other DNA
cgcaggaggccgagttccca

SEQ ID NO: 13404 - DNA, 20 bp, synthetic construct
  source 1..20: mol_type = other DNA
catggataaaatctccccgg

SEQ ID NO: 13405 - DNA, 20 bp, synthetic construct
  source 1..20: mol_type = other DNA
aatagggtttcaaagaaccc

SEQ ID NO: 13406 - DNA, 20 bp, synthetic construct
  source 1..20: mol_type = other DNA
gaaactctagccactcgtcc

SEQ ID NO: 13407 - DNA, 20 bp, synthetic construct
  source 1..20: mol_type = other DNA
ctgggccgacctgggacgga

SEQ ID NO: 13408 - DNA, 20 bp, synthetic construct
  source 1..20: mol_type = other DNA
atcccctcaccagcagcagc

SEQ ID NO: 13409 - DNA, 20 bp, synthetic construct
  source 1..20: mol_type = other DNA
agtccctccagcttcggtcg

SEQ ID NO: 13410 - DNA, 20 bp, synthetic construct
  source 1..20: mol_type = other DNA
ctgtactccccgattgctaa

SEQ ID NO: 13411 - DNA, 20 bp, synthetic construct
  source 1..20: mol_type = other DNA
ctcacgtcaaatccattctg

SEQ ID NO: 13412 - DNA, 20 bp, synthetic construct
  source 1..20: mol_type = other DNA
ctttctgggaggagacacgc

SEQ ID NO: 13413 - DNA, 20 bp, synthetic construct
  source 1..20: mol_type = other DNA
atgactgggtacctgcggga

SEQ ID NO: 13414 - DNA, 20 bp, synthetic construct
  source 1..20: mol_type = other DNA
caggttcccaaagtggtcgc

SEQ ID NO: 13415 - DNA, 20 bp, synthetic construct
  source 1..20: mol_type = other DNA
gacctcagacttctcaaagc

SEQ ID NO: 13416 - DNA, 20 bp, synthetic construct
  source 1..20: mol_type = other DNA
aactgtacaaactggtgact

SEQ ID NO: 13417 - DNA, 20 bp, synthetic construct
  source 1..20: mol_type = other DNA
gcatcttgtagcgatagaac

SEQ ID NO: 13418 - DNA, 20 bp, synthetic construct
  source 1..20: mol_type = other DNA
aggacgagtgggaggttccc

SEQ ID NO: 13419 - DNA, 20 bp, synthetic construct
  source 1..20: mol_type = other DNA
agccggtgaggccagaatca

SEQ ID NO: 13420 - DNA, 20 bp, synthetic construct
  source 1..20: mol_type = other DNA
ctgttgtcttcaggagtagg

SEQ ID NO: 13421 - DNA, 20 bp, synthetic construct
  source 1..20: mol_type = other DNA
cagggaggcccacacctcag

SEQ ID NO: 13422 - DNA, 20 bp, synthetic construct
  source 1..20: mol_type = other DNA
tcgttcgtggcgctcgtgga

SEQ ID NO: 13423 - DNA, 20 bp, synthetic construct
  source 1..20: mol_type = other DNA
tgaccttattgatttcatgt

SEQ ID NO: 13424 - DNA, 20 bp, synthetic construct
  source 1..20: mol_type = other DNA
gttcttacctctcaatctgc

SEQ ID NO: 13425 - DNA, 20 bp, synthetic construct
  source 1..20: mol_type = other DNA
agaggacccagctttccggc

SEQ ID NO: 13426 - DNA, 20 bp, synthetic construct
  source 1..20: mol_type = other DNA
tgggtggccaccaccagcac

SEQ ID NO: 13427 - DNA, 20 bp, synthetic construct
  source 1..20: mol_type = other DNA
ccaggtgacgtccttgctcg

SEQ ID NO: 13428 - DNA, 20 bp, synthetic construct
  source 1..20: mol_type = other DNA
accgagtgattccggccggc

SEQ ID NO: 13429 - DNA, 20 bp, synthetic construct
  source 1..20: mol_type = other DNA
cgtcctcccaccacggcttc

SEQ ID NO: 13430 - DNA, 20 bp, synthetic construct
  source 1..20: mol_type = other DNA
cctggggcgccccacgatgg

SEQ ID NO: 13431 - DNA, 20 bp, synthetic construct
  source 1..20: mol_type = other DNA
cacagtgttcacagaaggtc

SEQ ID NO: 13432 - DNA, 20 bp, synthetic construct
  source 1..20: mol_type = other DNA
ttgatctgtccaaagtacag

SEQ ID NO: 13433 - DNA, 20 bp, synthetic construct
  source 1..20: mol_type = other DNA
ggaggacgccgcgctcttca

SEQ ID NO: 13434 - DNA, 20 bp, synthetic construct
  source 1..20: mol_type = other DNA
atccacagctaccgaggtac

SEQ ID NO: 13435 - DNA, 20 bp, synthetic construct
  source 1..20: mol_type = other DNA
gaaagtcccgtccgagcggt

SEQ ID NO: 13436 - DNA, 20 bp, synthetic construct
  source 1..20: mol_type = other DNA
catagtcccactggatggca

SEQ ID NO: 13437 - DNA, 20 bp, synthetic construct
  source 1..20: mol_type = other DNA
tcacagatcagcctcctcat

SEQ ID NO: 13438 - DNA, 20 bp, synthetic construct
  source 1..20: mol_type = other DNA
cttctacaatgagctgcgtg

SEQ ID NO: 13439 - DNA, 20 bp, synthetic construct
  source 1..20: mol_type = other DNA
gtagtctaccagcttattta

SEQ ID NO: 13440 - DNA, 20 bp, synthetic construct
  source 1..20: mol_type = other DNA
gttccagatggtcaaagagc

SEQ ID NO: 13441 - DNA, 20 bp, synthetic construct
  source 1..20: mol_type = other DNA
aaggctggaagagtgcctca

SEQ ID NO: 13442 - DNA, 20 bp, synthetic construct
  source 1..20: mol_type = other DNA
tgaggcttctcttcacctgg

SEQ ID NO: 13443 - DNA, 20 bp, synthetic construct
  source 1..20: mol_type = other DNA
gcgcgaccctcaaccgcctg

SEQ ID NO: 13444 - DNA, 20 bp, synthetic construct
  source 1..20: mol_type = other DNA
taagaacgacgccactgccc

SEQ ID NO: 13445 - DNA, 20 bp, synthetic construct
  source 1..20: mol_type = other DNA
acagagcaaaatgtgggctg

SEQ ID NO: 13446 - DNA, 20 bp, synthetic construct
  source 1..20: mol_type = other DNA
agctccagggcgctcaggac

SEQ ID NO: 13447 - DNA, 20 bp, synthetic construct
  source 1..20: mol_type = other DNA
gggctgccagcgtatcgtag

SEQ ID NO: 13448 - DNA, 20 bp, synthetic construct
  source 1..20: mol_type = other DNA
catccaggtaaccgaggtga

SEQ ID NO: 13449 - DNA, 20 bp, synthetic construct
  source 1..20: mol_type = other DNA
acagtgcatggcctatgagc

SEQ ID NO: 13450 - DNA, 20 bp, synthetic construct
  source 1..20: mol_type = other DNA
gctcccctacctggtgcctg

SEQ ID NO: 13451 - DNA, 20 bp, synthetic construct
  source 1..20: mol_type = other DNA
gaggaagctgtcaaagtcct

SEQ ID NO: 13452 - DNA, 20 bp, synthetic construct
  source 1..20: mol_type = other DNA
ggccctggaggatgacgagc

SEQ ID NO: 13453 - DNA, 20 bp, synthetic construct
  source 1..20: mol_type = other DNA
atacctgggctgggagcgaa

SEQ ID NO: 13454 - DNA, 20 bp, synthetic construct
  source 1..20: mol_type = other DNA
tcccgcagctgcagctgctg

SEQ ID NO: 13455 - DNA, 20 bp, synthetic construct
  source 1..20: mol_type = other DNA
gcgagggccatgtcgctgtt

SEQ ID NO: 13456 - DNA, 20 bp, synthetic construct
  source 1..20: mol_type = other DNA
gtctggttggggagatggac

SEQ ID NO: 13457 - DNA, 20 bp, synthetic construct
  source 1..20: mol_type = other DNA
tgtagacagatggccagggt

SEQ ID NO: 13458 - DNA, 20 bp, synthetic construct
  source 1..20: mol_type = other DNA
gcaggttctggaactggagc

SEQ ID NO: 13459 - DNA, 20 bp, synthetic construct
  source 1..20: mol_type = other DNA
agaagaccctgcagctgctg

SEQ ID NO: 13460 - DNA, 20 bp, synthetic construct
  source 1..20: mol_type = other DNA
gaaagacttgaactcaaggt

SEQ ID NO: 13461 - DNA, 20 bp, synthetic construct
  source 1..20: mol_type = other DNA
catcatcagccaggccccgc

SEQ ID NO: 13462 - DNA, 20 bp, synthetic construct
  source 1..20: mol_type = other DNA
ctccaggccgccagagcctg

SEQ ID NO: 13463 - DNA, 20 bp, synthetic construct
  source 1..20: mol_type = other DNA
gctgtcccaggtcaactacc

SEQ ID NO: 13464 - DNA, 20 bp, synthetic construct
  source 1..20: mol_type = other DNA
ggcctcagtctcaaggagca

SEQ ID NO: 13465 - DNA, 20 bp, synthetic construct
  source 1..20: mol_type = other DNA
gatcaggttggacttttcta

SEQ ID NO: 13466 - DNA, 20 bp, synthetic construct
  source 1..20: mol_type = other DNA
gcccaacggtaccttcttca

SEQ ID NO: 13467 - DNA, 20 bp, synthetic construct
  source 1..20: mol_type = other DNA
ggtaattcaagtctcccaag

SEQ ID NO: 13468 - DNA, 20 bp, synthetic construct
  source 1..20: mol_type = other DNA
atcaggttggacttttctat

SEQ ID NO: 13469 - DNA, 20 bp, synthetic construct
  source 1..20: mol_type = other DNA
gtttgctcagtgcttccccc

SEQ ID NO: 13470 - DNA, 20 bp, synthetic construct
  source 1..20: mol_type = other DNA
tgggtaggcaggtggccagg

SEQ ID NO: 13471 - DNA, 20 bp, synthetic construct
  source 1..20: mol_type = other DNA
cgttgggcagttgtgtgaca

SEQ ID NO: 13472 - DNA, 20 bp, synthetic construct
  source 1..20: mol_type = other DNA
caaggcaccccaggtttcca

SEQ ID NO: 13473 - DNA, 20 bp, synthetic construct
  source 1..20: mol_type = other DNA
ggccgcccgaaacatcctcg

SEQ ID NO: 13474 - DNA, 20 bp, synthetic construct
  source 1..20: mol_type = other DNA
accggctttccccccatctc

SEQ ID NO: 13475 - DNA, 20 bp, synthetic construct
  source 1..20: mol_type = other DNA
ctggtcatggagatggctgg

SEQ ID NO: 13476 - DNA, 20 bp, synthetic construct
  source 1..20: mol_type = other DNA
tggaaggtggagctgggctg

SEQ ID NO: 13477 - DNA, 20 bp, synthetic construct
  source 1..20: mol_type = other DNA
tcccaatgatgaccaggatg

SEQ ID NO: 13478 - DNA, 20 bp, synthetic construct
  source 1..20: mol_type = other DNA
cagctccaccttccaccaga

SEQ ID NO: 13479 - DNA, 20 bp, synthetic construct
  source 1..20: mol_type = other DNA
tacaggggcctgaacaaaca

SEQ ID NO: 13480 - DNA, 20 bp, synthetic construct
  source 1..20: mol_type = other DNA
ctcaggtgacggcagcaggc

SEQ ID NO: 13481 - DNA, 20 bp, synthetic construct
  source 1..20: mol_type = other DNA
cttctggtttgcttcctctg

SEQ ID NO: 13482 - DNA, 20 bp, synthetic construct
  source 1..20: mol_type = other DNA
tcgatgtgaagaaggaaaca

SEQ ID NO: 13483 - DNA, 20 bp, synthetic construct
  source 1..20: mol_type = other DNA
ttggcagctaaagctgttga

SEQ ID NO: 13484 - DNA, 20 bp, synthetic construct
  source 1..20: mol_type = other DNA
gtgaagggttctctatcaaa

SEQ ID NO: 13485 - DNA, 20 bp, synthetic construct
  source 1..20: mol_type = other DNA
gcacttactgatccaataca

SEQ ID NO: 13486 - DNA, 20 bp, synthetic construct
  source 1..20: mol_type = other DNA
acagtagccccggaacctgc

SEQ ID NO: 13487 - DNA, 20 bp, synthetic construct
  source 1..20: mol_type = other DNA
atccagttcagcatgatctc

SEQ ID NO: 13488 - DNA, 20 bp, synthetic construct
  source 1..20: mol_type = other DNA
ctcctccatcctcgccatgc

SEQ ID NO: 13489 - DNA, 20 bp, synthetic construct
  source 1..20: mol_type = other DNA
ggggcaggaggaggatgagg

SEQ ID NO: 13490 - DNA, 20 bp, synthetic construct
  source 1..20: mol_type = other DNA
cttggtgcccaccaggatga

SEQ ID NO: 13491 - DNA, 20 bp, synthetic construct
  source 1..20: mol_type = other DNA
taccaggtgcatcgaatcac

SEQ ID NO: 13492 - DNA, 20 bp, synthetic construct
  source 1..20: mol_type = other DNA
gggcaaaggatcgtagttgg

SEQ ID NO: 13493 - DNA, 20 bp, synthetic construct
  source 1..20: mol_type = other DNA
cggaggtctgtgccaccggc

SEQ ID NO: 13494 - DNA, 20 bp, synthetic construct
  source 1..20: mol_type = other DNA
aacgatcaccaccactggca

SEQ ID NO: 13495 - DNA, 20 bp, synthetic construct
  source 1..20: mol_type = other DNA
tgtttcgggcggccaggtcg

SEQ ID NO: 13496 - DNA, 20 bp, synthetic construct
  source 1..20: mol_type = other DNA
gagcctgtttgcctttggta

SEQ ID NO: 13497 - DNA, 20 bp, synthetic construct
  source 1..20: mol_type = other DNA
ccagctgataaaagactgac

SEQ ID NO: 13498 - DNA, 20 bp, synthetic construct
  source 1..20: mol_type = other DNA
ccctatggctgcctccccac

SEQ ID NO: 13499 - DNA, 20 bp, synthetic construct
  source 1..20: mol_type = other DNA
ccatctgcaagtcaggtgag

SEQ ID NO: 13500 - DNA, 20 bp, synthetic construct
  source 1..20: mol_type = other DNA
cctggaggagaaggaggacc

SEQ ID NO: 13501 - DNA, 20 bp, synthetic construct
  source 1..20: mol_type = other DNA
gttctcatgctgaatggtga

SEQ ID NO: 13502 - DNA, 20 bp, synthetic construct
  source 1..20: mol_type = other DNA
ggagaagctcattgctacga

SEQ ID NO: 13503 - DNA, 20 bp, synthetic construct
  source 1..20: mol_type = other DNA
ccggaaccgctcattgccaa

SEQ ID NO: 13504 - DNA, 20 bp, synthetic construct
  source 1..20: mol_type = other DNA
gaacttgatcttggtggtaa

SEQ ID NO: 13505 - DNA, 20 bp, synthetic construct
  source 1..20: mol_type = other DNA
tacacacatttccatggacc

SEQ ID NO: 13506 - DNA, 20 bp, synthetic construct
  source 1..20: mol_type = other DNA
agcagcaccttcaggatgtc

SEQ ID NO: 13507 - DNA, 20 bp, synthetic construct
  source 1..20: mol_type = other DNA
ccgcatcccctggaagcacg

SEQ ID NO: 13508 - DNA, 20 bp, synthetic construct
  source 1..20: mol_type = other DNA
tggacaacccctacatcgtg

SEQ ID NO: 13509 - DNA, 20 bp, synthetic construct
  source 1..20: mol_type = other DNA
aatactcacaggcaagctgg

SEQ ID NO: 13510 - DNA, 20 bp, synthetic construct
  source 1..20: mol_type = other DNA
ggggatttctatgacctgta

SEQ ID NO: 13511 - DNA, 20 bp, synthetic construct
  source 1..20: mol_type = other DNA
gttatccaatacctacaagg

SEQ ID NO: 13512 - DNA, 20 bp, synthetic construct
  source 1..20: mol_type = other DNA
gtctctcctcgaagatcgtg

SEQ ID NO: 13513 - DNA, 20 bp, synthetic construct
  source 1..20: mol_type = other DNA
catcaacaaactcctggaca

SEQ ID NO: 13514 - DNA, 20 bp, synthetic construct
  source 1..20: mol_type = other DNA
tcatcaagctgagtgaccct

SEQ ID NO: 13515 - DNA, 20 bp, synthetic construct
  source 1..20: mol_type = other DNA
cgttctcctgggacggagag

SEQ ID NO: 13516 - DNA, 20 bp, synthetic construct
  source 1..20: mol_type = other DNA
cacacttactctccacgtcg

SEQ ID NO: 13517 - DNA, 20 bp, synthetic construct
  source 1..20: mol_type = other DNA
ggtgaagctctcctgtgggg

SEQ ID NO: 13518 - DNA, 20 bp, synthetic construct
  source 1..20: mol_type = other DNA
acccatatccgcacccacac

SEQ ID NO: 13519 - DNA, 20 bp, synthetic construct
  source 1..20: mol_type = other DNA
ggcccccaggtttgagccga

SEQ ID NO: 13520 - DNA, 20 bp, synthetic construct
  source 1..20: mol_type = other DNA
ctagacaatgagaagagcaa

SEQ ID NO: 13521 - DNA, 20 bp, synthetic construct
  source 1..20: mol_type = other DNA
acctgtggatgcagcggtcc

SEQ ID NO: 13522 - DNA, 20 bp, synthetic construct
  source 1..20: mol_type = other DNA
aggccctgcgggtaggtgat

SEQ ID NO: 13523 - DNA, 20 bp, synthetic construct
  source 1..20: mol_type = other DNA
tactgtaccagacaaactcg

SEQ ID NO: 13524 - DNA, 20 bp, synthetic construct
  source 1..20: mol_type = other DNA
gagccggcagcgctgggtgc

SEQ ID NO: 13525 - DNA, 20 bp, synthetic construct
  source 1..20: mol_type = other DNA
gcacagcaggtagagcatct

SEQ ID NO: 13526 - DNA, 20 bp, synthetic construct
  source 1..20: mol_type = other DNA
cttctgggagtcaaaggtca

SEQ ID NO: 13527 - DNA, 20 bp, synthetic construct
  source 1..20: mol_type = other DNA
tgaaatagaacctggaaggc

SEQ ID NO: 13528 - DNA, 20 bp, synthetic construct
  source 1..20: mol_type = other DNA
ggctcctcaccctgttgaac

SEQ ID NO: 13529 - DNA, 20 bp, synthetic construct
  source 1..20: mol_type = other DNA
cgcggacacagacgccatag

SEQ ID NO: 13530 - DNA, 20 bp, synthetic construct
  source 1..20: mol_type = other DNA
gcttcgggcaaccctacggc

SEQ ID NO: 13531 - DNA, 20 bp, synthetic construct
  source 1..20: mol_type = other DNA
tggtgctgctaaatctcttg

SEQ ID NO: 13532 - DNA, 20 bp, synthetic construct
  source 1..20: mol_type = other DNA
gagagaagatgttgtccgag

SEQ ID NO: 13533 - DNA, 20 bp, synthetic construct
  source 1..20: mol_type = other DNA
cccattcctgtcatttactg

SEQ ID NO: 13534 - DNA, 20 bp, synthetic construct
  source 1..20: mol_type = other DNA
tggttttccagctctcacgg

SEQ ID NO: 13535 - DNA, 20 bp, synthetic construct
  source 1..20: mol_type = other DNA
gcaaagagggagtggtacac

SEQ ID NO: 13536 - DNA, 20 bp, synthetic construct
  source 1..20: mol_type = other DNA
tgccatcaacatggccagga

SEQ ID NO: 13537 - DNA, 20 bp, synthetic construct
  source 1..20: mol_type = other DNA
gcagtaccacagccatctcc

SEQ ID NO: 13538 - DNA, 20 bp, synthetic construct
  source 1..20: mol_type = other DNA
gaattactcccagcagcttc

SEQ ID NO: 13539 - DNA, 20 bp, synthetic construct
  source 1..20: mol_type = other DNA
gggtcactcagcttgatgaa

SEQ ID NO: 13540 - DNA, 20 bp, synthetic construct
  source 1..20: mol_type = other DNA
cacaggcatgccgtgagtac

SEQ ID NO: 13541 - DNA, 20 bp, synthetic construct
  source 1..20: mol_type = other DNA
agcacccaaaagggcttaga

SEQ ID NO: 13542 - DNA, 20 bp, synthetic construct
  source 1..20: mol_type = other DNA
agttgaagaggcaccagagg

SEQ ID NO: 13543 - DNA, 20 bp, synthetic construct
  source 1..20: mol_type = other DNA
ttctacataccaaggggcaa

SEQ ID NO: 13544 - DNA, 20 bp, synthetic construct
  source 1..20: mol_type = other DNA
atcttcaaagtatgccaggc

SEQ ID NO: 13545 - DNA, 20 bp, synthetic construct
  source 1..20: mol_type = other DNA
ggtgaagtgggcatccccag

SEQ ID NO: 13546 - DNA, 20 bp, synthetic construct
  source 1..20: mol_type = other DNA
ccacaggtagccctgccagc

SEQ ID NO: 13547 - DNA, 20 bp, synthetic construct
  source 1..20: mol_type = other DNA
gtgacacgaggagcgggtgc

SEQ ID NO: 13548 - DNA, 20 bp, synthetic construct
  source 1..20: mol_type = other DNA
gcacgcagcggcgggagccc

SEQ ID NO: 13549 - DNA, 20 bp, synthetic construct
  source 1..20: mol_type = other DNA
cacaaaggcatgctccttga

SEQ ID NO: 13550 - DNA, 20 bp, synthetic construct
  source 1..20: mol_type = other DNA
caggaggagctgctgggctc

SEQ ID NO: 13551 - DNA, 20 bp, synthetic construct
  source 1..20: mol_type = other DNA
tatgccatctctttccggtg

SEQ ID NO: 13552 - DNA, 20 bp, synthetic construct
  source 1..20: mol_type = other DNA
ccacggaggacctgtcctgc

SEQ ID NO: 13553 - DNA, 20 bp, synthetic construct
  source 1..20: mol_type = other DNA
cattctcaccaagtagctca

SEQ ID NO: 13554 - DNA, 20 bp, synthetic construct
  source 1..20: mol_type = other DNA
ccaggaagacctagaaggag

SEQ ID NO: 13555 - DNA, 20 bp, synthetic construct
  source 1..20: mol_type = other DNA
ctctgcaggtatgaccccga

SEQ ID NO: 13556 - DNA, 20 bp, synthetic construct
  source 1..20: mol_type = other DNA
tggtccagtgctcagctcca

SEQ ID NO: 13557 - DNA, 20 bp, synthetic construct
  source 1..20: mol_type = other DNA
tgtgtcacagctcaatctcg

SEQ ID NO: 13558 - DNA, 20 bp, synthetic construct
  source 1..20: mol_type = other DNA
ctattcagccaatgtgatgg

SEQ ID NO: 13559 - DNA, 20 bp, synthetic construct
  source 1..20: mol_type = other DNA
gctcggtgaggatcttcatg

SEQ ID NO: 13560 - DNA, 20 bp, synthetic construct
  source 1..20: mol_type = other DNA
gcagcatgaccgtgttcatg

SEQ ID NO: 13561 - DNA, 20 bp, synthetic construct
  source 1..20: mol_type = other DNA
gaagttcaggtagacccctg

SEQ ID NO: 13562 - DNA, 20 bp, synthetic construct
  source 1..20: mol_type = other DNA
aacttctactcactctcatg

SEQ ID NO: 13563 - DNA, 20 bp, synthetic construct
  source 1..20: mol_type = other DNA
ttggtccagtgctcagctcc

SEQ ID NO: 13564 - DNA, 20 bp, synthetic construct
  source 1..20: mol_type = other DNA
ccacatctcatgccagagga

SEQ ID NO: 13565 - DNA, 20 bp, synthetic construct
  source 1..20: mol_type = other DNA
agttagaagtcgggtcgtgg

SEQ ID NO: 13566 - DNA, 20 bp, synthetic construct
  source 1..20: mol_type = other DNA
caccaagtagctcagggcac

SEQ ID NO: 13567 - DNA, 20 bp, synthetic construct
  source 1..20: mol_type = other DNA
ctcaggaggaaggtcccatc

SEQ ID NO: 13568 - DNA, 20 bp, synthetic construct
  source 1..20: mol_type = other DNA
cgacaagttcagagagctcc

SEQ ID NO: 13569 - DNA, 20 bp, synthetic construct
  source 1..20: mol_type = other DNA
cgcatgcacagtttgtaccc

SEQ ID NO: 13570 - DNA, 20 bp, synthetic construct
  source 1..20: mol_type = other DNA
ctggctgcggtcctcgggga

SEQ ID NO: 13571 - DNA, 20 bp, synthetic construct
  source 1..20: mol_type = other DNA
gcaagatctgcacaaccaaa

SEQ ID NO: 13572 - DNA, 20 bp, synthetic construct
  source 1..20: mol_type = other DNA
tacctgtttatgcacatctg

SEQ ID NO: 13573 - DNA, 20 bp, synthetic construct
  source 1..20: mol_type = other DNA
cagctgaaccccgaggcgct

SEQ ID NO: 13574 - DNA, 20 bp, synthetic construct
  source 1..20: mol_type = other DNA
gagcagggcatccttgttga

SEQ ID NO: 13575 - DNA, 20 bp, synthetic construct
  source 1..20: mol_type = other DNA
ttcttgactaccagggggta

SEQ ID NO: 13576 - DNA, 20 bp, synthetic construct
  source 1..20: mol_type = other DNA
ggtccagtgctcagctccag

SEQ ID NO: 13577 - DNA, 20 bp, synthetic construct
  source 1..20: mol_type = other DNA
ctaccaaaccaatgatcctc

SEQ ID NO: 13578 - DNA, 20 bp, synthetic construct
  source 1..20: mol_type = other DNA
cagaatggggatcttgaagt

SEQ ID NO: 13579 - DNA, 20 bp, synthetic construct
  source 1..20: mol_type = other DNA
aggaccaccagtccacagag

SEQ ID NO: 13580 - DNA, 20 bp, synthetic construct
  source 1..20: mol_type = other DNA
tcaagcctcattggaatgat

SEQ ID NO: 13581 - DNA, 20 bp, synthetic construct
  source 1..20: mol_type = other DNA
aaaggtatacatcaggaggc

SEQ ID NO: 13582 - DNA, 20 bp, synthetic construct
  source 1..20: mol_type = other DNA
cacacggagtacttgcgctc

SEQ ID NO: 13583 - DNA, 20 bp, synthetic construct
  source 1..20: mol_type = other DNA
cagtcggacatctggagcat

SEQ ID NO: 13584 - DNA, 20 bp, synthetic construct
  source 1..20: mol_type = other DNA
ccttcccagggcgtgatggt

SEQ ID NO: 13585 - DNA, 20 bp, synthetic construct
  source 1..20: mol_type = other DNA
gaagtcatgcccgttggcgg

SEQ ID NO: 13586 - DNA, 20 bp, synthetic construct
  source 1..20: mol_type = other DNA
acgccctgtccctcatctat

SEQ ID NO: 13587 - DNA, 20 bp, synthetic construct
  source 1..20: mol_type = other DNA
cctgcaccatggtgcctggt

SEQ ID NO: 13588 - DNA, 20 bp, synthetic construct
  source 1..20: mol_type = other DNA
actcaccagctgtccactcc

SEQ ID NO: 13589 - DNA, 20 bp, synthetic construct
  source 1..20: mol_type = other DNA
gaagccacactggtaaggcc

SEQ ID NO: 13590 - DNA, 20 bp, synthetic construct
  source 1..20: mol_type = other DNA
tccgcatgcagatccggcac

SEQ ID NO: 13591 - DNA, 20 bp, synthetic construct
  source 1..20: mol_type = other DNA
agaccctgcggataggtgat

SEQ ID NO: 13592 - DNA, 20 bp, synthetic construct
  source 1..20: mol_type = other DNA
aggtgtttcaggaatactac

SEQ ID NO: 13593 - DNA, 20 bp, synthetic construct
  source 1..20: mol_type = other DNA
acatgggtagagggaacggt

SEQ ID NO: 13594 - DNA, 20 bp, synthetic construct
  source 1..20: mol_type = other DNA
ctttcccagacgatcgtcac

SEQ ID NO: 13595 - DNA, 20 bp, synthetic construct
  source 1..20: mol_type = other DNA
cagctggacaggagatggct

SEQ ID NO: 13596 - DNA, 20 bp, synthetic construct
  source 1..20: mol_type = other DNA
cctggaggacaggcaggagc

SEQ ID NO: 13597 - DNA, 20 bp, synthetic construct
  source 1..20: mol_type = other DNA
gctgtcccggtcatccttga

SEQ ID NO: 13598 - DNA, 20 bp, synthetic construct
  source 1..20: mol_type = other DNA
acgtgaacgttccggagagc

SEQ ID NO: 13599 - DNA, 20 bp, synthetic construct
  source 1..20: mol_type = other DNA
tggcctcaccggctgtagct

SEQ ID NO: 13600 - DNA, 20 bp, synthetic construct
  source 1..20: mol_type = other DNA
ggccttcgtgaaaccatctg

SEQ ID NO: 13601 - DNA, 20 bp, synthetic construct
  source 1..20: mol_type = other DNA
gaagaggcaccagaggcgga

SEQ ID NO: 13602 - DNA, 20 bp, synthetic construct
  source 1..20: mol_type = other DNA
cagttcggggaggtgtggat

SEQ ID NO: 13603 - DNA, 20 bp, synthetic construct
  source 1..20: mol_type = other DNA
ttccatcaagtgcgtgttgg

SEQ ID NO: 13604 - DNA, 20 bp, synthetic construct
  source 1..20: mol_type = other DNA
tacctgcagtgcaccacaat

SEQ ID NO: 13605 - DNA, 20 bp, synthetic construct
  source 1..20: mol_type = other DNA
ctgtacccctgtgctggtgg

SEQ ID NO: 13606 - DNA, 20 bp, synthetic construct
  source 1..20: mol_type = other DNA
gcggaggctcagcgagctcc

SEQ ID NO: 13607 - DNA, 20 bp, synthetic construct
  source 1..20: mol_type = other DNA
aattatgagaaactgagccg

SEQ ID NO: 13608 - DNA, 20 bp, synthetic construct
  source 1..20: mol_type = other DNA
gagggtacttgtcctcagac

SEQ ID NO: 13609 - DNA, 20 bp, synthetic construct
  source 1..20: mol_type = other DNA
tgctggtcatggagatggct

SEQ ID NO: 13610 - DNA, 20 bp, synthetic construct
  source 1..20: mol_type = other DNA
gcagctgcgcggggtcagca

SEQ ID NO: 13611 - DNA, 20 bp, synthetic construct
  source 1..20: mol_type = other DNA
acacgaggagcgggtgctgg

SEQ ID NO: 13612 - DNA, 20 bp, synthetic construct
  source 1..20: mol_type = other DNA
cccaagtaaggagactgggg

SEQ ID NO: 13613 - DNA, 20 bp, synthetic construct
  source 1..20: mol_type = other DNA
ctcggagctgcggcgtgggg

SEQ ID NO: 13614 - DNA, 20 bp, synthetic construct
  source 1..20: mol_type = other DNA
catcttgggctgagagcgag

SEQ ID NO: 13615 - DNA, 20 bp, synthetic construct
  source 1..20: mol_type = other DNA
gaggcggaaggcatcctgat

SEQ ID NO: 13616 - DNA, 20 bp, synthetic construct
  source 1..20: mol_type = other DNA
tcttcctccacgtagttggc

SEQ ID NO: 13617 - DNA, 20 bp, synthetic construct
  source 1..20: mol_type = other DNA
gcaggtgaacacataggcct

SEQ ID NO: 13618 - DNA, 20 bp, synthetic construct
  source 1..20: mol_type = other DNA
ttctgcccttctctctggaa

SEQ ID NO: 13619 - DNA, 20 bp, synthetic construct
  source 1..20: mol_type = other DNA
tcatttggtgagtgtcatgc

SEQ ID NO: 13620 - DNA, 20 bp, synthetic construct
  source 1..20: mol_type = other DNA
tatccaatacctacaaggag

SEQ ID NO: 13621 - DNA, 20 bp, synthetic construct
  source 1..20: mol_type = other DNA
catcaagctgagtgaccctg

SEQ ID NO: 13622 - DNA, 20 bp, synthetic construct
  source 1..20: mol_type = other DNA
ctcgtggccttcctccactg

SEQ ID NO: 13623 - DNA, 20 bp, synthetic construct
  source 1..20: mol_type = other DNA
ttgcacagctcgcacttgta

SEQ ID NO: 13624 - DNA, 20 bp, synthetic construct
  source 1..20: mol_type = other DNA
tcggagattctccaccattg

SEQ ID NO: 13625 - DNA, 20 bp, synthetic construct
  source 1..20: mol_type = other DNA
gggggaacagctccgcatcc

SEQ ID NO: 13626 - DNA, 20 bp, synthetic construct
  source 1..20: mol_type = other DNA
tcaggaagcaccaccctgaa

SEQ ID NO: 13627 - DNA, 20 bp, synthetic construct
  source 1..20: mol_type = other DNA
tagtcatttctatttaaggg

SEQ ID NO: 13628 - DNA, 20 bp, synthetic construct
  source 1..20: mol_type = other DNA
taaacttggaccacaacagg

SEQ ID NO: 13629 - DNA, 20 bp, synthetic construct
  source 1..20: mol_type = other DNA
gtgctatattggctggtgag

SEQ ID NO: 13630 - DNA, 20 bp, synthetic construct
  source 1..20: mol_type = other DNA
tggtgaaggacccatggccc

SEQ ID NO: 13631 - DNA, 20 bp, synthetic construct
  source 1..20: mol_type = other DNA
tgaactcgtggcacttgacg

SEQ ID NO: 13632 - DNA, 20 bp, synthetic construct
  source 1..20: mol_type = other DNA
gggtcacctgaaggccgtaa

SEQ ID NO: 13633 - DNA, 20 bp, synthetic construct
  source 1..20: mol_type = other DNA
aaatcaatgtggaacagctg

SEQ ID NO: 13634 - DNA, 20 bp, synthetic construct
  source 1..20: mol_type = other DNA
atccaatacctacaaggagg

SEQ ID NO: 13635 - DNA, 20 bp, synthetic construct
  source 1..20: mol_type = other DNA
cagcgagcagaaggcgcacc

SEQ ID NO: 13636 - DNA, 20 bp, synthetic construct
  source 1..20: mol_type = other DNA
ccatgcactgttgaatcagc

SEQ ID NO: 13637 - DNA, 20 bp, synthetic construct
  source 1..20: mol_type = other DNA
gatgaagccttcctggcccg

SEQ ID NO: 13638 - DNA, 20 bp, synthetic construct
  source 1..20: mol_type = other DNA
cgccttccactgtggggaga

SEQ ID NO: 13639 - DNA, 20 bp, synthetic construct
  source 1..20: mol_type = other DNA
cggggagcagctcacaggtt

SEQ ID NO: 13640 - DNA, 20 bp, synthetic construct
  source 1..20: mol_type = other DNA
gagaaggtaaaaataaatgt

SEQ ID NO: 13641 - DNA, 20 bp, synthetic construct
  source 1..20: mol_type = other DNA
ctgaccacgtccagccccga

SEQ ID NO: 13642 - DNA, 20 bp, synthetic construct
  source 1..20: mol_type = other DNA
gcaccggttgaataagatgg

SEQ ID NO: 13643 - DNA, 20 bp, synthetic construct
  source 1..20: mol_type = other DNA
cacagcctgtgttgaagcag

SEQ ID NO: 13644 - DNA, 20 bp, synthetic construct
  source 1..20: mol_type = other DNA
tcgcaggaggccgagttccc

SEQ ID NO: 13645 - DNA, 20 bp, synthetic construct
  source 1..20: mol_type = other DNA
cggcccctcgtcatcaagac

SEQ ID NO: 13646 - DNA, 20 bp, synthetic construct
  source 1..20: mol_type = other DNA
cagctgcagatgtactgaga

SEQ ID NO: 13647 - DNA, 20 bp, synthetic construct
  source 1..20: mol_type = other DNA
gtgaactgagtctggtatag

SEQ ID NO: 13648 - DNA, 20 bp, synthetic construct
  source 1..20: mol_type = other DNA
aacactgtgggaccctgctg

SEQ ID NO: 13649 - DNA, 20 bp, synthetic construct
  source 1..20: mol_type = other DNA
ccatacagctgcaccagttt

SEQ ID NO: 13650 - DNA, 20 bp, synthetic construct
  source 1..20: mol_type = other DNA
tctttacctggggaaacaca

SEQ ID NO: 13651 - DNA, 20 bp, synthetic construct
  source 1..20: mol_type = other DNA
ccccttcaagatacctatag

SEQ ID NO: 13652 - DNA, 20 bp, synthetic construct
  source 1..20: mol_type = other DNA
ctcgtgcaggtgtgagaagt

SEQ ID NO: 13653 - DNA, 20 bp, synthetic construct
  source 1..20: mol_type = other DNA
cgatggaggggaagacggcc

SEQ ID NO: 13654 - DNA, 20 bp, synthetic construct
  source 1..20: mol_type = other DNA
gaccaggtgccccagcatgc

SEQ ID NO: 13655 - DNA, 20 bp, synthetic construct
  source 1..20: mol_type = other DNA
ggtactccatgaccagccgc

SEQ ID NO: 13656 - DNA, 20 bp, synthetic construct
  source 1..20: mol_type = other DNA
cccggctcagacgctcctgg

SEQ ID NO: 13657 - DNA, 20 bp, synthetic construct
  source 1..20: mol_type = other DNA
agggccagctctgtccactt

SEQ ID NO: 13658 - DNA, 20 bp, synthetic construct
  source 1..20: mol_type = other DNA
ggccaaggcaagcagcgcgc

SEQ ID NO: 13659 - DNA, 20 bp, synthetic construct
  source 1..20: mol_type = other DNA
tactcacgattgtcaaagat

SEQ ID NO: 13660 - DNA, 20 bp, synthetic construct
  source 1..20: mol_type = other DNA
atgctcataccaagtctctg

SEQ ID NO: 13661 - DNA, 20 bp, synthetic construct
  source 1..20: mol_type = other DNA
gaaatcatggtgcttccttc

SEQ ID NO: 13662 - DNA, 20 bp, synthetic construct
  source 1..20: mol_type = other DNA
tccagattacgagaatctgc

SEQ ID NO: 13663 - DNA, 20 bp, synthetic construct
  source 1..20: mol_type = other DNA
tgaccagccgcaggctctgg

SEQ ID NO: 13664 - DNA, 20 bp, synthetic construct
  source 1..20: mol_type = other DNA
tactctggggcgcagaccga

SEQ ID NO: 13665 - DNA, 20 bp, synthetic construct
  source 1..20: mol_type = other DNA
aaacctgtggggagcaggca

SEQ ID NO: 13666 - DNA, 20 bp, synthetic construct
  source 1..20: mol_type = other DNA
acattacaagatccgtaatc

SEQ ID NO: 13667 - DNA, 20 bp, synthetic construct
  source 1..20: mol_type = other DNA
ctctccgggaaaggcgttgg

SEQ ID NO: 13668 - DNA, 20 bp, synthetic construct
  source 1..20: mol_type = other DNA
ggtcgcggtgcacgcagcgg

SEQ ID NO: 13669 - DNA, 20 bp, synthetic construct
  source 1..20: mol_type = other DNA
gtgcatcagctccttggtct

SEQ ID NO: 13670 - DNA, 20 bp, synthetic construct
  source 1..20: mol_type = other DNA
ccagcagctcgcagcgttgc

SEQ ID NO: 13671 - DNA, 20 bp, synthetic construct
  source 1..20: mol_type = other DNA
gattgaaagccaagcatggt

SEQ ID NO: 13672 - DNA, 20 bp, synthetic construct
  source 1..20: mol_type = other DNA
ctgttggccttggggttcag

SEQ ID NO: 13673 - DNA, 20 bp, synthetic construct
  source 1..20: mol_type = other DNA
ggaaggctcgcttggtccac

SEQ ID NO: 13674 - DNA, 20 bp, synthetic construct
  source 1..20: mol_type = other DNA
ggcaggcctttgtcctccta

SEQ ID NO: 13675 - DNA, 20 bp, synthetic construct
  source 1..20: mol_type = other DNA
ggcttccaaggaggactcac

SEQ ID NO: 13676 - DNA, 20 bp, synthetic construct
  source 1..20: mol_type = other DNA
tgcccagtgtgttccaccat

SEQ ID NO: 13677 - DNA, 20 bp, synthetic construct
  source 1..20: mol_type = other DNA
caagctcaaagctcctttgg

SEQ ID NO: 13678 - DNA, 20 bp, synthetic construct
  source 1..20: mol_type = other DNA
ctcacagcaggtggacagga

SEQ ID NO: 13679 - DNA, 20 bp, synthetic construct
  source 1..20: mol_type = other DNA
ggcggtaccagagcggcaag

SEQ ID NO: 13680 - DNA, 20 bp, synthetic construct
  source 1..20: mol_type = other DNA
ccacttcaggaatatggtga

SEQ ID NO: 13681 - DNA, 20 bp, synthetic construct
  source 1..20: mol_type = other DNA
aacggcgctccaagatggac

SEQ ID NO: 13682 - DNA, 20 bp, synthetic construct
  source 1..20: mol_type = other DNA
tgccgagtgaaccgaaactc

SEQ ID NO: 13683 - DNA, 20 bp, synthetic construct
  source 1..20: mol_type = other DNA
cgggcagagacattgccatg

SEQ ID NO: 13684 - DNA, 20 bp, synthetic construct
  source 1..20: mol_type = other DNA
agttccattcattacctcac

SEQ ID NO: 13685 - DNA, 20 bp, synthetic construct
  source 1..20: mol_type = other DNA
cgactgaaagagaaaacctc

SEQ ID NO: 13686 - DNA, 20 bp, synthetic construct
  source 1..20: mol_type = other DNA
gcagaagcaggtgtctctgg

SEQ ID NO: 13687 - DNA, 20 bp, synthetic construct
  source 1..20: mol_type = other DNA
aggcggaccctgaaaaaccg

SEQ ID NO: 13688 - DNA, 20 bp, synthetic construct
  source 1..20: mol_type = other DNA
agaaggtaaaaataaatgtg

SEQ ID NO: 13689 - DNA, 20 bp, synthetic construct
  source 1..20: mol_type = other DNA
gggtttctgtccactgccgg

SEQ ID NO: 13690 - DNA, 20 bp, synthetic construct
  source 1..20: mol_type = other DNA
gcggaaccgctcattgccaa

SEQ ID NO: 13691 - DNA, 20 bp, synthetic construct
  source 1..20: mol_type = other DNA
cccaggtggggttctgcctg

SEQ ID NO: 13692 - DNA, 20 bp, synthetic construct
  source 1..20: mol_type = other DNA
gctgggggctggacagttcg

SEQ ID NO: 13693 - DNA, 20 bp, synthetic construct
  source 1..20: mol_type = other DNA
gagtagggccggccagtgca

SEQ ID NO: 13694 - DNA, 20 bp, synthetic construct
  source 1..20: mol_type = other DNA
aagttcaggtagacccctgt

SEQ ID NO: 13695 - DNA, 20 bp, synthetic construct
  source 1..20: mol_type = other DNA
ttgtagctgcaggggttgga

SEQ ID NO: 13696 - DNA, 20 bp, synthetic construct
  source 1..20: mol_type = other DNA
ccgacgagcggatgaaggtg

SEQ ID NO: 13697 - DNA, 20 bp, synthetic construct
  source 1..20: mol_type = other DNA
atacaagtccaggagatctt

SEQ ID NO: 13698 - DNA, 20 bp, synthetic construct
  source 1..20: mol_type = other DNA
tggctaggtgcagtggtctg

SEQ ID NO: 13699 - DNA, 20 bp, synthetic construct
  source 1..20: mol_type = other DNA
ccaagcttaaagcctccagc

SEQ ID NO: 13700 - DNA, 20 bp, synthetic construct
  source 1..20: mol_type = other DNA
ggcacagagctttggcctgc

SEQ ID NO: 13701 - DNA, 20 bp, synthetic construct
  source 1..20: mol_type = other DNA
cttcaggtgctcctcggcct

SEQ ID NO: 13702 - DNA, 20 bp, synthetic construct
  source 1..20: mol_type = other DNA
ccgtggacgatgacaaccac

SEQ ID NO: 13703 - DNA, 20 bp, synthetic construct
  source 1..20: mol_type = other DNA
gacgaggcccagagcaagag

SEQ ID NO: 13704 - DNA, 20 bp, synthetic construct
  source 1..20: mol_type = other DNA
tcttccaccatgatatctgt

SEQ ID NO: 13705 - DNA, 20 bp, synthetic construct
  source 1..20: mol_type = other DNA
gagctccatatatctggact

SEQ ID NO: 13706 - DNA, 20 bp, synthetic construct
  source 1..20: mol_type = other DNA
gttgtagaagcatgtgaact

SEQ ID NO: 13707 - DNA, 20 bp, synthetic construct
  source 1..20: mol_type = other DNA
ttcgctcagaggtcctgggc

SEQ ID NO: 13708 - DNA, 20 bp, synthetic construct
  source 1..20: mol_type = other DNA
tgatggtggccttcacctgg

SEQ ID NO: 13709 - DNA, 20 bp, synthetic construct
  source 1..20: mol_type = other DNA
gttctccagtgagtcctcct

SEQ ID NO: 13710 - DNA, 20 bp, synthetic construct
  source 1..20: mol_type = other DNA
acggagcagcccaagcagcg

SEQ ID NO: 13711 - DNA, 20 bp, synthetic construct
  source 1..20: mol_type = other DNA
agtgaccaggcggtgctctc

SEQ ID NO: 13712 - DNA, 20 bp, synthetic construct
  source 1..20: mol_type = other DNA
ccagctccttctccttcagc

SEQ ID NO: 13713 - DNA, 20 bp, synthetic construct
  source 1..20: mol_type = other DNA
taaacttggtcttcaggtat

SEQ ID NO: 13714 - DNA, 20 bp, synthetic construct
  source 1..20: mol_type = other DNA
cacgatttcccgctcggccg

SEQ ID NO: 13715 - DNA, 20 bp, synthetic construct
  source 1..20: mol_type = other DNA
aatgtggaacagctgagggg

SEQ ID NO: 13716 - DNA, 20 bp, synthetic construct
  source 1..20: mol_type = other DNA
ccaggtcactgcggtgctgg

SEQ ID NO: 13717 - DNA, 20 bp, synthetic construct
  source 1..20: mol_type = other DNA
gcccgaagcagaccgagtgt

SEQ ID NO: 13718 - DNA, 20 bp, synthetic construct
  source 1..20: mol_type = other DNA
tagccaggtatcaatctgga

SEQ ID NO: 13719 - DNA, 20 bp, synthetic construct
  source 1..20: mol_type = other DNA
tcttcaggtgcccgctggga

SEQ ID NO: 13720 - DNA, 20 bp, synthetic construct
  source 1..20: mol_type = other DNA
gccctattcctcactaccag

SEQ ID NO: 13721 - DNA, 20 bp, synthetic construct
  source 1..20: mol_type = other DNA
acagttcatcccgcagtctg

SEQ ID NO: 13722 - DNA, 20 bp, synthetic construct
  source 1..20: mol_type = other DNA
gatggagtacctcaacggag

SEQ ID NO: 13723 - DNA, 20 bp, synthetic construct
  source 1..20: mol_type = other DNA
cagaaagccccagttacagc

SEQ ID NO: 13724 - DNA, 20 bp, synthetic construct
  source 1..20: mol_type = other DNA
acctgactttagtagtgaac

SEQ ID NO: 13725 - DNA, 20 bp, synthetic construct
  source 1..20: mol_type = other DNA
gggatgccagttatttacca

SEQ ID NO: 13726 - DNA, 20 bp, synthetic construct
  source 1..20: mol_type = other DNA
catcgagcagctgactacac

SEQ ID NO: 13727 - DNA, 20 bp, synthetic construct
  source 1..20: mol_type = other DNA
gttcccatacccctgccgcc

SEQ ID NO: 13728 - DNA, 20 bp, synthetic construct
  source 1..20: mol_type = other DNA
ttatccaatacctacaagga

SEQ ID NO: 13729 - DNA, 20 bp, synthetic construct
  source 1..20: mol_type = other DNA
gccaggtgcaggggcgtctg

SEQ ID NO: 13730 - DNA, 20 bp, synthetic construct
  source 1..20: mol_type = other DNA
caaccaggcctggcatgcgt

SEQ ID NO: 13731 - DNA, 20 bp, synthetic construct
  source 1..20: mol_type = other DNA
ccttgcccatgtcggccaca

SEQ ID NO: 13732 - DNA, 20 bp, synthetic construct
  source 1..20: mol_type = other DNA
agagcctgcgggcagagctc

SEQ ID NO: 13733 - DNA, 20 bp, synthetic construct
  source 1..20: mol_type = other DNA
acggagcgtgatgaatccag

SEQ ID NO: 13734 - DNA, 20 bp, synthetic construct
  source 1..20: mol_type = other DNA
tgatgtgagtgctcagaaca

SEQ ID NO: 13735 - DNA, 20 bp, synthetic construct
  source 1..20: mol_type = other DNA
tcacctgaaggccgtaaagg

SEQ ID NO: 13736 - DNA, 20 bp, synthetic construct
  source 1..20: mol_type = other DNA
ctccagcttcggtcgagggg

SEQ ID NO: 13737 - DNA, 20 bp, synthetic construct
  source 1..20: mol_type = other DNA
ggtgcagtaccggactgact

SEQ ID NO: 13738 - DNA, 20 bp, synthetic construct
  source 1..20: mol_type = other DNA
aacatcaagaggttcaggta

SEQ ID NO: 13739 - DNA, 20 bp, synthetic construct
  source 1..20: mol_type = other DNA
ttcagctgctgctttgtgta

SEQ ID NO: 13740 - DNA, 20 bp, synthetic construct
  source 1..20: mol_type = other DNA
tccacaggacgtccatgagc

SEQ ID NO: 13741 - DNA, 20 bp, synthetic construct
  source 1..20: mol_type = other DNA
tttcctggaggaaaaagaca

SEQ ID NO: 13742 - DNA, 20 bp, synthetic construct
  source 1..20: mol_type = other DNA
tgcagtaggcctccaggatg

SEQ ID NO: 13743 - DNA, 20 bp, synthetic construct
  source 1..20: mol_type = other DNA
caggccctgcgggtaggtga

SEQ ID NO: 13744 - DNA, 20 bp, synthetic construct
  source 1..20: mol_type = other DNA
caccaaatcatactgtccct

SEQ ID NO: 13745 - DNA, 20 bp, synthetic construct
  source 1..20: mol_type = other DNA
acgagaacgagggtgcgtct

SEQ ID NO: 13746 - DNA, 20 bp, synthetic construct
  source 1..20: mol_type = other DNA
atccagggcactgatgggca

SEQ ID NO: 13747 - DNA, 20 bp, synthetic construct
  source 1..20: mol_type = other DNA
cttggtgcggcagagggtga

SEQ ID NO: 13748 - DNA, 20 bp, synthetic construct
  source 1..20: mol_type = other DNA
cctgctggtaggacaggggc

SEQ ID NO: 13749 - DNA, 20 bp, synthetic construct
  source 1..20: mol_type = other DNA
cggacgggactttcttggtg

SEQ ID NO: 13750 - DNA, 20 bp, synthetic construct
  source 1..20: mol_type = other DNA
agcgcaggcactggcgcagc

SEQ ID NO: 13751 - DNA, 20 bp, synthetic construct
  source 1..20: mol_type = other DNA
agtctctggctcactatggc

SEQ ID NO: 13752 - DNA, 20 bp, synthetic construct
  source 1..20: mol_type = other DNA
acgaatgacggctcggaagg

SEQ ID NO: 13753 - DNA, 20 bp, synthetic construct
  source 1..20: mol_type = other DNA
cactcagccttaccagcccc

SEQ ID NO: 13754 - DNA, 20 bp, synthetic construct
  source 1..20: mol_type = other DNA
gaagccgactcacggccgag

SEQ ID NO: 13755 - DNA, 20 bp, synthetic construct
  source 1..20: mol_type = other DNA
gattctacactggcaaaccc

SEQ ID NO: 13756 - DNA, 20 bp, synthetic construct
  source 1..20: mol_type = other DNA
ccgccttgtcttggctgatg

SEQ ID NO: 13757 - DNA, 20 bp, synthetic construct
  source 1..20: mol_type = other DNA
agcacagcaggtagagcatc

SEQ ID NO: 13758 - DNA, 20 bp, synthetic construct
  source 1..20: mol_type = other DNA
tgactaccagggggtatggc

SEQ ID NO: 13759 - DNA, 20 bp, synthetic construct
  source 1..20: mol_type = other DNA
ctctggatctcttcatgcac

SEQ ID NO: 13760 - DNA, 20 bp, synthetic construct
  source 1..20: mol_type = other DNA
gatgtgatgacttgcaaaga

SEQ ID NO: 13761 - DNA, 20 bp, synthetic construct
  source 1..20: mol_type = other DNA
gatacatgtctatggccccc

SEQ ID NO: 13762 - DNA, 20 bp, synthetic construct
  source 1..20: mol_type = other DNA
tggatagctccaacccatcc

SEQ ID NO: 13763 - DNA, 20 bp, synthetic construct
  source 1..20: mol_type = other DNA
tccagaatggagtcgcaggt

SEQ ID NO: 13764 - DNA, 20 bp, synthetic construct
  source 1..20: mol_type = other DNA
atctgtccaaaagagaagac

SEQ ID NO: 13765 - DNA, 20 bp, synthetic construct
  source 1..20: mol_type = other DNA
cgcggcgatatcatcatcca

SEQ ID NO: 13766 - DNA, 20 bp, synthetic construct
  source 1..20: mol_type = other DNA
gctggccaggctgtagtaac

SEQ ID NO: 13767 - DNA, 20 bp, synthetic construct
  source 1..20: mol_type = other DNA
tgatcatccagaacgaacct

SEQ ID NO: 13768 - DNA, 20 bp, synthetic construct
  source 1..20: mol_type = other DNA
atgtgcaggactgccaagcg

SEQ ID NO: 13769 - DNA, 20 bp, synthetic construct
  source 1..20: mol_type = other DNA
ggccacacaatagccagcac

SEQ ID NO: 13770 - DNA, 20 bp, synthetic construct
  source 1..20: mol_type = other DNA
gaagccagtactctgaggtt

SEQ ID NO: 13771 - DNA, 20 bp, synthetic construct
  source 1..20: mol_type = other DNA
taagcccttttgggtgctgg

SEQ ID NO: 13772 - DNA, 20 bp, synthetic construct
  source 1..20: mol_type = other DNA
aaccctggtggttggtgtcg

SEQ ID NO: 13773 - DNA, 20 bp, synthetic construct
  source 1..20: mol_type = other DNA
ctgtggggctgcgccggatg

SEQ ID NO: 13774 - DNA, 20 bp, synthetic construct
  source 1..20: mol_type = other DNA
acaacgggaggttcaccctg

SEQ ID NO: 13775 - DNA, 20 bp, synthetic construct
  source 1..20: mol_type = other DNA
cccagtcctgccgcttcaag

SEQ ID NO: 13776 - DNA, 20 bp, synthetic construct
  source 1..20: mol_type = other DNA
aagcaggagtatgacgagtc

SEQ ID NO: 13777 - DNA, 20 bp, synthetic construct
  source 1..20: mol_type = other DNA
ccgccattacatccacaggg

SEQ ID NO: 13778 - DNA, 20 bp, synthetic construct
  source 1..20: mol_type = other DNA
cagagctacctttgccgatg

SEQ ID NO: 13779 - DNA, 20 bp, synthetic construct
  source 1..20: mol_type = other DNA
ctgcaactgaaacgcaagcg

SEQ ID NO: 13780 - DNA, 20 bp, synthetic construct
  source 1..20: mol_type = other DNA
gcagttccttcttgactacc

SEQ ID NO: 13781 - DNA, 20 bp, synthetic construct
  source 1..20: mol_type = other DNA
gttctcagagagccaacaac

SEQ ID NO: 13782 - DNA, 20 bp, synthetic construct
  source 1..20: mol_type = other DNA
gcacttgtaaggccgctcgc

SEQ ID NO: 13783 - DNA, 20 bp, synthetic construct
  source 1..20: mol_type = other DNA
cagctcgtagctcttctcca

SEQ ID NO: 13784 - DNA, 20 bp, synthetic construct
  source 1..20: mol_type = other DNA
ccctcattaagcccaagcga

SEQ ID NO: 13785 - DNA, 20 bp, synthetic construct
  source 1..20: mol_type = other DNA
cctcgtctttcatggagtcc

SEQ ID NO: 13786 - DNA, 20 bp, synthetic construct
  source 1..20: mol_type = other DNA
aggaagattatgatcgcctg

SEQ ID NO: 13787 - DNA, 20 bp, synthetic construct
  source 1..20: mol_type = other DNA
tccgcctcttctgcttcagc

SEQ ID NO: 13788 - DNA, 20 bp, synthetic construct
  source 1..20: mol_type = other DNA
tcatacacgctcgtgtccat

SEQ ID NO: 13789 - DNA, 20 bp, synthetic construct
  source 1..20: mol_type = other DNA
gtcttacctgtcacaggaca

SEQ ID NO: 13790 - DNA, 20 bp, synthetic construct
  source 1..20: mol_type = other DNA
cgcacaggtcctcagccaag

SEQ ID NO: 13791 - DNA, 20 bp, synthetic construct
  source 1..20: mol_type = other DNA
cttcacaatgtaagtggact

SEQ ID NO: 13792 - DNA, 20 bp, synthetic construct
  source 1..20: mol_type = other DNA
cagggtgacgatgtcaactg

SEQ ID NO: 13793 - DNA, 20 bp, synthetic construct
  source 1..20: mol_type = other DNA
ctccaagatggacaggtggg

SEQ ID NO: 13794 - DNA, 20 bp, synthetic construct
  source 1..20: mol_type = other DNA
tagaccctgcggataggtga

SEQ ID NO: 13795 - DNA, 20 bp, synthetic construct
  source 1..20: mol_type = other DNA
gcagcaacttgacggtgcac

SEQ ID NO: 13796 - DNA, 20 bp, synthetic construct
  source 1..20: mol_type = other DNA
gatgatggtggccttcacct

SEQ ID NO: 13797 - DNA, 20 bp, synthetic construct
  source 1..20: mol_type = other DNA
gagcgggcagcagcacatgc

SEQ ID NO: 13798 - DNA, 20 bp, synthetic construct
  source 1..20: mol_type = other DNA
caccagctgtagaaggtgcc

SEQ ID NO: 13799 - DNA, 20 bp, synthetic construct
  source 1..20: mol_type = other DNA
ttctcattgtctaggtaagg

SEQ ID NO: 13800 - DNA, 20 bp, synthetic construct
  source 1..20: mol_type = other DNA
gcgacctcaccgtccatggc

SEQ ID NO: 13801 - DNA, 20 bp, synthetic construct
  source 1..20: mol_type = other DNA
gggggcctcggtcagcagca

SEQ ID NO: 13802 - DNA, 20 bp, synthetic construct
  source 1..20: mol_type = other DNA
acgagctggggttccacagc

SEQ ID NO: 13803 - DNA, 20 bp, synthetic construct
  source 1..20: mol_type = other DNA
cccaggatgcttgactcacg

SEQ ID NO: 13804 - DNA, 20 bp, synthetic construct
  source 1..20: mol_type = other DNA
ggtccaaaacgtgtgccctt

SEQ ID NO: 13805 - DNA, 20 bp, synthetic construct
  source 1..20: mol_type = other DNA
gcccatctgaagcatctgcg

SEQ ID NO: 13806 - DNA, 20 bp, synthetic construct
  source 1..20: mol_type = other DNA
gatgcggaacggctgctcca

SEQ ID NO: 13807 - DNA, 20 bp, synthetic construct
  source 1..20: mol_type = other DNA
tccccagtggactgctggga

SEQ ID NO: 13808 - DNA, 20 bp, synthetic construct
  source 1..20: mol_type = other DNA
tgtgcaacggcatctcccag

SEQ ID NO: 13809 - DNA, 20 bp, synthetic construct
  source 1..20: mol_type = other DNA
gaagaaggcagagcaccagg

SEQ ID NO: 13810 - DNA, 20 bp, synthetic construct
  source 1..20: mol_type = other DNA
tatgccacacagctccaggt

SEQ ID NO: 13811 - DNA, 20 bp, synthetic construct
  source 1..20: mol_type = other DNA
ataccccctggtagtcaaga

SEQ ID NO: 13812 - DNA, 20 bp, synthetic construct
  source 1..20: mol_type = other DNA
cctgccgtgcctgtacgcca

SEQ ID NO: 13813 - DNA, 20 bp, synthetic construct
  source 1..20: mol_type = other DNA
gcggatgaagtaggacttct

SEQ ID NO: 13814 - DNA, 20 bp, synthetic construct
  source 1..20: mol_type = other DNA
ccttccttcttcatagtcag

SEQ ID NO: 13815 - DNA, 20 bp, synthetic construct
  source 1..20: mol_type = other DNA
tcattgagcagcccaagcag

SEQ ID NO: 13816 - DNA, 20 bp, synthetic construct
  source 1..20: mol_type = other DNA
tgaggctgaacagaactggt

SEQ ID NO: 13817 - DNA, 20 bp, synthetic construct
  source 1..20: mol_type = other DNA
agctctaactggttgggaga

SEQ ID NO: 13818 - DNA, 20 bp, synthetic construct
  source 1..20: mol_type = other DNA
aaaaccaggatgtcccccaa

SEQ ID NO: 13819 - DNA, 20 bp, synthetic construct
  source 1..20: mol_type = other DNA
cgtcagaaacggatgctccc

SEQ ID NO: 13820 - DNA, 20 bp, synthetic construct
  source 1..20: mol_type = other DNA
gccccggaacctgcaggtag

SEQ ID NO: 13821 - DNA, 20 bp, synthetic construct
  source 1..20: mol_type = other DNA
tcgaacatcaagtagaaaaa

SEQ ID NO: 13822 - DNA, 20 bp, synthetic construct
  source 1..20: mol_type = other DNA
gctgtactccccgattgcta

SEQ ID NO: 13823 - DNA, 20 bp, synthetic construct
  source 1..20: mol_type = other DNA
ccccaccttcatccgctcgt

SEQ ID NO: 13824 - DNA, 20 bp, synthetic construct
  source 1..20: mol_type = other DNA
ctcgcagctcctctgcctgg

SEQ ID NO: 13825 - DNA, 20 bp, synthetic construct
  source 1..20: mol_type = other DNA
aatcaatgtggaacagctga

SEQ ID NO: 13826 - DNA, 20 bp, synthetic construct
  source 1..20: mol_type = other DNA
catctacctggagcccgggc

SEQ ID NO: 13827 - DNA, 20 bp, synthetic construct
  source 1..20: mol_type = other DNA
tgtgctgaaataaagaaaaa

SEQ ID NO: 13828 - DNA, 20 bp, synthetic construct
  source 1..20: mol_type = other DNA
cgtgtgcaggagtttgacag

SEQ ID NO: 13829 - DNA, 20 bp, synthetic construct
  source 1..20: mol_type = other DNA
ccgaagcgcagggccaccga

SEQ ID NO: 13830 - DNA, 20 bp, synthetic construct
  source 1..20: mol_type = other DNA
gacactgcagcagtaccgcg

SEQ ID NO: 13831 - DNA, 20 bp, synthetic construct
  source 1..20: mol_type = other DNA
ctctttgatctgcgccttgg

SEQ ID NO: 13832 - DNA, 20 bp, synthetic construct
  source 1..20: mol_type = other DNA
tgaggttggcccaggcaatg

SEQ ID NO: 13833 - DNA, 20 bp, synthetic construct
  source 1..20: mol_type = other DNA
gccacagactgccaggtgag

SEQ ID NO: 13834 - DNA, 20 bp, synthetic construct
  source 1..20: mol_type = other DNA
tgaagaagtaccacatcgat

SEQ ID NO: 13835 - DNA, 20 bp, synthetic construct
  source 1..20: mol_type = other DNA
gtcccaccttggtgaccaga

SEQ ID NO: 13836 - DNA, 20 bp, synthetic construct
  source 1..20: mol_type = other DNA
taggcaggccttgtagctgc

SEQ ID NO: 13837 - DNA, 20 bp, synthetic construct
  source 1..20: mol_type = other DNA
cagctcaatctcgaggctca

SEQ ID NO: 13838 - DNA, 20 bp, synthetic construct
  source 1..20: mol_type = other DNA
cagggagtgtgtgaactgtg

SEQ ID NO: 13839 - DNA, 20 bp, synthetic construct
  source 1..20: mol_type = other DNA
cccccaacagcgagtgcggt

SEQ ID NO: 13840 - DNA, 20 bp, synthetic construct
  source 1..20: mol_type = other DNA
ggcaggatgcctacagggga

SEQ ID NO: 13841 - DNA, 20 bp, synthetic construct
  source 1..20: mol_type = other DNA
gtcttccaggtgggagggtc

SEQ ID NO: 13842 - DNA, 20 bp, synthetic construct
  source 1..20: mol_type = other DNA
ggaagaaaggcctctgattg

SEQ ID NO: 13843 - DNA, 20 bp, synthetic construct
  source 1..20: mol_type = other DNA
tcacctgaatcagtagtttg

SEQ ID NO: 13844 - DNA, 20 bp, synthetic construct
  source 1..20: mol_type = other DNA
gatgaactgagctttcacac

SEQ ID NO: 13845 - DNA, 20 bp, synthetic construct
  source 1..20: mol_type = other DNA
cccggagcttggggaacttc

SEQ ID NO: 13846 - DNA, 20 bp, synthetic construct
  source 1..20: mol_type = other DNA
aggagaaagataggcgctgg

SEQ ID NO: 13847 - DNA, 20 bp, synthetic construct
  source 1..20: mol_type = other DNA
tgccccactcacctgctacc

SEQ ID NO: 13848 - DNA, 20 bp, synthetic construct
  source 1..20: mol_type = other DNA
gcaaggtacgagtgggaggg

SEQ ID NO: 13849 - DNA, 20 bp, synthetic construct
  source 1..20: mol_type = other DNA
agttgacatcgtcaccctga

SEQ ID NO: 13850 - DNA, 20 bp, synthetic construct
  source 1..20: mol_type = other DNA
aaaggacaaggcctcctcgt

SEQ ID NO: 13851 - DNA, 20 bp, synthetic construct
  source 1..20: mol_type = other DNA
ggcacttggtggccgccagc

SEQ ID NO: 13852 - DNA, 20 bp, synthetic construct
  source 1..20: mol_type = other DNA
ggctgaacagaactggtggg

SEQ ID NO: 13853 - DNA, 20 bp, synthetic construct
  source 1..20: mol_type = other DNA
caggcgcaggacgggcagga

SEQ ID NO: 13854 - DNA, 20 bp, synthetic construct
  source 1..20: mol_type = other DNA
atcctaatttctggatggat

SEQ ID NO: 13855 - DNA, 20 bp, synthetic construct
  source 1..20: mol_type = other DNA
gtgtcacacaactgcccaac

SEQ ID NO: 13856 - DNA, 20 bp, synthetic construct
  source 1..20: mol_type = other DNA
cccagctctccatcctcctg

SEQ ID NO: 13857 - DNA, 20 bp, synthetic construct
  source 1..20: mol_type = other DNA
gtacatggctggggtgttga

SEQ ID NO: 13858 - DNA, 20 bp, synthetic construct
  source 1..20: mol_type = other DNA
ctacaacgggcacacgaagg

SEQ ID NO: 13859 - DNA, 20 bp, synthetic construct
  source 1..20: mol_type = other DNA
tctagaacagaaaatgaaag

SEQ ID NO: 13860 - DNA, 20 bp, synthetic construct
  source 1..20: mol_type = other DNA
ggatgagcagctgtggagtg

SEQ ID NO: 13861 - DNA, 20 bp, synthetic construct
  source 1..20: mol_type = other DNA
gttccagttcagttctagct

SEQ ID NO: 13862 - DNA, 20 bp, synthetic construct
  source 1..20: mol_type = other DNA
gctcatatgcacaggtgaaa

SEQ ID NO: 13863 - DNA, 20 bp, synthetic construct
  source 1..20: mol_type = other DNA
gctgacccaccccaatgtgg

SEQ ID NO: 13864 - DNA, 20 bp, synthetic construct
  source 1..20: mol_type = other DNA
ctgtaagaaaagaaaaaggc

SEQ ID NO: 13865 - DNA, 20 bp, synthetic construct
  source 1..20: mol_type = other DNA
tcgtggtgtcagctatggcc

SEQ ID NO: 13866 - DNA, 20 bp, synthetic construct
  source 1..20: mol_type = other DNA
cagcagaactctcacgacca

SEQ ID NO: 13867 - DNA, 20 bp, synthetic construct
  source 1..20: mol_type = other DNA
gtccagtgctcagctccagg

SEQ ID NO: 13868 - DNA, 20 bp, synthetic construct
  source 1..20: mol_type = other DNA
atgcagggcaccagcctccg

SEQ ID NO: 13869 - DNA, 20 bp, synthetic construct
  source 1..20: mol_type = other DNA
ctcactgtctgtgtccaggt

SEQ ID NO: 13870 - DNA, 20 bp, synthetic construct
  source 1..20: mol_type = other DNA
cagagcaggatctactggga

SEQ ID NO: 13871 - DNA, 20 bp, synthetic construct
  source 1..20: mol_type = other DNA
ttttcaaatacagacagaaa

SEQ ID NO: 13872 - DNA, 20 bp, synthetic construct
  source 1..20: mol_type = other DNA
agctctcgaagactgctgtg

SEQ ID NO: 13873 - DNA, 20 bp, synthetic construct
  source 1..20: mol_type = other DNA
acctccatcttgggcagacc

SEQ ID NO: 13874 - DNA, 20 bp, synthetic construct
  source 1..20: mol_type = other DNA
gtcaggctgctgtggtacca

SEQ ID NO: 13875 - DNA, 20 bp, synthetic construct
  source 1..20: mol_type = other DNA
gtgtagacagatggccaggg

SEQ ID NO: 13876 - DNA, 20 bp, synthetic construct
  source 1..20: mol_type = other DNA
acgggtgatgagctccctct

SEQ ID NO: 13877 - DNA, 20 bp, synthetic construct
  source 1..20: mol_type = other DNA
tggcctatgagccggtccag

SEQ ID NO: 13878 - DNA, 20 bp, synthetic construct
  source 1..20: mol_type = other DNA
ttgggatgacaaggtaaaag

SEQ ID NO: 13879 - DNA, 20 bp, synthetic construct
  source 1..20: mol_type = other DNA
cggatgaagtaggacttctg

SEQ ID NO: 13880 - DNA, 20 bp, synthetic construct
  source 1..20: mol_type = other DNA
tgttgcagatcttggagctg

SEQ ID NO: 13881 - DNA, 20 bp, synthetic construct
  source 1..20: mol_type = other DNA
tgcgggagccgctgctgcgg

SEQ ID NO: 13882 - DNA, 20 bp, synthetic construct
  source 1..20: mol_type = other DNA
cgactcacaggaggagctgc

SEQ ID NO: 13883 - DNA, 20 bp, synthetic construct
  source 1..20: mol_type = other DNA
gggtcagaaggattcctatg

SEQ ID NO: 13884 - DNA, 20 bp, synthetic construct
  source 1..20: mol_type = other DNA
ttacccagaactgtacaaac

SEQ ID NO: 13885 - DNA, 20 bp, synthetic construct
  source 1..20: mol_type = other DNA
caccaccactggcagggaca

SEQ ID NO: 13886 - DNA, 20 bp, synthetic construct
  source 1..20: mol_type = other DNA
caccctgcgggacctgctga

SEQ ID NO: 13887 - DNA, 20 bp, synthetic construct
  source 1..20: mol_type = other DNA
cattcatacttgctttccag

SEQ ID NO: 13888 - DNA, 20 bp, synthetic construct
  source 1..20: mol_type = other DNA
gtcactcagcaaggtgagga

SEQ ID NO: 13889 - DNA, 20 bp, synthetic construct
  source 1..20: mol_type = other DNA
cctgaagctggcgggcatgg

SEQ ID NO: 13890 - DNA, 20 bp, synthetic construct
  source 1..20: mol_type = other DNA
gcccaggttctcatgctgaa

SEQ ID NO: 13891 - DNA, 20 bp, synthetic construct
  source 1..20: mol_type = other DNA
gtaggaggtgacaggtgggt

SEQ ID NO: 13892 - DNA, 20 bp, synthetic construct
  source 1..20: mol_type = other DNA
ctatggctgcctccccaccg

SEQ ID NO: 13893 - DNA, 20 bp, synthetic construct
  source 1..20: mol_type = other DNA
aggcgcaggacgggcaggaa

SEQ ID NO: 13894 - DNA, 20 bp, synthetic construct
  source 1..20: mol_type = other DNA
cgtcctttgtgagtatggtg

SEQ ID NO: 13895 - DNA, 20 bp, synthetic construct
  source 1..20: mol_type = other DNA
cgaaggtgaggaagatggag

SEQ ID NO: 13896 - DNA, 20 bp, synthetic construct
  source 1..20: mol_type = other DNA
agagtgaggttggtaggctg

SEQ ID NO: 13897 - DNA, 20 bp, synthetic construct
  source 1..20: mol_type = other DNA
cagggcgagcaccttgggag

SEQ ID NO: 13898 - DNA, 20 bp, synthetic construct
  source 1..20: mol_type = other DNA
cactcagcttgatgaagggc

SEQ ID NO: 13899 - DNA, 20 bp, synthetic construct
  source 1..20: mol_type = other DNA
ctagcagctccagggcgctc

SEQ ID NO: 13900 - DNA, 20 bp, synthetic construct
  source 1..20: mol_type = other DNA
gtaccaggtagtgtttctgc

SEQ ID NO: 13901 - DNA, 20 bp, synthetic construct
  source 1..20: mol_type = other DNA
tgcggccacagcactttgtc

SEQ ID NO: 13902 - DNA, 20 bp, synthetic construct
  source 1..20: mol_type = other DNA
tgccaggtgcgcgcgcccct

SEQ ID NO: 13903 - DNA, 20 bp, synthetic construct
  source 1..20: mol_type = other DNA
aaacgcatcctggacccacg

SEQ ID NO: 13904 - DNA, 20 bp, synthetic construct
  source 1..20: mol_type = other DNA
ctgaagtaccccatcgagca

SEQ ID NO: 13905 - DNA, 20 bp, synthetic construct
  source 1..20: mol_type = other DNA
ccactgaccttctccagggc

SEQ ID NO: 13906 - DNA, 20 bp, synthetic construct
  source 1..20: mol_type = other DNA
acttggccatgagcgagtgc

SEQ ID NO: 13907 - DNA, 20 bp, synthetic construct
  source 1..20: mol_type = other DNA
ctggctctcccggatgagga

SEQ ID NO: 13908 - DNA, 20 bp, synthetic construct
  source 1..20: mol_type = other DNA
cacggcttgcgcaggttgca

SEQ ID NO: 13909 - DNA, 20 bp, synthetic construct
  source 1..20: mol_type = other DNA
cctcttacgtcgctctggaa

SEQ ID NO: 13910 - DNA, 20 bp, synthetic construct
  source 1..20: mol_type = other DNA
ctcagccatggccctgcgca

SEQ ID NO: 13911 - DNA, 20 bp, synthetic construct
  source 1..20: mol_type = other DNA
atctgaggatgtgctgtcgt

SEQ ID NO: 13912 - DNA, 20 bp, synthetic construct
  source 1..20: mol_type = other DNA
tcccccaacagcgagtgcgg

SEQ ID NO: 13913 - DNA, 20 bp, synthetic construct
  source 1..20: mol_type = other DNA
gggtctgtaagaaaagaaaa

SEQ ID NO: 13914 - DNA, 20 bp, synthetic construct
  source 1..20: mol_type = other DNA
gcatgaactcctgcacctgg

SEQ ID NO: 13915 - DNA, 20 bp, synthetic construct
  source 1..20: mol_type = other DNA
ggagtatgtgaatgtgtccc

SEQ ID NO: 13916 - DNA, 20 bp, synthetic construct
  source 1..20: mol_type = other DNA
tacgcctctggccgtaccac

SEQ ID NO: 13917 - DNA, 20 bp, synthetic construct
  source 1..20: mol_type = other DNA
gtgagctccacaatgtctcc

SEQ ID NO: 13918 - DNA, 20 bp, synthetic construct
  source 1..20: mol_type = other DNA
gtccctccagcttcggtcga

SEQ ID NO: 13919 - DNA, 20 bp, synthetic construct
  source 1..20: mol_type = other DNA
agcccccattgtcctcttcg

SEQ ID NO: 13920 - DNA, 20 bp, synthetic construct
  source 1..20: mol_type = other DNA
tctggggacagagaaaaagc

SEQ ID NO: 13921 - DNA, 20 bp, synthetic construct
  source 1..20: mol_type = other DNA
ggaggaagctgtcaaagtcc

SEQ ID NO: 13922 - DNA, 20 bp, synthetic construct
  source 1..20: mol_type = other DNA
tgtaggaatacttgcagcta

SEQ ID NO: 13923 - DNA, 20 bp, synthetic construct
  source 1..20: mol_type = other DNA
tccagggggaggcggtgtgg

SEQ ID NO: 13924 - DNA, 20 bp, synthetic construct
  source 1..20: mol_type = other DNA
caaacggcctcgtgagtaca

SEQ ID NO: 13925 - DNA, 20 bp, synthetic construct
  source 1..20: mol_type = other DNA
cgcacctggcatgctgccct

SEQ ID NO: 13926 - DNA, 20 bp, synthetic construct
  source 1..20: mol_type = other DNA
gaggaggcactggagaagat

SEQ ID NO: 13927 - DNA, 20 bp, synthetic construct
  source 1..20: mol_type = other DNA
aggcggccggtccaccagga

SEQ ID NO: 13928 - DNA, 20 bp, synthetic construct
  source 1..20: mol_type = other DNA
cttgatacaggtttaattcg

SEQ ID NO: 13929 - DNA, 20 bp, synthetic construct
  source 1..20: mol_type = other DNA
tgggccatcctgctaaaatc

SEQ ID NO: 13930 - DNA, 20 bp, synthetic construct
  source 1..20: mol_type = other DNA
ggacttcagccagttgagca

SEQ ID NO: 13931 - DNA, 20 bp, synthetic construct
  source 1..20: mol_type = other DNA
tggacatggcagcccaagta

SEQ ID NO: 13932 - DNA, 20 bp, synthetic construct
  source 1..20: mol_type = other DNA
agccaggtccagacgcagga

SEQ ID NO: 13933 - DNA, 20 bp, synthetic construct
  source 1..20: mol_type = other DNA
cattcattacctcacaggtc

SEQ ID NO: 13934 - DNA, 20 bp, synthetic construct
  source 1..20: mol_type = other DNA
ctggcccaggccctccggga

SEQ ID NO: 13935 - DNA, 20 bp, synthetic construct
  source 1..20: mol_type = other DNA
tgcacagcatctcgttgccg

SEQ ID NO: 13936 - DNA, 20 bp, synthetic construct
  source 1..20: mol_type = other DNA
cctgtacctgcccactctct

SEQ ID NO: 13937 - DNA, 20 bp, synthetic construct
  source 1..20: mol_type = other DNA
gtgtactaaaaacctcctcc

SEQ ID NO: 13938 - DNA, 20 bp, synthetic construct
  source 1..20: mol_type = other DNA
gccgcccgacagcaccgtgt

SEQ ID NO: 13939 - DNA, 20 bp, synthetic construct
  source 1..20: mol_type = other DNA
gagccgagacctccaactcg

SEQ ID NO: 13940 - DNA, 20 bp, synthetic construct
  source 1..20: mol_type = other DNA
cctccagcagttccaagagg

SEQ ID NO: 13941 - DNA, 20 bp, synthetic construct
  source 1..20: mol_type = other DNA
aggtgaggagtaagaggagc

SEQ ID NO: 13942 - DNA, 20 bp, synthetic construct
  source 1..20: mol_type = other DNA
tcattacctctgcaccgacg

SEQ ID NO: 13943 - DNA, 20 bp, synthetic construct
  source 1..20: mol_type = other DNA
accagactcggtgaaatacc

SEQ ID NO: 13944 - DNA, 20 bp, synthetic construct
  source 1..20: mol_type = other DNA
tgcaggcttgagtttccacc

SEQ ID NO: 13945 - DNA, 20 bp, synthetic construct
  source 1..20: mol_type = other DNA
tgctcagctctcacccagag

SEQ ID NO: 13946 - DNA, 20 bp, synthetic construct
  source 1..20: mol_type = other DNA
ctggaaagtcgcagaagggc

SEQ ID NO: 13947 - DNA, 20 bp, synthetic construct
  source 1..20: mol_type = other DNA
ccctcactctttgctctcgt

SEQ ID NO: 13948 - DNA, 20 bp, synthetic construct
  source 1..20: mol_type = other DNA
aacatcatgatccgagagag

SEQ ID NO: 13949 - DNA, 20 bp, synthetic construct
  source 1..20: mol_type = other DNA
tcaccacctctccctggttc

SEQ ID NO: 13950 - DNA, 20 bp, synthetic construct
  source 1..20: mol_type = other DNA
tccatggccaactccttcgt

SEQ ID NO: 13951 - DNA, 20 bp, synthetic construct
  source 1..20: mol_type = other DNA
cacgtcaagatcgctgactt

SEQ ID NO: 13952 - DNA, 20 bp, synthetic construct
  source 1..20: mol_type = other DNA
gcccaccagcaggcgcacag

SEQ ID NO: 13953 - DNA, 20 bp, synthetic construct
  source 1..20: mol_type = other DNA
caacagcccacagctcctga

SEQ ID NO: 13954 - DNA, 20 bp, synthetic construct
  source 1..20: mol_type = other DNA
gcggtaccagagcggcaagt

SEQ ID NO: 13955 - DNA, 20 bp, synthetic construct
  source 1..20: mol_type = other DNA
ccacacaagaagttcctggt

SEQ ID NO: 13956 - DNA, 20 bp, synthetic construct
  source 1..20: mol_type = other DNA
gccgtgcctgtacgccacgg

SEQ ID NO: 13957 - DNA, 20 bp, synthetic construct
  source 1..20: mol_type = other DNA
ggatggcctcctccatctgc

SEQ ID NO: 13958 - DNA, 20 bp, synthetic construct
  source 1..20: mol_type = other DNA
acagccactcgtgcctgtcc

SEQ ID NO: 13959 - DNA, 20 bp, synthetic construct
  source 1..20: mol_type = other DNA
cctgctgtacaggattcggt

SEQ ID NO: 13960 - DNA, 20 bp, synthetic construct
  source 1..20: mol_type = other DNA
agctgtagccgcgctcggtg

SEQ ID NO: 13961 - DNA, 20 bp, synthetic construct
  source 1..20: mol_type = other DNA
gctttgactgcacactgcag

SEQ ID NO: 13962 - DNA, 20 bp, synthetic construct
  source 1..20: mol_type = other DNA
agagggagtggtacacaggc

SEQ ID NO: 13963 - DNA, 20 bp, synthetic construct
  source 1..20: mol_type = other DNA
gccaggcaggtaagggcctg

SEQ ID NO: 13964 - DNA, 20 bp, synthetic construct
  source 1..20: mol_type = other DNA
catggctaaggagattggta

SEQ ID NO: 13965 - DNA, 20 bp, synthetic construct
  source 1..20: mol_type = other DNA
tgaactatgaccccaatcag

SEQ ID NO: 13966 - DNA, 20 bp, synthetic construct
  source 1..20: mol_type = other DNA
tcactgtagttgttcttcaa

SEQ ID NO: 13967 - DNA, 20 bp, synthetic construct
  source 1..20: mol_type = other DNA
cccctaaaagccctaacaca

SEQ ID NO: 13968 - DNA, 20 bp, synthetic construct
  source 1..20: mol_type = other DNA
gttctcggcaatacgttcac

SEQ ID NO: 13969 - DNA, 20 bp, synthetic construct
  source 1..20: mol_type = other DNA
tttgtgcaagagattggcag

SEQ ID NO: 13970 - DNA, 20 bp, synthetic construct
  source 1..20: mol_type = other DNA
ccgcactcaccgtccctgct

SEQ ID NO: 13971 - DNA, 20 bp, synthetic construct
  source 1..20: mol_type = other DNA
gcaccagctgcagcaggtac

SEQ ID NO: 13972 - DNA, 20 bp, synthetic construct
  source 1..20: mol_type = other DNA
ccgtcaacaaattaagaaac

SEQ ID NO: 13973 - DNA, 20 bp, synthetic construct
  source 1..20: mol_type = other DNA
agggcatacccctcgtagat

SEQ ID NO: 13974 - DNA, 20 bp, synthetic construct
  source 1..20: mol_type = other DNA
gactgcctaccagaatgccg

SEQ ID NO: 13975 - DNA, 20 bp, synthetic construct
  source 1..20: mol_type = other DNA
ttgcagaggtggcatttgaa

SEQ ID NO: 13976 - DNA, 20 bp, synthetic construct
  source 1..20: mol_type = other DNA
gacagcaagccagtgaacct

SEQ ID NO: 13977 - DNA, 20 bp, synthetic construct
  source 1..20: mol_type = other DNA
caggtgagtgggaaactggt

SEQ ID NO: 13978 - DNA, 20 bp, synthetic construct
  source 1..20: mol_type = other DNA
cccgaacctggaagctgtgc

SEQ ID NO: 13979 - DNA, 20 bp, synthetic construct
  source 1..20: mol_type = other DNA
cccagagtcaaaggcagtct

SEQ ID NO: 13980 - DNA, 20 bp, synthetic construct
  source 1..20: mol_type = other DNA
ggtcagaaggattcctatgt

SEQ ID NO: 13981 - DNA, 20 bp, synthetic construct
  source 1..20: mol_type = other DNA
cttccagatgttctcctttg

SEQ ID NO: 13982 - DNA, 20 bp, synthetic construct
  source 1..20: mol_type = other DNA
catcctggcagtggagaagc

SEQ ID NO: 13983 - DNA, 20 bp, synthetic construct
  source 1..20: mol_type = other DNA
tgtcctctaggaagcccagg

SEQ ID NO: 13984 - DNA, 20 bp, synthetic construct
  source 1..20: mol_type = other DNA
ctcaatggacagctggaaat

SEQ ID NO: 13985 - DNA, 20 bp, synthetic construct
  source 1..20: mol_type = other DNA
ctcatgaggtctcccaagct

SEQ ID NO: 13986 - DNA, 20 bp, synthetic construct
  source 1..20: mol_type = other DNA
agcaggtctggctggctcag

SEQ ID NO: 13987 - DNA, 20 bp, synthetic construct
  source 1..20: mol_type = other DNA
ctgctccgcgtggctggtga

SEQ ID NO: 13988 - DNA, 20 bp, synthetic construct
  source 1..20: mol_type = other DNA
ctgaggctgaacagaactgg

SEQ ID NO: 13989 - DNA, 20 bp, synthetic construct
  source 1..20: mol_type = other DNA
gggcccaccgcactcgctgt

SEQ ID NO: 13990 - DNA, 20 bp, synthetic construct
  source 1..20: mol_type = other DNA
gccctggccagtcgtctggg

SEQ ID NO: 13991 - DNA, 20 bp, synthetic construct
  source 1..20: mol_type = other DNA
gttcagctcgcgcacagaca

SEQ ID NO: 13992 - DNA, 20 bp, synthetic construct
  source 1..20: mol_type = other DNA
caggcaccgggccacaatcc

SEQ ID NO: 13993 - DNA, 20 bp, synthetic construct
  source 1..20: mol_type = other DNA
atcatggtgcttccttcggg

SEQ ID NO: 13994 - DNA, 20 bp, synthetic construct
  source 1..20: mol_type = other DNA
ccatgaccagccgcaggctc

SEQ ID NO: 13995 - DNA, 20 bp, synthetic construct
  source 1..20: mol_type = other DNA
gctctccaggttgacgatgc

SEQ ID NO: 13996 - DNA, 20 bp, synthetic construct
  source 1..20: mol_type = other DNA
gaaccggcagcagatccgca

SEQ ID NO: 13997 - DNA, 20 bp, synthetic construct
  source 1..20: mol_type = other DNA
tagccaagtatttcaccttc

SEQ ID NO: 13998 - DNA, 20 bp, synthetic construct
  source 1..20: mol_type = other DNA
ccatgaacgatcaccaccac

SEQ ID NO: 13999 - DNA, 20 bp, synthetic construct
  source 1..20: mol_type = other DNA
cttcagcttctcagcccccc

SEQ ID NO: 14000 - DNA, 20 bp, synthetic construct
  source 1..20: mol_type = other DNA
accaaaacacagggctgtcc

SEQ ID NO: 14001 - DNA, 20 bp, synthetic construct
  source 1..20: mol_type = other DNA
cacagcaggtagagcatctg

SEQ ID NO: 14002 - DNA, 20 bp, synthetic construct
  source 1..20: mol_type = other DNA
gctgaagctggtggagcggc

SEQ ID NO: 14003 - DNA, 20 bp, synthetic construct
  source 1..20: mol_type = other DNA
cccggacgccttcctggccg

SEQ ID NO: 14004 - DNA, 20 bp, synthetic construct
  source 1..20: mol_type = other DNA
ccctcccaggtggctacccc

SEQ ID NO: 14005 - DNA, 20 bp, synthetic construct
  source 1..20: mol_type = other DNA
gtaggagaagcgcagctggt

SEQ ID NO: 14006 - DNA, 20 bp, synthetic construct
  source 1..20: mol_type = other DNA
cctggagcgaggctaccgca

SEQ ID NO: 14007 - DNA, 20 bp, synthetic construct
  source 1..20: mol_type = other DNA
aataccacacaagaagttcc

SEQ ID NO: 14008 - DNA, 20 bp, synthetic construct
  source 1..20: mol_type = other DNA
tgtctcgcagctcctctgcc

SEQ ID NO: 14009 - DNA, 20 bp, synthetic construct
  source 1..20: mol_type = other DNA
tttaccagtttgtatccaag

SEQ ID NO: 14010 - DNA, 20 bp, synthetic construct
  source 1..20: mol_type = other DNA
ggagcaggtctggctggctc

SEQ ID NO: 14011 - DNA, 20 bp, synthetic construct
  source 1..20: mol_type = other DNA
tgccagctccaacatctatc

SEQ ID NO: 14012 - DNA, 20 bp, synthetic construct
  source 1..20: mol_type = other DNA
caggaagacctagaaggaga

SEQ ID NO: 14013 - DNA, 20 bp, synthetic construct
  source 1..20: mol_type = other DNA
agtggcctacctcggagctg

SEQ ID NO: 14014 - DNA, 20 bp, synthetic construct
  source 1..20: mol_type = other DNA
gcggtcggctagggaccgaa

SEQ ID NO: 14015 - DNA, 20 bp, synthetic construct
  source 1..20: mol_type = other DNA
tcatcaaggtgtctgacttt

SEQ ID NO: 14016 - DNA, 20 bp, synthetic construct
  source 1..20: mol_type = other DNA
gaatgtgccctttcgctcag

SEQ ID NO: 14017 - DNA, 20 bp, synthetic construct
  source 1..20: mol_type = other DNA
gcagcagcagatgaaggcca

SEQ ID NO: 14018 - DNA, 20 bp, synthetic construct
  source 1..20: mol_type = other DNA
ttctgggaggagacacgcag

SEQ ID NO: 14019 - DNA, 20 bp, synthetic construct
  source 1..20: mol_type = other DNA
ggcagtactccatggccagc

SEQ ID NO: 14020 - DNA, 20 bp, synthetic construct
  source 1..20: mol_type = other DNA
tctacctgtttgccaggggg

SEQ ID NO: 14021 - DNA, 20 bp, synthetic construct
  source 1..20: mol_type = other DNA
gcaatgagcttctccacctg

SEQ ID NO: 14022 - DNA, 20 bp, synthetic construct
  source 1..20: mol_type = other DNA
aggccctttcacagtagccc

SEQ ID NO: 14023 - DNA, 20 bp, synthetic construct
  source 1..20: mol_type = other DNA
cagttgacatcgtcaccctg

SEQ ID NO: 14024 - DNA, 20 bp, synthetic construct
  source 1..20: mol_type = other DNA
tgctgtgccctcagcccacg

SEQ ID NO: 14025 - DNA, 20 bp, synthetic construct
  source 1..20: mol_type = other DNA
gctcagtgaggatcttcatg

SEQ ID NO: 14026 - DNA, 20 bp, synthetic construct
  source 1..20: mol_type = other DNA
agcacttactgatccaatac

SEQ ID NO: 14027 - DNA, 20 bp, synthetic construct
  source 1..20: mol_type = other DNA
gctgacttacgttatagagc

SEQ ID NO: 14028 - DNA, 20 bp, synthetic construct
  source 1..20: mol_type = other DNA
cggcacatcaagctgcattc

SEQ ID NO: 14029 - DNA, 20 bp, synthetic construct
  source 1..20: mol_type = other DNA
aagcagtgtggcggcagctt

SEQ ID NO: 14030 - DNA, 20 bp, synthetic construct
  source 1..20: mol_type = other DNA
gtcctggtcgcagttcaaca

SEQ ID NO: 14031 - DNA, 20 bp, synthetic construct
  source 1..20: mol_type = other DNA
agctacagcagcttgacaca

SEQ ID NO: 14032 - DNA, 20 bp, synthetic construct
  source 1..20: mol_type = other DNA
ggccgaagtgcagagcaacc

SEQ ID NO: 14033 - DNA, 20 bp, synthetic construct
  source 1..20: mol_type = other DNA
acctgcagcgtgtagtcttc

SEQ ID NO: 14034 - DNA, 20 bp, synthetic construct
  source 1..20: mol_type = other DNA
ggtcgcgcaggcttgggggt

SEQ ID NO: 14035 - DNA, 20 bp, synthetic construct
  source 1..20: mol_type = other DNA
gccagccagctggaagctgc

SEQ ID NO: 14036 - DNA, 20 bp, synthetic construct
  source 1..20: mol_type = other DNA
aagattggcacagctgtgag

SEQ ID NO: 14037 - DNA, 20 bp, synthetic construct
  source 1..20: mol_type = other DNA
cgaaactcagctggctcatg

SEQ ID NO: 14038 - DNA, 20 bp, synthetic construct
  source 1..20: mol_type = other DNA
accttacactgacgcaggta

SEQ ID NO: 14039 - DNA, 20 bp, synthetic construct
  source 1..20: mol_type = other DNA
tggacccacgaggaatatat

SEQ ID NO: 14040 - DNA, 20 bp, synthetic construct
  source 1..20: mol_type = other DNA
ctccagaatggagtcgcagg

SEQ ID NO: 14041 - DNA, 20 bp, synthetic construct
  source 1..20: mol_type = other DNA
aggcggacttccaggctgag

SEQ ID NO: 14042 - DNA, 20 bp, synthetic construct
  source 1..20: mol_type = other DNA
actcccggctgccatctgtg

SEQ ID NO: 14043 - DNA, 20 bp, synthetic construct
  source 1..20: mol_type = other DNA
actggtcctatgcagtaggc

SEQ ID NO: 14044 - DNA, 20 bp, synthetic construct
  source 1..20: mol_type = other DNA
gcagggcaggcaggaggcgc

SEQ ID NO: 14045 - DNA, 20 bp, synthetic construct
  source 1..20: mol_type = other DNA
ggcacgagtggctgtgcgcg

SEQ ID NO: 14046 - DNA, 20 bp, synthetic construct
  source 1..20: mol_type = other DNA
gggccgtcccagcagtccac

SEQ ID NO: 14047 - DNA, 20 bp, synthetic construct
  source 1..20: mol_type = other DNA
ggtggggaggcagccatagg

SEQ ID NO: 14048 - DNA, 20 bp, synthetic construct
  source 1..20: mol_type = other DNA
ggatagcaacgtacatggct

SEQ ID NO: 14049 - DNA, 20 bp, synthetic construct
  source 1..20: mol_type = other DNA
gagggccatgtcgctgttgg

SEQ ID NO: 14050 - DNA, 20 bp, synthetic construct
  source 1..20: mol_type = other DNA
tcccccaggaaacaagattt

SEQ ID NO: 14051 - DNA, 20 bp, synthetic construct
  source 1..20: mol_type = other DNA
ccatcagcaggccagcaggt

SEQ ID NO: 14052 - DNA, 20 bp, synthetic construct
  source 1..20: mol_type = other DNA
gcccgagccctactcgacta

SEQ ID NO: 14053 - DNA, 20 bp, synthetic construct
  source 1..20: mol_type = other DNA
tgtggactggtggtccttcg

SEQ ID NO: 14054 - DNA, 20 bp, synthetic construct
  source 1..20: mol_type = other DNA
tatctctacctgagggcaag

SEQ ID NO: 14055 - DNA, 20 bp, synthetic construct
  source 1..20: mol_type = other DNA
cgatttccgagcggccgtcg

SEQ ID NO: 14056 - DNA, 20 bp, synthetic construct
  source 1..20: mol_type = other DNA
tatatattcctcgtgggtcc

SEQ ID NO: 14057 - DNA, 20 bp, synthetic construct
  source 1..20: mol_type = other DNA
ttgaacgtcatcctcatgcc

SEQ ID NO: 14058 - DNA, 20 bp, synthetic construct
  source 1..20: mol_type = other DNA
gcagctggagggacagtcac

SEQ ID NO: 14059 - DNA, 20 bp, synthetic construct
  source 1..20: mol_type = other DNA
gtggccttaatgttctcctg

SEQ ID NO: 14060 - DNA, 20 bp, synthetic construct
  source 1..20: mol_type = other DNA
gaccccggccatggacggtg

SEQ ID NO: 14061 - DNA, 20 bp, synthetic construct
  source 1..20: mol_type = other DNA
aggaggaatggaccatggtc

SEQ ID NO: 14062 - DNA, 20 bp, synthetic construct
  source 1..20: mol_type = other DNA
cctagaggagaaaggttgga

SEQ ID NO: 14063 - DNA, 20 bp, synthetic construct
  source 1..20: mol_type = other DNA
tacatgtggccctccgtccc

SEQ ID NO: 14064 - DNA, 20 bp, synthetic construct
  source 1..20: mol_type = other DNA
caggaatgactggggaaggt

SEQ ID NO: 14065 - DNA, 20 bp, synthetic construct
  source 1..20: mol_type = other DNA
gcagggtcagcatgtcctgc

SEQ ID NO: 14066 - DNA, 20 bp, synthetic construct
  source 1..20: mol_type = other DNA
taccagggacacaaaggaca

SEQ ID NO: 14067 - DNA, 20 bp, synthetic construct
  source 1..20: mol_type = other DNA
tgcccacttcaccgggaatt

SEQ ID NO: 14068 - DNA, 20 bp, synthetic construct
  source 1..20: mol_type = other DNA
ccagtatgagtttcaggtgc

SEQ ID NO: 14069 - DNA, 20 bp, synthetic construct
  source 1..20: mol_type = other DNA
gcaaaaagtttcctacaaag

SEQ ID NO: 14070 - DNA, 20 bp, synthetic construct
  source 1..20: mol_type = other DNA
agaaggggaggtccatctgc

SEQ ID NO: 14071 - DNA, 20 bp, synthetic construct
  source 1..20: mol_type = other DNA
tgcttaggtgagaatctggg

SEQ ID NO: 14072 - DNA, 20 bp, synthetic construct
  source 1..20: mol_type = other DNA
atactcacaggcaagctgga

SEQ ID NO: 14073 - DNA, 20 bp, synthetic construct
  source 1..20: mol_type = other DNA
ggacagcaagccagtgaacc

SEQ ID NO: 14074 - DNA, 20 bp, synthetic construct
  source 1..20: mol_type = other DNA
cagcccctaccagtccggcg

SEQ ID NO: 14075 - DNA, 20 bp, synthetic construct
  source 1..20: mol_type = other DNA
cagaaagtgtaattccgtcc

SEQ ID NO: 14076 - DNA, 20 bp, synthetic construct
  source 1..20: mol_type = other DNA
tcacaatgttctcatgatag

SEQ ID NO: 14077 - DNA, 20 bp, synthetic construct
  source 1..20: mol_type = other DNA
gtgcagtgtggaaaggccga

SEQ ID NO: 14078 - DNA, 20 bp, synthetic construct
  source 1..20: mol_type = other DNA
caaatgtcagacttgcaaca

SEQ ID NO: 14079 - DNA, 20 bp, synthetic construct
  source 1..20: mol_type = other DNA
ggatgaagtaggacttctgg

SEQ ID NO: 14080 - DNA, 20 bp, synthetic construct
  source 1..20: mol_type = other DNA
gagatgatcatcaccaagca

SEQ ID NO: 14081 - DNA, 20 bp, synthetic construct
  source 1..20: mol_type = other DNA
ccctcaccatattcctgaag

SEQ ID NO: 14082 - DNA, 20 bp, synthetic construct
  source 1..20: mol_type = other DNA
ccaggatgaggccgaagcgc

SEQ ID NO: 14083 - DNA, 20 bp, synthetic construct
  source 1..20: mol_type = other DNA
tgggaactcggcctcctgcg

SEQ ID NO: 14084 - DNA, 20 bp, synthetic construct
  source 1..20: mol_type = other DNA
atggagccacccaatccact

SEQ ID NO: 14085 - DNA, 20 bp, synthetic construct
  source 1..20: mol_type = other DNA
tttcaggaaccccggaggca

SEQ ID NO: 14086 - DNA, 20 bp, synthetic construct
  source 1..20: mol_type = other DNA
ttaagaggtcagaccgtcgt

SEQ ID NO: 14087 - DNA, 20 bp, synthetic construct
  source 1..20: mol_type = other DNA
acagcaagccagtgaacctg

SEQ ID NO: 14088 - DNA, 20 bp, synthetic construct
  source 1..20: mol_type = other DNA
agacctggaggacagggtac

SEQ ID NO: 14089 - DNA, 20 bp, synthetic construct
  source 1..20: mol_type = other DNA
cagtgaggagaagaacatgg

SEQ ID NO: 14090 - DNA, 20 bp, synthetic construct
  source 1..20: mol_type = other DNA
tcacatgatccccctgttct

SEQ ID NO: 14091 - DNA, 20 bp, synthetic construct
  source 1..20: mol_type = other DNA
gcagctcgttgtagaaggtg

SEQ ID NO: 14092 - DNA, 20 bp, synthetic construct
  source 1..20: mol_type = other DNA
gatcttggatggcagcatag

SEQ ID NO: 14093 - DNA, 20 bp, synthetic construct
  source 1..20: mol_type = other DNA
gattctatgaaagccggtgc

SEQ ID NO: 14094 - DNA, 20 bp, synthetic construct
  source 1..20: mol_type = other DNA
atgtgggaagttttcagtga

SEQ ID NO: 14095 - DNA, 20 bp, synthetic construct
  source 1..20: mol_type = other DNA
gctccaggcggcaggggtat

SEQ ID NO: 14096 - DNA, 20 bp, synthetic construct
  source 1..20: mol_type = other DNA
caggtatcttgagaagccaa

SEQ ID NO: 14097 - DNA, 20 bp, synthetic construct
  source 1..20: mol_type = other DNA
tctgaggtcagtcaggacac

SEQ ID NO: 14098 - DNA, 20 bp, synthetic construct
  source 1..20: mol_type = other DNA
ccagtcctgccgcttcaaga

SEQ ID NO: 14099 - DNA, 20 bp, synthetic construct
  source 1..20: mol_type = other DNA
ctgtcatggtccaatctggt

SEQ ID NO: 14100 - DNA, 20 bp, synthetic construct
  source 1..20: mol_type = other DNA
ccgtcttcacaaagtctgga

SEQ ID NO: 14101 - DNA, 20 bp, synthetic construct
  source 1..20: mol_type = other DNA
ctactcaccagagctacagc

SEQ ID NO: 14102 - DNA, 20 bp, synthetic construct
  source 1..20: mol_type = other DNA
cacaggtggcgaggggacta

SEQ ID NO: 14103 - DNA, 20 bp, synthetic construct
  source 1..20: mol_type = other DNA
tcgccgctcctgcgccacgg

SEQ ID NO: 14104 - DNA, 20 bp, synthetic construct
  source 1..20: mol_type = other DNA
cctcaaagtcatacagcgcc

SEQ ID NO: 14105 - DNA, 20 bp, synthetic construct
  source 1..20: mol_type = other DNA
aggatgaagaggacgccttg

SEQ ID NO: 14106 - DNA, 20 bp, synthetic construct
  source 1..20: mol_type = other DNA
tctgaccttagcaggatcca

SEQ ID NO: 14107 - DNA, 20 bp, synthetic construct
  source 1..20: mol_type = other DNA
gcttgctgatccacatctgc

SEQ ID NO: 14108 - DNA, 20 bp, synthetic construct
  source 1..20: mol_type = other DNA
ttggagtttctgagggtgag

SEQ ID NO: 14109 - DNA, 20 bp, synthetic construct
  source 1..20: mol_type = other DNA
ggagccacccaatccactgg

SEQ ID NO: 14110 - DNA, 20 bp, synthetic construct
  source 1..20: mol_type = other DNA
ccagtgcgctcctgtgttgg

SEQ ID NO: 14111 - DNA, 20 bp, synthetic construct
  source 1..20: mol_type = other DNA
tgccccctcgctaacagcca

SEQ ID NO: 14112 - DNA, 20 bp, synthetic construct
  source 1..20: mol_type = other DNA
tccagacgcaggatggcatg

SEQ ID NO: 14113 - DNA, 20 bp, synthetic construct
  source 1..20: mol_type = other DNA
ccctacctataaggatgctt

SEQ ID NO: 14114 - DNA, 20 bp, synthetic construct
  source 1..20: mol_type = other DNA
ggccagggcgagcgcggcgg

SEQ ID NO: 14115 - DNA, 20 bp, synthetic construct
  source 1..20: mol_type = other DNA
acgttggagatcaccacaac

SEQ ID NO: 14116 - DNA, 20 bp, synthetic construct
  source 1..20: mol_type = other DNA
ggactttcttggtgcggcag

SEQ ID NO: 14117 - DNA, 20 bp, synthetic construct
  source 1..20: mol_type = other DNA
ctcgccgaatagattcaaca

SEQ ID NO: 14118 - DNA, 20 bp, synthetic construct
  source 1..20: mol_type = other DNA
ggtgcagcagagacacgtcc

SEQ ID NO: 14119 - DNA, 20 bp, synthetic construct
  source 1..20: mol_type = other DNA
cgtgtcaaacttggtgccct

SEQ ID NO: 14120 - DNA, 20 bp, synthetic construct
  source 1..20: mol_type = other DNA
tggccagagcaaagagggag

SEQ ID NO: 14121 - DNA, 20 bp, synthetic construct
  source 1..20: mol_type = other DNA
acgacagcacatcctcagat

SEQ ID NO: 14122 - DNA, 20 bp, synthetic construct
  source 1..20: mol_type = other DNA
ccacagtgttcacagaaggt

SEQ ID NO: 14123 - DNA, 20 bp, synthetic construct
  source 1..20: mol_type = other DNA
gaggacgactatcacaaccc

SEQ ID NO: 14124 - DNA, 20 bp, synthetic construct
  source 1..20: mol_type = other DNA
aacttacatcacaattggct

SEQ ID NO: 14125 - DNA, 20 bp, synthetic construct
  source 1..20: mol_type = other DNA
agaaccggcagcagatccgc

SEQ ID NO: 14126 - DNA, 20 bp, synthetic construct
  source 1..20: mol_type = other DNA
acttctagtggcgagatctc

SEQ ID NO: 14127 - DNA, 20 bp, synthetic construct
  source 1..20: mol_type = other DNA
gggctggggagaaggtgggg

SEQ ID NO: 14128 - DNA, 20 bp, synthetic construct
  source 1..20: mol_type = other DNA
gataaagcccatgatgtacc

SEQ ID NO: 14129 - DNA, 20 bp, synthetic construct
  source 1..20: mol_type = other DNA
gtggaaggtctcggcggccc

SEQ ID NO: 14130 - DNA, 20 bp, synthetic construct
  source 1..20: mol_type = other DNA
aagatccccgcagccccttg

SEQ ID NO: 14131 - DNA, 20 bp, synthetic construct
  source 1..20: mol_type = other DNA
tgggtggagaaggacatcag

SEQ ID NO: 14132 - DNA, 20 bp, synthetic construct
  source 1..20: mol_type = other DNA
gcagtactccatggccagca

SEQ ID NO: 14133 - DNA, 20 bp, synthetic construct
  source 1..20: mol_type = other DNA
atagcagcaagtccgatgtg

SEQ ID NO: 14134 - DNA, 20 bp, synthetic construct
  source 1..20: mol_type = other DNA
tgagcggttccgctgccctg

SEQ ID NO: 14135 - DNA, 20 bp, synthetic construct
  source 1..20: mol_type = other DNA
cctcgtagatgggcaccgtg

SEQ ID NO: 14136 - DNA, 20 bp, synthetic construct
  source 1..20: mol_type = other DNA
cgcatcccctggaagcacgc

SEQ ID NO: 14137 - DNA, 20 bp, synthetic construct
  source 1..20: mol_type = other DNA
tccagcagaggctgaccatg

SEQ ID NO: 14138 - DNA, 20 bp, synthetic construct
  source 1..20: mol_type = other DNA
ctcgtcgcacataacgcgag

SEQ ID NO: 14139 - DNA, 20 bp, synthetic construct
  source 1..20: mol_type = other DNA
cttcaccaccacggccgagc

SEQ ID NO: 14140 - DNA, 20 bp, synthetic construct
  source 1..20: mol_type = other DNA
ggaggtgccagaaaaggaag

SEQ ID NO: 14141 - DNA, 20 bp, synthetic construct
  source 1..20: mol_type = other DNA
ctccagccgctgcttccaca

SEQ ID NO: 14142 - DNA, 20 bp, synthetic construct
  source 1..20: mol_type = other DNA
agggcccggcgcaatgacag

SEQ ID NO: 14143 - DNA, 20 bp, synthetic construct
  source 1..20: mol_type = other DNA
cctactcaccagagctacag

SEQ ID NO: 14144 - DNA, 20 bp, synthetic construct
  source 1..20: mol_type = other DNA
tgtctggaagaggcagatta

SEQ ID NO: 14145 - DNA, 20 bp, synthetic construct
  source 1..20: mol_type = other DNA
cacgctgggctccatccagc

SEQ ID NO: 14146 - DNA, 20 bp, synthetic construct
  source 1..20: mol_type = other DNA
ctgacggaaattgtcaccca

SEQ ID NO: 14147 - DNA, 20 bp, synthetic construct
  source 1..20: mol_type = other DNA
cactgggggcttgctgctgc

SEQ ID NO: 14148 - DNA, 20 bp, synthetic construct
  source 1..20: mol_type = other DNA
cgtagagggacagcacggcc

SEQ ID NO: 14149 - DNA, 20 bp, synthetic construct
  source 1..20: mol_type = other DNA
gggagatattcaccatctgt

SEQ ID NO: 14150 - DNA, 20 bp, synthetic construct
  source 1..20: mol_type = other DNA
ggagatggatgtgatgtcgg

SEQ ID NO: 14151 - DNA, 20 bp, synthetic construct
  source 1..20: mol_type = other DNA
cgagggccatgtcgctgttg

SEQ ID NO: 14152 - DNA, 20 bp, synthetic construct
  source 1..20: mol_type = other DNA
gaagaagtgctgggagtccg

SEQ ID NO: 14153 - DNA, 20 bp, synthetic construct
  source 1..20: mol_type = other DNA
caacctcgaccccactgtgg

SEQ ID NO: 14154 - DNA, 20 bp, synthetic construct
  source 1..20: mol_type = other DNA
tcctggggacagagcaagcg

SEQ ID NO: 14155 - DNA, 20 bp, synthetic construct
  source 1..20: mol_type = other DNA
ttccctcagggcgagcacct

SEQ ID NO: 14156 - DNA, 20 bp, synthetic construct
  source 1..20: mol_type = other DNA
atcagtgcgtccagggatac

SEQ ID NO: 14157 - DNA, 20 bp, synthetic construct
  source 1..20: mol_type = other DNA
gtgaagaagtaccacatcga

SEQ ID NO: 14158 - DNA, 20 bp, synthetic construct
  source 1..20: mol_type = other DNA
ggagctctcgaagactgctg

SEQ ID NO: 14159 - DNA, 20 bp, synthetic construct
  source 1..20: mol_type = other DNA
cccaggtactccatgccctg

SEQ ID NO: 14160 - DNA, 20 bp, synthetic construct
  source 1..20: mol_type = other DNA
gctcctcgatctctcgtaag

SEQ ID NO: 14161 - DNA, 20 bp, synthetic construct
  source 1..20: mol_type = other DNA
ttggtgaaatagaacctgga

SEQ ID NO: 14162 - DNA, 20 bp, synthetic construct
  source 1..20: mol_type = other DNA
gggcctcggtcagcagcacg

SEQ ID NO: 14163 - DNA, 20 bp, synthetic construct
  source 1..20: mol_type = other DNA
tggctataagatgtgtgcca

SEQ ID NO: 14164 - DNA, 20 bp, synthetic construct
  source 1..20: mol_type = other DNA
gttaccagtagcagactcgc

SEQ ID NO: 14165 - DNA, 20 bp, synthetic construct
  source 1..20: mol_type = other DNA
gcacaaagttcttctcctcc

SEQ ID NO: 14166 - DNA, 20 bp, synthetic construct
  source 1..20: mol_type = other DNA
caaccaccagggtttggaac

SEQ ID NO: 14167 - DNA, 20 bp, synthetic construct
  source 1..20: mol_type = other DNA
cacgtatgaccgctgcccca

SEQ ID NO: 14168 - DNA, 20 bp, synthetic construct
  source 1..20: mol_type = other DNA
tgacgagctggtcaaggtga

SEQ ID NO: 14169 - DNA, 20 bp, synthetic construct
  source 1..20: mol_type = other DNA
ggctgaggacctgtgcgtgc

SEQ ID NO: 14170 - DNA, 20 bp, synthetic construct
  source 1..20: mol_type = other DNA
tgcggcccgggagcagatga

SEQ ID NO: 14171 - DNA, 20 bp, synthetic construct
  source 1..20: mol_type = other DNA
agctgcatggagacacgcac

SEQ ID NO: 14172 - DNA, 20 bp, synthetic construct
  source 1..20: mol_type = other DNA
caacatggttccttccttgt

SEQ ID NO: 14173 - DNA, 20 bp, synthetic construct
  source 1..20: mol_type = other DNA
ggctaggtgcagtggtctgg

SEQ ID NO: 14174 - DNA, 20 bp, synthetic construct
  source 1..20: mol_type = other DNA
ctcaaagtcatacagcgccc

SEQ ID NO: 14175 - DNA, 20 bp, synthetic construct
  source 1..20: mol_type = other DNA
ccaaccaggaacttcttgtg

SEQ ID NO: 14176 - DNA, 20 bp, synthetic construct
  source 1..20: mol_type = other DNA
actccaagatgaagcccctg

SEQ ID NO: 14177 - DNA, 20 bp, synthetic construct
  source 1..20: mol_type = other DNA
gcagatgtggatcagcaagc

SEQ ID NO: 14178 - DNA, 20 bp, synthetic construct
  source 1..20: mol_type = other DNA
ggaaagctcatcttaggggt

SEQ ID NO: 14179 - DNA, 20 bp, synthetic construct
  source 1..20: mol_type = other DNA
gagaaaggacaggcggcagg

SEQ ID NO: 14180 - DNA, 20 bp, synthetic construct
  source 1..20: mol_type = other DNA
tcaccgactctgccccacga

SEQ ID NO: 14181 - DNA, 20 bp, synthetic construct
  source 1..20: mol_type = other DNA
gtgcaccggcggagccacac

SEQ ID NO: 14182 - DNA, 20 bp, synthetic construct
  source 1..20: mol_type = other DNA
tgacgaactggaggagaaga

SEQ ID NO: 14183 - DNA, 20 bp, synthetic construct
  source 1..20: mol_type = other DNA
caagacgagccgcttcgcaa

SEQ ID NO: 14184 - DNA, 20 bp, synthetic construct
  source 1..20: mol_type = other DNA
cagcgactttggtctcacca

SEQ ID NO: 14185 - DNA, 20 bp, synthetic construct
  source 1..20: mol_type = other DNA
actgcagggaacctccacca

SEQ ID NO: 14186 - DNA, 20 bp, synthetic construct
  source 1..20: mol_type = other DNA
tgactgggtacctgcgggat

SEQ ID NO: 14187 - DNA, 20 bp, synthetic construct
  source 1..20: mol_type = other DNA
tgtccaggatgtacttgttg

SEQ ID NO: 14188 - DNA, 20 bp, synthetic construct
  source 1..20: mol_type = other DNA
ctaaagaacagcaacgactg

SEQ ID NO: 14189 - DNA, 20 bp, synthetic construct
  source 1..20: mol_type = other DNA
gtggaccaagcgagccttcc

SEQ ID NO: 14190 - DNA, 20 bp, synthetic construct
  source 1..20: mol_type = other DNA
gtgggccagccagttcactt

SEQ ID NO: 14191 - DNA, 20 bp, synthetic construct
  source 1..20: mol_type = other DNA
gccctacctgcgtcagtgta

SEQ ID NO: 14192 - DNA, 20 bp, synthetic construct
  source 1..20: mol_type = other DNA
gagcactcaccagatagttg

SEQ ID NO: 14193 - DNA, 20 bp, synthetic construct
  source 1..20: mol_type = other DNA
agccaccgttgtccagatta

SEQ ID NO: 14194 - DNA, 20 bp, synthetic construct
  source 1..20: mol_type = other DNA
tggtccctgagtaagtgtcc

SEQ ID NO: 14195 - DNA, 20 bp, synthetic construct
  source 1..20: mol_type = other DNA
agaagccaatggagattgcc

SEQ ID NO: 14196 - DNA, 20 bp, synthetic construct
  source 1..20: mol_type = other DNA
cgtcaggctgctgtggtacc

SEQ ID NO: 14197 - DNA, 20 bp, synthetic construct
  source 1..20: mol_type = other DNA
tttctgggaggagacacgca

SEQ ID NO: 14198 - DNA, 20 bp, synthetic construct
  source 1..20: mol_type = other DNA
gatgaaagggccggaggtca

SEQ ID NO: 14199 - DNA, 20 bp, synthetic construct
  source 1..20: mol_type = other DNA
gggaactcggcctcctgcga

SEQ ID NO: 14200 - DNA, 20 bp, synthetic construct
  source 1..20: mol_type = other DNA
cctcacccaaccagcttaag

SEQ ID NO: 14201 - DNA, 20 bp, synthetic construct
  source 1..20: mol_type = other DNA
ttggacttttctatggggag

SEQ ID NO: 14202 - DNA, 20 bp, synthetic construct
  source 1..20: mol_type = other DNA
tgccttgttcctgagagtga

SEQ ID NO: 14203 - DNA, 20 bp, synthetic construct
  source 1..20: mol_type = other DNA
ttccactgtggggagatggg

SEQ ID NO: 14204 - DNA, 20 bp, synthetic construct
  source 1..20: mol_type = other DNA
tggccgtcgcattgttgtcc

SEQ ID NO: 14205 - DNA, 20 bp, synthetic construct
  source 1..20: mol_type = other DNA
cttgtagctgcaggggttgg

SEQ ID NO: 14206 - DNA, 20 bp, synthetic construct
  source 1..20: mol_type = other DNA
actaaacacttcccagaccg

SEQ ID NO: 14207 - DNA, 20 bp, synthetic construct
  source 1..20: mol_type = other DNA
cgtgacctgggatggggctc

SEQ ID NO: 14208 - DNA, 20 bp, synthetic construct
  source 1..20: mol_type = other DNA
tcgctgcattgagtgtgcgt

SEQ ID NO: 14209 - DNA, 20 bp, synthetic construct
  source 1..20: mol_type = other DNA
cgtacagcgcaaagcagaga

SEQ ID NO: 14210 - DNA, 20 bp, synthetic construct
  source 1..20: mol_type = other DNA
aacagcgacatggccctcgc

SEQ ID NO: 14211 - DNA, 20 bp, synthetic construct
  source 1..20: mol_type = other DNA
gtccaggtcggtctactgct

SEQ ID NO: 14212 - DNA, 20 bp, synthetic construct
  source 1..20: mol_type = other DNA
tccagttcactactaaagtc

SEQ ID NO: 14213 - DNA, 20 bp, synthetic construct
  source 1..20: mol_type = other DNA
agattggcacagctgtgagg

SEQ ID NO: 14214 - DNA, 20 bp, synthetic construct
  source 1..20: mol_type = other DNA
gcttcacaatgtaagtggac

SEQ ID NO: 14215 - DNA, 20 bp, synthetic construct
  source 1..20: mol_type = other DNA
gcccacgacaccaaccacca

SEQ ID NO: 14216 - DNA, 20 bp, synthetic construct
  source 1..20: mol_type = other DNA
ggcgccccaggcaccaggta

SEQ ID NO: 14217 - DNA, 20 bp, synthetic construct
  source 1..20: mol_type = other DNA
ggatgtccggaagagagtgc

SEQ ID NO: 14218 - DNA, 20 bp, synthetic construct
  source 1..20: mol_type = other DNA
cagccagtggccgctcaggt

SEQ ID NO: 14219 - DNA, 20 bp, synthetic construct
  source 1..20: mol_type = other DNA
gacaccatcatgtaaggagc

SEQ ID NO: 14220 - DNA, 20 bp, synthetic construct
  source 1..20: mol_type = other DNA
gatccacaggggcttcatct

SEQ ID NO: 14221 - DNA, 20 bp, synthetic construct
  source 1..20: mol_type = other DNA
tgtagctgcaggggttggag

SEQ ID NO: 14222 - DNA, 20 bp, synthetic construct
  source 1..20: mol_type = other DNA
catgtccagctgggggccca

SEQ ID NO: 14223 - DNA, 20 bp, synthetic construct
  source 1..20: mol_type = other DNA
cgaagctccagacgtctgac

SEQ ID NO: 14224 - DNA, 20 bp, synthetic construct
  source 1..20: mol_type = other DNA
caggctacctgtgagtggcc

SEQ ID NO: 14225 - DNA, 20 bp, synthetic construct
  source 1..20: mol_type = other DNA
tctgatacctgagtgtatcc

SEQ ID NO: 14226 - DNA, 20 bp, synthetic construct
  source 1..20: mol_type = other DNA
tggatgagctcgatgcggaa

SEQ ID NO: 14227 - DNA, 20 bp, synthetic construct
  source 1..20: mol_type = other DNA
ggagctgcagtccatcatcc

SEQ ID NO: 14228 - DNA, 20 bp, synthetic construct
  source 1..20: mol_type = other DNA
tccctgaccacgggccagga

SEQ ID NO: 14229 - DNA, 20 bp, synthetic construct
  source 1..20: mol_type = other DNA
tattcagtgatgatgtagat

SEQ ID NO: 14230 - DNA, 20 bp, synthetic construct
  source 1..20: mol_type = other DNA
caggcggttgagggtcgcgc

SEQ ID NO: 14231 - DNA, 20 bp, synthetic construct
  source 1..20: mol_type = other DNA
tggaggggaagacggcccgg

SEQ ID NO: 14232 - DNA, 20 bp, synthetic construct
  source 1..20: mol_type = other DNA
tctgacacactgtagggaaa

SEQ ID NO: 14233 - DNA, 20 bp, synthetic construct
  source 1..20: mol_type = other DNA
acggagtacttgcgctcagg

SEQ ID NO: 14234 - DNA, 20 bp, synthetic construct
  source 1..20: mol_type = other DNA
cctccaccattgccacctgc

SEQ ID NO: 14235 - DNA, 20 bp, synthetic construct
  source 1..20: mol_type = other DNA
tgctaagggctgagcactcc

SEQ ID NO: 14236 - DNA, 20 bp, synthetic construct
  source 1..20: mol_type = other DNA
cactggaagggccgttctcc

SEQ ID NO: 14237 - DNA, 20 bp, synthetic construct
  source 1..20: mol_type = other DNA
cagcaggtagagcatctggg

SEQ ID NO: 14238 - DNA, 20 bp, synthetic construct
  source 1..20: mol_type = other DNA
cccagcttatgttgcatctg

SEQ ID NO: 14239 - DNA, 20 bp, synthetic construct
  source 1..20: mol_type = other DNA
tgcaggactccctggcactg

SEQ ID NO: 14240 - DNA, 20 bp, synthetic construct
  source 1..20: mol_type = other DNA
gcgcaggcttgggggtaggc

SEQ ID NO: 14241 - DNA, 20 bp, synthetic construct
  source 1..20: mol_type = other DNA
ccacatgtcaggttccaccg

SEQ ID NO: 14242 - DNA, 20 bp, synthetic construct
  source 1..20: mol_type = other DNA
ttctaatgttcttaaggcac

SEQ ID NO: 14243 - DNA, 20 bp, synthetic construct
  source 1..20: mol_type = other DNA
ctcccaaggtgctcgccctg

SEQ ID NO: 14244 - DNA, 20 bp, synthetic construct
  source 1..20: mol_type = other DNA
gcagttgccagaactgccca

SEQ ID NO: 14245 - DNA, 20 bp, synthetic construct
  source 1..20: mol_type = other DNA
ggaggcgcccacctgctgga

SEQ ID NO: 14246 - DNA, 20 bp, synthetic construct
  source 1..20: mol_type = other DNA
cacaggcaggatgcctacag

SEQ ID NO: 14247 - DNA, 20 bp, synthetic construct
  source 1..20: mol_type = other DNA
acagcagttcttgtcaggta

SEQ ID NO: 14248 - DNA, 20 bp, synthetic construct
  source 1..20: mol_type = other DNA
tcgttctcccacaccagccc

SEQ ID NO: 14249 - DNA, 20 bp, synthetic construct
  source 1..20: mol_type = other DNA
aggtggcgaggggactacgg

SEQ ID NO: 14250 - DNA, 20 bp, synthetic construct
  source 1..20: mol_type = other DNA
ggcatcccttcacaaaggac

SEQ ID NO: 14251 - DNA, 20 bp, synthetic construct
  source 1..20: mol_type = other DNA
acagcaggtagagcatctgg

SEQ ID NO: 14252 - DNA, 20 bp, synthetic construct
  source 1..20: mol_type = other DNA
tcaccaccactggcagggac

SEQ ID NO: 14253 - DNA, 20 bp, synthetic construct
  source 1..20: mol_type = other DNA
caaaggacaaggcctcctcg

SEQ ID NO: 14254 - DNA, 20 bp, synthetic construct
  source 1..20: mol_type = other DNA
atgtggaacagctgagggga

SEQ ID NO: 14255 - DNA, 20 bp, synthetic construct
  source 1..20: mol_type = other DNA
tcgctgtgggttgtgaggtc

SEQ ID NO: 14256 - DNA, 20 bp, synthetic construct
  source 1..20: mol_type = other DNA
tgttaggttctctggagccc

SEQ ID NO: 14257 - DNA, 20 bp, synthetic construct
  source 1..20: mol_type = other DNA
gagcaggtctggctggctca

SEQ ID NO: 14258 - DNA, 20 bp, synthetic construct
  source 1..20: mol_type = other DNA
aagcgcagaaaggcaaattc

SEQ ID NO: 14259 - DNA, 20 bp, synthetic construct
  source 1..20: mol_type = other DNA
ggaggccctggaggacaggc

SEQ ID NO: 14260 - DNA, 20 bp, synthetic construct
  source 1..20: mol_type = other DNA
gactctacctgtttgccagg

SEQ ID NO: 14261 - DNA, 20 bp, synthetic construct
  source 1..20: mol_type = other DNA
tgagtcggcagcaacatcca

SEQ ID NO: 14262 - DNA, 20 bp, synthetic construct
  source 1..20: mol_type = other DNA
caatgatgaccaggatgggg

SEQ ID NO: 14263 - DNA, 20 bp, synthetic construct
  source 1..20: mol_type = other DNA
tctggaggaggaatgccaat

SEQ ID NO: 14264 - DNA, 20 bp, synthetic construct
  source 1..20: mol_type = other DNA
cattgctcttctcattgtct

SEQ ID NO: 14265 - DNA, 20 bp, synthetic construct
  source 1..20: mol_type = other DNA
gccttcgtgaaaccatctgt

SEQ ID NO: 14266 - DNA, 20 bp, synthetic construct
  source 1..20: mol_type = other DNA
caactattcagccaatgtga

SEQ ID NO: 14267 - DNA, 20 bp, synthetic construct
  source 1..20: mol_type = other DNA
tggggcgccccacgatggag

SEQ ID NO: 14268 - DNA, 20 bp, synthetic construct
  source 1..20: mol_type = other DNA
ggagaaagataggcgctggg

SEQ ID NO: 14269 - DNA, 20 bp, synthetic construct
  source 1..20: mol_type = other DNA
aaggtcatgcgagacaacaa

SEQ ID NO: 14270 - DNA, 20 bp, synthetic construct
  source 1..20: mol_type = other DNA
ctccactgtgcactctcagg

SEQ ID NO: 14271 - DNA, 20 bp, synthetic construct
  source 1..20: mol_type = other DNA
accgagtctggttggggaga

SEQ ID NO: 14272 - DNA, 20 bp, synthetic construct
  source 1..20: mol_type = other DNA
aagaaggcagagcaccaggt

SEQ ID NO: 14273 - DNA, 20 bp, synthetic construct
  source 1..20: mol_type = other DNA
ggaagctgtcaaagtcctgg

SEQ ID NO: 14274 - DNA, 20 bp, synthetic construct
  source 1..20: mol_type = other DNA
catcagcaccttcatgtggt

SEQ ID NO: 14275 - DNA, 20 bp, synthetic construct
  source 1..20: mol_type = other DNA
gccgaagctccagtagtcga

SEQ ID NO: 14276 - DNA, 20 bp, synthetic construct
  source 1..20: mol_type = other DNA
gactccgagggaaagaggta

SEQ ID NO: 14277 - DNA, 20 bp, synthetic construct
  source 1..20: mol_type = other DNA
atgccatctctttccggtga

SEQ ID NO: 14278 - DNA, 20 bp, synthetic construct
  source 1..20: mol_type = other DNA
cccagaagggcaacctgctc

SEQ ID NO: 14279 - DNA, 20 bp, synthetic construct
  source 1..20: mol_type = other DNA
gtgtctctcctcgaagatcg

SEQ ID NO: 14280 - DNA, 20 bp, synthetic construct
  source 1..20: mol_type = other DNA
aaaccaggatgtcccccaag

SEQ ID NO: 14281 - DNA, 20 bp, synthetic construct
  source 1..20: mol_type = other DNA
tccaagaggcggcagagggc

SEQ ID NO: 14282 - DNA, 20 bp, synthetic construct
  source 1..20: mol_type = other DNA
gacctccaactcgaggtgag

SEQ ID NO: 14283 - DNA, 20 bp, synthetic construct
  source 1..20: mol_type = other DNA
gcgaggggagatctatggcc

SEQ ID NO: 14284 - DNA, 20 bp, synthetic construct
  source 1..20: mol_type = other DNA
aagatgatctcaatgtcttg

SEQ ID NO: 14285 - DNA, 20 bp, synthetic construct
  source 1..20: mol_type = other DNA
atcgatctgaaataccccaa

SEQ ID NO: 14286 - DNA, 20 bp, synthetic construct
  source 1..20: mol_type = other DNA
gcatgcgctgctccacggtc

SEQ ID NO: 14287 - DNA, 20 bp, synthetic construct
  source 1..20: mol_type = other DNA
agtaccaggtagcaggtgag

SEQ ID NO: 14288 - DNA, 20 bp, synthetic construct
  source 1..20: mol_type = other DNA
tttccatccagtcatcttcc

SEQ ID NO: 14289 - DNA, 20 bp, synthetic construct
  source 1..20: mol_type = other DNA
tgacgatatctgcagagaga

SEQ ID NO: 14290 - DNA, 20 bp, synthetic construct
  source 1..20: mol_type = other DNA
agagcgcggcgtcctcctcg

SEQ ID NO: 14291 - DNA, 20 bp, synthetic construct
  source 1..20: mol_type = other DNA
gtggcgtgtgggatctctgg

SEQ ID NO: 14292 - DNA, 20 bp, synthetic construct
  source 1..20: mol_type = other DNA
ttccgggcatcccttcacaa

SEQ ID NO: 14293 - DNA, 20 bp, synthetic construct
  source 1..20: mol_type = other DNA
ggaccagctccagggggcag

SEQ ID NO: 14294 - DNA, 20 bp, synthetic construct
  source 1..20: mol_type = other DNA
gtgagtgggcgcctccccgt

SEQ ID NO: 14295 - DNA, 20 bp, synthetic construct
  source 1..20: mol_type = other DNA
cttcctccgagagcggctga

SEQ ID NO: 14296 - DNA, 20 bp, synthetic construct
  source 1..20: mol_type = other DNA
tcaggtatgatgagaaactg

SEQ ID NO: 14297 - DNA, 20 bp, synthetic construct
  source 1..20: mol_type = other DNA
agaaaagccacatgaatgcc

SEQ ID NO: 14298 - DNA, 20 bp, synthetic construct
  source 1..20: mol_type = other DNA
gggctctatcacaaaatgaa

SEQ ID NO: 14299 - DNA, 20 bp, synthetic construct
  source 1..20: mol_type = other DNA
agaccacctatcagagccga

SEQ ID NO: 14300 - DNA, 20 bp, synthetic construct
  source 1..20: mol_type = other DNA
tcactcagcttgatgaaggg

SEQ ID NO: 14301 - DNA, 20 bp, synthetic construct
  source 1..20: mol_type = other DNA
ggatccaaggtgaggcgcgg

SEQ ID NO: 14302 - DNA, 20 bp, synthetic construct
  source 1..20: mol_type = other DNA
ctcctactcctgaagacaac

SEQ ID NO: 14303 - DNA, 20 bp, synthetic construct
  source 1..20: mol_type = other DNA
ccagctcactcacgatgctc

SEQ ID NO: 14304 - DNA, 20 bp, synthetic construct
  source 1..20: mol_type = other DNA
gcctggctgccaggcaggta

SEQ ID NO: 14305 - DNA, 20 bp, synthetic construct
  source 1..20: mol_type = other DNA
catccttacctctgacggca

SEQ ID NO: 14306 - DNA, 20 bp, synthetic construct
  source 1..20: mol_type = other DNA
catcgtcagacgctacaagg

SEQ ID NO: 14307 - DNA, 20 bp, synthetic construct
  source 1..20: mol_type = other DNA
acgacggacagcacatgtgg

SEQ ID NO: 14308 - DNA, 20 bp, synthetic construct
  source 1..20: mol_type = other DNA
gcagaaaactctcacggacg

SEQ ID NO: 14309 - DNA, 20 bp, synthetic construct
  source 1..20: mol_type = other DNA
ccagctcctgcctgtcctcc

SEQ ID NO: 14310 - DNA, 20 bp, synthetic construct
  source 1..20: mol_type = other DNA
gggccgccattacatccaca

SEQ ID NO: 14311 - DNA, 20 bp, synthetic construct
  source 1..20: mol_type = other DNA
ctccacgaggatgtttcggg

SEQ ID NO: 14312 - DNA, 20 bp, synthetic construct
  source 1..20: mol_type = other DNA
tggaggaggcagcctcttga

SEQ ID NO: 14313 - DNA, 20 bp, synthetic construct
  source 1..20: mol_type = other DNA
tgaggtagtcagtcaggtcc

SEQ ID NO: 14314 - DNA, 20 bp, synthetic construct
  source 1..20: mol_type = other DNA
tgtcatctgcagagggacga

SEQ ID NO: 14315 - DNA, 20 bp, synthetic construct
  source 1..20: mol_type = other DNA
cacccctcacctcgagttgg

SEQ ID NO: 14316 - DNA, 20 bp, synthetic construct
  source 1..20: mol_type = other DNA
agctacctttgccgatgagg

SEQ ID NO: 14317 - DNA, 20 bp, synthetic construct
  source 1..20: mol_type = other DNA
gcagggcctggcactggcca

SEQ ID NO: 14318 - DNA, 20 bp, synthetic construct
  source 1..20: mol_type = other DNA
ccctcacctcctgttctccc

SEQ ID NO: 14319 - DNA, 20 bp, synthetic construct
  source 1..20: mol_type = other DNA
gttgagttggatgttggcga

SEQ ID NO: 14320 - DNA, 20 bp, synthetic construct
  source 1..20: mol_type = other DNA
aggcaggccttgtagctgca

SEQ ID NO: 14321 - DNA, 20 bp, synthetic construct
  source 1..20: mol_type = other DNA
tcacctcgagttggaggtct

SEQ ID NO: 14322 - DNA, 20 bp, synthetic construct
  source 1..20: mol_type = other DNA
ccactgggcaggtgggtggg

SEQ ID NO: 14323 - DNA, 20 bp, synthetic construct
  source 1..20: mol_type = other DNA
aatagtcagcaaggctgtcg

SEQ ID NO: 14324 - DNA, 20 bp, synthetic construct
  source 1..20: mol_type = other DNA
cagtcagacatctggagcat

SEQ ID NO: 14325 - DNA, 20 bp, synthetic construct
  source 1..20: mol_type = other DNA
agagtgaaggtgggtaccac

SEQ ID NO: 14326 - DNA, 20 bp, synthetic construct
  source 1..20: mol_type = other DNA
tttgcaggactccctggcac

SEQ ID NO: 14327 - DNA, 20 bp, synthetic construct
  source 1..20: mol_type = other DNA
gagaagtctctggtggtaaa

SEQ ID NO: 14328 - DNA, 20 bp, synthetic construct
  source 1..20: mol_type = other DNA
tactcacatctggggctccg

SEQ ID NO: 14329 - DNA, 20 bp, synthetic construct
  source 1..20: mol_type = other DNA
gggccaggtccaacacggcc

SEQ ID NO: 14330 - DNA, 20 bp, synthetic construct
  source 1..20: mol_type = other DNA
ggtccaggatgcgttttccc

SEQ ID NO: 14331 - DNA, 20 bp, synthetic construct
  source 1..20: mol_type = other DNA
gggccagccagagctcccca

SEQ ID NO: 14332 - DNA, 20 bp, synthetic construct
  source 1..20: mol_type = other DNA
agaagattggcacagctgtg

SEQ ID NO: 14333 - DNA, 20 bp, synthetic construct
  source 1..20: mol_type = other DNA
gatcaggcgcccgagggccg

SEQ ID NO: 14334 - DNA, 20 bp, synthetic construct
  source 1..20: mol_type = other DNA
gcacgagtggctgtgcgcgc

SEQ ID NO: 14335 - DNA, 20 bp, synthetic construct
  source 1..20: mol_type = other DNA
cgtagtcccctcgccacctg

SEQ ID NO: 14336 - DNA, 20 bp, synthetic construct
  source 1..20: mol_type = other DNA
gagaacgtccccggggcaca

SEQ ID NO: 14337 - DNA, 20 bp, synthetic construct
  source 1..20: mol_type = other DNA
ccgcggcctcagcctggcag

SEQ ID NO: 14338 - DNA, 20 bp, synthetic construct
  source 1..20: mol_type = other DNA
gttcattgtacaatatatgg

SEQ ID NO: 14339 - DNA, 20 bp, synthetic construct
  source 1..20: mol_type = other DNA
ctgacgaactggaggagaag

SEQ ID NO: 14340 - DNA, 20 bp, synthetic construct
  source 1..20: mol_type = other DNA
gcccccgcacctggtgcagg

SEQ ID NO: 14341 - DNA, 20 bp, synthetic construct
  source 1..20: mol_type = other DNA
tgctttcagttgcctagacc

SEQ ID NO: 14342 - DNA, 20 bp, synthetic construct
  source 1..20: mol_type = other DNA
gcagttccaagaggcggcag

SEQ ID NO: 14343 - DNA, 20 bp, synthetic construct
  source 1..20: mol_type = other DNA
tgcatctgtgggtctccacg

SEQ ID NO: 14344 - DNA, 20 bp, synthetic construct
  source 1..20: mol_type = other DNA
gcctgtgggatctgcatgcc

SEQ ID NO: 14345 - DNA, 20 bp, synthetic construct
  source 1..20: mol_type = other DNA
tccagctggctggcaccagg

SEQ ID NO: 14346 - DNA, 20 bp, synthetic construct
  source 1..20: mol_type = other DNA
cgtgcgccagacgtggaagc

SEQ ID NO: 14347 - DNA, 20 bp, synthetic construct
  source 1..20: mol_type = other DNA
ggaggagcaatgatctgagg

SEQ ID NO: 14348 - DNA, 20 bp, synthetic construct
  source 1..20: mol_type = other DNA
cccgagccacatcttctccg

SEQ ID NO: 14349 - DNA, 20 bp, synthetic construct
  source 1..20: mol_type = other DNA
gcaggtacaggggctggtgc

SEQ ID NO: 14350 - DNA, 20 bp, synthetic construct
  source 1..20: mol_type = other DNA
agatggaacggaagaagccc

SEQ ID NO: 14351 - DNA, 20 bp, synthetic construct
  source 1..20: mol_type = other DNA
tacgccctgtccctcatcta

SEQ ID NO: 14352 - DNA, 20 bp, synthetic construct
  source 1..20: mol_type = other DNA
agagaagtatggtggcaggg

SEQ ID NO: 14353 - DNA, 20 bp, synthetic construct
  source 1..20: mol_type = other DNA
gtgtgaagagcacgggccgg

SEQ ID NO: 14354 - DNA, 20 bp, synthetic construct
  source 1..20: mol_type = other DNA
cccaggatgagcagcagccc

SEQ ID NO: 14355 - DNA, 20 bp, synthetic construct
  source 1..20: mol_type = other DNA
gctgctgacaagtggagctt

SEQ ID NO: 14356 - DNA, 20 bp, synthetic construct
  source 1..20: mol_type = other DNA
aggttcccaaagtggtcgct

SEQ ID NO: 14357 - DNA, 20 bp, synthetic construct
  source 1..20: mol_type = other DNA
tctgcgaggaatagagaagg

SEQ ID NO: 14358 - DNA, 20 bp, synthetic construct
  source 1..20: mol_type = other DNA
ctacataccaaggggcaaag

SEQ ID NO: 14359 - DNA, 20 bp, synthetic construct
  source 1..20: mol_type = other DNA
ataaacttggtcttcaggta

SEQ ID NO: 14360 - DNA, 20 bp, synthetic construct
  source 1..20: mol_type = other DNA
tcttctgggagtcaaaggtc

SEQ ID NO: 14361 - DNA, 20 bp, synthetic construct
  source 1..20: mol_type = other DNA
tgggatgacaaggtaaaaga

SEQ ID NO: 14362 - DNA, 20 bp, synthetic construct
  source 1..20: mol_type = other DNA
gaacctgggaagagagtgga

SEQ ID NO: 14363 - DNA, 20 bp, synthetic construct
  source 1..20: mol_type = other DNA
atatccaaacacaatattgg

SEQ ID NO: 14364 - DNA, 20 bp, synthetic construct
  source 1..20: mol_type = other DNA
acagcgagtgcggtgggccc

SEQ ID NO: 14365 - DNA, 20 bp, synthetic construct
  source 1..20: mol_type = other DNA
actggccaaggagattggta

SEQ ID NO: 14366 - DNA, 20 bp, synthetic construct
  source 1..20: mol_type = other DNA
gcagggagtgtgtgaactgt

SEQ ID NO: 14367 - DNA, 20 bp, synthetic construct
  source 1..20: mol_type = other DNA
tcccaccttggtgaccagat

SEQ ID NO: 14368 - DNA, 20 bp, synthetic construct
  source 1..20: mol_type = other DNA
acgtagtagtctttgtcaag

SEQ ID NO: 14369 - DNA, 20 bp, synthetic construct
  source 1..20: mol_type = other DNA
acccgtagggatgaccaacc

SEQ ID NO: 14370 - DNA, 20 bp, synthetic construct
  source 1..20: mol_type = other DNA
gcaatggtttgacggtgtga

SEQ ID NO: 14371 - DNA, 20 bp, synthetic construct
  source 1..20: mol_type = other DNA
gcatctggcagatgtcgcag

SEQ ID NO: 14372 - DNA, 20 bp, synthetic construct
  source 1..20: mol_type = other DNA
gttcctgggaaatctacggg

SEQ ID NO: 14373 - DNA, 20 bp, synthetic construct
  source 1..20: mol_type = other DNA
ccaggtcttcgctctcctgt

SEQ ID NO: 14374 - DNA, 20 bp, synthetic construct
  source 1..20: mol_type = other DNA
ggaggacgtgcagatgaagc

SEQ ID NO: 14375 - DNA, 20 bp, synthetic construct
  source 1..20: mol_type = other DNA
tttgacacgctctggcaggt

SEQ ID NO: 14376 - DNA, 20 bp, synthetic construct
  source 1..20: mol_type = other DNA
acgttatatctggaaccaga

SEQ ID NO: 14377 - DNA, 20 bp, synthetic construct
  source 1..20: mol_type = other DNA
ggccgcctgcacaacaagct

SEQ ID NO: 14378 - DNA, 20 bp, synthetic construct
  source 1..20: mol_type = other DNA
ggaagcgcatgttggggacc

SEQ ID NO: 14379 - DNA, 20 bp, synthetic construct
  source 1..20: mol_type = other DNA
ctgtggcggcgagatggcac

SEQ ID NO: 14380 - DNA, 20 bp, synthetic construct
  source 1..20: mol_type = other DNA
aaacagatactccagtgagc

SEQ ID NO: 14381 - DNA, 20 bp, synthetic construct
  source 1..20: mol_type = other DNA
gctcctcaccctgttgaact

SEQ ID NO: 14382 - DNA, 20 bp, synthetic construct
  source 1..20: mol_type = other DNA
ggttcccaaagtggtcgctg

SEQ ID NO: 14383 - DNA, 20 bp, synthetic construct
  source 1..20: mol_type = other DNA
cattacaccagtgagcccga

SEQ ID NO: 14384 - DNA, 20 bp, synthetic construct
  source 1..20: mol_type = other DNA
ccgaatggagaagtctctgg

SEQ ID NO: 14385 - DNA, 20 bp, synthetic construct
  source 1..20: mol_type = other DNA
tgggcaccaagctggacctg

SEQ ID NO: 14386 - DNA, 20 bp, synthetic construct
  source 1..20: mol_type = other DNA
gggtcagcatgtcctgccgg

SEQ ID NO: 14387 - DNA, 20 bp, synthetic construct
  source 1..20: mol_type = other DNA
ttccagaacgcctgccgcga

SEQ ID NO: 14388 - DNA, 20 bp, synthetic construct
  source 1..20: mol_type = other DNA
actcatgaggctgtgctgga

SEQ ID NO: 14389 - DNA, 20 bp, synthetic construct
  source 1..20: mol_type = other DNA
aggagattggtatgggcctc

SEQ ID NO: 14390 - DNA, 20 bp, synthetic construct
  source 1..20: mol_type = other DNA
gcccagatctccgtcgtgag

SEQ ID NO: 14391 - DNA, 20 bp, synthetic construct
  source 1..20: mol_type = other DNA
attgtccagccagacccaga

SEQ ID NO: 14392 - DNA, 20 bp, synthetic construct
  source 1..20: mol_type = other DNA
cctatggctgcctccccacc

SEQ ID NO: 14393 - DNA, 20 bp, synthetic construct
  source 1..20: mol_type = other DNA
tgatgtacctggagccaagg

SEQ ID NO: 14394 - DNA, 20 bp, synthetic construct
  source 1..20: mol_type = other DNA
gcatctctggtcctcttcaa

SEQ ID NO: 14395 - DNA, 20 bp, synthetic construct
  source 1..20: mol_type = other DNA
gactttcttggtgcggcaga

SEQ ID NO: 14396 - DNA, 20 bp, synthetic construct
  source 1..20: mol_type = other DNA
catgcccaccatcacgccct

SEQ ID NO: 14397 - DNA, 20 bp, synthetic construct
  source 1..20: mol_type = other DNA
ccaccgcgtgacctgggatg

SEQ ID NO: 14398 - DNA, 20 bp, synthetic construct
  source 1..20: mol_type = other DNA
gcagatcgacgtggccatca

SEQ ID NO: 14399 - DNA, 20 bp, synthetic construct
  source 1..20: mol_type = other DNA
cgggctggctgcggtcctcg

SEQ ID NO: 14400 - DNA, 20 bp, synthetic construct
  source 1..20: mol_type = other DNA
tcacactggagatgttttga

SEQ ID NO: 14401 - DNA, 20 bp, synthetic construct
  source 1..20: mol_type = other DNA
ctccgcgtggctggtgacgg

SEQ ID NO: 14402 - DNA, 20 bp, synthetic construct
  source 1..20: mol_type = other DNA
tccaggtgcatgggtgtgga

SEQ ID NO: 14403 - DNA, 20 bp, synthetic construct
  source 1..20: mol_type = other DNA
ggacccagactagcagcacc

SEQ ID NO: 14404 - DNA, 20 bp, synthetic construct
  source 1..20: mol_type = other DNA
gaaacaaccagtcagtgacc

SEQ ID NO: 14405 - DNA, 20 bp, synthetic construct
  source 1..20: mol_type = other DNA
cgtgcagatgaagctggagg

SEQ ID NO: 14406 - DNA, 20 bp, synthetic construct
  source 1..20: mol_type = other DNA
catgagctggatcatctgca

SEQ ID NO: 14407 - DNA, 20 bp, synthetic construct
  source 1..20: mol_type = other DNA
ccgcagcgacttgatggcga

SEQ ID NO: 14408 - DNA, 20 bp, synthetic construct
  source 1..20: mol_type = other DNA
gatcgatctgaaatacccca

SEQ ID NO: 14409 - DNA, 20 bp, synthetic construct
  source 1..20: mol_type = other DNA
caccagggtttggaactggc

SEQ ID NO: 14410 - DNA, 20 bp, synthetic construct
  source 1..20: mol_type = other DNA
caagtaccccgggctggtgt

SEQ ID NO: 14411 - DNA, 20 bp, synthetic construct
  source 1..20: mol_type = other DNA
ctgcagcgcctgatgcaccg

SEQ ID NO: 14412 - DNA, 20 bp, synthetic construct
  source 1..20: mol_type = other DNA
aggaaccacgcgctgttgaa

SEQ ID NO: 14413 - DNA, 20 bp, synthetic construct
  source 1..20: mol_type = other DNA
ggtgcagaggctgctcaact

SEQ ID NO: 14414 - DNA, 20 bp, synthetic construct
  source 1..20: mol_type = other DNA
tgacttacccattcctgtcc

SEQ ID NO: 14415 - DNA, 20 bp, synthetic construct
  source 1..20: mol_type = other DNA
caggccccatggagcgggca

SEQ ID NO: 14416 - DNA, 20 bp, synthetic construct
  source 1..20: mol_type = other DNA
acctacccggagtgcccgca

SEQ ID NO: 14417 - DNA, 20 bp, synthetic construct
  source 1..20: mol_type = other DNA
ccttaagagaacactgctcc

SEQ ID NO: 14418 - DNA, 20 bp, synthetic construct
  source 1..20: mol_type = other DNA
gagtcaaaggcagtcttggc

SEQ ID NO: 14419 - DNA, 20 bp, synthetic construct
  source 1..20: mol_type = other DNA
aaactctgctacctgctgga

SEQ ID NO: 14420 - DNA, 20 bp, synthetic construct
  source 1..20: mol_type = other DNA
ggcacatcaagctgcattcc

SEQ ID NO: 14421 - DNA, 20 bp, synthetic construct
  source 1..20: mol_type = other DNA
gaacttactcatgggcaagg

SEQ ID NO: 14422 - DNA, 20 bp, synthetic construct
  source 1..20: mol_type = other DNA
attgacgcaggaggccctgt

SEQ ID NO: 14423 - DNA, 20 bp, synthetic construct
  source 1..20: mol_type = other DNA
taagaggtcagaccgtcgtg

SEQ ID NO: 14424 - DNA, 20 bp, synthetic construct
  source 1..20: mol_type = other DNA
ggtcggaatgcagccaagcg

SEQ ID NO: 14425 - DNA, 20 bp, synthetic construct
  source 1..20: mol_type = other DNA
ggatgaagaggacgccttgt

SEQ ID NO: 14426 - DNA, 20 bp, synthetic construct
  source 1..20: mol_type = other DNA
cgtgaacgttccggagagcg

SEQ ID NO: 14427 - DNA, 20 bp, synthetic construct
  source 1..20: mol_type = other DNA
ggacaaaaagaggaatgagc

SEQ ID NO: 14428 - DNA, 20 bp, synthetic construct
  source 1..20: mol_type = other DNA
tcatgaggtctcccaagctg

SEQ ID NO: 14429 - DNA, 20 bp, synthetic construct
  source 1..20: mol_type = other DNA
ttcagtgactcagaaattgg

SEQ ID NO: 14430 - DNA, 20 bp, synthetic construct
  source 1..20: mol_type = other DNA
gaagattggcacagctgtga

SEQ ID NO: 14431 - DNA, 20 bp, synthetic construct
  source 1..20: mol_type = other DNA
gagtgattccggccggctgg

SEQ ID NO: 14432 - DNA, 20 bp, synthetic construct
  source 1..20: mol_type = other DNA
cacggccgcatcccttaccc

SEQ ID NO: 14433 - DNA, 20 bp, synthetic construct
  source 1..20: mol_type = other DNA
cagcagtcacctggtcacca

SEQ ID NO: 14434 - DNA, 20 bp, synthetic construct
  source 1..20: mol_type = other DNA
catctactaatgaaattggc

SEQ ID NO: 14435 - DNA, 20 bp, synthetic construct
  source 1..20: mol_type = other DNA
catgccgcagcttccacacc

SEQ ID NO: 14436 - DNA, 20 bp, synthetic construct
  source 1..20: mol_type = other DNA
acatgagcgtggtcagggcc

SEQ ID NO: 14437 - DNA, 20 bp, synthetic construct
  source 1..20: mol_type = other DNA
gtctaaaaagacacaagaga

SEQ ID NO: 14438 - DNA, 20 bp, synthetic construct
  source 1..20: mol_type = other DNA
gcagctcattgtagaaggtg

SEQ ID NO: 14439 - DNA, 20 bp, synthetic construct
  source 1..20: mol_type = other DNA
ggtggaggaagagaagcccg

SEQ ID NO: 14440 - DNA, 20 bp, synthetic construct
  source 1..20: mol_type = other DNA
gcggaccagttcatgcaggc

SEQ ID NO: 14441 - DNA, 20 bp, synthetic construct
  source 1..20: mol_type = other DNA
ctgcttcatgaggttggcct

SEQ ID NO: 14442 - DNA, 20 bp, synthetic construct
  source 1..20: mol_type = other DNA
atcccaggtcacgcggtggc

SEQ ID NO: 14443 - DNA, 20 bp, synthetic construct
  source 1..20: mol_type = other DNA
ccagcagatccaggcactca

SEQ ID NO: 14444 - DNA, 20 bp, synthetic construct
  source 1..20: mol_type = other DNA
gcttgtagcgtacgacaatg

SEQ ID NO: 14445 - DNA, 20 bp, synthetic construct
  source 1..20: mol_type = other DNA
accgaaagaacccggtgtgc

SEQ ID NO: 14446 - DNA, 20 bp, synthetic construct
  source 1..20: mol_type = other DNA
gtgacccgctttttattctg

SEQ ID NO: 14447 - DNA, 20 bp, synthetic construct
  source 1..20: mol_type = other DNA
ccacggtggaacctgacatg

SEQ ID NO: 14448 - DNA, 20 bp, synthetic construct
  source 1..20: mol_type = other DNA
cagcacgcgcagaacacgca

SEQ ID NO: 14449 - DNA, 20 bp, synthetic construct
  source 1..20: mol_type = other DNA
cttcccaaagtggccctgga

SEQ ID NO: 14450 - DNA, 20 bp, synthetic construct
  source 1..20: mol_type = other DNA
ttgggcagacctggaggaca

SEQ ID NO: 14451 - DNA, 20 bp, synthetic construct
  source 1..20: mol_type = other DNA
ttatgagaacgtccgcgcca

SEQ ID NO: 14452 - DNA, 20 bp, synthetic construct
  source 1..20: mol_type = other DNA
gcagcttgatgtgccggagc

SEQ ID NO: 14453 - DNA, 20 bp, synthetic construct
  source 1..20: mol_type = other DNA
ttcaggtttactcaaaaacg

SEQ ID NO: 14454 - DNA, 20 bp, synthetic construct
  source 1..20: mol_type = other DNA
tgctcagtgcttccccctgg

SEQ ID NO: 14455 - DNA, 20 bp, synthetic construct
  source 1..20: mol_type = other DNA
aagtggaaaatcagtaacgt

SEQ ID NO: 14456 - DNA, 20 bp, synthetic construct
  source 1..20: mol_type = other DNA
gcgccccaggcaccaggtag

SEQ ID NO: 14457 - DNA, 20 bp, synthetic construct
  source 1..20: mol_type = other DNA
taacttcagcagacacaggc

SEQ ID NO: 14458 - DNA, 20 bp, synthetic construct
  source 1..20: mol_type = other DNA
ggaccacgcccctctccagg

SEQ ID NO: 14459 - DNA, 20 bp, synthetic construct
  source 1..20: mol_type = other DNA
acggcaaagcgtgagtacaa

SEQ ID NO: 14460 - DNA, 20 bp, synthetic construct
  source 1..20: mol_type = other DNA
tcttcccatagatgagggac

SEQ ID NO: 14461 - DNA, 20 bp, synthetic construct
  source 1..20: mol_type = other DNA
gcttggcagggttgatatag

SEQ ID NO: 14462 - DNA, 20 bp, synthetic construct
  source 1..20: mol_type = other DNA
acactccacattctcccaca

SEQ ID NO: 14463 - DNA, 20 bp, synthetic construct
  source 1..20: mol_type = other DNA
tggcagggaaccagccaacc

SEQ ID NO: 14464 - DNA, 20 bp, synthetic construct
  source 1..20: mol_type = other DNA
aaactccaccagctcctaga

SEQ ID NO: 14465 - DNA, 20 bp, synthetic construct
  source 1..20: mol_type = other DNA
ccttgcagtggggaagccgg

SEQ ID NO: 14466 - DNA, 20 bp, synthetic construct
  source 1..20: mol_type = other DNA
ccccacgatggaggggaaga

SEQ ID NO: 14467 - DNA, 20 bp, synthetic construct
  source 1..20: mol_type = other DNA
gcaggtatcagccagacaga

SEQ ID NO: 14468 - DNA, 20 bp, synthetic construct
  source 1..20: mol_type = other DNA
cagcagtaccgcgtggtgag

SEQ ID NO: 14469 - DNA, 20 bp, synthetic construct
  source 1..20: mol_type = other DNA
gaggcatggctgaaatcttc

SEQ ID NO: 14470 - DNA, 20 bp, synthetic construct
  source 1..20: mol_type = other DNA
tccccagacgcccctgcacc

SEQ ID NO: 14471 - DNA, 20 bp, synthetic construct
  source 1..20: mol_type = other DNA
cccaagcaggagaacattgc

SEQ ID NO: 14472 - DNA, 20 bp, synthetic construct
  source 1..20: mol_type = other DNA
cggctacttccggctgacca

SEQ ID NO: 14473 - DNA, 20 bp, synthetic construct
  source 1..20: mol_type = other DNA
agtactcgcacgtgtcgctg

SEQ ID NO: 14474 - DNA, 20 bp, synthetic construct
  source 1..20: mol_type = other DNA
tgcgcaggatctgcttcttg

SEQ ID NO: 14475 - DNA, 20 bp, synthetic construct
  source 1..20: mol_type = other DNA
ttatatgctggggagaaaga

SEQ ID NO: 14476 - DNA, 20 bp, synthetic construct
  source 1..20: mol_type = other DNA
acgcgccacatgaagacgca

SEQ ID NO: 14477 - DNA, 20 bp, synthetic construct
  source 1..20: mol_type = other DNA
gacatctcaaagtcattgcc

SEQ ID NO: 14478 - DNA, 20 bp, synthetic construct
  source 1..20: mol_type = other DNA
gtggcgagctacgagaacga

SEQ ID NO: 14479 - DNA, 20 bp, synthetic construct
  source 1..20: mol_type = other DNA
gctcgccggtgtggctccgc

SEQ ID NO: 14480 - DNA, 20 bp, synthetic construct
  source 1..20: mol_type = other DNA
ctgaaggaacttcttgcctt

SEQ ID NO: 14481 - DNA, 20 bp, synthetic construct
  source 1..20: mol_type = other DNA
ccaaggtgagctggacaggg

SEQ ID NO: 14482 - DNA, 20 bp, synthetic construct
  source 1..20: mol_type = other DNA
tcgcaccttgcagatctgcg

SEQ ID NO: 14483 - DNA, 20 bp, synthetic construct
  source 1..20: mol_type = other DNA
tgcggcagtttctggcccct

SEQ ID NO: 14484 - DNA, 20 bp, synthetic construct
  source 1..20: mol_type = other DNA
acaggccactgtagtcctcc

SEQ ID NO: 14485 - DNA, 20 bp, synthetic construct
  source 1..20: mol_type = other DNA
agtgtttgaattctgcagag

SEQ ID NO: 14486 - DNA, 20 bp, synthetic construct
  source 1..20: mol_type = other DNA
gtgagtcggcagcaacatcc

SEQ ID NO: 14487 - DNA, 20 bp, synthetic construct
  source 1..20: mol_type = other DNA
ggatgaatgggacacgctcg

SEQ ID NO: 14488 - DNA, 20 bp, synthetic construct
  source 1..20: mol_type = other DNA
aaatacgtgaacaaggccaa

SEQ ID NO: 14489 - DNA, 20 bp, synthetic construct
  source 1..20: mol_type = other DNA
agcactcaccagatagttga

SEQ ID NO: 14490 - DNA, 20 bp, synthetic construct
  source 1..20: mol_type = other DNA
gttctccactgtgcactctc

SEQ ID NO: 14491 - DNA, 20 bp, synthetic construct
  source 1..20: mol_type = other DNA
ccagctgctcgtcggagaag

SEQ ID NO: 14492 - DNA, 20 bp, synthetic construct
  source 1..20: mol_type = other DNA
ctggccgatcttctggtctc

SEQ ID NO: 14493 - DNA, 20 bp, synthetic construct
  source 1..20: mol_type = other DNA
tattccttaaggcttcccga

SEQ ID NO: 14494 - DNA, 20 bp, synthetic construct
  source 1..20: mol_type = other DNA
gtctcccaagcggtcggcta

SEQ ID NO: 14495 - DNA, 20 bp, synthetic construct
  source 1..20: mol_type = other DNA
gactcaccgtctgtccggcc

SEQ ID NO: 14496 - DNA, 20 bp, synthetic construct
  source 1..20: mol_type = other DNA
taccagcatcacatgggtag

SEQ ID NO: 14497 - DNA, 20 bp, synthetic construct
  source 1..20: mol_type = other DNA
atactttgaagatcgtcatg

SEQ ID NO: 14498 - DNA, 20 bp, synthetic construct
  source 1..20: mol_type = other DNA
atgcagatccggcactggaa

SEQ ID NO: 14499 - DNA, 20 bp, synthetic construct
  source 1..20: mol_type = other DNA
acctcaatagagatggcaca

SEQ ID NO: 14500 - DNA, 20 bp, synthetic construct
  source 1..20: mol_type = other DNA
cctcaccatattcctgaagt

SEQ ID NO: 14501 - DNA, 20 bp, synthetic construct
  source 1..20: mol_type = other DNA
acgaaggtgaggaagatgga

SEQ ID NO: 14502 - DNA, 20 bp, synthetic construct
  source 1..20: mol_type = other DNA
cagttctcacacactgtggg

SEQ ID NO: 14503 - DNA, 20 bp, synthetic construct
  source 1..20: mol_type = other DNA
gtcatcaaggtgtctgactt

SEQ ID NO: 14504 - DNA, 20 bp, synthetic construct
  source 1..20: mol_type = other DNA
agcagtgcacgcagcagctc

SEQ ID NO: 14505 - DNA, 20 bp, synthetic construct
  source 1..20: mol_type = other DNA
ccatgatgtacctggagcca

SEQ ID NO: 14506 - DNA, 20 bp, synthetic construct
  source 1..20: mol_type = other DNA
cttccaggaatgactgggga

SEQ ID NO: 14507 - DNA, 20 bp, synthetic construct
  source 1..20: mol_type = other DNA
gcaccaagtgctccaaacag

SEQ ID NO: 14508 - DNA, 20 bp, synthetic construct
  source 1..20: mol_type = other DNA
ggagagggtgaactcctcaa

SEQ ID NO: 14509 - DNA, 20 bp, synthetic construct
  source 1..20: mol_type = other DNA
cggagacacgtaggcaacag

SEQ ID NO: 14510 - DNA, 20 bp, synthetic construct
  source 1..20: mol_type = other DNA
cacccggatgaagagcacga

SEQ ID NO: 14511 - DNA, 20 bp, synthetic construct
  source 1..20: mol_type = other DNA
aggcatggctgaaatcttcc

SEQ ID NO: 14512 - DNA, 20 bp, synthetic construct
  source 1..20: mol_type = other DNA
catcaggtaaagcttcccac

SEQ ID NO: 14513 - DNA, 20 bp, synthetic construct
  source 1..20: mol_type = other DNA
cagaggctgctcaactcggg

SEQ ID NO: 14514 - DNA, 20 bp, synthetic construct
  source 1..20: mol_type = other DNA
tggcccagtcaatcaaaggt

SEQ ID NO: 14515 - DNA, 20 bp, synthetic construct
  source 1..20: mol_type = other DNA
ctatgagtcccccaatgagg

SEQ ID NO: 14516 - DNA, 20 bp, synthetic construct
  source 1..20: mol_type = other DNA
tgctgagcgggcctggggag

SEQ ID NO: 14517 - DNA, 20 bp, synthetic construct
  source 1..20: mol_type = other DNA
cccgcagcacttgtcccaga

SEQ ID NO: 14518 - DNA, 20 bp, synthetic construct
  source 1..20: mol_type = other DNA
gggcccagggcgctgaatga

SEQ ID NO: 14519 - DNA, 20 bp, synthetic construct
  source 1..20: mol_type = other DNA
ttccacagagtgggttaaag

SEQ ID NO: 14520 - DNA, 20 bp, synthetic construct
  source 1..20: mol_type = other DNA
cgacctcaccgtccatggcc

SEQ ID NO: 14521 - DNA, 20 bp, synthetic construct
  source 1..20: mol_type = other DNA
gttacctttcacatggataa

SEQ ID NO: 14522 - DNA, 20 bp, synthetic construct
  source 1..20: mol_type = other DNA
tcaacaaattaagaaactgg

SEQ ID NO: 14523 - DNA, 20 bp, synthetic construct
  source 1..20: mol_type = other DNA
gaaggcgcagtccctgacca

SEQ ID NO: 14524 - DNA, 20 bp, synthetic construct
  source 1..20: mol_type = other DNA
tgttttgaaggtaggtgacc

SEQ ID NO: 14525 - DNA, 20 bp, synthetic construct
  source 1..20: mol_type = other DNA
tacaccaccaacgcctttcc

SEQ ID NO: 14526 - DNA, 20 bp, synthetic construct
  source 1..20: mol_type = other DNA
cacggtggggatgtactctc

SEQ ID NO: 14527 - DNA, 20 bp, synthetic construct
  source 1..20: mol_type = other DNA
gcccagcaggagcgcaggga

SEQ ID NO: 14528 - DNA, 20 bp, synthetic construct
  source 1..20: mol_type = other DNA
gcatttgcggtggacgatgg

SEQ ID NO: 14529 - DNA, 20 bp, synthetic construct
  source 1..20: mol_type = other DNA
agggagatgcgcactgtccc

SEQ ID NO: 14530 - DNA, 20 bp, synthetic construct
  source 1..20: mol_type = other DNA
atcgagggctgcaagacagg

SEQ ID NO: 14531 - DNA, 20 bp, synthetic construct
  source 1..20: mol_type = other DNA
gacctacccggagtgcccgc

SEQ ID NO: 14532 - DNA, 20 bp, synthetic construct
  source 1..20: mol_type = other DNA
tccagtgcgctcctgtgttg

SEQ ID NO: 14533 - DNA, 20 bp, synthetic construct
  source 1..20: mol_type = other DNA
cctggttctggtcgaagtcc

SEQ ID NO: 14534 - DNA, 20 bp, synthetic construct
  source 1..20: mol_type = other DNA
tcacctggaactggcagagc

SEQ ID NO: 14535 - DNA, 20 bp, synthetic construct
  source 1..20: mol_type = other DNA
actgtggcggcgagatggca

SEQ ID NO: 14536 - DNA, 20 bp, synthetic construct
  source 1..20: mol_type = other DNA
agtgcatcagctccttggtc

SEQ ID NO: 14537 - DNA, 20 bp, synthetic construct
  source 1..20: mol_type = other DNA
accaggcggtgctctccggc

SEQ ID NO: 14538 - DNA, 20 bp, synthetic construct
  source 1..20: mol_type = other DNA
gtagtcccctcgccacctgt

SEQ ID NO: 14539 - DNA, 20 bp, synthetic construct
  source 1..20: mol_type = other DNA
gctcatccgaaatggctctg

SEQ ID NO: 14540 - DNA, 20 bp, synthetic construct
  source 1..20: mol_type = other DNA
gccttgcagattaagtacac

SEQ ID NO: 14541 - DNA, 20 bp, synthetic construct
  source 1..20: mol_type = other DNA
aaggcgcagtccctgaccac

SEQ ID NO: 14542 - DNA, 20 bp, synthetic construct
  source 1..20: mol_type = other DNA
cgtctgggcggtgctacaac

SEQ ID NO: 14543 - DNA, 20 bp, synthetic construct
  source 1..20: mol_type = other DNA
tcagtgcctttgtggtggag

SEQ ID NO: 14544 - DNA, 20 bp, synthetic construct
  source 1..20: mol_type = other DNA
cacggtaagaggcgagacag

SEQ ID NO: 14545 - DNA, 20 bp, synthetic construct
  source 1..20: mol_type = other DNA
ctcaccagccaatatagcac

SEQ ID NO: 14546 - DNA, 20 bp, synthetic construct
  source 1..20: mol_type = other DNA
gaaacacacgcaggaggcga

SEQ ID NO: 14547 - DNA, 20 bp, synthetic construct
  source 1..20: mol_type = other DNA
acttaccaggtgcagggtgt

SEQ ID NO: 14548 - DNA, 20 bp, synthetic construct
  source 1..20: mol_type = other DNA
tggctggctcaggggtgggt

SEQ ID NO: 14549 - DNA, 20 bp, synthetic construct
  source 1..20: mol_type = other DNA
caggtgaacacataggcctc

SEQ ID NO: 14550 - DNA, 20 bp, synthetic construct
  source 1..20: mol_type = other DNA
cgatgatcaggatatctaca

SEQ ID NO: 14551 - DNA, 20 bp, synthetic construct
  source 1..20: mol_type = other DNA
ccctgaaaaacaaaatagag

SEQ ID NO: 14552 - DNA, 20 bp, synthetic construct
  source 1..20: mol_type = other DNA
tgactatcaagaagatggtt

SEQ ID NO: 14553 - DNA, 20 bp, synthetic construct
  source 1..20: mol_type = other DNA
ggagcggtactacaagatga

SEQ ID NO: 14554 - DNA, 20 bp, synthetic construct
  source 1..20: mol_type = other DNA
gcgggacttggggtctgcaa

SEQ ID NO: 14555 - DNA, 20 bp, synthetic construct
  source 1..20: mol_type = other DNA
tgtggaacagctgaggggag

SEQ ID NO: 14556 - DNA, 20 bp, synthetic construct
  source 1..20: mol_type = other DNA
ctacaggacccaccgacccc

SEQ ID NO: 14557 - DNA, 20 bp, synthetic construct
  source 1..20: mol_type = other DNA
ccaggtcctccttctcctcc

SEQ ID NO: 14558 - DNA, 20 bp, synthetic construct
  source 1..20: mol_type = other DNA
tcatcagcaccttcatgtgg

SEQ ID NO: 14559 - DNA, 20 bp, synthetic construct
  source 1..20: mol_type = other DNA
gagcagcttctgcctctggt

SEQ ID NO: 14560 - DNA, 20 bp, synthetic construct
  source 1..20: mol_type = other DNA
ccacgtagttggcagggaag

SEQ ID NO: 14561 - DNA, 20 bp, synthetic construct
  source 1..20: mol_type = other DNA
gccgctctcctatccacaga

SEQ ID NO: 14562 - DNA, 20 bp, synthetic construct
  source 1..20: mol_type = other DNA
gatgcggagagtaagggcat

SEQ ID NO: 14563 - DNA, 20 bp, synthetic construct
  source 1..20: mol_type = other DNA
cggaccagttcatgcaggcc

SEQ ID NO: 14564 - DNA, 20 bp, synthetic construct
  source 1..20: mol_type = other DNA
gccacatatgtgctgggcat

SEQ ID NO: 14565 - DNA, 20 bp, synthetic construct
  source 1..20: mol_type = other DNA
ccaggcggtgctctccggcc

SEQ ID NO: 14566 - DNA, 20 bp, synthetic construct
  source 1..20: mol_type = other DNA
gcacgggcagatcggcaagg

SEQ ID NO: 14567 - DNA, 20 bp, synthetic construct
  source 1..20: mol_type = other DNA
tccagtttgtatattggtac

SEQ ID NO: 14568 - DNA, 20 bp, synthetic construct
  source 1..20: mol_type = other DNA
gagggcatacccctcgtaga

SEQ ID NO: 14569 - DNA, 20 bp, synthetic construct
  source 1..20: mol_type = other DNA
aacctgaagaacagaaagaa

SEQ ID NO: 14570 - DNA, 20 bp, synthetic construct
  source 1..20: mol_type = other DNA
atatcatcctaatttctgga

SEQ ID NO: 14571 - DNA, 20 bp, synthetic construct
  source 1..20: mol_type = other DNA
agcacacccatcatcctggt

SEQ ID NO: 14572 - DNA, 20 bp, synthetic construct
  source 1..20: mol_type = other DNA
gaggacaaaggcctgcccca

SEQ ID NO: 14573 - DNA, 20 bp, synthetic construct
  source 1..20: mol_type = other DNA
caggagctatgaaaaggaca

SEQ ID NO: 14574 - DNA, 20 bp, synthetic construct
  source 1..20: mol_type = other DNA
cctccagctcggacagcatg

SEQ ID NO: 14575 - DNA, 20 bp, synthetic construct
  source 1..20: mol_type = other DNA
caatatgatccaaccaagaa

SEQ ID NO: 14576 - DNA, 20 bp, synthetic construct
  source 1..20: mol_type = other DNA
ccagtggccgctcaggtagg

SEQ ID NO: 14577 - DNA, 20 bp, synthetic construct
  source 1..20: mol_type = other DNA
ctcacatgatccccctgttc

SEQ ID NO: 14578 - DNA, 20 bp, synthetic construct
  source 1..20: mol_type = other DNA
ctgcaggagctccttcttct

SEQ ID NO: 14579 - DNA, 20 bp, synthetic construct
  source 1..20: mol_type = other DNA
gcagggactggaaggggaaa

SEQ ID NO: 14580 - DNA, 20 bp, synthetic construct
  source 1..20: mol_type = other DNA
gccctgtacccctgtgctgg

SEQ ID NO: 14581 - DNA, 20 bp, synthetic construct
  source 1..20: mol_type = other DNA
cccatggcaatgtctctgcc

SEQ ID NO: 14582 - DNA, 20 bp, synthetic construct
  source 1..20: mol_type = other DNA
gctgtaggggcaaccagaac

SEQ ID NO: 14583 - DNA, 20 bp, synthetic construct
  source 1..20: mol_type = other DNA
tgggtcttcaggacctgagg

SEQ ID NO: 14584 - DNA, 20 bp, synthetic construct
  source 1..20: mol_type = other DNA
acttccacatgagcgtggtc

SEQ ID NO: 14585 - DNA, 20 bp, synthetic construct
  source 1..20: mol_type = other DNA
acaggaaaacccaaaaggtc

SEQ ID NO: 14586 - DNA, 20 bp, synthetic construct
  source 1..20: mol_type = other DNA
gccacatgctggaaggaaga

SEQ ID NO: 14587 - DNA, 20 bp, synthetic construct
  source 1..20: mol_type = other DNA
gtgtcaaacttggtgccctc

SEQ ID NO: 14588 - DNA, 20 bp, synthetic construct
  source 1..20: mol_type = other DNA
ctcacctcagcagggcaggc

SEQ ID NO: 14589 - DNA, 20 bp, synthetic construct
  source 1..20: mol_type = other DNA
gtggggactgcaggtgggag

SEQ ID NO: 14590 - DNA, 20 bp, synthetic construct
  source 1..20: mol_type = other DNA
ccttcgtgaaaccatctgtg

SEQ ID NO: 14591 - DNA, 20 bp, synthetic construct
  source 1..20: mol_type = other DNA
caaggtgctgaagcagggca

SEQ ID NO: 14592 - DNA, 20 bp, synthetic construct
  source 1..20: mol_type = other DNA
tgtacagcaccggccgatgc

SEQ ID NO: 14593 - DNA, 20 bp, synthetic construct
  source 1..20: mol_type = other DNA
accaggagaatttaccagga

SEQ ID NO: 14594 - DNA, 20 bp, synthetic construct
  source 1..20: mol_type = other DNA
gtatgactttgaggccctgg

SEQ ID NO: 14595 - DNA, 20 bp, synthetic construct
  source 1..20: mol_type = other DNA
tcttcaaggtctccggcctc

SEQ ID NO: 14596 - DNA, 20 bp, synthetic construct
  source 1..20: mol_type = other DNA
tacgggtgatgagctccctc

SEQ ID NO: 14597 - DNA, 20 bp, synthetic construct
  source 1..20: mol_type = other DNA
tgtctctcctcgaagatcgt

SEQ ID NO: 14598 - DNA, 20 bp, synthetic construct
  source 1..20: mol_type = other DNA
tggaaaggtaccccagtgaa

SEQ ID NO: 14599 - DNA, 20 bp, synthetic construct
  source 1..20: mol_type = other DNA
acggagaagatgtggctcgg

SEQ ID NO: 14600 - DNA, 20 bp, synthetic construct
  source 1..20: mol_type = other DNA
acagtgccatcaacatggcc

SEQ ID NO: 14601 - DNA, 20 bp, synthetic construct
  source 1..20: mol_type = other DNA
cagatgaggtaaggaaggag

SEQ ID NO: 14602 - DNA, 20 bp, synthetic construct
  source 1..20: mol_type = other DNA
ccgttgtagtaccctgggtc

SEQ ID NO: 14603 - DNA, 20 bp, synthetic construct
  source 1..20: mol_type = other DNA
ccacactcacgtgttgtgcg

SEQ ID NO: 14604 - DNA, 20 bp, synthetic construct
  source 1..20: mol_type = other DNA
gggggctggacagttcgggg

SEQ ID NO: 14605 - DNA, 20 bp, synthetic construct
  source 1..20: mol_type = other DNA
gtcaccagtttgtacagttc

SEQ ID NO: 14606 - DNA, 20 bp, synthetic construct
  source 1..20: mol_type = other DNA
ctactcacgattgtcaaaga

SEQ ID NO: 14607 - DNA, 20 bp, synthetic construct
  source 1..20: mol_type = other DNA
gcgtggtaccacctgagaac

SEQ ID NO: 14608 - DNA, 20 bp, synthetic construct
  source 1..20: mol_type = other DNA
caccttgatcttcattgtgc

SEQ ID NO: 14609 - DNA, 20 bp, synthetic construct
  source 1..20: mol_type = other DNA
gacctgtataaccaaaccaa

SEQ ID NO: 14610 - DNA, 20 bp, synthetic construct
  source 1..20: mol_type = other DNA
ccaaaagggcttagaaggtc

SEQ ID NO: 14611 - DNA, 20 bp, synthetic construct
  source 1..20: mol_type = other DNA
aacacaaaacactgaacctc

SEQ ID NO: 14612 - DNA, 20 bp, synthetic construct
  source 1..20: mol_type = other DNA
cttcaggtgcccgctgggac

SEQ ID NO: 14613 - DNA, 20 bp, synthetic construct
  source 1..20: mol_type = other DNA
gtgattcttcccacaggcac

SEQ ID NO: 14614 - DNA, 20 bp, synthetic construct
  source 1..20: mol_type = other DNA
gctgtatgactttgaggccc

SEQ ID NO: 14615 - DNA, 20 bp, synthetic construct
  source 1..20: mol_type = other DNA
atcctcaggaactcgcactg

SEQ ID NO: 14616 - DNA, 20 bp, synthetic construct
  source 1..20: mol_type = other DNA
ggaacctacagggagaagac

SEQ ID NO: 14617 - DNA, 20 bp, synthetic construct
  source 1..20: mol_type = other DNA
ggctttagctcatgtggaag

SEQ ID NO: 14618 - DNA, 20 bp, synthetic construct
  source 1..20: mol_type = other DNA
gagaacactgctccaggtct

SEQ ID NO: 14619 - DNA, 20 bp, synthetic construct
  source 1..20: mol_type = other DNA
tgatgatggtggccttcacc

SEQ ID NO: 14620 - DNA, 20 bp, synthetic construct
  source 1..20: mol_type = other DNA
gctatgaaaaggacagggag

SEQ ID NO: 14621 - DNA, 20 bp, synthetic construct
  source 1..20: mol_type = other DNA
gagagagtgggcaggtacag

SEQ ID NO: 14622 - DNA, 20 bp, synthetic construct
  source 1..20: mol_type = other DNA
ctcgcagcgttgcaggtcct

SEQ ID NO: 14623 - DNA, 20 bp, synthetic construct
  source 1..20: mol_type = other DNA
accccactgtggcggcgaga

SEQ ID NO: 14624 - DNA, 20 bp, synthetic construct
  source 1..20: mol_type = other DNA
ctcttctcattgtctaggta

SEQ ID NO: 14625 - DNA, 20 bp, synthetic construct
  source 1..20: mol_type = other DNA
cccgccatggctccgacgct

SEQ ID NO: 14626 - DNA, 20 bp, synthetic construct
  source 1..20: mol_type = other DNA
cctcctcactgtctgtgtcc

SEQ ID NO: 14627 - DNA, 20 bp, synthetic construct
  source 1..20: mol_type = other DNA
gaggagcaatgatctgagga

SEQ ID NO: 14628 - DNA, 20 bp, synthetic construct
  source 1..20: mol_type = other DNA
ctcactggagaactggtccc

SEQ ID NO: 14629 - DNA, 20 bp, synthetic construct
  source 1..20: mol_type = other DNA
cgcggcatcttcccgccctg

SEQ ID NO: 14630 - DNA, 20 bp, synthetic construct
  source 1..20: mol_type = other DNA
cacacccacctggagctgtg

SEQ ID NO: 14631 - DNA, 20 bp, synthetic construct
  source 1..20: mol_type = other DNA
gacaaaaagaggaatgagct

SEQ ID NO: 14632 - DNA, 20 bp, synthetic construct
  source 1..20: mol_type = other DNA
cgtggagcagcacgagatgc

SEQ ID NO: 14633 - DNA, 20 bp, synthetic construct
  source 1..20: mol_type = other DNA
catgcctgagagggaaatga

SEQ ID NO: 14634 - DNA, 20 bp, synthetic construct
  source 1..20: mol_type = other DNA
cggagaagatgtggctcggg

SEQ ID NO: 14635 - DNA, 20 bp, synthetic construct
  source 1..20: mol_type = other DNA
ggcgccctggccagtcgtct

SEQ ID NO: 14636 - DNA, 20 bp, synthetic construct
  source 1..20: mol_type = other DNA
gactaccagggggtatggct

SEQ ID NO: 14637 - DNA, 20 bp, synthetic construct
  source 1..20: mol_type = other DNA
gcaccatcagcaggtcccgc

SEQ ID NO: 14638 - DNA, 20 bp, synthetic construct
  source 1..20: mol_type = other DNA
ttgtcaaacctgtggggagc

SEQ ID NO: 14639 - DNA, 20 bp, synthetic construct
  source 1..20: mol_type = other DNA
actgcgcaggtagtcaaagg

SEQ ID NO: 14640 - DNA, 20 bp, synthetic construct
  source 1..20: mol_type = other DNA
agcagcccttcaacagcgcg

SEQ ID NO: 14641 - DNA, 20 bp, synthetic construct
  source 1..20: mol_type = other DNA
ggagagctggccgaaagtct

SEQ ID NO: 14642 - DNA, 20 bp, synthetic construct
  source 1..20: mol_type = other DNA
actcgcacgtgtcgctgcgg

SEQ ID NO: 14643 - DNA, 20 bp, synthetic construct
  source 1..20: mol_type = other DNA
tcaaggagaggggttgcatc

SEQ ID NO: 14644 - DNA, 20 bp, synthetic construct
  source 1..20: mol_type = other DNA
ccccatcgtgctcttcatcc

SEQ ID NO: 14645 - DNA, 20 bp, synthetic construct
  source 1..20: mol_type = other DNA
gcagcccaagtaaggagact

SEQ ID NO: 14646 - DNA, 20 bp, synthetic construct
  source 1..20: mol_type = other DNA
ggcagaggagctgcgagaca

SEQ ID NO: 14647 - DNA, 20 bp, synthetic construct
  source 1..20: mol_type = other DNA
gagctgcaaagagaagggga

SEQ ID NO: 14648 - DNA, 20 bp, synthetic construct
  source 1..20: mol_type = other DNA
ccaggccgaggccctcatgc

SEQ ID NO: 14649 - DNA, 20 bp, synthetic construct
  source 1..20: mol_type = other DNA
acgaagaggacaatgggggc

SEQ ID NO: 14650 - DNA, 20 bp, synthetic construct
  source 1..20: mol_type = other DNA
ccgaagcaactcagaggtgg

SEQ ID NO: 14651 - DNA, 20 bp, synthetic construct
  source 1..20: mol_type = other DNA
tgctggtcagaacaaagtag

SEQ ID NO: 14652 - DNA, 20 bp, synthetic construct
  source 1..20: mol_type = other DNA
ccgcaggtttcgggaggccc

SEQ ID NO: 14653 - DNA, 20 bp, synthetic construct
  source 1..20: mol_type = other DNA
atagatagtggctgcacttc

SEQ ID NO: 14654 - DNA, 20 bp, synthetic construct
  source 1..20: mol_type = other DNA
gctgtgtacctgtatctggc

SEQ ID NO: 14655 - DNA, 20 bp, synthetic construct
  source 1..20: mol_type = other DNA
aatgctgcagtggtcctcaa

SEQ ID NO: 14656 - DNA, 20 bp, synthetic construct
  source 1..20: mol_type = other DNA
aggactctacctgtttgcca

SEQ ID NO: 14657 - DNA, 20 bp, synthetic construct
  source 1..20: mol_type = other DNA
acttactctggaagctctct

SEQ ID NO: 14658 - DNA, 20 bp, synthetic construct
  source 1..20: mol_type = other DNA
ccttacccaggttagagcca

SEQ ID NO: 14659 - DNA, 20 bp, synthetic construct
  source 1..20: mol_type = other DNA
gcaggccccatggagcgggc

SEQ ID NO: 14660 - DNA, 20 bp, synthetic construct
  source 1..20: mol_type = other DNA
cccagatctccgtcgtgaga

SEQ ID NO: 14661 - DNA, 20 bp, synthetic construct
  source 1..20: mol_type = other DNA
gaagaagcgggacctggagc

SEQ ID NO: 14662 - DNA, 20 bp, synthetic construct
  source 1..20: mol_type = other DNA
gaagggccgttctcctggga

SEQ ID NO: 14663 - DNA, 20 bp, synthetic construct
  source 1..20: mol_type = other DNA
gtcaaatgaacttccccttg

SEQ ID NO: 14664 - DNA, 20 bp, synthetic construct
  source 1..20: mol_type = other DNA
tcttctgcagctcctgcacc

SEQ ID NO: 14665 - DNA, 20 bp, synthetic construct
  source 1..20: mol_type = other DNA
cccctgtattgtccccttcg

SEQ ID NO: 14666 - DNA, 20 bp, synthetic construct
  source 1..20: mol_type = other DNA
gtccaactgccccgagatgt

SEQ ID NO: 14667 - DNA, 20 bp, synthetic construct
  source 1..20: mol_type = other DNA
gagacagctggacttcaaag

SEQ ID NO: 14668 - DNA, 20 bp, synthetic construct
  source 1..20: mol_type = other DNA
ttccaggtgactctatgctt

SEQ ID NO: 14669 - DNA, 20 bp, synthetic construct
  source 1..20: mol_type = other DNA
ctctcaatctgcaggggtgt

SEQ ID NO: 14670 - DNA, 20 bp, synthetic construct
  source 1..20: mol_type = other DNA
cagagtgaggttggtaggct

SEQ ID NO: 14671 - DNA, 20 bp, synthetic construct
  source 1..20: mol_type = other DNA
ttctcggcaatacgttcacc

SEQ ID NO: 14672 - DNA, 20 bp, synthetic construct
  source 1..20: mol_type = other DNA
aaacacatgaaaaagtggca

SEQ ID NO: 14673 - DNA, 20 bp, synthetic construct
  source 1..20: mol_type = other DNA
cacgcacctggacagctgac

SEQ ID NO: 14674 - DNA, 20 bp, synthetic construct
  source 1..20: mol_type = other DNA
tgactacggggccctgtatg

SEQ ID NO: 14675 - DNA, 20 bp, synthetic construct
  source 1..20: mol_type = other DNA
cctacaggagagcgaagacc

SEQ ID NO: 14676 - DNA, 20 bp, synthetic construct
  source 1..20: mol_type = other DNA
tccctccagcttcggtcgag

SEQ ID NO: 14677 - DNA, 20 bp, synthetic construct
  source 1..20: mol_type = other DNA
tcaccagtttgtacagttct

SEQ ID NO: 14678 - DNA, 20 bp, synthetic construct
  source 1..20: mol_type = other DNA
tcaacaagaacgaagagagg

SEQ ID NO: 14679 - DNA, 20 bp, synthetic construct
  source 1..20: mol_type = other DNA
ctctctccagtttgttgggc

SEQ ID NO: 14680 - DNA, 20 bp, synthetic construct
  source 1..20: mol_type = other DNA
caggcagaagatgcagcagc

SEQ ID NO: 14681 - DNA, 20 bp, synthetic construct
  source 1..20: mol_type = other DNA
acagttcggggaggtgtgga

SEQ ID NO: 14682 - DNA, 20 bp, synthetic construct
  source 1..20: mol_type = other DNA
atgttggagatcaccacaac

SEQ ID NO: 14683 - DNA, 20 bp, synthetic construct
  source 1..20: mol_type = other DNA
agtacatcatggacctggag

SEQ ID NO: 14684 - DNA, 20 bp, synthetic construct
  source 1..20: mol_type = other DNA
cggccagctctccaatctga

SEQ ID NO: 14685 - DNA, 20 bp, synthetic construct
  source 1..20: mol_type = other DNA
gtcatggagatggctggggg

SEQ ID NO: 14686 - DNA, 20 bp, synthetic construct
  source 1..20: mol_type = other DNA
gatggaggaggaatggacca

SEQ ID NO: 14687 - DNA, 20 bp, synthetic construct
  source 1..20: mol_type = other DNA
aggaggggatgtacgtgctg

SEQ ID NO: 14688 - DNA, 20 bp, synthetic construct
  source 1..20: mol_type = other DNA
gttgcagaggtggcatttga

SEQ ID NO: 14689 - DNA, 20 bp, synthetic construct
  source 1..20: mol_type = other DNA
tgtaccaggacaggcacgag

SEQ ID NO: 14690 - DNA, 20 bp, synthetic construct
  source 1..20: mol_type = other DNA
ctccaccattgccacctgcg

SEQ ID NO: 14691 - DNA, 20 bp, synthetic construct
  source 1..20: mol_type = other DNA
cacaatagccagcacaggag

SEQ ID NO: 14692 - DNA, 20 bp, synthetic construct
  source 1..20: mol_type = other DNA
cggaaggagggcctctggac

SEQ ID NO: 14693 - DNA, 20 bp, synthetic construct
  source 1..20: mol_type = other DNA
gcaaggtgaccccaggcagc

SEQ ID NO: 14694 - DNA, 20 bp, synthetic construct
  source 1..20: mol_type = other DNA
gtaggtacctgtttattcag

SEQ ID NO: 14695 - DNA, 20 bp, synthetic construct
  source 1..20: mol_type = other DNA
gatacctcatctggacagtt

SEQ ID NO: 14696 - DNA, 20 bp, synthetic construct
  source 1..20: mol_type = other DNA
gctgctccagctgctcctgc

SEQ ID NO: 14697 - DNA, 20 bp, synthetic construct
  source 1..20: mol_type = other DNA
ggtgccgctgtcattgcgcc

SEQ ID NO: 14698 - DNA, 20 bp, synthetic construct
  source 1..20: mol_type = other DNA
actccagtgagctggcatca

SEQ ID NO: 14699 - DNA, 20 bp, synthetic construct
  source 1..20: mol_type = other DNA
ctgtatgagggacgcaaccc

SEQ ID NO: 14700 - DNA, 20 bp, synthetic construct
  source 1..20: mol_type = other DNA
ggagagtccaggacaggaat

SEQ ID NO: 14701 - DNA, 20 bp, synthetic construct
  source 1..20: mol_type = other DNA
cgagggatgtatcagtgtaa

SEQ ID NO: 14702 - DNA, 20 bp, synthetic construct
  source 1..20: mol_type = other DNA
agtgtacaggattgttcctg

SEQ ID NO: 14703 - DNA, 20 bp, synthetic construct
  source 1..20: mol_type = other DNA
gcagtccatcatccaggtga

SEQ ID NO: 14704 - DNA, 20 bp, synthetic construct
  source 1..20: mol_type = other DNA
agcaatgatctgaggaggga

SEQ ID NO: 14705 - DNA, 20 bp, synthetic construct
  source 1..20: mol_type = other DNA
gtcctggtcccagttcaaca

SEQ ID NO: 14706 - DNA, 20 bp, synthetic construct
  source 1..20: mol_type = other DNA
gactacggggccctgtatga

SEQ ID NO: 14707 - DNA, 20 bp, synthetic construct
  source 1..20: mol_type = other DNA
agcaggttctggaactggag

SEQ ID NO: 14708 - DNA, 20 bp, synthetic construct
  source 1..20: mol_type = other DNA
atagttgatgagaagaggga

SEQ ID NO: 14709 - DNA, 20 bp, synthetic construct
  source 1..20: mol_type = other DNA
atccagcaggtagcagagtt

SEQ ID NO: 14710 - DNA, 20 bp, synthetic construct
  source 1..20: mol_type = other DNA
caaaagggcttagaaggtcc

SEQ ID NO: 14711 - DNA, 20 bp, synthetic construct
  source 1..20: mol_type = other DNA
aagctttacctgatgtcctt

SEQ ID NO: 14712 - DNA, 20 bp, synthetic construct
  source 1..20: mol_type = other DNA
acagctgacaggctcgacac

SEQ ID NO: 14713 - DNA, 20 bp, synthetic construct
  source 1..20: mol_type = other DNA
ccagctgcacaagccgctcg

SEQ ID NO: 14714 - DNA, 20 bp, synthetic construct
  source 1..20: mol_type = other DNA
attgagcagcccaagcagcg

SEQ ID NO: 14715 - DNA, 20 bp, synthetic construct
  source 1..20: mol_type = other DNA
gcgaggaatagagaaggagg

SEQ ID NO: 14716 - DNA, 20 bp, synthetic construct
  source 1..20: mol_type = other DNA
caggaacacgaggttctcct

SEQ ID NO: 14717 - DNA, 20 bp, synthetic construct
  source 1..20: mol_type = other DNA
acagtggaggaaggccacga

SEQ ID NO: 14718 - DNA, 20 bp, synthetic construct
  source 1..20: mol_type = other DNA
ctgggaaccactgggcaggt

SEQ ID NO: 14719 - DNA, 20 bp, synthetic construct
  source 1..20: mol_type = other DNA
gcagctcgtagctcttctcc

SEQ ID NO: 14720 - DNA, 20 bp, synthetic construct
  source 1..20: mol_type = other DNA
ggactctacctgtttgccag

SEQ ID NO: 14721 - DNA, 20 bp, synthetic construct
  source 1..20: mol_type = other DNA
acctcatccaggaagaagta

SEQ ID NO: 14722 - DNA, 20 bp, synthetic construct
  source 1..20: mol_type = other DNA
cagccagcttcttgtgctgt

SEQ ID NO: 14723 - DNA, 20 bp, synthetic construct
  source 1..20: mol_type = other DNA
ggaagcctacagtaacgaga

SEQ ID NO: 14724 - DNA, 20 bp, synthetic construct
  source 1..20: mol_type = other DNA
atgagtgcgtacagttcggg

SEQ ID NO: 14725 - DNA, 20 bp, synthetic construct
  source 1..20: mol_type = other DNA
ggttttccagctctcacgga

SEQ ID NO: 14726 - DNA, 20 bp, synthetic construct
  source 1..20: mol_type = other DNA
gcaggtttcgggaggcccag

SEQ ID NO: 14727 - DNA, 20 bp, synthetic construct
  source 1..20: mol_type = other DNA
tttgcggcgggacattgccc

SEQ ID NO: 14728 - DNA, 20 bp, synthetic construct
  source 1..20: mol_type = other DNA
ttaccagtagcagactcgca

SEQ ID NO: 14729 - DNA, 20 bp, synthetic construct
  source 1..20: mol_type = other DNA
ataatccgcgtcatcttcca

SEQ ID NO: 14730 - DNA, 20 bp, synthetic construct
  source 1..20: mol_type = other DNA
tggaccagatgcggagagta

SEQ ID NO: 14731 - DNA, 20 bp, synthetic construct
  source 1..20: mol_type = other DNA
ggtcgtgttccaagatgtcc

SEQ ID NO: 14732 - DNA, 20 bp, synthetic construct
  source 1..20: mol_type = other DNA
ctcaccttcttcgcaggaat

SEQ ID NO: 14733 - DNA, 20 bp, synthetic construct
  source 1..20: mol_type = other DNA
gctgctgcaccaggtgtcca

SEQ ID NO: 14734 - DNA, 20 bp, synthetic construct
  source 1..20: mol_type = other DNA
tcttgaagaaccagctgtgc

SEQ ID NO: 14735 - DNA, 20 bp, synthetic construct
  source 1..20: mol_type = other DNA
tagaagatcacttccacccc

SEQ ID NO: 14736 - DNA, 20 bp, synthetic construct
  source 1..20: mol_type = other DNA
ccacagactgccaggtgagt

SEQ ID NO: 14737 - DNA, 20 bp, synthetic construct
  source 1..20: mol_type = other DNA
aagaaggcggagcaccaggt

SEQ ID NO: 14738 - DNA, 20 bp, synthetic construct
  source 1..20: mol_type = other DNA
accctgagggagcagagatg

SEQ ID NO: 14739 - DNA, 20 bp, synthetic construct
  source 1..20: mol_type = other DNA
tacgccaagatcagcgactt

SEQ ID NO: 14740 - DNA, 20 bp, synthetic construct
  source 1..20: mol_type = other DNA
caggtgccaggcacatctct

SEQ ID NO: 14741 - DNA, 20 bp, synthetic construct
  source 1..20: mol_type = other DNA
tggtcaacttgatgcctgaa

SEQ ID NO: 14742 - DNA, 20 bp, synthetic construct
  source 1..20: mol_type = other DNA
ttgggccatgtttctctgct

SEQ ID NO: 14743 - DNA, 20 bp, synthetic construct
  source 1..20: mol_type = other DNA
tacagtcctggtaatggtgt

SEQ ID NO: 14744 - DNA, 20 bp, synthetic construct
  source 1..20: mol_type = other DNA
tatggccggcccaagatcga

SEQ ID NO: 14745 - DNA, 20 bp, synthetic construct
  source 1..20: mol_type = other DNA
gctcagtgcttccccctggt

SEQ ID NO: 14746 - DNA, 20 bp, synthetic construct
  source 1..20: mol_type = other DNA
agttcctgcagaagagggcg

SEQ ID NO: 14747 - DNA, 20 bp, synthetic construct
  source 1..20: mol_type = other DNA
cagccaggacaacaatgcga

SEQ ID NO: 14748 - DNA, 20 bp, synthetic construct
  source 1..20: mol_type = other DNA
ggtccagcttggtgcccacc

SEQ ID NO: 14749 - DNA, 20 bp, synthetic construct
  source 1..20: mol_type = other DNA
tatatgctggggagaaagaa

SEQ ID NO: 14750 - DNA, 20 bp, synthetic construct
  source 1..20: mol_type = other DNA
agactgaccagcgggagatg

SEQ ID NO: 14751 - DNA, 20 bp, synthetic construct
  source 1..20: mol_type = other DNA
gccttcctccactgtggaga

SEQ ID NO: 14752 - DNA, 20 bp, synthetic construct
  source 1..20: mol_type = other DNA
atctggaaccagatggtcac

SEQ ID NO: 14753 - DNA, 20 bp, synthetic construct
  source 1..20: mol_type = other DNA
ctgctctgtatcctaggagg

SEQ ID NO: 14754 - DNA, 20 bp, synthetic construct
  source 1..20: mol_type = other DNA
gtcgcgcacgatttcccgct

SEQ ID NO: 14755 - DNA, 20 bp, synthetic construct
  source 1..20: mol_type = other DNA
ctcacctggaactggcagag

SEQ ID NO: 14756 - DNA, 20 bp, synthetic construct
  source 1..20: mol_type = other DNA
gcagtaccgcgtggtgagtg

SEQ ID NO: 14757 - DNA, 20 bp, synthetic construct
  source 1..20: mol_type = other DNA
acgaacctcggggcttgggc

SEQ ID NO: 14758 - DNA, 20 bp, synthetic construct
  source 1..20: mol_type = other DNA
gttttgaaggtaggtgacct

SEQ ID NO: 14759 - DNA, 20 bp, synthetic construct
  source 1..20: mol_type = other DNA
cgcaggcagtcgaagacccc

SEQ ID NO: 14760 - DNA, 20 bp, synthetic construct
  source 1..20: mol_type = other DNA
gtgcagaggctgctcaactc

SEQ ID NO: 14761 - DNA, 20 bp, synthetic construct
  source 1..20: mol_type = other DNA
gtcacgcacgatttcccgct

SEQ ID NO: 14762 - DNA, 20 bp, synthetic construct
  source 1..20: mol_type = other DNA
cctgctgagcgggcctgggg

SEQ ID NO: 14763 - DNA, 20 bp, synthetic construct
  source 1..20: mol_type = other DNA
ggcgctccaagatggacagg

SEQ ID NO: 14764 - DNA, 20 bp, synthetic construct
  source 1..20: mol_type = other DNA
gatgcaggccatcaagtgtg

SEQ ID NO: 14765 - DNA, 20 bp, synthetic construct
  source 1..20: mol_type = other DNA
cgtccgaactgccgtcaacc

SEQ ID NO: 14766 - DNA, 20 bp, synthetic construct
  source 1..20: mol_type = other DNA
cccactggctcatccagtgc

SEQ ID NO: 14767 - DNA, 20 bp, synthetic construct
  source 1..20: mol_type = other DNA
tccagccgctgcttccacac

SEQ ID NO: 14768 - DNA, 20 bp, synthetic construct
  source 1..20: mol_type = other DNA
ggggacgttgcagctctcag

SEQ ID NO: 14769 - DNA, 20 bp, synthetic construct
  source 1..20: mol_type = other DNA
caggagagcctgaggatcca

SEQ ID NO: 14770 - DNA, 20 bp, synthetic construct
  source 1..20: mol_type = other DNA
gtgtcaaatgaacttcccct

SEQ ID NO: 14771 - DNA, 20 bp, synthetic construct
  source 1..20: mol_type = other DNA
ttgatcccaggttccaattg

SEQ ID NO: 14772 - DNA, 20 bp, synthetic construct
  source 1..20: mol_type = other DNA
agaagggacagcaaggctgg

SEQ ID NO: 14773 - DNA, 20 bp, synthetic construct
  source 1..20: mol_type = other DNA
gcccgccatggctccgacgc

SEQ ID NO: 14774 - DNA, 20 bp, synthetic construct
  source 1..20: mol_type = other DNA
tctacagactgcagccactg

SEQ ID NO: 14775 - DNA, 20 bp, synthetic construct
  source 1..20: mol_type = other DNA
tccgggttggtcatccctac

SEQ ID NO: 14776 - DNA, 20 bp, synthetic construct
  source 1..20: mol_type = other DNA
tggccacaggtgagcaggtc

SEQ ID NO: 14777 - DNA, 20 bp, synthetic construct
  source 1..20: mol_type = other DNA
gcgccagaagccattaacta

SEQ ID NO: 14778 - DNA, 20 bp, synthetic construct
  source 1..20: mol_type = other DNA
tctgtggataggagagcggc

SEQ ID NO: 14779 - DNA, 20 bp, synthetic construct
  source 1..20: mol_type = other DNA
ggccagccagagctccccag

SEQ ID NO: 14780 - DNA, 20 bp, synthetic construct
  source 1..20: mol_type = other DNA
caagctggccgccttccccg

SEQ ID NO: 14781 - DNA, 20 bp, synthetic construct
  source 1..20: mol_type = other DNA
tttcaggtggccaggagatg

SEQ ID NO: 14782 - DNA, 20 bp, synthetic construct
  source 1..20: mol_type = other DNA
tccgcggcctcagcctggca

SEQ ID NO: 14783 - DNA, 20 bp, synthetic construct
  source 1..20: mol_type = other DNA
tgattcttcccacaggcacc

SEQ ID NO: 14784 - DNA, 20 bp, synthetic construct
  source 1..20: mol_type = other DNA
ggagcagagatgtgggaatg

SEQ ID NO: 14785 - DNA, 20 bp, synthetic construct
  source 1..20: mol_type = other DNA
gagggacagcacggcctgga

SEQ ID NO: 14786 - DNA, 20 bp, synthetic construct
  source 1..20: mol_type = other DNA
ttttctcagtatatcagcca

SEQ ID NO: 14787 - DNA, 20 bp, synthetic construct
  source 1..20: mol_type = other DNA
cacgcacttcctgatgaacg

SEQ ID NO: 14788 - DNA, 20 bp, synthetic construct
  source 1..20: mol_type = other DNA
ggggcggactcacctatctg

SEQ ID NO: 14789 - DNA, 20 bp, synthetic construct
  source 1..20: mol_type = other DNA
agagagaatttatcatttcg

SEQ ID NO: 14790 - DNA, 20 bp, synthetic construct
  source 1..20: mol_type = other DNA
ccaattggtgaaatagaacc

SEQ ID NO: 14791 - DNA, 20 bp, synthetic construct
  source 1..20: mol_type = other DNA
cccatggaaccacttctcat

SEQ ID NO: 14792 - DNA, 20 bp, synthetic construct
  source 1..20: mol_type = other DNA
accaggactgtagcacgtcc

SEQ ID NO: 14793 - DNA, 20 bp, synthetic construct
  source 1..20: mol_type = other DNA
tccctttgatgaagagagta

SEQ ID NO: 14794 - DNA, 20 bp, synthetic construct
  source 1..20: mol_type = other DNA
cgtaggagcctgggaaagag

SEQ ID NO: 14795 - DNA, 20 bp, synthetic construct
  source 1..20: mol_type = other DNA
cgtaatagtagcgtaggcca

SEQ ID NO: 14796 - DNA, 20 bp, synthetic construct
  source 1..20: mol_type = other DNA
gggccatcctgctaaaatca

SEQ ID NO: 14797 - DNA, 20 bp, synthetic construct
  source 1..20: mol_type = other DNA
caccctgttgaactgggacc

SEQ ID NO: 14798 - DNA, 20 bp, synthetic construct
  source 1..20: mol_type = other DNA
accaggatgatgggtgtgct

SEQ ID NO: 14799 - DNA, 20 bp, synthetic construct
  source 1..20: mol_type = other DNA
ccaggatgatgggtgtgctg

SEQ ID NO: 14800 - DNA, 20 bp, synthetic construct
  source 1..20: mol_type = other DNA
atcacttccacccctggctc

SEQ ID NO: 14801 - DNA, 20 bp, synthetic construct
  source 1..20: mol_type = other DNA
ctgcacctagccatcatcca

SEQ ID NO: 14802 - DNA, 20 bp, synthetic construct
  source 1..20: mol_type = other DNA
cttgtagatatcctgatcat

SEQ ID NO: 14803 - DNA, 20 bp, synthetic construct
  source 1..20: mol_type = other DNA
ctcctccagccccggccctc

SEQ ID NO: 14804 - DNA, 20 bp, synthetic construct
  source 1..20: mol_type = other DNA
actcacgctttgccgttttg

SEQ ID NO: 14805 - DNA, 20 bp, synthetic construct
  source 1..20: mol_type = other DNA
tatttctgccctaaacaccc

SEQ ID NO: 14806 - DNA, 20 bp, synthetic construct
  source 1..20: mol_type = other DNA
ctgcacgtcctcccgggctg

SEQ ID NO: 14807 - DNA, 20 bp, synthetic construct
  source 1..20: mol_type = other DNA
tctgcctgctggtaggacag

SEQ ID NO: 14808 - DNA, 20 bp, synthetic construct
  source 1..20: mol_type = other DNA
ctcgctctcccggatgagga

SEQ ID NO: 14809 - DNA, 20 bp, synthetic construct
  source 1..20: mol_type = other DNA
taatgtctctcatgatggct

SEQ ID NO: 14810 - DNA, 20 bp, synthetic construct
  source 1..20: mol_type = other DNA
cggaagaaaggcctctgatt

SEQ ID NO: 14811 - DNA, 20 bp, synthetic construct
  source 1..20: mol_type = other DNA
tccatcaagtgcgtgttggt

SEQ ID NO: 14812 - DNA, 20 bp, synthetic construct
  source 1..20: mol_type = other DNA
acaatagccagcacaggaga

SEQ ID NO: 14813 - DNA, 20 bp, synthetic construct
  source 1..20: mol_type = other DNA
tgattgacatgatgctgctg

SEQ ID NO: 14814 - DNA, 20 bp, synthetic construct
  source 1..20: mol_type = other DNA
ttgggaaggttgagctctgc

SEQ ID NO: 14815 - DNA, 20 bp, synthetic construct
  source 1..20: mol_type = other DNA
aggaataagagggatgtgaa

SEQ ID NO: 14816 - DNA, 20 bp, synthetic construct
  source 1..20: mol_type = other DNA
ctctcggaggaagcgcatgt

SEQ ID NO: 14817 - DNA, 20 bp, synthetic construct
  source 1..20: mol_type = other DNA
cagctccagggcgctcagga

SEQ ID NO: 14818 - DNA, 20 bp, synthetic construct
  source 1..20: mol_type = other DNA
tcgagtacatgaattgcact

SEQ ID NO: 14819 - DNA, 20 bp, synthetic construct
  source 1..20: mol_type = other DNA
gcaggactacaaccgcgagg

SEQ ID NO: 14820 - DNA, 20 bp, synthetic construct
  source 1..20: mol_type = other DNA
cctcatcacgcactaccagc

SEQ ID NO: 14821 - DNA, 20 bp, synthetic construct
  source 1..20: mol_type = other DNA
gtcggtgcagaggtaatgat

SEQ ID NO: 14822 - DNA, 20 bp, synthetic construct
  source 1..20: mol_type = other DNA
ggagacacgtaggcaacaga

SEQ ID NO: 14823 - DNA, 20 bp, synthetic construct
  source 1..20: mol_type = other DNA
gggcaccaagctggacctgc

SEQ ID NO: 14824 - DNA, 20 bp, synthetic construct
  source 1..20: mol_type = other DNA
taccaggtagcaggtgagtg

SEQ ID NO: 14825 - DNA, 20 bp, synthetic construct
  source 1..20: mol_type = other DNA
aggtcagctcgtcctccctc

SEQ ID NO: 14826 - DNA, 20 bp, synthetic construct
  source 1..20: mol_type = other DNA
gataccggagtcgagtcacc

SEQ ID NO: 14827 - DNA, 20 bp, synthetic construct
  source 1..20: mol_type = other DNA
ttccgggatctgaatcacag

SEQ ID NO: 14828 - DNA, 20 bp, synthetic construct
  source 1..20: mol_type = other DNA
gcacggtaagaggcgagaca

SEQ ID NO: 14829 - DNA, 20 bp, synthetic construct
  source 1..20: mol_type = other DNA
ccattccagtgtaatcagtg

SEQ ID NO: 14830 - DNA, 20 bp, synthetic construct
  source 1..20: mol_type = other DNA
agcgggtccgcatcatctcg

SEQ ID NO: 14831 - DNA, 20 bp, synthetic construct
  source 1..20: mol_type = other DNA
caagcaggactacaaccgcg

SEQ ID NO: 14832 - DNA, 20 bp, synthetic construct
  source 1..20: mol_type = other DNA
ctgcagcttctccaacacat

SEQ ID NO: 14833 - DNA, 20 bp, synthetic construct
  source 1..20: mol_type = other DNA
gacaattactttggcacagg

SEQ ID NO: 14834 - DNA, 20 bp, synthetic construct
  source 1..20: mol_type = other DNA
ccaggttgtctgtaaagaca

SEQ ID NO: 14835 - DNA, 20 bp, synthetic construct
  source 1..20: mol_type = other DNA
catcacccagtcccgaacat

SEQ ID NO: 14836 - DNA, 20 bp, synthetic construct
  source 1..20: mol_type = other DNA
gaagccggccttgcacatgc

SEQ ID NO: 14837 - DNA, 20 bp, synthetic construct
  source 1..20: mol_type = other DNA
cattgcccagcagagaaaca

SEQ ID NO: 14838 - DNA, 20 bp, synthetic construct
  source 1..20: mol_type = other DNA
tcagtgcgtccagggataca

SEQ ID NO: 14839 - DNA, 20 bp, synthetic construct
  source 1..20: mol_type = other DNA
gggacgttgcagctctcaga

SEQ ID NO: 14840 - DNA, 20 bp, synthetic construct
  source 1..20: mol_type = other DNA
cagtcagtttccaggtaggg

SEQ ID NO: 14841 - DNA, 20 bp, synthetic construct
  source 1..20: mol_type = other DNA
atcaggtcgcgcaggcttgg

SEQ ID NO: 14842 - DNA, 20 bp, synthetic construct
  source 1..20: mol_type = other DNA
ggtcaacttgatgcctgaag

SEQ ID NO: 14843 - DNA, 20 bp, synthetic construct
  source 1..20: mol_type = other DNA
cggggcgccgacaagatcga

SEQ ID NO: 14844 - DNA, 20 bp, synthetic construct
  source 1..20: mol_type = other DNA
ctgcaagcgtttgctcacca

SEQ ID NO: 14845 - DNA, 20 bp, synthetic construct
  source 1..20: mol_type = other DNA
acacgaccgcaaggaggccc

SEQ ID NO: 14846 - DNA, 20 bp, synthetic construct
  source 1..20: mol_type = other DNA
ccgatcagagctgtcgctca

SEQ ID NO: 14847 - DNA, 20 bp, synthetic construct
  source 1..20: mol_type = other DNA
tcgccgaatagattcaacaa

SEQ ID NO: 14848 - DNA, 20 bp, synthetic construct
  source 1..20: mol_type = other DNA
tgacacggaagcggcagtcc

SEQ ID NO: 14849 - DNA, 20 bp, synthetic construct
  source 1..20: mol_type = other DNA
actggaagggccgttctcct

SEQ ID NO: 14850 - DNA, 20 bp, synthetic construct
  source 1..20: mol_type = other DNA
caggagaacattgcaggtat

SEQ ID NO: 14851 - DNA, 20 bp, synthetic construct
  source 1..20: mol_type = other DNA
acacgaggttctccttggtc

SEQ ID NO: 14852 - DNA, 20 bp, synthetic construct
  source 1..20: mol_type = other DNA
tcccagggtagctctccagc

SEQ ID NO: 14853 - DNA, 20 bp, synthetic construct
  source 1..20: mol_type = other DNA
cctgccacccacctgcgatg

SEQ ID NO: 14854 - DNA, 20 bp, synthetic construct
  source 1..20: mol_type = other DNA
ctgctgagcgggcctgggga

SEQ ID NO: 14855 - DNA, 20 bp, synthetic construct
  source 1..20: mol_type = other DNA
tgctgaccttgatggtgggg

SEQ ID NO: 14856 - DNA, 20 bp, synthetic construct
  source 1..20: mol_type = other DNA
aacttcagcagacacaggct

SEQ ID NO: 14857 - DNA, 20 bp, synthetic construct
  source 1..20: mol_type = other DNA
ccaggcggatatctacaagg

SEQ ID NO: 14858 - DNA, 20 bp, synthetic construct
  source 1..20: mol_type = other DNA
ccttcctccactgtggagag

SEQ ID NO: 14859 - DNA, 20 bp, synthetic construct
  source 1..20: mol_type = other DNA
catttgcggtggacgatgga

SEQ ID NO: 14860 - DNA, 20 bp, synthetic construct
  source 1..20: mol_type = other DNA
acaggacgtccctgctctcc

SEQ ID NO: 14861 - DNA, 20 bp, synthetic construct
  source 1..20: mol_type = other DNA
ccctttgatgaagagagtaa

SEQ ID NO: 14862 - DNA, 20 bp, synthetic construct
  source 1..20: mol_type = other DNA
ctcccagcaggggcagctgc

SEQ ID NO: 14863 - DNA, 20 bp, synthetic construct
  source 1..20: mol_type = other DNA
gaggttggcctcggccagga

SEQ ID NO: 14864 - DNA, 20 bp, synthetic construct
  source 1..20: mol_type = other DNA
cctgcaatgttctcctgctt

SEQ ID NO: 14865 - DNA, 20 bp, synthetic construct
  source 1..20: mol_type = other DNA
tgaccactggctgaattcaa

SEQ ID NO: 14866 - DNA, 20 bp, synthetic construct
  source 1..20: mol_type = other DNA
ggagatcaccacaactggca

SEQ ID NO: 14867 - DNA, 20 bp, synthetic construct
  source 1..20: mol_type = other DNA
gcagcttgacacacggtacc

SEQ ID NO: 14868 - DNA, 20 bp, synthetic construct
  source 1..20: mol_type = other DNA
ggagtctgagagatggagag

SEQ ID NO: 14869 - DNA, 20 bp, synthetic construct
  source 1..20: mol_type = other DNA
ccaggacaaactacatcgca

SEQ ID NO: 14870 - DNA, 20 bp, synthetic construct
  source 1..20: mol_type = other DNA
caagttcaatgtcagctatg

SEQ ID NO: 14871 - DNA, 20 bp, synthetic construct
  source 1..20: mol_type = other DNA
ccatgagggtgagtgggtgt

SEQ ID NO: 14872 - DNA, 20 bp, synthetic construct
  source 1..20: mol_type = other DNA
ctactcatctgtaagcgcag

SEQ ID NO: 14873 - DNA, 20 bp, synthetic construct
  source 1..20: mol_type = other DNA
ccacagcactttgtcaggca

SEQ ID NO: 14874 - DNA, 20 bp, synthetic construct
  source 1..20: mol_type = other DNA
gtgctgaaataaagaaaaag

SEQ ID NO: 14875 - DNA, 20 bp, synthetic construct
  source 1..20: mol_type = other DNA
ggtggtctgacagttcgcac

SEQ ID NO: 14876 - DNA, 20 bp, synthetic construct
  source 1..20: mol_type = other DNA
ggatcaggtcgcgcaggctt

SEQ ID NO: 14877 - DNA, 20 bp, synthetic construct
  source 1..20: mol_type = other DNA
agtctcccaagcggtcggct

SEQ ID NO: 14878 - DNA, 20 bp, synthetic construct
  source 1..20: mol_type = other DNA
tatctgaagctgaaggcgga

SEQ ID NO: 14879 - DNA, 20 bp, synthetic construct
  source 1..20: mol_type = other DNA
ctaaaggcggggcattgccc

SEQ ID NO: 14880 - DNA, 20 bp, synthetic construct
  source 1..20: mol_type = other DNA
cctgtggggcaacggggaaa

SEQ ID NO: 14881 - DNA, 20 bp, synthetic construct
  source 1..20: mol_type = other DNA
tccacagtgcgctttgccgc

SEQ ID NO: 14882 - DNA, 20 bp, synthetic construct
  source 1..20: mol_type = other DNA
gaagcagggcagcatgtccc

SEQ ID NO: 14883 - DNA, 20 bp, synthetic construct
  source 1..20: mol_type = other DNA
ccattaacttcagcagacac

SEQ ID NO: 14884 - DNA, 20 bp, synthetic construct
  source 1..20: mol_type = other DNA
ggttcttaggtaggtggggt

SEQ ID NO: 14885 - DNA, 20 bp, synthetic construct
  source 1..20: mol_type = other DNA
cgaaacctgcgggttcacag

SEQ ID NO: 14886 - DNA, 20 bp, synthetic construct
  source 1..20: mol_type = other DNA
cttgcctccttgactcttga

SEQ ID NO: 14887 - DNA, 20 bp, synthetic construct
  source 1..20: mol_type = other DNA
catttggtgagtgtcatgct

SEQ ID NO: 14888 - DNA, 20 bp, synthetic construct
  source 1..20: mol_type = other DNA
tcttgttcaaagcgcaccgc

SEQ ID NO: 14889 - DNA, 20 bp, synthetic construct
  source 1..20: mol_type = other DNA
gcaggagaacattgcaggta

SEQ ID NO: 14890 - DNA, 20 bp, synthetic construct
  source 1..20: mol_type = other DNA
gcccaccaacacgcacttga

SEQ ID NO: 14891 - DNA, 20 bp, synthetic construct
  source 1..20: mol_type = other DNA
gacgatggagtcgtttcccg

SEQ ID NO: 14892 - DNA, 20 bp, synthetic construct
  source 1..20: mol_type = other DNA
cccgttgtagtaccctgggt

SEQ ID NO: 14893 - DNA, 20 bp, synthetic construct
  source 1..20: mol_type = other DNA
caactataaggactgtgaga

SEQ ID NO: 14894 - DNA, 20 bp, synthetic construct
  source 1..20: mol_type = other DNA
tggcaggtactggaattcca

SEQ ID NO: 14895 - DNA, 20 bp, synthetic construct
  source 1..20: mol_type = other DNA
ttgtgtatggttccacggac

SEQ ID NO: 14896 - DNA, 20 bp, synthetic construct
  source 1..20: mol_type = other DNA
tcccaccaccacacacttga

SEQ ID NO: 14897 - DNA, 20 bp, synthetic construct
  source 1..20: mol_type = other DNA
ggtctcaaacatgatctgta

SEQ ID NO: 14898 - DNA, 20 bp, synthetic construct
  source 1..20: mol_type = other DNA
agagcccgcaggcgttgcac

SEQ ID NO: 14899 - DNA, 20 bp, synthetic construct
  source 1..20: mol_type = other DNA
ccaccacaaccacactctgg

SEQ ID NO: 14900 - DNA, 20 bp, synthetic construct
  source 1..20: mol_type = other DNA
ctagaaaaggagaggcgagg

SEQ ID NO: 14901 - DNA, 20 bp, synthetic construct
  source 1..20: mol_type = other DNA
tgtcaaatgaacttcccctt

SEQ ID NO: 14902 - DNA, 20 bp, synthetic construct
  source 1..20: mol_type = other DNA
cgcggcgcagtacccgctgc

SEQ ID NO: 14903 - DNA, 20 bp, synthetic construct
  source 1..20: mol_type = other DNA
ccttcatcgagcagggcaag

SEQ ID NO: 14904 - DNA, 20 bp, synthetic construct
  source 1..20: mol_type = other DNA
gctccttctttgccctggaa

SEQ ID NO: 14905 - DNA, 20 bp, synthetic construct
  source 1..20: mol_type = other DNA
gaagcatttgcggtggacga

SEQ ID NO: 14906 - DNA, 20 bp, synthetic construct
  source 1..20: mol_type = other DNA
agcactgcctgctggaggct

SEQ ID NO: 14907 - DNA, 20 bp, synthetic construct
  source 1..20: mol_type = other DNA
tgcagaagtaaatatctgtt

SEQ ID NO: 14908 - DNA, 20 bp, synthetic construct
  source 1..20: mol_type = other DNA
tttgcagaccccaagtcccg

SEQ ID NO: 14909 - DNA, 20 bp, synthetic construct
  source 1..20: mol_type = other DNA
caatgagcttctccacctgc

SEQ ID NO: 14910 - DNA, 20 bp, synthetic construct
  source 1..20: mol_type = other DNA
ccaggaggcagaggaagtgg

SEQ ID NO: 14911 - DNA, 20 bp, synthetic construct
  source 1..20: mol_type = other DNA
ggggtcacgattgtgcgtgc

SEQ ID NO: 14912 - DNA, 20 bp, synthetic construct
  source 1..20: mol_type = other DNA
tttggacagatctattccag

SEQ ID NO: 14913 - DNA, 20 bp, synthetic construct
  source 1..20: mol_type = other DNA
tgaaaaccgaagcaactcag

SEQ ID NO: 14914 - DNA, 20 bp, synthetic construct
  source 1..20: mol_type = other DNA
acctgcaatgttctcctgct

SEQ ID NO: 14915 - DNA, 20 bp, synthetic construct
  source 1..20: mol_type = other DNA
cttggaacacgaccgcaagg

SEQ ID NO: 14916 - DNA, 20 bp, synthetic construct
  source 1..20: mol_type = other DNA
ccgctcctgcgccacggagg

SEQ ID NO: 14917 - DNA, 20 bp, synthetic construct
  source 1..20: mol_type = other DNA
gtccatggccggggtcccgg

SEQ ID NO: 14918 - DNA, 20 bp, synthetic construct
  source 1..20: mol_type = other DNA
ctggaaaggtaccccagtga

SEQ ID NO: 14919 - DNA, 20 bp, synthetic construct
  source 1..20: mol_type = other DNA
ggaagatctcatccccaccg

SEQ ID NO: 14920 - DNA, 20 bp, synthetic construct
  source 1..20: mol_type = other DNA
ggaaggttctaatgttctta

SEQ ID NO: 14921 - DNA, 20 bp, synthetic construct
  source 1..20: mol_type = other DNA
ccctgagggagcagagatgt

SEQ ID NO: 14922 - DNA, 20 bp, synthetic construct
  source 1..20: mol_type = other DNA
ctccatgccctgcgggcggg

SEQ ID NO: 14923 - DNA, 20 bp, synthetic construct
  source 1..20: mol_type = other DNA
catgaggatgttgtcaaagt

SEQ ID NO: 14924 - DNA, 20 bp, synthetic construct
  source 1..20: mol_type = other DNA
gtacagcaggacttgggtgc

SEQ ID NO: 14925 - DNA, 20 bp, synthetic construct
  source 1..20: mol_type = other DNA
gctccgcgtccttgcggctc

SEQ ID NO: 14926 - DNA, 20 bp, synthetic construct
  source 1..20: mol_type = other DNA
gtgaactggcccaggccctc

SEQ ID NO: 14927 - DNA, 20 bp, synthetic construct
  source 1..20: mol_type = other DNA
tggggactgcaggtgggaga

SEQ ID NO: 14928 - DNA, 20 bp, synthetic construct
  source 1..20: mol_type = other DNA
tctggttgctggggctcatg

SEQ ID NO: 14929 - DNA, 20 bp, synthetic construct
  source 1..20: mol_type = other DNA
taatccgcgtcatcttccac

SEQ ID NO: 14930 - DNA, 20 bp, synthetic construct
  source 1..20: mol_type = other DNA
cagcagtgaccagggcaacg

SEQ ID NO: 14931 - DNA, 20 bp, synthetic construct
  source 1..20: mol_type = other DNA
ggctgtaggggatgaggctg

SEQ ID NO: 14932 - DNA, 20 bp, synthetic construct
  source 1..20: mol_type = other DNA
gggccagctctgtccacttg

SEQ ID NO: 14933 - DNA, 20 bp, synthetic construct
  source 1..20: mol_type = other DNA
caccagatagttgagggcgt

SEQ ID NO: 14934 - DNA, 20 bp, synthetic construct
  source 1..20: mol_type = other DNA
ttgggacagcagaagtcagg

SEQ ID NO: 14935 - DNA, 20 bp, synthetic construct
  source 1..20: mol_type = other DNA
acccgcagcacttgtcccag

SEQ ID NO: 14936 - DNA, 20 bp, synthetic construct
  source 1..20: mol_type = other DNA
cagctggactgtgagtgact

SEQ ID NO: 14937 - DNA, 20 bp, synthetic construct
  source 1..20: mol_type = other DNA
ccagactgaccagcgggaga

SEQ ID NO: 14938 - DNA, 20 bp, synthetic construct
  source 1..20: mol_type = other DNA
cactttcacttgggtggaga

SEQ ID NO: 14939 - DNA, 20 bp, synthetic construct
  source 1..20: mol_type = other DNA
gtgacaccatgtaccaggac

SEQ ID NO: 14940 - DNA, 20 bp, synthetic construct
  source 1..20: mol_type = other DNA
caacgagtacacagccaggg

SEQ ID NO: 14941 - DNA, 20 bp, synthetic construct
  source 1..20: mol_type = other DNA
gcattgccgtgtccagcaag

SEQ ID NO: 14942 - DNA, 20 bp, synthetic construct
  source 1..20: mol_type = other DNA
tcttacctgtcacaggacat

SEQ ID NO: 14943 - DNA, 20 bp, synthetic construct
  source 1..20: mol_type = other DNA
tataaagcattatcacatca

SEQ ID NO: 14944 - DNA, 20 bp, synthetic construct
  source 1..20: mol_type = other DNA
accccgatcgcccagaacag

SEQ ID NO: 14945 - DNA, 20 bp, synthetic construct
  source 1..20: mol_type = other DNA
cgtatcctcctgcctagcgc

SEQ ID NO: 14946 - DNA, 20 bp, synthetic construct
  source 1..20: mol_type = other DNA
accactgggcaggtgggtgg

SEQ ID NO: 14947 - DNA, 20 bp, synthetic construct
  source 1..20: mol_type = other DNA
gccgaagtgcagagcaaccg

SEQ ID NO: 14948 - DNA, 20 bp, synthetic construct
  source 1..20: mol_type = other DNA
tcaggttggacttttctatg

SEQ ID NO: 14949 - DNA, 20 bp, synthetic construct
  source 1..20: mol_type = other DNA
cggtgctacaactgggctgg

SEQ ID NO: 14950 - DNA, 20 bp, synthetic construct
  source 1..20: mol_type = other DNA
gcaactacgcctgccgccgg

SEQ ID NO: 14951 - DNA, 20 bp, synthetic construct
  source 1..20: mol_type = other DNA
ctgcagggaacctccaccat

SEQ ID NO: 14952 - DNA, 20 bp, synthetic construct
  source 1..20: mol_type = other DNA
tcacttcctaaaggagatga

SEQ ID NO: 14953 - DNA, 20 bp, synthetic construct
  source 1..20: mol_type = other DNA
cgaatgacggctcggaagga

SEQ ID NO: 14954 - DNA, 20 bp, synthetic construct
  source 1..20: mol_type = other DNA
ggtcagctgctgcacagtgt

SEQ ID NO: 14955 - DNA, 20 bp, synthetic construct
  source 1..20: mol_type = other DNA
caatcttgactctcaatcca

SEQ ID NO: 14956 - DNA, 20 bp, synthetic construct
  source 1..20: mol_type = other DNA
gaagaagtaccacatcgatg

SEQ ID NO: 14957 - DNA, 20 bp, synthetic construct
  source 1..20: mol_type = other DNA
ctgaagcatctgcgaggacg

SEQ ID NO: 14958 - DNA, 20 bp, synthetic construct
  source 1..20: mol_type = other DNA
tgtccactgccgggggtctg

SEQ ID NO: 14959 - DNA, 20 bp, synthetic construct
  source 1..20: mol_type = other DNA
ggtgcaggagctgcagaaga

SEQ ID NO: 14960 - DNA, 20 bp, synthetic construct
  source 1..20: mol_type = other DNA
aaatgtcagacttgcaacaa

SEQ ID NO: 14961 - DNA, 20 bp, synthetic construct
  source 1..20: mol_type = other DNA
gccatgagtgcaacttgcct

SEQ ID NO: 14962 - DNA, 20 bp, synthetic construct
  source 1..20: mol_type = other DNA
cctgagagggaaatgagggc

SEQ ID NO: 14963 - DNA, 20 bp, synthetic construct
  source 1..20: mol_type = other DNA
ggcgaggggagatctatggc

SEQ ID NO: 14964 - DNA, 20 bp, synthetic construct
  source 1..20: mol_type = other DNA
tccactaccggatgaggtat

SEQ ID NO: 14965 - DNA, 20 bp, synthetic construct
  source 1..20: mol_type = other DNA
ttcatgatccagttcttgaa

SEQ ID NO: 14966 - DNA, 20 bp, synthetic construct
  source 1..20: mol_type = other DNA
aatggagccacccaatccac

SEQ ID NO: 14967 - DNA, 20 bp, synthetic construct
  source 1..20: mol_type = other DNA
tctactcatctgtaagcgca

SEQ ID NO: 14968 - DNA, 20 bp, synthetic construct
  source 1..20: mol_type = other DNA
agcgggcagcagcacatgca

SEQ ID NO: 14969 - DNA, 20 bp, synthetic construct
  source 1..20: mol_type = other DNA
tcacttccacccctggctca

SEQ ID NO: 14970 - DNA, 20 bp, synthetic construct
  source 1..20: mol_type = other DNA
tgatcccaggttccaattgg

SEQ ID NO: 14971 - DNA, 20 bp, synthetic construct
  source 1..20: mol_type = other DNA
tgcacctagccatcatccac

SEQ ID NO: 14972 - DNA, 20 bp, synthetic construct
  source 1..20: mol_type = other DNA
ggaactgcagaaagataaga

SEQ ID NO: 14973 - DNA, 20 bp, synthetic construct
  source 1..20: mol_type = other DNA
acggtggggatgtactctcc

SEQ ID NO: 14974 - DNA, 20 bp, synthetic construct
  source 1..20: mol_type = other DNA
tgtctggggagtctgagaga

SEQ ID NO: 14975 - DNA, 20 bp, synthetic construct
  source 1..20: mol_type = other DNA
gcagaagtcatagcgggctt

SEQ ID NO: 14976 - DNA, 20 bp, synthetic construct
  source 1..20: mol_type = other DNA
ctgtcctcaagttcctctat

SEQ ID NO: 14977 - DNA, 20 bp, synthetic construct
  source 1..20: mol_type = other DNA
gaggccaaagtcgctgatct

SEQ ID NO: 14978 - DNA, 20 bp, synthetic construct
  source 1..20: mol_type = other DNA
cttgaaggggaactgcaagg

SEQ ID NO: 14979 - DNA, 20 bp, synthetic construct
  source 1..20: mol_type = other DNA
cgcgccacatgaagacgcac

SEQ ID NO: 14980 - DNA, 20 bp, synthetic construct
  source 1..20: mol_type = other DNA
acttgcctccttgactcttg

SEQ ID NO: 14981 - DNA, 20 bp, synthetic construct
  source 1..20: mol_type = other DNA
caggtgggtcttgagattgc

SEQ ID NO: 14982 - DNA, 20 bp, synthetic construct
  source 1..20: mol_type = other DNA
gcaggcagtgcttgttctgc

SEQ ID NO: 14983 - DNA, 20 bp, synthetic construct
  source 1..20: mol_type = other DNA
caggcacagttgccgattac

SEQ ID NO: 14984 - DNA, 20 bp, synthetic construct
  source 1..20: mol_type = other DNA
accttgatcttcattgtgct

SEQ ID NO: 14985 - DNA, 20 bp, synthetic construct
  source 1..20: mol_type = other DNA
cctgcgggttcacagagggt

SEQ ID NO: 14986 - DNA, 20 bp, synthetic construct
  source 1..20: mol_type = other DNA
ggcccaccgcactcgctgtt

SEQ ID NO: 14987 - DNA, 20 bp, synthetic construct
  source 1..20: mol_type = other DNA
ctatggggtcaccatgtggg

SEQ ID NO: 14988 - DNA, 20 bp, synthetic construct
  source 1..20: mol_type = other DNA
tccctgagtaagtgtccagg

SEQ ID NO: 14989 - DNA, 20 bp, synthetic construct
  source 1..20: mol_type = other DNA
acagaactggtgggaggtac

SEQ ID NO: 14990 - DNA, 20 bp, synthetic construct
  source 1..20: mol_type = other DNA
tttctccaggaaaacatggc

SEQ ID NO: 14991 - DNA, 20 bp, synthetic construct
  source 1..20: mol_type = other DNA
gatcaggtcgcgcaggcttg

SEQ ID NO: 14992 - DNA, 20 bp, synthetic construct
  source 1..20: mol_type = other DNA
cccggaggtgattcagaacc

SEQ ID NO: 14993 - DNA, 20 bp, synthetic construct
  source 1..20: mol_type = other DNA
gggtgtagatgacctgtgac

SEQ ID NO: 14994 - DNA, 20 bp, synthetic construct
  source 1..20: mol_type = other DNA
cagcggcacctacctctgtg

SEQ ID NO: 14995 - DNA, 20 bp, synthetic construct
  source 1..20: mol_type = other DNA
tcatggagatggctgggggc

SEQ ID NO: 14996 - DNA, 20 bp, synthetic construct
  source 1..20: mol_type = other DNA
ccgtaagtggggacccgtcg

SEQ ID NO: 14997 - DNA, 20 bp, synthetic construct
  source 1..20: mol_type = other DNA
ctcgggcaggcagatgagca

SEQ ID NO: 14998 - DNA, 20 bp, synthetic construct
  source 1..20: mol_type = other DNA
caaggtgagctggacagggt

SEQ ID NO: 14999 - DNA, 20 bp, synthetic construct
  source 1..20: mol_type = other DNA
ggagcagcgcaagaccatct

SEQ ID NO: 15000 - DNA, 20 bp, synthetic construct
  source 1..20: mol_type = other DNA
ggaaccattatccatgtgaa

SEQ ID NO: 15001 - DNA, 20 bp, synthetic construct
  source 1..20: mol_type = other DNA
ccagcttatgttgcatctgt

SEQ ID NO: 15002 - DNA, 20 bp, synthetic construct
  source 1..20: mol_type = other DNA
ccaataatgcagagtgaggt

SEQ ID NO: 15003 - DNA, 20 bp, synthetic construct
  source 1..20: mol_type = other DNA
agtgcagctccaggcggcag

SEQ ID NO: 15004 - DNA, 20 bp, synthetic construct
  source 1..20: mol_type = other DNA
cacgcactgagccaggtcct

SEQ ID NO: 15005 - DNA, 20 bp, synthetic construct
  source 1..20: mol_type = other DNA
ggcgcaggttgacctcacgc

SEQ ID NO: 15006 - DNA, 20 bp, synthetic construct
  source 1..20: mol_type = other DNA
cgttctcccacaccagcccg

SEQ ID NO: 15007 - DNA, 20 bp, synthetic construct
  source 1..20: mol_type = other DNA
ttgaaggagcagggactgga

SEQ ID NO: 15008 - DNA, 20 bp, synthetic construct
  source 1..20: mol_type = other DNA
agcgggcacctgaagagatg

SEQ ID NO: 15009 - DNA, 20 bp, synthetic construct
  source 1..20: mol_type = other DNA
gtcgaaggcctcatcccgca

SEQ ID NO: 15010 - DNA, 20 bp, synthetic construct
  source 1..20: mol_type = other DNA
aagagagattctatgaaagc

SEQ ID NO: 15011 - DNA, 20 bp, synthetic construct
  source 1..20: mol_type = other DNA
cgtgtcacacaactgcccaa

SEQ ID NO: 15012 - DNA, 20 bp, synthetic construct
  source 1..20: mol_type = other DNA
gccgacttacgatttccgag

SEQ ID NO: 15013 - DNA, 20 bp, synthetic construct
  source 1..20: mol_type = other DNA
cctggagcacctctttgccc

SEQ ID NO: 15014 - DNA, 20 bp, synthetic construct
  source 1..20: mol_type = other DNA
ctgagctgtaccttgaaagt

SEQ ID NO: 15015 - DNA, 20 bp, synthetic construct
  source 1..20: mol_type = other DNA
gcttccagctggctggcacc

SEQ ID NO: 15016 - DNA, 20 bp, synthetic construct
  source 1..20: mol_type = other DNA
caaaccaaacctcagagtac

SEQ ID NO: 15017 - DNA, 20 bp, synthetic construct
  source 1..20: mol_type = other DNA
ctatgctcgctgcctgcgga

SEQ ID NO: 15018 - DNA, 20 bp, synthetic construct
  source 1..20: mol_type = other DNA
gcagcgcaagaccatctggg

SEQ ID NO: 15019 - DNA, 20 bp, synthetic construct
  source 1..20: mol_type = other DNA
agcagcttctgcctctggtc

SEQ ID NO: 15020 - DNA, 20 bp, synthetic construct
  source 1..20: mol_type = other DNA
catggagatggatgtgatgt

SEQ ID NO: 15021 - DNA, 20 bp, synthetic construct
  source 1..20: mol_type = other DNA
tggcccagacagcagacgcc

SEQ ID NO: 15022 - DNA, 20 bp, synthetic construct
  source 1..20: mol_type = other DNA
gatgatgtagatgggctcct

SEQ ID NO: 15023 - DNA, 20 bp, synthetic construct
  source 1..20: mol_type = other DNA
tcggaagaaaggcctctgat

SEQ ID NO: 15024 - DNA, 20 bp, synthetic construct
  source 1..20: mol_type = other DNA
tgagctccacaatgtctcca

SEQ ID NO: 15025 - DNA, 20 bp, synthetic construct
  source 1..20: mol_type = other DNA
acgccagggtgagattctgc

SEQ ID NO: 15026 - DNA, 20 bp, synthetic construct
  source 1..20: mol_type = other DNA
tgctgtcccaggtcaactac

SEQ ID NO: 15027 - DNA, 20 bp, synthetic construct
  source 1..20: mol_type = other DNA
tcgctcagaggtcctgggct

SEQ ID NO: 15028 - DNA, 20 bp, synthetic construct
  source 1..20: mol_type = other DNA
actgagctgtgcgtagcgca

SEQ ID NO: 15029 - DNA, 20 bp, synthetic construct
  source 1..20: mol_type = other DNA
ggaggagctgctgggctctg

SEQ ID NO: 15030 - DNA, 20 bp, synthetic construct
  source 1..20: mol_type = other DNA
gtcagtttctgagactgcaa

SEQ ID NO: 15031 - DNA, 20 bp, synthetic construct
  source 1..20: mol_type = other DNA
tggccagtgccaggccctgc

SEQ ID NO: 15032 - DNA, 20 bp, synthetic construct
  source 1..20: mol_type = other DNA
cggtgaggccagaatcaggg

SEQ ID NO: 15033 - DNA, 20 bp, synthetic construct
  source 1..20: mol_type = other DNA
tcgccgccacagtggggtcg

SEQ ID NO: 15034 - DNA, 20 bp, synthetic construct
  source 1..20: mol_type = other DNA
ggaatagagaaggaggcggc

SEQ ID NO: 15035 - DNA, 20 bp, synthetic construct
  source 1..20: mol_type = other DNA
aggtgagcaggtcagggtcg

SEQ ID NO: 15036 - DNA, 20 bp, synthetic construct
  source 1..20: mol_type = other DNA
tcccacagccccaggttcac

SEQ ID NO: 15037 - DNA, 20 bp, synthetic construct
  source 1..20: mol_type = other DNA
gaccccgatcgcccagaaca

SEQ ID NO: 15038 - DNA, 20 bp, synthetic construct
  source 1..20: mol_type = other DNA
ctgcagggtgtccatatcag

SEQ ID NO: 15039 - DNA, 20 bp, synthetic construct
  source 1..20: mol_type = other DNA
gccatagacgaggaacctac

SEQ ID NO: 15040 - DNA, 20 bp, synthetic construct
  source 1..20: mol_type = other DNA
ggcagggagtgtgtgaactg

SEQ ID NO: 15041 - DNA, 20 bp, synthetic construct
  source 1..20: mol_type = other DNA
gaggcactcacatggacata

SEQ ID NO: 15042 - DNA, 20 bp, synthetic construct
  source 1..20: mol_type = other DNA
aggtgccgctgtcattgcgc

SEQ ID NO: 15043 - DNA, 20 bp, synthetic construct
  source 1..20: mol_type = other DNA
cttccagtgcaatcagtgcg

SEQ ID NO: 15044 - DNA, 20 bp, synthetic construct
  source 1..20: mol_type = other DNA
gtgattcagaacctggagcg

SEQ ID NO: 15045 - DNA, 20 bp, synthetic construct
  source 1..20: mol_type = other DNA
ctggaggagactggcggagc

SEQ ID NO: 15046 - DNA, 20 bp, synthetic construct
  source 1..20: mol_type = other DNA
ttcgtgcttctgtctattga

SEQ ID NO: 15047 - DNA, 20 bp, synthetic construct
  source 1..20: mol_type = other DNA
cccagagtaaagtttgcgct

SEQ ID NO: 15048 - DNA, 20 bp, synthetic construct
  source 1..20: mol_type = other DNA
tggatcaggtcgcgcaggct

SEQ ID NO: 15049 - DNA, 20 bp, synthetic construct
  source 1..20: mol_type = other DNA
catgaggttggcccaggcaa

SEQ ID NO: 15050 - DNA, 20 bp, synthetic construct
  source 1..20: mol_type = other DNA
gcacctctgccgcagcctcg

SEQ ID NO: 15051 - DNA, 20 bp, synthetic construct
  source 1..20: mol_type = other DNA
agccaacctggaaacagacg

SEQ ID NO: 15052 - DNA, 20 bp, synthetic construct
  source 1..20: mol_type = other DNA
cctggctgccaggcaggtaa

SEQ ID NO: 15053 - DNA, 20 bp, synthetic construct
  source 1..20: mol_type = other DNA
tgacaggcttcgaatggtat

SEQ ID NO: 15054 - DNA, 20 bp, synthetic construct
  source 1..20: mol_type = other DNA
caatgaccttacactgacgc

SEQ ID NO: 15055 - DNA, 20 bp, synthetic construct
  source 1..20: mol_type = other DNA
agtgaaagcagcaaagaagg

SEQ ID NO: 15056 - DNA, 20 bp, synthetic construct
  source 1..20: mol_type = other DNA
gtctgcctgctggtaggaca

SEQ ID NO: 15057 - DNA, 20 bp, synthetic construct
  source 1..20: mol_type = other DNA
accagttttctagccgatct

SEQ ID NO: 15058 - DNA, 20 bp, synthetic construct
  source 1..20: mol_type = other DNA
tatagcggctgagcatgtgc

SEQ ID NO: 15059 - DNA, 20 bp, synthetic construct
  source 1..20: mol_type = other DNA
ggaacagatgctcactgcgc

SEQ ID NO: 15060 - DNA, 20 bp, synthetic construct
  source 1..20: mol_type = other DNA
gcacttcttctgcaaggagg

SEQ ID NO: 15061 - DNA, 20 bp, synthetic construct
  source 1..20: mol_type = other DNA
ggccacaggtgagcaggtca

SEQ ID NO: 15062 - DNA, 20 bp, synthetic construct
  source 1..20: mol_type = other DNA
tgtgcccccccagagaccga

SEQ ID NO: 15063 - DNA, 20 bp, synthetic construct
  source 1..20: mol_type = other DNA
caggttgtctgtaaagacaa

SEQ ID NO: 15064 - DNA, 20 bp, synthetic construct
  source 1..20: mol_type = other DNA
ttacccctagaggaggctgc

SEQ ID NO: 15065 - DNA, 20 bp, synthetic construct
  source 1..20: mol_type = other DNA
gcagtgttctcttaaggtac

SEQ ID NO: 15066 - DNA, 20 bp, synthetic construct
  source 1..20: mol_type = other DNA
agcacagccagtggccgctc

SEQ ID NO: 15067 - DNA, 20 bp, synthetic construct
  source 1..20: mol_type = other DNA
ccccactgcaaggtgacccc

SEQ ID NO: 15068 - DNA, 20 bp, synthetic construct
  source 1..20: mol_type = other DNA
gtcttttgggatcctgctga

SEQ ID NO: 15069 - DNA, 20 bp, synthetic construct
  source 1..20: mol_type = other DNA
catgagctcgtgaacctgag

SEQ ID NO: 15070 - DNA, 20 bp, synthetic construct
  source 1..20: mol_type = other DNA
gtacgtgcagaaaactctca

SEQ ID NO: 15071 - DNA, 20 bp, synthetic construct
  source 1..20: mol_type = other DNA
gtgggacactgctgggcagg

SEQ ID NO: 15072 - DNA, 20 bp, synthetic construct
  source 1..20: mol_type = other DNA
gggaaacttggcccctaagg

SEQ ID NO: 15073 - DNA, 20 bp, synthetic construct
  source 1..20: mol_type = other DNA
gaagcggactttaaagttcg

SEQ ID NO: 15074 - DNA, 20 bp, synthetic construct
  source 1..20: mol_type = other DNA
ctgagggcaagaggtaatcc

SEQ ID NO: 15075 - DNA, 20 bp, synthetic construct
  source 1..20: mol_type = other DNA
cgccagaagccattaactac

SEQ ID NO: 15076 - DNA, 20 bp, synthetic construct
  source 1..20: mol_type = other DNA
agaccaccacaaccacactc

SEQ ID NO: 15077 - DNA, 20 bp, synthetic construct
  source 1..20: mol_type = other DNA
ggatacagtcctaaggatgc

SEQ ID NO: 15078 - DNA, 20 bp, synthetic construct
  source 1..20: mol_type = other DNA
ccaggtcttcatcaaataca

SEQ ID NO: 15079 - DNA, 20 bp, synthetic construct
  source 1..20: mol_type = other DNA
agtggactgctgggacggcc

SEQ ID NO: 15080 - DNA, 20 bp, synthetic construct
  source 1..20: mol_type = other DNA
cgtccatggccggggtcccg

SEQ ID NO: 15081 - DNA, 20 bp, synthetic construct
  source 1..20: mol_type = other DNA
gcgctcagtttccagaacct

SEQ ID NO: 15082 - DNA, 20 bp, synthetic construct
  source 1..20: mol_type = other DNA
gacggtatgttatgcaaggc

SEQ ID NO: 15083 - DNA, 20 bp, synthetic construct
  source 1..20: mol_type = other DNA
ttcaggaaaccacttggtta

SEQ ID NO: 15084 - DNA, 20 bp, synthetic construct
  source 1..20: mol_type = other DNA
gcagaaaggtatacatcagg

SEQ ID NO: 15085 - DNA, 20 bp, synthetic construct
  source 1..20: mol_type = other DNA
ccggggcgccgacaagatcg

SEQ ID NO: 15086 - DNA, 20 bp, synthetic construct
  source 1..20: mol_type = other DNA
caccaccagcacaggggtac

SEQ ID NO: 15087 - DNA, 20 bp, synthetic construct
  source 1..20: mol_type = other DNA
agtctcttaccattcttggt

SEQ ID NO: 15088 - DNA, 20 bp, synthetic construct
  source 1..20: mol_type = other DNA
ggacgtgcagatgaagctgg

SEQ ID NO: 15089 - DNA, 20 bp, synthetic construct
  source 1..20: mol_type = other DNA
tgtcccaggtgagccctccg

SEQ ID NO: 15090 - DNA, 20 bp, synthetic construct
  source 1..20: mol_type = other DNA
tcaaatgaacttccccttgg

SEQ ID NO: 15091 - DNA, 20 bp, synthetic construct
  source 1..20: mol_type = other DNA
ccaccaggtatctggaaaga

SEQ ID NO: 15092 - DNA, 20 bp, synthetic construct
  source 1..20: mol_type = other DNA
agggcacagcacggcccgga

SEQ ID NO: 15093 - DNA, 20 bp, synthetic construct
  source 1..20: mol_type = other DNA
ccagagcatcgtgagtgagc

SEQ ID NO: 15094 - DNA, 20 bp, synthetic construct
  source 1..20: mol_type = other DNA
ggaggcctaccgagtgattc

SEQ ID NO: 15095 - DNA, 20 bp, synthetic construct
  source 1..20: mol_type = other DNA
tgcatcagctccttggtctg

SEQ ID NO: 15096 - DNA, 20 bp, synthetic construct
  source 1..20: mol_type = other DNA
ggctctctgagaacattcct

SEQ ID NO: 15097 - DNA, 20 bp, synthetic construct
  source 1..20: mol_type = other DNA
ccacctgcagaaacactacc

SEQ ID NO: 15098 - DNA, 20 bp, synthetic construct
  source 1..20: mol_type = other DNA
ccttccagtgcaatcagtgc

SEQ ID NO: 15099 - DNA, 20 bp, synthetic construct
  source 1..20: mol_type = other DNA
caacagattgcctgcattgg

SEQ ID NO: 15100 - DNA, 20 bp, synthetic construct
  source 1..20: mol_type = other DNA
ggccacccagactgaccagc

SEQ ID NO: 15101 - DNA, 20 bp, synthetic construct
  source 1..20: mol_type = other DNA
gtgttccaagatgtccagga

SEQ ID NO: 15102 - DNA, 20 bp, synthetic construct
  source 1..20: mol_type = other DNA
tcacctgggtcatcttctcg

SEQ ID NO: 15103 - DNA, 20 bp, synthetic construct
  source 1..20: mol_type = other DNA
gcgccaaggtgagctggaca

SEQ ID NO: 15104 - DNA, 20 bp, synthetic construct
  source 1..20: mol_type = other DNA
gctggttcggctctacgctg

SEQ ID NO: 15105 - DNA, 20 bp, synthetic construct
  source 1..20: mol_type = other DNA
ctaccccaagggccagcgac

SEQ ID NO: 15106 - DNA, 20 bp, synthetic construct
  source 1..20: mol_type = other DNA
ccaatacttcaagaaggtgc

SEQ ID NO: 15107 - DNA, 20 bp, synthetic construct
  source 1..20: mol_type = other DNA
ggcaggtactggaattccat

SEQ ID NO: 15108 - DNA, 20 bp, synthetic construct
  source 1..20: mol_type = other DNA
tctgcagggtgtccatatca

SEQ ID NO: 15109 - DNA, 20 bp, synthetic construct
  source 1..20: mol_type = other DNA
catgcactgttgaatcagca

SEQ ID NO: 15110 - DNA, 20 bp, synthetic construct
  source 1..20: mol_type = other DNA
tgcccacggccctgaaagac

SEQ ID NO: 15111 - DNA, 20 bp, synthetic construct
  source 1..20: mol_type = other DNA
cctcacctcctgttctccct

SEQ ID NO: 15112 - DNA, 20 bp, synthetic construct
  source 1..20: mol_type = other DNA
tgctcagcccttagcaatcg

SEQ ID NO: 15113 - DNA, 20 bp, synthetic construct
  source 1..20: mol_type = other DNA
cggcaacagattgcctgcat

SEQ ID NO: 15114 - DNA, 20 bp, synthetic construct
  source 1..20: mol_type = other DNA
gcagttctcacacactgtgg

SEQ ID NO: 15115 - DNA, 20 bp, synthetic construct
  source 1..20: mol_type = other DNA
ggcccaggatgtcagagcca

SEQ ID NO: 15116 - DNA, 20 bp, synthetic construct
  source 1..20: mol_type = other DNA
ttcctggaacagaccaaaga

SEQ ID NO: 15117 - DNA, 20 bp, synthetic construct
  source 1..20: mol_type = other DNA
cgttcatcaggaagtgcgtg

SEQ ID NO: 15118 - DNA, 20 bp, synthetic construct
  source 1..20: mol_type = other DNA
ttcacctgtgcatatgagct

SEQ ID NO: 15119 - DNA, 20 bp, synthetic construct
  source 1..20: mol_type = other DNA
tgtctgtcaagaagaacttg

SEQ ID NO: 15120 - DNA, 20 bp, synthetic construct
  source 1..20: mol_type = other DNA
cgtcgggctcactggtgtaa

SEQ ID NO: 15121 - DNA, 20 bp, synthetic construct
  source 1..20: mol_type = other DNA
gccggttgcacggcttgcgc

SEQ ID NO: 15122 - DNA, 20 bp, synthetic construct
  source 1..20: mol_type = other DNA
taccggagtgcgtcctcagg

SEQ ID NO: 15123 - DNA, 20 bp, synthetic construct
  source 1..20: mol_type = other DNA
tggaggaggtggagcgggag

SEQ ID NO: 15124 - DNA, 20 bp, synthetic construct
  source 1..20: mol_type = other DNA
tcttacccagaaaataataa

SEQ ID NO: 15125 - DNA, 20 bp, synthetic construct
  source 1..20: mol_type = other DNA
ctcctgcagctccccgagca

SEQ ID NO: 15126 - DNA, 20 bp, synthetic construct
  source 1..20: mol_type = other DNA
cttaaggtactggagcctga

SEQ ID NO: 15127 - DNA, 20 bp, synthetic construct
  source 1..20: mol_type = other DNA
ggaaatctacgggagggtaa

SEQ ID NO: 15128 - DNA, 20 bp, synthetic construct
  source 1..20: mol_type = other DNA
gaaacctgcgggttcacaga

SEQ ID NO: 15129 - DNA, 20 bp, synthetic construct
  source 1..20: mol_type = other DNA
atgtccaacagccggcctag

SEQ ID NO: 15130 - DNA, 20 bp, synthetic construct
  source 1..20: mol_type = other DNA
ggaccagatgcggagagtaa

SEQ ID NO: 15131 - DNA, 20 bp, synthetic construct
  source 1..20: mol_type = other DNA
aggccctcttcatgacgggc

SEQ ID NO: 15132 - DNA, 20 bp, synthetic construct
  source 1..20: mol_type = other DNA
cgccccggctccacgtgatc

SEQ ID NO: 15133 - DNA, 20 bp, synthetic construct
  source 1..20: mol_type = other DNA
cttactaatgaagtaatccg

SEQ ID NO: 15134 - DNA, 20 bp, synthetic construct
  source 1..20: mol_type = other DNA
ggcattctccggatagatgt

SEQ ID NO: 15135 - DNA, 20 bp, synthetic construct
  source 1..20: mol_type = other DNA
cagtgctgaccttgatggtg

SEQ ID NO: 15136 - DNA, 20 bp, synthetic construct
  source 1..20: mol_type = other DNA
gcagtacccgctgccggagg

SEQ ID NO: 15137 - DNA, 20 bp, synthetic construct
  source 1..20: mol_type = other DNA
acctaccggagtgcgtcctc

SEQ ID NO: 15138 - DNA, 20 bp, synthetic construct
  source 1..20: mol_type = other DNA
gctgaagcagggcacggaga

SEQ ID NO: 15139 - DNA, 20 bp, synthetic construct
  source 1..20: mol_type = other DNA
ttcaggatcgttttcactgt

SEQ ID NO: 15140 - DNA, 20 bp, synthetic construct
  source 1..20: mol_type = other DNA
gatgagcagctgtggagtgg

SEQ ID NO: 15141 - DNA, 20 bp, synthetic construct
  source 1..20: mol_type = other DNA
tcctgcaggtgaggagtaag

SEQ ID NO: 15142 - DNA, 20 bp, synthetic construct
  source 1..20: mol_type = other DNA
ccccgagcaaggacgtcacc

SEQ ID NO: 15143 - DNA, 20 bp, synthetic construct
  source 1..20: mol_type = other DNA
ctccgggttggtcatcccta

SEQ ID NO: 15144 - DNA, 20 bp, synthetic construct
  source 1..20: mol_type = other DNA
gagaatttatcatttcgtgg

SEQ ID NO: 15145 - DNA, 20 bp, synthetic construct
  source 1..20: mol_type = other DNA
catggcccaatacttcaaga

SEQ ID NO: 15146 - DNA, 20 bp, synthetic construct
  source 1..20: mol_type = other DNA
gcctgcggatccctggctgt

SEQ ID NO: 15147 - DNA, 20 bp, synthetic construct
  source 1..20: mol_type = other DNA
gttcacaaaagaagccacac

SEQ ID NO: 15148 - DNA, 20 bp, synthetic construct
  source 1..20: mol_type = other DNA
tggagccacccaatccactg

SEQ ID NO: 15149 - DNA, 20 bp, synthetic construct
  source 1..20: mol_type = other DNA
cccggatgaagagcacgatg

SEQ ID NO: 15150 - DNA, 20 bp, synthetic construct
  source 1..20: mol_type = other DNA
gatgaagagagtaagggcca

SEQ ID NO: 15151 - DNA, 20 bp, synthetic construct
  source 1..20: mol_type = other DNA
ggaccagctccatggggcag

SEQ ID NO: 15152 - DNA, 20 bp, synthetic construct
  source 1..20: mol_type = other DNA
gctcctggatcaggcgcccg

SEQ ID NO: 15153 - DNA, 20 bp, synthetic construct
  source 1..20: mol_type = other DNA
ggacgagtgggaggttccca

SEQ ID NO: 15154 - DNA, 20 bp, synthetic construct
  source 1..20: mol_type = other DNA
caatttctggcagcctggag

SEQ ID NO: 15155 - DNA, 20 bp, synthetic construct
  source 1..20: mol_type = other DNA
gaggataaagacctggtcca

SEQ ID NO: 15156 - DNA, 20 bp, synthetic construct
  source 1..20: mol_type = other DNA
cctgcgggagatccagcaga

SEQ ID NO: 15157 - DNA, 20 bp, synthetic construct
  source 1..20: mol_type = other DNA
ttcaggtaagtccatcaggt

SEQ ID NO: 15158 - DNA, 20 bp, synthetic construct
  source 1..20: mol_type = other DNA
ggaaaggtaccccagtgaag

SEQ ID NO: 15159 - DNA, 20 bp, synthetic construct
  source 1..20: mol_type = other DNA
ggaggggaagacggcccggg

SEQ ID NO: 15160 - DNA, 20 bp, synthetic construct
  source 1..20: mol_type = other DNA
gaggccgaacttctcacagc

SEQ ID NO: 15161 - DNA, 20 bp, synthetic construct
  source 1..20: mol_type = other DNA
cgacatgggcaaggtacgag

SEQ ID NO: 15162 - DNA, 20 bp, synthetic construct
  source 1..20: mol_type = other DNA
caaggtacagctcaggcctc

SEQ ID NO: 15163 - DNA, 20 bp, synthetic construct
  source 1..20: mol_type = other DNA
gtagtcaggctcctggaaac

SEQ ID NO: 15164 - DNA, 20 bp, synthetic construct
  source 1..20: mol_type = other DNA
caccacgtctgcctgctggt

SEQ ID NO: 15165 - DNA, 20 bp, synthetic construct
  source 1..20: mol_type = other DNA
catcctactcacctgataag

SEQ ID NO: 15166 - DNA, 20 bp, synthetic construct
  source 1..20: mol_type = other DNA
ggcagcccaagtaaggagac

SEQ ID NO: 15167 - DNA, 20 bp, synthetic construct
  source 1..20: mol_type = other DNA
tgtctgactttgggatgaca

SEQ ID NO: 15168 - DNA, 20 bp, synthetic construct
  source 1..20: mol_type = other DNA
gcagaaagataagatggcgg

SEQ ID NO: 15169 - DNA, 20 bp, synthetic construct
  source 1..20: mol_type = other DNA
tacaaggcaggcgcgggcag

SEQ ID NO: 15170 - DNA, 20 bp, synthetic construct
  source 1..20: mol_type = other DNA
cacctgtaggcagacaaaga

SEQ ID NO: 15171 - DNA, 20 bp, synthetic construct
  source 1..20: mol_type = other DNA
gcgcactcaccgtggtgggt

SEQ ID NO: 15172 - DNA, 20 bp, synthetic construct
  source 1..20: mol_type = other DNA
cccgagcaaggacgtcacct

SEQ ID NO: 15173 - DNA, 20 bp, synthetic construct
  source 1..20: mol_type = other DNA
atgcccttactctccgcatc

SEQ ID NO: 15174 - DNA, 20 bp, synthetic construct
  source 1..20: mol_type = other DNA
acaggtgagcaggtcagggt

SEQ ID NO: 15175 - DNA, 20 bp, synthetic construct
  source 1..20: mol_type = other DNA
gccccagcacgcaggggacc

SEQ ID NO: 15176 - DNA, 20 bp, synthetic construct
  source 1..20: mol_type = other DNA
cagcccaagtaaggagactg

SEQ ID NO: 15177 - DNA, 20 bp, synthetic construct
  source 1..20: mol_type = other DNA
tactcccggctgccatctgt

SEQ ID NO: 15178 - DNA, 20 bp, synthetic construct
  source 1..20: mol_type = other DNA
cgccatggctccgacgctgg

SEQ ID NO: 15179 - DNA, 20 bp, synthetic construct
  source 1..20: mol_type = other DNA
ctggtcctatgcagtaggca

SEQ ID NO: 15180 - DNA, 20 bp, synthetic construct
  source 1..20: mol_type = other DNA
cactcacgtgttgtgcgagg

SEQ ID NO: 15181 - DNA, 20 bp, synthetic construct
  source 1..20: mol_type = other DNA
gtaccactccctctttgctc

SEQ ID NO: 15182 - DNA, 20 bp, synthetic construct
  source 1..20: mol_type = other DNA
tttcaggtaagtccatcagg

SEQ ID NO: 15183 - DNA, 20 bp, synthetic construct
  source 1..20: mol_type = other DNA
accaggggtctggaagttga

SEQ ID NO: 15184 - DNA, 20 bp, synthetic construct
  source 1..20: mol_type = other DNA
ctcaccaaatgaccacacat

SEQ ID NO: 15185 - DNA, 20 bp, synthetic construct
  source 1..20: mol_type = other DNA
gcagcaccaccatttccacc

SEQ ID NO: 15186 - DNA, 20 bp, synthetic construct
  source 1..20: mol_type = other DNA
acttcatccccatggacacc

SEQ ID NO: 15187 - DNA, 20 bp, synthetic construct
  source 1..20: mol_type = other DNA
tccgcagcagcggctcccgc

SEQ ID NO: 15188 - DNA, 20 bp, synthetic construct
  source 1..20: mol_type = other DNA
agcaaagagaaagccagata

SEQ ID NO: 15189 - DNA, 20 bp, synthetic construct
  source 1..20: mol_type = other DNA
tatgtagaatgtccaacagc

SEQ ID NO: 15190 - DNA, 20 bp, synthetic construct
  source 1..20: mol_type = other DNA
ggcgctcacctcagcagggc

SEQ ID NO: 15191 - DNA, 20 bp, synthetic construct
  source 1..20: mol_type = other DNA
atcagcacacctacaagaaa

SEQ ID NO: 15192 - DNA, 20 bp, synthetic construct
  source 1..20: mol_type = other DNA
agtcactcacagtccagctg

SEQ ID NO: 15193 - DNA, 20 bp, synthetic construct
  source 1..20: mol_type = other DNA
atcgaggaccaaggtgccca

SEQ ID NO: 15194 - DNA, 20 bp, synthetic construct
  source 1..20: mol_type = other DNA
gacactggccacaggtgagc

SEQ ID NO: 15195 - DNA, 20 bp, synthetic construct
  source 1..20: mol_type = other DNA
gaggatgcctctcttgctct

SEQ ID NO: 15196 - DNA, 20 bp, synthetic construct
  source 1..20: mol_type = other DNA
gagcacaaaaggaagcagtg

SEQ ID NO: 15197 - DNA, 20 bp, synthetic construct
  source 1..20: mol_type = other DNA
ccgccatggctccgacgctg

SEQ ID NO: 15198 - DNA, 20 bp, synthetic construct
  source 1..20: mol_type = other DNA
gcctggtgtctgctgagctc

SEQ ID NO: 15199 - DNA, 20 bp, synthetic construct
  source 1..20: mol_type = other DNA
ttggacagatctattccaga

SEQ ID NO: 15200 - DNA, 20 bp, synthetic construct
  source 1..20: mol_type = other DNA
gtattcagtgatgatgtaga

SEQ ID NO: 15201 - DNA, 20 bp, synthetic construct
  source 1..20: mol_type = other DNA
ccggctttccccccatctca

SEQ ID NO: 15202 - DNA, 20 bp, synthetic construct
  source 1..20: mol_type = other DNA
gcagctcaccatcttggtga

SEQ ID NO: 15203 - DNA, 20 bp, synthetic construct
  source 1..20: mol_type = other DNA
aatccacatctgctggaagg

SEQ ID NO: 15204 - DNA, 20 bp, synthetic construct
  source 1..20: mol_type = other DNA
ttcacagtacctggaggaga

SEQ ID NO: 15205 - DNA, 20 bp, synthetic construct
  source 1..20: mol_type = other DNA
ccagctgtgagatgtacttg

SEQ ID NO: 15206 - DNA, 20 bp, synthetic construct
  source 1..20: mol_type = other DNA
ccgggacttcgaccagaacc

SEQ ID NO: 15207 - DNA, 20 bp, synthetic construct
  source 1..20: mol_type = other DNA
caaaacactgaacctctggg

SEQ ID NO: 15208 - DNA, 20 bp, synthetic construct
  source 1..20: mol_type = other DNA
ggcgcagtacccgctgccgg

SEQ ID NO: 15209 - DNA, 20 bp, synthetic construct
  source 1..20: mol_type = other DNA
cattgccgtgtccagcaaga

SEQ ID NO: 15210 - DNA, 20 bp, synthetic construct
  source 1..20: mol_type = other DNA
tattgtaccacctgaaagca

SEQ ID NO: 15211 - DNA, 20 bp, synthetic construct
  source 1..20: mol_type = other DNA
tcttgatgagctgttcttcc

SEQ ID NO: 15212 - DNA, 20 bp, synthetic construct
  source 1..20: mol_type = other DNA
tagaactcgcagagctctgc

SEQ ID NO: 15213 - DNA, 20 bp, synthetic construct
  source 1..20: mol_type = other DNA
ggtatttcaccgagtctggt

SEQ ID NO: 15214 - DNA, 20 bp, synthetic construct
  source 1..20: mol_type = other DNA
ggcgcagatcatgcaccagc

SEQ ID NO: 15215 - DNA, 20 bp, synthetic construct
  source 1..20: mol_type = other DNA
ctgaatacatggagaatggt

SEQ ID NO: 15216 - DNA, 20 bp, synthetic construct
  source 1..20: mol_type = other DNA
ccagcacttcttctgcaagg

SEQ ID NO: 15217 - DNA, 20 bp, synthetic construct
  source 1..20: mol_type = other DNA
tgaggcactcacatggacat

SEQ ID NO: 15218 - DNA, 20 bp, synthetic construct
  source 1..20: mol_type = other DNA
caacgggaggttcaccctgc

SEQ ID NO: 15219 - DNA, 20 bp, synthetic construct
  source 1..20: mol_type = other DNA
ccagcaggacaggtcctccg

SEQ ID NO: 15220 - DNA, 20 bp, synthetic construct
  source 1..20: mol_type = other DNA
cggtgcatgaagagatccag

SEQ ID NO: 15221 - DNA, 20 bp, synthetic construct
  source 1..20: mol_type = other DNA
atccccaccgtgtgagttcc

SEQ ID NO: 15222 - DNA, 20 bp, synthetic construct
  source 1..20: mol_type = other DNA
gctcagcctgtgctctggtc

SEQ ID NO: 15223 - DNA, 20 bp, synthetic construct
  source 1..20: mol_type = other DNA
ggaaccactgggcaggtggg

SEQ ID NO: 15224 - DNA, 20 bp, synthetic construct
  source 1..20: mol_type = other DNA
cacaggaggagctgcaggac

SEQ ID NO: 15225 - DNA, 20 bp, synthetic construct
  source 1..20: mol_type = other DNA
ccacaaccacactctggagg

SEQ ID NO: 15226 - DNA, 20 bp, synthetic construct
  source 1..20: mol_type = other DNA
cacaggctggggcttccttc

SEQ ID NO: 15227 - DNA, 20 bp, synthetic construct
  source 1..20: mol_type = other DNA
ttcactgaatcttagcagga

SEQ ID NO: 15228 - DNA, 20 bp, synthetic construct
  source 1..20: mol_type = other DNA
gaaggagccgtgagtgttcc

SEQ ID NO: 15229 - DNA, 20 bp, synthetic construct
  source 1..20: mol_type = other DNA
agatcgatcagctaaagcac

SEQ ID NO: 15230 - DNA, 20 bp, synthetic construct
  source 1..20: mol_type = other DNA
cgggtgaggcaggcagggct

SEQ ID NO: 15231 - DNA, 20 bp, synthetic construct
  source 1..20: mol_type = other DNA
gtccatggggatgaagtacc

SEQ ID NO: 15232 - DNA, 20 bp, synthetic construct
  source 1..20: mol_type = other DNA
gctgaccttgatggtggggt

SEQ ID NO: 15233 - DNA, 20 bp, synthetic construct
  source 1..20: mol_type = other DNA
gccagctcctgagggaaggg

SEQ ID NO: 15234 - DNA, 20 bp, synthetic construct
  source 1..20: mol_type = other DNA
gagcacgatggggtagatgt

SEQ ID NO: 15235 - DNA, 20 bp, synthetic construct
  source 1..20: mol_type = other DNA
ctcatgatggctcggaagaa

SEQ ID NO: 15236 - DNA, 20 bp, synthetic construct
  source 1..20: mol_type = other DNA
tccataccttacaacagcct

SEQ ID NO: 15237 - DNA, 20 bp, synthetic construct
  source 1..20: mol_type = other DNA
cagtgcagctccaggcggca

SEQ ID NO: 15238 - DNA, 20 bp, synthetic construct
  source 1..20: mol_type = other DNA
ggacagatcaatggctacac

SEQ ID NO: 15239 - DNA, 20 bp, synthetic construct
  source 1..20: mol_type = other DNA
ccaatgagccgcacgatgta

SEQ ID NO: 15240 - DNA, 20 bp, synthetic construct
  source 1..20: mol_type = other DNA
gccccagaagccgtggtggg

SEQ ID NO: 15241 - DNA, 20 bp, synthetic construct
  source 1..20: mol_type = other DNA
atttcagatccaggatactg

SEQ ID NO: 15242 - DNA, 20 bp, synthetic construct
  source 1..20: mol_type = other DNA
cctcccgggctgcggccaca

SEQ ID NO: 15243 - DNA, 20 bp, synthetic construct
  source 1..20: mol_type = other DNA
cagctctccaatctgaaggt

SEQ ID NO: 15244 - DNA, 20 bp, synthetic construct
  source 1..20: mol_type = other DNA
tgactacaaggcccagaggg

SEQ ID NO: 15245 - DNA, 20 bp, synthetic construct
  source 1..20: mol_type = other DNA
cccagtggttcccagaagtg

SEQ ID NO: 15246 - DNA, 20 bp, synthetic construct
  source 1..20: mol_type = other DNA
taaaatctacatggaagaaa

SEQ ID NO: 15247 - DNA, 20 bp, synthetic construct
  source 1..20: mol_type = other DNA
ctcctggatcaggcgcccga

SEQ ID NO: 15248 - DNA, 20 bp, synthetic construct
  source 1..20: mol_type = other DNA
tgagagtgcacagtggagaa

SEQ ID NO: 15249 - DNA, 20 bp, synthetic construct
  source 1..20: mol_type = other DNA
gctggacctgcgggacgaca

SEQ ID NO: 15250 - DNA, 20 bp, synthetic construct
  source 1..20: mol_type = other DNA
attcctggaacagaccaaag

SEQ ID NO: 15251 - DNA, 20 bp, synthetic construct
  source 1..20: mol_type = other DNA
cctcacgcgtcaggctgctg

SEQ ID NO: 15252 - DNA, 20 bp, synthetic construct
  source 1..20: mol_type = other DNA
cgccacctgtgggagccaca

SEQ ID NO: 15253 - DNA, 20 bp, synthetic construct
  source 1..20: mol_type = other DNA
tcaagaaatgctgcggggaa

SEQ ID NO: 15254 - DNA, 20 bp, synthetic construct
  source 1..20: mol_type = other DNA
cacagtggaggaaggccacg

SEQ ID NO: 15255 - DNA, 20 bp, synthetic construct
  source 1..20: mol_type = other DNA
ctgttataggagctcaatct

SEQ ID NO: 15256 - DNA, 20 bp, synthetic construct
  source 1..20: mol_type = other DNA
cctgtggaagacacagagtg

SEQ ID NO: 15257 - DNA, 20 bp, synthetic construct
  source 1..20: mol_type = other DNA
gcagaagatgaaagggccgg

SEQ ID NO: 15258 - DNA, 20 bp, synthetic construct
  source 1..20: mol_type = other DNA
gcagcacaccgtctgtggat

SEQ ID NO: 15259 - DNA, 20 bp, synthetic construct
  source 1..20: mol_type = other DNA
gacgcacgggcagatcggca

SEQ ID NO: 15260 - DNA, 20 bp, synthetic construct
  source 1..20: mol_type = other DNA
aggcgccctggccagtcgtc

SEQ ID NO: 15261 - DNA, 20 bp, synthetic construct
  source 1..20: mol_type = other DNA
cgggccagccagagctcccc

SEQ ID NO: 15262 - DNA, 20 bp, synthetic construct
  source 1..20: mol_type = other DNA
cggtgtcacacagataaact

SEQ ID NO: 15263 - DNA, 20 bp, synthetic construct
  source 1..20: mol_type = other DNA
ccctcagggaccatgggctg

SEQ ID NO: 15264 - DNA, 20 bp, synthetic construct
  source 1..20: mol_type = other DNA
cgcgcaagcagccgctgggc

SEQ ID NO: 15265 - DNA, 20 bp, synthetic construct
  source 1..20: mol_type = other DNA
ggccgaggagcacctgaagc

SEQ ID NO: 15266 - DNA, 20 bp, synthetic construct
  source 1..20: mol_type = other DNA
ccaagaggagtggtttaagg

SEQ ID NO: 15267 - DNA, 20 bp, synthetic construct
  source 1..20: mol_type = other DNA
ctcacctgggccttcagcac

SEQ ID NO: 15268 - DNA, 20 bp, synthetic construct
  source 1..20: mol_type = other DNA
tcttcacacgcaagtgagtg

SEQ ID NO: 15269 - DNA, 20 bp, synthetic construct
  source 1..20: mol_type = other DNA
gagccgtagaaagggtccaa

SEQ ID NO: 15270 - DNA, 20 bp, synthetic construct
  source 1..20: mol_type = other DNA
gccgccagacagcactgtgt

SEQ ID NO: 15271 - DNA, 20 bp, synthetic construct
  source 1..20: mol_type = other DNA
ctgtcagatgccaaatgcct

SEQ ID NO: 15272 - DNA, 20 bp, synthetic construct
  source 1..20: mol_type = other DNA
gcgccagatcacgtggagcc

SEQ ID NO: 15273 - DNA, 20 bp, synthetic construct
  source 1..20: mol_type = other DNA
gaaggagcagggactggaag

SEQ ID NO: 15274 - DNA, 20 bp, synthetic construct
  source 1..20: mol_type = other DNA
gctaccgctgccatcggtgc

SEQ ID NO: 15275 - DNA, 20 bp, synthetic construct
  source 1..20: mol_type = other DNA
cctggccgtcatctgctccc

SEQ ID NO: 15276 - DNA, 20 bp, synthetic construct
  source 1..20: mol_type = other DNA
gatcgaggaccaaggtgccc

SEQ ID NO: 15277 - DNA, 20 bp, synthetic construct
  source 1..20: mol_type = other DNA
agagactggtcctatgcagt

SEQ ID NO: 15278 - DNA, 20 bp, synthetic construct
  source 1..20: mol_type = other DNA
gcagcagcggctcccgcagg

SEQ ID NO: 15279 - DNA, 20 bp, synthetic construct
  source 1..20: mol_type = other DNA
ggcacctacgccattgccgg

SEQ ID NO: 15280 - DNA, 20 bp, synthetic construct
  source 1..20: mol_type = other DNA
cctcatcagccaagacaagg

SEQ ID NO: 15281 - DNA, 20 bp, synthetic construct
  source 1..20: mol_type = other DNA
ggtcagctcgtcctccctct

SEQ ID NO: 15282 - DNA, 20 bp, synthetic construct
  source 1..20: mol_type = other DNA
tccctgcagagaaacacact

SEQ ID NO: 15283 - DNA, 20 bp, synthetic construct
  source 1..20: mol_type = other DNA
tcgctgagcctccgcagcag

SEQ ID NO: 15284 - DNA, 20 bp, synthetic construct
  source 1..20: mol_type = other DNA
caccaggatgatgggtgtgc

SEQ ID NO: 15285 - DNA, 20 bp, synthetic construct
  source 1..20: mol_type = other DNA
gctcctgcactcagcacccc

SEQ ID NO: 15286 - DNA, 20 bp, synthetic construct
  source 1..20: mol_type = other DNA
gttcacttcatcctcagatg

SEQ ID NO: 15287 - DNA, 20 bp, synthetic construct
  source 1..20: mol_type = other DNA
tcatacagggccccgtagtc

SEQ ID NO: 15288 - DNA, 20 bp, synthetic construct
  source 1..20: mol_type = other DNA
ttgatcttggatggcagcat

SEQ ID NO: 15289 - DNA, 20 bp, synthetic construct
  source 1..20: mol_type = other DNA
gacaaggtaaaagagggatg

SEQ ID NO: 15290 - DNA, 20 bp, synthetic construct
  source 1..20: mol_type = other DNA
cgaggaatatataggtgtaa

SEQ ID NO: 15291 - DNA, 20 bp, synthetic construct
  source 1..20: mol_type = other DNA
ccctgcagagaaacacactt

SEQ ID NO: 15292 - DNA, 20 bp, synthetic construct
  source 1..20: mol_type = other DNA
ttcaggtatggggcagcgcc

SEQ ID NO: 15293 - DNA, 20 bp, synthetic construct
  source 1..20: mol_type = other DNA
ctccactaccggatgaggta

SEQ ID NO: 15294 - DNA, 20 bp, synthetic construct
  source 1..20: mol_type = other DNA
ctgtaggggcaaccagaaca

SEQ ID NO: 15295 - DNA, 20 bp, synthetic construct
  source 1..20: mol_type = other DNA
acgagaactcgtaccggtcc

SEQ ID NO: 15296 - DNA, 20 bp, synthetic construct
  source 1..20: mol_type = other DNA
ggagctggatccagccaccg

SEQ ID NO: 15297 - DNA, 20 bp, synthetic construct
  source 1..20: mol_type = other DNA
actccacctggctgcagtag

SEQ ID NO: 15298 - DNA, 20 bp, synthetic construct
  source 1..20: mol_type = other DNA
catctgcgaggacgagggag

SEQ ID NO: 15299 - DNA, 20 bp, synthetic construct
  source 1..20: mol_type = other DNA
tggccacccagactgaccag

SEQ ID NO: 15300 - DNA, 20 bp, synthetic construct
  source 1..20: mol_type = other DNA
gacctcacctgtggatgcag

SEQ ID NO: 15301 - DNA, 20 bp, synthetic construct
  source 1..20: mol_type = other DNA
ggctggccctggatgccatg

SEQ ID NO: 15302 - DNA, 20 bp, synthetic construct
  source 1..20: mol_type = other DNA
aacggcaaagcgtgagtaca

SEQ ID NO: 15303 - DNA, 20 bp, synthetic construct
  source 1..20: mol_type = other DNA
ggtcagtttctgagactgca

SEQ ID NO: 15304 - DNA, 20 bp, synthetic construct
  source 1..20: mol_type = other DNA
tgtcctccagggcctccttg

SEQ ID NO: 15305 - DNA, 20 bp, synthetic construct
  source 1..20: mol_type = other DNA
catcgagcagggcaagcgga

SEQ ID NO: 15306 - DNA, 20 bp, synthetic construct
  source 1..20: mol_type = other DNA
actgaatacatggagaatgg

SEQ ID NO: 15307 - DNA, 20 bp, synthetic construct
  source 1..20: mol_type = other DNA
gaggacagccaaggggcacg

SEQ ID NO: 15308 - DNA, 20 bp, synthetic construct
  source 1..20: mol_type = other DNA
tcccaaagcaaggagcagag

SEQ ID NO: 15309 - DNA, 20 bp, synthetic construct
  source 1..20: mol_type = other DNA
gccaatgagccgcacgatgt

SEQ ID NO: 15310 - DNA, 20 bp, synthetic construct
  source 1..20: mol_type = other DNA
ggccacccaggggatcctgt

SEQ ID NO: 15311 - DNA, 20 bp, synthetic construct
  source 1..20: mol_type = other DNA
cgttgtagtaccctgggtcg

SEQ ID NO: 15312 - DNA, 20 bp, synthetic construct
  source 1..20: mol_type = other DNA
tggatcaggcgcccgagggc

SEQ ID NO: 15313 - DNA, 20 bp, synthetic construct
  source 1..20: mol_type = other DNA
ctcccagccatccgtcctga

SEQ ID NO: 15314 - DNA, 20 bp, synthetic construct
  source 1..20: mol_type = other DNA
cgcccacgacaccaaccacc

SEQ ID NO: 15315 - DNA, 20 bp, synthetic construct
  source 1..20: mol_type = other DNA
caccagcgtcttggccagca

SEQ ID NO: 15316 - DNA, 20 bp, synthetic construct
  source 1..20: mol_type = other DNA
acgcactccggtaggtcccc

SEQ ID NO: 15317 - DNA, 20 bp, synthetic construct
  source 1..20: mol_type = other DNA
ggcaggccttgtagctgcag

SEQ ID NO: 15318 - DNA, 20 bp, synthetic construct
  source 1..20: mol_type = other DNA
aatataataaccctgaaaag

SEQ ID NO: 15319 - DNA, 20 bp, synthetic construct
  source 1..20: mol_type = other DNA
tccgaaatggctctgaggtg

SEQ ID NO: 15320 - DNA, 20 bp, synthetic construct
  source 1..20: mol_type = other DNA
ctggataggcaaggagaggc

SEQ ID NO: 15321 - DNA, 20 bp, synthetic construct
  source 1..20: mol_type = other DNA
cagttccaaaccctggtggt

SEQ ID NO: 15322 - DNA, 20 bp, synthetic construct
  source 1..20: mol_type = other DNA
gccccctcgctaacagccag

SEQ ID NO: 15323 - DNA, 20 bp, synthetic construct
  source 1..20: mol_type = other DNA
agcatctgcgaggacgaggg

SEQ ID NO: 15324 - DNA, 20 bp, synthetic construct
  source 1..20: mol_type = other DNA
aggggaagttcatttgacac

SEQ ID NO: 15325 - DNA, 20 bp, synthetic construct
  source 1..20: mol_type = other DNA
cagtgccaggccctgcgggt

SEQ ID NO: 15326 - DNA, 20 bp, synthetic construct
  source 1..20: mol_type = other DNA
gagcagagatgtgggaatgg

SEQ ID NO: 15327 - DNA, 20 bp, synthetic construct
  source 1..20: mol_type = other DNA
tctgtcagatgccaaatgcc

SEQ ID NO: 15328 - DNA, 20 bp, synthetic construct
  source 1..20: mol_type = other DNA
accagcgccggaggggcaag

SEQ ID NO: 15329 - DNA, 20 bp, synthetic construct
  source 1..20: mol_type = other DNA
ggccagtttcttcccttcca

SEQ ID NO: 15330 - DNA, 20 bp, synthetic construct
  source 1..20: mol_type = other DNA
tcaggaaaccgcgggacttg

SEQ ID NO: 15331 - DNA, 20 bp, synthetic construct
  source 1..20: mol_type = other DNA
gaaccaggccctcttcatga

SEQ ID NO: 15332 - DNA, 20 bp, synthetic construct
  source 1..20: mol_type = other DNA
tgtggccacagcactttgtc

SEQ ID NO: 15333 - DNA, 20 bp, synthetic construct
  source 1..20: mol_type = other DNA
ggtttattatcagtgcgtcc

SEQ ID NO: 15334 - DNA, 20 bp, synthetic construct
  source 1..20: mol_type = other DNA
tgtggcagacctacagtgta

SEQ ID NO: 15335 - DNA, 20 bp, synthetic construct
  source 1..20: mol_type = other DNA
gccggagaccttgaagagcg

SEQ ID NO: 15336 - DNA, 20 bp, synthetic construct
  source 1..20: mol_type = other DNA
ccctgtggggcaacggggaa

SEQ ID NO: 15337 - DNA, 20 bp, synthetic construct
  source 1..20: mol_type = other DNA
cacaaaaggaagcagtgtgg

SEQ ID NO: 15338 - DNA, 20 bp, synthetic construct
  source 1..20: mol_type = other DNA
acagcaaggctggtggcgag

SEQ ID NO: 15339 - DNA, 20 bp, synthetic construct
  source 1..20: mol_type = other DNA
atcctccagctgccgcaacc

SEQ ID NO: 15340 - DNA, 20 bp, synthetic construct
  source 1..20: mol_type = other DNA
cctgctcggttgatcttgga

SEQ ID NO: 15341 - DNA, 20 bp, synthetic construct
  source 1..20: mol_type = other DNA
ggccatcctgctaaaatcag

SEQ ID NO: 15342 - DNA, 20 bp, synthetic construct
  source 1..20: mol_type = other DNA
ttggacattctacataccaa

SEQ ID NO: 15343 - DNA, 20 bp, synthetic construct
  source 1..20: mol_type = other DNA
accctgttgtcttcaggagt

SEQ ID NO: 15344 - DNA, 20 bp, synthetic construct
  source 1..20: mol_type = other DNA
cgtctgcctgctggtaggac

SEQ ID NO: 15345 - DNA, 20 bp, synthetic construct
  source 1..20: mol_type = other DNA
cccctgactatgaagaagga

SEQ ID NO: 15346 - DNA, 20 bp, synthetic construct
  source 1..20: mol_type = other DNA
aaaccgaagcaactcagagg

SEQ ID NO: 15347 - DNA, 20 bp, synthetic construct
  source 1..20: mol_type = other DNA
cggctacagcttcaccacca

SEQ ID NO: 15348 - DNA, 20 bp, synthetic construct
  source 1..20: mol_type = other DNA
ggagaaggacatcagcggta

SEQ ID NO: 15349 - DNA, 20 bp, synthetic construct
  source 1..20: mol_type = other DNA
acgcaggtagggcgtgagct

SEQ ID NO: 15350 - DNA, 20 bp, synthetic construct
  source 1..20: mol_type = other DNA
ctacctgtgagtggccaggt

SEQ ID NO: 15351 - DNA, 20 bp, synthetic construct
  source 1..20: mol_type = other DNA
ccagaatgtggagaagcaag

SEQ ID NO: 15352 - DNA, 20 bp, synthetic construct
  source 1..20: mol_type = other DNA
acacctgcacgagagcccca

SEQ ID NO: 15353 - DNA, 20 bp, synthetic construct
  source 1..20: mol_type = other DNA
cagggtgaacctcccgttgt

SEQ ID NO: 15354 - DNA, 20 bp, synthetic construct
  source 1..20: mol_type = other DNA
ttcatcaagctgagtgaccc

SEQ ID NO: 15355 - DNA, 20 bp, synthetic construct
  source 1..20: mol_type = other DNA
ttgacgcaggaggccctgtg

SEQ ID NO: 15356 - DNA, 20 bp, synthetic construct
  source 1..20: mol_type = other DNA
agaatttatcatttcgtggt

SEQ ID NO: 15357 - DNA, 20 bp, synthetic construct
  source 1..20: mol_type = other DNA
ctcggccagctcctgaggga

SEQ ID NO: 15358 - DNA, 20 bp, synthetic construct
  source 1..20: mol_type = other DNA
ggaacatgtggctccactgc

SEQ ID NO: 15359 - DNA, 20 bp, synthetic construct
  source 1..20: mol_type = other DNA
gcagcagggcctgaaagaca

SEQ ID NO: 15360 - DNA, 20 bp, synthetic construct
  source 1..20: mol_type = other DNA
gaagctgaaaagagaaaaac

SEQ ID NO: 15361 - DNA, 20 bp, synthetic construct
  source 1..20: mol_type = other DNA
tatcagtaaggagcgggagc

SEQ ID NO: 15362 - DNA, 20 bp, synthetic construct
  source 1..20: mol_type = other DNA
aatgtccaacagccggccta

SEQ ID NO: 15363 - DNA, 20 bp, synthetic construct
  source 1..20: mol_type = other DNA
tgagccgcaaggacgcggag

SEQ ID NO: 15364 - DNA, 20 bp, synthetic construct
  source 1..20: mol_type = other DNA
ttctgaaatgaagacacata

SEQ ID NO: 15365 - DNA, 20 bp, synthetic construct
  source 1..20: mol_type = other DNA
cggggaggtggtggaggtcc

SEQ ID NO: 15366 - DNA, 20 bp, synthetic construct
  source 1..20: mol_type = other DNA
aagcggactttaaagttcga

SEQ ID NO: 15367 - DNA, 20 bp, synthetic construct
  source 1..20: mol_type = other DNA
actgcagaaagataagatgg

SEQ ID NO: 15368 - DNA, 20 bp, synthetic construct
  source 1..20: mol_type = other DNA
tcctggccgtcatctgctcc

SEQ ID NO: 15369 - DNA, 20 bp, synthetic construct
  source 1..20: mol_type = other DNA
gagaaggcaggtcttgccca

SEQ ID NO: 15370 - DNA, 20 bp, synthetic construct
  source 1..20: mol_type = other DNA
acacaaggagtgtctgggga

SEQ ID NO: 15371 - DNA, 20 bp, synthetic construct
  source 1..20: mol_type = other DNA
tcttaagctggttgggtgag

SEQ ID NO: 15372 - DNA, 20 bp, synthetic construct
  source 1..20: mol_type = other DNA
atgaagctggaggtgggcgc

SEQ ID NO: 15373 - DNA, 20 bp, synthetic construct
  source 1..20: mol_type = other DNA
aatcttagcaggaaggtgcc

SEQ ID NO: 15374 - DNA, 20 bp, synthetic construct
  source 1..20: mol_type = other DNA
tttcacctgtgcatatgagc

SEQ ID NO: 15375 - DNA, 20 bp, synthetic construct
  source 1..20: mol_type = other DNA
tcggtcaccacgagcagggc

SEQ ID NO: 15376 - DNA, 20 bp, synthetic construct
  source 1..20: mol_type = other DNA
tcctcaggctctcctggtac

SEQ ID NO: 15377 - DNA, 20 bp, synthetic construct
  source 1..20: mol_type = other DNA
tgacgagggagaagcagatg

SEQ ID NO: 15378 - DNA, 20 bp, synthetic construct
  source 1..20: mol_type = other DNA
acagcggcacctacctctgt

SEQ ID NO: 15379 - DNA, 20 bp, synthetic construct
  source 1..20: mol_type = other DNA
ctgcaaggtgggagttaagg

SEQ ID NO: 15380 - DNA, 20 bp, synthetic construct
  source 1..20: mol_type = other DNA
cctggctcagtgcgtgaacg

SEQ ID NO: 15381 - DNA, 20 bp, synthetic construct
  source 1..20: mol_type = other DNA
accaccagcacaggggtaca

SEQ ID NO: 15382 - DNA, 20 bp, synthetic construct
  source 1..20: mol_type = other DNA
tcgccacctgtgggagccac

SEQ ID NO: 15383 - DNA, 20 bp, synthetic construct
  source 1..20: mol_type = other DNA
ccggagaatgccaccgccaa

SEQ ID NO: 15384 - DNA, 20 bp, synthetic construct
  source 1..20: mol_type = other DNA
gcatcacctgcactctcttc

SEQ ID NO: 15385 - DNA, 20 bp, synthetic construct
  source 1..20: mol_type = other DNA
gcagttgtgtgacacggaag

SEQ ID NO: 15386 - DNA, 20 bp, synthetic construct
  source 1..20: mol_type = other DNA
gaccctgacctgctcacctg

SEQ ID NO: 15387 - DNA, 20 bp, synthetic construct
  source 1..20: mol_type = other DNA
gcgccagacgtggaagctgg

SEQ ID NO: 15388 - DNA, 20 bp, synthetic construct
  source 1..20: mol_type = other DNA
gggaccacttgcttgatctg

SEQ ID NO: 15389 - DNA, 20 bp, synthetic construct
  source 1..20: mol_type = other DNA
ggcccagcttgttgtgcagg

SEQ ID NO: 15390 - DNA, 20 bp, synthetic construct
  source 1..20: mol_type = other DNA
atcttgaaggggctcactaa

SEQ ID NO: 15391 - DNA, 20 bp, synthetic construct
  source 1..20: mol_type = other DNA
tggttccacggactggatct

SEQ ID NO: 15392 - DNA, 20 bp, synthetic construct
  source 1..20: mol_type = other DNA
ccggcccctgtcctaccagc

SEQ ID NO: 15393 - DNA, 20 bp, synthetic construct
  source 1..20: mol_type = other DNA
caatacttcaagaaggtgct

SEQ ID NO: 15394 - DNA, 20 bp, synthetic construct
  source 1..20: mol_type = other DNA
cacactcctcaccaagcccg

SEQ ID NO: 15395 - DNA, 20 bp, synthetic construct
  source 1..20: mol_type = other DNA
ctccaccagctgcagggagc

SEQ ID NO: 15396 - DNA, 20 bp, synthetic construct
  source 1..20: mol_type = other DNA
cacgggatggggagcaggtc

SEQ ID NO: 15397 - DNA, 20 bp, synthetic construct
  source 1..20: mol_type = other DNA
tcctcaccatgttcctgaag

SEQ ID NO: 15398 - DNA, 20 bp, synthetic construct
  source 1..20: mol_type = other DNA
tgtggggaaaacctctctgt

SEQ ID NO: 15399 - DNA, 20 bp, synthetic construct
  source 1..20: mol_type = other DNA
gttgacctcacgcaggttga

SEQ ID NO: 15400 - DNA, 20 bp, synthetic construct
  source 1..20: mol_type = other DNA
atcctgaatgaatgaatgga

SEQ ID NO: 15401 - DNA, 20 bp, synthetic construct
  source 1..20: mol_type = other DNA
cctcaccatgttcctgaagt

SEQ ID NO: 15402 - DNA, 20 bp, synthetic construct
  source 1..20: mol_type = other DNA
ctgaggtttggtttggagtg

SEQ ID NO: 15403 - DNA, 20 bp, synthetic construct
  source 1..20: mol_type = other DNA
cttcgtgaaaccatctgtgg

SEQ ID NO: 15404 - DNA, 20 bp, synthetic construct
  source 1..20: mol_type = other DNA
gcctggggtcaccttgcagt

SEQ ID NO: 15405 - DNA, 20 bp, synthetic construct
  source 1..20: mol_type = other DNA
tggacagatctattccagag

SEQ ID NO: 15406 - DNA, 20 bp, synthetic construct
  source 1..20: mol_type = other DNA
ttactcatgggcaaggaggt

SEQ ID NO: 15407 - DNA, 20 bp, synthetic construct
  source 1..20: mol_type = other DNA
ctttcatcttctgctcaagc

SEQ ID NO: 15408 - DNA, 20 bp, synthetic construct
  source 1..20: mol_type = other DNA
agggccagacagtgatgcta

SEQ ID NO: 15409 - DNA, 20 bp, synthetic construct
  source 1..20: mol_type = other DNA
gaagaaccagctgtgcaggg

SEQ ID NO: 15410 - DNA, 20 bp, synthetic construct
  source 1..20: mol_type = other DNA
agcaggcagtgcttgttctg

SEQ ID NO: 15411 - DNA, 20 bp, synthetic construct
  source 1..20: mol_type = other DNA
agaagccccagaagccgtgg

SEQ ID NO: 15412 - DNA, 20 bp, synthetic construct
  source 1..20: mol_type = other DNA
gctccaggactggcaggtca

SEQ ID NO: 15413 - DNA, 20 bp, synthetic construct
  source 1..20: mol_type = other DNA
tctgaggtttggtttggagt

SEQ ID NO: 15414 - DNA, 20 bp, synthetic construct
  source 1..20: mol_type = other DNA
atctgctcccgggccgcacg

SEQ ID NO: 15415 - DNA, 20 bp, synthetic construct
  source 1..20: mol_type = other DNA
tccacttgttcttcaagttc

SEQ ID NO: 15416 - DNA, 20 bp, synthetic construct
  source 1..20: mol_type = other DNA
tgttaagcagctgacacaga

SEQ ID NO: 15417 - DNA, 20 bp, synthetic construct
  source 1..20: mol_type = other DNA
gtcacgaatgacggctcgga

SEQ ID NO: 15418 - DNA, 20 bp, synthetic construct
  source 1..20: mol_type = other DNA
ttgacgcagcagtctggaga

SEQ ID NO: 15419 - DNA, 20 bp, synthetic construct
  source 1..20: mol_type = other DNA
cgacggcaagttcctgtatg

SEQ ID NO: 15420 - DNA, 20 bp, synthetic construct
  source 1..20: mol_type = other DNA
atgagttggtacagctcctc

SEQ ID NO: 15421 - DNA, 20 bp, synthetic construct
  source 1..20: mol_type = other DNA
ttgcctctacatagaagcca

SEQ ID NO: 15422 - DNA, 20 bp, synthetic construct
  source 1..20: mol_type = other DNA
gacagcaaggctggtggcga

SEQ ID NO: 15423 - DNA, 20 bp, synthetic construct
  source 1..20: mol_type = other DNA
gaggcttacctcttcactgt

SEQ ID NO: 15424 - DNA, 20 bp, synthetic construct
  source 1..20: mol_type = other DNA
cttctccccagccctgctcg

SEQ ID NO: 15425 - DNA, 20 bp, synthetic construct
  source 1..20: mol_type = other DNA
tttcctcagtgcctttgtgg

SEQ ID NO: 15426 - DNA, 20 bp, synthetic construct
  source 1..20: mol_type = other DNA
cttgaagaaccagctgtgca

SEQ ID NO: 15427 - DNA, 20 bp, synthetic construct
  source 1..20: mol_type = other DNA
agaggcccagcttgttgtgc

SEQ ID NO: 15428 - DNA, 20 bp, synthetic construct
  source 1..20: mol_type = other DNA
ataagaggctgggctgacga

SEQ ID NO: 15429 - DNA, 20 bp, synthetic construct
  source 1..20: mol_type = other DNA
gcgagcctgttactacagcc

SEQ ID NO: 15430 - DNA, 20 bp, synthetic construct
  source 1..20: mol_type = other DNA
gcaggccatcaagtgtgtgg

SEQ ID NO: 15431 - DNA, 20 bp, synthetic construct
  source 1..20: mol_type = other DNA
ggctgatatactgagaaaac

SEQ ID NO: 15432 - DNA, 20 bp, synthetic construct
  source 1..20: mol_type = other DNA
gatccacatctgctggaagg

SEQ ID NO: 15433 - DNA, 20 bp, synthetic construct
  source 1..20: mol_type = other DNA
agaccagtcagtttccaggt

SEQ ID NO: 15434 - DNA, 20 bp, synthetic construct
  source 1..20: mol_type = other DNA
cctcgtagatgggcacagtg

SEQ ID NO: 15435 - DNA, 20 bp, synthetic construct
  source 1..20: mol_type = other DNA
ctacggccagaagccctaca

SEQ ID NO: 15436 - DNA, 20 bp, synthetic construct
  source 1..20: mol_type = other DNA
gccgggaaaagtgattcgag

SEQ ID NO: 15437 - DNA, 20 bp, synthetic construct
  source 1..20: mol_type = other DNA
tcggccagctcctgagggaa

SEQ ID NO: 15438 - DNA, 20 bp, synthetic construct
  source 1..20: mol_type = other DNA
gggtggccaccaccagcaca

SEQ ID NO: 15439 - DNA, 20 bp, synthetic construct
  source 1..20: mol_type = other DNA
tggtcagtacctgacagaga

SEQ ID NO: 15440 - DNA, 20 bp, synthetic construct
  source 1..20: mol_type = other DNA
gtagcagatttcccagagcg

SEQ ID NO: 15441 - DNA, 20 bp, synthetic construct
  source 1..20: mol_type = other DNA
cttcctccacgtagttggca

SEQ ID NO: 15442 - DNA, 20 bp, synthetic construct
  source 1..20: mol_type = other DNA
gatcagtacaccagttccac

SEQ ID NO: 15443 - DNA, 20 bp, synthetic construct
  source 1..20: mol_type = other DNA
ctgactgccacagatccaca

SEQ ID NO: 15444 - DNA, 20 bp, synthetic construct
  source 1..20: mol_type = other DNA
tcagcaccacgtctgcctgc

SEQ ID NO: 15445 - DNA, 20 bp, synthetic construct
  source 1..20: mol_type = other DNA
cctgcgcccccagatgtccc

SEQ ID NO: 15446 - DNA, 20 bp, synthetic construct
  source 1..20: mol_type = other DNA
gcttacctcttcactgttgg

SEQ ID NO: 15447 - DNA, 20 bp, synthetic construct
  source 1..20: mol_type = other DNA
tcttaggtaggtggggtcgg

SEQ ID NO: 15448 - DNA, 20 bp, synthetic construct
  source 1..20: mol_type = other DNA
aaggaagatctgcttctgtc

SEQ ID NO: 15449 - DNA, 20 bp, synthetic construct
  source 1..20: mol_type = other DNA
gagaaggacatcagcggtaa

SEQ ID NO: 15450 - DNA, 20 bp, synthetic construct
  source 1..20: mol_type = other DNA
aaggagatgaaggaagccct

SEQ ID NO: 15451 - DNA, 20 bp, synthetic construct
  source 1..20: mol_type = other DNA
caggtgagcaggtcagggtc

SEQ ID NO: 15452 - DNA, 20 bp, synthetic construct
  source 1..20: mol_type = other DNA
acgtggtcagctccttcacg

SEQ ID NO: 15453 - DNA, 20 bp, synthetic construct
  source 1..20: mol_type = other DNA
atgcccggcaccgatggcag

SEQ ID NO: 15454 - DNA, 20 bp, synthetic construct
  source 1..20: mol_type = other DNA
gcgggagcgggaccaggtac

SEQ ID NO: 15455 - DNA, 20 bp, synthetic construct
  source 1..20: mol_type = other DNA
gcatataaagtctccatctc

SEQ ID NO: 15456 - DNA, 20 bp, synthetic construct
  source 1..20: mol_type = other DNA
catctgcaggaaacagaacc

SEQ ID NO: 15457 - DNA, 20 bp, synthetic construct
  source 1..20: mol_type = other DNA
agaccacacatctgacttga

SEQ ID NO: 15458 - DNA, 20 bp, synthetic construct
  source 1..20: mol_type = other DNA
gaacatgtggctccactgca

SEQ ID NO: 15459 - DNA, 20 bp, synthetic construct
  source 1..20: mol_type = other DNA
gtctgggcggtgctacaact

SEQ ID NO: 15460 - DNA, 20 bp, synthetic construct
  source 1..20: mol_type = other DNA
gagggccagacagtgatgct

SEQ ID NO: 15461 - DNA, 20 bp, synthetic construct
  source 1..20: mol_type = other DNA
ggtttccgcagaataaaaag

SEQ ID NO: 15462 - DNA, 20 bp, synthetic construct
  source 1..20: mol_type = other DNA
cagtgcctgcgctcgctggg

SEQ ID NO: 15463 - DNA, 20 bp, synthetic construct
  source 1..20: mol_type = other DNA
tcaaggtaagggcctactag

SEQ ID NO: 15464 - DNA, 20 bp, synthetic construct
  source 1..20: mol_type = other DNA
gtagtaccctgggtcgggga

SEQ ID NO: 15465 - DNA, 20 bp, synthetic construct
  source 1..20: mol_type = other DNA
caggagcggcgagtggtgga

SEQ ID NO: 15466 - DNA, 20 bp, synthetic construct
  source 1..20: mol_type = other DNA
aagaaggtaagactttcccg

SEQ ID NO: 15467 - DNA, 20 bp, synthetic construct
  source 1..20: mol_type = other DNA
tccagtaccaggagagcctg

SEQ ID NO: 15468 - DNA, 20 bp, synthetic construct
  source 1..20: mol_type = other DNA
gctgatatactgagaaaaca

SEQ ID NO: 15469 - DNA, 20 bp, synthetic construct
  source 1..20: mol_type = other DNA
cgagatgctgccgtagaaga

SEQ ID NO: 15470 - DNA, 20 bp, synthetic construct
  source 1..20: mol_type = other DNA
tcccaaggtgctcgccctga

SEQ ID NO: 15471 - DNA, 20 bp, synthetic construct
  source 1..20: mol_type = other DNA
tgtgcgacgagaactcgtac

SEQ ID NO: 15472 - DNA, 20 bp, synthetic construct
  source 1..20: mol_type = other DNA
ttgagtgtgcgtggggtcca

SEQ ID NO: 15473 - DNA, 20 bp, synthetic construct
  source 1..20: mol_type = other DNA
cagatacttacttgggaaac

SEQ ID NO: 15474 - DNA, 20 bp, synthetic construct
  source 1..20: mol_type = other DNA
ttctctcaaggtttgtactc

SEQ ID NO: 15475 - DNA, 20 bp, synthetic construct
  source 1..20: mol_type = other DNA
agctggactgtgagtgacta

SEQ ID NO: 15476 - DNA, 20 bp, synthetic construct
  source 1..20: mol_type = other DNA
ggtgaatgtcccgtagttaa

SEQ ID NO: 15477 - DNA, 20 bp, synthetic construct
  source 1..20: mol_type = other DNA
gttaggttctctggagccca

SEQ ID NO: 15478 - DNA, 20 bp, synthetic construct
  source 1..20: mol_type = other DNA
gagaaggtgggggggttcca

SEQ ID NO: 15479 - DNA, 20 bp, synthetic construct
  source 1..20: mol_type = other DNA
cagcagcacggggtgctcct

SEQ ID NO: 15480 - DNA, 20 bp, synthetic construct
  source 1..20: mol_type = other DNA
ttcttacctctcaatctgca

SEQ ID NO: 15481 - DNA, 20 bp, synthetic construct
  source 1..20: mol_type = other DNA
actggggagcaacatcacca

SEQ ID NO: 15482 - DNA, 20 bp, synthetic construct
  source 1..20: mol_type = other DNA
ggcggcccgcaacgtcctgc

SEQ ID NO: 15483 - DNA, 20 bp, synthetic construct
  source 1..20: mol_type = other DNA
aaagagaaagccagatatgg

SEQ ID NO: 15484 - DNA, 20 bp, synthetic construct
  source 1..20: mol_type = other DNA
tgtaggagtccgtccaggac

SEQ ID NO: 15485 - DNA, 20 bp, synthetic construct
  source 1..20: mol_type = other DNA
acataccatcatcttcatcc

SEQ ID NO: 15486 - DNA, 20 bp, synthetic construct
  source 1..20: mol_type = other DNA
tgctcccccagtggattggg

SEQ ID NO: 15487 - DNA, 20 bp, synthetic construct
  source 1..20: mol_type = other DNA
tagagctttgtcgagcagga

SEQ ID NO: 15488 - DNA, 20 bp, synthetic construct
  source 1..20: mol_type = other DNA
gtccctccatgtggccgaca

SEQ ID NO: 15489 - DNA, 20 bp, synthetic construct
  source 1..20: mol_type = other DNA
tggccgctactgcagccagg

SEQ ID NO: 15490 - DNA, 20 bp, synthetic construct
  source 1..20: mol_type = other DNA
gcagatgaggaagacgtcct

SEQ ID NO: 15491 - DNA, 20 bp, synthetic construct
  source 1..20: mol_type = other DNA
gattctcagtaagttaagtc

SEQ ID NO: 15492 - DNA, 20 bp, synthetic construct
  source 1..20: mol_type = other DNA
cctggaatcccttaccatga

SEQ ID NO: 15493 - DNA, 20 bp, synthetic construct
  source 1..20: mol_type = other DNA
ggagcatacctggtcttctc

SEQ ID NO: 15494 - DNA, 20 bp, synthetic construct
  source 1..20: mol_type = other DNA
caactaggaaggtagcaaag

SEQ ID NO: 15495 - DNA, 20 bp, synthetic construct
  source 1..20: mol_type = other DNA
aggatggttcttaggtaggt

SEQ ID NO: 15496 - DNA, 20 bp, synthetic construct
  source 1..20: mol_type = other DNA
gagatccagtagtgggaaag

SEQ ID NO: 15497 - DNA, 20 bp, synthetic construct
  source 1..20: mol_type = other DNA
gcagctgcaacaccagcggc

SEQ ID NO: 15498 - DNA, 20 bp, synthetic construct
  source 1..20: mol_type = other DNA
cagttccttcttgactacca

SEQ ID NO: 15499 - DNA, 20 bp, synthetic construct
  source 1..20: mol_type = other DNA
tgaggaggttatcgcgcttc

SEQ ID NO: 15500 - DNA, 20 bp, synthetic construct
  source 1..20: mol_type = other DNA
gatccagctccacacagctc

SEQ ID NO: 15501 - DNA, 20 bp, synthetic construct
  source 1..20: mol_type = other DNA
gacgagctggggttccacag

SEQ ID NO: 15502 - DNA, 20 bp, synthetic construct
  source 1..20: mol_type = other DNA
ggtggcgaggggactacgga

SEQ ID NO: 15503 - DNA, 20 bp, synthetic construct
  source 1..20: mol_type = other DNA
gccaggtgagcgggcagagg

SEQ ID NO: 15504 - DNA, 20 bp, synthetic construct
  source 1..20: mol_type = other DNA
cttcctgcccgacccggcca

SEQ ID NO: 15505 - DNA, 20 bp, synthetic construct
  source 1..20: mol_type = other DNA
ctacaactgggctggcggcc

SEQ ID NO: 15506 - DNA, 20 bp, synthetic construct
  source 1..20: mol_type = other DNA
gatgtccactatgacaattg

SEQ ID NO: 15507 - DNA, 20 bp, synthetic construct
  source 1..20: mol_type = other DNA
catctgccaaagaatggccg

SEQ ID NO: 15508 - DNA, 20 bp, synthetic construct
  source 1..20: mol_type = other DNA
ccagcatgagggcctcggcc

SEQ ID NO: 15509 - DNA, 20 bp, synthetic construct
  source 1..20: mol_type = other DNA
ctggacagttcggggaggtg

SEQ ID NO: 15510 - DNA, 20 bp, synthetic construct
  source 1..20: mol_type = other DNA
tctgcaggggagctcggagc

SEQ ID NO: 15511 - DNA, 20 bp, synthetic construct
  source 1..20: mol_type = other DNA
ctcacgttcatcatggtgcc

SEQ ID NO: 15512 - DNA, 20 bp, synthetic construct
  source 1..20: mol_type = other DNA
agaaggtacctctgagatgc

SEQ ID NO: 15513 - DNA, 20 bp, synthetic construct
  source 1..20: mol_type = other DNA
tcacctgtgcatatgagctg

SEQ ID NO: 15514 - DNA, 20 bp, synthetic construct
  source 1..20: mol_type = other DNA
gccctggaggatgacgagct

SEQ ID NO: 15515 - DNA, 20 bp, synthetic construct
  source 1..20: mol_type = other DNA
ctcactctctcgcacgagga

SEQ ID NO: 15516 - DNA, 20 bp, synthetic construct
  source 1..20: mol_type = other DNA
tccaggtatttcaccgagtc

SEQ ID NO: 15517 - DNA, 20 bp, synthetic construct
  source 1..20: mol_type = other DNA
ttggccagtgccaggccctg

SEQ ID NO: 15518 - DNA, 20 bp, synthetic construct
  source 1..20: mol_type = other DNA
gggtgcgtagataatctgac

SEQ ID NO: 15519 - DNA, 20 bp, synthetic construct
  source 1..20: mol_type = other DNA
gccaccgcgtgacctgggat

SEQ ID NO: 15520 - DNA, 20 bp, synthetic construct
  source 1..20: mol_type = other DNA
acagcccacagctcctgatg

SEQ ID NO: 15521 - DNA, 20 bp, synthetic construct
  source 1..20: mol_type = other DNA
gaactgctggaactcaggaa

SEQ ID NO: 15522 - DNA, 20 bp, synthetic construct
  source 1..20: mol_type = other DNA
ttaccagcagaactctctaa

SEQ ID NO: 15523 - DNA, 20 bp, synthetic construct
  source 1..20: mol_type = other DNA
ctgaagggaagataatggaa

SEQ ID NO: 15524 - DNA, 20 bp, synthetic construct
  source 1..20: mol_type = other DNA
tttgattcgggagagctcaa

SEQ ID NO: 15525 - DNA, 20 bp, synthetic construct
  source 1..20: mol_type = other DNA
catgagtcaacgtggatggg

SEQ ID NO: 15526 - DNA, 20 bp, synthetic construct
  source 1..20: mol_type = other DNA
tgcaacaccagcggctggtt

SEQ ID NO: 15527 - DNA, 20 bp, synthetic construct
  source 1..20: mol_type = other DNA
caactacgcctgccgccgga

SEQ ID NO: 15528 - DNA, 20 bp, synthetic construct
  source 1..20: mol_type = other DNA
cggccactgtcaatagagag

SEQ ID NO: 15529 - DNA, 20 bp, synthetic construct
  source 1..20: mol_type = other DNA
ggctcgcatgcgctgctcca

SEQ ID NO: 15530 - DNA, 20 bp, synthetic construct
  source 1..20: mol_type = other DNA
tccccaccgtgtgagttcct

SEQ ID NO: 15531 - DNA, 20 bp, synthetic construct
  source 1..20: mol_type = other DNA
caaaggtgggccggtcctct

SEQ ID NO: 15532 - DNA, 20 bp, synthetic construct
  source 1..20: mol_type = other DNA
acaaactgtccagaaacatg

SEQ ID NO: 15533 - DNA, 20 bp, synthetic construct
  source 1..20: mol_type = other DNA
ccatccaagatcaaccgagc

SEQ ID NO: 15534 - DNA, 20 bp, synthetic construct
  source 1..20: mol_type = other DNA
ggagcagccccagcccgtcg

SEQ ID NO: 15535 - DNA, 20 bp, synthetic construct
  source 1..20: mol_type = other DNA
agaattgaagaagaagtgga

SEQ ID NO: 15536 - DNA, 20 bp, synthetic construct
  source 1..20: mol_type = other DNA
acccacctgcgactccattc

SEQ ID NO: 15537 - DNA, 20 bp, synthetic construct
  source 1..20: mol_type = other DNA
cagtgccatggctgctctcc

SEQ ID NO: 15538 - DNA, 20 bp, synthetic construct
  source 1..20: mol_type = other DNA
gataggagagcggccggaga

SEQ ID NO: 15539 - DNA, 20 bp, synthetic construct
  source 1..20: mol_type = other DNA
cgggagtggaaggcctgcca

SEQ ID NO: 15540 - DNA, 20 bp, synthetic construct
  source 1..20: mol_type = other DNA
ggtcaccacgagcagggctg

SEQ ID NO: 15541 - DNA, 20 bp, synthetic construct
  source 1..20: mol_type = other DNA
gaccagtcagtttccaggta

SEQ ID NO: 15542 - DNA, 20 bp, synthetic construct
  source 1..20: mol_type = other DNA
gttacctgctcggttgatct

SEQ ID NO: 15543 - DNA, 20 bp, synthetic construct
  source 1..20: mol_type = other DNA
tcaccggctgtagctgggta

SEQ ID NO: 15544 - DNA, 20 bp, synthetic construct
  source 1..20: mol_type = other DNA
ctctggaggaggaatgccaa

SEQ ID NO: 15545 - DNA, 20 bp, synthetic construct
  source 1..20: mol_type = other DNA
aagcagaagacagagtttgt

SEQ ID NO: 15546 - DNA, 20 bp, synthetic construct
  source 1..20: mol_type = other DNA
agccaccgcgtgacctggga

SEQ ID NO: 15547 - DNA, 20 bp, synthetic construct
  source 1..20: mol_type = other DNA
caccaggggtctggaagttg

SEQ ID NO: 15548 - DNA, 20 bp, synthetic construct
  source 1..20: mol_type = other DNA
agcggcagctcctggcgccc

SEQ ID NO: 15549 - DNA, 20 bp, synthetic construct
  source 1..20: mol_type = other DNA
tgtttctaggaacgccgagg

SEQ ID NO: 15550 - DNA, 20 bp, synthetic construct
  source 1..20: mol_type = other DNA
ggtagggcgtgagcttggca

SEQ ID NO: 15551 - DNA, 20 bp, synthetic construct
  source 1..20: mol_type = other DNA
caggccctccaggagctggg

SEQ ID NO: 15552 - DNA, 20 bp, synthetic construct
  source 1..20: mol_type = other DNA
ggtgaagcgcaccaacagag

SEQ ID NO: 15553 - DNA, 20 bp, synthetic construct
  source 1..20: mol_type = other DNA
ccacagatccacatgggcaa

SEQ ID NO: 15554 - DNA, 20 bp, synthetic construct
  source 1..20: mol_type = other DNA
cgatgtgttggagaagctgc

SEQ ID NO: 15555 - DNA, 20 bp, synthetic construct
  source 1..20: mol_type = other DNA
cggggcgatcctcccacctg

SEQ ID NO: 15556 - DNA, 20 bp, synthetic construct
  source 1..20: mol_type = other DNA
tgttgcactcaaaaggatca

SEQ ID NO: 15557 - DNA, 20 bp, synthetic construct
  source 1..20: mol_type = other DNA
gtaccaggtagcaggtgagt

SEQ ID NO: 15558 - DNA, 20 bp, synthetic construct
  source 1..20: mol_type = other DNA
ggccgtcccagcagtccact

SEQ ID NO: 15559 - DNA, 20 bp, synthetic construct
  source 1..20: mol_type = other DNA
aggcgtcactttcacttggg

SEQ ID NO: 15560 - DNA, 20 bp, synthetic construct
  source 1..20: mol_type = other DNA
gtaccacaggatggacgccc

SEQ ID NO: 15561 - DNA, 20 bp, synthetic construct
  source 1..20: mol_type = other DNA
tctggaaccagatggtcacc

SEQ ID NO: 15562 - DNA, 20 bp, synthetic construct
  source 1..20: mol_type = other DNA
ctcacatgagtcaacgtgga

SEQ ID NO: 15563 - DNA, 20 bp, synthetic construct
  source 1..20: mol_type = other DNA
tggggctcaggtgtgtgaac

SEQ ID NO: 15564 - DNA, 20 bp, synthetic construct
  source 1..20: mol_type = other DNA
actggccccctcgatcttgt

SEQ ID NO: 15565 - DNA, 20 bp, synthetic construct
  source 1..20: mol_type = other DNA
gtgagaagttcggcctcaag

SEQ ID NO: 15566 - DNA, 20 bp, synthetic construct
  source 1..20: mol_type = other DNA
cctgaaacgggtatttatag

SEQ ID NO: 15567 - DNA, 20 bp, synthetic construct
  source 1..20: mol_type = other DNA
gtctgcaatcttgcagctca

SEQ ID NO: 15568 - DNA, 20 bp, synthetic construct
  source 1..20: mol_type = other DNA
tcacctaagcagcatctgac

SEQ ID NO: 15569 - DNA, 20 bp, synthetic construct
  source 1..20: mol_type = other DNA
gcaaagaggtgctccaggac

SEQ ID NO: 15570 - DNA, 20 bp, synthetic construct
  source 1..20: mol_type = other DNA
tcacatgagtcaacgtggat

SEQ ID NO: 15571 - DNA, 20 bp, synthetic construct
  source 1..20: mol_type = other DNA
ctgtaaagacaaggggcatc

SEQ ID NO: 15572 - DNA, 20 bp, synthetic construct
  source 1..20: mol_type = other DNA
ttcatcaagctcagtgaccc

SEQ ID NO: 15573 - DNA, 20 bp, synthetic construct
  source 1..20: mol_type = other DNA
caagcagaagacagagtttg

SEQ ID NO: 15574 - DNA, 20 bp, synthetic construct
  source 1..20: mol_type = other DNA
ttcctgcccgacccggccac

SEQ ID NO: 15575 - DNA, 20 bp, synthetic construct
  source 1..20: mol_type = other DNA
ctttggttaacacaaagaag

SEQ ID NO: 15576 - DNA, 20 bp, synthetic construct
  source 1..20: mol_type = other DNA
ttgctccagatcgtgagagc

SEQ ID NO: 15577 - DNA, 20 bp, synthetic construct
  source 1..20: mol_type = other DNA
tggtcctatgcagtaggcag

SEQ ID NO: 15578 - DNA, 20 bp, synthetic construct
  source 1..20: mol_type = other DNA
cccttactctcttcatcaaa

SEQ ID NO: 15579 - DNA, 20 bp, synthetic construct
  source 1..20: mol_type = other DNA
gagtccattgtccactgtga

SEQ ID NO: 15580 - DNA, 20 bp, synthetic construct
  source 1..20: mol_type = other DNA
catccagatccgttatcaga

SEQ ID NO: 15581 - DNA, 20 bp, synthetic construct
  source 1..20: mol_type = other DNA
gctggtcagaacaaagtagt

SEQ ID NO: 15582 - DNA, 20 bp, synthetic construct
  source 1..20: mol_type = other DNA
acatacttctgtaatacact

SEQ ID NO: 15583 - DNA, 20 bp, synthetic construct
  source 1..20: mol_type = other DNA
gctctacgctgtggtcaccc

SEQ ID NO: 15584 - DNA, 20 bp, synthetic construct
  source 1..20: mol_type = other DNA
tgaccagggcaacgaggatg

SEQ ID NO: 15585 - DNA, 20 bp, synthetic construct
  source 1..20: mol_type = other DNA
agcagatgaggaagacgtcc

SEQ ID NO: 15586 - DNA, 20 bp, synthetic construct
  source 1..20: mol_type = other DNA
gatttcggttgtacaagccc

SEQ ID NO: 15587 - DNA, 20 bp, synthetic construct
  source 1..20: mol_type = other DNA
cccacagtgtacgagaacac

SEQ ID NO: 15588 - DNA, 20 bp, synthetic construct
  source 1..20: mol_type = other DNA
ttcctggaggaaaaagacaa

SEQ ID NO: 15589 - DNA, 20 bp, synthetic construct
  source 1..20: mol_type = other DNA
tcccatacctcatccggtag

SEQ ID NO: 15590 - DNA, 20 bp, synthetic construct
  source 1..20: mol_type = other DNA
gcatctgcgaggacgaggga

SEQ ID NO: 15591 - DNA, 20 bp, synthetic construct
  source 1..20: mol_type = other DNA
tgcccgctcacctggctcag

SEQ ID NO: 15592 - DNA, 20 bp, synthetic construct
  source 1..20: mol_type = other DNA
tagtggacatctgcatcact

SEQ ID NO: 15593 - DNA, 20 bp, synthetic construct
  source 1..20: mol_type = other DNA
tacctccctctccggctcca

SEQ ID NO: 15594 - DNA, 20 bp, synthetic construct
  source 1..20: mol_type = other DNA
agaccgagacaacaagaagg

SEQ ID NO: 15595 - DNA, 20 bp, synthetic construct
  source 1..20: mol_type = other DNA
cttcctccactgtggagagg

SEQ ID NO: 15596 - DNA, 20 bp, synthetic construct
  source 1..20: mol_type = other DNA
cagctgagcaaactgcccgt

SEQ ID NO: 15597 - DNA, 20 bp, synthetic construct
  source 1..20: mol_type = other DNA
tagtaccctgggtcggggaa

SEQ ID NO: 15598 - DNA, 20 bp, synthetic construct
  source 1..20: mol_type = other DNA
ggtggccaccaccagcacag

SEQ ID NO: 15599 - DNA, 20 bp, synthetic construct
  source 1..20: mol_type = other DNA
cagctggagaagcttgcaac

SEQ ID NO: 15600 - DNA, 20 bp, synthetic construct
  source 1..20: mol_type = other DNA
gccgccaccctccaatgacg

SEQ ID NO: 15601 - DNA, 20 bp, synthetic construct
  source 1..20: mol_type = other DNA
aaacactgaacctctgggag

SEQ ID NO: 15602 - DNA, 20 bp, synthetic construct
  source 1..20: mol_type = other DNA
ccatgtcagtctctgtcctc

SEQ ID NO: 15603 - DNA, 20 bp, synthetic construct
  source 1..20: mol_type = other DNA
ctggttccctgccaactacg

SEQ ID NO: 15604 - DNA, 20 bp, synthetic construct
  source 1..20: mol_type = other DNA
ggacagcaaggctggtggcg

SEQ ID NO: 15605 - DNA, 20 bp, synthetic construct
  source 1..20: mol_type = other DNA
aaccaggccctcttcatgac

SEQ ID NO: 15606 - DNA, 20 bp, synthetic construct
  source 1..20: mol_type = other DNA
ggccagctctgtccacttgg

SEQ ID NO: 15607 - DNA, 20 bp, synthetic construct
  source 1..20: mol_type = other DNA
ggaccccgatcgcccagaac

SEQ ID NO: 15608 - DNA, 20 bp, synthetic construct
  source 1..20: mol_type = other DNA
ctggtcagaacaaagtagtg

SEQ ID NO: 15609 - DNA, 20 bp, synthetic construct
  source 1..20: mol_type = other DNA
taatgcagagtgaggttggt

SEQ ID NO: 15610 - DNA, 20 bp, synthetic construct
  source 1..20: mol_type = other DNA
agcccacaggcattgcagac

SEQ ID NO: 15611 - DNA, 20 bp, synthetic construct
  source 1..20: mol_type = other DNA
ccatagacgaggaacctaca

SEQ ID NO: 15612 - DNA, 20 bp, synthetic construct
  source 1..20: mol_type = other DNA
caaccagcgccggaggggca

SEQ ID NO: 15613 - DNA, 20 bp, synthetic construct
  source 1..20: mol_type = other DNA
gctccagacacaggagatgt

SEQ ID NO: 15614 - DNA, 20 bp, synthetic construct
  source 1..20: mol_type = other DNA
tcctcccaccacggcttctg

SEQ ID NO: 15615 - DNA, 20 bp, synthetic construct
  source 1..20: mol_type = other DNA
atgacgagaacaccaagctc

SEQ ID NO: 15616 - DNA, 20 bp, synthetic construct
  source 1..20: mol_type = other DNA
ttgagcgcctcacacagctg

SEQ ID NO: 15617 - DNA, 20 bp, synthetic construct
  source 1..20: mol_type = other DNA
tggcggccaggatggttctt

SEQ ID NO: 15618 - DNA, 20 bp, synthetic construct
  source 1..20: mol_type = other DNA
ccacagctgctcatccgaaa

SEQ ID NO: 15619 - DNA, 20 bp, synthetic construct
  source 1..20: mol_type = other DNA
ccgggacatgtcatccttcc

SEQ ID NO: 15620 - DNA, 20 bp, synthetic construct
  source 1..20: mol_type = other DNA
gacggcaagttcctgtatgt

SEQ ID NO: 15621 - DNA, 20 bp, synthetic construct
  source 1..20: mol_type = other DNA
caccgtgtctgttttcacca

SEQ ID NO: 15622 - DNA, 20 bp, synthetic construct
  source 1..20: mol_type = other DNA
gtttccgcagaataaaaagc

SEQ ID NO: 15623 - DNA, 20 bp, synthetic construct
  source 1..20: mol_type = other DNA
cagacccctgactatgaaga

SEQ ID NO: 15624 - DNA, 20 bp, synthetic construct
  source 1..20: mol_type = other DNA
cattgccggctgtgtcccag

SEQ ID NO: 15625 - DNA, 20 bp, synthetic construct
  source 1..20: mol_type = other DNA
ccatctccatgaccagcatg

SEQ ID NO: 15626 - DNA, 20 bp, synthetic construct
  source 1..20: mol_type = other DNA
caaggtaaggctactccagg

SEQ ID NO: 15627 - DNA, 20 bp, synthetic construct
  source 1..20: mol_type = other DNA
gtggcttcattttcccatgg

SEQ ID NO: 15628 - DNA, 20 bp, synthetic construct
  source 1..20: mol_type = other DNA
ctaccgggaaatcctcgtga

SEQ ID NO: 15629 - DNA, 20 bp, synthetic construct
  source 1..20: mol_type = other DNA
ctccatcagcatggcgtcgg

SEQ ID NO: 15630 - DNA, 20 bp, synthetic construct
  source 1..20: mol_type = other DNA
agccttaccttgcgagagaa

SEQ ID NO: 15631 - DNA, 20 bp, synthetic construct
  source 1..20: mol_type = other DNA
aagcctcaggcaagccccga

SEQ ID NO: 15632 - DNA, 20 bp, synthetic construct
  source 1..20: mol_type = other DNA
caatgagccgcacgatgtag

SEQ ID NO: 15633 - DNA, 20 bp, synthetic construct
  source 1..20: mol_type = other DNA
gcccaggatgtcagagccaa

SEQ ID NO: 15634 - DNA, 20 bp, synthetic construct
  source 1..20: mol_type = other DNA
gctgccagaaattgtttggt

SEQ ID NO: 15635 - DNA, 20 bp, synthetic construct
  source 1..20: mol_type = other DNA
ctcgtagatgggcaccgtgt

SEQ ID NO: 15636 - DNA, 20 bp, synthetic construct
  source 1..20: mol_type = other DNA
gttcaggaatgagttatggt

SEQ ID NO: 15637 - DNA, 20 bp, synthetic construct
  source 1..20: mol_type = other DNA
ctgaagctggtggagcggct

SEQ ID NO: 15638 - DNA, 20 bp, synthetic construct
  source 1..20: mol_type = other DNA
gacagccattctgtatgttg

SEQ ID NO: 15639 - DNA, 20 bp, synthetic construct
  source 1..20: mol_type = other DNA
tggacattctacataccaag

SEQ ID NO: 15640 - DNA, 20 bp, synthetic construct
  source 1..20: mol_type = other DNA
acaccctgtctgctctgtcc

SEQ ID NO: 15641 - DNA, 20 bp, synthetic construct
  source 1..20: mol_type = other DNA
ttttgaaggtaggtgacctg

SEQ ID NO: 15642 - DNA, 20 bp, synthetic construct
  source 1..20: mol_type = other DNA
tgtaaagacaaggggcatca

SEQ ID NO: 15643 - DNA, 20 bp, synthetic construct
  source 1..20: mol_type = other DNA
aactatcaccaacataatgg

SEQ ID NO: 15644 - DNA, 20 bp, synthetic construct
  source 1..20: mol_type = other DNA
cactggagaaggcactgtct

SEQ ID NO: 15645 - DNA, 20 bp, synthetic construct
  source 1..20: mol_type = other DNA
cagatgaggaagacgtcctg

SEQ ID NO: 15646 - DNA, 20 bp, synthetic construct
  source 1..20: mol_type = other DNA
gtcccaggtgagccctccgc

SEQ ID NO: 15647 - DNA, 20 bp, synthetic construct
  source 1..20: mol_type = other DNA
ccccaccgtgtgagttcctg

SEQ ID NO: 15648 - DNA, 20 bp, synthetic construct
  source 1..20: mol_type = other DNA
tgaaggagcagggactggaa

SEQ ID NO: 15649 - DNA, 20 bp, synthetic construct
  source 1..20: mol_type = other DNA
ccatgagtgcaacttgcctg

SEQ ID NO: 15650 - DNA, 20 bp, synthetic construct
  source 1..20: mol_type = other DNA
tgcagttctcacacactgtg

SEQ ID NO: 15651 - DNA, 20 bp, synthetic construct
  source 1..20: mol_type = other DNA
tgatgatgtagatgggctcc

SEQ ID NO: 15652 - DNA, 20 bp, synthetic construct
  source 1..20: mol_type = other DNA
ttctactcttcctcctgtag

SEQ ID NO: 15653 - DNA, 20 bp, synthetic construct
  source 1..20: mol_type = other DNA
ccacagctcctgatggggta

SEQ ID NO: 15654 - DNA, 20 bp, synthetic construct
  source 1..20: mol_type = other DNA
aggagctgtaccaactcatg

SEQ ID NO: 15655 - DNA, 20 bp, synthetic construct
  source 1..20: mol_type = other DNA
ccccgatcgcccagaacagg

SEQ ID NO: 15656 - DNA, 20 bp, synthetic construct
  source 1..20: mol_type = other DNA
ccacagtgtacgagaacaca

SEQ ID NO: 15657 - DNA, 20 bp, synthetic construct
  source 1..20: mol_type = other DNA
aacgagtacacagccaggga

SEQ ID NO: 15658 - DNA, 20 bp, synthetic construct
  source 1..20: mol_type = other DNA
ggaagagtgcctcagggcag

SEQ ID NO: 15659 - DNA, 20 bp, synthetic construct
  source 1..20: mol_type = other DNA
ggcggccggtccaccaggat

SEQ ID NO: 15660 - DNA, 20 bp, synthetic construct
  source 1..20: mol_type = other DNA
tgctccacggtcaggaagtc

SEQ ID NO: 15661 - DNA, 20 bp, synthetic construct
  source 1..20: mol_type = other DNA
agccagttgacgcagcagtc

SEQ ID NO: 15662 - DNA, 20 bp, synthetic construct
  source 1..20: mol_type = other DNA
ctcctagaaggcggaccaca

SEQ ID NO: 15663 - DNA, 20 bp, synthetic construct
  source 1..20: mol_type = other DNA
tcctggaggaaaaagacaag

SEQ ID NO: 15664 - DNA, 20 bp, synthetic construct
  source 1..20: mol_type = other DNA
gggcagctgcaggaataaga

SEQ ID NO: 15665 - DNA, 20 bp, synthetic construct
  source 1..20: mol_type = other DNA
tcccactcgtcctcccacca

SEQ ID NO: 15666 - DNA, 20 bp, synthetic construct
  source 1..20: mol_type = other DNA
aaaacactgaacctctggga

SEQ ID NO: 15667 - DNA, 20 bp, synthetic construct
  source 1..20: mol_type = other DNA
gtgcaggcggccggtccacc

SEQ ID NO: 15668 - DNA, 20 bp, synthetic construct
  source 1..20: mol_type = other DNA
tctgtggcttcattttccca

SEQ ID NO: 15669 - DNA, 20 bp, synthetic construct
  source 1..20: mol_type = other DNA
ctcggaggaagcgcatgttg

SEQ ID NO: 15670 - DNA, 20 bp, synthetic construct
  source 1..20: mol_type = other DNA
accaactcatgaggctgtgc

SEQ ID NO: 15671 - DNA, 20 bp, synthetic construct
  source 1..20: mol_type = other DNA
gcctcgccctagaaaaggag

SEQ ID NO: 15672 - DNA, 20 bp, synthetic construct
  source 1..20: mol_type = other DNA
cagaatgtggagaagcaaga

SEQ ID NO: 15673 - DNA, 20 bp, synthetic construct
  source 1..20: mol_type = other DNA
ctggaagggcacaaaggtca

SEQ ID NO: 15674 - DNA, 20 bp, synthetic construct
  source 1..20: mol_type = other DNA
gcacatcaagctgcattccg

SEQ ID NO: 15675 - DNA, 20 bp, synthetic construct
  source 1..20: mol_type = other DNA
ggtgtagatgacctgtgacg

SEQ ID NO: 15676 - DNA, 20 bp, synthetic construct
  source 1..20: mol_type = other DNA
ggagaagctgcaggtgaagg

SEQ ID NO: 15677 - DNA, 20 bp, synthetic construct
  source 1..20: mol_type = other DNA
atgagtcaacgtggatgggt

SEQ ID NO: 15678 - DNA, 20 bp, synthetic construct
  source 1..20: mol_type = other DNA
ctccactcacccaggaagga

SEQ ID NO: 15679 - DNA, 20 bp, synthetic construct
  source 1..20: mol_type = other DNA
cccttccatggcattgacgc

SEQ ID NO: 15680 - DNA, 20 bp, synthetic construct
  source 1..20: mol_type = other DNA
ggggcgatcctcccacctgt

SEQ ID NO: 15681 - DNA, 20 bp, synthetic construct
  source 1..20: mol_type = other DNA
ggaggttccctgcagtgacc

SEQ ID NO: 15682 - DNA, 20 bp, synthetic construct
  source 1..20: mol_type = other DNA
gccagcttcttgtgctgtag

SEQ ID NO: 15683 - DNA, 20 bp, synthetic construct
  source 1..20: mol_type = other DNA
cccttccagtgcaatcagtg

SEQ ID NO: 15684 - DNA, 20 bp, synthetic construct
  source 1..20: mol_type = other DNA
aggccccgcactgattgcac

SEQ ID NO: 15685 - DNA, 20 bp, synthetic construct
  source 1..20: mol_type = other DNA
ggaaggcatacctggaagga

SEQ ID NO: 15686 - DNA, 20 bp, synthetic construct
  source 1..20: mol_type = other DNA
gttggacattctacatacca

SEQ ID NO: 15687 - DNA, 20 bp, synthetic construct
  source 1..20: mol_type = other DNA
ccctgctcgtggtgaccgaa

SEQ ID NO: 15688 - DNA, 20 bp, synthetic construct
  source 1..20: mol_type = other DNA
cggtcaccacgagcagggct

SEQ ID NO: 15689 - DNA, 20 bp, synthetic construct
  source 1..20: mol_type = other DNA
tctaccagcttatttaggga

SEQ ID NO: 15690 - DNA, 20 bp, synthetic construct
  source 1..20: mol_type = other DNA
gcagcggtagccctgataga

SEQ ID NO: 15691 - DNA, 20 bp, synthetic construct
  source 1..20: mol_type = other DNA
gtggcagacctacagtgtag

SEQ ID NO: 15692 - DNA, 20 bp, synthetic construct
  source 1..20: mol_type = other DNA
gtgcagatgaagctggaggt

SEQ ID NO: 15693 - DNA, 20 bp, synthetic construct
  source 1..20: mol_type = other DNA
catccagacacatgcccagc

SEQ ID NO: 15694 - DNA, 20 bp, synthetic construct
  source 1..20: mol_type = other DNA
tggtcatccctacgggttga

SEQ ID NO: 15695 - DNA, 20 bp, synthetic construct
  source 1..20: mol_type = other DNA
gccgttgtcgacgacgagcg

SEQ ID NO: 15696 - DNA, 20 bp, synthetic construct
  source 1..20: mol_type = other DNA
caccctgaaaggaagtgaaa

SEQ ID NO: 15697 - DNA, 20 bp, synthetic construct
  source 1..20: mol_type = other DNA
gcttcattttcccatggtgg

SEQ ID NO: 15698 - DNA, 20 bp, synthetic construct
  source 1..20: mol_type = other DNA
ggcttcaaagagagggtgag

SEQ ID NO: 15699 - DNA, 20 bp, synthetic construct
  source 1..20: mol_type = other DNA
tccagcaggtagcagagttt

SEQ ID NO: 15700 - DNA, 20 bp, synthetic construct
  source 1..20: mol_type = other DNA
caagtaaggagactggggag

SEQ ID NO: 15701 - DNA, 20 bp, synthetic construct
  source 1..20: mol_type = other DNA
atgcagttctcacacactgt

SEQ ID NO: 15702 - DNA, 20 bp, synthetic construct
  source 1..20: mol_type = other DNA
ttgtggcagacctacagtgt

SEQ ID NO: 15703 - DNA, 20 bp, synthetic construct
  source 1..20: mol_type = other DNA
cctcctccagagtgtggttg

SEQ ID NO: 15704 - DNA, 20 bp, synthetic construct
  source 1..20: mol_type = other DNA
ggaactgctggaactcagga

SEQ ID NO: 15705 - DNA, 20 bp, synthetic construct
  source 1..20: mol_type = other DNA
tctacaagtgagtgccagtg

SEQ ID NO: 15706 - DNA, 20 bp, synthetic construct
  source 1..20: mol_type = other DNA
acggcctcgtgagtacaagg

SEQ ID NO: 15707 - DNA, 20 bp, synthetic construct
  source 1..20: mol_type = other DNA
tcacctccagcttccacgtc

SEQ ID NO: 15708 - DNA, 20 bp, synthetic construct
  source 1..20: mol_type = other DNA
gacatgggcaaggtacgagt

SEQ ID NO: 15709 - DNA, 20 bp, synthetic construct
  source 1..20: mol_type = other DNA
tgaggatgcctctcttgctc

SEQ ID NO: 15710 - DNA, 20 bp, synthetic construct
  source 1..20: mol_type = other DNA
gcaaagtccaatgcagccag

SEQ ID NO: 15711 - DNA, 20 bp, synthetic construct
  source 1..20: mol_type = other DNA
ggcaagaggtgagcaccggg

SEQ ID NO: 15712 - DNA, 20 bp, synthetic construct
  source 1..20: mol_type = other DNA
ccccatcccaggtcacgcgg

SEQ ID NO: 15713 - DNA, 20 bp, synthetic construct
  source 1..20: mol_type = other DNA
ttcagtgaaagcagcaaaga

SEQ ID NO: 15714 - DNA, 20 bp, synthetic construct
  source 1..20: mol_type = other DNA
tgctatgttccatctcccag

SEQ ID NO: 15715 - DNA, 20 bp, synthetic construct
  source 1..20: mol_type = other DNA
cataccatcatcttcatcct

SEQ ID NO: 15716 - DNA, 20 bp, synthetic construct
  source 1..20: mol_type = other DNA
accagattatgaatcactgc

SEQ ID NO: 15717 - DNA, 20 bp, synthetic construct
  source 1..20: mol_type = other DNA
acctgtaggcagacaaagaa

SEQ ID NO: 15718 - DNA, 20 bp, synthetic construct
  source 1..20: mol_type = other DNA
ggggcagctgcaggaataag

SEQ ID NO: 15719 - DNA, 20 bp, synthetic construct
  source 1..20: mol_type = other DNA
agtcctccagcacactgcgc

SEQ ID NO: 15720 - DNA, 20 bp, synthetic construct
  source 1..20: mol_type = other DNA
cgttgcgggccgccaggtca

SEQ ID NO: 15721 - DNA, 20 bp, synthetic construct
  source 1..20: mol_type = other DNA
ggtgtcagacaccagaatgt

SEQ ID NO: 15722 - DNA, 20 bp, synthetic construct
  source 1..20: mol_type = other DNA
gcttcatctgcacgtcctcc

SEQ ID NO: 15723 - DNA, 20 bp, synthetic construct
  source 1..20: mol_type = other DNA
tgaactggcccaggccctcc

SEQ ID NO: 15724 - DNA, 20 bp, synthetic construct
  source 1..20: mol_type = other DNA
ccgtgcccttgccatccagt

SEQ ID NO: 15725 - DNA, 20 bp, synthetic construct
  source 1..20: mol_type = other DNA
ttctcaccgaaaagttcccg

SEQ ID NO: 15726 - DNA, 20 bp, synthetic construct
  source 1..20: mol_type = other DNA
caggtaggaggtctcagact

SEQ ID NO: 15727 - DNA, 20 bp, synthetic construct
  source 1..20: mol_type = other DNA
aggggaacaggacctggtcc

SEQ ID NO: 15728 - DNA, 20 bp, synthetic construct
  source 1..20: mol_type = other DNA
ctgcagggctggggagcggc

SEQ ID NO: 15729 - DNA, 20 bp, synthetic construct
  source 1..20: mol_type = other DNA
aggcctgtcagatgctgctt

SEQ ID NO: 15730 - DNA, 20 bp, synthetic construct
  source 1..20: mol_type = other DNA
gctcggcctcctcacgcgtc

SEQ ID NO: 15731 - DNA, 20 bp, synthetic construct
  source 1..20: mol_type = other DNA
gtgtacaggattgttcctga

SEQ ID NO: 15732 - DNA, 20 bp, synthetic construct
  source 1..20: mol_type = other DNA
ctgctccacggtcaggaagt

SEQ ID NO: 15733 - DNA, 20 bp, synthetic construct
  source 1..20: mol_type = other DNA
gctctcccgcatctacccca

SEQ ID NO: 15734 - DNA, 20 bp, synthetic construct
  source 1..20: mol_type = other DNA
tcaggtgtgtgaactggccc

SEQ ID NO: 15735 - DNA, 20 bp, synthetic construct
  source 1..20: mol_type = other DNA
ccatgcggtagcctcgctcc

SEQ ID NO: 15736 - DNA, 20 bp, synthetic construct
  source 1..20: mol_type = other DNA
tgaaggctccttctttgccc

SEQ ID NO: 15737 - DNA, 20 bp, synthetic construct
  source 1..20: mol_type = other DNA
cttgcagatggtgaactcca

SEQ ID NO: 15738 - DNA, 20 bp, synthetic construct
  source 1..20: mol_type = other DNA
ccatcatcttcatcctggga

SEQ ID NO: 15739 - DNA, 20 bp, synthetic construct
  source 1..20: mol_type = other DNA
ccgcttgccctgctcgatga

SEQ ID NO: 15740 - DNA, 20 bp, synthetic construct
  source 1..20: mol_type = other DNA
gtgccagagctgtgtggagc

SEQ ID NO: 15741 - DNA, 20 bp, synthetic construct
  source 1..20: mol_type = other DNA
aaccagcgccggaggggcaa

SEQ ID NO: 15742 - DNA, 20 bp, synthetic construct
  source 1..20: mol_type = other DNA
tcggttgtacaagccccggc

SEQ ID NO: 15743 - DNA, 20 bp, synthetic construct
  source 1..20: mol_type = other DNA
aaacagtgcccaagcctggt

SEQ ID NO: 15744 - DNA, 20 bp, synthetic construct
  source 1..20: mol_type = other DNA
cccacagctcctgatggggt

SEQ ID NO: 15745 - DNA, 20 bp, synthetic construct
  source 1..20: mol_type = other DNA
gtaggagcctgggaaagaga

SEQ ID NO: 15746 - DNA, 20 bp, synthetic construct
  source 1..20: mol_type = other DNA
tcaccatcaagtcagatgtg

SEQ ID NO: 15747 - DNA, 20 bp, synthetic construct
  source 1..20: mol_type = other DNA
tgctgcagccaagcaccatg

SEQ ID NO: 15748 - DNA, 20 bp, synthetic construct
  source 1..20: mol_type = other DNA
accccagctcgtcatcctcc

SEQ ID NO: 15749 - DNA, 20 bp, synthetic construct
  source 1..20: mol_type = other DNA
cgcaggcgcgtcttccaggt

SEQ ID NO: 15750 - DNA, 20 bp, synthetic construct
  source 1..20: mol_type = other DNA
ctcgtagatgggcacagtgt

SEQ ID NO: 15751 - DNA, 20 bp, synthetic construct
  source 1..20: mol_type = other DNA
cttagcaggaaggtgcctgg

SEQ ID NO: 15752 - DNA, 20 bp, synthetic construct
  source 1..20: mol_type = other DNA
ctgtggaagacacagagtga

SEQ ID NO: 15753 - DNA, 20 bp, synthetic construct
  source 1..20: mol_type = other DNA
gctccaggcatgtgagagga

SEQ ID NO: 15754 - DNA, 20 bp, synthetic construct
  source 1..20: mol_type = other DNA
ttcttgtaggtgtgctgatg

SEQ ID NO: 15755 - DNA, 20 bp, synthetic construct
  source 1..20: mol_type = other DNA
actgaaagagaaaacctctg

SEQ ID NO: 15756 - DNA, 20 bp, synthetic construct
  source 1..20: mol_type = other DNA
ccccggtcaggtacctggat

SEQ ID NO: 15757 - DNA, 20 bp, synthetic construct
  source 1..20: mol_type = other DNA
gctgccaggtgagcccactc

SEQ ID NO: 15758 - DNA, 20 bp, synthetic construct
  source 1..20: mol_type = other DNA
ccagctgtccattgagaacc

SEQ ID NO: 15759 - DNA, 20 bp, synthetic construct
  source 1..20: mol_type = other DNA
caccaggccctccaggagct

SEQ ID NO: 15760 - DNA, 20 bp, synthetic construct
  source 1..20: mol_type = other DNA
accgtgcccttgccatccag

SEQ ID NO: 15761 - DNA, 20 bp, synthetic construct
  source 1..20: mol_type = other DNA
cttacattctctcttctgtc

SEQ ID NO: 15762 - DNA, 20 bp, synthetic construct
  source 1..20: mol_type = other DNA
ccatgccttctgcaatctgc

SEQ ID NO: 15763 - DNA, 20 bp, synthetic construct
  source 1..20: mol_type = other DNA
ggcgctcgatgggaaagtgg

SEQ ID NO: 15764 - DNA, 20 bp, synthetic construct
  source 1..20: mol_type = other DNA
ccaggtgagtgggaaactgg

SEQ ID NO: 15765 - DNA, 20 bp, synthetic construct
  source 1..20: mol_type = other DNA
gtcctaccagcaggcagacg

SEQ ID NO: 15766 - DNA, 20 bp, synthetic construct
  source 1..20: mol_type = other DNA
ggtcctatgcagtaggcagg

SEQ ID NO: 15767 - DNA, 20 bp, synthetic construct
  source 1..20: mol_type = other DNA
cactgagccaggtcctgggg

SEQ ID NO: 15768 - DNA, 20 bp, synthetic construct
  source 1..20: mol_type = other DNA
gagatgctgccgtagaagaa

SEQ ID NO: 15769 - DNA, 20 bp, synthetic construct
  source 1..20: mol_type = other DNA
tgtccacttaatgggaaact

SEQ ID NO: 15770 - DNA, 20 bp, synthetic construct
  source 1..20: mol_type = other DNA
tcctcccacctgtggggcgt

SEQ ID NO: 15771 - DNA, 20 bp, synthetic construct
  source 1..20: mol_type = other DNA
attgcagacagggtccccat

SEQ ID NO: 15772 - DNA, 20 bp, synthetic construct
  source 1..20: mol_type = other DNA
tccacagaccggcccccctc

SEQ ID NO: 15773 - DNA, 20 bp, synthetic construct
  source 1..20: mol_type = other DNA
caggtgagcgggcagaggtg

SEQ ID NO: 15774 - DNA, 20 bp, synthetic construct
  source 1..20: mol_type = other DNA
gcgacagctctgatcggtct

SEQ ID NO: 15775 - DNA, 20 bp, synthetic construct
  source 1..20: mol_type = other DNA
gctgcagccaagcaccatgc

SEQ ID NO: 15776 - DNA, 20 bp, synthetic construct
  source 1..20: mol_type = other DNA
gccgtcccagcagtccactg

SEQ ID NO: 15777 - DNA, 20 bp, synthetic construct
  source 1..20: mol_type = other DNA
gtacctgcaaagagacacca

SEQ ID NO: 15778 - DNA, 20 bp, synthetic construct
  source 1..20: mol_type = other DNA
tgagccaggtcctggggagg

SEQ ID NO: 15779 - DNA, 20 bp, synthetic construct
  source 1..20: mol_type = other DNA
ccacagcagcctgacgcgtg

SEQ ID NO: 15780 - DNA, 20 bp, synthetic construct
  source 1..20: mol_type = other DNA
accaccatcagaatcccgcc

SEQ ID NO: 15781 - DNA, 20 bp, synthetic construct
  source 1..20: mol_type = other DNA
gacagcggcacctacctctg

SEQ ID NO: 15782 - DNA, 20 bp, synthetic construct
  source 1..20: mol_type = other DNA
gaagccctacaaggcaggcg

SEQ ID NO: 15783 - DNA, 20 bp, synthetic construct
  source 1..20: mol_type = other DNA
caacttccagacccctggtg

SEQ ID NO: 15784 - DNA, 20 bp, synthetic construct
  source 1..20: mol_type = other DNA
catccggtagtggagccgga

SEQ ID NO: 15785 - DNA, 20 bp, synthetic construct
  source 1..20: mol_type = other DNA
aagcctatgctcgctgcctg

SEQ ID NO: 15786 - DNA, 20 bp, synthetic construct
  source 1..20: mol_type = other DNA
cagcaggttggagatttctg

SEQ ID NO: 15787 - DNA, 20 bp, synthetic construct
  source 1..20: mol_type = other DNA
gcccgacatctgccaaagaa

SEQ ID NO: 15788 - DNA, 20 bp, synthetic construct
  source 1..20: mol_type = other DNA
tgcactggtatctggaacct

SEQ ID NO: 15789 - DNA, 20 bp, synthetic construct
  source 1..20: mol_type = other DNA
ggtagagattggctgcgcca

SEQ ID NO: 15790 - DNA, 20 bp, synthetic construct
  source 1..20: mol_type = other DNA
gcccaccgcactcgctgttg

SEQ ID NO: 15791 - DNA, 20 bp, synthetic construct
  source 1..20: mol_type = other DNA
ccaggttctgaatcacctcc

SEQ ID NO: 15792 - DNA, 20 bp, synthetic construct
  source 1..20: mol_type = other DNA
cacagtgtacgagaacacag

SEQ ID NO: 15793 - DNA, 20 bp, synthetic construct
  source 1..20: mol_type = other DNA
ttctctctggaagggcacaa

SEQ ID NO: 15794 - DNA, 20 bp, synthetic construct
  source 1..20: mol_type = other DNA
gccatcaacatggccaggat

SEQ ID NO: 15795 - DNA, 20 bp, synthetic construct
  source 1..20: mol_type = other DNA
acttcagcagacacaggctg

SEQ ID NO: 15796 - DNA, 20 bp, synthetic construct
  source 1..20: mol_type = other DNA
actgtccagaaacatgtgga

SEQ ID NO: 15797 - DNA, 20 bp, synthetic construct
  source 1..20: mol_type = other DNA
gtttattatcagtgcgtcca

SEQ ID NO: 15798 - DNA, 20 bp, synthetic construct
  source 1..20: mol_type = other DNA
cagggctggggagaaggtgg

SEQ ID NO: 15799 - DNA, 20 bp, synthetic construct
  source 1..20: mol_type = other DNA
cgctgtgggttgtgaggtca

SEQ ID NO: 15800 - DNA, 20 bp, synthetic construct
  source 1..20: mol_type = other DNA
tacagcgcaggggcacctgc

SEQ ID NO: 15801 - DNA, 20 bp, synthetic construct
  source 1..20: mol_type = other DNA
gcgggagatccagcagacgg

SEQ ID NO: 15802 - DNA, 20 bp, synthetic construct
  source 1..20: mol_type = other DNA
tcaaaggtgggccggtcctc

SEQ ID NO: 15803 - DNA, 20 bp, synthetic construct
  source 1..20: mol_type = other DNA
cgacagctctgatcggtctc

SEQ ID NO: 15804 - DNA, 20 bp, synthetic construct
  source 1..20: mol_type = other DNA
cagcaaacacctggaccgtg

SEQ ID NO: 15805 - DNA, 20 bp, synthetic construct
  source 1..20: mol_type = other DNA
cgctcctgcgccacggaggt

SEQ ID NO: 15806 - DNA, 20 bp, synthetic construct
  source 1..20: mol_type = other DNA
agttgtcagggcgcaccatg

SEQ ID NO: 15807 - DNA, 20 bp, synthetic construct
  source 1..20: mol_type = other DNA
acggcaagttcctgtatgtg

SEQ ID NO: 15808 - DNA, 20 bp, synthetic construct
  source 1..20: mol_type = other DNA
ggacacctggtgcagcagct

SEQ ID NO: 15809 - DNA, 20 bp, synthetic construct
  source 1..20: mol_type = other DNA
cggtatgttatgcaaggctg

SEQ ID NO: 15810 - DNA, 20 bp, synthetic construct
  source 1..20: mol_type = other DNA
gcgtcctcaggtggccagtg

SEQ ID NO: 15811 - DNA, 20 bp, synthetic construct
  source 1..20: mol_type = other DNA
cacttactgtctccgctgcc

SEQ ID NO: 15812 - DNA, 20 bp, synthetic construct
  source 1..20: mol_type = other DNA
ctctcttcatcaaagggaac

SEQ ID NO: 15813 - DNA, 20 bp, synthetic construct
  source 1..20: mol_type = other DNA
ttacgttatagagctggttc

SEQ ID NO: 15814 - DNA, 20 bp, synthetic construct
  source 1..20: mol_type = other DNA
ggccatcaaggtgctgaagc

SEQ ID NO: 15815 - DNA, 20 bp, synthetic construct
  source 1..20: mol_type = other DNA
ccctggaggatgacgagctg

SEQ ID NO: 15816 - DNA, 20 bp, synthetic construct
  source 1..20: mol_type = other DNA
cctgaagaacatgctgtccc

SEQ ID NO: 15817 - DNA, 20 bp, synthetic construct
  source 1..20: mol_type = other DNA
gccctttcgctcagaggtcc

SEQ ID NO: 15818 - DNA, 20 bp, synthetic construct
  source 1..20: mol_type = other DNA
gatggcctcctccatctgca

SEQ ID NO: 15819 - DNA, 20 bp, synthetic construct
  source 1..20: mol_type = other DNA
cgggacttcgaccagaacca

SEQ ID NO: 15820 - DNA, 20 bp, synthetic construct
  source 1..20: mol_type = other DNA
gcgctccaagatggacaggt

SEQ ID NO: 15821 - DNA, 20 bp, synthetic construct
  source 1..20: mol_type = other DNA
tgagcactccaggtagccct

SEQ ID NO: 15822 - DNA, 20 bp, synthetic construct
  source 1..20: mol_type = other DNA
ggagtatctgaagctgaagg

SEQ ID NO: 15823 - DNA, 20 bp, synthetic construct
  source 1..20: mol_type = other DNA
acggtatgttatgcaaggct

SEQ ID NO: 15824 - DNA, 20 bp, synthetic construct
  source 1..20: mol_type = other DNA
ccacacccctgcagattgag

SEQ ID NO: 15825 - DNA, 20 bp, synthetic construct
  source 1..20: mol_type = other DNA
catagagtcacctggaatct

SEQ ID NO: 15826 - DNA, 20 bp, synthetic construct
  source 1..20: mol_type = other DNA
agaaggaactgctggaactc

SEQ ID NO: 15827 - DNA, 20 bp, synthetic construct
  source 1..20: mol_type = other DNA
ctgtccagaaacatgtggaa

SEQ ID NO: 15828 - DNA, 20 bp, synthetic construct
  source 1..20: mol_type = other DNA
agtccaggccgctgtcgtgg

SEQ ID NO: 15829 - DNA, 20 bp, synthetic construct
  source 1..20: mol_type = other DNA
cactcaccgtggtgggtcgg

SEQ ID NO: 15830 - DNA, 20 bp, synthetic construct
  source 1..20: mol_type = other DNA
tgttcatactcacttcctaa

SEQ ID NO: 15831 - DNA, 20 bp, synthetic construct
  source 1..20: mol_type = other DNA
catctggaagtcatgcccgt

SEQ ID NO: 15832 - DNA, 20 bp, synthetic construct
  source 1..20: mol_type = other DNA
cgcaggtttcgggaggccca

SEQ ID NO: 15833 - DNA, 20 bp, synthetic construct
  source 1..20: mol_type = other DNA
cggaagcggcagtcctggcc

SEQ ID NO: 15834 - DNA, 20 bp, synthetic construct
  source 1..20: mol_type = other DNA
gctcatctactgcctgaagg

SEQ ID NO: 15835 - DNA, 20 bp, synthetic construct
  source 1..20: mol_type = other DNA
gttggagaagctgcaggtga

SEQ ID NO: 15836 - DNA, 20 bp, synthetic construct
  source 1..20: mol_type = other DNA
accagatcgagtgagtgctc

SEQ ID NO: 15837 - DNA, 20 bp, synthetic construct
  source 1..20: mol_type = other DNA
agaacttaccagccttcgct

SEQ ID NO: 15838 - DNA, 20 bp, synthetic construct
  source 1..20: mol_type = other DNA
acggaagcggcagtcctggc

SEQ ID NO: 15839 - DNA, 20 bp, synthetic construct
  source 1..20: mol_type = other DNA
ttcccatcaatgagcagaag

SEQ ID NO: 15840 - DNA, 20 bp, synthetic construct
  source 1..20: mol_type = other DNA
gagatggagactttatatgc

SEQ ID NO: 15841 - DNA, 20 bp, synthetic construct
  source 1..20: mol_type = other DNA
gagtggctagaaaatataga

SEQ ID NO: 15842 - DNA, 20 bp, synthetic construct
  source 1..20: mol_type = other DNA
ctccctgcagggctggggag

SEQ ID NO: 15843 - DNA, 20 bp, synthetic construct
  source 1..20: mol_type = other DNA
tccctccatgtggccgacat

SEQ ID NO: 15844 - DNA, 20 bp, synthetic construct
  source 1..20: mol_type = other DNA
cctctgccgcagcctcgagg

SEQ ID NO: 15845 - DNA, 20 bp, synthetic construct
  source 1..20: mol_type = other DNA
gctggccctggatgccatga

SEQ ID NO: 15846 - DNA, 20 bp, synthetic construct
  source 1..20: mol_type = other DNA
gggtccaggacagagcagac

SEQ ID NO: 15847 - DNA, 20 bp, synthetic construct
  source 1..20: mol_type = other DNA
gctctctgagaacattcctg

SEQ ID NO: 15848 - DNA, 20 bp, synthetic construct
  source 1..20: mol_type = other DNA
taccaccatcagaatcccgc

SEQ ID NO: 15849 - DNA, 20 bp, synthetic construct
  source 1..20: mol_type = other DNA
cttaaggcacaggaactgtg

SEQ ID NO: 15850 - DNA, 20 bp, synthetic construct
  source 1..20: mol_type = other DNA
gagccccatcccaggtcacg

SEQ ID NO: 15851 - DNA, 20 bp, synthetic construct
  source 1..20: mol_type = other DNA
tcctgcctcgtcacaacaac

SEQ ID NO: 15852 - DNA, 20 bp, synthetic construct
  source 1..20: mol_type = other DNA
atccagacacatgcccagca

SEQ ID NO: 15853 - DNA, 20 bp, synthetic construct
  source 1..20: mol_type = other DNA
ctctcaggcatggagtcctg

SEQ ID NO: 15854 - DNA, 20 bp, synthetic construct
  source 1..20: mol_type = other DNA
actcaccgtggtgggtcgga

SEQ ID NO: 15855 - DNA, 20 bp, synthetic construct
  source 1..20: mol_type = other DNA
cataccaataatgcagagtg

SEQ ID NO: 15856 - DNA, 20 bp, synthetic construct
  source 1..20: mol_type = other DNA
acgcactcatgagtgactgc

SEQ ID NO: 15857 - DNA, 20 bp, synthetic construct
  source 1..20: mol_type = other DNA
cggcctcgtgagtacaagga

SEQ ID NO: 15858 - DNA, 20 bp, synthetic construct
  source 1..20: mol_type = other DNA
cccaggacctctgagcgaaa

SEQ ID NO: 15859 - DNA, 20 bp, synthetic construct
  source 1..20: mol_type = other DNA
ccctttcgctcagaggtcct

SEQ ID NO: 15860 - DNA, 20 bp, synthetic construct
  source 1..20: mol_type = other DNA
cctcaatggacaggatgact

SEQ ID NO: 15861 - DNA, 20 bp, synthetic construct
  source 1..20: mol_type = other DNA
tcgcaaggtaaggctactcc

SEQ ID NO: 15862 - DNA, 20 bp, synthetic construct
  source 1..20: mol_type = other DNA
gctatcaaaaccattcggga

SEQ ID NO: 15863 - DNA, 20 bp, synthetic construct
  source 1..20: mol_type = other DNA
gcgagagagtgagaccttcg

SEQ ID NO: 15864 - DNA, 20 bp, synthetic construct
  source 1..20: mol_type = other DNA
cctgctcgtggtgaccgaag

SEQ ID NO: 15865 - DNA, 20 bp, synthetic construct
  source 1..20: mol_type = other DNA
tccatgctgtaacgtgaagc

SEQ ID NO: 15866 - DNA, 20 bp, synthetic construct
  source 1..20: mol_type = other DNA
caggatggttcttaggtagg

SEQ ID NO: 15867 - DNA, 20 bp, synthetic construct
  source 1..20: mol_type = other DNA
ccgccagtctcctccagccc

SEQ ID NO: 15868 - DNA, 20 bp, synthetic construct
  source 1..20: mol_type = other DNA
ggcggtgaagagcctgaagc

SEQ ID NO: 15869 - DNA, 20 bp, synthetic construct
  source 1..20: mol_type = other DNA
gagtgaaggtgggtaccact

SEQ ID NO: 15870 - DNA, 20 bp, synthetic construct
  source 1..20: mol_type = other DNA
cggccacttccctgctgagc

SEQ ID NO: 15871 - DNA, 20 bp, synthetic construct
  source 1..20: mol_type = other DNA
gagcactcactcgatctggt

SEQ ID NO: 15872 - DNA, 20 bp, synthetic construct
  source 1..20: mol_type = other DNA
ctcagatgtggctgtgagca

SEQ ID NO: 15873 - DNA, 20 bp, synthetic construct
  source 1..20: mol_type = other DNA
gttctgaatcacctccgggt

SEQ ID NO: 15874 - DNA, 20 bp, synthetic construct
  source 1..20: mol_type = other DNA
gccatcaagtgtgtggtggt

SEQ ID NO: 15875 - DNA, 20 bp, synthetic construct
  source 1..20: mol_type = other DNA
gggccagcacccagcgctgc

SEQ ID NO: 15876 - DNA, 20 bp, synthetic construct
  source 1..20: mol_type = other DNA
ctcggccaggaaggcgtccg

SEQ ID NO: 15877 - DNA, 20 bp, synthetic construct
  source 1..20: mol_type = other DNA
ccaggcaggtaagggcctgt

SEQ ID NO: 15878 - DNA, 20 bp, synthetic construct
  source 1..20: mol_type = other DNA
cggcacccagtgctttggag

SEQ ID NO: 15879 - DNA, 20 bp, synthetic construct
  source 1..20: mol_type = other DNA
caagagaattgaagaagaag

SEQ ID NO: 15880 - DNA, 20 bp, synthetic construct
  source 1..20: mol_type = other DNA
ctgcgcacctggcattcatg

SEQ ID NO: 15881 - DNA, 20 bp, synthetic construct
  source 1..20: mol_type = other DNA
tcactcaccctgttgtcttc

SEQ ID NO: 15882 - DNA, 20 bp, synthetic construct
  source 1..20: mol_type = other DNA
gaggtttcaggaaccgttgc

SEQ ID NO: 15883 - DNA, 20 bp, synthetic construct
  source 1..20: mol_type = other DNA
gctgatccacatctgctgga

SEQ ID NO: 15884 - DNA, 20 bp, synthetic construct
  source 1..20: mol_type = other DNA
ccgaaatggctctgaggtgc

SEQ ID NO: 15885 - DNA, 20 bp, synthetic construct
  source 1..20: mol_type = other DNA
catagccgcccagcgagcgc

SEQ ID NO: 15886 - DNA, 20 bp, synthetic construct
  source 1..20: mol_type = other DNA
ctcagagagccaacaacggg

SEQ ID NO: 15887 - DNA, 20 bp, synthetic construct
  source 1..20: mol_type = other DNA
gtagagattggctgcgccag

SEQ ID NO: 15888 - DNA, 20 bp, synthetic construct
  source 1..20: mol_type = other DNA
ggccatcaagtgtgtggtgg

SEQ ID NO: 15889 - DNA, 20 bp, synthetic construct
  source 1..20: mol_type = other DNA
cctcggccaggaaggcgtcc

SEQ ID NO: 15890 - DNA, 20 bp, synthetic construct
  source 1..20: mol_type = other DNA
tcccaaactctgctacctgc

SEQ ID NO: 15891 - DNA, 20 bp, synthetic construct
  source 1..20: mol_type = other DNA
ggtcatccctacgggttgat

SEQ ID NO: 15892 - DNA, 20 bp, synthetic construct
  source 1..20: mol_type = other DNA
gcttacctcctccattatgt

SEQ ID NO: 15893 - DNA, 20 bp, synthetic construct
  source 1..20: mol_type = other DNA
accctgaaaggaagtgaaaa

SEQ ID NO: 15894 - DNA, 20 bp, synthetic construct
  source 1..20: mol_type = other DNA
cctcttccctgccaactacg

SEQ ID NO: 15895 - DNA, 20 bp, synthetic construct
  source 1..20: mol_type = other DNA
tctggaagggcacaaaggtc

SEQ ID NO: 15896 - DNA, 20 bp, synthetic construct
  source 1..20: mol_type = other DNA
ttcatcttctgctcaagccg

SEQ ID NO: 15897 - DNA, 20 bp, synthetic construct
  source 1..20: mol_type = other DNA
gatgaagacctggtagagat

SEQ ID NO: 15898 - DNA, 20 bp, synthetic construct
  source 1..20: mol_type = other DNA
tcctgaaatgagaaaagccg

SEQ ID NO: 15899 - DNA, 20 bp, synthetic construct
  source 1..20: mol_type = other DNA
tgaagcatctgcgaggacga

SEQ ID NO: 15900 - DNA, 20 bp, synthetic construct
  source 1..20: mol_type = other DNA
cttcgtcttctccatcagca

SEQ ID NO: 15901 - DNA, 20 bp, synthetic construct
  source 1..20: mol_type = other DNA
cctggggtcaccttgcagtg

SEQ ID NO: 15902 - DNA, 20 bp, synthetic construct
  source 1..20: mol_type = other DNA
gcagcgagcataggcttcca

SEQ ID NO: 15903 - DNA, 20 bp, synthetic construct
  source 1..20: mol_type = other DNA
cccaccgcactcgctgttgg

SEQ ID NO: 15904 - DNA, 20 bp, synthetic construct
  source 1..20: mol_type = other DNA
agatgaacagacaggtcctg

SEQ ID NO: 15905 - DNA, 20 bp, synthetic construct
  source 1..20: mol_type = other DNA
agcactgccgtatccactcc

SEQ ID NO: 15906 - DNA, 20 bp, synthetic construct
  source 1..20: mol_type = other DNA
gtgctctggtcaggctcgcg

SEQ ID NO: 15907 - DNA, 20 bp, synthetic construct
  source 1..20: mol_type = other DNA
gtgagctggtgacacacaca

SEQ ID NO: 15908 - DNA, 20 bp, synthetic construct
  source 1..20: mol_type = other DNA
cggccagttccaaaccctgg

SEQ ID NO: 15909 - DNA, 20 bp, synthetic construct
  source 1..20: mol_type = other DNA
catgcagttctcacacactg

SEQ ID NO: 15910 - DNA, 20 bp, synthetic construct
  source 1..20: mol_type = other DNA
caacacaatgataaaaacat

SEQ ID NO: 15911 - DNA, 20 bp, synthetic construct
  source 1..20: mol_type = other DNA
agacttggtatgagcatgca

SEQ ID NO: 15912 - DNA, 20 bp, synthetic construct
  source 1..20: mol_type = other DNA
tgcagatcccacaggcgccc

SEQ ID NO: 15913 - DNA, 20 bp, synthetic construct
  source 1..20: mol_type = other DNA
cgtcccagtagatcctgctc

SEQ ID NO: 15914 - DNA, 20 bp, synthetic construct
  source 1..20: mol_type = other DNA
ccctgtaggttcctcgtcta

SEQ ID NO: 15915 - DNA, 20 bp, synthetic construct
  source 1..20: mol_type = other DNA
taaacagtgcccaagcctgg

SEQ ID NO: 15916 - DNA, 20 bp, synthetic construct
  source 1..20: mol_type = other DNA
ccccacagatggtttcacga

SEQ ID NO: 15917 - DNA, 20 bp, synthetic construct
  source 1..20: mol_type = other DNA
ttacttgggctgccatgtcc

SEQ ID NO: 15918 - DNA, 20 bp, synthetic construct
  source 1..20: mol_type = other DNA
ctctcccgcatctaccccaa

SEQ ID NO: 15919 - DNA, 20 bp, synthetic construct
  source 1..20: mol_type = other DNA
cttgagagaagtatggtggc

SEQ ID NO: 15920 - DNA, 20 bp, synthetic construct
  source 1..20: mol_type = other DNA
aaagtatgccaggctggctt

SEQ ID NO: 15921 - DNA, 20 bp, synthetic construct
  source 1..20: mol_type = other DNA
agaaggtggggctttgacgc

SEQ ID NO: 15922 - DNA, 20 bp, synthetic construct
  source 1..20: mol_type = other DNA
tgatgagctgttcttccagg

SEQ ID NO: 15923 - DNA, 20 bp, synthetic construct
  source 1..20: mol_type = other DNA
cccagaagccccagaagccg

SEQ ID NO: 15924 - DNA, 20 bp, synthetic construct
  source 1..20: mol_type = other DNA
cgttaatgtgcactggtatc

SEQ ID NO: 15925 - DNA, 20 bp, synthetic construct
  source 1..20: mol_type = other DNA
gcatggcattcattgaagag

SEQ ID NO: 15926 - DNA, 20 bp, synthetic construct
  source 1..20: mol_type = other DNA
acagttgccgattacaggta

SEQ ID NO: 15927 - DNA, 20 bp, synthetic construct
  source 1..20: mol_type = other DNA
cgggcccttaccgatgtaca

SEQ ID NO: 15928 - DNA, 20 bp, synthetic construct
  source 1..20: mol_type = other DNA
tacagtgtagtagctgtcgt

SEQ ID NO: 15929 - DNA, 20 bp, synthetic construct
  source 1..20: mol_type = other DNA
tgacccttaccgtaagcccc

SEQ ID NO: 15930 - DNA, 20 bp, synthetic construct
  source 1..20: mol_type = other DNA
gatgtacatggagttggagt

SEQ ID NO: 15931 - DNA, 20 bp, synthetic construct
  source 1..20: mol_type = other DNA
gatctacaagtgagtgccag

SEQ ID NO: 15932 - DNA, 20 bp, synthetic construct
  source 1..20: mol_type = other DNA
ccgcctagaagcatttgcgg

SEQ ID NO: 15933 - DNA, 20 bp, synthetic construct
  source 1..20: mol_type = other DNA
tatcaccaacataatggagg

SEQ ID NO: 15934 - DNA, 20 bp, synthetic construct
  source 1..20: mol_type = other DNA
cacgaagctctccgatgtgt

SEQ ID NO: 15935 - DNA, 20 bp, synthetic construct
  source 1..20: mol_type = other DNA
tcagccagctccttacatga

SEQ ID NO: 15936 - DNA, 20 bp, synthetic construct
  source 1..20: mol_type = other DNA
attggttgtcccaggacgag

SEQ ID NO: 15937 - DNA, 20 bp, synthetic construct
  source 1..20: mol_type = other DNA
cgctgcggctggagaacttg

SEQ ID NO: 15938 - DNA, 20 bp, synthetic construct
  source 1..20: mol_type = other DNA
caccttcactctcaggaaca

SEQ ID NO: 15939 - DNA, 20 bp, synthetic construct
  source 1..20: mol_type = other DNA
gggcgatcctcccacctgtg

SEQ ID NO: 15940 - DNA, 20 bp, synthetic construct
  source 1..20: mol_type = other DNA
ccgacccagggtactacaac

SEQ ID NO: 15941 - DNA, 20 bp, synthetic construct
  source 1..20: mol_type = other DNA
agccggccagttccaaaccc

SEQ ID NO: 15942 - DNA, 20 bp, synthetic construct
  source 1..20: mol_type = other DNA
atggcctcctccatctgcag

SEQ ID NO: 15943 - DNA, 20 bp, synthetic construct
  source 1..20: mol_type = other DNA
aaggagccgtgagtgttccc

SEQ ID NO: 15944 - DNA, 20 bp, synthetic construct
  source 1..20: mol_type = other DNA
ggctgccagaaattgtttgg

SEQ ID NO: 15945 - DNA, 20 bp, synthetic construct
  source 1..20: mol_type = other DNA
ctgcagctcctcctgtgagt

SEQ ID NO: 15946 - DNA, 20 bp, synthetic construct
  source 1..20: mol_type = other DNA
caaatatcacctccttctcc

SEQ ID NO: 15947 - DNA, 20 bp, synthetic construct
  source 1..20: mol_type = other DNA
tgctgccgtagaagaagggc

SEQ ID NO: 15948 - DNA, 20 bp, synthetic construct
  source 1..20: mol_type = other DNA
tcagatactccaccagctgc

SEQ ID NO: 15949 - DNA, 20 bp, synthetic construct
  source 1..20: mol_type = other DNA
gaggaggtaagctctagagc

SEQ ID NO: 15950 - DNA, 20 bp, synthetic construct
  source 1..20: mol_type = other DNA
atcatacccacctagtgtga

SEQ ID NO: 15951 - DNA, 20 bp, synthetic construct
  source 1..20: mol_type = other DNA
atgtacatggagttggagtt

SEQ ID NO: 15952 - DNA, 20 bp, synthetic construct
  source 1..20: mol_type = other DNA
agaagtcccctggggagctc

SEQ ID NO: 15953 - DNA, 20 bp, synthetic construct
  source 1..20: mol_type = other DNA
attttgcagacgctctcagc

SEQ ID NO: 15954 - DNA, 20 bp, synthetic construct
  source 1..20: mol_type = other DNA
ccagaatgttggcagcccga

SEQ ID NO: 15955 - DNA, 20 bp, synthetic construct
  source 1..20: mol_type = other DNA
tcatacccacctagtgtgaa

SEQ ID NO: 15956 - DNA, 20 bp, synthetic construct
  source 1..20: mol_type = other DNA
ggaatccagtcgctggccct

SEQ ID NO: 15957 - DNA, 20 bp, synthetic construct
  source 1..20: mol_type = other DNA
gcaccaggccctccaggagc

SEQ ID NO: 15958 - DNA, 20 bp, synthetic construct
  source 1..20: mol_type = other DNA
catctccatgaccagcatga

SEQ ID NO: 15959 - DNA, 20 bp, synthetic construct
  source 1..20: mol_type = other DNA
cagatactccaccagctgca

SEQ ID NO: 15960 - DNA, 20 bp, synthetic construct
  source 1..20: mol_type = other DNA
cccgcactgattgcactgga

SEQ ID NO: 15961 - DNA, 20 bp, synthetic construct
  source 1..20: mol_type = other DNA
tcaggtatggggcagcgcct

SEQ ID NO: 15962 - DNA, 20 bp, synthetic construct
  source 1..20: mol_type = other DNA
gcctcggccaggaaggcgtc

SEQ ID NO: 15963 - DNA, 20 bp, synthetic construct
  source 1..20: mol_type = other DNA
atgggagatccggcagccct

SEQ ID NO: 15964 - DNA, 20 bp, synthetic construct
  source 1..20: mol_type = other DNA
cgagctggggttccacagcg

SEQ ID NO: 15965 - DNA, 20 bp, synthetic construct
  source 1..20: mol_type = other DNA
gcaagaggtgagcaccgggt

SEQ ID NO: 15966 - DNA, 20 bp, synthetic construct
  source 1..20: mol_type = other DNA
ggcccagacagcagacgcca

SEQ ID NO: 15967 - DNA, 20 bp, synthetic construct
  source 1..20: mol_type = other DNA
tggccggcccaagatcgacg

SEQ ID NO: 15968 - DNA, 20 bp, synthetic construct
  source 1..20: mol_type = other DNA
cactcgtaccttgcccatgt

SEQ ID NO: 15969 - DNA, 20 bp, synthetic construct
  source 1..20: mol_type = other DNA
gcccaggacctctgagcgaa

SEQ ID NO: 15970 - DNA, 20 bp, synthetic construct
  source 1..20: mol_type = other DNA
gcatttgaagggcttctccc

SEQ ID NO: 15971 - DNA, 20 bp, synthetic construct
  source 1..20: mol_type = other DNA
cttctccatcagcatggcgt

SEQ ID NO: 15972 - DNA, 20 bp, synthetic construct
  source 1..20: mol_type = other DNA
catactttgaagatcgtcat

SEQ ID NO: 15973 - DNA, 20 bp, synthetic construct
  source 1..20: mol_type = other DNA
ggtcctgcatggtatagagc

SEQ ID NO: 15974 - DNA, 20 bp, synthetic construct
  source 1..20: mol_type = other DNA
catgtccaggagtttgttga

SEQ ID NO: 15975 - DNA, 20 bp, synthetic construct
  source 1..20: mol_type = other DNA
caaggtgaccccaggcagca

SEQ ID NO: 15976 - DNA, 20 bp, synthetic construct
  source 1..20: mol_type = other DNA
cagggaagtggccgctcaag

SEQ ID NO: 15977 - DNA, 20 bp, synthetic construct
  source 1..20: mol_type = other DNA
cgcacgaggaaggagccgtc

SEQ ID NO: 15978 - DNA, 20 bp, synthetic construct
  source 1..20: mol_type = other DNA
tgtacttctcctccgtctgc

SEQ ID NO: 15979 - DNA, 20 bp, synthetic construct
  source 1..20: mol_type = other DNA
cctttgcccatgtggatctg

SEQ ID NO: 15980 - DNA, 20 bp, synthetic construct
  source 1..20: mol_type = other DNA
tgtggcgccaatgcacccac

SEQ ID NO: 15981 - DNA, 20 bp, synthetic construct
  source 1..20: mol_type = other DNA
ggaggtaagctctagagcag

SEQ ID NO: 15982 - DNA, 20 bp, synthetic construct
  source 1..20: mol_type = other DNA
caaccctggcttctatgtag

SEQ ID NO: 15983 - DNA, 20 bp, synthetic construct
  source 1..20: mol_type = other DNA
caggatgactgggtacctgc

SEQ ID NO: 15984 - DNA, 20 bp, synthetic construct
  source 1..20: mol_type = other DNA
agaccccttacgagagatcg

SEQ ID NO: 15985 - DNA, 20 bp, synthetic construct
  source 1..20: mol_type = other DNA
cgcccagccaccgcgtgacc

SEQ ID NO: 15986 - DNA, 20 bp, synthetic construct
  source 1..20: mol_type = other DNA
tccaggacaaactacatcgc

SEQ ID NO: 15987 - DNA, 20 bp, synthetic construct
  source 1..20: mol_type = other DNA
gtgtcccaggaactgcatcc

SEQ ID NO: 15988 - DNA, 20 bp, synthetic construct
  source 1..20: mol_type = other DNA
gcttcaaagagagggtgaga

SEQ ID NO: 15989 - DNA, 20 bp, synthetic construct
  source 1..20: mol_type = other DNA
ccccagctcgtcatcctcca

SEQ ID NO: 15990 - DNA, 20 bp, synthetic construct
  source 1..20: mol_type = other DNA
cagagatggagaagtcccct

SEQ ID NO: 15991 - DNA, 20 bp, synthetic construct
  source 1..20: mol_type = other DNA
gcagggctcaggacaaaaag

SEQ ID NO: 15992 - DNA, 20 bp, synthetic construct
  source 1..20: mol_type = other DNA
ctctgaggtttggtttggag

SEQ ID NO: 15993 - DNA, 20 bp, synthetic construct
  source 1..20: mol_type = other DNA
ctccaggcatgtgagaggat

SEQ ID NO: 15994 - DNA, 20 bp, synthetic construct
  source 1..20: mol_type = other DNA
cagcacgcaggggaccagga

SEQ ID NO: 15995 - DNA, 20 bp, synthetic construct
  source 1..20: mol_type = other DNA
tcactctatatgctctgtac

SEQ ID NO: 15996 - DNA, 20 bp, synthetic construct
  source 1..20: mol_type = other DNA
ctacctcatcagccaagaca

SEQ ID NO: 15997 - DNA, 20 bp, synthetic construct
  source 1..20: mol_type = other DNA
gcaggtttacaaagtccttg

SEQ ID NO: 15998 - DNA, 20 bp, synthetic construct
  source 1..20: mol_type = other DNA
cccaccatcacgccctggga

SEQ ID NO: 15999 - DNA, 20 bp, synthetic construct
  source 1..20: mol_type = other DNA
ccgggagagcgagagcaccg

SEQ ID NO: 16000 - DNA, 20 bp, synthetic construct
  source 1..20: mol_type = other DNA
ctctactcatctgtaagcgc

SEQ ID NO: 16001 - DNA, 20 bp, synthetic construct
  source 1..20: mol_type = other DNA
tacaaaccttgagagaagta

SEQ ID NO: 16002 - DNA, 20 bp, synthetic construct
  source 1..20: mol_type = other DNA
cctacgggttgatgggtgaa

SEQ ID NO: 16003 - DNA, 20 bp, synthetic construct
  source 1..20: mol_type = other DNA
tgctcttagaaagataaacc

SEQ ID NO: 16004 - DNA, 20 bp, synthetic construct
  source 1..20: mol_type = other DNA
ggcaagtactgcattcccga

SEQ ID NO: 16005 - DNA, 20 bp, synthetic construct
  source 1..20: mol_type = other DNA
catggggatgaagtacctgg

SEQ ID NO: 16006 - DNA, 20 bp, synthetic construct
  source 1..20: mol_type = other DNA
tgccatagtatttcagatcc

SEQ ID NO: 16007 - DNA, 20 bp, synthetic construct
  source 1..20: mol_type = other DNA
gcccttactctcttcatcaa

SEQ ID NO: 16008 - DNA, 20 bp, synthetic construct
  source 1..20: mol_type = other DNA
aactgggctggcggccagga

SEQ ID NO: 16009 - DNA, 20 bp, synthetic construct
  source 1..20: mol_type = other DNA
tcttgtaggtgtgctgatgt

SEQ ID NO: 16010 - DNA, 20 bp, synthetic construct
  source 1..20: mol_type = other DNA
ccttcccaggatgaagatga

SEQ ID NO: 16011 - DNA, 20 bp, synthetic construct
  source 1..20: mol_type = other DNA
gggagatccggcagccctcg

SEQ ID NO: 16012 - DNA, 20 bp, synthetic construct
  source 1..20: mol_type = other DNA
ctggaggaggaatgccaatg

SEQ ID NO: 16013 - DNA, 20 bp, synthetic construct
  source 1..20: mol_type = other DNA
ctaccttcagattggagagc

SEQ ID NO: 16014 - DNA, 20 bp, synthetic construct
  source 1..20: mol_type = other DNA
gctacctgtgagtggccagg

SEQ ID NO: 16015 - DNA, 20 bp, synthetic construct
  source 1..20: mol_type = other DNA
ttcctgggaaatctacggga

SEQ ID NO: 16016 - DNA, 20 bp, synthetic construct
  source 1..20: mol_type = other DNA
actcacgaggccgtttgaac

SEQ ID NO: 16017 - DNA, 20 bp, synthetic construct
  source 1..20: mol_type = other DNA
acacgccacattcaaagcca

SEQ ID NO: 16018 - DNA, 20 bp, synthetic construct
  source 1..20: mol_type = other DNA
ccttgctgactatttcaaga

SEQ ID NO: 16019 - DNA, 20 bp, synthetic construct
  source 1..20: mol_type = other DNA
tctaacctgggtaagggatg

SEQ ID NO: 16020 - DNA, 20 bp, synthetic construct
  source 1..20: mol_type = other DNA
gaccagtctctggctcacta

SEQ ID NO: 16021 - DNA, 20 bp, synthetic construct
  source 1..20: mol_type = other DNA
tccaggttctgaatcacctc

SEQ ID NO: 16022 - DNA, 20 bp, synthetic construct
  source 1..20: mol_type = other DNA
cttctgtaatacacttggag

SEQ ID NO: 16023 - DNA, 20 bp, synthetic construct
  source 1..20: mol_type = other DNA
ccaactcacatgagtcaacg

SEQ ID NO: 16024 - DNA, 20 bp, synthetic construct
  source 1..20: mol_type = other DNA
ggatggttcttaggtaggtg

SEQ ID NO: 16025 - DNA, 20 bp, synthetic construct
  source 1..20: mol_type = other DNA
tccagcagtgattcataatc

SEQ ID NO: 16026 - DNA, 20 bp, synthetic construct
  source 1..20: mol_type = other DNA
cctgtctcttcaggaaaccg

SEQ ID NO: 16027 - DNA, 20 bp, synthetic construct
  source 1..20: mol_type = other DNA
tctattgaaggagcagggac

SEQ ID NO: 16028 - DNA, 20 bp, synthetic construct
  source 1..20: mol_type = other DNA
cgggctcatctactgcctga

SEQ ID NO: 16029 - DNA, 20 bp, synthetic construct
  source 1..20: mol_type = other DNA
cgggagagcgagagcaccgc

SEQ ID NO: 16030 - DNA, 20 bp, synthetic construct
  source 1..20: mol_type = other DNA
cttcatctgcacgtcctccc

SEQ ID NO: 16031 - DNA, 20 bp, synthetic construct
  source 1..20: mol_type = other DNA
ggagaagtacactgacacgc

SEQ ID NO: 16032 - DNA, 20 bp, synthetic construct
  source 1..20: mol_type = other DNA
gcccagccaccgcgtgacct

SEQ ID NO: 16033 - DNA, 20 bp, synthetic construct
  source 1..20: mol_type = other DNA
caggcagagaacttactcat

SEQ ID NO: 16034 - DNA, 20 bp, synthetic construct
  source 1..20: mol_type = other DNA
gagacttggtatgagcatgc

SEQ ID NO: 16035 - DNA, 20 bp, synthetic construct
  source 1..20: mol_type = other DNA
gtcgggcccccagcacctgt

SEQ ID NO: 16036 - DNA, 20 bp, synthetic construct
  source 1..20: mol_type = other DNA
ttgcaagtctgacatttgaa

SEQ ID NO: 16037 - DNA, 20 bp, synthetic construct
  source 1..20: mol_type = other DNA
tgagtagagctttgtcgagc

SEQ ID NO: 16038 - DNA, 20 bp, synthetic construct
  source 1..20: mol_type = other DNA
ggactcactgctccaggatg

SEQ ID NO: 16039 - DNA, 20 bp, synthetic construct
  source 1..20: mol_type = other DNA
ccagggggcaaccgtgtctg

SEQ ID NO: 16040 - DNA, 20 bp, synthetic construct
  source 1..20: mol_type = other DNA
ccgcaggcgcgtcttccagg

SEQ ID NO: 16041 - DNA, 20 bp, synthetic construct
  source 1..20: mol_type = other DNA
atctacaagtgagtgccagt

SEQ ID NO: 16042 - DNA, 20 bp, synthetic construct
  source 1..20: mol_type = other DNA
cgccagatcacgtggagccg

SEQ ID NO: 16043 - DNA, 20 bp, synthetic construct
  source 1..20: mol_type = other DNA
ctcctggaaacaggacacaa

SEQ ID NO: 16044 - DNA, 20 bp, synthetic construct
  source 1..20: mol_type = other DNA
tcctcgcagatgcttcagat

SEQ ID NO: 16045 - DNA, 20 bp, synthetic construct
  source 1..20: mol_type = other DNA
tggcatccagggccagccgc

SEQ ID NO: 16046 - DNA, 20 bp, synthetic construct
  source 1..20: mol_type = other DNA
cagagcttgtgcattgacat

SEQ ID NO: 16047 - DNA, 20 bp, synthetic construct
  source 1..20: mol_type = other DNA
tttcagatccaggatactga

SEQ ID NO: 16048 - DNA, 20 bp, synthetic construct
  source 1..20: mol_type = other DNA
cctcgatcaggaggaacatg

SEQ ID NO: 16049 - DNA, 20 bp, synthetic construct
  source 1..20: mol_type = other DNA
ggtccaggacagagcagaca

SEQ ID NO: 16050 - DNA, 20 bp, synthetic construct
  source 1..20: mol_type = other DNA
gagggctcacctgggacatc

SEQ ID NO: 16051 - DNA, 20 bp, synthetic construct
  source 1..20: mol_type = other DNA
ctatcaaaaccattcgggaa

SEQ ID NO: 16052 - DNA, 20 bp, synthetic construct
  source 1..20: mol_type = other DNA
tgtactcgttgtcctcaatg

SEQ ID NO: 16053 - DNA, 20 bp, synthetic construct
  source 1..20: mol_type = other DNA
gcgtctgcaaaatgacccac

SEQ ID NO: 16054 - DNA, 20 bp, synthetic construct
  source 1..20: mol_type = other DNA
gccctcaacttccagacccc

SEQ ID NO: 16055 - DNA, 20 bp, synthetic construct
  source 1..20: mol_type = other DNA
ccaggcagagaacttactca

SEQ ID NO: 16056 - DNA, 20 bp, synthetic construct
  source 1..20: mol_type = other DNA
gcatactttgaagatcgtca

SEQ ID NO: 16057 - DNA, 20 bp, synthetic construct
  source 1..20: mol_type = other DNA
agggctcacctgggacatct

SEQ ID NO: 16058 - DNA, 20 bp, synthetic construct
  source 1..20: mol_type = other DNA
tcttcgtggctttctgtgga

SEQ ID NO: 16059 - DNA, 20 bp, synthetic construct
  source 1..20: mol_type = other DNA
tgttctcagagagccaacaa

SEQ ID NO: 16060 - DNA, 20 bp, synthetic construct
  source 1..20: mol_type = other DNA
ctctccagagaccagaagat

SEQ ID NO: 16061 - DNA, 20 bp, synthetic construct
  source 1..20: mol_type = other DNA
cttacccaggttagagccaa

SEQ ID NO: 16062 - DNA, 20 bp, synthetic construct
  source 1..20: mol_type = other DNA
cctcccagccatccgtcctg

SEQ ID NO: 16063 - DNA, 20 bp, synthetic construct
  source 1..20: mol_type = other DNA
tagttgagctgcaaagagaa

SEQ ID NO: 16064 - DNA, 20 bp, synthetic construct
  source 1..20: mol_type = other DNA
ccatgagtaagttctctgcc

SEQ ID NO: 16065 - DNA, 20 bp, synthetic construct
  source 1..20: mol_type = other DNA
cctgcagagaaacacacttg

SEQ ID NO: 16066 - DNA, 20 bp, synthetic construct
  source 1..20: mol_type = other DNA
ttgcagctgcttcatgaggt

SEQ ID NO: 16067 - DNA, 20 bp, synthetic construct
  source 1..20: mol_type = other DNA
cggtgcccacctcgaggctg

SEQ ID NO: 16068 - DNA, 20 bp, synthetic construct
  source 1..20: mol_type = other DNA
gaaggtacctctgagatgca

SEQ ID NO: 16069 - DNA, 20 bp, synthetic construct
  source 1..20: mol_type = other DNA
cagccccagctcatatgcac

SEQ ID NO: 16070 - DNA, 20 bp, synthetic construct
  source 1..20: mol_type = other DNA
gtccctcatctatgggaaga

SEQ ID NO: 16071 - DNA, 20 bp, synthetic construct
  source 1..20: mol_type = other DNA
atcagggctaccgctgccat

SEQ ID NO: 16072 - DNA, 20 bp, synthetic construct
  source 1..20: mol_type = other DNA
gccagaccacggggtgcctg

SEQ ID NO: 16073 - DNA, 20 bp, synthetic construct
  source 1..20: mol_type = other DNA
acttacggcacccggagctt

SEQ ID NO: 16074 - DNA, 20 bp, synthetic construct
  source 1..20: mol_type = other DNA
cgtagggatgaccaacccgg

SEQ ID NO: 16075 - DNA, 20 bp, synthetic construct
  source 1..20: mol_type = other DNA
cacgcaggaggcgatggaga

SEQ ID NO: 16076 - DNA, 20 bp, synthetic construct
  source 1..20: mol_type = other DNA
ctgcagttttagcatctgtg

SEQ ID NO: 16077 - DNA, 20 bp, synthetic construct
  source 1..20: mol_type = other DNA
tacactgatacatccctcga

SEQ ID NO: 16078 - DNA, 20 bp, synthetic construct
  source 1..20: mol_type = other DNA
catcatcttcatcctgggaa

SEQ ID NO: 16079 - DNA, 20 bp, synthetic construct
  source 1..20: mol_type = other DNA
cccttacctgcctggcagcc

SEQ ID NO: 16080 - DNA, 20 bp, synthetic construct
  source 1..20: mol_type = other DNA
tacagttcgggtggacactc

SEQ ID NO: 16081 - DNA, 20 bp, synthetic construct
  source 1..20: mol_type = other DNA
cctccatctgcaggggagct

SEQ ID NO: 16082 - DNA, 20 bp, synthetic construct
  source 1..20: mol_type = other DNA
cttcctgcccacacagtgat

SEQ ID NO: 16083 - DNA, 20 bp, synthetic construct
  source 1..20: mol_type = other DNA
ctcatgagtgcgtacagttc

SEQ ID NO: 16084 - DNA, 20 bp, synthetic construct
  source 1..20: mol_type = other DNA
tgactgccacagatccacat

SEQ ID NO: 16085 - DNA, 20 bp, synthetic construct
  source 1..20: mol_type = other DNA
ccgctgcacaagttcctggt

SEQ ID NO: 16086 - DNA, 20 bp, synthetic construct
  source 1..20: mol_type = other DNA
ttcctgcccacacagtgata

SEQ ID NO: 16087 - DNA, 20 bp, synthetic construct
  source 1..20: mol_type = other DNA
gaagccccagaagccgtggt

SEQ ID NO: 16088 - DNA, 20 bp, synthetic construct
  source 1..20: mol_type = other DNA
gcaggtaggaggtctcagac

SEQ ID NO: 16089 - DNA, 20 bp, synthetic construct
  source 1..20: mol_type = other DNA
cgtagagccgaaccagccgc

SEQ ID NO: 16090 - DNA, 20 bp, synthetic construct
  source 1..20: mol_type = other DNA
cttgtagggcttctggccgt

SEQ ID NO: 16091 - DNA, 20 bp, synthetic construct
  source 1..20: mol_type = other DNA
aagccctacaaggcaggcgc

SEQ ID NO: 16092 - DNA, 20 bp, synthetic construct
  source 1..20: mol_type = other DNA
cactcaccctcatggcatcc

SEQ ID NO: 16093 - DNA, 20 bp, synthetic construct
  source 1..20: mol_type = other DNA
cgcagatcaaagagagcctg

SEQ ID NO: 16094 - DNA, 20 bp, synthetic construct
  source 1..20: mol_type = other DNA
gggcaagtactgcattcccg

SEQ ID NO: 16095 - DNA, 20 bp, synthetic construct
  source 1..20: mol_type = other DNA
actcatgagtgcgtacagtt

SEQ ID NO: 16096 - DNA, 20 bp, synthetic construct
  source 1..20: mol_type = other DNA
gcaggtcctactcggaggga

SEQ ID NO: 16097 - DNA, 20 bp, synthetic construct
  source 1..20: mol_type = other DNA
atgtggaagtcacgcccgtt

SEQ ID NO: 16098 - DNA, 20 bp, synthetic construct
  source 1..20: mol_type = other DNA
atagttgagctgcaaagaga

SEQ ID NO: 16099 - DNA, 20 bp, synthetic construct
  source 1..20: mol_type = other DNA
ttgagagaagtatggtggca

SEQ ID NO: 16100 - DNA, 20 bp, synthetic construct
  source 1..20: mol_type = other DNA
ctgagccaggtcctggggag

SEQ ID NO: 16101 - DNA, 20 bp, synthetic construct
  source 1..20: mol_type = other DNA
gccctgctcgtggtgaccga

SEQ ID NO: 16102 - DNA, 20 bp, synthetic construct
  source 1..20: mol_type = other DNA
gttccctgccaactacgtgg

SEQ ID NO: 16103 - DNA, 20 bp, synthetic construct
  source 1..20: mol_type = other DNA
ccagaagttccccaagctcc

SEQ ID NO: 16104 - DNA, 20 bp, synthetic construct
  source 1..20: mol_type = other DNA
tctgtgccaagagataaagc

SEQ ID NO: 16105 - DNA, 20 bp, synthetic construct
  source 1..20: mol_type = other DNA
agcgtctgcaaaatgaccca

SEQ ID NO: 16106 - DNA, 20 bp, synthetic construct
  source 1..20: mol_type = other DNA
tgaagcagctgcaacaccag

SEQ ID NO: 16107 - DNA, 20 bp, synthetic construct
  source 1..20: mol_type = other DNA
ccatgccatcaacctgcgtg

SEQ ID NO: 16108 - DNA, 20 bp, synthetic construct
  source 1..20: mol_type = other DNA
ggccggtctgtggaaacaca

SEQ ID NO: 16109 - DNA, 20 bp, synthetic construct
  source 1..20: mol_type = other DNA
gccacagcccatggtccctg

SEQ ID NO: 16110 - DNA, 20 bp, synthetic construct
  source 1..20: mol_type = other DNA
ctgcccgctcacctggctca

SEQ ID NO: 16111 - DNA, 20 bp, synthetic construct
  source 1..20: mol_type = other DNA
aggacctgtctgttcatctc

SEQ ID NO: 16112 - DNA, 20 bp, synthetic construct
  source 1..20: mol_type = other DNA
gcgccctgacaactgtccag

SEQ ID NO: 16113 - DNA, 20 bp, synthetic construct
  source 1..20: mol_type = other DNA
tgggagatccggcagccctc

SEQ ID NO: 16114 - DNA, 20 bp, synthetic construct
  source 1..20: mol_type = other DNA
tgtacatggagttggagttg

SEQ ID NO: 16115 - DNA, 20 bp, synthetic construct
  source 1..20: mol_type = other DNA
cagtgagggcgtccctccgg

SEQ ID NO: 16116 - DNA, 20 bp, synthetic construct
  source 1..20: mol_type = other DNA
gctccagacatcgctgcggc

SEQ ID NO: 16117 - DNA, 20 bp, synthetic construct
  source 1..20: mol_type = other DNA
aagggaagataatggaacgg

SEQ ID NO: 16118 - DNA, 20 bp, synthetic construct
  source 1..20: mol_type = other DNA
cgcgccagatcacgtggagc

SEQ ID NO: 16119 - DNA, 20 bp, synthetic construct
  source 1..20: mol_type = other DNA
tgagctgcagccacagccca

SEQ ID NO: 16120 - DNA, 20 bp, synthetic construct
  source 1..20: mol_type = other DNA
actcacccaggaaggaaggc

SEQ ID NO: 16121 - DNA, 20 bp, synthetic construct
  source 1..20: mol_type = other DNA
gaatttatcatttcgtggtg

SEQ ID NO: 16122 - DNA, 20 bp, synthetic construct
  source 1..20: mol_type = other DNA
ggttccttccttgtaggcca

SEQ ID NO: 16123 - DNA, 20 bp, synthetic construct
  source 1..20: mol_type = other DNA
accgagacaacaagaaggtg

SEQ ID NO: 16124 - DNA, 20 bp, synthetic construct
  source 1..20: mol_type = other DNA
agatggagactttatatgct

SEQ ID NO: 16125 - DNA, 20 bp, synthetic construct
  source 1..20: mol_type = other DNA
ggcagcggagacagtaagtg

SEQ ID NO: 16126 - DNA, 20 bp, synthetic construct
  source 1..20: mol_type = other DNA
gatggagccgccgatccaca

SEQ ID NO: 16127 - DNA, 20 bp, synthetic construct
  source 1..20: mol_type = other DNA
ctccaccagctcctagaagg

SEQ ID NO: 16128 - DNA, 20 bp, synthetic construct
  source 1..20: mol_type = other DNA
cagatacctggtggaaatgg

SEQ ID NO: 16129 - DNA, 20 bp, synthetic construct
  source 1..20: mol_type = other DNA
caggtcctactcggagggaa

SEQ ID NO: 16130 - DNA, 20 bp, synthetic construct
  source 1..20: mol_type = other DNA
caggttgcagggcagcccgt

SEQ ID NO: 16131 - DNA, 20 bp, synthetic construct
  source 1..20: mol_type = other DNA
gtaggacaaggcctcccaca

SEQ ID NO: 16132 - DNA, 20 bp, synthetic construct
  source 1..20: mol_type = other DNA
gactgacatggaacagggga

SEQ ID NO: 16133 - DNA, 20 bp, synthetic construct
  source 1..20: mol_type = other DNA
tcttacctctcaatctgcag

SEQ ID NO: 16134 - DNA, 20 bp, synthetic construct
  source 1..20: mol_type = other DNA
aaaccttgagagaagtatgg

SEQ ID NO: 16135 - DNA, 20 bp, synthetic construct
  source 1..20: mol_type = other DNA
tacttacggcacccggagct

SEQ ID NO: 16136 - DNA, 20 bp, synthetic construct
  source 1..20: mol_type = other DNA
ctctggcacactgtggggga

SEQ ID NO: 16137 - DNA, 20 bp, synthetic construct
  source 1..20: mol_type = other DNA
agctcaccaatctgacaagc

SEQ ID NO: 16138 - DNA, 20 bp, synthetic construct
  source 1..20: mol_type = other DNA
agaagggcaggtgcgccgcg

SEQ ID NO: 16139 - DNA, 20 bp, synthetic construct
  source 1..20: mol_type = other DNA
tcatgaggttggcctcggcc

SEQ ID NO: 16140 - DNA, 20 bp, synthetic construct
  source 1..20: mol_type = other DNA
acggaggaagaagattgccc

SEQ ID NO: 16141 - DNA, 20 bp, synthetic construct
  source 1..20: mol_type = other DNA
aggaggtaagctctagagca

SEQ ID NO: 16142 - DNA, 20 bp, synthetic construct
  source 1..20: mol_type = other DNA
actgacatggaacaggggaa

SEQ ID NO: 16143 - DNA, 20 bp, synthetic construct
  source 1..20: mol_type = other DNA
tcttcatcaaatacaaggag

SEQ ID NO: 16144 - DNA, 20 bp, synthetic construct
  source 1..20: mol_type = other DNA
cgctgatcttggcgtagtgc

SEQ ID NO: 16145 - DNA, 20 bp, synthetic construct
  source 1..20: mol_type = other DNA
ccacagcccatggtccctga

SEQ ID NO: 16146 - DNA, 20 bp, synthetic construct
  source 1..20: mol_type = other DNA
tcaccttgcagtggggaagc

SEQ ID NO: 16147 - DNA, 20 bp, synthetic construct
  source 1..20: mol_type = other DNA
ggcaggcgtagttgcagagg

SEQ ID NO: 16148 - DNA, 20 bp, synthetic construct
  source 1..20: mol_type = other DNA
gtctgtcaagaagaacttgg

SEQ ID NO: 16149 - DNA, 20 bp, synthetic construct
  source 1..20: mol_type = other DNA
ccgcctcaccaggttctcaa

SEQ ID NO: 16150 - DNA, 20 bp, synthetic construct
  source 1..20: mol_type = other DNA
gcggcagaggtgcagcacct

SEQ ID NO: 16151 - DNA, 20 bp, synthetic construct
  source 1..20: mol_type = other DNA
ctctgccgcagcctcgaggt

SEQ ID NO: 16152 - DNA, 20 bp, synthetic construct
  source 1..20: mol_type = other DNA
gaatccagtcgctggccctt

SEQ ID NO: 16153 - DNA, 20 bp, synthetic construct
  source 1..20: mol_type = other DNA
gcccacaggcattgcagaca

SEQ ID NO: 16154 - DNA, 20 bp, synthetic construct
  source 1..20: mol_type = other DNA
gacagaaatggctgcaacca

SEQ ID NO: 16155 - DNA, 20 bp, synthetic construct
  source 1..20: mol_type = other DNA
agcgcagaaaggcaaattca

SEQ ID NO: 16156 - DNA, 20 bp, synthetic construct
  source 1..20: mol_type = other DNA
caggtcacgcggtggctggg

SEQ ID NO: 16157 - DNA, 20 bp, synthetic construct
  source 1..20: mol_type = other DNA
gcggccacttccctgctgag

SEQ ID NO: 16158 - DNA, 20 bp, synthetic construct
  source 1..20: mol_type = other DNA
gtactacaacgggcacacga

SEQ ID NO: 16159 - DNA, 20 bp, synthetic construct
  source 1..20: mol_type = other DNA
ctcgtcacaacaacaggtgc

SEQ ID NO: 16160 - DNA, 20 bp, synthetic construct
  source 1..20: mol_type = other DNA
ttgcagccctcgattccagc

SEQ ID NO: 16161 - DNA, 20 bp, synthetic construct
  source 1..20: mol_type = other DNA
actgagccaggtcctgggga

SEQ ID NO: 16162 - DNA, 20 bp, synthetic construct
  source 1..20: mol_type = other DNA
agatccagtagtgggaaaga

SEQ ID NO: 16163 - DNA, 20 bp, synthetic construct
  source 1..20: mol_type = other DNA
ctgaacttgtcgtctactgc

SEQ ID NO: 16164 - DNA, 20 bp, synthetic construct
  source 1..20: mol_type = other DNA
cactcgccgctcctgcgcca

SEQ ID NO: 16165 - DNA, 20 bp, synthetic construct
  source 1..20: mol_type = other DNA
ggagctatggggtcaccatg

SEQ ID NO: 16166 - DNA, 20 bp, synthetic construct
  source 1..20: mol_type = other DNA
cgagagagtgagaccttcgt

SEQ ID NO: 16167 - DNA, 20 bp, synthetic construct
  source 1..20: mol_type = other DNA
tacaacaccatgaggacata

SEQ ID NO: 16168 - DNA, 20 bp, synthetic construct
  source 1..20: mol_type = other DNA
tgaagaacagctcatagccc

SEQ ID NO: 16169 - DNA, 20 bp, synthetic construct
  source 1..20: mol_type = other DNA
cgcagcagtctggagaaggc

SEQ ID NO: 16170 - DNA, 20 bp, synthetic construct
  source 1..20: mol_type = other DNA
tcttgaaggggctcactaaa

SEQ ID NO: 16171 - DNA, 20 bp, synthetic construct
  source 1..20: mol_type = other DNA
ctggaagtcatgcccgttgg

SEQ ID NO: 16172 - DNA, 20 bp, synthetic construct
  source 1..20: mol_type = other DNA
cctatccaggtacctgaccg

SEQ ID NO: 16173 - DNA, 20 bp, synthetic construct
  source 1..20: mol_type = other DNA
ttctgtctattgaaggagca

SEQ ID NO: 16174 - DNA, 20 bp, synthetic construct
  source 1..20: mol_type = other DNA
ccgtctgctggatctcccgc

SEQ ID NO: 16175 - DNA, 20 bp, synthetic construct
  source 1..20: mol_type = other DNA
ccaggtgagcgggcagaggt

SEQ ID NO: 16176 - DNA, 20 bp, synthetic construct
  source 1..20: mol_type = other DNA
acagcacaagaagctggctg

SEQ ID NO: 16177 - DNA, 20 bp, synthetic construct
  source 1..20: mol_type = other DNA
cgaggaggagatccagtagt

SEQ ID NO: 16178 - DNA, 20 bp, synthetic construct
  source 1..20: mol_type = other DNA
gaccgagacaacaagaaggt

SEQ ID NO: 16179 - DNA, 20 bp, synthetic construct
  source 1..20: mol_type = other DNA
ggccagaagccctacaaggc

SEQ ID NO: 16180 - DNA, 20 bp, synthetic construct
  source 1..20: mol_type = other DNA
ggcggcaggcgtagttgcag

SEQ ID NO: 16181 - DNA, 20 bp, synthetic construct
  source 1..20: mol_type = other DNA
cctcgtcacaacaacaggtg

SEQ ID NO: 16182 - DNA, 20 bp, synthetic construct
  source 1..20: mol_type = other DNA
caccatgaggacatatggat

SEQ ID NO: 16183 - DNA, 20 bp, synthetic construct
  source 1..20: mol_type = other DNA
ttacactgatacatccctcg

SEQ ID NO: 16184 - DNA, 20 bp, synthetic construct
  source 1..20: mol_type = other DNA
ggccacctgaggacgcactc

SEQ ID NO: 16185 - DNA, 20 bp, synthetic construct
  source 1..20: mol_type = other DNA
tccagaagttccccaagctc

SEQ ID NO: 16186 - DNA, 20 bp, synthetic construct
  source 1..20: mol_type = other DNA
cctccaccacctccccgctg

SEQ ID NO: 16187 - DNA, 20 bp, synthetic construct
  source 1..20: mol_type = other DNA
tccatggctaccgcctgccc

SEQ ID NO: 16188 - DNA, 20 bp, synthetic construct
  source 1..20: mol_type = other DNA
ccactggctcatccagtgcc

SEQ ID NO: 16189 - DNA, 20 bp, synthetic construct
  source 1..20: mol_type = other DNA
tggagtccaggccgctgtcg

SEQ ID NO: 16190 - DNA, 20 bp, synthetic construct
  source 1..20: mol_type = other DNA
catccgcaggcagcgagcat

SEQ ID NO: 16191 - DNA, 20 bp, synthetic construct
  source 1..20: mol_type = other DNA
ggcacagaggcacagagctt

SEQ ID NO: 16192 - DNA, 20 bp, synthetic construct
  source 1..20: mol_type = other DNA
ttcctctataggtatcttga

SEQ ID NO: 16193 - DNA, 20 bp, synthetic construct
  source 1..20: mol_type = other DNA
caccatcagcaggtcccgca

SEQ ID NO: 16194 - DNA, 20 bp, synthetic construct
  source 1..20: mol_type = other DNA
aatgagcttctccacctgcg

SEQ ID NO: 16195 - DNA, 20 bp, synthetic construct
  source 1..20: mol_type = other DNA
gaacttaccagccttcgctt

SEQ ID NO: 16196 - DNA, 20 bp, synthetic construct
  source 1..20: mol_type = other DNA
ggccactgtcaatagagaga

SEQ ID NO: 16197 - DNA, 20 bp, synthetic construct
  source 1..20: mol_type = other DNA
tacacctatatattcctcgt

SEQ ID NO: 16198 - DNA, 20 bp, synthetic construct
  source 1..20: mol_type = other DNA
gagcagggctggggagaagg

SEQ ID NO: 16199 - DNA, 20 bp, synthetic construct
  source 1..20: mol_type = other DNA
ccacatgttcctcctgatcg

SEQ ID NO: 16200 - DNA, 20 bp, synthetic construct
  source 1..20: mol_type = other DNA
gctccacggtcaggaagtcg

SEQ ID NO: 16201 - DNA, 20 bp, synthetic construct
  source 1..20: mol_type = other DNA
gcaccaagtttgacacgctc

SEQ ID NO: 16202 - DNA, 20 bp, synthetic construct
  source 1..20: mol_type = other DNA
agttggaggaatccagtcgc

SEQ ID NO: 16203 - DNA, 20 bp, synthetic construct
  source 1..20: mol_type = other DNA
cttccacatgagcgtggtca

SEQ ID NO: 16204 - DNA, 20 bp, synthetic construct
  source 1..20: mol_type = other DNA
ctcttacctcttcctccgcg

SEQ ID NO: 16205 - DNA, 20 bp, synthetic construct
  source 1..20: mol_type = other DNA
tcctctataggtatcttgaa

SEQ ID NO: 16206 - DNA, 20 bp, synthetic construct
  source 1..20: mol_type = other DNA
ggtgttgcagctgcttcatg

SEQ ID NO: 16207 - DNA, 20 bp, synthetic construct
  source 1..20: mol_type = other DNA
tctgcacacaaggagtgtct

SEQ ID NO: 16208 - DNA, 20 bp, synthetic construct
  source 1..20: mol_type = other DNA
accgcccagacgactggcca

SEQ ID NO: 16209 - DNA, 20 bp, synthetic construct
  source 1..20: mol_type = other DNA
ctcactcgatctggtcggac

SEQ ID NO: 16210 - DNA, 20 bp, synthetic construct
  source 1..20: mol_type = other DNA
agcagagtttgggatccagc

SEQ ID NO: 16211 - DNA, 20 bp, synthetic construct
  source 1..20: mol_type = other DNA
gagaagtacactgacacgct

SEQ ID NO: 16212 - DNA, 20 bp, synthetic construct
  source 1..20: mol_type = other DNA
ggtaccagggcatccgctcg

SEQ ID NO: 16213 - DNA, 20 bp, synthetic construct
  source 1..20: mol_type = other DNA
acagagagggagaagtcccc

SEQ ID NO: 16214 - DNA, 20 bp, synthetic construct
  source 1..20: mol_type = other DNA
gagctatggggtcaccatgt

SEQ ID NO: 16215 - DNA, 20 bp, synthetic construct
  source 1..20: mol_type = other DNA
gcattgacattggttgtccc

SEQ ID NO: 16216 - DNA, 20 bp, synthetic construct
  source 1..20: mol_type = other DNA
tgggcaaggtacgagtggga

SEQ ID NO: 16217 - DNA, 20 bp, synthetic construct
  source 1..20: mol_type = other DNA
tcctccaggtctgcccaaga

SEQ ID NO: 16218 - DNA, 20 bp, synthetic construct
  source 1..20: mol_type = other DNA
acagagatggagaagtcccc

SEQ ID NO: 16219 - DNA, 20 bp, synthetic construct
  source 1..20: mol_type = other DNA
acctggaaggtcttccgctc

SEQ ID NO: 16220 - DNA, 20 bp, synthetic construct
  source 1..20: mol_type = other DNA
agagatggagaagtcccctg

SEQ ID NO: 16221 - DNA, 20 bp, synthetic construct
  source 1..20: mol_type = other DNA
cttacggcacccggagcttg

SEQ ID NO: 16222 - DNA, 20 bp, synthetic construct
  source 1..20: mol_type = other DNA
actcacctgataagaggcag

SEQ ID NO: 16223 - DNA, 20 bp, synthetic construct
  source 1..20: mol_type = other DNA
ccatggctaccgcctgccca

SEQ ID NO: 16224 - DNA, 20 bp, synthetic construct
  source 1..20: mol_type = other DNA
gccggtccaccaggatgggt

SEQ ID NO: 16225 - DNA, 20 bp, synthetic construct
  source 1..20: mol_type = other DNA
agttgagctgcaaagagaag

SEQ ID NO: 16226 - DNA, 20 bp, synthetic construct
  source 1..20: mol_type = other DNA
gcccatggtccctgagggaa

SEQ ID NO: 16227 - DNA, 20 bp, synthetic construct
  source 1..20: mol_type = other DNA
cacagttgccgattacaggt

SEQ ID NO: 16228 - DNA, 20 bp, synthetic construct
  source 1..20: mol_type = other DNA
gcagggctggggagaaggtg

SEQ ID NO: 16229 - DNA, 20 bp, synthetic construct
  source 1..20: mol_type = other DNA
tcacgcactgagccaggtcc

SEQ ID NO: 16230 - DNA, 20 bp, synthetic construct
  source 1..20: mol_type = other DNA
agtgccatggctgctctccc

SEQ ID NO: 16231 - DNA, 20 bp, synthetic construct
  source 1..20: mol_type = other DNA
agaagtcgcagcgacccgag

SEQ ID NO: 16232 - DNA, 20 bp, synthetic construct
  source 1..20: mol_type = other DNA
tgctgcaccaggtgtccatg

SEQ ID NO: 16233 - DNA, 20 bp, synthetic construct
  source 1..20: mol_type = other DNA
tcagcagggaggccaactcc

SEQ ID NO: 16234 - DNA, 20 bp, synthetic construct
  source 1..20: mol_type = other DNA
cctccagagtgtggttgtgg

SEQ ID NO: 16235 - DNA, 20 bp, synthetic construct
  source 1..20: mol_type = other DNA
gcgaggaggagatccagtag

SEQ ID NO: 16236 - DNA, 20 bp, synthetic construct
  source 1..20: mol_type = other DNA
gacctggaaggtcttccgct

SEQ ID NO: 16237 - DNA, 20 bp, synthetic construct
  source 1..20: mol_type = other DNA
tgggtaagggatgcggccgt

SEQ ID NO: 16238 - DNA, 20 bp, synthetic construct
  source 1..20: mol_type = other DNA
caggacctggagcagcgcag

SEQ ID NO: 16239 - DNA, 20 bp, synthetic construct
  source 1..20: mol_type = other DNA
cacacaaggagtgtctgggg

SEQ ID NO: 16240 - DNA, 20 bp, synthetic construct
  source 1..20: mol_type = other DNA
ctgtctcttcaggaaaccgc

SEQ ID NO: 16241 - DNA, 20 bp, synthetic construct
  source 1..20: mol_type = other DNA
caatgtcaatgcacaagctc

SEQ ID NO: 16242 - DNA, 20 bp, synthetic construct
  source 1..20: mol_type = other DNA
aacctttctgagaatgctcc

SEQ ID NO: 16243 - DNA, 20 bp, synthetic construct
  source 1..20: mol_type = other DNA
ccgaccaggaacttgtgcag

SEQ ID NO: 16244 - DNA, 20 bp, synthetic construct
  source 1..20: mol_type = other DNA
tccagcacagcctcatgagt

SEQ ID NO: 16245 - DNA, 20 bp, synthetic construct
  source 1..20: mol_type = other DNA
gtcacgcaccggcatggaca

SEQ ID NO: 16246 - DNA, 20 bp, synthetic construct
  source 1..20: mol_type = other DNA
cccttcggtcaccacgagca

SEQ ID NO: 16247 - DNA, 20 bp, synthetic construct
  source 1..20: mol_type = other DNA
cctgggacatctgggggcgc

SEQ ID NO: 16248 - DNA, 20 bp, synthetic construct
  source 1..20: mol_type = other DNA
cgaagagctcgctccgcttg

SEQ ID NO: 16249 - DNA, 20 bp, synthetic construct
  source 1..20: mol_type = other DNA
tgccaggctgaggccgcgga

SEQ ID NO: 16250 - DNA, 20 bp, synthetic construct
  source 1..20: mol_type = other DNA
ttacacctatatattcctcg

SEQ ID NO: 16251 - DNA, 20 bp, synthetic construct
  source 1..20: mol_type = other DNA
aatccagtcgctggcccttg

SEQ ID NO: 16252 - DNA, 20 bp, synthetic construct
  source 1..20: mol_type = other DNA
cggcccacgagcggatgccc

SEQ ID NO: 16253 - DNA, 20 bp, synthetic construct
  source 1..20: mol_type = other DNA
agcaggaaggcatacctgga

SEQ ID NO: 16254 - DNA, 20 bp, synthetic construct
  source 1..20: mol_type = other DNA
ctcaccagagatgaacagac

SEQ ID NO: 16255 - DNA, 20 bp, synthetic construct
  source 1..20: mol_type = other DNA
ctggattacctcttgccctc

SEQ ID NO: 16256 - DNA, 20 bp, synthetic construct
  source 1..20: mol_type = other DNA
cctgcagattgcagaaggca

SEQ ID NO: 16257 - DNA, 20 bp, synthetic construct
  source 1..20: mol_type = other DNA
ctgcgcaggtagtcaaaggt

SEQ ID NO: 16258 - DNA, 20 bp, synthetic construct
  source 1..20: mol_type = other DNA
agatgcagtcgggcactcac

SEQ ID NO: 16259 - DNA, 20 bp, synthetic construct
  source 1..20: mol_type = other DNA
gggcggtgctacaactgggc

SEQ ID NO: 16260 - DNA, 20 bp, synthetic construct
  source 1..20: mol_type = other DNA
gctgcagtcgattgtactga

SEQ ID NO: 16261 - DNA, 20 bp, synthetic construct
  source 1..20: mol_type = other DNA
gaagaagggcaggtgcgccg

SEQ ID NO: 16262 - DNA, 20 bp, synthetic construct
  source 1..20: mol_type = other DNA
tgcagcgacagcccatccgc

SEQ ID NO: 16263 - DNA, 20 bp, synthetic construct
  source 1..20: mol_type = other DNA
tgcagtggtcctcaatggac

SEQ ID NO: 16264 - DNA, 20 bp, synthetic construct
  source 1..20: mol_type = other DNA
gccgtcacctgaggcgttgc

SEQ ID NO: 16265 - DNA, 20 bp, synthetic construct
  source 1..20: mol_type = other DNA
acctgttgttgtgacgaggc

SEQ ID NO: 16266 - DNA, 20 bp, synthetic construct
  source 1..20: mol_type = other DNA
acaggatgactgggtacctg

SEQ ID NO: 16267 - DNA, 20 bp, synthetic construct
  source 1..20: mol_type = other DNA
ccgcactgattgcactggaa

SEQ ID NO: 16268 - DNA, 20 bp, synthetic construct
  source 1..20: mol_type = other DNA
cctcagacacggttgccccc

SEQ ID NO: 16269 - DNA, 20 bp, synthetic construct
  source 1..20: mol_type = other DNA
tcccaggtcacgcggtggct

SEQ ID NO: 16270 - DNA, 20 bp, synthetic construct
  source 1..20: mol_type = other DNA
ctactcacgggatggggagc

SEQ ID NO: 16271 - DNA, 20 bp, synthetic construct
  source 1..20: mol_type = other DNA
acgactggccagggcgcctg

SEQ ID NO: 16272 - DNA, 20 bp, synthetic construct
  source 1..20: mol_type = other DNA
ctcagaggtaccttctatca

SEQ ID NO: 16273 - DNA, 20 bp, synthetic construct
  source 1..20: mol_type = other DNA
acgcactgagccaggtcctg

SEQ ID NO: 16274 - DNA, 20 bp, synthetic construct
  source 1..20: mol_type = other DNA
gtcctcttcgtggctttctg

SEQ ID NO: 16275 - DNA, 20 bp, synthetic construct
  source 1..20: mol_type = other DNA
tcgccccgacttcctgaccg

SEQ ID NO: 16276 - DNA, 20 bp, synthetic construct
  source 1..20: mol_type = other DNA
gatgacctgtgacggggcag

SEQ ID NO: 16277 - DNA, 20 bp, synthetic construct
  source 1..20: mol_type = other DNA
gtaccagggcatccgctcgt

SEQ ID NO: 16278 - DNA, 20 bp, synthetic construct
  source 1..20: mol_type = other DNA
gcacgaggaaggagccgtca

SEQ ID NO: 16279 - DNA, 20 bp, synthetic construct
  source 1..20: mol_type = other DNA
aggttgtctgtaaagacaag

SEQ ID NO: 16280 - DNA, 20 bp, synthetic construct
  source 1..20: mol_type = other DNA
tgaagaggattccatccagc

SEQ ID NO: 16281 - DNA, 20 bp, synthetic construct
  source 1..20: mol_type = other DNA
acagctctggcacactgtgg

SEQ ID NO: 16282 - DNA, 20 bp, synthetic construct
  source 1..20: mol_type = other DNA
ccccttcggtcaccacgagc

SEQ ID NO: 16283 - DNA, 20 bp, synthetic construct
  source 1..20: mol_type = other DNA
gggcaggaagcagatcgacg

SEQ ID NO: 16284 - DNA, 20 bp, synthetic construct
  source 1..20: mol_type = other DNA
cagtaagtgtggcatcacca

SEQ ID NO: 16285 - DNA, 20 bp, synthetic construct
  source 1..20: mol_type = other DNA
cttaccttgtcagaaaatgg

SEQ ID NO: 16286 - DNA, 20 bp, synthetic construct
  source 1..20: mol_type = other DNA
gccgaacttctcacagcagg

SEQ ID NO: 16287 - DNA, 20 bp, synthetic construct
  source 1..20: mol_type = other DNA
tgcagtagcggccatagacg

SEQ ID NO: 16288 - DNA, 20 bp, synthetic construct
  source 1..20: mol_type = other DNA
ctgacaggccttgcaggatg

SEQ ID NO: 16289 - DNA, 20 bp, synthetic construct
  source 1..20: mol_type = other DNA
aggtttcaggaaccgttgca

SEQ ID NO: 16290 - DNA, 20 bp, synthetic construct
  source 1..20: mol_type = other DNA
gactcactctgaggccacaa

SEQ ID NO: 16291 - DNA, 20 bp, synthetic construct
  source 1..20: mol_type = other DNA
cgtcctcaggtggccagtga

SEQ ID NO: 16292 - DNA, 20 bp, synthetic construct
  source 1..20: mol_type = other DNA
catgtggaagtcacgcccgt

SEQ ID NO: 16293 - DNA, 20 bp, synthetic construct
  source 1..20: mol_type = other DNA
cgggctcactggtgtaatgg

SEQ ID NO: 16294 - DNA, 20 bp, synthetic construct
  source 1..20: mol_type = other DNA
ttaccgtcagccgctctcgg

SEQ ID NO: 16295 - DNA, 20 bp, synthetic construct
  source 1..20: mol_type = other DNA
tcgggtgcgtaccacttgag

SEQ ID NO: 16296 - DNA, 20 bp, synthetic construct
  source 1..20: mol_type = other DNA
ctgcacacaaggagtgtctg

SEQ ID NO: 16297 - DNA, 20 bp, synthetic construct
  source 1..20: mol_type = other DNA
gttccccgtcgatcttgggc

SEQ ID NO: 16298 - DNA, 20 bp, synthetic construct
  source 1..20: mol_type = other DNA
gcagatcaaagagagcctgc

SEQ ID NO: 16299 - DNA, 20 bp, synthetic construct
  source 1..20: mol_type = other DNA
ggaggaggacgctgatcagc

SEQ ID NO: 16300 - DNA, 20 bp, synthetic construct
  source 1..20: mol_type = other DNA
gtcctgaaagagtcaagata

SEQ ID NO: 16301 - DNA, 20 bp, synthetic construct
  source 1..20: mol_type = other DNA
tttccaggagcctgactacg

SEQ ID NO: 16302 - DNA, 20 bp, synthetic construct
  source 1..20: mol_type = other DNA
aagaagggcaggtgcgccgc

SEQ ID NO: 16303 - DNA, 20 bp, synthetic construct
  source 1..20: mol_type = other DNA
ggctcacctgggacatctgg

SEQ ID NO: 16304 - DNA, 20 bp, synthetic construct
  source 1..20: mol_type = other DNA
cttgcagccctcgattccag

SEQ ID NO: 16305 - DNA, 20 bp, synthetic construct
  source 1..20: mol_type = other DNA
tcacgcaccggcatggacac

SEQ ID NO: 16306 - DNA, 20 bp, synthetic construct
  source 1..20: mol_type = other DNA
cacagtgtgtgagaactgca

SEQ ID NO: 16307 - DNA, 20 bp, synthetic construct
  source 1..20: mol_type = other DNA
gtcgagcaggaaggcatacc

SEQ ID NO: 16308 - DNA, 20 bp, synthetic construct
  source 1..20: mol_type = other DNA
cacacgcaagtgagtgcggc

SEQ ID NO: 16309 - DNA, 20 bp, synthetic construct
  source 1..20: mol_type = other DNA
ctccaggtacttcatcccca

SEQ ID NO: 16310 - DNA, 20 bp, synthetic construct
  source 1..20: mol_type = other DNA
ctccccaggcccgctcagca

SEQ ID NO: 16311 - DNA, 20 bp, synthetic construct
  source 1..20: mol_type = other DNA
cttaccgatgtacatggagt

SEQ ID NO: 16312 - DNA, 20 bp, synthetic construct
  source 1..20: mol_type = other DNA
cctcgcacaacacgtgagtg

SEQ ID NO: 16313 - DNA, 20 bp, synthetic construct
  source 1..20: mol_type = other DNA
ggtttcaggaaccgttgcag

SEQ ID NO: 16314 - DNA, 20 bp, synthetic construct
  source 1..20: mol_type = other DNA
cccggcactggatgagccag

SEQ ID NO: 16315 - DNA, 20 bp, synthetic construct
  source 1..20: mol_type = other DNA
gaaacactacctggtacaca

SEQ ID NO: 16316 - DNA, 20 bp, synthetic construct
  source 1..20: mol_type = other DNA
ttaccttcccgctggaatcg

SEQ ID NO: 16317 - DNA, 20 bp, synthetic construct
  source 1..20: mol_type = other DNA
catagctccagacatcgctg

SEQ ID NO: 16318 - DNA, 20 bp, synthetic construct
  source 1..20: mol_type = other DNA
tggttccagatataacgtcg

SEQ ID NO: 16319 - DNA, 20 bp, synthetic construct
  source 1..20: mol_type = other DNA
agagctcagggtgacaggtg

SEQ ID NO: 16320 - DNA, 20 bp, synthetic construct
  source 1..20: mol_type = other DNA
gacaagttcagagagctcca

SEQ ID NO: 16321 - DNA, 20 bp, synthetic construct
  source 1..20: mol_type = other DNA
cagcacaagaagctggctga

SEQ ID NO: 16322 - DNA, 20 bp, synthetic construct
  source 1..20: mol_type = other DNA
ttgcaggtacgcaggcccca

SEQ ID NO: 16323 - DNA, 20 bp, synthetic construct
  source 1..20: mol_type = other DNA
gtaccttgaaagttggcata

SEQ ID NO: 16324 - DNA, 20 bp, synthetic construct
  source 1..20: mol_type = other DNA
cttgaaggggctcactaaag

SEQ ID NO: 16325 - DNA, 20 bp, synthetic construct
  source 1..20: mol_type = other DNA
ccacctcgaggctgcggcag

SEQ ID NO: 16326 - DNA, 20 bp, synthetic construct
  source 1..20: mol_type = other DNA
agaagcgagccccatcgatg

SEQ ID NO: 16327 - DNA, 20 bp, synthetic construct
  source 1..20: mol_type = other DNA
aggaggactcactggagaac

SEQ ID NO: 16328 - DNA, 20 bp, synthetic construct
  source 1..20: mol_type = other DNA
gtcatccttcccggaaacca

SEQ ID NO: 16329 - DNA, 20 bp, synthetic construct
  source 1..20: mol_type = other DNA
gctgaggccgcggaaggagc

SEQ ID NO: 16330 - DNA, 20 bp, synthetic construct
  source 1..20: mol_type = other DNA
ggcgcaggagcggcgagtgg

SEQ ID NO: 16331 - DNA, 20 bp, synthetic construct
  source 1..20: mol_type = other DNA
gtaggccatggctttgaatg

SEQ ID NO: 16332 - DNA, 20 bp, synthetic construct
  source 1..20: mol_type = other DNA
gatggagactttatatgctg

SEQ ID NO: 16333 - DNA, 20 bp, synthetic construct
  source 1..20: mol_type = other DNA
aacccacagcgacacggtgg

SEQ ID NO: 16334 - DNA, 20 bp, synthetic construct
  source 1..20: mol_type = other DNA
ggccaggatggttcttaggt

SEQ ID NO: 16335 - DNA, 20 bp, synthetic construct
  source 1..20: mol_type = other DNA
acgaagcaggtcctactcgg

SEQ ID NO: 16336 - DNA, 20 bp, synthetic construct
  source 1..20: mol_type = other DNA
cacgaggaaggagccgtcag

SEQ ID NO: 16337 - DNA, 20 bp, synthetic construct
  source 1..20: mol_type = other DNA
ccttcttgaaatagtcagca

SEQ ID NO: 16338 - DNA, 20 bp, synthetic construct
  source 1..20: mol_type = other DNA
ccggcactggatgagccagt

SEQ ID NO: 16339 - DNA, 20 bp, synthetic construct
  source 1..20: mol_type = other DNA
agggcatgtcaatattactg

SEQ ID NO: 16340 - DNA, 20 bp, synthetic construct
  source 1..20: mol_type = other DNA
cttctgtctattgaaggagc

SEQ ID NO: 16341 - DNA, 20 bp, synthetic construct
  source 1..20: mol_type = other DNA
agtcctgaaagagtcaagat

SEQ ID NO: 16342 - DNA, 20 bp, synthetic construct
  source 1..20: mol_type = other DNA
ctctcttacctcttcctccg

SEQ ID NO: 16343 - DNA, 20 bp, synthetic construct
  source 1..20: mol_type = other DNA
aaacactacctggtacacac

SEQ ID NO: 16344 - DNA, 20 bp, synthetic construct
  source 1..20: mol_type = other DNA
cctctataggtatcttgaag

SEQ ID NO: 16345 - DNA, 20 bp, synthetic construct
  source 1..20: mol_type = other DNA
gcattggcgccacagctcca

SEQ ID NO: 16346 - DNA, 20 bp, synthetic construct
  source 1..20: mol_type = other DNA
gtttccaggagcctgactac

SEQ ID NO: 16347 - DNA, 20 bp, synthetic construct
  source 1..20: mol_type = other DNA
cacatacaggaacttgccgt

SEQ ID NO: 16348 - DNA, 20 bp, synthetic construct
  source 1..20: mol_type = other DNA
gcaggatgtggtctcctcaa

SEQ ID NO: 16349 - DNA, 20 bp, synthetic construct
  source 1..20: mol_type = other DNA
gcagatggaggaggccatcc

SEQ ID NO: 16350 - DNA, 20 bp, synthetic construct
  source 1..20: mol_type = other DNA
ggaactcaagatcacctcgg

SEQ ID NO: 16351 - DNA, 20 bp, synthetic construct
  source 1..20: mol_type = other DNA
tgtaccttgaaagttggcat

SEQ ID NO: 16352 - DNA, 20 bp, synthetic construct
  source 1..20: mol_type = other DNA
tccaggtctgcccaagatgg

SEQ ID NO: 16353 - DNA, 20 bp, synthetic construct
  source 1..20: mol_type = other DNA
gcggtgaagagcctgaagca

SEQ ID NO: 16354 - DNA, 20 bp, synthetic construct
  source 1..20: mol_type = other DNA
tattatgtctgctaccccag

SEQ ID NO: 16355 - DNA, 20 bp, synthetic construct
  source 1..20: mol_type = other DNA
agagacaggtaaagctctca

SEQ ID NO: 16356 - DNA, 20 bp, synthetic construct
  source 1..20: mol_type = other DNA
ccacagcgacacggtggagg

SEQ ID NO: 16357 - DNA, 20 bp, synthetic construct
  source 1..20: mol_type = other DNA
agagaagggtagccagtacc

SEQ ID NO: 16358 - DNA, 20 bp, synthetic construct
  source 1..20: mol_type = other DNA
tgacgttacctcgtgcggcc

SEQ ID NO: 16359 - DNA, 20 bp, synthetic construct
  source 1..20: mol_type = other DNA
cgactggccagggcgcctgt

SEQ ID NO: 16360 - DNA, 20 bp, synthetic construct
  source 1..20: mol_type = other DNA
gacacagaaggacaccatcc

SEQ ID NO: 16361 - DNA, 20 bp, synthetic construct
  source 1..20: mol_type = other DNA
cacacagctctggcacactg

SEQ ID NO: 16362 - DNA, 20 bp, synthetic construct
  source 1..20: mol_type = other DNA
ggcctcagcctggcagggga

SEQ ID NO: 16363 - DNA, 20 bp, synthetic construct
  source 1..20: mol_type = other DNA
aaggagaggtgagacccagc

SEQ ID NO: 16364 - DNA, 20 bp, synthetic construct
  source 1..20: mol_type = other DNA
cacagctctggcacactgtg

SEQ ID NO: 16365 - DNA, 20 bp, synthetic construct
  source 1..20: mol_type = other DNA
acagaaggacaccatcccgg

SEQ ID NO: 16366 - DNA, 20 bp, synthetic construct
  source 1..20: mol_type = other DNA
gaagaacagctcatagccct

SEQ ID NO: 16367 - DNA, 20 bp, synthetic construct
  source 1..20: mol_type = other DNA
cacagtgtgccagagctgtg

SEQ ID NO: 16368 - DNA, 20 bp, synthetic construct
  source 1..20: mol_type = other DNA
cagaaggacaccatcccgga

SEQ ID NO: 16369 - DNA, 20 bp, synthetic construct
  source 1..20: mol_type = other DNA
ggatgagccagtgggtgcat

SEQ ID NO: 16370 - DNA, 20 bp, synthetic construct
  source 1..20: mol_type = other DNA
ccaagaaagtcccgtccgag

SEQ ID NO: 16371 - DNA, 20 bp, synthetic construct
  source 1..20: mol_type = other DNA
ccgggaaggatgacatgtcc

SEQ ID NO: 16372 - DNA, 20 bp, synthetic construct
  source 1..20: mol_type = other DNA
agcaggagccccagcacgca

SEQ ID NO: 16373 - DNA, 20 bp, synthetic construct
  source 1..20: mol_type = other DNA
cccactcacctggcagtctg

SEQ ID NO: 16374 - DNA, 20 bp, synthetic construct
  source 1..20: mol_type = other DNA
cgaagcaggtcctactcgga

SEQ ID NO: 16375 - DNA, 20 bp, synthetic construct
  source 1..20: mol_type = other DNA
gccatcaaggtgctgaagca

SEQ ID NO: 16376 - DNA, 20 bp, synthetic construct
  source 1..20: mol_type = other DNA
tctggcacactgtgggggaa

SEQ ID NO: 16377 - DNA, 20 bp, synthetic construct
  source 1..20: mol_type = other DNA
actcaccctcatggcatcca

SEQ ID NO: 16378 - DNA, 20 bp, synthetic construct
  source 1..20: mol_type = other DNA
ctgaggccgcggaaggagca

SEQ ID NO: 16379 - DNA, 20 bp, synthetic construct
  source 1..20: mol_type = other DNA
tgtttccaggagcctgacta

SEQ ID NO: 16380 - DNA, 20 bp, synthetic construct
  source 1..20: mol_type = other DNA
aggtgagcccactcaggagg

SEQ ID NO: 16381 - DNA, 20 bp, synthetic construct
  source 1..20: mol_type = other DNA
cctacctgctggcctgctga

SEQ ID NO: 16382 - DNA, 20 bp, synthetic construct
  source 1..20: mol_type = other DNA
tcttacctcttcctccgcgg

SEQ ID NO: 16383 - DNA, 20 bp, synthetic construct
  source 1..20: mol_type = other DNA
gtccacctgagagtgcacag

SEQ ID NO: 16384 - DNA, 20 bp, synthetic construct
  source 1..20: mol_type = other DNA
tcatgacggtgcccacctcg

SEQ ID NO: 16385 - DNA, 20 bp, synthetic construct
  source 1..20: mol_type = other DNA
gtcaggtacctggataggca

SEQ ID NO: 16386 - DNA, 20 bp, synthetic construct
  source 1..20: mol_type = other DNA
taccttcccgctggaatcga

SEQ ID NO: 16387 - DNA, 20 bp, synthetic construct
  source 1..20: mol_type = other DNA
acacagctctggcacactgt

SEQ ID NO: 16388 - DNA, 20 bp, synthetic construct
  source 1..20: mol_type = other DNA
gcaggagccccagcacgcag

SEQ ID NO: 16389 - DNA, 20 bp, synthetic construct
  source 1..20: mol_type = other DNA
gggctcacctgggacatctg

SEQ ID NO: 16390 - DNA, 20 bp, synthetic construct
  source 1..20: mol_type = other DNA
tgggcggcagcacccggcac

SEQ ID NO: 16391 - DNA, 20 bp, synthetic construct
  source 1..20: mol_type = other DNA
cacacacagtgccatcaaca

SEQ ID NO: 16392 - DNA, 20 bp, synthetic construct
  source 1..20: mol_type = other DNA
agtggacatctgcatcactg

SEQ ID NO: 16393 - DNA, 20 bp, synthetic construct
  source 1..20: mol_type = other DNA
gtggacatctgcatcactgg

SEQ ID NO: 16394 - DNA, 20 bp, synthetic construct
  source 1..20: mol_type = other DNA
ccccaggcccttccccaccg

SEQ ID NO: 16395 - DNA, 20 bp, synthetic construct
  source 1..20: mol_type = other DNA
cgcccagcgagcgcaggcac

SEQ ID NO: 16396 - DNA, 20 bp, synthetic construct
  source 1..20: mol_type = other DNA
acttcgataatgaacttgca

SEQ ID NO: 16397 - DNA, 20 bp, synthetic construct
  source 1..20: mol_type = other DNA
gcctcagcctggcaggggaa

SEQ ID NO: 16398 - DNA, 20 bp, synthetic construct
  source 1..20: mol_type = other DNA
gcctaccgagtgattccggc

SEQ ID NO: 16399 - DNA, 20 bp, synthetic construct
  source 1..20: mol_type = other DNA
tggccaggatgggcagcagc

SEQ ID NO: 16400 - DNA, 20 bp, synthetic construct
  source 1..20: mol_type = other DNA
cagcaggagccccagcacgc

SEQ ID NO: 16401 - DNA, 20 bp, synthetic construct
  source 1..20: mol_type = other DNA
agcagggctggggagaaggt

SEQ ID NO: 16402 - DNA, 20 bp, synthetic construct
  source 1..20: mol_type = other DNA
tgagcagaagatgaaagggc

SEQ ID NO: 16403 - DNA, 20 bp, synthetic construct
  source 1..20: mol_type = other DNA
ctgtgcatatgagctggggc

SEQ ID NO: 16404 - DNA, 20 bp, synthetic construct
  source 1..20: mol_type = other DNA
gaatccatcttcctgaccct

SEQ ID NO: 16405 - DNA, 20 bp, synthetic construct
  source 1..20: mol_type = other DNA
gtacctggataggcaaggag

SEQ ID NO: 16406 - DNA, 20 bp, synthetic construct
  source 1..20: mol_type = other DNA
ggcacactgtgggggaaggg

SEQ ID NO: 16407 - DNA, 20 bp, synthetic construct
  source 1..20: mol_type = other DNA
caccctacctggaaactgac

SEQ ID NO: 16408 - DNA, 20 bp, synthetic construct
  source 1..20: mol_type = other DNA
cacgagcagggctggggaga

SEQ ID NO: 16409 - DNA, 20 bp, synthetic construct
  source 1..20: mol_type = other DNA
agtacaggcagatgtgcagc

SEQ ID NO: 16410 - DNA, 20 bp, synthetic construct
  source 1..20: mol_type = other DNA
gacgttacctcgtgcggccc

SEQ ID NO: 16411 - DNA, 20 bp, synthetic construct
  source 1..20: mol_type = other DNA
tggagaactggtccccggtc

SEQ ID NO: 16412 - DNA, 20 bp, synthetic construct
  source 1..20: mol_type = other DNA
aatccatcttcctgaccctt

SEQ ID NO: 16413 - DNA, 20 bp, synthetic construct
  source 1..20: mol_type = other DNA
tgagcagtccccacatcagc

SEQ ID NO: 16414 - DNA, 20 bp, synthetic construct
  source 1..20: mol_type = other DNA
ccagggagatggccccacag

SEQ ID NO: 16415 - DNA, 20 bp, synthetic construct
  source 1..20: mol_type = other DNA
ggtgacaggtgcggcctcgg

SEQ ID NO: 16416 - DNA, 20 bp, synthetic construct
  source 1..20: mol_type = other DNA
tgtagcaccgcccagacgac

SEQ ID NO: 16417 - DNA, 20 bp, synthetic construct
  source 1..20: mol_type = other DNA
tccaggcatgcagatcccac

SEQ ID NO: 16418 - DNA, 20 bp, synthetic construct
  source 1..20: mol_type = other DNA
tgtgcatatgagctggggct

SEQ ID NO: 16419 - DNA, 20 bp, synthetic construct
  source 1..20: mol_type = other DNA
cttgcattcacagttcaaca

SEQ ID NO: 16420 - DNA, 20 bp, synthetic construct
  source 1..20: mol_type = other DNA
ggatacagggctctacacag

SEQ ID NO: 16421 - DNA, 20 bp, synthetic construct
  source 1..20: mol_type = other DNA
ggtccaccttgtcttcccgt

SEQ ID NO: 16422 - DNA, 20 bp, synthetic construct
  source 1..20: mol_type = other DNA
gatcagcaggaaaacacagc

SEQ ID NO: 16423 - DNA, 20 bp, synthetic construct
  source 1..20: mol_type = other DNA
gggtccaccttgtcttcccg

SEQ ID NO: 16424 - DNA, 20 bp, synthetic construct
  source 1..20: mol_type = other DNA
cacctacctaagaaccatcc

SEQ ID NO: 16425 - DNA, 20 bp, synthetic construct
  source 1..20: mol_type = other DNA
ggagatggccccacagaggt

SEQ ID NO: 16426 - DNA, 20 bp, synthetic construct
  source 1..20: mol_type = other DNA
cccaggtgaagagaagcctc

SEQ ID NO: 16427 - DNA, 20 bp, synthetic construct
  source 1..20: mol_type = other DNA
gccaggtgagcccactcagg

SEQ ID NO: 16428 - DNA, 20 bp, synthetic construct
  source 1..20: mol_type = other DNA
tcaccctgagctctgcccgc

SEQ ID NO: 16429 - DNA, 20 bp, synthetic construct
  source 1..20: mol_type = other DNA
ccgcacctgttgttgtgacg

SEQ ID NO: 16430 - DNA, 20 bp, synthetic construct
  source 1..20: mol_type = other DNA
gcagtgacctggaagatgga

SEQ ID NO: 16431 - DNA, 20 bp, synthetic construct
  source 1..20: mol_type = other DNA
ccctgcagtgacctggaaga

SEQ ID NO: 16432 - DNA, 20 bp, synthetic construct
  source 1..20: mol_type = other DNA
acacttcatgatggagttga

SEQ ID NO: 16433 - DNA, 20 bp, synthetic construct
  source 1..20: mol_type = other DNA
ggggcctcggtcagcagcac

SEQ ID NO: 16434 - DNA, 20 bp, synthetic construct
  source 1..20: mol_type = other DNA
gcaatgatctgaggagggaa

SEQ ID NO: 16435 - DNA, 20 bp, synthetic construct
  source 1..20: mol_type = other DNA
agctgtagccgcgctcggtg

SEQ ID NO: 16436 - DNA, 20 bp, synthetic construct
  source 1..20: mol_type = other DNA
gctgatccacatctgctgga

SEQ ID NO: 16437 - DNA, 20 bp, synthetic construct
  source 1..20: mol_type = other DNA
tcacctgggtcatcttctcg

SEQ ID NO: 16438 - DNA, 20 bp, synthetic construct
  source 1..20: mol_type = other DNA
gtcacgcacgatttcccgct

SEQ ID NO: 16439 - DNA, 20 bp, synthetic construct
  source 1..20: mol_type = other DNA
ggctccggcatgtgcaaggc

SEQ ID NO: 16440 - DNA, 20 bp, synthetic construct
  source 1..20: mol_type = other DNA
gtgacgatgccgtgctcgat

SEQ ID NO: 16441 - DNA, 20 bp, synthetic construct
  source 1..20: mol_type = other DNA
aaggctggaagagtgcctca

SEQ ID NO: 16442 - DNA, 20 bp, synthetic construct
  source 1..20: mol_type = other DNA
cgaggcccccctgaacccca

SEQ ID NO: 16443 - DNA, 20 bp, synthetic construct
  source 1..20: mol_type = other DNA
cacaggactccatgcctgag

SEQ ID NO: 16444 - DNA, 20 bp, synthetic construct
  source 1..20: mol_type = other DNA
acggagtacttgcgctcagg

SEQ ID NO: 16445 - DNA, 20 bp, synthetic construct
  source 1..20: mol_type = other DNA
ggccagccaggtccagacgc

SEQ ID NO: 16446 - DNA, 20 bp, synthetic construct
  source 1..20: mol_type = other DNA
catgcccaccatcacgccct

SEQ ID NO: 16447 - DNA, 20 bp, synthetic construct
  source 1..20: mol_type = other DNA
gaaggctggaagagtgcctc

SEQ ID NO: 16448 - DNA, 20 bp, synthetic construct
  source 1..20: mol_type = other DNA
cccccatgccatcctgcgtc

SEQ ID NO: 16449 - DNA, 20 bp, synthetic construct
  source 1..20: mol_type = other DNA
cggctacagcttcaccacca

SEQ ID NO: 16450 - DNA, 20 bp, synthetic construct
  source 1..20: mol_type = other DNA
gccgccagacagcactgtgt

SEQ ID NO: 16451 - DNA, 20 bp, synthetic construct
  source 1..20: mol_type = other DNA
ctgagcgcaagtactccgtg

SEQ ID NO: 16452 - DNA, 20 bp, synthetic construct
  source 1..20: mol_type = other DNA
actcttccagccttccttcc

SEQ ID NO: 16453 - DNA, 20 bp, synthetic construct
  source 1..20: mol_type = other DNA
tggggcgccccacgatggag

SEQ ID NO: 16454 - DNA, 20 bp, synthetic construct
  source 1..20: mol_type = other DNA
agcagcacggggtgctcctc

SEQ ID NO: 16455 - DNA, 20 bp, synthetic construct
  source 1..20: mol_type = other DNA
tgttggcgtacaggtctttg

SEQ ID NO: 16456 - DNA, 20 bp, synthetic construct
  source 1..20: mol_type = other DNA
ctgaagtaccccatcgagca

SEQ ID NO: 16457 - DNA, 20 bp, synthetic construct
  source 1..20: mol_type = other DNA
gaagcatttgcggtggacga

SEQ ID NO: 16458 - DNA, 20 bp, synthetic construct
  source 1..20: mol_type = other DNA
ggttggccttggggttcagg

SEQ ID NO: 16459 - DNA, 20 bp, synthetic construct
  source 1..20: mol_type = other DNA
gcttcaccaccacggccgag

SEQ ID NO: 16460 - DNA, 20 bp, synthetic construct
  source 1..20: mol_type = other DNA
gtacatggctggggtgttga

SEQ ID NO: 16461 - DNA, 20 bp, synthetic construct
  source 1..20: mol_type = other DNA
tggaggggaagacggcccgg

SEQ ID NO: 16462 - DNA, 20 bp, synthetic construct
  source 1..20: mol_type = other DNA
gatggaggggaagacggccc

SEQ ID NO: 16463 - DNA, 20 bp, synthetic construct
  source 1..20: mol_type = other DNA
cgcggcgatatcatcatcca

SEQ ID NO: 16464 - DNA, 20 bp, synthetic construct
  source 1..20: mol_type = other DNA
cacacggagtacttgcgctc

SEQ ID NO: 16465 - DNA, 20 bp, synthetic construct
  source 1..20: mol_type = other DNA
agtccgcctagaagcatttg

SEQ ID NO: 16466 - DNA, 20 bp, synthetic construct
  source 1..20: mol_type = other DNA
gatctccttctgcatcctgt

SEQ ID NO: 16467 - DNA, 20 bp, synthetic construct
  source 1..20: mol_type = other DNA
cgtggggcgccccaggcacc

SEQ ID NO: 16468 - DNA, 20 bp, synthetic construct
  source 1..20: mol_type = other DNA
catttgcggtggacgatgga

SEQ ID NO: 16469 - DNA, 20 bp, synthetic construct
  source 1..20: mol_type = other DNA
ggaggagcaatgatctgagg

SEQ ID NO: 16470 - DNA, 20 bp, synthetic construct
  source 1..20: mol_type = other DNA
tgagcggttccgctgccctg

SEQ ID NO: 16471 - DNA, 20 bp, synthetic construct
  source 1..20: mol_type = other DNA
gacggccaggtcatcaccat

SEQ ID NO: 16472 - DNA, 20 bp, synthetic construct
  source 1..20: mol_type = other DNA
ctgggtcatcttctcgcggt

SEQ ID NO: 16473 - DNA, 20 bp, synthetic construct
  source 1..20: mol_type = other DNA
cgtacagggatagcacagcc

SEQ ID NO: 16474 - DNA, 20 bp, synthetic construct
  source 1..20: mol_type = other DNA
agggcatacccctcgtagat

SEQ ID NO: 16475 - DNA, 20 bp, synthetic construct
  source 1..20: mol_type = other DNA
gaagccggccttgcacatgc

SEQ ID NO: 16476 - DNA, 20 bp, synthetic construct
  source 1..20: mol_type = other DNA
gcagctcgtagctcttctcc

SEQ ID NO: 16477 - DNA, 20 bp, synthetic construct
  source 1..20: mol_type = other DNA
atctgaggagggaaggggac

SEQ ID NO: 16478 - DNA, 20 bp, synthetic construct
  source 1..20: mol_type = other DNA
gcggttggccttggggttca

SEQ ID NO: 16479 - DNA, 20 bp, synthetic construct
  source 1..20: mol_type = other DNA
gctcccctacctggtgcctg

SEQ ID NO: 16480 - DNA, 20 bp, synthetic construct
  source 1..20: mol_type = other DNA
gggcctcggtcagcagcacg

SEQ ID NO: 16481 - DNA, 20 bp, synthetic construct
  source 1..20: mol_type = other DNA
ggaggagctggaagcagccg

SEQ ID NO: 16482 - DNA, 20 bp, synthetic construct
  source 1..20: mol_type = other DNA
cacactgtgcccatctacga

SEQ ID NO: 16483 - DNA, 20 bp, synthetic construct
  source 1..20: mol_type = other DNA
cttcgagcaagagatggcca

SEQ ID NO: 16484 - DNA, 20 bp, synthetic construct
  source 1..20: mol_type = other DNA
cagctcgtagctcttctcca

SEQ ID NO: 16485 - DNA, 20 bp, synthetic construct
  source 1..20: mol_type = other DNA
ctgctggaaggtggacagcg

SEQ ID NO: 16486 - DNA, 20 bp, synthetic construct
  source 1..20: mol_type = other DNA
gtggatcggcggctccatcc

SEQ ID NO: 16487 - DNA, 20 bp, synthetic construct
  source 1..20: mol_type = other DNA
tttctccatgtcgtcccagt

SEQ ID NO: 16488 - DNA, 20 bp, synthetic construct
  source 1..20: mol_type = other DNA
caaccgcgagaagatgaccc

SEQ ID NO: 16489 - DNA, 20 bp, synthetic construct
  source 1..20: mol_type = other DNA
acagcactgtgttggcgtac

SEQ ID NO: 16490 - DNA, 20 bp, synthetic construct
  source 1..20: mol_type = other DNA
tggatagcaacgtacatggc

SEQ ID NO: 16491 - DNA, 20 bp, synthetic construct
  source 1..20: mol_type = other DNA
cggttggccttggggttcag

SEQ ID NO: 16492 - DNA, 20 bp, synthetic construct
  source 1..20: mol_type = other DNA
ctcgtcgtcgacaacggctc

SEQ ID NO: 16493 - DNA, 20 bp, synthetic construct
  source 1..20: mol_type = other DNA
aagcaggagtatgacgagtc

SEQ ID NO: 16494 - DNA, 20 bp, synthetic construct
  source 1..20: mol_type = other DNA
ggtccagacgcaggatggca

SEQ ID NO: 16495 - DNA, 20 bp, synthetic construct
  source 1..20: mol_type = other DNA
cgtgatggactccggtgacg

SEQ ID NO: 16496 - DNA, 20 bp, synthetic construct
  source 1..20: mol_type = other DNA
ccgtcttcccctccatcgtg

SEQ ID NO: 16497 - DNA, 20 bp, synthetic construct
  source 1..20: mol_type = other DNA
catcacgccctgggaaggaa

SEQ ID NO: 16498 - DNA, 20 bp, synthetic construct
  source 1..20: mol_type = other DNA
cgcaagtactccgtgtggat

SEQ ID NO: 16499 - DNA, 20 bp, synthetic construct
  source 1..20: mol_type = other DNA
ccgcctagaagcatttgcgg

SEQ ID NO: 16500 - DNA, 20 bp, synthetic construct
  source 1..20: mol_type = other DNA
gaggatgcctctcttgctct

SEQ ID NO: 16501 - DNA, 20 bp, synthetic construct
  source 1..20: mol_type = other DNA
ccatgcctgagagggaaatg

SEQ ID NO: 16502 - DNA, 20 bp, synthetic construct
  source 1..20: mol_type = other DNA
agccttccttcctgggtgag

SEQ ID NO: 16503 - DNA, 20 bp, synthetic construct
  source 1..20: mol_type = other DNA
ccacactgtgcccatctacg

SEQ ID NO: 16504 - DNA, 20 bp, synthetic construct
  source 1..20: mol_type = other DNA
gcatttgcggtggacgatgg

SEQ ID NO: 16505 - DNA, 20 bp, synthetic construct
  source 1..20: mol_type = other DNA
cttctacaatgagctgcgtg

SEQ ID NO: 16506 - DNA, 20 bp, synthetic construct
  source 1..20: mol_type = other DNA
gcagatgtggatcagcaagc

SEQ ID NO: 16507 - DNA, 20 bp, synthetic construct
  source 1..20: mol_type = other DNA
atcgtgatggactccggtga

SEQ ID NO: 16508 - DNA, 20 bp, synthetic construct
  source 1..20: mol_type = other DNA
cctggggcgccccacgatgg

SEQ ID NO: 16509 - DNA, 20 bp, synthetic construct
  source 1..20: mol_type = other DNA
ggtctcaaacatgatctgta

SEQ ID NO: 16510 - DNA, 20 bp, synthetic construct
  source 1..20: mol_type = other DNA
ggaaggtggacagcgaggcc

SEQ ID NO: 16511 - DNA, 20 bp, synthetic construct
  source 1..20: mol_type = other DNA
gagggcatacccctcgtaga

SEQ ID NO: 16512 - DNA, 20 bp, synthetic construct
  source 1..20: mol_type = other DNA
gatggagccgccgatccaca

SEQ ID NO: 16513 - DNA, 20 bp, synthetic construct
  source 1..20: mol_type = other DNA
gctcggtgaggatcttcatg

SEQ ID NO: 16514 - DNA, 20 bp, synthetic construct
  source 1..20: mol_type = other DNA
gacgcaggatggcatggggg

SEQ ID NO: 16515 - DNA, 20 bp, synthetic construct
  source 1..20: mol_type = other DNA
tccagacgcaggatggcatg

SEQ ID NO: 16516 - DNA, 20 bp, synthetic construct
  source 1..20: mol_type = other DNA
ccagggcgtgatggtgggca

SEQ ID NO: 16517 - DNA, 20 bp, synthetic construct
  source 1..20: mol_type = other DNA
tacgcctctggccgtaccac

SEQ ID NO: 16518 - DNA, 20 bp, synthetic construct
  source 1..20: mol_type = other DNA
ctacgagctgcctgacggcc

SEQ ID NO: 16519 - DNA, 20 bp, synthetic construct
  source 1..20: mol_type = other DNA
ggtcagaaggattcctatgt

SEQ ID NO: 16520 - DNA, 20 bp, synthetic construct
  source 1..20: mol_type = other DNA
gcttgctgatccacatctgc

SEQ ID NO: 16521 - DNA, 20 bp, synthetic construct
  source 1..20: mol_type = other DNA
caggcaccaggtaggggagc

SEQ ID NO: 16522 - DNA, 20 bp, synthetic construct
  source 1..20: mol_type = other DNA
agcaatgatctgaggaggga

SEQ ID NO: 16523 - DNA, 20 bp, synthetic construct
  source 1..20: mol_type = other DNA
cacacgcagctcattgtaga

SEQ ID NO: 16524 - DNA, 20 bp, synthetic construct
  source 1..20: mol_type = other DNA
tggagttgaaggtagtttcg

SEQ ID NO: 16525 - DNA, 20 bp, synthetic construct
  source 1..20: mol_type = other DNA
atgtgcaaggccggcttcgc

SEQ ID NO: 16526 - DNA, 20 bp, synthetic construct
  source 1..20: mol_type = other DNA
gggggcctcggtcagcagca

SEQ ID NO: 16527 - DNA, 20 bp, synthetic construct
  source 1..20: mol_type = other DNA
ccagacgcaggatggcatgg

SEQ ID NO: 16528 - DNA, 20 bp, synthetic construct
  source 1..20: mol_type = other DNA
ggccgtcttcccctccatcg

SEQ ID NO: 16529 - DNA, 20 bp, synthetic construct
  source 1..20: mol_type = other DNA
ccatgcccaccatcacgccc

SEQ ID NO: 16530 - DNA, 20 bp, synthetic construct
  source 1..20: mol_type = other DNA
cccaccatcacgccctggga

SEQ ID NO: 16531 - DNA, 20 bp, synthetic construct
  source 1..20: mol_type = other DNA
ggtgacgatgccgtgctcga

SEQ ID NO: 16532 - DNA, 20 bp, synthetic construct
  source 1..20: mol_type = other DNA
gccgcgctcgtcgtcgacaa

SEQ ID NO: 16533 - DNA, 20 bp, synthetic construct
  source 1..20: mol_type = other DNA
cctgagagggaaatgagggc

SEQ ID NO: 16534 - DNA, 20 bp, synthetic construct
  source 1..20: mol_type = other DNA
gggcgccccaggcaccaggt

SEQ ID NO: 16535 - DNA, 20 bp, synthetic construct
  source 1..20: mol_type = other DNA
cagcagcacggggtgctcct

SEQ ID NO: 16536 - DNA, 20 bp, synthetic construct
  source 1..20: mol_type = other DNA
cttcaccaccacggccgagc

SEQ ID NO: 16537 - DNA, 20 bp, synthetic construct
  source 1..20: mol_type = other DNA
tgaggatgcctctcttgctc

SEQ ID NO: 16538 - DNA, 20 bp, synthetic construct
  source 1..20: mol_type = other DNA
ggtacggccagaggcgtaca

SEQ ID NO: 16539 - DNA, 20 bp, synthetic construct
  source 1..20: mol_type = other DNA
tgccatcctgcgtctggacc

SEQ ID NO: 16540 - DNA, 20 bp, synthetic construct
  source 1..20: mol_type = other DNA
ccatctcttgctcgaagtcc

SEQ ID NO: 16541 - DNA, 20 bp, synthetic construct
  source 1..20: mol_type = other DNA
gggtcagaaggattcctatg

SEQ ID NO: 16542 - DNA, 20 bp, synthetic construct
  source 1..20: mol_type = other DNA
atggtgatgacctggccgtc

SEQ ID NO: 16543 - DNA, 20 bp, synthetic construct
  source 1..20: mol_type = other DNA
ggaagagtgcctcagggcag

SEQ ID NO: 16544 - DNA, 20 bp, synthetic construct
  source 1..20: mol_type = other DNA
ccttcccagggcgtgatggt

SEQ ID NO: 16545 - DNA, 20 bp, synthetic construct
  source 1..20: mol_type = other DNA
catgcctgagagggaaatga

SEQ ID NO: 16546 - DNA, 20 bp, synthetic construct
  source 1..20: mol_type = other DNA
tcgtgatggactccggtgac

SEQ ID NO: 16547 - DNA, 20 bp, synthetic construct
  source 1..20: mol_type = other DNA
tgaggtagtcagtcaggtcc

SEQ ID NO: 16548 - DNA, 20 bp, synthetic construct
  source 1..20: mol_type = other DNA
tacgccaacacagtgctgtc

SEQ ID NO: 16549 - DNA, 20 bp, synthetic construct
  source 1..20: mol_type = other DNA
ggtagtttcgtggatgccac

SEQ ID NO: 16550 - DNA, 20 bp, synthetic construct
  source 1..20: mol_type = other DNA
accttgatcttcattgtgct

SEQ ID NO: 16551 - DNA, 20 bp, synthetic construct
  source 1..20: mol_type = other DNA
cgatggaggggaagacggcc

SEQ ID NO: 16552 - DNA, 20 bp, synthetic construct
  source 1..20: mol_type = other DNA
ctccactcacccaggaagga

SEQ ID NO: 16553 - DNA, 20 bp, synthetic construct
  source 1..20: mol_type = other DNA
gatccacatctgctggaagg

SEQ ID NO: 16554 - DNA, 20 bp, synthetic construct
  source 1..20: mol_type = other DNA
agccaggtccagacgcagga

SEQ ID NO: 16555 - DNA, 20 bp, synthetic construct
  source 1..20: mol_type = other DNA
tgacgatgccgtgctcgatg

SEQ ID NO: 16556 - DNA, 20 bp, synthetic construct
  source 1..20: mol_type = other DNA
ctccatcatgaagtgtgacg

SEQ ID NO: 16557 - DNA, 20 bp, synthetic construct
  source 1..20: mol_type = other DNA
tcaggaggagcaatgatctg

SEQ ID NO: 16558 - DNA, 20 bp, synthetic construct
  source 1..20: mol_type = other DNA
ggatagcaacgtacatggct

SEQ ID NO: 16559 - DNA, 20 bp, synthetic construct
  source 1..20: mol_type = other DNA
gccgttgtcgacgacgagcg

SEQ ID NO: 16560 - DNA, 20 bp, synthetic construct
  source 1..20: mol_type = other DNA
caacggctccggcatgtgca

SEQ ID NO: 16561 - DNA, 20 bp, synthetic construct
  source 1..20: mol_type = other DNA
acgcaggatggcatggggga

SEQ ID NO: 16562 - DNA, 20 bp, synthetic construct
  source 1..20: mol_type = other DNA
caccttgatcttcattgtgc

SEQ ID NO: 16563 - DNA, 20 bp, synthetic construct
  source 1..20: mol_type = other DNA
acaggactccatgcctgaga

SEQ ID NO: 16564 - DNA, 20 bp, synthetic construct
  source 1..20: mol_type = other DNA
cacgatttcccgctcggccg

SEQ ID NO: 16565 - DNA, 20 bp, synthetic construct
  source 1..20: mol_type = other DNA
ggaggggaagacggcccggg

SEQ ID NO: 16566 - DNA, 20 bp, synthetic construct
  source 1..20: mol_type = other DNA
ctctcaggcatggagtcctg

SEQ ID NO: 16567 - DNA, 20 bp, synthetic construct
  source 1..20: mol_type = other DNA
gatgccagtggtacggccag

SEQ ID NO: 16568 - DNA, 20 bp, synthetic construct
  source 1..20: mol_type = other DNA
ctcgtagctcttctccaggg

SEQ ID NO: 16569 - DNA, 20 bp, synthetic construct
  source 1..20: mol_type = other DNA
gacgaggcccagagcaagag

SEQ ID NO: 16570 - DNA, 20 bp, synthetic construct
  source 1..20: mol_type = other DNA
gatttcccgctcggccgtgg

SEQ ID NO: 16571 - DNA, 20 bp, synthetic construct
  source 1..20: mol_type = other DNA
gaggagcaatgatctgagga

SEQ ID NO: 16572 - DNA, 20 bp, synthetic construct
  source 1..20: mol_type = other DNA
actcacccaggaaggaaggc

SEQ ID NO: 16573 - DNA, 20 bp, synthetic construct
  source 1..20: mol_type = other DNA
ccatcacgatgccagtggta

SEQ ID NO: 16574 - DNA, 20 bp, synthetic construct
  source 1..20: mol_type = other DNA
gccgtcttcccctccatcgt

SEQ ID NO: 16575 - DNA, 20 bp, synthetic construct
  source 1..20: mol_type = other DNA
gtccagacgcaggatggcat

SEQ ID NO: 16576 - DNA, 20 bp, synthetic construct
  source 1..20: mol_type = other DNA
gcggtggacgatggaggggc

SEQ ID NO: 16577 - DNA, 20 bp, synthetic construct
  source 1..20: mol_type = other DNA
ccccacgatggaggggaaga

SEQ ID NO: 16578 - DNA, 20 bp, synthetic construct
  source 1..20: mol_type = other DNA
gtgctatccctgtacgcctc

SEQ ID NO: 16579 - DNA, 20 bp, synthetic construct
  source 1..20: mol_type = other DNA
ctcgtagatgggcacagtgt

SEQ ID NO: 16580 - DNA, 20 bp, synthetic construct
  source 1..20: mol_type = other DNA
ggtggacagcgaggccagga

SEQ ID NO: 16581 - DNA, 20 bp, synthetic construct
  source 1..20: mol_type = other DNA
gcgccccaggcaccaggtag

SEQ ID NO: 16582 - DNA, 20 bp, synthetic construct
  source 1..20: mol_type = other DNA
cctcgtagatgggcacagtg

SEQ ID NO: 16583 - DNA, 20 bp, synthetic construct
  source 1..20: mol_type = other DNA
cattgccaatggtgatgacc

SEQ ID NO: 16584 - DNA, 20 bp, synthetic construct
  source 1..20: mol_type = other DNA
gcatcctgtcggcaatgcca

SEQ ID NO: 16585 - DNA, 20 bp, synthetic construct
  source 1..20: mol_type = other DNA
tgcatcctgtcggcaatgcc

SEQ ID NO: 16586 - DNA, 20 bp, synthetic construct
  source 1..20: mol_type = other DNA
ctggggcgccccacgatgga

SEQ ID NO: 16587 - DNA, 20 bp, synthetic construct
  source 1..20: mol_type = other DNA
gcagctcattgtagaaggtg

SEQ ID NO: 16588 - DNA, 20 bp, synthetic construct
  source 1..20: mol_type = other DNA
gtccacgtcacacttcatga

SEQ ID NO: 16589 - DNA, 20 bp, synthetic construct
  source 1..20: mol_type = other DNA
cgtgctcgatggggtacttc

SEQ ID NO: 16590 - DNA, 20 bp, synthetic construct
  source 1..20: mol_type = other DNA
cgcggttggccttggggttc

SEQ ID NO: 16591 - DNA, 20 bp, synthetic construct
  source 1..20: mol_type = other DNA
atttgcggtggacgatggag

SEQ ID NO: 16592 - DNA, 20 bp, synthetic construct
  source 1..20: mol_type = other DNA
ggcgccccaggcaccaggta

SEQ ID NO: 16593 - DNA, 20 bp, synthetic construct
  source 1..20: mol_type = other DNA
actggcatcgtgatggactc

SEQ ID NO: 16594 - DNA, 20 bp, synthetic construct
  source 1..20: mol_type = other DNA
ggtgaagctgtagccgcgct

SEQ ID NO: 16595 - DNA, 20 bp, synthetic construct
  source 1..20: mol_type = other DNA
ccgtaccactggcatcgtga

SEQ ID NO: 16596 - DNA, 20 bp, synthetic construct
  source 1..20: mol_type = other DNA
cagtcaggtcccggccagcc

SEQ ID NO: 16597 - DNA, 20 bp, synthetic construct
  source 1..20: mol_type = other DNA
agcctggatagcaacgtaca

SEQ ID NO: 16598 - DNA, 20 bp, synthetic construct
  source 1..20: mol_type = other DNA
gcagaaggagatcactgccc

SEQ ID NO: 16599 - DNA, 20 bp, synthetic construct
  source 1..20: mol_type = other DNA
gtgctcgatggggtacttca

SEQ ID NO: 16600 - DNA, 20 bp, synthetic construct
  source 1..20: mol_type = other DNA
gcggaaccgctcattgccaa

SEQ ID NO: 16601 - DNA, 20 bp, synthetic construct
  source 1..20: mol_type = other DNA
gcatggcatcgtcaccaact

SEQ ID NO: 16602 - DNA, 20 bp, synthetic construct
  source 1..20: mol_type = other DNA
agaggcgtagagggacagca

SEQ ID NO: 16603 - DNA, 20 bp, synthetic construct
  source 1..20: mol_type = other DNA
cccgacgatggaaggaaaca

SEQ ID NO: 16604 - DNA, 20 bp, synthetic construct
  source 1..20: mol_type = other DNA
ctctgttggccttggggttc

SEQ ID NO: 16605 - DNA, 20 bp, synthetic construct
  source 1..20: mol_type = other DNA
agaagaggaggatgcggcgg

SEQ ID NO: 16606 - DNA, 20 bp, synthetic construct
  source 1..20: mol_type = other DNA
tgaggtagtcggtcaggtcc

SEQ ID NO: 16607 - DNA, 20 bp, synthetic construct
  source 1..20: mol_type = other DNA
gtctcaaacataatctgaga

SEQ ID NO: 16608 - DNA, 20 bp, synthetic construct
  source 1..20: mol_type = other DNA
caggatgccacgcttgctct

SEQ ID NO: 16609 - DNA, 20 bp, synthetic construct
  source 1..20: mol_type = other DNA
tgttggccttggggttcagg

SEQ ID NO: 16610 - DNA, 20 bp, synthetic construct
  source 1..20: mol_type = other DNA
gatggccaggtcatcaccat

SEQ ID NO: 16611 - DNA, 20 bp, synthetic construct
  source 1..20: mol_type = other DNA
ctcgtagatgggcaccgtgt

SEQ ID NO: 16612 - DNA, 20 bp, synthetic construct
  source 1..20: mol_type = other DNA
tctgttggccttggggttca

SEQ ID NO: 16613 - DNA, 20 bp, synthetic construct
  source 1..20: mol_type = other DNA
agagtccatgacaatgccag

SEQ ID NO: 16614 - DNA, 20 bp, synthetic construct
  source 1..20: mol_type = other DNA
ctggggcgcccgacgatgga

SEQ ID NO: 16615 - DNA, 20 bp, synthetic construct
  source 1..20: mol_type = other DNA
cccctgcagggcgtcatggt

SEQ ID NO: 16616 - DNA, 20 bp, synthetic construct
  source 1..20: mol_type = other DNA
tcccctgcagggcgtcatgg

SEQ ID NO: 16617 - DNA, 20 bp, synthetic construct
  source 1..20: mol_type = other DNA
tggatggccacgtacatggc

SEQ ID NO: 16618 - DNA, 20 bp, synthetic construct
  source 1..20: mol_type = other DNA
ggaacagcgcctccggacac

SEQ ID NO: 16619 - DNA, 20 bp, synthetic construct
  source 1..20: mol_type = other DNA
caagcaggagtacgacgagt

SEQ ID NO: 16620 - DNA, 20 bp, synthetic construct
  source 1..20: mol_type = other DNA
acctacccaggaaggaaggc

SEQ ID NO: 16621 - DNA, 20 bp, synthetic construct
  source 1..20: mol_type = other DNA
cgcaagtactcggtgtggat

SEQ ID NO: 16622 - DNA, 20 bp, synthetic construct
  source 1..20: mol_type = other DNA
gacgaggcccagagcaagcg

SEQ ID NO: 16623 - DNA, 20 bp, synthetic construct
  source 1..20: mol_type = other DNA
gcttgctaatccacatctgc

SEQ ID NO: 16624 - DNA, 20 bp, synthetic construct
  source 1..20: mol_type = other DNA
cctcgtagatgggcaccgtg

SEQ ID NO: 16625 - DNA, 20 bp, synthetic construct
  source 1..20: mol_type = other DNA
gctaatccacatctgctgga

SEQ ID NO: 16626 - DNA, 20 bp, synthetic construct
  source 1..20: mol_type = other DNA
tcaggatgccacgcttgctc

SEQ ID NO: 16627 - DNA, 20 bp, synthetic construct
  source 1..20: mol_type = other DNA
gtcgcgcacgatttcccgct

SEQ ID NO: 16628 - DNA, 20 bp, synthetic construct
  source 1..20: mol_type = other DNA
tgcccaccatgacgccctgc

SEQ ID NO: 16629 - DNA, 20 bp, synthetic construct
  source 1..20: mol_type = other DNA
gcagcactgggtgctcctcc

SEQ ID NO: 16630 - DNA, 20 bp, synthetic construct
  source 1..20: mol_type = other DNA
gcccaccatgacgccctgca

SEQ ID NO: 16631 - DNA, 20 bp, synthetic construct
  source 1..20: mol_type = other DNA
cacgcgcagctcgttgtaga

SEQ ID NO: 16632 - DNA, 20 bp, synthetic construct
  source 1..20: mol_type = other DNA
aatgccagtggtgcgcccag

SEQ ID NO: 16633 - DNA, 20 bp, synthetic construct
  source 1..20: mol_type = other DNA
cagcactgggtgctcctccg

SEQ ID NO: 16634 - DNA, 20 bp, synthetic construct
  source 1..20: mol_type = other DNA
cttctccatgtcgtcccagt

SEQ ID NO: 16635 - DNA, 20 bp, synthetic construct
  source 1..20: mol_type = other DNA
gccattgtcaatgaccagcg

SEQ ID NO: 16636 - DNA, 20 bp, synthetic construct
  source 1..20: mol_type = other DNA
ggtccagacgcaggatggcg

SEQ ID NO: 16637 - DNA, 20 bp, synthetic construct
  source 1..20: mol_type = other DNA
aggctacagcttcaccacca

SEQ ID NO: 16638 - DNA, 20 bp, synthetic construct
  source 1..20: mol_type = other DNA
cacacggtgcccatctacga

SEQ ID NO: 16639 - DNA, 20 bp, synthetic construct
  source 1..20: mol_type = other DNA
gtccagacgcaggatggcgt

SEQ ID NO: 16640 - DNA, 20 bp, synthetic construct
  source 1..20: mol_type = other DNA
ctgttggccttggggttcag

SEQ ID NO: 16641 - DNA, 20 bp, synthetic construct
  source 1..20: mol_type = other DNA
gctcagtgaggatcttcatg

SEQ ID NO: 16642 - DNA, 20 bp, synthetic construct
  source 1..20: mol_type = other DNA
ccggaaccgctcattgccaa

SEQ ID NO: 16643 - DNA, 20 bp, synthetic construct
  source 1..20: mol_type = other DNA
cacaccgagtacttgcgctc

SEQ ID NO: 16644 - DNA, 20 bp, synthetic construct
  source 1..20: mol_type = other DNA
ggaaggtggacagtgaggcc

SEQ ID NO: 16645 - DNA, 20 bp, synthetic construct
  source 1..20: mol_type = other DNA
ctgctggaaggtggacagtg

SEQ ID NO: 16646 - DNA, 20 bp, synthetic construct
  source 1..20: mol_type = other DNA
cagagcgcaagtactcggtg

SEQ ID NO: 16647 - DNA, 20 bp, synthetic construct
  source 1..20: mol_type = other DNA
cccccacgccatcctgcgtc

SEQ ID NO: 16648 - DNA, 20 bp, synthetic construct
  source 1..20: mol_type = other DNA
ccagacgcaggatggcgtgg

SEQ ID NO: 16649 - DNA, 20 bp, synthetic construct
  source 1..20: mol_type = other DNA
cgccccagacaccaggtgag

SEQ ID NO: 16650 - DNA, 20 bp, synthetic construct
  source 1..20: mol_type = other DNA
cgtagagggacagcacggcc

SEQ ID NO: 16651 - DNA, 20 bp, synthetic construct
  source 1..20: mol_type = other DNA
aagcaggagtacgacgagtc

SEQ ID NO: 16652 - DNA, 20 bp, synthetic construct
  source 1..20: mol_type = other DNA
tggagttgaaggtggtctcg

SEQ ID NO: 16653 - DNA, 20 bp, synthetic construct
  source 1..20: mol_type = other DNA
gacgcaggatggcgtggggg

SEQ ID NO: 16654 - DNA, 20 bp, synthetic construct
  source 1..20: mol_type = other DNA
gcagctcgttgtagaaggtg

SEQ ID NO: 16655 - DNA, 20 bp, synthetic construct
  source 1..20: mol_type = other DNA
gtacatggccggggtgttga

SEQ ID NO: 16656 - DNA, 20 bp, synthetic construct
  source 1..20: mol_type = other DNA
ccacacggtgcccatctacg

SEQ ID NO: 16657 - DNA, 20 bp, synthetic construct
  source 1..20: mol_type = other DNA
gcccagcaccatgaagatca

SEQ ID NO: 16658 - DNA, 20 bp, synthetic construct
  source 1..20: mol_type = other DNA
gcagatgtggattagcaagc

SEQ ID NO: 16659 - DNA, 20 bp, synthetic construct
  source 1..20: mol_type = other DNA
aatccacatctgctggaagg

SEQ ID NO: 16660 - DNA, 20 bp, synthetic construct
  source 1..20: mol_type = other DNA
accgagtacttgcgctctgg

SEQ ID NO: 16661 - DNA, 20 bp, synthetic construct
  source 1..20: mol_type = other DNA
agcagcactgggtgctcctc

SEQ ID NO: 16662 - DNA, 20 bp, synthetic construct
  source 1..20: mol_type = other DNA
gatgatctgcaaagacagcc

SEQ ID NO: 16663 - DNA, 20 bp, synthetic construct
  source 1..20: mol_type = other DNA
ataatctgagaagggacaag

SEQ ID NO: 16664 - DNA, 20 bp, synthetic construct
  source 1..20: mol_type = other DNA
gcagaaggagatcaccgccc

SEQ ID NO: 16665 - DNA, 20 bp, synthetic construct
  source 1..20: mol_type = other DNA
gccgcccgacagcaccgtgt

SEQ ID NO: 16666 - DNA, 20 bp, synthetic construct
  source 1..20: mol_type = other DNA
gagggacagcacggcctgga

SEQ ID NO: 16667 - DNA, 20 bp, synthetic construct
  source 1..20: mol_type = other DNA
aagaatgatggcaccttcat

SEQ ID NO: 16668 - DNA, 20 bp, synthetic construct
  source 1..20: mol_type = other DNA
cagtggtccactgcaggcag

SEQ ID NO: 16669 - DNA, 20 bp, synthetic construct
  source 1..20: mol_type = other DNA
gccagcggcacggcctgagg

SEQ ID NO: 16670 - DNA, 20 bp, synthetic construct
  source 1..20: mol_type = other DNA
tggctacaaggagcggccgc

SEQ ID NO: 16671 - DNA, 20 bp, synthetic construct
  source 1..20: mol_type = other DNA
gccagctgatgaagacggag

SEQ ID NO: 16672 - DNA, 20 bp, synthetic construct
  source 1..20: mol_type = other DNA
agacttcgggctgtgcaagg

SEQ ID NO: 16673 - DNA, 20 bp, synthetic construct
  source 1..20: mol_type = other DNA
tcaagaaggaccccaagcag

SEQ ID NO: 16674 - DNA, 20 bp, synthetic construct
  source 1..20: mol_type = other DNA
gcaggatgtggaccaacgtg

SEQ ID NO: 16675 - DNA, 20 bp, synthetic construct
  source 1..20: mol_type = other DNA
tgaagagatggaggtgtccc

SEQ ID NO: 16676 - DNA, 20 bp, synthetic construct
  source 1..20: mol_type = other DNA
cctgcactcggagaagaacg

SEQ ID NO: 16677 - DNA, 20 bp, synthetic construct
  source 1..20: mol_type = other DNA
ggtggaagaacagctgcggg

SEQ ID NO: 16678 - DNA, 20 bp, synthetic construct
  source 1..20: mol_type = other DNA
tcctccagcacctgcacggg

SEQ ID NO: 16679 - DNA, 20 bp, synthetic construct
  source 1..20: mol_type = other DNA
aacctcatgctggacaagga

SEQ ID NO: 16680 - DNA, 20 bp, synthetic construct
  source 1..20: mol_type = other DNA
ccgggagcgtgtgttctccg

SEQ ID NO: 16681 - DNA, 20 bp, synthetic construct
  source 1..20: mol_type = other DNA
gacaggtggaagaacagctg

SEQ ID NO: 16682 - DNA, 20 bp, synthetic construct
  source 1..20: mol_type = other DNA
cgatgacagtggtccactgc

SEQ ID NO: 16683 - DNA, 20 bp, synthetic construct
  source 1..20: mol_type = other DNA
acagtgagtgggagcccaga

SEQ ID NO: 16684 - DNA, 20 bp, synthetic construct
  source 1..20: mol_type = other DNA
agaacacacgctcccgggac

SEQ ID NO: 16685 - DNA, 20 bp, synthetic construct
  source 1..20: mol_type = other DNA
ggtgatcctggtgaaggaga

SEQ ID NO: 16686 - DNA, 20 bp, synthetic construct
  source 1..20: mol_type = other DNA
cagtgagtgggagcccagat

SEQ ID NO: 16687 - DNA, 20 bp, synthetic construct
  source 1..20: mol_type = other DNA
agcagaggcggtcgtgggtc

SEQ ID NO: 16688 - DNA, 20 bp, synthetic construct
  source 1..20: mol_type = other DNA
tcgcctgcccttctacaacc

SEQ ID NO: 16689 - DNA, 20 bp, synthetic construct
  source 1..20: mol_type = other DNA
ctagctggagaacctcatgc

SEQ ID NO: 16690 - DNA, 20 bp, synthetic construct
  source 1..20: mol_type = other DNA
cacgtcgctcatggtgcccg

SEQ ID NO: 16691 - DNA, 20 bp, synthetic construct
  source 1..20: mol_type = other DNA
ttgtcctccagcacctgcac

SEQ ID NO: 16692 - DNA, 20 bp, synthetic construct
  source 1..20: mol_type = other DNA
gcatgaggttctccagctag

SEQ ID NO: 16693 - DNA, 20 bp, synthetic construct
  source 1..20: mol_type = other DNA
ccttcattggctacaaggag

SEQ ID NO: 16694 - DNA, 20 bp, synthetic construct
  source 1..20: mol_type = other DNA
tcacgttggtccacatcctg

SEQ ID NO: 16695 - DNA, 20 bp, synthetic construct
  source 1..20: mol_type = other DNA
ccgctccttgtagccaatga

SEQ ID NO: 16696 - DNA, 20 bp, synthetic construct
  source 1..20: mol_type = other DNA
tgtactcccctacagacgtg

SEQ ID NO: 16697 - DNA, 20 bp, synthetic construct
  source 1..20: mol_type = other DNA
tcacgtcggagactgacacc

SEQ ID NO: 16698 - DNA, 20 bp, synthetic construct
  source 1..20: mol_type = other DNA
attgtcctccagcacctgca

SEQ ID NO: 16699 - DNA, 20 bp, synthetic construct
  source 1..20: mol_type = other DNA
gtactcccctacagacgtgc

SEQ ID NO: 16700 - DNA, 20 bp, synthetic construct
  source 1..20: mol_type = other DNA
ccgcctgcccttctacaacc

SEQ ID NO: 16701 - DNA, 20 bp, synthetic construct
  source 1..20: mol_type = other DNA
cctctccttgtacccaatga

SEQ ID NO: 16702 - DNA, 20 bp, synthetic construct
  source 1..20: mol_type = other DNA
gggcaactcacagtgaggaa

SEQ ID NO: 16703 - DNA, 20 bp, synthetic construct
  source 1..20: mol_type = other DNA
agctggcattctgcaggcag

SEQ ID NO: 16704 - DNA, 20 bp, synthetic construct
  source 1..20: mol_type = other DNA
gactgctcactcgcggatgc

SEQ ID NO: 16705 - DNA, 20 bp, synthetic construct
  source 1..20: mol_type = other DNA
aggcactcacagcggtcagg

SEQ ID NO: 16706 - DNA, 20 bp, synthetic construct
  source 1..20: mol_type = other DNA
tggccgagtaggagaactgg

SEQ ID NO: 16707 - DNA, 20 bp, synthetic construct
  source 1..20: mol_type = other DNA
tcacctgaaatgaggcagga

SEQ ID NO: 16708 - DNA, 20 bp, synthetic construct
  source 1..20: mol_type = other DNA
tgatgtattcacctgaaatg

SEQ ID NO: 16709 - DNA, 20 bp, synthetic construct
  source 1..20: mol_type = other DNA
ttaagaaggaccccaagcag

SEQ ID NO: 16710 - DNA, 20 bp, synthetic construct
  source 1..20: mol_type = other DNA
ggatcttcatggcgtagtag

SEQ ID NO: 16711 - DNA, 20 bp, synthetic construct
  source 1..20: mol_type = other DNA
aggaccccaagcagaggtga

SEQ ID NO: 16712 - DNA, 20 bp, synthetic construct
  source 1..20: mol_type = other DNA
caatgactatggccgggccg

SEQ ID NO: 16713 - DNA, 20 bp, synthetic construct
  source 1..20: mol_type = other DNA
tcattgtcctccagcacctg

SEQ ID NO: 16714 - DNA, 20 bp, synthetic construct
  source 1..20: mol_type = other DNA
caggaagtaccgtggcctcc

SEQ ID NO: 16715 - DNA, 20 bp, synthetic construct
  source 1..20: mol_type = other DNA
tgctggccgagtaggagaac

SEQ ID NO: 16716 - DNA, 20 bp, synthetic construct
  source 1..20: mol_type = other DNA
tcgccaacagcctcaagcag

SEQ ID NO: 16717 - DNA, 20 bp, synthetic construct
  source 1..20: mol_type = other DNA
ccttcattgggtacaaggag

SEQ ID NO: 16718 - DNA, 20 bp, synthetic construct
  source 1..20: mol_type = other DNA
ggaggacaatgactatggcc

SEQ ID NO: 16719 - DNA, 20 bp, synthetic construct
  source 1..20: mol_type = other DNA
tgtcctccagcacctgagga

SEQ ID NO: 16720 - DNA, 20 bp, synthetic construct
  source 1..20: mol_type = other DNA
gcccccaccagtccacggcc

SEQ ID NO: 16721 - DNA, 20 bp, synthetic construct
  source 1..20: mol_type = other DNA
cctccagcacctgaggatgg

SEQ ID NO: 16722 - DNA, 20 bp, synthetic construct
  source 1..20: mol_type = other DNA
ctcttcagcaggaagtaccg

SEQ ID NO: 16723 - DNA, 20 bp, synthetic construct
  source 1..20: mol_type = other DNA
agcacaggcggtcgtgggtc

SEQ ID NO: 16724 - DNA, 20 bp, synthetic construct
  source 1..20: mol_type = other DNA
cgatgactgtggtccactgc

SEQ ID NO: 16725 - DNA, 20 bp, synthetic construct
  source 1..20: mol_type = other DNA
actacgccatgaagatcctg

SEQ ID NO: 16726 - DNA, 20 bp, synthetic construct
  source 1..20: mol_type = other DNA
gcagaggtgagggctggcgt

SEQ ID NO: 16727 - DNA, 20 bp, synthetic construct
  source 1..20: mol_type = other DNA
caggcactcacagcggtcag

SEQ ID NO: 16728 - DNA, 20 bp, synthetic construct
  source 1..20: mol_type = other DNA
cgtcctgccagttgatgctg

SEQ ID NO: 16729 - DNA, 20 bp, synthetic construct
  source 1..20: mol_type = other DNA
gtcatgtacgagatgatgtg

SEQ ID NO: 16730 - DNA, 20 bp, synthetic construct
  source 1..20: mol_type = other DNA
gtgctggaggacaatgacta

SEQ ID NO: 16731 - DNA, 20 bp, synthetic construct
  source 1..20: mol_type = other DNA
agtaggagaactgggggaag

SEQ ID NO: 16732 - DNA, 20 bp, synthetic construct
  source 1..20: mol_type = other DNA
tggaggacaatgactatggc

SEQ ID NO: 16733 - DNA, 20 bp, synthetic construct
  source 1..20: mol_type = other DNA
gaagaacagctgcaggagga

SEQ ID NO: 16734 - DNA, 20 bp, synthetic construct
  source 1..20: mol_type = other DNA
tacggagaagttgtttaagg

SEQ ID NO: 16735 - DNA, 20 bp, synthetic construct
  source 1..20: mol_type = other DNA
acaggtggaagaacagctgc

SEQ ID NO: 16736 - DNA, 20 bp, synthetic construct
  source 1..20: mol_type = other DNA
gctggccgagtaggagaact

SEQ ID NO: 16737 - DNA, 20 bp, synthetic construct
  source 1..20: mol_type = other DNA
acggagaagttgtttaaggg

SEQ ID NO: 16738 - DNA, 20 bp, synthetic construct
  source 1..20: mol_type = other DNA
ccgggagcgtgtcttcacag

SEQ ID NO: 16739 - DNA, 20 bp, synthetic construct
  source 1..20: mol_type = other DNA
gcacagggaggagtggatgc

SEQ ID NO: 16740 - DNA, 20 bp, synthetic construct
  source 1..20: mol_type = other DNA
gaaggtcctctcgatgactg

SEQ ID NO: 16741 - DNA, 20 bp, synthetic construct
  source 1..20: mol_type = other DNA
ctgaggtgtctggggttggt

SEQ ID NO: 16742 - DNA, 20 bp, synthetic construct
  source 1..20: mol_type = other DNA
tcatcctgcagacagactgc

SEQ ID NO: 16743 - DNA, 20 bp, synthetic construct
  source 1..20: mol_type = other DNA
ggtggaagaacagctgcagg

SEQ ID NO: 16744 - DNA, 20 bp, synthetic construct
  source 1..20: mol_type = other DNA
cccacagaaggttttcatgg

SEQ ID NO: 16745 - DNA, 20 bp, synthetic construct
  source 1..20: mol_type = other DNA
atttacttacatttttcagg

SEQ ID NO: 16746 - DNA, 20 bp, synthetic construct
  source 1..20: mol_type = other DNA
gtgttagaagataatgacta

SEQ ID NO: 16747 - DNA, 20 bp, synthetic construct
  source 1..20: mol_type = other DNA
ataatttcttttgcatcatc

SEQ ID NO: 16748 - DNA, 20 bp, synthetic construct
  source 1..20: mol_type = other DNA
cgtgtgcaggagtttgacag

SEQ ID NO: 16749 - DNA, 20 bp, synthetic construct
  source 1..20: mol_type = other DNA
gtccaactgccccgagatgt

SEQ ID NO: 16750 - DNA, 20 bp, synthetic construct
  source 1..20: mol_type = other DNA
ggagtccgtccaggacaggc

SEQ ID NO: 16751 - DNA, 20 bp, synthetic construct
  source 1..20: mol_type = other DNA
cctttcctcatgctgccata

SEQ ID NO: 16752 - DNA, 20 bp, synthetic construct
  source 1..20: mol_type = other DNA
tacggcttcgggcaacccta

SEQ ID NO: 16753 - DNA, 20 bp, synthetic construct
  source 1..20: mol_type = other DNA
tgcaccacaagcacccagaa

SEQ ID NO: 16754 - DNA, 20 bp, synthetic construct
  source 1..20: mol_type = other DNA
gcctgagaggaagatgtggg

SEQ ID NO: 16755 - DNA, 20 bp, synthetic construct
  source 1..20: mol_type = other DNA
tgtggctgctgctgatacga

SEQ ID NO: 16756 - DNA, 20 bp, synthetic construct
  source 1..20: mol_type = other DNA
ctacctgctgtgtataagag

SEQ ID NO: 16757 - DNA, 20 bp, synthetic construct
  source 1..20: mol_type = other DNA
catggcggacaacaaagccc

SEQ ID NO: 16758 - DNA, 20 bp, synthetic construct
  source 1..20: mol_type = other DNA
ggtagtaggagttgtactgg

SEQ ID NO: 16759 - DNA, 20 bp, synthetic construct
  source 1..20: mol_type = other DNA
cggctgcggcggccccacgg

SEQ ID NO: 16760 - DNA, 20 bp, synthetic construct
  source 1..20: mol_type = other DNA
acagaagaatgatccatttg

SEQ ID NO: 16761 - DNA, 20 bp, synthetic construct
  source 1..20: mol_type = other DNA
cctcagtgaccgaaagaacc

SEQ ID NO: 16762 - DNA, 20 bp, synthetic construct
  source 1..20: mol_type = other DNA
tgcactggcggattggtggg

SEQ ID NO: 16763 - DNA, 20 bp, synthetic construct
  source 1..20: mol_type = other DNA
gcttacctcactctgtcata

SEQ ID NO: 16764 - DNA, 20 bp, synthetic construct
  source 1..20: mol_type = other DNA
gggccgggcgcagagtgcca

SEQ ID NO: 16765 - DNA, 20 bp, synthetic construct
  source 1..20: mol_type = other DNA
tatggacaacaaggccccag

SEQ ID NO: 16766 - DNA, 20 bp, synthetic construct
  source 1..20: mol_type = other DNA
tgtcctctaggaagcccagg

SEQ ID NO: 16767 - DNA, 20 bp, synthetic construct
  source 1..20: mol_type = other DNA
cgtcctaaacaaaattggag

SEQ ID NO: 16768 - DNA, 20 bp, synthetic construct
  source 1..20: mol_type = other DNA
gacatctcaaagtcattgcc

SEQ ID NO: 16769 - DNA, 20 bp, synthetic construct
  source 1..20: mol_type = other DNA
ttcctacagattcctcctta

SEQ ID NO: 16770 - DNA, 20 bp, synthetic construct
  source 1..20: mol_type = other DNA
acaaggagctctagcaaccc

SEQ ID NO: 16771 - DNA, 20 bp, synthetic construct
  source 1..20: mol_type = other DNA
tcattacccgccatgcctcc

SEQ ID NO: 16772 - DNA, 20 bp, synthetic construct
  source 1..20: mol_type = other DNA
ccgaagccgtaggctggggg

SEQ ID NO: 16773 - DNA, 20 bp, synthetic construct
  source 1..20: mol_type = other DNA
ccggaacatcaagatcctag

SEQ ID NO: 16774 - DNA, 20 bp, synthetic construct
  source 1..20: mol_type = other DNA
ccttacctcatgcctggcaa

SEQ ID NO: 16775 - DNA, 20 bp, synthetic construct
  source 1..20: mol_type = other DNA
cccaggatgagcagcagccc

SEQ ID NO: 16776 - DNA, 20 bp, synthetic construct
  source 1..20: mol_type = other DNA
tcagcaaggcaccatgtggc

SEQ ID NO: 16777 - DNA, 20 bp, synthetic construct
  source 1..20: mol_type = other DNA
cagcagcgcttcggggccat

SEQ ID NO: 16778 - DNA, 20 bp, synthetic construct
  source 1..20: mol_type = other DNA
tggagcaggagcaattcagt

SEQ ID NO: 16779 - DNA, 20 bp, synthetic construct
  source 1..20: mol_type = other DNA
catgcagaatcacattcctc

SEQ ID NO: 16780 - DNA, 20 bp, synthetic construct
  source 1..20: mol_type = other DNA
ggggatctgactgtgtggtg

SEQ ID NO: 16781 - DNA, 20 bp, synthetic construct
  source 1..20: mol_type = other DNA
ccccatacaggcatcagctg

SEQ ID NO: 16782 - DNA, 20 bp, synthetic construct
  source 1..20: mol_type = other DNA
tccacccacatcttcctctc

SEQ ID NO: 16783 - DNA, 20 bp, synthetic construct
  source 1..20: mol_type = other DNA
cacaaatgacaggcttcgaa

SEQ ID NO: 16784 - DNA, 20 bp, synthetic construct
  source 1..20: mol_type = other DNA
cccaggacagagaacgctac

SEQ ID NO: 16785 - DNA, 20 bp, synthetic construct
  source 1..20: mol_type = other DNA
cagggacccccatattccat

SEQ ID NO: 16786 - DNA, 20 bp, synthetic construct
  source 1..20: mol_type = other DNA
ttgagatgtccaaacaccca

SEQ ID NO: 16787 - DNA, 20 bp, synthetic construct
  source 1..20: mol_type = other DNA
cttgcaaccaacctcaatgt

SEQ ID NO: 16788 - DNA, 20 bp, synthetic construct
  source 1..20: mol_type = other DNA
aggcagatttgtcatgccca

SEQ ID NO: 16789 - DNA, 20 bp, synthetic construct
  source 1..20: mol_type = other DNA
agcaaggcaccatgtggcag

SEQ ID NO: 16790 - DNA, 20 bp, synthetic construct
  source 1..20: mol_type = other DNA
actcacctgactgaggttga

SEQ ID NO: 16791 - DNA, 20 bp, synthetic construct
  source 1..20: mol_type = other DNA
ttacctgttttggatagagt

SEQ ID NO: 16792 - DNA, 20 bp, synthetic construct
  source 1..20: mol_type = other DNA
aggacggggccgagagcaat

SEQ ID NO: 16793 - DNA, 20 bp, synthetic construct
  source 1..20: mol_type = other DNA
ctcggctttcttcagctccg

SEQ ID NO: 16794 - DNA, 20 bp, synthetic construct
  source 1..20: mol_type = other DNA
tggcactccgggctccggcg

SEQ ID NO: 16795 - DNA, 20 bp, synthetic construct
  source 1..20: mol_type = other DNA
atactcacaggcaagctgga

SEQ ID NO: 16796 - DNA, 20 bp, synthetic construct
  source 1..20: mol_type = other DNA
gcagcgctgcagagcggcgg

SEQ ID NO: 16797 - DNA, 20 bp, synthetic construct
  source 1..20: mol_type = other DNA
ccagtcaaccagcagttcca

SEQ ID NO: 16798 - DNA, 20 bp, synthetic construct
  source 1..20: mol_type = other DNA
ccctcccaggtggctacccc

SEQ ID NO: 16799 - DNA, 20 bp, synthetic construct
  source 1..20: mol_type = other DNA
ctggatgctgagtttgctga

SEQ ID NO: 16800 - DNA, 20 bp, synthetic construct
  source 1..20: mol_type = other DNA
tatccaaaacaggtaaggcc

SEQ ID NO: 16801 - DNA, 20 bp, synthetic construct
  source 1..20: mol_type = other DNA
agtcagatccccccattgcc

SEQ ID NO: 16802 - DNA, 20 bp, synthetic construct
  source 1..20: mol_type = other DNA
cacaccccccttcagccgcc

SEQ ID NO: 16803 - DNA, 20 bp, synthetic construct
  source 1..20: mol_type = other DNA
tccacccaaggcaccccttc

SEQ ID NO: 16804 - DNA, 20 bp, synthetic construct
  source 1..20: mol_type = other DNA
tcagcagcgcttcggggcca

SEQ ID NO: 16805 - DNA, 20 bp, synthetic construct
  source 1..20: mol_type = other DNA
cggtgagtaaagcctggtct

SEQ ID NO: 16806 - DNA, 20 bp, synthetic construct
  source 1..20: mol_type = other DNA
tgccaggagaccagacttga

SEQ ID NO: 16807 - DNA, 20 bp, synthetic construct
  source 1..20: mol_type = other DNA
cttcgctcagcagcgcttcg

SEQ ID NO: 16808 - DNA, 20 bp, synthetic construct
  source 1..20: mol_type = other DNA
ccgttatctggccttcactg

SEQ ID NO: 16809 - DNA, 20 bp, synthetic construct
  source 1..20: mol_type = other DNA
gacctgtataaccaaaccaa

SEQ ID NO: 16810 - DNA, 20 bp, synthetic construct
  source 1..20: mol_type = other DNA
caagatgtatacaaccagta

SEQ ID NO: 16811 - DNA, 20 bp, synthetic construct
  source 1..20: mol_type = other DNA
tcctatagacatgattccta

SEQ ID NO: 16812 - DNA, 20 bp, synthetic construct
  source 1..20: mol_type = other DNA
caggtgagtatcagtgcctg

SEQ ID NO: 16813 - DNA, 20 bp, synthetic construct
  source 1..20: mol_type = other DNA
agaggtttcctacccacagc

SEQ ID NO: 16814 - DNA, 20 bp, synthetic construct
  source 1..20: mol_type = other DNA
cagggccccaacggcgggat

SEQ ID NO: 16815 - DNA, 20 bp, synthetic construct
  source 1..20: mol_type = other DNA
gccctcgctttcctgcccgg

SEQ ID NO: 16816 - DNA, 20 bp, synthetic construct
  source 1..20: mol_type = other DNA
atgagacctcagccatatgg

SEQ ID NO: 16817 - DNA, 20 bp, synthetic construct
  source 1..20: mol_type = other DNA
tggcatgttttgctgggcat

SEQ ID NO: 16818 - DNA, 20 bp, synthetic construct
  source 1..20: mol_type = other DNA
ggagcaggagcaattcagtt

SEQ ID NO: 16819 - DNA, 20 bp, synthetic construct
  source 1..20: mol_type = other DNA
agtgttgctcagtctcgctc

SEQ ID NO: 16820 - DNA, 20 bp, synthetic construct
  source 1..20: mol_type = other DNA
agaaatactcacaggcaagc

SEQ ID NO: 16821 - DNA, 20 bp, synthetic construct
  source 1..20: mol_type = other DNA
cggctcacaatgaaagacat

SEQ ID NO: 16822 - DNA, 20 bp, synthetic construct
  source 1..20: mol_type = other DNA
atgccacctcaggttgggtc

SEQ ID NO: 16823 - DNA, 20 bp, synthetic construct
  source 1..20: mol_type = other DNA
ggggcagagggaccatatgg

SEQ ID NO: 16824 - DNA, 20 bp, synthetic construct
  source 1..20: mol_type = other DNA
ggccgggcgcagagtgccat

SEQ ID NO: 16825 - DNA, 20 bp, synthetic construct
  source 1..20: mol_type = other DNA
gccgccgggcaggaaagcga

SEQ ID NO: 16826 - DNA, 20 bp, synthetic construct
  source 1..20: mol_type = other DNA
cctcagcaaactcagcatcc

SEQ ID NO: 16827 - DNA, 20 bp, synthetic construct
  source 1..20: mol_type = other DNA
ccacgacagcactatcccta

SEQ ID NO: 16828 - DNA, 20 bp, synthetic construct
  source 1..20: mol_type = other DNA
tggccaaggcaagcagcgcg

SEQ ID NO: 16829 - DNA, 20 bp, synthetic construct
  source 1..20: mol_type = other DNA
gcccggagtgccacctctcg

SEQ ID NO: 16830 - DNA, 20 bp, synthetic construct
  source 1..20: mol_type = other DNA
gcagccccccatgattcggc

SEQ ID NO: 16831 - DNA, 20 bp, synthetic construct
  source 1..20: mol_type = other DNA
gacaggcaggcaaatgctct

SEQ ID NO: 16832 - DNA, 20 bp, synthetic construct
  source 1..20: mol_type = other DNA
caaggagctctagcaaccct

SEQ ID NO: 16833 - DNA, 20 bp, synthetic construct
  source 1..20: mol_type = other DNA
cgacagcactatccctatgg

SEQ ID NO: 16834 - DNA, 20 bp, synthetic construct
  source 1..20: mol_type = other DNA
cagcaaggacatgggtaccc

SEQ ID NO: 16835 - DNA, 20 bp, synthetic construct
  source 1..20: mol_type = other DNA
gtctgccgtcgccgccgccg

SEQ ID NO: 16836 - DNA, 20 bp, synthetic construct
  source 1..20: mol_type = other DNA
ctggcagcgctgcagagcgg

SEQ ID NO: 16837 - DNA, 20 bp, synthetic construct
  source 1..20: mol_type = other DNA
cgaagcctgtcatttgtgcc

SEQ ID NO: 16838 - DNA, 20 bp, synthetic construct
  source 1..20: mol_type = other DNA
tgtaggagtccgtccaggac

SEQ ID NO: 16839 - DNA, 20 bp, synthetic construct
  source 1..20: mol_type = other DNA
cgaggtgagagcctgggtgt

SEQ ID NO: 16840 - DNA, 20 bp, synthetic construct
  source 1..20: mol_type = other DNA
accgaaagaacccggtgtgc

SEQ ID NO: 16841 - DNA, 20 bp, synthetic construct
  source 1..20: mol_type = other DNA
cagagaacgctactggatcc

SEQ ID NO: 16842 - DNA, 20 bp, synthetic construct
  source 1..20: mol_type = other DNA
caggcaggcaaatgctctcg

SEQ ID NO: 16843 - DNA, 20 bp, synthetic construct
  source 1..20: mol_type = other DNA
tgcagccccccatgattcgg

SEQ ID NO: 16844 - DNA, 20 bp, synthetic construct
  source 1..20: mol_type = other DNA
cagcatccaggacaacaatg

SEQ ID NO: 16845 - DNA, 20 bp, synthetic construct
  source 1..20: mol_type = other DNA
ccagcctccctctcctggta

SEQ ID NO: 16846 - DNA, 20 bp, synthetic construct
  source 1..20: mol_type = other DNA
tcagggcagggccccaacgg

SEQ ID NO: 16847 - DNA, 20 bp, synthetic construct
  source 1..20: mol_type = other DNA
acagcaacagcaggtgagga

SEQ ID NO: 16848 - DNA, 20 bp, synthetic construct
  source 1..20: mol_type = other DNA
atcaacagcaacagcaggtg

SEQ ID NO: 16849 - DNA, 20 bp, synthetic construct
  source 1..20: mol_type = other DNA
tcagggacccccatattcca

SEQ ID NO: 16850 - DNA, 20 bp, synthetic construct
  source 1..20: mol_type = other DNA
catgaggtaaggccaagagc

SEQ ID NO: 16851 - DNA, 20 bp, synthetic construct
  source 1..20: mol_type = other DNA
caagcacccagaacggaagc

SEQ ID NO: 16852 - DNA, 20 bp, synthetic construct
  source 1..20: mol_type = other DNA
acctgcagaattgttggcca

SEQ ID NO: 16853 - DNA, 20 bp, synthetic construct
  source 1..20: mol_type = other DNA
gcagtaccacagccatctcc

SEQ ID NO: 16854 - DNA, 20 bp, synthetic construct
  source 1..20: mol_type = other DNA
cggggctaccagggctaccc

SEQ ID NO: 16855 - DNA, 20 bp, synthetic construct
  source 1..20: mol_type = other DNA
aggcaaatgctctcggggta

SEQ ID NO: 16856 - DNA, 20 bp, synthetic construct
  source 1..20: mol_type = other DNA
ggtgccggaggtcaaatgca

SEQ ID NO: 16857 - DNA, 20 bp, synthetic construct
  source 1..20: mol_type = other DNA
gccgtcttccaccaacaaca

SEQ ID NO: 16858 - DNA, 20 bp, synthetic construct
  source 1..20: mol_type = other DNA
aggggtgagctgcaacaaag

SEQ ID NO: 16859 - DNA, 20 bp, synthetic construct
  source 1..20: mol_type = other DNA
gatgctccgggaaaacacct

SEQ ID NO: 16860 - DNA, 20 bp, synthetic construct
  source 1..20: mol_type = other DNA
gggaaaggagctgcaggacg

SEQ ID NO: 16861 - DNA, 20 bp, synthetic construct
  source 1..20: mol_type = other DNA
ctgccaggagaccagacttg

SEQ ID NO: 16862 - DNA, 20 bp, synthetic construct
  source 1..20: mol_type = other DNA
atgaatcaagggggcatgat

SEQ ID NO: 16863 - DNA, 20 bp, synthetic construct
  source 1..20: mol_type = other DNA
gcttcgggcaaccctacggc

SEQ ID NO: 16864 - DNA, 20 bp, synthetic construct
  source 1..20: mol_type = other DNA
gaacgctactggatcctggg

SEQ ID NO: 16865 - DNA, 20 bp, synthetic construct
  source 1..20: mol_type = other DNA
tcaggtccacattgttgtcc

SEQ ID NO: 16866 - DNA, 20 bp, synthetic construct
  source 1..20: mol_type = other DNA
tgaggtaaggccaagagcag

SEQ ID NO: 16867 - DNA, 20 bp, synthetic construct
  source 1..20: mol_type = other DNA
taaggaggaatctgtaggaa

SEQ ID NO: 16868 - DNA, 20 bp, synthetic construct
  source 1..20: mol_type = other DNA
tggacaagggattaatagta

SEQ ID NO: 16869 - DNA, 20 bp, synthetic construct
  source 1..20: mol_type = other DNA
gcagcgcttcggggccatgg

SEQ ID NO: 16870 - DNA, 20 bp, synthetic construct
  source 1..20: mol_type = other DNA
atccaggatgcctttaatga

SEQ ID NO: 16871 - DNA, 20 bp, synthetic construct
  source 1..20: mol_type = other DNA
gcagtgcagaagggcagtat

SEQ ID NO: 16872 - DNA, 20 bp, synthetic construct
  source 1..20: mol_type = other DNA
ccttaccaggagagggaggc

SEQ ID NO: 16873 - DNA, 20 bp, synthetic construct
  source 1..20: mol_type = other DNA
ccaggatgagcagcagccct

SEQ ID NO: 16874 - DNA, 20 bp, synthetic construct
  source 1..20: mol_type = other DNA
caggacgggggcgccggcaa

SEQ ID NO: 16875 - DNA, 20 bp, synthetic construct
  source 1..20: mol_type = other DNA
ccccgccgccgctgctcccg

SEQ ID NO: 16876 - DNA, 20 bp, synthetic construct
  source 1..20: mol_type = other DNA
ctcctgccaagcggcacgaa

SEQ ID NO: 16877 - DNA, 20 bp, synthetic construct
  source 1..20: mol_type = other DNA
ccatccttaccaggagaggg

SEQ ID NO: 16878 - DNA, 20 bp, synthetic construct
  source 1..20: mol_type = other DNA
gcagggccccaacggcggga

SEQ ID NO: 16879 - DNA, 20 bp, synthetic construct
  source 1..20: mol_type = other DNA
agcagcagcagcagcagcaa

SEQ ID NO: 16880 - DNA, 20 bp, synthetic construct
  source 1..20: mol_type = other DNA
gttgagggtgggggtggcgg

SEQ ID NO: 16881 - DNA, 20 bp, synthetic construct
  source 1..20: mol_type = other DNA
ttccaagaccagtctctgcg

SEQ ID NO: 16882 - DNA, 20 bp, synthetic construct
  source 1..20: mol_type = other DNA
caacaaggccccagcgggta

SEQ ID NO: 16883 - DNA, 20 bp, synthetic construct
  source 1..20: mol_type = other DNA
cagcggcggcgggcccggcg

SEQ ID NO: 16884 - DNA, 20 bp, synthetic construct
  source 1..20: mol_type = other DNA
gtttccaagaccagtctctg

SEQ ID NO: 16885 - DNA, 20 bp, synthetic construct
  source 1..20: mol_type = other DNA
gacatggcctcgcagtgttg

SEQ ID NO: 16886 - DNA, 20 bp, synthetic construct
  source 1..20: mol_type = other DNA
acttgcaaccaacctcaatg

SEQ ID NO: 16887 - DNA, 20 bp, synthetic construct
  source 1..20: mol_type = other DNA
tccttcgctcagcagcgctt

SEQ ID NO: 16888 - DNA, 20 bp, synthetic construct
  source 1..20: mol_type = other DNA
gcagcgcttccctccaccgc

SEQ ID NO: 16889 - DNA, 20 bp, synthetic construct
  source 1..20: mol_type = other DNA
cttacctcatgcctggcaat

SEQ ID NO: 16890 - DNA, 20 bp, synthetic construct
  source 1..20: mol_type = other DNA
cagtctctgcggggaaagga

SEQ ID NO: 16891 - DNA, 20 bp, synthetic construct
  source 1..20: mol_type = other DNA
agcccagagatgatgggcct

SEQ ID NO: 16892 - DNA, 20 bp, synthetic construct
  source 1..20: mol_type = other DNA
gtccctcaagtctggtctcc

SEQ ID NO: 16893 - DNA, 20 bp, synthetic construct
  source 1..20: mol_type = other DNA
ggccaaggcaagcagcgcgc

SEQ ID NO: 16894 - DNA, 20 bp, synthetic construct
  source 1..20: mol_type = other DNA
ctaaggcagagacaagcaga

SEQ ID NO: 16895 - DNA, 20 bp, synthetic construct
  source 1..20: mol_type = other DNA
tttcaggaaccccggaggca

SEQ ID NO: 16896 - DNA, 20 bp, synthetic construct
  source 1..20: mol_type = other DNA
ttgctcagcaaggcaccatg

SEQ ID NO: 16897 - DNA, 20 bp, synthetic construct
  source 1..20: mol_type = other DNA
acctcatgcctggcaatggg

SEQ ID NO: 16898 - DNA, 20 bp, synthetic construct
  source 1..20: mol_type = other DNA
agcaaggacatgggtaccca

SEQ ID NO: 16899 - DNA, 20 bp, synthetic construct
  source 1..20: mol_type = other DNA
tgacaggcttcgaatggtat

SEQ ID NO: 16900 - DNA, 20 bp, synthetic construct
  source 1..20: mol_type = other DNA
cagcagaactctcacgacca

SEQ ID NO: 16901 - DNA, 20 bp, synthetic construct
  source 1..20: mol_type = other DNA
gggctaccagggctaccccg

SEQ ID NO: 16902 - DNA, 20 bp, synthetic construct
  source 1..20: mol_type = other DNA
caagggattaatagtatggc

SEQ ID NO: 16903 - DNA, 20 bp, synthetic construct
  source 1..20: mol_type = other DNA
cagacacatagaggcgatag

SEQ ID NO: 16904 - DNA, 20 bp, synthetic construct
  source 1..20: mol_type = other DNA
cacagcctgtgttgaagcag

SEQ ID NO: 16905 - DNA, 20 bp, synthetic construct
  source 1..20: mol_type = other DNA
acagccatctcccggcacac

SEQ ID NO: 16906 - DNA, 20 bp, synthetic construct
  source 1..20: mol_type = other DNA
attcaaaggcatagagacac

SEQ ID NO: 16907 - DNA, 20 bp, synthetic construct
  source 1..20: mol_type = other DNA
atggacaacaaggccccagc

SEQ ID NO: 16908 - DNA, 20 bp, synthetic construct
  source 1..20: mol_type = other DNA
atggggagctatggtcccca

SEQ ID NO: 16909 - DNA, 20 bp, synthetic construct
  source 1..20: mol_type = other DNA
ccaggaccccttttccaccc

SEQ ID NO: 16910 - DNA, 20 bp, synthetic construct
  source 1..20: mol_type = other DNA
ttacctcatgcctggcaatg

SEQ ID NO: 16911 - DNA, 20 bp, synthetic construct
  source 1..20: mol_type = other DNA
aggaggaggaacaggaccaa

SEQ ID NO: 16912 - DNA, 20 bp, synthetic construct
  source 1..20: mol_type = other DNA
cgccaacatctcggggcagt

SEQ ID NO: 16913 - DNA, 20 bp, synthetic construct
  source 1..20: mol_type = other DNA
caggacggggccgagagcaa

SEQ ID NO: 16914 - DNA, 20 bp, synthetic construct
  source 1..20: mol_type = other DNA
ggacggggccgagagcaatg

SEQ ID NO: 16915 - DNA, 20 bp, synthetic construct
  source 1..20: mol_type = other DNA
actgcccttctgcactgcaa

SEQ ID NO: 16916 - DNA, 20 bp, synthetic construct
  source 1..20: mol_type = other DNA
ccttcgctcagcagcgcttc

SEQ ID NO: 16917 - DNA, 20 bp, synthetic construct
  source 1..20: mol_type = other DNA
catgcttccgaggggctggt

SEQ ID NO: 16918 - DNA, 20 bp, synthetic construct
  source 1..20: mol_type = other DNA
ggggctaccagggctacccc

SEQ ID NO: 16919 - DNA, 20 bp, synthetic construct
  source 1..20: mol_type = other DNA
aggacagatacacacaggca

SEQ ID NO: 16920 - DNA, 20 bp, synthetic construct
  source 1..20: mol_type = other DNA
gagaatcctgccagtccaga

SEQ ID NO: 16921 - DNA, 20 bp, synthetic construct
  source 1..20: mol_type = other DNA
agaccagtctctgcggggaa

SEQ ID NO: 16922 - DNA, 20 bp, synthetic construct
  source 1..20: mol_type = other DNA
gcagcaggatcagcttgccc

SEQ ID NO: 16923 - DNA, 20 bp, synthetic construct
  source 1..20: mol_type = other DNA
cccccgccgccgctgctccc

SEQ ID NO: 16924 - DNA, 20 bp, synthetic construct
  source 1..20: mol_type = other DNA
ggacagatacacacaggcat

SEQ ID NO: 16925 - DNA, 20 bp, synthetic construct
  source 1..20: mol_type = other DNA
cagcaacggtgagtaaagcc

SEQ ID NO: 16926 - DNA, 20 bp, synthetic construct
  source 1..20: mol_type = other DNA
cccagtgtaggagtccgtcc

SEQ ID NO: 16927 - DNA, 20 bp, synthetic construct
  source 1..20: mol_type = other DNA
ggaggaggaacaggaccaag

SEQ ID NO: 16928 - DNA, 20 bp, synthetic construct
  source 1..20: mol_type = other DNA
ggcaatcagttctccaccca

SEQ ID NO: 16929 - DNA, 20 bp, synthetic construct
  source 1..20: mol_type = other DNA
atggtcatcgggtaccgctg

SEQ ID NO: 16930 - DNA, 20 bp, synthetic construct
  source 1..20: mol_type = other DNA
tcaagcattgcccaagatcg

SEQ ID NO: 16931 - DNA, 20 bp, synthetic construct
  source 1..20: mol_type = other DNA
gatcagagggccaaccacga

SEQ ID NO: 16932 - DNA, 20 bp, synthetic construct
  source 1..20: mol_type = other DNA
tgccacctcaggttgggtca

SEQ ID NO: 16933 - DNA, 20 bp, synthetic construct
  source 1..20: mol_type = other DNA
cccgggggcgactacagtgg

SEQ ID NO: 16934 - DNA, 20 bp, synthetic construct
  source 1..20: mol_type = other DNA
tggcggcctaaggaagaaga

SEQ ID NO: 16935 - DNA, 20 bp, synthetic construct
  source 1..20: mol_type = other DNA
accccatccttaccaggaga

SEQ ID NO: 16936 - DNA, 20 bp, synthetic construct
  source 1..20: mol_type = other DNA
tacctcatgcctggcaatgg

SEQ ID NO: 16937 - DNA, 20 bp, synthetic construct
  source 1..20: mol_type = other DNA
cgcagccccccaacactgcg

SEQ ID NO: 16938 - DNA, 20 bp, synthetic construct
  source 1..20: mol_type = other DNA
gagctaaaaagagaaagaac

SEQ ID NO: 16939 - DNA, 20 bp, synthetic construct
  source 1..20: mol_type = other DNA
gtggattgactcaggtgagt

SEQ ID NO: 16940 - DNA, 20 bp, synthetic construct
  source 1..20: mol_type = other DNA
tcgtgccattgcagtgcaga

SEQ ID NO: 16941 - DNA, 20 bp, synthetic construct
  source 1..20: mol_type = other DNA
ctagtgtggacatgatgcgg

SEQ ID NO: 16942 - DNA, 20 bp, synthetic construct
  source 1..20: mol_type = other DNA
cggacaacaaagccctggcc

SEQ ID NO: 16943 - DNA, 20 bp, synthetic construct
  source 1..20: mol_type = other DNA
cagcaaggcaccatgtggca

SEQ ID NO: 16944 - DNA, 20 bp, synthetic construct
  source 1..20: mol_type = other DNA
agcagcgcttcggggccatg

SEQ ID NO: 16945 - DNA, 20 bp, synthetic construct
  source 1..20: mol_type = other DNA
aatactcacaggcaagctgg

SEQ ID NO: 16946 - DNA, 20 bp, synthetic construct
  source 1..20: mol_type = other DNA
caggcaaccagatgccacct

SEQ ID NO: 16947 - DNA, 20 bp, synthetic construct
  source 1..20: mol_type = other DNA
gtcttccaccaacaacatgg

SEQ ID NO: 16948 - DNA, 20 bp, synthetic construct
  source 1..20: mol_type = other DNA
acccttcgtgggagttctgc

SEQ ID NO: 16949 - DNA, 20 bp, synthetic construct
  source 1..20: mol_type = other DNA
ggaggaggcagcggaggagg

SEQ ID NO: 16950 - DNA, 20 bp, synthetic construct
  source 1..20: mol_type = other DNA
cgccgctgccgccgcggagg

SEQ ID NO: 16951 - DNA, 20 bp, synthetic construct
  source 1..20: mol_type = other DNA
ggcggcggcggaggaggagg

SEQ ID NO: 16952 - DNA, 20 bp, synthetic construct
  source 1..20: mol_type = other DNA
tgaggagatgctagcagagc

SEQ ID NO: 16953 - DNA, 20 bp, synthetic construct
  source 1..20: mol_type = other DNA
ggcagaaaaggagacttgct

SEQ ID NO: 16954 - DNA, 20 bp, synthetic construct
  source 1..20: mol_type = other DNA
gccccagtcccaggcggcgg

SEQ ID NO: 16955 - DNA, 20 bp, synthetic construct
  source 1..20: mol_type = other DNA
cagcaggcggccgcgggcat

SEQ ID NO: 16956 - DNA, 20 bp, synthetic construct
  source 1..20: mol_type = other DNA
cggcccggcgcgggcggcgg

SEQ ID NO: 16957 - DNA, 20 bp, synthetic construct
  source 1..20: mol_type = other DNA
cggcgcggcggcggcggcgg

SEQ ID NO: 16958 - DNA, 20 bp, synthetic construct
  source 1..20: mol_type = other DNA
aaatgcctgattgacatttt

SEQ ID NO: 16959 - DNA, 20 bp, synthetic construct
  source 1..20: mol_type = other DNA
cggcggcggcggcggcggcg

SEQ ID NO: 16960 - DNA, 20 bp, synthetic construct
  source 1..20: mol_type = other DNA
ggcagcagcggcggcggcgg

SEQ ID NO: 16961 - DNA, 20 bp, synthetic construct
  source 1..20: mol_type = other DNA
ggttacctgggatctgccca

SEQ ID NO: 16962 - DNA, 20 bp, synthetic construct
  source 1..20: mol_type = other DNA
aattcttatggaatatgaag

SEQ ID NO: 16963 - DNA, 20 bp, synthetic construct
  source 1..20: mol_type = other DNA
cggctgctgtgggtacaggc

SEQ ID NO: 16964 - DNA, 20 bp, synthetic construct
  source 1..20: mol_type = other DNA
ggcgcgcggcgcggcggcgg

SEQ ID NO: 16965 - DNA, 20 bp, synthetic construct
  source 1..20: mol_type = other DNA
gggggcggcggcgacggcgg

SEQ ID NO: 16966 - DNA, 20 bp, synthetic construct
  source 1..20: mol_type = other DNA
aacagcttgggcggcgcggg

SEQ ID NO: 16967 - DNA, 20 bp, synthetic construct
  source 1..20: mol_type = other DNA
tggcccggtgacctgggatg

SEQ ID NO: 16968 - DNA, 20 bp, synthetic construct
  source 1..20: mol_type = other DNA
agggatacgggtactggccc

SEQ ID NO: 16969 - DNA, 20 bp, synthetic construct
  source 1..20: mol_type = other DNA
gcggcggcggcagcagcagg

SEQ ID NO: 16970 - DNA, 20 bp, synthetic construct
  source 1..20: mol_type = other DNA
ttaaactccgggacggccgc

SEQ ID NO: 16971 - DNA, 20 bp, synthetic construct
  source 1..20: mol_type = other DNA
cagagtggacgaaaaccgct

SEQ ID NO: 16972 - DNA, 20 bp, synthetic construct
  source 1..20: mol_type = other DNA
acgccgctgccagcccggcc

SEQ ID NO: 16973 - DNA, 20 bp, synthetic construct
  source 1..20: mol_type = other DNA
atgagccagagagaaagctc

SEQ ID NO: 16974 - DNA, 20 bp, synthetic construct
  source 1..20: mol_type = other DNA
cgcgggcaggcagcggcgaa

SEQ ID NO: 16975 - DNA, 20 bp, synthetic construct
  source 1..20: mol_type = other DNA
atgtacaaccaaagtccctc

SEQ ID NO: 16976 - DNA, 20 bp, synthetic construct
  source 1..20: mol_type = other DNA
tccatgtcggggccgggctg

SEQ ID NO: 16977 - DNA, 20 bp, synthetic construct
  source 1..20: mol_type = other DNA
ggcggcggcggcggaggagg

SEQ ID NO: 16978 - DNA, 20 bp, synthetic construct
  source 1..20: mol_type = other DNA
gccaactcaccggctgctgt

SEQ ID NO: 16979 - DNA, 20 bp, synthetic construct
  source 1..20: mol_type = other DNA
ggccccggcggcggcggcgg

SEQ ID NO: 16980 - DNA, 20 bp, synthetic construct
  source 1..20: mol_type = other DNA
agcaatgtctaacctgggca

SEQ ID NO: 16981 - DNA, 20 bp, synthetic construct
  source 1..20: mol_type = other DNA
ggcagcggaggaggaggagg

SEQ ID NO: 16982 - DNA, 20 bp, synthetic construct
  source 1..20: mol_type = other DNA
tccgcctccgccgccgccgc

SEQ ID NO: 16983 - DNA, 20 bp, synthetic construct
  source 1..20: mol_type = other DNA
gcagcaggaggcggcggcgg

SEQ ID NO: 16984 - DNA, 20 bp, synthetic construct
  source 1..20: mol_type = other DNA
aagaaagagcaagaaggcaa

SEQ ID NO: 16985 - DNA, 20 bp, synthetic construct
  source 1..20: mol_type = other DNA
ggcggcggcggcggcggcgc

SEQ ID NO: 16986 - DNA, 20 bp, synthetic construct
  source 1..20: mol_type = other DNA
agcagcggcggcggcggcgg

SEQ ID NO: 16987 - DNA, 20 bp, synthetic construct
  source 1..20: mol_type = other DNA
ttgcttccgttcccgtgggg

SEQ ID NO: 16988 - DNA, 20 bp, synthetic construct
  source 1..20: mol_type = other DNA
caagagcggcggctccgagg

SEQ ID NO: 16989 - DNA, 20 bp, synthetic construct
  source 1..20: mol_type = other DNA
gcggcggcagcagcaggagg

SEQ ID NO: 16990 - DNA, 20 bp, synthetic construct
  source 1..20: mol_type = other DNA
tctcctggcatgtctcagca

SEQ ID NO: 16991 - DNA, 20 bp, synthetic construct
  source 1..20: mol_type = other DNA
ggaggaggaggaggacagcg

SEQ ID NO: 16992 - DNA, 20 bp, synthetic construct
  source 1..20: mol_type = other DNA
gccgggggccccggcggcgg

SEQ ID NO: 16993 - DNA, 20 bp, synthetic construct
  source 1..20: mol_type = other DNA
ctcctccgcggcggcagcgg

SEQ ID NO: 16994 - DNA, 20 bp, synthetic construct
  source 1..20: mol_type = other DNA
ggcggcggcggcgggggcgg

SEQ ID NO: 16995 - DNA, 20 bp, synthetic construct
  source 1..20: mol_type = other DNA
tgcgcctggggtgggaggtg

SEQ ID NO: 16996 - DNA, 20 bp, synthetic construct
  source 1..20: mol_type = other DNA
ggcctccaccttgctcacct

SEQ ID NO: 16997 - DNA, 20 bp, synthetic construct
  source 1..20: mol_type = other DNA
actggccaaaaagaagctcc

SEQ ID NO: 16998 - DNA, 20 bp, synthetic construct
  source 1..20: mol_type = other DNA
cggggagcgggaggaggagc

SEQ ID NO: 16999 - DNA, 20 bp, synthetic construct
  source 1..20: mol_type = other DNA
ggggtgctattggggcctcc

SEQ ID NO: 17000 - DNA, 20 bp, synthetic construct
  source 1..20: mol_type = other DNA
gcgcgtgcacgtggccgcgc

SEQ ID NO: 17001 - DNA, 20 bp, synthetic construct
  source 1..20: mol_type = other DNA
gcgggaggaggagcaggagc

SEQ ID NO: 17002 - DNA, 20 bp, synthetic construct
  source 1..20: mol_type = other DNA
acgcctggggctctgcccca

SEQ ID NO: 17003 - DNA, 20 bp, synthetic construct
  source 1..20: mol_type = other DNA
ggaggaggagcaggagcggg

SEQ ID NO: 17004 - DNA, 20 bp, synthetic construct
  source 1..20: mol_type = other DNA
ctccttaagaaagggagaca

SEQ ID NO: 17005 - DNA, 20 bp, synthetic construct
  source 1..20: mol_type = other DNA
cgccgtacctctcgtagtgg

SEQ ID NO: 17006 - DNA, 20 bp, synthetic construct
  source 1..20: mol_type = other DNA
tgaataccagcaggctcagc

SEQ ID NO: 17007 - DNA, 20 bp, synthetic construct
  source 1..20: mol_type = other DNA
atctgcattgagaagaatgg

SEQ ID NO: 17008 - DNA, 20 bp, synthetic construct
  source 1..20: mol_type = other DNA
ttgccttaccagcttcttcc

SEQ ID NO: 17009 - DNA, 20 bp, synthetic construct
  source 1..20: mol_type = other DNA
agtctgcaccagggcacagc

SEQ ID NO: 17010 - DNA, 20 bp, synthetic construct
  source 1..20: mol_type = other DNA
caagtgaactggtactcctc

SEQ ID NO: 17011 - DNA, 20 bp, synthetic construct
  source 1..20: mol_type = other DNA
cccctgctgctccacatcgc

SEQ ID NO: 17012 - DNA, 20 bp, synthetic construct
  source 1..20: mol_type = other DNA
gagccaacaagcccaggcga

SEQ ID NO: 17013 - DNA, 20 bp, synthetic construct
  source 1..20: mol_type = other DNA
tgccttaccagcttcttcct

SEQ ID NO: 17014 - DNA, 20 bp, synthetic construct
  source 1..20: mol_type = other DNA
aagtcctctggtgtacggag

SEQ ID NO: 17015 - DNA, 20 bp, synthetic construct
  source 1..20: mol_type = other DNA
cgtgagccatttccggattg

SEQ ID NO: 17016 - DNA, 20 bp, synthetic construct
  source 1..20: mol_type = other DNA
ggacatagaggactattacg

SEQ ID NO: 17017 - DNA, 20 bp, synthetic construct
  source 1..20: mol_type = other DNA
gaaccagagccaacaagccc

SEQ ID NO: 17018 - DNA, 20 bp, synthetic construct
  source 1..20: mol_type = other DNA
cctcttcagggactatgtgg

SEQ ID NO: 17019 - DNA, 20 bp, synthetic construct
  source 1..20: mol_type = other DNA
ataccagcaggctcagctgg

SEQ ID NO: 17020 - DNA, 20 bp, synthetic construct
  source 1..20: mol_type = other DNA
tttggagcattgctgtcaga

SEQ ID NO: 17021 - DNA, 20 bp, synthetic construct
  source 1..20: mol_type = other DNA
tcaatgcagatgttgcactt

SEQ ID NO: 17022 - DNA, 20 bp, synthetic construct
  source 1..20: mol_type = other DNA
tgcatatagcggagcagcgg

SEQ ID NO: 17023 - DNA, 20 bp, synthetic construct
  source 1..20: mol_type = other DNA
ttctgctcaactgcttgttg

SEQ ID NO: 17024 - DNA, 20 bp, synthetic construct
  source 1..20: mol_type = other DNA
gtgctcacactaaagacgta

SEQ ID NO: 17025 - DNA, 20 bp, synthetic construct
  source 1..20: mol_type = other DNA
ttgacctacaaggaatctga

SEQ ID NO: 17026 - DNA, 20 bp, synthetic construct
  source 1..20: mol_type = other DNA
tcctgtacccgaataaccat

SEQ ID NO: 17027 - DNA, 20 bp, synthetic construct
  source 1..20: mol_type = other DNA
taatagtcctctatgtcccc

SEQ ID NO: 17028 - DNA, 20 bp, synthetic construct
  source 1..20: mol_type = other DNA
ttatattagttaatttccac

SEQ ID NO: 17029 - DNA, 20 bp, synthetic construct
  source 1..20: mol_type = other DNA
ggagaaccagatgcatatag

SEQ ID NO: 17030 - DNA, 20 bp, synthetic construct
  source 1..20: mol_type = other DNA
aatagtcctctatgtcccca

SEQ ID NO: 17031 - DNA, 20 bp, synthetic construct
  source 1..20: mol_type = other DNA
atacacactgcacagtggtg

SEQ ID NO: 17032 - DNA, 20 bp, synthetic construct
  source 1..20: mol_type = other DNA
ctttaggacagaagctaagc

SEQ ID NO: 17033 - DNA, 20 bp, synthetic construct
  source 1..20: mol_type = other DNA
cactgtactcggcgagctct

SEQ ID NO: 17034 - DNA, 20 bp, synthetic construct
  source 1..20: mol_type = other DNA
ttcacgagaagattcaggag

SEQ ID NO: 17035 - DNA, 20 bp, synthetic construct
  source 1..20: mol_type = other DNA
accagttttgccgcagctgc

SEQ ID NO: 17036 - DNA, 20 bp, synthetic construct
  source 1..20: mol_type = other DNA
agtcctgcatcagagaaaca

SEQ ID NO: 17037 - DNA, 20 bp, synthetic construct
  source 1..20: mol_type = other DNA
agataccttggccaagagct

SEQ ID NO: 17038 - DNA, 20 bp, synthetic construct
  source 1..20: mol_type = other DNA
caccagggcacagctggagc

SEQ ID NO: 17039 - DNA, 20 bp, synthetic construct
  source 1..20: mol_type = other DNA
ctcacatgttttgatggatt

SEQ ID NO: 17040 - DNA, 20 bp, synthetic construct
  source 1..20: mol_type = other DNA
gactctgtgaacacaccaag

SEQ ID NO: 17041 - DNA, 20 bp, synthetic construct
  source 1..20: mol_type = other DNA
caatgctccaaatgtaaaca

SEQ ID NO: 17042 - DNA, 20 bp, synthetic construct
  source 1..20: mol_type = other DNA
ccagcgatgtggagcagcag

SEQ ID NO: 17043 - DNA, 20 bp, synthetic construct
  source 1..20: mol_type = other DNA
acaggtaaggtatttggggg

SEQ ID NO: 17044 - DNA, 20 bp, synthetic construct
  source 1..20: mol_type = other DNA
tgcacagtggtgagggggat

SEQ ID NO: 17045 - DNA, 20 bp, synthetic construct
  source 1..20: mol_type = other DNA
ctgcacagtggtgaggggga

SEQ ID NO: 17046 - DNA, 20 bp, synthetic construct
  source 1..20: mol_type = other DNA
tcagggactatgtggaggta

SEQ ID NO: 17047 - DNA, 20 bp, synthetic construct
  source 1..20: mol_type = other DNA
gacatagaggactattacgt

SEQ ID NO: 17048 - DNA, 20 bp, synthetic construct
  source 1..20: mol_type = other DNA
cgacacttgaaacttaaaat

SEQ ID NO: 17049 - DNA, 20 bp, synthetic construct
  source 1..20: mol_type = other DNA
tcacgagaagattcaggaga

SEQ ID NO: 17050 - DNA, 20 bp, synthetic construct
  source 1..20: mol_type = other DNA
ctgagatcgaaaacctctca

SEQ ID NO: 17051 - DNA, 20 bp, synthetic construct
  source 1..20: mol_type = other DNA
cagcgatgtggagcagcagg

SEQ ID NO: 17052 - DNA, 20 bp, synthetic construct
  source 1..20: mol_type = other DNA
cggattgtggcacagtctgt

SEQ ID NO: 17053 - DNA, 20 bp, synthetic construct
  source 1..20: mol_type = other DNA
aatacaggcgctacctcttc

SEQ ID NO: 17054 - DNA, 20 bp, synthetic construct
  source 1..20: mol_type = other DNA
ccggattgtggcacagtctg

SEQ ID NO: 17055 - DNA, 20 bp, synthetic construct
  source 1..20: mol_type = other DNA
gcggcaaaactggtgctgac

SEQ ID NO: 17056 - DNA, 20 bp, synthetic construct
  source 1..20: mol_type = other DNA
gaactcaccgtgtttacatt

SEQ ID NO: 17057 - DNA, 20 bp, synthetic construct
  source 1..20: mol_type = other DNA
tgtaggtcaagcaagtgaac

SEQ ID NO: 17058 - DNA, 20 bp, synthetic construct
  source 1..20: mol_type = other DNA
gccagcgatgtggagcagca

SEQ ID NO: 17059 - DNA, 20 bp, synthetic construct
  source 1..20: mol_type = other DNA
tcaaactgtataggcagagc

SEQ ID NO: 17060 - DNA, 20 bp, synthetic construct
  source 1..20: mol_type = other DNA
ttggacaggtaaggtatttg

SEQ ID NO: 17061 - DNA, 20 bp, synthetic construct
  source 1..20: mol_type = other DNA
cagaagtctgtgcagaacag

SEQ ID NO: 17062 - DNA, 20 bp, synthetic construct
  source 1..20: mol_type = other DNA
agagccaacaagcccaggcg

SEQ ID NO: 17063 - DNA, 20 bp, synthetic construct
  source 1..20: mol_type = other DNA
taccagcttcttcctgggtc

SEQ ID NO: 17064 - DNA, 20 bp, synthetic construct
  source 1..20: mol_type = other DNA
atgttgcacttgggacactg

SEQ ID NO: 17065 - DNA, 20 bp, synthetic construct
  source 1..20: mol_type = other DNA
gtcaaggacggcgtgggcgt

SEQ ID NO: 17066 - DNA, 20 bp, synthetic construct
  source 1..20: mol_type = other DNA
ccagttttgccgcagctgct

SEQ ID NO: 17067 - DNA, 20 bp, synthetic construct
  source 1..20: mol_type = other DNA
ttcaacaggagtctcttgca

SEQ ID NO: 17068 - DNA, 20 bp, synthetic construct
  source 1..20: mol_type = other DNA
cctccacatagtccctgaag

SEQ ID NO: 17069 - DNA, 20 bp, synthetic construct
  source 1..20: mol_type = other DNA
atttggagcattgctgtcag

SEQ ID NO: 17070 - DNA, 20 bp, synthetic construct
  source 1..20: mol_type = other DNA
ctatgagtgcagtcgttaca

SEQ ID NO: 17071 - DNA, 20 bp, synthetic construct
  source 1..20: mol_type = other DNA
agatgcatatagcggagcag

SEQ ID NO: 17072 - DNA, 20 bp, synthetic construct
  source 1..20: mol_type = other DNA
cacactgcacagtggtgagg

SEQ ID NO: 17073 - DNA, 20 bp, synthetic construct
  source 1..20: mol_type = other DNA
gggacactgaggagacagaa

SEQ ID NO: 17074 - DNA, 20 bp, synthetic construct
  source 1..20: mol_type = other DNA
tgggacactgaggagacaga

SEQ ID NO: 17075 - DNA, 20 bp, synthetic construct
  source 1..20: mol_type = other DNA
tacacactgcacagtggtga

SEQ ID NO: 17076 - DNA, 20 bp, synthetic construct
  source 1..20: mol_type = other DNA
taccagctccagctgtgccc

SEQ ID NO: 17077 - DNA, 20 bp, synthetic construct
  source 1..20: mol_type = other DNA
tagaggcacagacataccag

SEQ ID NO: 17078 - DNA, 20 bp, synthetic construct
  source 1..20: mol_type = other DNA
actgtataggcagagcagga

SEQ ID NO: 17079 - DNA, 20 bp, synthetic construct
  source 1..20: mol_type = other DNA
gctgacaggccagagagagt

SEQ ID NO: 17080 - DNA, 20 bp, synthetic construct
  source 1..20: mol_type = other DNA
gtagaataagtacttcttga

SEQ ID NO: 17081 - DNA, 20 bp, synthetic construct
  source 1..20: mol_type = other DNA
tggacaggtaaggtatttgg

SEQ ID NO: 17082 - DNA, 20 bp, synthetic construct
  source 1..20: mol_type = other DNA
actgcatacacactgcacag

SEQ ID NO: 17083 - DNA, 20 bp, synthetic construct
  source 1..20: mol_type = other DNA
gcaagtgaactggtactcct

SEQ ID NO: 17084 - DNA, 20 bp, synthetic construct
  source 1..20: mol_type = other DNA
aactgtataggcagagcagg

SEQ ID NO: 17085 - DNA, 20 bp, synthetic construct
  source 1..20: mol_type = other DNA
acagtgcaatcggtgcaacg

SEQ ID NO: 17086 - DNA, 20 bp, synthetic construct
  source 1..20: mol_type = other DNA
tgcaccgattgcactgtact

SEQ ID NO: 17087 - DNA, 20 bp, synthetic construct
  source 1..20: mol_type = other DNA
agagcttggcagcattctgt

SEQ ID NO: 17088 - DNA, 20 bp, synthetic construct
  source 1..20: mol_type = other DNA
tatacagtttgaataccagc

SEQ ID NO: 17089 - DNA, 20 bp, synthetic construct
  source 1..20: mol_type = other DNA
acacactgcacagtggtgag

SEQ ID NO: 17090 - DNA, 20 bp, synthetic construct
  source 1..20: mol_type = other DNA
ccctggtgcagactgcccca

SEQ ID NO: 17091 - DNA, 20 bp, synthetic construct
  source 1..20: mol_type = other DNA
agtagaataagtacttcttg

SEQ ID NO: 17092 - DNA, 20 bp, synthetic construct
  source 1..20: mol_type = other DNA
ccatggggcagtctgcacca

SEQ ID NO: 17093 - DNA, 20 bp, synthetic construct
  source 1..20: mol_type = other DNA
taggaatcaaacacttttat

SEQ ID NO: 17094 - DNA, 20 bp, synthetic construct
  source 1..20: mol_type = other DNA
cttatcttctgaagatacac

SEQ ID NO: 17095 - DNA, 20 bp, synthetic construct
  source 1..20: mol_type = other DNA
tcctacgcggaggacgggag

SEQ ID NO: 17096 - DNA, 20 bp, synthetic construct
  source 1..20: mol_type = other DNA
acctccttctggcccacgtg

SEQ ID NO: 17097 - DNA, 20 bp, synthetic construct
  source 1..20: mol_type = other DNA
tcgcaggcctactcccacgg

SEQ ID NO: 17098 - DNA, 20 bp, synthetic construct
  source 1..20: mol_type = other DNA
gaaccaggcctgatgggaga

SEQ ID NO: 17099 - DNA, 20 bp, synthetic construct
  source 1..20: mol_type = other DNA
caggacaggggccaggaggt

SEQ ID NO: 17100 - DNA, 20 bp, synthetic construct
  source 1..20: mol_type = other DNA
cgcaggcctactcccacggt

SEQ ID NO: 17101 - DNA, 20 bp, synthetic construct
  source 1..20: mol_type = other DNA
tgcggccagcacagcccggt

SEQ ID NO: 17102 - DNA, 20 bp, synthetic construct
  source 1..20: mol_type = other DNA
tctccaaggggggtgagcga

SEQ ID NO: 17103 - DNA, 20 bp, synthetic construct
  source 1..20: mol_type = other DNA
agctcgcaggcctactccca

SEQ ID NO: 17104 - DNA, 20 bp, synthetic construct
  source 1..20: mol_type = other DNA
tgtgcaggacaggggccagg

SEQ ID NO: 17105 - DNA, 20 bp, synthetic construct
  source 1..20: mol_type = other DNA
caattctcggaggtgttgct

SEQ ID NO: 17106 - DNA, 20 bp, synthetic construct
  source 1..20: mol_type = other DNA
gcggccccagctggggccgt

SEQ ID NO: 17107 - DNA, 20 bp, synthetic construct
  source 1..20: mol_type = other DNA
agaggaggaggatgaagagg

SEQ ID NO: 17108 - DNA, 20 bp, synthetic construct
  source 1..20: mol_type = other DNA
agtaggcctgcgagctgggg

SEQ ID NO: 17109 - DNA, 20 bp, synthetic construct
  source 1..20: mol_type = other DNA
cctggcctaggaagccagtc

SEQ ID NO: 17110 - DNA, 20 bp, synthetic construct
  source 1..20: mol_type = other DNA
gcaccatggggcaggtggga

SEQ ID NO: 17111 - DNA, 20 bp, synthetic construct
  source 1..20: mol_type = other DNA
cggtggattgcacagagggg

SEQ ID NO: 17112 - DNA, 20 bp, synthetic construct
  source 1..20: mol_type = other DNA
gactctacctgtttgccagg

SEQ ID NO: 17113 - DNA, 20 bp, synthetic construct
  source 1..20: mol_type = other DNA
acttaccaggtgcagggtgt

SEQ ID NO: 17114 - DNA, 20 bp, synthetic construct
  source 1..20: mol_type = other DNA
tcactgctgtcggagctgtg

SEQ ID NO: 17115 - DNA, 20 bp, synthetic construct
  source 1..20: mol_type = other DNA
aggactctacctgtttgcca

SEQ ID NO: 17116 - DNA, 20 bp, synthetic construct
  source 1..20: mol_type = other DNA
tcacatcatcagatgagtcc

SEQ ID NO: 17117 - DNA, 20 bp, synthetic construct
  source 1..20: mol_type = other DNA
gaaggccgacaccctgcacc

SEQ ID NO: 17118 - DNA, 20 bp, synthetic construct
  source 1..20: mol_type = other DNA
aggtcttcgctctcctgtag

SEQ ID NO: 17119 - DNA, 20 bp, synthetic construct
  source 1..20: mol_type = other DNA
ccaggtcttcgctctcctgt

SEQ ID NO: 17120 - DNA, 20 bp, synthetic construct
  source 1..20: mol_type = other DNA
acagaacgcggctctacgca

SEQ ID NO: 17121 - DNA, 20 bp, synthetic construct
  source 1..20: mol_type = other DNA
gctgtcggagctgtgaggca

SEQ ID NO: 17122 - DNA, 20 bp, synthetic construct
  source 1..20: mol_type = other DNA
gaggcatggctgaaatcttc

SEQ ID NO: 17123 - DNA, 20 bp, synthetic construct
  source 1..20: mol_type = other DNA
ggagatcaagcagctcacag

SEQ ID NO: 17124 - DNA, 20 bp, synthetic construct
  source 1..20: mol_type = other DNA
tctacctgtttgccaggggg

SEQ ID NO: 17125 - DNA, 20 bp, synthetic construct
  source 1..20: mol_type = other DNA
ccgacagaggcagacacaga

SEQ ID NO: 17126 - DNA, 20 bp, synthetic construct
  source 1..20: mol_type = other DNA
ggactctacctgtttgccag

SEQ ID NO: 17127 - DNA, 20 bp, synthetic construct
  source 1..20: mol_type = other DNA
tgtgagaagagttcagagga

SEQ ID NO: 17128 - DNA, 20 bp, synthetic construct
  source 1..20: mol_type = other DNA
ccgcccagaagagccgacag

SEQ ID NO: 17129 - DNA, 20 bp, synthetic construct
  source 1..20: mol_type = other DNA
gaggactctacctgtttgcc

SEQ ID NO: 17130 - DNA, 20 bp, synthetic construct
  source 1..20: mol_type = other DNA
cctacaggagagcgaagacc

SEQ ID NO: 17131 - DNA, 20 bp, synthetic construct
  source 1..20: mol_type = other DNA
atgtgagaagagttcagagg

SEQ ID NO: 17132 - DNA, 20 bp, synthetic construct
  source 1..20: mol_type = other DNA
caggtcttcgctctcctgta

SEQ ID NO: 17133 - DNA, 20 bp, synthetic construct
  source 1..20: mol_type = other DNA
tgagtcctgggaagcagaga

SEQ ID NO: 17134 - DNA, 20 bp, synthetic construct
  source 1..20: mol_type = other DNA
gggaggagagcggctgaagc

SEQ ID NO: 17135 - DNA, 20 bp, synthetic construct
  source 1..20: mol_type = other DNA
aggcatggctgaaatcttcc

SEQ ID NO: 17136 - DNA, 20 bp, synthetic construct
  source 1..20: mol_type = other DNA
cagccacgagcccctgtgct

SEQ ID NO: 17137 - DNA, 20 bp, synthetic construct
  source 1..20: mol_type = other DNA
cctctgtcggctcttctggg

SEQ ID NO: 17138 - DNA, 20 bp, synthetic construct
  source 1..20: mol_type = other DNA
ccttctgtgtctgcctctgt

SEQ ID NO: 17139 - DNA, 20 bp, synthetic construct
  source 1..20: mol_type = other DNA
atgatgtgagaagagttcag

SEQ ID NO: 17140 - DNA, 20 bp, synthetic construct
  source 1..20: mol_type = other DNA
agaggcgggggtgaggcggg

SEQ ID NO: 17141 - DNA, 20 bp, synthetic construct
  source 1..20: mol_type = other DNA
aactacacttcccagacctg

SEQ ID NO: 17142 - DNA, 20 bp, synthetic construct
  source 1..20: mol_type = other DNA
tcccagacctggggacccag

SEQ ID NO: 17143 - DNA, 20 bp, synthetic construct
  source 1..20: mol_type = other DNA
gatctacagttagaagaaga

SEQ ID NO: 17144 - DNA, 20 bp, synthetic construct
  source 1..20: mol_type = other DNA
ctcgccgaatagattcaaca

SEQ ID NO: 17145 - DNA, 20 bp, synthetic construct
  source 1..20: mol_type = other DNA
gtcgaacatcaagtagaaaa

SEQ ID NO: 17146 - DNA, 20 bp, synthetic construct
  source 1..20: mol_type = other DNA
tcgaacatcaagtagaaaaa

SEQ ID NO: 17147 - DNA, 20 bp, synthetic construct
  source 1..20: mol_type = other DNA
tacttacaggaaaacccaaa

SEQ ID NO: 17148 - DNA, 20 bp, synthetic construct
  source 1..20: mol_type = other DNA
ggcctaaaagacataaaata

SEQ ID NO: 17149 - DNA, 20 bp, synthetic construct
  source 1..20: mol_type = other DNA
tcgccgaatagattcaacaa

SEQ ID NO: 17150 - DNA, 20 bp, synthetic construct
  source 1..20: mol_type = other DNA
ttctggatggtacatgacag

SEQ ID NO: 17151 - DNA, 20 bp, synthetic construct
  source 1..20: mol_type = other DNA
ggtggcaaaggaggagcccc

SEQ ID NO: 17152 - DNA, 20 bp, synthetic construct
  source 1..20: mol_type = other DNA
acaggaaaacccaaaaggtc

SEQ ID NO: 17153 - DNA, 20 bp, synthetic construct
  source 1..20: mol_type = other DNA
acatcaagtagaaaaagggc

SEQ ID NO: 17154 - DNA, 20 bp, synthetic construct
  source 1..20: mol_type = other DNA
cagctatgattttctcacac

SEQ ID NO: 17155 - DNA, 20 bp, synthetic construct
  source 1..20: mol_type = other DNA
cggcggccctccttggagct

SEQ ID NO: 17156 - DNA, 20 bp, synthetic construct
  source 1..20: mol_type = other DNA
tctttacctggggaaacaca

SEQ ID NO: 17157 - DNA, 20 bp, synthetic construct
  source 1..20: mol_type = other DNA
gccgggctcgggggagctgg

SEQ ID NO: 17158 - DNA, 20 bp, synthetic construct
  source 1..20: mol_type = other DNA
acgcgccacatgaagacgca

SEQ ID NO: 17159 - DNA, 20 bp, synthetic construct
  source 1..20: mol_type = other DNA
agcagcccttcaacagcgcg

SEQ ID NO: 17160 - DNA, 20 bp, synthetic construct
  source 1..20: mol_type = other DNA
gcaacttgacggtgcaccgg

SEQ ID NO: 17161 - DNA, 20 bp, synthetic construct
  source 1..20: mol_type = other DNA
tagaggagccaagtggcctg

SEQ ID NO: 17162 - DNA, 20 bp, synthetic construct
  source 1..20: mol_type = other DNA
gcaggagaacattgcaggta

SEQ ID NO: 17163 - DNA, 20 bp, synthetic construct
  source 1..20: mol_type = other DNA
gctcgccggtgtggctccgc

SEQ ID NO: 17164 - DNA, 20 bp, synthetic construct
  source 1..20: mol_type = other DNA
gcctccggcccgagcggcgg

SEQ ID NO: 17165 - DNA, 20 bp, synthetic construct
  source 1..20: mol_type = other DNA
acaggtgagcaggtcagggt

SEQ ID NO: 17166 - DNA, 20 bp, synthetic construct
  source 1..20: mol_type = other DNA
ctggagatagaggagccaag

SEQ ID NO: 17167 - DNA, 20 bp, synthetic construct
  source 1..20: mol_type = other DNA
cctgcaatgttctcctgctt

SEQ ID NO: 17168 - DNA, 20 bp, synthetic construct
  source 1..20: mol_type = other DNA
cgtcctcctcctccggctcg

SEQ ID NO: 17169 - DNA, 20 bp, synthetic construct
  source 1..20: mol_type = other DNA
gctggagacagaaagaagaa

SEQ ID NO: 17170 - DNA, 20 bp, synthetic construct
  source 1..20: mol_type = other DNA
gcacgggcagatcggcaagg

SEQ ID NO: 17171 - DNA, 20 bp, synthetic construct
  source 1..20: mol_type = other DNA
tctgcccgtgcgtcttcatg

SEQ ID NO: 17172 - DNA, 20 bp, synthetic construct
  source 1..20: mol_type = other DNA
aagcagtgtggcggcagctt

SEQ ID NO: 17173 - DNA, 20 bp, synthetic construct
  source 1..20: mol_type = other DNA
tcaaatgaacttccccttgg

SEQ ID NO: 17174 - DNA, 20 bp, synthetic construct
  source 1..20: mol_type = other DNA
cctcctcacgctccgagctc

SEQ ID NO: 17175 - DNA, 20 bp, synthetic construct
  source 1..20: mol_type = other DNA
ccgcccggggacctgctgga

SEQ ID NO: 17176 - DNA, 20 bp, synthetic construct
  source 1..20: mol_type = other DNA
gttcatttgacactggccac

SEQ ID NO: 17177 - DNA, 20 bp, synthetic construct
  source 1..20: mol_type = other DNA
gaccctgacctgctcacctg

SEQ ID NO: 17178 - DNA, 20 bp, synthetic construct
  source 1..20: mol_type = other DNA
ggaaggctcatctttacctg

SEQ ID NO: 17179 - DNA, 20 bp, synthetic construct
  source 1..20: mol_type = other DNA
gagccgccgcgagaagtcca

SEQ ID NO: 17180 - DNA, 20 bp, synthetic construct
  source 1..20: mol_type = other DNA
gcaatgtcccgccgcaaaca

SEQ ID NO: 17181 - DNA, 20 bp, synthetic construct
  source 1..20: mol_type = other DNA
aggggaagttcatttgacac

SEQ ID NO: 17182 - DNA, 20 bp, synthetic construct
  source 1..20: mol_type = other DNA
cacaaaaggaagcagtgtgg

SEQ ID NO: 17183 - DNA, 20 bp, synthetic construct
  source 1..20: mol_type = other DNA
cccaagcaggagaacattgc

SEQ ID NO: 17184 - DNA, 20 bp, synthetic construct
  source 1..20: mol_type = other DNA
ggagctaagcgcgcgggccc

SEQ ID NO: 17185 - DNA, 20 bp, synthetic construct
  source 1..20: mol_type = other DNA
gacgcacgggcagatcggca

SEQ ID NO: 17186 - DNA, 20 bp, synthetic construct
  source 1..20: mol_type = other DNA
gccgcggcaaccctatgcac

SEQ ID NO: 17187 - DNA, 20 bp, synthetic construct
  source 1..20: mol_type = other DNA
tggagaaacacatgaaaaag

SEQ ID NO: 17188 - DNA, 20 bp, synthetic construct
  source 1..20: mol_type = other DNA
gcccggggcccgggccgccc

SEQ ID NO: 17189 - DNA, 20 bp, synthetic construct
  source 1..20: mol_type = other DNA
gccatcctcgaagaagacga

SEQ ID NO: 17190 - DNA, 20 bp, synthetic construct
  source 1..20: mol_type = other DNA
tgtcaaatgaacttcccctt

SEQ ID NO: 17191 - DNA, 20 bp, synthetic construct
  source 1..20: mol_type = other DNA
aaaccaggatgtcccccaag

SEQ ID NO: 17192 - DNA, 20 bp, synthetic construct
  source 1..20: mol_type = other DNA
ccgcgagaacggcggtggtg

SEQ ID NO: 17193 - DNA, 20 bp, synthetic construct
  source 1..20: mol_type = other DNA
cccgcagcacttgtcccaga

SEQ ID NO: 17194 - DNA, 20 bp, synthetic construct
  source 1..20: mol_type = other DNA
tgtagacgctgaagggcatc

SEQ ID NO: 17195 - DNA, 20 bp, synthetic construct
  source 1..20: mol_type = other DNA
ttgcacagctcgcacttgta

SEQ ID NO: 17196 - DNA, 20 bp, synthetic construct
  source 1..20: mol_type = other DNA
ggccacaggtgagcaggtca

SEQ ID NO: 17197 - DNA, 20 bp, synthetic construct
  source 1..20: mol_type = other DNA
cctcgaagaagacgagggtc

SEQ ID NO: 17198 - DNA, 20 bp, synthetic construct
  source 1..20: mol_type = other DNA
ttgggacagatgcctttcgt

SEQ ID NO: 17199 - DNA, 20 bp, synthetic construct
  source 1..20: mol_type = other DNA
acctgcaatgttctcctgct

SEQ ID NO: 17200 - DNA, 20 bp, synthetic construct
  source 1..20: mol_type = other DNA
ggcgtcgcggcacttcatga

SEQ ID NO: 17201 - DNA, 20 bp, synthetic construct
  source 1..20: mol_type = other DNA
tccctctgggacaagtgctg

SEQ ID NO: 17202 - DNA, 20 bp, synthetic construct
  source 1..20: mol_type = other DNA
catcccgccgccgctcgggc

SEQ ID NO: 17203 - DNA, 20 bp, synthetic construct
  source 1..20: mol_type = other DNA
aaaaaccaggatgtccccca

SEQ ID NO: 17204 - DNA, 20 bp, synthetic construct
  source 1..20: mol_type = other DNA
gcagcaacttgacggtgcac

SEQ ID NO: 17205 - DNA, 20 bp, synthetic construct
  source 1..20: mol_type = other DNA
cgcgccacatgaagacgcac

SEQ ID NO: 17206 - DNA, 20 bp, synthetic construct
  source 1..20: mol_type = other DNA
actcgcacgtgtcgctgcgg

SEQ ID NO: 17207 - DNA, 20 bp, synthetic construct
  source 1..20: mol_type = other DNA
atgaagacgcacgggcagat

SEQ ID NO: 17208 - DNA, 20 bp, synthetic construct
  source 1..20: mol_type = other DNA
ctggccgacaagcagaagcg

SEQ ID NO: 17209 - DNA, 20 bp, synthetic construct
  source 1..20: mol_type = other DNA
ggccctcgccgaagcccggg

SEQ ID NO: 17210 - DNA, 20 bp, synthetic construct
  source 1..20: mol_type = other DNA
aaacacatgaaaaagtggca

SEQ ID NO: 17211 - DNA, 20 bp, synthetic construct
  source 1..20: mol_type = other DNA
cttcagcgtctacagcaccc

SEQ ID NO: 17212 - DNA, 20 bp, synthetic construct
  source 1..20: mol_type = other DNA
ggcaatgtcccgccgcaaac

SEQ ID NO: 17213 - DNA, 20 bp, synthetic construct
  source 1..20: mol_type = other DNA
tgctcggacgacgtggcgaa

SEQ ID NO: 17214 - DNA, 20 bp, synthetic construct
  source 1..20: mol_type = other DNA
cgccatcctcgaagaagacg

SEQ ID NO: 17215 - DNA, 20 bp, synthetic construct
  source 1..20: mol_type = other DNA
tcctcggcactgaggcggtg

SEQ ID NO: 17216 - DNA, 20 bp, synthetic construct
  source 1..20: mol_type = other DNA
ctggagacagaaagaagaaa

SEQ ID NO: 17217 - DNA, 20 bp, synthetic construct
  source 1..20: mol_type = other DNA
cacggatgagtgagggtggg

SEQ ID NO: 17218 - DNA, 20 bp, synthetic construct
  source 1..20: mol_type = other DNA
catctacctggagcccgggc

SEQ ID NO: 17219 - DNA, 20 bp, synthetic construct
  source 1..20: mol_type = other DNA
gacactggccacaggtgagc

SEQ ID NO: 17220 - DNA, 20 bp, synthetic construct
  source 1..20: mol_type = other DNA
ggcggagccacaccggcgag

SEQ ID NO: 17221 - DNA, 20 bp, synthetic construct
  source 1..20: mol_type = other DNA
gcacttgtaaggccgctcgc

SEQ ID NO: 17222 - DNA, 20 bp, synthetic construct
  source 1..20: mol_type = other DNA
gtgcaccggcggagccacac

SEQ ID NO: 17223 - DNA, 20 bp, synthetic construct
  source 1..20: mol_type = other DNA
ccagaccctcgtcttcttcg

SEQ ID NO: 17224 - DNA, 20 bp, synthetic construct
  source 1..20: mol_type = other DNA
gcacggcttccgcatctacc

SEQ ID NO: 17225 - DNA, 20 bp, synthetic construct
  source 1..20: mol_type = other DNA
acccgcagcacttgtcccag

SEQ ID NO: 17226 - DNA, 20 bp, synthetic construct
  source 1..20: mol_type = other DNA
aggtgagcaggtcagggtcg

SEQ ID NO: 17227 - DNA, 20 bp, synthetic construct
  source 1..20: mol_type = other DNA
tccagcagaggctgaccatg

SEQ ID NO: 17228 - DNA, 20 bp, synthetic construct
  source 1..20: mol_type = other DNA
caggaaccacgcgctgttga

SEQ ID NO: 17229 - DNA, 20 bp, synthetic construct
  source 1..20: mol_type = other DNA
cttctccaccttgatgcgct

SEQ ID NO: 17230 - DNA, 20 bp, synthetic construct
  source 1..20: mol_type = other DNA
tacgggtgatgagctccctc

SEQ ID NO: 17231 - DNA, 20 bp, synthetic construct
  source 1..20: mol_type = other DNA
tttgcggcgggacattgccc

SEQ ID NO: 17232 - DNA, 20 bp, synthetic construct
  source 1..20: mol_type = other DNA
aaaaccaggatgtcccccaa

SEQ ID NO: 17233 - DNA, 20 bp, synthetic construct
  source 1..20: mol_type = other DNA
tggccacaggtgagcaggtc

SEQ ID NO: 17234 - DNA, 20 bp, synthetic construct
  source 1..20: mol_type = other DNA
gttgtgcaaatgtagctgga

SEQ ID NO: 17235 - DNA, 20 bp, synthetic construct
  source 1..20: mol_type = other DNA
gtgtcaaatgaacttcccct

SEQ ID NO: 17236 - DNA, 20 bp, synthetic construct
  source 1..20: mol_type = other DNA
gccgcagtacggcgagctcc

SEQ ID NO: 17237 - DNA, 20 bp, synthetic construct
  source 1..20: mol_type = other DNA
ctgagctcggagcgtgagga

SEQ ID NO: 17238 - DNA, 20 bp, synthetic construct
  source 1..20: mol_type = other DNA
cccgcaccgcctcagtgccg

SEQ ID NO: 17239 - DNA, 20 bp, synthetic construct
  source 1..20: mol_type = other DNA
gcggcggccctccttggagc

SEQ ID NO: 17240 - DNA, 20 bp, synthetic construct
  source 1..20: mol_type = other DNA
cagcacgcgcagaacacgca

SEQ ID NO: 17241 - DNA, 20 bp, synthetic construct
  source 1..20: mol_type = other DNA
cacgtgcgagtactgcggca

SEQ ID NO: 17242 - DNA, 20 bp, synthetic construct
  source 1..20: mol_type = other DNA
gcagtggctggtgggctacg

SEQ ID NO: 17243 - DNA, 20 bp, synthetic construct
  source 1..20: mol_type = other DNA
ggaggaggaggacgaggagg

SEQ ID NO: 17244 - DNA, 20 bp, synthetic construct
  source 1..20: mol_type = other DNA
cagggtgctgtagacgctga

SEQ ID NO: 17245 - DNA, 20 bp, synthetic construct
  source 1..20: mol_type = other DNA
gccttcctgaagcgtgcggc

SEQ ID NO: 17246 - DNA, 20 bp, synthetic construct
  source 1..20: mol_type = other DNA
gaagcagtgtggcggcagct

SEQ ID NO: 17247 - DNA, 20 bp, synthetic construct
  source 1..20: mol_type = other DNA
caggtgagcaggtcagggtc

SEQ ID NO: 17248 - DNA, 20 bp, synthetic construct
  source 1..20: mol_type = other DNA
tgtaaggccgctcgccggtg

SEQ ID NO: 17249 - DNA, 20 bp, synthetic construct
  source 1..20: mol_type = other DNA
gagcacaaaaggaagcagtg

SEQ ID NO: 17250 - DNA, 20 bp, synthetic construct
  source 1..20: mol_type = other DNA
cacctgctctcacccacgaa

SEQ ID NO: 17251 - DNA, 20 bp, synthetic construct
  source 1..20: mol_type = other DNA
tgaagcgtgcggcgggcggc

SEQ ID NO: 17252 - DNA, 20 bp, synthetic construct
  source 1..20: mol_type = other DNA
cccggggctgggcagcggcg

SEQ ID NO: 17253 - DNA, 20 bp, synthetic construct
  source 1..20: mol_type = other DNA
cctctcgggccgcagcggca

SEQ ID NO: 17254 - DNA, 20 bp, synthetic construct
  source 1..20: mol_type = other DNA
agtactcgcacgtgtcgctg

SEQ ID NO: 17255 - DNA, 20 bp, synthetic construct
  source 1..20: mol_type = other DNA
ccctctgggacaagtgctgc

SEQ ID NO: 17256 - DNA, 20 bp, synthetic construct
  source 1..20: mol_type = other DNA
cattgccccggcatctattc

SEQ ID NO: 17257 - DNA, 20 bp, synthetic construct
  source 1..20: mol_type = other DNA
gggggcatgggcggcagcgg

SEQ ID NO: 17258 - DNA, 20 bp, synthetic construct
  source 1..20: mol_type = other DNA
tccgcatctacctggagccc

SEQ ID NO: 17259 - DNA, 20 bp, synthetic construct
  source 1..20: mol_type = other DNA
acgggtgatgagctccctct

SEQ ID NO: 17260 - DNA, 20 bp, synthetic construct
  source 1..20: mol_type = other DNA
gtcaaatgaacttccccttg

SEQ ID NO: 17261 - DNA, 20 bp, synthetic construct
  source 1..20: mol_type = other DNA
caggagaacattgcaggtat

SEQ ID NO: 17262 - DNA, 20 bp, synthetic construct
  source 1..20: mol_type = other DNA
gcatctggcagatgtcgcag

SEQ ID NO: 17263 - DNA, 20 bp, synthetic construct
  source 1..20: mol_type = other DNA
caggcctgcccagctgccag

SEQ ID NO: 17264 - DNA, 20 bp, synthetic construct
  source 1..20: mol_type = other DNA
tccacatggtcagcctctgc

SEQ ID NO: 17265 - DNA, 20 bp, synthetic construct
  source 1..20: mol_type = other DNA
agcagaggctgaccatgtgg

SEQ ID NO: 17266 - DNA, 20 bp, synthetic construct
  source 1..20: mol_type = other DNA
tcaccatcccgccgccgctc

SEQ ID NO: 17267 - DNA, 20 bp, synthetic construct
  source 1..20: mol_type = other DNA
ctcgtcttcttcgaggatgg

SEQ ID NO: 17268 - DNA, 20 bp, synthetic construct
  source 1..20: mol_type = other DNA
cgaggatggcggcctccaca

SEQ ID NO: 17269 - DNA, 20 bp, synthetic construct
  source 1..20: mol_type = other DNA
accctcgtcttcttcgagga

SEQ ID NO: 17270 - DNA, 20 bp, synthetic construct
  source 1..20: mol_type = other DNA
tcatcacccgtaagtgtctg

SEQ ID NO: 17271 - DNA, 20 bp, synthetic construct
  source 1..20: mol_type = other DNA
agagcaatctcatcgtgcac

SEQ ID NO: 17272 - DNA, 20 bp, synthetic construct
  source 1..20: mol_type = other DNA
aggaaccacgcgctgttgaa

SEQ ID NO: 17273 - DNA, 20 bp, synthetic construct
  source 1..20: mol_type = other DNA
gacctcgccgctgcagaccc

SEQ ID NO: 17274 - DNA, 20 bp, synthetic construct
  source 1..20: mol_type = other DNA
tggaggagctcttcagggac

SEQ ID NO: 17275 - DNA, 20 bp, synthetic construct
  source 1..20: mol_type = other DNA
aggagaagatgcccggtgcg

SEQ ID NO: 17276 - DNA, 20 bp, synthetic construct
  source 1..20: mol_type = other DNA
cgaagtcgcggcggtagcgg

SEQ ID NO: 17277 - DNA, 20 bp, synthetic construct
  source 1..20: mol_type = other DNA
agggtcaggtggaccacagg

SEQ ID NO: 17278 - DNA, 20 bp, synthetic construct
  source 1..20: mol_type = other DNA
agaagtcgtcgccggcctgg

SEQ ID NO: 17279 - DNA, 20 bp, synthetic construct
  source 1..20: mol_type = other DNA
ctacccagcctccgttatcc

SEQ ID NO: 17280 - DNA, 20 bp, synthetic construct
  source 1..20: mol_type = other DNA
tgaaccggcacctgcacacc

SEQ ID NO: 17281 - DNA, 20 bp, synthetic construct
  source 1..20: mol_type = other DNA
tacaggtgagcagagtgggc

SEQ ID NO: 17282 - DNA, 20 bp, synthetic construct
  source 1..20: mol_type = other DNA
ccgctccttggggaaggggt

SEQ ID NO: 17283 - DNA, 20 bp, synthetic construct
  source 1..20: mol_type = other DNA
agccacctgcgaatccacac

SEQ ID NO: 17284 - DNA, 20 bp, synthetic construct
  source 1..20: mol_type = other DNA
ccaagacatcatggcctatc

SEQ ID NO: 17285 - DNA, 20 bp, synthetic construct
  source 1..20: mol_type = other DNA
aagcacatgggcacggaggt

SEQ ID NO: 17286 - DNA, 20 bp, synthetic construct
  source 1..20: mol_type = other DNA
acccacactcgaattcactc

SEQ ID NO: 17287 - DNA, 20 bp, synthetic construct
  source 1..20: mol_type = other DNA
cctttccccacgagcctaca

SEQ ID NO: 17288 - DNA, 20 bp, synthetic construct
  source 1..20: mol_type = other DNA
tttgtacaggtgagcagagt

SEQ ID NO: 17289 - DNA, 20 bp, synthetic construct
  source 1..20: mol_type = other DNA
ggaggtgagggggtgaggag

SEQ ID NO: 17290 - DNA, 20 bp, synthetic construct
  source 1..20: mol_type = other DNA
aaagccattgaccagggcct

SEQ ID NO: 17291 - DNA, 20 bp, synthetic construct
  source 1..20: mol_type = other DNA
ccggccacgcgcctcggggc

SEQ ID NO: 17292 - DNA, 20 bp, synthetic construct
  source 1..20: mol_type = other DNA
cgcgagggccagggcggggc

SEQ ID NO: 17293 - DNA, 20 bp, synthetic construct
  source 1..20: mol_type = other DNA
cctgtcagaacagcaggaga

SEQ ID NO: 17294 - DNA, 20 bp, synthetic construct
  source 1..20: mol_type = other DNA
cagggccgagggcaccgggc

SEQ ID NO: 17295 - DNA, 20 bp, synthetic construct
  source 1..20: mol_type = other DNA
cgagatggagcagctcaagg

SEQ ID NO: 17296 - DNA, 20 bp, synthetic construct
  source 1..20: mol_type = other DNA
ccagctcaagctgcagttcg

SEQ ID NO: 17297 - DNA, 20 bp, synthetic construct
  source 1..20: mol_type = other DNA
taggaggggactgggagtcc

SEQ ID NO: 17298 - DNA, 20 bp, synthetic construct
  source 1..20: mol_type = other DNA
agaggccgcggcgccggcgc

SEQ ID NO: 17299 - DNA, 20 bp, synthetic construct
  source 1..20: mol_type = other DNA
acctccagatatattgatgg

SEQ ID NO: 17300 - DNA, 20 bp, synthetic construct
  source 1..20: mol_type = other DNA
atcatttggaacagtctaca

SEQ ID NO: 17301 - DNA, 20 bp, synthetic construct
  source 1..20: mol_type = other DNA
atggagcccgaggccggcgc

SEQ ID NO: 17302 - DNA, 20 bp, synthetic construct
  source 1..20: mol_type = other DNA
cagtgaaatctcgatggagt

SEQ ID NO: 17303 - DNA, 20 bp, synthetic construct
  source 1..20: mol_type = other DNA
acagtgaaatctcgatggag

SEQ ID NO: 17304 - DNA, 20 bp, synthetic construct
  source 1..20: mol_type = other DNA
tatcgtttacttcctttggg

SEQ ID NO: 17305 - DNA, 20 bp, synthetic construct
  source 1..20: mol_type = other DNA
tgttagcacagtatttcaca

SEQ ID NO: 17306 - DNA, 20 bp, synthetic construct
  source 1..20: mol_type = other DNA
agtttctgatagcagtactt

SEQ ID NO: 17307 - DNA, 20 bp, synthetic construct
  source 1..20: mol_type = other DNA
tctcctctgccccagggggc

SEQ ID NO: 17308 - DNA, 20 bp, synthetic construct
  source 1..20: mol_type = other DNA
gctgccctgctcctgggtgc

SEQ ID NO: 17309 - DNA, 20 bp, synthetic construct
  source 1..20: mol_type = other DNA
gccccctggggcagaggaga

SEQ ID NO: 17310 - DNA, 20 bp, synthetic construct
  source 1..20: mol_type = other DNA
tgcggggcctggaggcggag

SEQ ID NO: 17311 - DNA, 20 bp, synthetic construct
  source 1..20: mol_type = other DNA
gaggttggagcacagggaat

SEQ ID NO: 17312 - DNA, 20 bp, synthetic construct
  source 1..20: mol_type = other DNA
cggtgaggccagaatcaggg

SEQ ID NO: 17313 - DNA, 20 bp, synthetic construct
  source 1..20: mol_type = other DNA
gccctacctgcgtcagtgta

SEQ ID NO: 17314 - DNA, 20 bp, synthetic construct
  source 1..20: mol_type = other DNA
acgagtcccccgatgtgatc

SEQ ID NO: 17315 - DNA, 20 bp, synthetic construct
  source 1..20: mol_type = other DNA
ccatccaagatcaaccgagc

SEQ ID NO: 17316 - DNA, 20 bp, synthetic construct
  source 1..20: mol_type = other DNA
caagctgcggcgcctctcca

SEQ ID NO: 17317 - DNA, 20 bp, synthetic construct
  source 1..20: mol_type = other DNA
tgatcttggatggcagcata

SEQ ID NO: 17318 - DNA, 20 bp, synthetic construct
  source 1..20: mol_type = other DNA
atgatgctgctgcggctccg

SEQ ID NO: 17319 - DNA, 20 bp, synthetic construct
  source 1..20: mol_type = other DNA
ggtcgtgttccaagatgtcc

SEQ ID NO: 17320 - DNA, 20 bp, synthetic construct
  source 1..20: mol_type = other DNA
ctttctgggaggagacacgc

SEQ ID NO: 17321 - DNA, 20 bp, synthetic construct
  source 1..20: mol_type = other DNA
caccgtgctggccaagacgc

SEQ ID NO: 17322 - DNA, 20 bp, synthetic construct
  source 1..20: mol_type = other DNA
ggtcatgctgcagctggagg

SEQ ID NO: 17323 - DNA, 20 bp, synthetic construct
  source 1..20: mol_type = other DNA
tgagggccaccagctgctgc

SEQ ID NO: 17324 - DNA, 20 bp, synthetic construct
  source 1..20: mol_type = other DNA
ggaaaggtaccccagtgaag

SEQ ID NO: 17325 - DNA, 20 bp, synthetic construct
  source 1..20: mol_type = other DNA
gatgctgctgcggctccggg

SEQ ID NO: 17326 - DNA, 20 bp, synthetic construct
  source 1..20: mol_type = other DNA
ggcacgagtggctgtgcgcg

SEQ ID NO: 17327 - DNA, 20 bp, synthetic construct
  source 1..20: mol_type = other DNA
tggccaagacgctggtgcag

SEQ ID NO: 17328 - DNA, 20 bp, synthetic construct
  source 1..20: mol_type = other DNA
ggcagaggagctgcgagaca

SEQ ID NO: 17329 - DNA, 20 bp, synthetic construct
  source 1..20: mol_type = other DNA
ccacatgtcaggttccaccg

SEQ ID NO: 17330 - DNA, 20 bp, synthetic construct
  source 1..20: mol_type = other DNA
ggaagtgcgtgaggccctcg

SEQ ID NO: 17331 - DNA, 20 bp, synthetic construct
  source 1..20: mol_type = other DNA
cctggaggagaaggaggacc

SEQ ID NO: 17332 - DNA, 20 bp, synthetic construct
  source 1..20: mol_type = other DNA
ggaggaggagtggatggagg

SEQ ID NO: 17333 - DNA, 20 bp, synthetic construct
  source 1..20: mol_type = other DNA
tctggggacagagaaaaagc

SEQ ID NO: 17334 - DNA, 20 bp, synthetic construct
  source 1..20: mol_type = other DNA
tctacataccaaggggcaaa

SEQ ID NO: 17335 - DNA, 20 bp, synthetic construct
  source 1..20: mol_type = other DNA
agccggtgaggccagaatca

SEQ ID NO: 17336 - DNA, 20 bp, synthetic construct
  source 1..20: mol_type = other DNA
ggacagcaacaacctggacc

SEQ ID NO: 17337 - DNA, 20 bp, synthetic construct
  source 1..20: mol_type = other DNA
gttacctgctcggttgatct

SEQ ID NO: 17338 - DNA, 20 bp, synthetic construct
  source 1..20: mol_type = other DNA
aaagcacttacccacaatgg

SEQ ID NO: 17339 - DNA, 20 bp, synthetic construct
  source 1..20: mol_type = other DNA
gcagctcaccatcttggtga

SEQ ID NO: 17340 - DNA, 20 bp, synthetic construct
  source 1..20: mol_type = other DNA
ggcgatgcattcgaacgcgt

SEQ ID NO: 17341 - DNA, 20 bp, synthetic construct
  source 1..20: mol_type = other DNA
cttgtagtaccgctcctgga

SEQ ID NO: 17342 - DNA, 20 bp, synthetic construct
  source 1..20: mol_type = other DNA
tgcgagacaaggtgggagtg

SEQ ID NO: 17343 - DNA, 20 bp, synthetic construct
  source 1..20: mol_type = other DNA
atcgatctgaaataccccaa

SEQ ID NO: 17344 - DNA, 20 bp, synthetic construct
  source 1..20: mol_type = other DNA
cctggaggacaggcaggagc

SEQ ID NO: 17345 - DNA, 20 bp, synthetic construct
  source 1..20: mol_type = other DNA
ctcgcagcgttgcaggtcct

SEQ ID NO: 17346 - DNA, 20 bp, synthetic construct
  source 1..20: mol_type = other DNA
actgagctgtgcgtagcgca

SEQ ID NO: 17347 - DNA, 20 bp, synthetic construct
  source 1..20: mol_type = other DNA
gatcgatctgaaatacccca

SEQ ID NO: 17348 - DNA, 20 bp, synthetic construct
  source 1..20: mol_type = other DNA
gcgatgcattcgaacgcgtt

SEQ ID NO: 17349 - DNA, 20 bp, synthetic construct
  source 1..20: mol_type = other DNA
atgtccaacagccggcctag

SEQ ID NO: 17350 - DNA, 20 bp, synthetic construct
  source 1..20: mol_type = other DNA
tgtgtctgaagcagcccccc

SEQ ID NO: 17351 - DNA, 20 bp, synthetic construct
  source 1..20: mol_type = other DNA
ctgacgaactggaggagaag

SEQ ID NO: 17352 - DNA, 20 bp, synthetic construct
  source 1..20: mol_type = other DNA
gcagtccatcatccaggtga

SEQ ID NO: 17353 - DNA, 20 bp, synthetic construct
  source 1..20: mol_type = other DNA
caaggggcaaaggggctatg

SEQ ID NO: 17354 - DNA, 20 bp, synthetic construct
  source 1..20: mol_type = other DNA
caacaggatctacaacctgc

SEQ ID NO: 17355 - DNA, 20 bp, synthetic construct
  source 1..20: mol_type = other DNA
ggcgctgcagtttcaccagg

SEQ ID NO: 17356 - DNA, 20 bp, synthetic construct
  source 1..20: mol_type = other DNA
aactgtacaaactggtgact

SEQ ID NO: 17357 - DNA, 20 bp, synthetic construct
  source 1..20: mol_type = other DNA
cctgcgctggggcggatggt

SEQ ID NO: 17358 - DNA, 20 bp, synthetic construct
  source 1..20: mol_type = other DNA
catgcacctggatgcccttc

SEQ ID NO: 17359 - DNA, 20 bp, synthetic construct
  source 1..20: mol_type = other DNA
cctgcaacgctgcgagctgc

SEQ ID NO: 17360 - DNA, 20 bp, synthetic construct
  source 1..20: mol_type = other DNA
aatgctgaagaccaaaaacc

SEQ ID NO: 17361 - DNA, 20 bp, synthetic construct
  source 1..20: mol_type = other DNA
gaccttacactgacgcaggt

SEQ ID NO: 17362 - DNA, 20 bp, synthetic construct
  source 1..20: mol_type = other DNA
aggcgcgtaccaggctgtag

SEQ ID NO: 17363 - DNA, 20 bp, synthetic construct
  source 1..20: mol_type = other DNA
gggtcgagcacttgagctcc

SEQ ID NO: 17364 - DNA, 20 bp, synthetic construct
  source 1..20: mol_type = other DNA
agactcagacaaggccatcc

SEQ ID NO: 17365 - DNA, 20 bp, synthetic construct
  source 1..20: mol_type = other DNA
cgagaggcagagtgtcccgt

SEQ ID NO: 17366 - DNA, 20 bp, synthetic construct
  source 1..20: mol_type = other DNA
gcagctggaggaggtggagc

SEQ ID NO: 17367 - DNA, 20 bp, synthetic construct
  source 1..20: mol_type = other DNA
gtgttccaagatgtccagga

SEQ ID NO: 17368 - DNA, 20 bp, synthetic construct
  source 1..20: mol_type = other DNA
ccatctgcaagtcaggtgag

SEQ ID NO: 17369 - DNA, 20 bp, synthetic construct
  source 1..20: mol_type = other DNA
acgcaggtagggcgtgagct

SEQ ID NO: 17370 - DNA, 20 bp, synthetic construct
  source 1..20: mol_type = other DNA
caggaggagctgctgggctc

SEQ ID NO: 17371 - DNA, 20 bp, synthetic construct
  source 1..20: mol_type = other DNA
tgagaagcaggaaggtacat

SEQ ID NO: 17372 - DNA, 20 bp, synthetic construct
  source 1..20: mol_type = other DNA
ggcgccgcagcttgctctcc

SEQ ID NO: 17373 - DNA, 20 bp, synthetic construct
  source 1..20: mol_type = other DNA
cctgcgcgtgtgccggctga

SEQ ID NO: 17374 - DNA, 20 bp, synthetic construct
  source 1..20: mol_type = other DNA
ttctgggaggagacacgcag

SEQ ID NO: 17375 - DNA, 20 bp, synthetic construct
  source 1..20: mol_type = other DNA
catcttggaacacgaccgca

SEQ ID NO: 17376 - DNA, 20 bp, synthetic construct
  source 1..20: mol_type = other DNA
cacagcttcaatgttggcag

SEQ ID NO: 17377 - DNA, 20 bp, synthetic construct
  source 1..20: mol_type = other DNA
ctcccagctcaccctgctgg

SEQ ID NO: 17378 - DNA, 20 bp, synthetic construct
  source 1..20: mol_type = other DNA
tgtaccaggacaggcacgag

SEQ ID NO: 17379 - DNA, 20 bp, synthetic construct
  source 1..20: mol_type = other DNA
tgatgctgctgcggctccgg

SEQ ID NO: 17380 - DNA, 20 bp, synthetic construct
  source 1..20: mol_type = other DNA
agggtaccggaagctggtga

SEQ ID NO: 17381 - DNA, 20 bp, synthetic construct
  source 1..20: mol_type = other DNA
tgtctcgcagctcctctgcc

SEQ ID NO: 17382 - DNA, 20 bp, synthetic construct
  source 1..20: mol_type = other DNA
acatttcacagtcctttccc

SEQ ID NO: 17383 - DNA, 20 bp, synthetic construct
  source 1..20: mol_type = other DNA
cagaggctgctcaactcggg

SEQ ID NO: 17384 - DNA, 20 bp, synthetic construct
  source 1..20: mol_type = other DNA
ttggccagctccttcaggta

SEQ ID NO: 17385 - DNA, 20 bp, synthetic construct
  source 1..20: mol_type = other DNA
tgacgagctggtcaaggtga

SEQ ID NO: 17386 - DNA, 20 bp, synthetic construct
  source 1..20: mol_type = other DNA
gagcgggtccgcatcatctc

SEQ ID NO: 17387 - DNA, 20 bp, synthetic construct
  source 1..20: mol_type = other DNA
ttggacattctacataccaa

SEQ ID NO: 17388 - DNA, 20 bp, synthetic construct
  source 1..20: mol_type = other DNA
gctcaactcgggaggtgcca

SEQ ID NO: 17389 - DNA, 20 bp, synthetic construct
  source 1..20: mol_type = other DNA
gctcagtgaggagaagaaca

SEQ ID NO: 17390 - DNA, 20 bp, synthetic construct
  source 1..20: mol_type = other DNA
catttcacagtcctttccca

SEQ ID NO: 17391 - DNA, 20 bp, synthetic construct
  source 1..20: mol_type = other DNA
gaggtgaccgaaggccggaa

SEQ ID NO: 17392 - DNA, 20 bp, synthetic construct
  source 1..20: mol_type = other DNA
acctacccggagtgcccgca

SEQ ID NO: 17393 - DNA, 20 bp, synthetic construct
  source 1..20: mol_type = other DNA
tcggagattctccaccattg

SEQ ID NO: 17394 - DNA, 20 bp, synthetic construct
  source 1..20: mol_type = other DNA
tgattgacatgatgctgctg

SEQ ID NO: 17395 - DNA, 20 bp, synthetic construct
  source 1..20: mol_type = other DNA
cctgctcggttgatcttgga

SEQ ID NO: 17396 - DNA, 20 bp, synthetic construct
  source 1..20: mol_type = other DNA
gcagcagcagatgaaggcca

SEQ ID NO: 17397 - DNA, 20 bp, synthetic construct
  source 1..20: mol_type = other DNA
ccctttcacagaccatgacc

SEQ ID NO: 17398 - DNA, 20 bp, synthetic construct
  source 1..20: mol_type = other DNA
ttgatcttggatggcagcat

SEQ ID NO: 17399 - DNA, 20 bp, synthetic construct
  source 1..20: mol_type = other DNA
caccagcttccggtaccctg

SEQ ID NO: 17400 - DNA, 20 bp, synthetic construct
  source 1..20: mol_type = other DNA
tctgagcttcatctcgggag

SEQ ID NO: 17401 - DNA, 20 bp, synthetic construct
  source 1..20: mol_type = other DNA
ctggaaaggtaccccagtga

SEQ ID NO: 17402 - DNA, 20 bp, synthetic construct
  source 1..20: mol_type = other DNA
tgcacctctggatggtccag

SEQ ID NO: 17403 - DNA, 20 bp, synthetic construct
  source 1..20: mol_type = other DNA
tccaggtgcatgggtgtgga

SEQ ID NO: 17404 - DNA, 20 bp, synthetic construct
  source 1..20: mol_type = other DNA
ccccatcgtgctcttcatcc

SEQ ID NO: 17405 - DNA, 20 bp, synthetic construct
  source 1..20: mol_type = other DNA
acacgaccgcaaggaggccc

SEQ ID NO: 17406 - DNA, 20 bp, synthetic construct
  source 1..20: mol_type = other DNA
acagaccatgacctggatat

SEQ ID NO: 17407 - DNA, 20 bp, synthetic construct
  source 1..20: mol_type = other DNA
cacctcccagctcaccctgc

SEQ ID NO: 17408 - DNA, 20 bp, synthetic construct
  source 1..20: mol_type = other DNA
tggcctcaccggctgtagct

SEQ ID NO: 17409 - DNA, 20 bp, synthetic construct
  source 1..20: mol_type = other DNA
gggagaatgtggagtgtaac

SEQ ID NO: 17410 - DNA, 20 bp, synthetic construct
  source 1..20: mol_type = other DNA
agaagaacatggcggtcatg

SEQ ID NO: 17411 - DNA, 20 bp, synthetic construct
  source 1..20: mol_type = other DNA
ctctctgcagctaaaaggga

SEQ ID NO: 17412 - DNA, 20 bp, synthetic construct
  source 1..20: mol_type = other DNA
gcacgtaccatccagatcta

SEQ ID NO: 17413 - DNA, 20 bp, synthetic construct
  source 1..20: mol_type = other DNA
gcttgatgacctcgttcatc

SEQ ID NO: 17414 - DNA, 20 bp, synthetic construct
  source 1..20: mol_type = other DNA
gtcaatcaccgccgagcccc

SEQ ID NO: 17415 - DNA, 20 bp, synthetic construct
  source 1..20: mol_type = other DNA
catcgtcagacgctacaagg

SEQ ID NO: 17416 - DNA, 20 bp, synthetic construct
  source 1..20: mol_type = other DNA
tcaatcaccgccgagccccc

SEQ ID NO: 17417 - DNA, 20 bp, synthetic construct
  source 1..20: mol_type = other DNA
gaatgtccaacagccggcct

SEQ ID NO: 17418 - DNA, 20 bp, synthetic construct
  source 1..20: mol_type = other DNA
gaggacagccaaggggcacg

SEQ ID NO: 17419 - DNA, 20 bp, synthetic construct
  source 1..20: mol_type = other DNA
ctggtgaggggatggcggca

SEQ ID NO: 17420 - DNA, 20 bp, synthetic construct
  source 1..20: mol_type = other DNA
catgatgctgctgcggctcc

SEQ ID NO: 17421 - DNA, 20 bp, synthetic construct
  source 1..20: mol_type = other DNA
accccatcgtgctcttcatc

SEQ ID NO: 17422 - DNA, 20 bp, synthetic construct
  source 1..20: mol_type = other DNA
gacctccaactcgaggtgag

SEQ ID NO: 17423 - DNA, 20 bp, synthetic construct
  source 1..20: mol_type = other DNA
atggtggagaatctccgagt

SEQ ID NO: 17424 - DNA, 20 bp, synthetic construct
  source 1..20: mol_type = other DNA
tgacgatatctgcagagaga

SEQ ID NO: 17425 - DNA, 20 bp, synthetic construct
  source 1..20: mol_type = other DNA
aggagcagcgcaagaccatc

SEQ ID NO: 17426 - DNA, 20 bp, synthetic construct
  source 1..20: mol_type = other DNA
ccacggtggaacctgacatg

SEQ ID NO: 17427 - DNA, 20 bp, synthetic construct
  source 1..20: mol_type = other DNA
ctcgcagctcctctgcctgg

SEQ ID NO: 17428 - DNA, 20 bp, synthetic construct
  source 1..20: mol_type = other DNA
tgtcatctgcagagggacga

SEQ ID NO: 17429 - DNA, 20 bp, synthetic construct
  source 1..20: mol_type = other DNA
tgatgttcttctcacacacc

SEQ ID NO: 17430 - DNA, 20 bp, synthetic construct
  source 1..20: mol_type = other DNA
gcacaacatcgtcacacttc

SEQ ID NO: 17431 - DNA, 20 bp, synthetic construct
  source 1..20: mol_type = other DNA
gaggagctgcgagacaaggt

SEQ ID NO: 17432 - DNA, 20 bp, synthetic construct
  source 1..20: mol_type = other DNA
tcaaccgagcaggtaacctt

SEQ ID NO: 17433 - DNA, 20 bp, synthetic construct
  source 1..20: mol_type = other DNA
cccggatgaagagcacgatg

SEQ ID NO: 17434 - DNA, 20 bp, synthetic construct
  source 1..20: mol_type = other DNA
ggctgtaggggatgaggctg

SEQ ID NO: 17435 - DNA, 20 bp, synthetic construct
  source 1..20: mol_type = other DNA
gatggaggaggaatgtaagc

SEQ ID NO: 17436 - DNA, 20 bp, synthetic construct
  source 1..20: mol_type = other DNA
cgtcccgccccacctggtcc

SEQ ID NO: 17437 - DNA, 20 bp, synthetic construct
  source 1..20: mol_type = other DNA
gtttcaccaggaggagctgc

SEQ ID NO: 17438 - DNA, 20 bp, synthetic construct
  source 1..20: mol_type = other DNA
ggacagctacaatgacgagc

SEQ ID NO: 17439 - DNA, 20 bp, synthetic construct
  source 1..20: mol_type = other DNA
gcaaggaggccctggaggac

SEQ ID NO: 17440 - DNA, 20 bp, synthetic construct
  source 1..20: mol_type = other DNA
gagaagcaggaaggtacatg

SEQ ID NO: 17441 - DNA, 20 bp, synthetic construct
  source 1..20: mol_type = other DNA
ggaggaggaggagtggatgg

SEQ ID NO: 17442 - DNA, 20 bp, synthetic construct
  source 1..20: mol_type = other DNA
tccaccgtggcgtacaggca

SEQ ID NO: 17443 - DNA, 20 bp, synthetic construct
  source 1..20: mol_type = other DNA
tcaggcgctgcagtttcacc

SEQ ID NO: 17444 - DNA, 20 bp, synthetic construct
  source 1..20: mol_type = other DNA
ggaggaggcccgccaggcag

SEQ ID NO: 17445 - DNA, 20 bp, synthetic construct
  source 1..20: mol_type = other DNA
aggatgaagaggacgccttg

SEQ ID NO: 17446 - DNA, 20 bp, synthetic construct
  source 1..20: mol_type = other DNA
gcagatgacgctgacgcgcg

SEQ ID NO: 17447 - DNA, 20 bp, synthetic construct
  source 1..20: mol_type = other DNA
ccagcagctcgcagcgttgc

SEQ ID NO: 17448 - DNA, 20 bp, synthetic construct
  source 1..20: mol_type = other DNA
ctgcagcgcctgatgcaccg

SEQ ID NO: 17449 - DNA, 20 bp, synthetic construct
  source 1..20: mol_type = other DNA
tgtcctccagggcctccttg

SEQ ID NO: 17450 - DNA, 20 bp, synthetic construct
  source 1..20: mol_type = other DNA
gctctctgcagctaaaaggg

SEQ ID NO: 17451 - DNA, 20 bp, synthetic construct
  source 1..20: mol_type = other DNA
actacaagatgaaggaagag

SEQ ID NO: 17452 - DNA, 20 bp, synthetic construct
  source 1..20: mol_type = other DNA
cctggcgggcctcctcctgc

SEQ ID NO: 17453 - DNA, 20 bp, synthetic construct
  source 1..20: mol_type = other DNA
acactccacattctcccaca

SEQ ID NO: 17454 - DNA, 20 bp, synthetic construct
  source 1..20: mol_type = other DNA
agcttcatctcgggagtgga

SEQ ID NO: 17455 - DNA, 20 bp, synthetic construct
  source 1..20: mol_type = other DNA
gatctacaacctgcaggagg

SEQ ID NO: 17456 - DNA, 20 bp, synthetic construct
  source 1..20: mol_type = other DNA
acccggatgaagagcacgat

SEQ ID NO: 17457 - DNA, 20 bp, synthetic construct
  source 1..20: mol_type = other DNA
ccctgccaacattgaagctg

SEQ ID NO: 17458 - DNA, 20 bp, synthetic construct
  source 1..20: mol_type = other DNA
gctctccaggttgacgatgc

SEQ ID NO: 17459 - DNA, 20 bp, synthetic construct
  source 1..20: mol_type = other DNA
cctgccgtgcctgtacgcca

SEQ ID NO: 17460 - DNA, 20 bp, synthetic construct
  source 1..20: mol_type = other DNA
cttcctccactgtggagagg

SEQ ID NO: 17461 - DNA, 20 bp, synthetic construct
  source 1..20: mol_type = other DNA
cgggagtggaaggcctgcca

SEQ ID NO: 17462 - DNA, 20 bp, synthetic construct
  source 1..20: mol_type = other DNA
cgaactggaggagaagaggg

SEQ ID NO: 17463 - DNA, 20 bp, synthetic construct
  source 1..20: mol_type = other DNA
tggaaaggtaccccagtgaa

SEQ ID NO: 17464 - DNA, 20 bp, synthetic construct
  source 1..20: mol_type = other DNA
ctggtggccctcacggaggc

SEQ ID NO: 17465 - DNA, 20 bp, synthetic construct
  source 1..20: mol_type = other DNA
tcgaggtgaggggtgcccaa

SEQ ID NO: 17466 - DNA, 20 bp, synthetic construct
  source 1..20: mol_type = other DNA
gaaggcctgccagggagaag

SEQ ID NO: 17467 - DNA, 20 bp, synthetic construct
  source 1..20: mol_type = other DNA
agcaggcagtgcttgttctg

SEQ ID NO: 17468 - DNA, 20 bp, synthetic construct
  source 1..20: mol_type = other DNA
cgatgcattcgaacgcgttg

SEQ ID NO: 17469 - DNA, 20 bp, synthetic construct
  source 1..20: mol_type = other DNA
acggtggaacctgacatgtg

SEQ ID NO: 17470 - DNA, 20 bp, synthetic construct
  source 1..20: mol_type = other DNA
cgttcatcaggaagtgcgtg

SEQ ID NO: 17471 - DNA, 20 bp, synthetic construct
  source 1..20: mol_type = other DNA
cacggtggaacctgacatgt

SEQ ID NO: 17472 - DNA, 20 bp, synthetic construct
  source 1..20: mol_type = other DNA
agaagaacatcaagaggttc

SEQ ID NO: 17473 - DNA, 20 bp, synthetic construct
  source 1..20: mol_type = other DNA
ccagctccttctccttcagc

SEQ ID NO: 17474 - DNA, 20 bp, synthetic construct
  source 1..20: mol_type = other DNA
ggagcagcgcaagaccatct

SEQ ID NO: 17475 - DNA, 20 bp, synthetic construct
  source 1..20: mol_type = other DNA
ggacgcgccccatcgcaggt

SEQ ID NO: 17476 - DNA, 20 bp, synthetic construct
  source 1..20: mol_type = other DNA
cctcccagctcaccctgctg

SEQ ID NO: 17477 - DNA, 20 bp, synthetic construct
  source 1..20: mol_type = other DNA
gcccaagaaggagcaggttc

SEQ ID NO: 17478 - DNA, 20 bp, synthetic construct
  source 1..20: mol_type = other DNA
tcaccagtttgtacagttct

SEQ ID NO: 17479 - DNA, 20 bp, synthetic construct
  source 1..20: mol_type = other DNA
caccatcttggtgaaggagt

SEQ ID NO: 17480 - DNA, 20 bp, synthetic construct
  source 1..20: mol_type = other DNA
gcgggagcgggaccaggtac

SEQ ID NO: 17481 - DNA, 20 bp, synthetic construct
  source 1..20: mol_type = other DNA
caagctgcagcagcagatga

SEQ ID NO: 17482 - DNA, 20 bp, synthetic construct
  source 1..20: mol_type = other DNA
atacccagctacagccggtg

SEQ ID NO: 17483 - DNA, 20 bp, synthetic construct
  source 1..20: mol_type = other DNA
tggaggaggtggagcgggag

SEQ ID NO: 17484 - DNA, 20 bp, synthetic construct
  source 1..20: mol_type = other DNA
ccctcaccagcagcagctgg

SEQ ID NO: 17485 - DNA, 20 bp, synthetic construct
  source 1..20: mol_type = other DNA
cagtgaggagaagaacatgg

SEQ ID NO: 17486 - DNA, 20 bp, synthetic construct
  source 1..20: mol_type = other DNA
cccggagtgcccgcagggtg

SEQ ID NO: 17487 - DNA, 20 bp, synthetic construct
  source 1..20: mol_type = other DNA
tgtcaaggacaagatcggcg

SEQ ID NO: 17488 - DNA, 20 bp, synthetic construct
  source 1..20: mol_type = other DNA
ttggtgaaggagttggtgat

SEQ ID NO: 17489 - DNA, 20 bp, synthetic construct
  source 1..20: mol_type = other DNA
cgtggcgtacaggcacggca

SEQ ID NO: 17490 - DNA, 20 bp, synthetic construct
  source 1..20: mol_type = other DNA
acagtggaggaaggccacga

SEQ ID NO: 17491 - DNA, 20 bp, synthetic construct
  source 1..20: mol_type = other DNA
gtgcagaggctgctcaactc

SEQ ID NO: 17492 - DNA, 20 bp, synthetic construct
  source 1..20: mol_type = other DNA
gactgtgctgcaagacacaa

SEQ ID NO: 17493 - DNA, 20 bp, synthetic construct
  source 1..20: mol_type = other DNA
gaaggagcaggttctggaac

SEQ ID NO: 17494 - DNA, 20 bp, synthetic construct
  source 1..20: mol_type = other DNA
gcaggcagtgcttgttctgc

SEQ ID NO: 17495 - DNA, 20 bp, synthetic construct
  source 1..20: mol_type = other DNA
cttgcagatggtgaactcca

SEQ ID NO: 17496 - DNA, 20 bp, synthetic construct
  source 1..20: mol_type = other DNA
ccagcgcaggatgaacctga

SEQ ID NO: 17497 - DNA, 20 bp, synthetic construct
  source 1..20: mol_type = other DNA
tggacattctacataccaag

SEQ ID NO: 17498 - DNA, 20 bp, synthetic construct
  source 1..20: mol_type = other DNA
aaagcaccggttgaataaga

SEQ ID NO: 17499 - DNA, 20 bp, synthetic construct
  source 1..20: mol_type = other DNA
gccttcctccactgtggaga

SEQ ID NO: 17500 - DNA, 20 bp, synthetic construct
  source 1..20: mol_type = other DNA
cacccggatgaagagcacga

SEQ ID NO: 17501 - DNA, 20 bp, synthetic construct
  source 1..20: mol_type = other DNA
tggaccatccagaggtgcag

SEQ ID NO: 17502 - DNA, 20 bp, synthetic construct
  source 1..20: mol_type = other DNA
ccggttgaataagatggagg

SEQ ID NO: 17503 - DNA, 20 bp, synthetic construct
  source 1..20: mol_type = other DNA
tgaagggcatccaggtgcat

SEQ ID NO: 17504 - DNA, 20 bp, synthetic construct
  source 1..20: mol_type = other DNA
cggagattctccaccattgt

SEQ ID NO: 17505 - DNA, 20 bp, synthetic construct
  source 1..20: mol_type = other DNA
aagcgaacatcagattttca

SEQ ID NO: 17506 - DNA, 20 bp, synthetic construct
  source 1..20: mol_type = other DNA
gcgagctgctggccaggttg

SEQ ID NO: 17507 - DNA, 20 bp, synthetic construct
  source 1..20: mol_type = other DNA
ctacaagatgaaggaagagc

SEQ ID NO: 17508 - DNA, 20 bp, synthetic construct
  source 1..20: mol_type = other DNA
ccttctactgcgagcgccgc

SEQ ID NO: 17509 - DNA, 20 bp, synthetic construct
  source 1..20: mol_type = other DNA
accttacactgacgcaggta

SEQ ID NO: 17510 - DNA, 20 bp, synthetic construct
  source 1..20: mol_type = other DNA
gagcacgatggggtagatgt

SEQ ID NO: 17511 - DNA, 20 bp, synthetic construct
  source 1..20: mol_type = other DNA
tcatccaggtgagggcctgg

SEQ ID NO: 17512 - DNA, 20 bp, synthetic construct
  source 1..20: mol_type = other DNA
cgagcgggtccgcatcatct

SEQ ID NO: 17513 - DNA, 20 bp, synthetic construct
  source 1..20: mol_type = other DNA
agatcgatcagctaaagcac

SEQ ID NO: 17514 - DNA, 20 bp, synthetic construct
  source 1..20: mol_type = other DNA
tggtgcccatatccaggtca

SEQ ID NO: 17515 - DNA, 20 bp, synthetic construct
  source 1..20: mol_type = other DNA
ttccagaacctgctccttct

SEQ ID NO: 17516 - DNA, 20 bp, synthetic construct
  source 1..20: mol_type = other DNA
gctgcaagacacaagggagg

SEQ ID NO: 17517 - DNA, 20 bp, synthetic construct
  source 1..20: mol_type = other DNA
agcttccggtaccctgcgga

SEQ ID NO: 17518 - DNA, 20 bp, synthetic construct
  source 1..20: mol_type = other DNA
cacagaccatgacctggata

SEQ ID NO: 17519 - DNA, 20 bp, synthetic construct
  source 1..20: mol_type = other DNA
tccagaacctgctccttctt

SEQ ID NO: 17520 - DNA, 20 bp, synthetic construct
  source 1..20: mol_type = other DNA
caggatctacaacctgcagg

SEQ ID NO: 17521 - DNA, 20 bp, synthetic construct
  source 1..20: mol_type = other DNA
agccgatcccagcctccagc

SEQ ID NO: 17522 - DNA, 20 bp, synthetic construct
  source 1..20: mol_type = other DNA
gcaggttctggaactggagc

SEQ ID NO: 17523 - DNA, 20 bp, synthetic construct
  source 1..20: mol_type = other DNA
aggtagggcgtgagcttggc

SEQ ID NO: 17524 - DNA, 20 bp, synthetic construct
  source 1..20: mol_type = other DNA
acctgccacccacctgcgat

SEQ ID NO: 17525 - DNA, 20 bp, synthetic construct
  source 1..20: mol_type = other DNA
gctcttcacacccaccgtgc

SEQ ID NO: 17526 - DNA, 20 bp, synthetic construct
  source 1..20: mol_type = other DNA
tgtgctgcaagacacaaggg

SEQ ID NO: 17527 - DNA, 20 bp, synthetic construct
  source 1..20: mol_type = other DNA
ctggaccaggtggggcggga

SEQ ID NO: 17528 - DNA, 20 bp, synthetic construct
  source 1..20: mol_type = other DNA
gagacctccaactcgaggtg

SEQ ID NO: 17529 - DNA, 20 bp, synthetic construct
  source 1..20: mol_type = other DNA
gagccgagacctccaactcg

SEQ ID NO: 17530 - DNA, 20 bp, synthetic construct
  source 1..20: mol_type = other DNA
ggaggccctggaggacaggc

SEQ ID NO: 17531 - DNA, 20 bp, synthetic construct
  source 1..20: mol_type = other DNA
caccagcgtcttggccagca

SEQ ID NO: 17532 - DNA, 20 bp, synthetic construct
  source 1..20: mol_type = other DNA
gcacctctggatggtccagt

SEQ ID NO: 17533 - DNA, 20 bp, synthetic construct
  source 1..20: mol_type = other DNA
ggagcggtactacaagatga

SEQ ID NO: 17534 - DNA, 20 bp, synthetic construct
  source 1..20: mol_type = other DNA
ccagctcctgcctgtcctcc

SEQ ID NO: 17535 - DNA, 20 bp, synthetic construct
  source 1..20: mol_type = other DNA
cacaacatcgtcacacttca

SEQ ID NO: 17536 - DNA, 20 bp, synthetic construct
  source 1..20: mol_type = other DNA
gaagcagatccgcgagctgg

SEQ ID NO: 17537 - DNA, 20 bp, synthetic construct
  source 1..20: mol_type = other DNA
aggaggagctgctgggctct

SEQ ID NO: 17538 - DNA, 20 bp, synthetic construct
  source 1..20: mol_type = other DNA
agcaggttctggaactggag

SEQ ID NO: 17539 - DNA, 20 bp, synthetic construct
  source 1..20: mol_type = other DNA
ctcgtggccttcctccactg

SEQ ID NO: 17540 - DNA, 20 bp, synthetic construct
  source 1..20: mol_type = other DNA
ggcatccaggtgcatgggtg

SEQ ID NO: 17541 - DNA, 20 bp, synthetic construct
  source 1..20: mol_type = other DNA
aatgtccaacagccggccta

SEQ ID NO: 17542 - DNA, 20 bp, synthetic construct
  source 1..20: mol_type = other DNA
ggaggaggaggaggagtgga

SEQ ID NO: 17543 - DNA, 20 bp, synthetic construct
  source 1..20: mol_type = other DNA
cacggtgggtgtgaagagca

SEQ ID NO: 17544 - DNA, 20 bp, synthetic construct
  source 1..20: mol_type = other DNA
ggatgatggactgcagctcc

SEQ ID NO: 17545 - DNA, 20 bp, synthetic construct
  source 1..20: mol_type = other DNA
gtcaccagtttgtacagttc

SEQ ID NO: 17546 - DNA, 20 bp, synthetic construct
  source 1..20: mol_type = other DNA
cagcgcaggatgaacctgaa

SEQ ID NO: 17547 - DNA, 20 bp, synthetic construct
  source 1..20: mol_type = other DNA
gttgacctgctccaggtcgt

SEQ ID NO: 17548 - DNA, 20 bp, synthetic construct
  source 1..20: mol_type = other DNA
ccgctcacctgacttgcaga

SEQ ID NO: 17549 - DNA, 20 bp, synthetic construct
  source 1..20: mol_type = other DNA
tcatcttgtagtaccgctcc

SEQ ID NO: 17550 - DNA, 20 bp, synthetic construct
  source 1..20: mol_type = other DNA
gagttcaccatctgcaagtc

SEQ ID NO: 17551 - DNA, 20 bp, synthetic construct
  source 1..20: mol_type = other DNA
tgactgggaaagagcccact

SEQ ID NO: 17552 - DNA, 20 bp, synthetic construct
  source 1..20: mol_type = other DNA
ggcggccacagcttcaatgt

SEQ ID NO: 17553 - DNA, 20 bp, synthetic construct
  source 1..20: mol_type = other DNA
ttacccagaactgtacaaac

SEQ ID NO: 17554 - DNA, 20 bp, synthetic construct
  source 1..20: mol_type = other DNA
gaacaagcactgcctgctgg

SEQ ID NO: 17555 - DNA, 20 bp, synthetic construct
  source 1..20: mol_type = other DNA
cacccctcacctcgagttgg

SEQ ID NO: 17556 - DNA, 20 bp, synthetic construct
  source 1..20: mol_type = other DNA
cttggaacacgaccgcaagg

SEQ ID NO: 17557 - DNA, 20 bp, synthetic construct
  source 1..20: mol_type = other DNA
gacgatatctgcagagagag

SEQ ID NO: 17558 - DNA, 20 bp, synthetic construct
  source 1..20: mol_type = other DNA
tttctgggaggagacacgca

SEQ ID NO: 17559 - DNA, 20 bp, synthetic construct
  source 1..20: mol_type = other DNA
ttctacataccaaggggcaa

SEQ ID NO: 17560 - DNA, 20 bp, synthetic construct
  source 1..20: mol_type = other DNA
gacctacccggagtgcccgc

SEQ ID NO: 17561 - DNA, 20 bp, synthetic construct
  source 1..20: mol_type = other DNA
gacgatggagtcgtttcccg

SEQ ID NO: 17562 - DNA, 20 bp, synthetic construct
  source 1..20: mol_type = other DNA
cagcctcatcccctacagcc

SEQ ID NO: 17563 - DNA, 20 bp, synthetic construct
  source 1..20: mol_type = other DNA
cgaccgcaaggaggccctgg

SEQ ID NO: 17564 - DNA, 20 bp, synthetic construct
  source 1..20: mol_type = other DNA
atcctccagctgccgcaacc

SEQ ID NO: 17565 - DNA, 20 bp, synthetic construct
  source 1..20: mol_type = other DNA
tatgtagaatgtccaacagc

SEQ ID NO: 17566 - DNA, 20 bp, synthetic construct
  source 1..20: mol_type = other DNA
tcaccggctgtagctgggta

SEQ ID NO: 17567 - DNA, 20 bp, synthetic construct
  source 1..20: mol_type = other DNA
agcactgcctgctggaggct

SEQ ID NO: 17568 - DNA, 20 bp, synthetic construct
  source 1..20: mol_type = other DNA
acatgaggttgacctgctcc

SEQ ID NO: 17569 - DNA, 20 bp, synthetic construct
  source 1..20: mol_type = other DNA
ggaggcctgcatcgtcaacc

SEQ ID NO: 17570 - DNA, 20 bp, synthetic construct
  source 1..20: mol_type = other DNA
aggaggacgcgccccatcgc

SEQ ID NO: 17571 - DNA, 20 bp, synthetic construct
  source 1..20: mol_type = other DNA
agcgggtccgcatcatctcg

SEQ ID NO: 17572 - DNA, 20 bp, synthetic construct
  source 1..20: mol_type = other DNA
cacgcacttcctgatgaacg

SEQ ID NO: 17573 - DNA, 20 bp, synthetic construct
  source 1..20: mol_type = other DNA
gcagcatgaccgtgttcatg

SEQ ID NO: 17574 - DNA, 20 bp, synthetic construct
  source 1..20: mol_type = other DNA
agcaacaacctggaccaggt

SEQ ID NO: 17575 - DNA, 20 bp, synthetic construct
  source 1..20: mol_type = other DNA
ccaggtcctccttctcctcc

SEQ ID NO: 17576 - DNA, 20 bp, synthetic construct
  source 1..20: mol_type = other DNA
ggccttcctccactgtggag

SEQ ID NO: 17577 - DNA, 20 bp, synthetic construct
  source 1..20: mol_type = other DNA
tgacgaactggaggagaaga

SEQ ID NO: 17578 - DNA, 20 bp, synthetic construct
  source 1..20: mol_type = other DNA
gggctctggggagcgaagag

SEQ ID NO: 17579 - DNA, 20 bp, synthetic construct
  source 1..20: mol_type = other DNA
tcgggagtggaaggcctgcc

SEQ ID NO: 17580 - DNA, 20 bp, synthetic construct
  source 1..20: mol_type = other DNA
ccttcctccactgtggagag

SEQ ID NO: 17581 - DNA, 20 bp, synthetic construct
  source 1..20: mol_type = other DNA
gcaccatacccagctacagc

SEQ ID NO: 17582 - DNA, 20 bp, synthetic construct
  source 1..20: mol_type = other DNA
acaggcaggagctggtcaac

SEQ ID NO: 17583 - DNA, 20 bp, synthetic construct
  source 1..20: mol_type = other DNA
gcagcgcaagaccatctggg

SEQ ID NO: 17584 - DNA, 20 bp, synthetic construct
  source 1..20: mol_type = other DNA
ggagctgcagtccatcatcc

SEQ ID NO: 17585 - DNA, 20 bp, synthetic construct
  source 1..20: mol_type = other DNA
gatcttggatggcagcatag

SEQ ID NO: 17586 - DNA, 20 bp, synthetic construct
  source 1..20: mol_type = other DNA
gcaccggttgaataagatgg

SEQ ID NO: 17587 - DNA, 20 bp, synthetic construct
  source 1..20: mol_type = other DNA
atccaggtgcatgggtgtgg

SEQ ID NO: 17588 - DNA, 20 bp, synthetic construct
  source 1..20: mol_type = other DNA
tatagcggctgagcatgtgc

SEQ ID NO: 17589 - DNA, 20 bp, synthetic construct
  source 1..20: mol_type = other DNA
cctgccacccacctgcgatg

SEQ ID NO: 17590 - DNA, 20 bp, synthetic construct
  source 1..20: mol_type = other DNA
ctccttgtagcgtctgacga

SEQ ID NO: 17591 - DNA, 20 bp, synthetic construct
  source 1..20: mol_type = other DNA
ctcggatgcagccttctagc

SEQ ID NO: 17592 - DNA, 20 bp, synthetic construct
  source 1..20: mol_type = other DNA
ggacgccttgtgggagaatg

SEQ ID NO: 17593 - DNA, 20 bp, synthetic construct
  source 1..20: mol_type = other DNA
tcacctcgagttggaggtct

SEQ ID NO: 17594 - DNA, 20 bp, synthetic construct
  source 1..20: mol_type = other DNA
acacttcagggacatggtgc

SEQ ID NO: 17595 - DNA, 20 bp, synthetic construct
  source 1..20: mol_type = other DNA
gctgcgagacaaggtgggag

SEQ ID NO: 17596 - DNA, 20 bp, synthetic construct
  source 1..20: mol_type = other DNA
gcgctacgcacagctcagtg

SEQ ID NO: 17597 - DNA, 20 bp, synthetic construct
  source 1..20: mol_type = other DNA
gcacgagtggctgtgcgcgc

SEQ ID NO: 17598 - DNA, 20 bp, synthetic construct
  source 1..20: mol_type = other DNA
tgcttgttctgcgggcacag

SEQ ID NO: 17599 - DNA, 20 bp, synthetic construct
  source 1..20: mol_type = other DNA
gtcgtttcccgggggctcgg

SEQ ID NO: 17600 - DNA, 20 bp, synthetic construct
  source 1..20: mol_type = other DNA
gaactgtacaaactggtgac

SEQ ID NO: 17601 - DNA, 20 bp, synthetic construct
  source 1..20: mol_type = other DNA
gtgtaaggtcattgatgagc

SEQ ID NO: 17602 - DNA, 20 bp, synthetic construct
  source 1..20: mol_type = other DNA
ggaggaggtggagcgggagc

SEQ ID NO: 17603 - DNA, 20 bp, synthetic construct
  source 1..20: mol_type = other DNA
gtgacgatatctgcagagag

SEQ ID NO: 17604 - DNA, 20 bp, synthetic construct
  source 1..20: mol_type = other DNA
caggaagcagatccgcgagc

SEQ ID NO: 17605 - DNA, 20 bp, synthetic construct
  source 1..20: mol_type = other DNA
cacagtggaggaaggccacg

SEQ ID NO: 17606 - DNA, 20 bp, synthetic construct
  source 1..20: mol_type = other DNA
ggatgaagaggacgccttgt

SEQ ID NO: 17607 - DNA, 20 bp, synthetic construct
  source 1..20: mol_type = other DNA
ggtagggcgtgagcttggca

SEQ ID NO: 17608 - DNA, 20 bp, synthetic construct
  source 1..20: mol_type = other DNA
gggcctggatgcctacgacc

SEQ ID NO: 17609 - DNA, 20 bp, synthetic construct
  source 1..20: mol_type = other DNA
ctcgaggtgaggggtgccca

SEQ ID NO: 17610 - DNA, 20 bp, synthetic construct
  source 1..20: mol_type = other DNA
tgcagtccatcatccaggtg

SEQ ID NO: 17611 - DNA, 20 bp, synthetic construct
  source 1..20: mol_type = other DNA
cggggcagcagctttctggg

SEQ ID NO: 17612 - DNA, 20 bp, synthetic construct
  source 1..20: mol_type = other DNA
caggttccaccgtggcgtac

SEQ ID NO: 17613 - DNA, 20 bp, synthetic construct
  source 1..20: mol_type = other DNA
gaacatcaagaggttcaggt

SEQ ID NO: 17614 - DNA, 20 bp, synthetic construct
  source 1..20: mol_type = other DNA
atcccctcaccagcagcagc

SEQ ID NO: 17615 - DNA, 20 bp, synthetic construct
  source 1..20: mol_type = other DNA
ctccaaggacagcaacaacc

SEQ ID NO: 17616 - DNA, 20 bp, synthetic construct
  source 1..20: mol_type = other DNA
ccggcggcgctcgcagtaga

SEQ ID NO: 17617 - DNA, 20 bp, synthetic construct
  source 1..20: mol_type = other DNA
agacctccaactcgaggtga

SEQ ID NO: 17618 - DNA, 20 bp, synthetic construct
  source 1..20: mol_type = other DNA
cctcctccatcttattcaac

SEQ ID NO: 17619 - DNA, 20 bp, synthetic construct
  source 1..20: mol_type = other DNA
cgcaggtgggtggcaggtga

SEQ ID NO: 17620 - DNA, 20 bp, synthetic construct
  source 1..20: mol_type = other DNA
gtgtgaagagcacgggccgg

SEQ ID NO: 17621 - DNA, 20 bp, synthetic construct
  source 1..20: mol_type = other DNA
acagtacctggaggagaagg

SEQ ID NO: 17622 - DNA, 20 bp, synthetic construct
  source 1..20: mol_type = other DNA
ctcgcagtgcttaatcgaaa

SEQ ID NO: 17623 - DNA, 20 bp, synthetic construct
  source 1..20: mol_type = other DNA
tgttcgcttcaggctgatgg

SEQ ID NO: 17624 - DNA, 20 bp, synthetic construct
  source 1..20: mol_type = other DNA
ctcggattggtgggaggagg

SEQ ID NO: 17625 - DNA, 20 bp, synthetic construct
  source 1..20: mol_type = other DNA
cacatagcccctttgcccct

SEQ ID NO: 17626 - DNA, 20 bp, synthetic construct
  source 1..20: mol_type = other DNA
ctccatcgtcagacgctaca

SEQ ID NO: 17627 - DNA, 20 bp, synthetic construct
  source 1..20: mol_type = other DNA
ggtgcagaggctgctcaact

SEQ ID NO: 17628 - DNA, 20 bp, synthetic construct
  source 1..20: mol_type = other DNA
tttcaccaggaggagctgct

SEQ ID NO: 17629 - DNA, 20 bp, synthetic construct
  source 1..20: mol_type = other DNA
gccgtgcctgtacgccacgg

SEQ ID NO: 17630 - DNA, 20 bp, synthetic construct
  source 1..20: mol_type = other DNA
ctccgcagggtaccggaagc

SEQ ID NO: 17631 - DNA, 20 bp, synthetic construct
  source 1..20: mol_type = other DNA
aggatggccttgtctgagtc

SEQ ID NO: 17632 - DNA, 20 bp, synthetic construct
  source 1..20: mol_type = other DNA
acagccactcgtgcctgtcc

SEQ ID NO: 17633 - DNA, 20 bp, synthetic construct
  source 1..20: mol_type = other DNA
cagcgtcttggccagcacgg

SEQ ID NO: 17634 - DNA, 20 bp, synthetic construct
  source 1..20: mol_type = other DNA
gaggaggagtggatggagga

SEQ ID NO: 17635 - DNA, 20 bp, synthetic construct
  source 1..20: mol_type = other DNA
aacatcaagaggttcaggta

SEQ ID NO: 17636 - DNA, 20 bp, synthetic construct
  source 1..20: mol_type = other DNA
agagccttacctgaaggagc

SEQ ID NO: 17637 - DNA, 20 bp, synthetic construct
  source 1..20: mol_type = other DNA
agctgctaaccttccaggag

SEQ ID NO: 17638 - DNA, 20 bp, synthetic construct
  source 1..20: mol_type = other DNA
ttcacagtacctggaggaga

SEQ ID NO: 17639 - DNA, 20 bp, synthetic construct
  source 1..20: mol_type = other DNA
gtgacaccatgtaccaggac

SEQ ID NO: 17640 - DNA, 20 bp, synthetic construct
  source 1..20: mol_type = other DNA
gcttggcagggttgatatag

SEQ ID NO: 17641 - DNA, 20 bp, synthetic construct
  source 1..20: mol_type = other DNA
ctacataccaaggggcaaag

SEQ ID NO: 17642 - DNA, 20 bp, synthetic construct
  source 1..20: mol_type = other DNA
tggaccaggtggggcgggac

SEQ ID NO: 17643 - DNA, 20 bp, synthetic construct
  source 1..20: mol_type = other DNA
caatgaccttacactgacgc

SEQ ID NO: 17644 - DNA, 20 bp, synthetic construct
  source 1..20: mol_type = other DNA
ggaggagctgctgggctctg

SEQ ID NO: 17645 - DNA, 20 bp, synthetic construct
  source 1..20: mol_type = other DNA
gttggacattctacatacca

SEQ ID NO: 17646 - DNA, 20 bp, synthetic construct
  source 1..20: mol_type = other DNA
tctccgcctggggcagagag

SEQ ID NO: 17647 - DNA, 20 bp, synthetic construct
  source 1..20: mol_type = other DNA
agcctgcaggaggaggtagg

SEQ ID NO: 17648 - DNA, 20 bp, synthetic construct
  source 1..20: mol_type = other DNA
ggaggctgcgaggcaggagg

SEQ ID NO: 17649 - DNA, 20 bp, synthetic construct
  source 1..20: mol_type = other DNA
ttctgggggaccacagaagc

SEQ ID NO: 17650 - DNA, 20 bp, synthetic construct
  source 1..20: mol_type = other DNA
agaccaggtacctgagaggc

SEQ ID NO: 17651 - DNA, 20 bp, synthetic construct
  source 1..20: mol_type = other DNA
cgaccctggaggaggccgtg

SEQ ID NO: 17652 - DNA, 20 bp, synthetic construct
  source 1..20: mol_type = other DNA
cgagacatcaagccttccag

SEQ ID NO: 17653 - DNA, 20 bp, synthetic construct
  source 1..20: mol_type = other DNA
gggtcgatggggccgcacca

SEQ ID NO: 17654 - DNA, 20 bp, synthetic construct
  source 1..20: mol_type = other DNA
cgcggcatcttcccgccctg

SEQ ID NO: 17655 - DNA, 20 bp, synthetic construct
  source 1..20: mol_type = other DNA
gtttgatgaggagcgagccc

SEQ ID NO: 17656 - DNA, 20 bp, synthetic construct
  source 1..20: mol_type = other DNA
cttcagggaccggccccacg

SEQ ID NO: 17657 - DNA, 20 bp, synthetic construct
  source 1..20: mol_type = other DNA
gccttgcagattaagtacac

SEQ ID NO: 17658 - DNA, 20 bp, synthetic construct
  source 1..20: mol_type = other DNA
gagtgtgaggtgaggcaggc

SEQ ID NO: 17659 - DNA, 20 bp, synthetic construct
  source 1..20: mol_type = other DNA
tgtgaggtgaggcaggcggg

SEQ ID NO: 17660 - DNA, 20 bp, synthetic construct
  source 1..20: mol_type = other DNA
atatacctaagacacagaaa

SEQ ID NO: 17661 - DNA, 20 bp, synthetic construct
  source 1..20: mol_type = other DNA
ttccgagcggccgtcgcggc

SEQ ID NO: 17662 - DNA, 20 bp, synthetic construct
  source 1..20: mol_type = other DNA
cagactccattcagaatcat

SEQ ID NO: 17663 - DNA, 20 bp, synthetic construct
  source 1..20: mol_type = other DNA
ccggccccacgaggaacgcc

SEQ ID NO: 17664 - DNA, 20 bp, synthetic construct
  source 1..20: mol_type = other DNA
acttaatctgcaaggcaaga

SEQ ID NO: 17665 - DNA, 20 bp, synthetic construct
  source 1..20: mol_type = other DNA
cgatttccgagcggccgtcg

SEQ ID NO: 17666 - DNA, 20 bp, synthetic construct
  source 1..20: mol_type = other DNA
gcgtgcctggcgttcctcgt

SEQ ID NO: 17667 - DNA, 20 bp, synthetic construct
  source 1..20: mol_type = other DNA
cctggcgttcctcgtggggc

SEQ ID NO: 17668 - DNA, 20 bp, synthetic construct
  source 1..20: mol_type = other DNA
agcgtgcctggcgttcctcg

SEQ ID NO: 17669 - DNA, 20 bp, synthetic construct
  source 1..20: mol_type = other DNA
agcccaggtagggtaacatc

SEQ ID NO: 17670 - DNA, 20 bp, synthetic construct
  source 1..20: mol_type = other DNA
cctttgaagaggctcggaga

SEQ ID NO: 17671 - DNA, 20 bp, synthetic construct
  source 1..20: mol_type = other DNA
gccgacttacgatttccgag

SEQ ID NO: 17672 - DNA, 20 bp, synthetic construct
  source 1..20: mol_type = other DNA
ctccaaagactggatggtat

SEQ ID NO: 17673 - DNA, 20 bp, synthetic construct
  source 1..20: mol_type = other DNA
aacaggcctttgaagaggct

SEQ ID NO: 17674 - DNA, 20 bp, synthetic construct
  source 1..20: mol_type = other DNA
ctcgaacttgcttctctggt

SEQ ID NO: 17675 - DNA, 20 bp, synthetic construct
  source 1..20: mol_type = other DNA
gagagacagattggttcctg

SEQ ID NO: 17676 - DNA, 20 bp, synthetic construct
  source 1..20: mol_type = other DNA
acagactccattcagaatca

SEQ ID NO: 17677 - DNA, 20 bp, synthetic construct
  source 1..20: mol_type = other DNA
ttccagaacgcctgccgcga

SEQ ID NO: 17678 - DNA, 20 bp, synthetic construct
  source 1..20: mol_type = other DNA
aagtcgacatactctcggct

SEQ ID NO: 17679 - DNA, 20 bp, synthetic construct
  source 1..20: mol_type = other DNA
ctgattgatggcttcaggga

SEQ ID NO: 17680 - DNA, 20 bp, synthetic construct
  source 1..20: mol_type = other DNA
tttacccgactctttcaggt

SEQ ID NO: 17681 - DNA, 20 bp, synthetic construct
  source 1..20: mol_type = other DNA
cggctgagctgtactcgtct

SEQ ID NO: 17682 - DNA, 20 bp, synthetic construct
  source 1..20: mol_type = other DNA
ttgatatggtcttggggagt

SEQ ID NO: 17683 - DNA, 20 bp, synthetic construct
  source 1..20: mol_type = other DNA
gatgtaaagattgagccctg

SEQ ID NO: 17684 - DNA, 20 bp, synthetic construct
  source 1..20: mol_type = other DNA
gtgtcctacctgaaagagtc

SEQ ID NO: 17685 - DNA, 20 bp, synthetic construct
  source 1..20: mol_type = other DNA
agatgagggacagtttggtt

SEQ ID NO: 17686 - DNA, 20 bp, synthetic construct
  source 1..20: mol_type = other DNA
tccaagggactattgtcctg

SEQ ID NO: 17687 - DNA, 20 bp, synthetic construct
  source 1..20: mol_type = other DNA
gttgtgtcagaacccaaagc

SEQ ID NO: 17688 - DNA, 20 bp, synthetic construct
  source 1..20: mol_type = other DNA
tcacctgggtcactttgata

SEQ ID NO: 17689 - DNA, 20 bp, synthetic construct
  source 1..20: mol_type = other DNA
cctgcaacaaatgaaaaaga

SEQ ID NO: 17690 - DNA, 20 bp, synthetic construct
  source 1..20: mol_type = other DNA
gctgaagatgagggacagtt

SEQ ID NO: 17691 - DNA, 20 bp, synthetic construct
  source 1..20: mol_type = other DNA
accagtgttggcatgggctg

SEQ ID NO: 17692 - DNA, 20 bp, synthetic construct
  source 1..20: mol_type = other DNA
ccaaagctttctggatgtcc

SEQ ID NO: 17693 - DNA, 20 bp, synthetic construct
  source 1..20: mol_type = other DNA
cgtccttcatgagcccaatc

SEQ ID NO: 17694 - DNA, 20 bp, synthetic construct
  source 1..20: mol_type = other DNA
ggtcaagtcgtggtggcacc

SEQ ID NO: 17695 - DNA, 20 bp, synthetic construct
  source 1..20: mol_type = other DNA
gcaacgtgaagaagagctct

SEQ ID NO: 17696 - DNA, 20 bp, synthetic construct
  source 1..20: mol_type = other DNA
agccaggatgagttacagca

SEQ ID NO: 17697 - DNA, 20 bp, synthetic construct
  source 1..20: mol_type = other DNA
cgtatgacgaagtgaaagct

SEQ ID NO: 17698 - DNA, 20 bp, synthetic construct
  source 1..20: mol_type = other DNA
ccagcatgtggctgaagatg

SEQ ID NO: 17699 - DNA, 20 bp, synthetic construct
  source 1..20: mol_type = other DNA
ccaggacatccagaaagctt

SEQ ID NO: 17700 - DNA, 20 bp, synthetic construct
  source 1..20: mol_type = other DNA
cagagacaaccagccaaagg

SEQ ID NO: 17701 - DNA, 20 bp, synthetic construct
  source 1..20: mol_type = other DNA
cagaaattcattcacaaacc

SEQ ID NO: 17702 - DNA, 20 bp, synthetic construct
  source 1..20: mol_type = other DNA
ccagacgagtacagctcagc

SEQ ID NO: 17703 - DNA, 20 bp, synthetic construct
  source 1..20: mol_type = other DNA
ggagcaatgtgagggtgaag

SEQ ID NO: 17704 - DNA, 20 bp, synthetic construct
  source 1..20: mol_type = other DNA
cttaccaaaggtgctgctct

SEQ ID NO: 17705 - DNA, 20 bp, synthetic construct
  source 1..20: mol_type = other DNA
ggccatggcctgggcagggt

SEQ ID NO: 17706 - DNA, 20 bp, synthetic construct
  source 1..20: mol_type = other DNA
cggagatgctggtaggtatc

SEQ ID NO: 17707 - DNA, 20 bp, synthetic construct
  source 1..20: mol_type = other DNA
ctgtactcgtctgggtcagt

SEQ ID NO: 17708 - DNA, 20 bp, synthetic construct
  source 1..20: mol_type = other DNA
ctcttccaagcactgattga

SEQ ID NO: 17709 - DNA, 20 bp, synthetic construct
  source 1..20: mol_type = other DNA
agtgtcctacctgaaagagt

SEQ ID NO: 17710 - DNA, 20 bp, synthetic construct
  source 1..20: mol_type = other DNA
gtggtggtggtgcggctgga

SEQ ID NO: 17711 - DNA, 20 bp, synthetic construct
  source 1..20: mol_type = other DNA
acaagatagtacggagatgc

SEQ ID NO: 17712 - DNA, 20 bp, synthetic construct
  source 1..20: mol_type = other DNA
cagttctgggctggaggcca

SEQ ID NO: 17713 - DNA, 20 bp, synthetic construct
  source 1..20: mol_type = other DNA
tctgcaggaatcagaaggtc

SEQ ID NO: 17714 - DNA, 20 bp, synthetic construct
  source 1..20: mol_type = other DNA
ctcctttggctggttgtctc

SEQ ID NO: 17715 - DNA, 20 bp, synthetic construct
  source 1..20: mol_type = other DNA
catgaggttctcgatctcac

SEQ ID NO: 17716 - DNA, 20 bp, synthetic construct
  source 1..20: mol_type = other DNA
gtgcacatgaggtgtccaca

SEQ ID NO: 17717 - DNA, 20 bp, synthetic construct
  source 1..20: mol_type = other DNA
agaccatatcaaagtgaccc

SEQ ID NO: 17718 - DNA, 20 bp, synthetic construct
  source 1..20: mol_type = other DNA
aatcagaatcctgatctgac

SEQ ID NO: 17719 - DNA, 20 bp, synthetic construct
  source 1..20: mol_type = other DNA
taagacaggatgtgcacatg

SEQ ID NO: 17720 - DNA, 20 bp, synthetic construct
  source 1..20: mol_type = other DNA
aggtcaagtcgtggtggcac

SEQ ID NO: 17721 - DNA, 20 bp, synthetic construct
  source 1..20: mol_type = other DNA
tctctggagggacagtcgcc

SEQ ID NO: 17722 - DNA, 20 bp, synthetic construct
  source 1..20: mol_type = other DNA
tacctgccaggatgtaagac

SEQ ID NO: 17723 - DNA, 20 bp, synthetic construct
  source 1..20: mol_type = other DNA
cctcatcttcagccacatgc

SEQ ID NO: 17724 - DNA, 20 bp, synthetic construct
  source 1..20: mol_type = other DNA
tccccaggacaatagtccct

SEQ ID NO: 17725 - DNA, 20 bp, synthetic construct
  source 1..20: mol_type = other DNA
tctcgaagtgtgggaggtac

SEQ ID NO: 17726 - DNA, 20 bp, synthetic construct
  source 1..20: mol_type = other DNA
gggggctgaggtggtggtgg

SEQ ID NO: 17727 - DNA, 20 bp, synthetic construct
  source 1..20: mol_type = other DNA
agcaggtctaagatataagg

SEQ ID NO: 17728 - DNA, 20 bp, synthetic construct
  source 1..20: mol_type = other DNA
ataaatggcattggcagatg

SEQ ID NO: 17729 - DNA, 20 bp, synthetic construct
  source 1..20: mol_type = other DNA
gttccaattcctgagcaaag

SEQ ID NO: 17730 - DNA, 20 bp, synthetic construct
  source 1..20: mol_type = other DNA
tgtgcacatgaggtgtccac

SEQ ID NO: 17731 - DNA, 20 bp, synthetic construct
  source 1..20: mol_type = other DNA
gggtcactttgatatggtct

SEQ ID NO: 17732 - DNA, 20 bp, synthetic construct
  source 1..20: mol_type = other DNA
aggagtacccctgactcatg

SEQ ID NO: 17733 - DNA, 20 bp, synthetic construct
  source 1..20: mol_type = other DNA
ggcagctgtcagcaaggtag

SEQ ID NO: 17734 - DNA, 20 bp, synthetic construct
  source 1..20: mol_type = other DNA
tgcccagaacaacatcgaga

SEQ ID NO: 17735 - DNA, 20 bp, synthetic construct
  source 1..20: mol_type = other DNA
ctgtaaagagtaaccaaccc

SEQ ID NO: 17736 - DNA, 20 bp, synthetic construct
  source 1..20: mol_type = other DNA
gattactaaagcagatgctg

SEQ ID NO: 17737 - DNA, 20 bp, synthetic construct
  source 1..20: mol_type = other DNA
tattttacatagttggaatg

SEQ ID NO: 17738 - DNA, 20 bp, synthetic construct
  source 1..20: mol_type = other DNA
gctgtactcgtctgggtcag

SEQ ID NO: 17739 - DNA, 20 bp, synthetic construct
  source 1..20: mol_type = other DNA
ggtcactttgatatggtctt

SEQ ID NO: 17740 - DNA, 20 bp, synthetic construct
  source 1..20: mol_type = other DNA
gcacatcctgtcttacatcc

SEQ ID NO: 17741 - DNA, 20 bp, synthetic construct
  source 1..20: mol_type = other DNA
tgccggccatggcctgggca

SEQ ID NO: 17742 - DNA, 20 bp, synthetic construct
  source 1..20: mol_type = other DNA
ctgcaacaaatgaaaaagaa

SEQ ID NO: 17743 - DNA, 20 bp, synthetic construct
  source 1..20: mol_type = other DNA
ctgcaggaatcagaaggtca

SEQ ID NO: 17744 - DNA, 20 bp, synthetic construct
  source 1..20: mol_type = other DNA
gtcaagtcgtggtggcaccg

SEQ ID NO: 17745 - DNA, 20 bp, synthetic construct
  source 1..20: mol_type = other DNA
caaccagccaaaggaggagc

SEQ ID NO: 17746 - DNA, 20 bp, synthetic construct
  source 1..20: mol_type = other DNA
tgctaggtagctacatgggc

SEQ ID NO: 17747 - DNA, 20 bp, synthetic construct
  source 1..20: mol_type = other DNA
cccttggaagagctttcgac

SEQ ID NO: 17748 - DNA, 20 bp, synthetic construct
  source 1..20: mol_type = other DNA
ggtagcaggtctaagatata

SEQ ID NO: 17749 - DNA, 20 bp, synthetic construct
  source 1..20: mol_type = other DNA
ggggcagccatgagtctcca

SEQ ID NO: 17750 - DNA, 20 bp, synthetic construct
  source 1..20: mol_type = other DNA
agaattctcagcctaggtaa

SEQ ID NO: 17751 - DNA, 20 bp, synthetic construct
  source 1..20: mol_type = other DNA
gcagccatgagtctccaagg

SEQ ID NO: 17752 - DNA, 20 bp, synthetic construct
  source 1..20: mol_type = other DNA
tcaatcagtgcttggaagag

SEQ ID NO: 17753 - DNA, 20 bp, synthetic construct
  source 1..20: mol_type = other DNA
gtgaacctaccgtgaactct

SEQ ID NO: 17754 - DNA, 20 bp, synthetic construct
  source 1..20: mol_type = other DNA
caccatctgggccacctgga

SEQ ID NO: 17755 - DNA, 20 bp, synthetic construct
  source 1..20: mol_type = other DNA
cttgctcactgctgctcctc

SEQ ID NO: 17756 - DNA, 20 bp, synthetic construct
  source 1..20: mol_type = other DNA
cgcagcagcggacgcaggcc

SEQ ID NO: 17757 - DNA, 20 bp, synthetic construct
  source 1..20: mol_type = other DNA
agtcgcctatggggagaagg

SEQ ID NO: 17758 - DNA, 20 bp, synthetic construct
  source 1..20: mol_type = other DNA
tggggtggtcctggcccaga

SEQ ID NO: 17759 - DNA, 20 bp, synthetic construct
  source 1..20: mol_type = other DNA
gagcctcttgaaatagatat

SEQ ID NO: 17760 - DNA, 20 bp, synthetic construct
  source 1..20: mol_type = other DNA
gtcgagcctgtcagctgtcc

SEQ ID NO: 17761 - DNA, 20 bp, synthetic construct
  source 1..20: mol_type = other DNA
ttcttcagtagctactctgt

SEQ ID NO: 17762 - DNA, 20 bp, synthetic construct
  source 1..20: mol_type = other DNA
tcttgatacaggtttaattc

SEQ ID NO: 17763 - DNA, 20 bp, synthetic construct
  source 1..20: mol_type = other DNA
aagctggctacaaatttaca

SEQ ID NO: 17764 - DNA, 20 bp, synthetic construct
  source 1..20: mol_type = other DNA
ctgtcagctgtccaggtgcg

SEQ ID NO: 17765 - DNA, 20 bp, synthetic construct
  source 1..20: mol_type = other DNA
agcagggaacaaagtcagca

SEQ ID NO: 17766 - DNA, 20 bp, synthetic construct
  source 1..20: mol_type = other DNA
ctgacctgtgaggtaatgaa

SEQ ID NO: 17767 - DNA, 20 bp, synthetic construct
  source 1..20: mol_type = other DNA
atacaagtccaggagatctt

SEQ ID NO: 17768 - DNA, 20 bp, synthetic construct
  source 1..20: mol_type = other DNA
cacgcacctggacagctgac

SEQ ID NO: 17769 - DNA, 20 bp, synthetic construct
  source 1..20: mol_type = other DNA
gtgccacaaagaccatcaag

SEQ ID NO: 17770 - DNA, 20 bp, synthetic construct
  source 1..20: mol_type = other DNA
ctcatcattggcatatgtgg

SEQ ID NO: 17771 - DNA, 20 bp, synthetic construct
  source 1..20: mol_type = other DNA
agagggtcatcacacacaag

SEQ ID NO: 17772 - DNA, 20 bp, synthetic construct
  source 1..20: mol_type = other DNA
tctgcaaaaggaagagaagt

SEQ ID NO: 17773 - DNA, 20 bp, synthetic construct
  source 1..20: mol_type = other DNA
acagctgacaggctcgacac

SEQ ID NO: 17774 - DNA, 20 bp, synthetic construct
  source 1..20: mol_type = other DNA
caagttgatgtcctgaccca

SEQ ID NO: 17775 - DNA, 20 bp, synthetic construct
  source 1..20: mol_type = other DNA
cagctgtccaggtgcgtggc

SEQ ID NO: 17776 - DNA, 20 bp, synthetic construct
  source 1..20: mol_type = other DNA
tacatggaaagctcatctta

SEQ ID NO: 17777 - DNA, 20 bp, synthetic construct
  source 1..20: mol_type = other DNA
ttacatggaaagctcatctt

SEQ ID NO: 17778 - DNA, 20 bp, synthetic construct
  source 1..20: mol_type = other DNA
cgatgatcaggatatctaca

SEQ ID NO: 17779 - DNA, 20 bp, synthetic construct
  source 1..20: mol_type = other DNA
ctggacatctatctcatcat

SEQ ID NO: 17780 - DNA, 20 bp, synthetic construct
  source 1..20: mol_type = other DNA
tcatcactcatttgaaaact

SEQ ID NO: 17781 - DNA, 20 bp, synthetic construct
  source 1..20: mol_type = other DNA
agttccattcattacctcac

SEQ ID NO: 17782 - DNA, 20 bp, synthetic construct
  source 1..20: mol_type = other DNA
aacatctaaaactttctcag

SEQ ID NO: 17783 - DNA, 20 bp, synthetic construct
  source 1..20: mol_type = other DNA
atcattggcatatgtggagg

SEQ ID NO: 17784 - DNA, 20 bp, synthetic construct
  source 1..20: mol_type = other DNA
gtcctgacccaaggcacccc

SEQ ID NO: 17785 - DNA, 20 bp, synthetic construct
  source 1..20: mol_type = other DNA
caaaaggaagagaagtggga

SEQ ID NO: 17786 - DNA, 20 bp, synthetic construct
  source 1..20: mol_type = other DNA
ttcagcaccagcctcagaag

SEQ ID NO: 17787 - DNA, 20 bp, synthetic construct
  source 1..20: mol_type = other DNA
ggaaagctcatcttaggggt

SEQ ID NO: 17788 - DNA, 20 bp, synthetic construct
  source 1..20: mol_type = other DNA
cttgggtcaggacatcaact

SEQ ID NO: 17789 - DNA, 20 bp, synthetic construct
  source 1..20: mol_type = other DNA
attcattacctcacaggtca

SEQ ID NO: 17790 - DNA, 20 bp, synthetic construct
  source 1..20: mol_type = other DNA
cattcattacctcacaggtc

SEQ ID NO: 17791 - DNA, 20 bp, synthetic construct
  source 1..20: mol_type = other DNA
ctctgcaaaaggaagagaag

SEQ ID NO: 17792 - DNA, 20 bp, synthetic construct
  source 1..20: mol_type = other DNA
cagcctcttgatggtctttg

SEQ ID NO: 17793 - DNA, 20 bp, synthetic construct
  source 1..20: mol_type = other DNA
acttgtgtgcccgacggagc

SEQ ID NO: 17794 - DNA, 20 bp, synthetic construct
  source 1..20: mol_type = other DNA
atgatattgacgatataaaa

SEQ ID NO: 17795 - DNA, 20 bp, synthetic construct
  source 1..20: mol_type = other DNA
tcagctgtccaggtgcgtgg

SEQ ID NO: 17796 - DNA, 20 bp, synthetic construct
  source 1..20: mol_type = other DNA
attgaaaatcagaaggaagc

SEQ ID NO: 17797 - DNA, 20 bp, synthetic construct
  source 1..20: mol_type = other DNA
tatctcatcattggcatatg

SEQ ID NO: 17798 - DNA, 20 bp, synthetic construct
  source 1..20: mol_type = other DNA
tttcttcagtagctactctg

SEQ ID NO: 17799 - DNA, 20 bp, synthetic construct
  source 1..20: mol_type = other DNA
caaggcaccccaggtttcca

SEQ ID NO: 17800 - DNA, 20 bp, synthetic construct
  source 1..20: mol_type = other DNA
aaacagaggagtcggagaaa

SEQ ID NO: 17801 - DNA, 20 bp, synthetic construct
  source 1..20: mol_type = other DNA
acatggaaagctcatcttag

SEQ ID NO: 17802 - DNA, 20 bp, synthetic construct
  source 1..20: mol_type = other DNA
acgaatgccttggaaacctg

SEQ ID NO: 17803 - DNA, 20 bp, synthetic construct
  source 1..20: mol_type = other DNA
cttgtagatatcctgatcat

SEQ ID NO: 17804 - DNA, 20 bp, synthetic construct
  source 1..20: mol_type = other DNA
aaaggaaaaaacagaggagt

SEQ ID NO: 17805 - DNA, 20 bp, synthetic construct
  source 1..20: mol_type = other DNA
caacacaaccctgacctgtg

SEQ ID NO: 17806 - DNA, 20 bp, synthetic construct
  source 1..20: mol_type = other DNA
tggaggaggcagcctcttga

SEQ ID NO: 17807 - DNA, 20 bp, synthetic construct
  source 1..20: mol_type = other DNA
cttgatacaggtttaattcg

SEQ ID NO: 17808 - DNA, 20 bp, synthetic construct
  source 1..20: mol_type = other DNA
accggctttccccccatctc

SEQ ID NO: 17809 - DNA, 20 bp, synthetic construct
  source 1..20: mol_type = other DNA
tcccaaactctgctacctgc

SEQ ID NO: 17810 - DNA, 20 bp, synthetic construct
  source 1..20: mol_type = other DNA
cattgtacaggccttcctga

SEQ ID NO: 17811 - DNA, 20 bp, synthetic construct
  source 1..20: mol_type = other DNA
ggaactgcagaaagataaga

SEQ ID NO: 17812 - DNA, 20 bp, synthetic construct
  source 1..20: mol_type = other DNA
gggcagggcctgcatgtgaa

SEQ ID NO: 17813 - DNA, 20 bp, synthetic construct
  source 1..20: mol_type = other DNA
ggggcagggcctgcatgtga

SEQ ID NO: 17814 - DNA, 20 bp, synthetic construct
  source 1..20: mol_type = other DNA
tctgtgccaagagataaagc

SEQ ID NO: 17815 - DNA, 20 bp, synthetic construct
  source 1..20: mol_type = other DNA
gaatgacaccatagatgaag

SEQ ID NO: 17816 - DNA, 20 bp, synthetic construct
  source 1..20: mol_type = other DNA
gctgacttacgttatagagc

SEQ ID NO: 17817 - DNA, 20 bp, synthetic construct
  source 1..20: mol_type = other DNA
ggcacagagctttggcctgc

SEQ ID NO: 17818 - DNA, 20 bp, synthetic construct
  source 1..20: mol_type = other DNA
accagcgccggaggggcaag

SEQ ID NO: 17819 - DNA, 20 bp, synthetic construct
  source 1..20: mol_type = other DNA
ctgccccctcgctaacagcc

SEQ ID NO: 17820 - DNA, 20 bp, synthetic construct
  source 1..20: mol_type = other DNA
tctgcagttcctgcagaaga

SEQ ID NO: 17821 - DNA, 20 bp, synthetic construct
  source 1..20: mol_type = other DNA
tgccccctcgctaacagcca

SEQ ID NO: 17822 - DNA, 20 bp, synthetic construct
  source 1..20: mol_type = other DNA
agttcctgcagaagagggcg

SEQ ID NO: 17823 - DNA, 20 bp, synthetic construct
  source 1..20: mol_type = other DNA
agcagagtttgggatccagc

SEQ ID NO: 17824 - DNA, 20 bp, synthetic construct
  source 1..20: mol_type = other DNA
aaccagcgccggaggggcaa

SEQ ID NO: 17825 - DNA, 20 bp, synthetic construct
  source 1..20: mol_type = other DNA
gagtgaaggtgggtaccact

SEQ ID NO: 17826 - DNA, 20 bp, synthetic construct
  source 1..20: mol_type = other DNA
agagtgaaggtgggtaccac

SEQ ID NO: 17827 - DNA, 20 bp, synthetic construct
  source 1..20: mol_type = other DNA
ctggccctgctggtacgcgg

SEQ ID NO: 17828 - DNA, 20 bp, synthetic construct
  source 1..20: mol_type = other DNA
taatcggcaactgtgcctgc

SEQ ID NO: 17829 - DNA, 20 bp, synthetic construct
  source 1..20: mol_type = other DNA
ggcctgtacaatgtgagtag

SEQ ID NO: 17830 - DNA, 20 bp, synthetic construct
  source 1..20: mol_type = other DNA
ttgttcctgagagtgaaggt

SEQ ID NO: 17831 - DNA, 20 bp, synthetic construct
  source 1..20: mol_type = other DNA
caaccagcgccggaggggca

SEQ ID NO: 17832 - DNA, 20 bp, synthetic construct
  source 1..20: mol_type = other DNA
ctgcatgtgaagggcgtcgt

SEQ ID NO: 17833 - DNA, 20 bp, synthetic construct
  source 1..20: mol_type = other DNA
caggcacagttgccgattac

SEQ ID NO: 17834 - DNA, 20 bp, synthetic construct
  source 1..20: mol_type = other DNA
gccccctcgctaacagccag

SEQ ID NO: 17835 - DNA, 20 bp, synthetic construct
  source 1..20: mol_type = other DNA
aaactctgctacctgctgga

SEQ ID NO: 17836 - DNA, 20 bp, synthetic construct
  source 1..20: mol_type = other DNA
tgagattgggatgaaaggcg

SEQ ID NO: 17837 - DNA, 20 bp, synthetic construct
  source 1..20: mol_type = other DNA
ctgttataggagctcaatct

SEQ ID NO: 17838 - DNA, 20 bp, synthetic construct
  source 1..20: mol_type = other DNA
agaaggaagaaccctcagga

SEQ ID NO: 17839 - DNA, 20 bp, synthetic construct
  source 1..20: mol_type = other DNA
tggtacccaccttcactctc

SEQ ID NO: 17840 - DNA, 20 bp, synthetic construct
  source 1..20: mol_type = other DNA
ttacgttatagagctggttc

SEQ ID NO: 17841 - DNA, 20 bp, synthetic construct
  source 1..20: mol_type = other DNA
ttctctgctaggaaagacaa

SEQ ID NO: 17842 - DNA, 20 bp, synthetic construct
  source 1..20: mol_type = other DNA
acattgtacaggccttcctg

SEQ ID NO: 17843 - DNA, 20 bp, synthetic construct
  source 1..20: mol_type = other DNA
ctttaccaggtaggagctgc

SEQ ID NO: 17844 - DNA, 20 bp, synthetic construct
  source 1..20: mol_type = other DNA
cggaggggcaaggggcacga

SEQ ID NO: 17845 - DNA, 20 bp, synthetic construct
  source 1..20: mol_type = other DNA
acagttgccgattacaggta

SEQ ID NO: 17846 - DNA, 20 bp, synthetic construct
  source 1..20: mol_type = other DNA
ccggctttccccccatctca

SEQ ID NO: 17847 - DNA, 20 bp, synthetic construct
  source 1..20: mol_type = other DNA
cacagttgccgattacaggt

SEQ ID NO: 17848 - DNA, 20 bp, synthetic construct
  source 1..20: mol_type = other DNA
atccagcaggtagcagagtt

SEQ ID NO: 17849 - DNA, 20 bp, synthetic construct
  source 1..20: mol_type = other DNA
gctcaatctaggacgaagag

SEQ ID NO: 17850 - DNA, 20 bp, synthetic construct
  source 1..20: mol_type = other DNA
tgccttgttcctgagagtga

SEQ ID NO: 17851 - DNA, 20 bp, synthetic construct
  source 1..20: mol_type = other DNA
ctcctctactcacattgtac

SEQ ID NO: 17852 - DNA, 20 bp, synthetic construct
  source 1..20: mol_type = other DNA
ccaaacaaccagcgccggag

SEQ ID NO: 17853 - DNA, 20 bp, synthetic construct
  source 1..20: mol_type = other DNA
tttcaccgcggccatcctgc

SEQ ID NO: 17854 - DNA, 20 bp, synthetic construct
  source 1..20: mol_type = other DNA
gacgcccccgcgtaccagca

SEQ ID NO: 17855 - DNA, 20 bp, synthetic construct
  source 1..20: mol_type = other DNA
tgaagaggattccatccagc

SEQ ID NO: 17856 - DNA, 20 bp, synthetic construct
  source 1..20: mol_type = other DNA
gcagagaaggaagaaccctc

SEQ ID NO: 17857 - DNA, 20 bp, synthetic construct
  source 1..20: mol_type = other DNA
tccagcaggtagcagagttt

SEQ ID NO: 17858 - DNA, 20 bp, synthetic construct
  source 1..20: mol_type = other DNA
caccttcactctcaggaaca

SEQ ID NO: 17859 - DNA, 20 bp, synthetic construct
  source 1..20: mol_type = other DNA
ccctgagatggggggaaagc

SEQ ID NO: 17860 - DNA, 20 bp, synthetic construct
  source 1..20: mol_type = other DNA
ggcacagaggcacagagctt

SEQ ID NO: 17861 - DNA, 20 bp, synthetic construct
  source 1..20: mol_type = other DNA
actgcagaaagataagatgg

SEQ ID NO: 17862 - DNA, 20 bp, synthetic construct
  source 1..20: mol_type = other DNA
cggaggcctacagtgagatt

SEQ ID NO: 17863 - DNA, 20 bp, synthetic construct
  source 1..20: mol_type = other DNA
gcagaaagataagatggcgg

SEQ ID NO: 17864 - DNA, 20 bp, synthetic construct
  source 1..20: mol_type = other DNA
cttggccagcagtgggggca

SEQ ID NO: 17865 - DNA, 20 bp, synthetic construct
  source 1..20: mol_type = other DNA
ctctcccttggatggtcggc

SEQ ID NO: 17866 - DNA, 20 bp, synthetic construct
  source 1..20: mol_type = other DNA
tggtgcaggggcaggaccgg

SEQ ID NO: 17867 - DNA, 20 bp, synthetic construct
  source 1..20: mol_type = other DNA
tctcccttggatggtcggcg

SEQ ID NO: 17868 - DNA, 20 bp, synthetic construct
  source 1..20: mol_type = other DNA
gtgccgacagctctcacagt

SEQ ID NO: 17869 - DNA, 20 bp, synthetic construct
  source 1..20: mol_type = other DNA
tctcttggaattggtggtgg

SEQ ID NO: 17870 - DNA, 20 bp, synthetic construct
  source 1..20: mol_type = other DNA
ttttgggtgctggtggtggt

SEQ ID NO: 17871 - DNA, 20 bp, synthetic construct
  source 1..20: mol_type = other DNA
ttcctacaatctcttctcaa

SEQ ID NO: 17872 - DNA, 20 bp, synthetic construct
  source 1..20: mol_type = other DNA
caccaaaatcttgtttcctg

SEQ ID NO: 17873 - DNA, 20 bp, synthetic construct
  source 1..20: mol_type = other DNA
ccctgaaaaacaaaatagag

SEQ ID NO: 17874 - DNA, 20 bp, synthetic construct
  source 1..20: mol_type = other DNA
tcctgcaggtgaggagtaag

SEQ ID NO: 17875 - DNA, 20 bp, synthetic construct
  source 1..20: mol_type = other DNA
accaccaccagcacccaaaa

SEQ ID NO: 17876 - DNA, 20 bp, synthetic construct
  source 1..20: mol_type = other DNA
ttccgggcatcccttcacaa

SEQ ID NO: 17877 - DNA, 20 bp, synthetic construct
  source 1..20: mol_type = other DNA
gcttcaggtttactcaaaaa

SEQ ID NO: 17878 - DNA, 20 bp, synthetic construct
  source 1..20: mol_type = other DNA
ccaaaagggcttagaaggtc

SEQ ID NO: 17879 - DNA, 20 bp, synthetic construct
  source 1..20: mol_type = other DNA
ctagacaatgagaagagcaa

SEQ ID NO: 17880 - DNA, 20 bp, synthetic construct
  source 1..20: mol_type = other DNA
ggaaccattatccatgtgaa

SEQ ID NO: 17881 - DNA, 20 bp, synthetic construct
  source 1..20: mol_type = other DNA
gaaataggggacttggacaa

SEQ ID NO: 17882 - DNA, 20 bp, synthetic construct
  source 1..20: mol_type = other DNA
gcgtccgtgtcaggagcgat

SEQ ID NO: 17883 - DNA, 20 bp, synthetic construct
  source 1..20: mol_type = other DNA
caaaggactggatagtgctg

SEQ ID NO: 17884 - DNA, 20 bp, synthetic construct
  source 1..20: mol_type = other DNA
agcacccaaaagggcttaga

SEQ ID NO: 17885 - DNA, 20 bp, synthetic construct
  source 1..20: mol_type = other DNA
tcattgtctaggtaaggagg

SEQ ID NO: 17886 - DNA, 20 bp, synthetic construct
  source 1..20: mol_type = other DNA
attgtcgtacgctacaagca

SEQ ID NO: 17887 - DNA, 20 bp, synthetic construct
  source 1..20: mol_type = other DNA
gttgtatgttacctttcaca

SEQ ID NO: 17888 - DNA, 20 bp, synthetic construct
  source 1..20: mol_type = other DNA
cttcaggtttactcaaaaac

SEQ ID NO: 17889 - DNA, 20 bp, synthetic construct
  source 1..20: mol_type = other DNA
aacatgactccccgccgccc

SEQ ID NO: 17890 - DNA, 20 bp, synthetic construct
  source 1..20: mol_type = other DNA
tgtaggaatacttgcagcta

SEQ ID NO: 17891 - DNA, 20 bp, synthetic construct
  source 1..20: mol_type = other DNA
tgttcatgtagtcactgtgc

SEQ ID NO: 17892 - DNA, 20 bp, synthetic construct
  source 1..20: mol_type = other DNA
aggctgcgaagtcgcgtggt

SEQ ID NO: 17893 - DNA, 20 bp, synthetic construct
  source 1..20: mol_type = other DNA
taagcccttttgggtgctgg

SEQ ID NO: 17894 - DNA, 20 bp, synthetic construct
  source 1..20: mol_type = other DNA
tggaagtctgtgttgtatat

SEQ ID NO: 17895 - DNA, 20 bp, synthetic construct
  source 1..20: mol_type = other DNA
attcctacaatctcttctca

SEQ ID NO: 17896 - DNA, 20 bp, synthetic construct
  source 1..20: mol_type = other DNA
ggttaacatacaaattctgg

SEQ ID NO: 17897 - DNA, 20 bp, synthetic construct
  source 1..20: mol_type = other DNA
ctagcaagctatagcaagcc

SEQ ID NO: 17898 - DNA, 20 bp, synthetic construct
  source 1..20: mol_type = other DNA
gtggaagtctgtgttgtata

SEQ ID NO: 17899 - DNA, 20 bp, synthetic construct
  source 1..20: mol_type = other DNA
caaaagggcttagaaggtcc

SEQ ID NO: 17900 - DNA, 20 bp, synthetic construct
  source 1..20: mol_type = other DNA
ggctgcgaagtcgcgtggtg

SEQ ID NO: 17901 - DNA, 20 bp, synthetic construct
  source 1..20: mol_type = other DNA
aaccaccaccagcacccaaa

SEQ ID NO: 17902 - DNA, 20 bp, synthetic construct
  source 1..20: mol_type = other DNA
gttacctttcacatggataa

SEQ ID NO: 17903 - DNA, 20 bp, synthetic construct
  source 1..20: mol_type = other DNA
ccccttagggcacatgatca

SEQ ID NO: 17904 - DNA, 20 bp, synthetic construct
  source 1..20: mol_type = other DNA
ttcaccaaaatcttgtttcc

SEQ ID NO: 17905 - DNA, 20 bp, synthetic construct
  source 1..20: mol_type = other DNA
ttctcattgtctaggtaagg

SEQ ID NO: 17906 - DNA, 20 bp, synthetic construct
  source 1..20: mol_type = other DNA
ttagaaggtccgggaaatag

SEQ ID NO: 17907 - DNA, 20 bp, synthetic construct
  source 1..20: mol_type = other DNA
accaaaatcttgtttcctgg

SEQ ID NO: 17908 - DNA, 20 bp, synthetic construct
  source 1..20: mol_type = other DNA
tgtccaagtcccctatttcc

SEQ ID NO: 17909 - DNA, 20 bp, synthetic construct
  source 1..20: mol_type = other DNA
ggtccgggaaataggggact

SEQ ID NO: 17910 - DNA, 20 bp, synthetic construct
  source 1..20: mol_type = other DNA
tcttacccagaaaataataa

SEQ ID NO: 17911 - DNA, 20 bp, synthetic construct
  source 1..20: mol_type = other DNA
gaattactcccagcagcttc

SEQ ID NO: 17912 - DNA, 20 bp, synthetic construct
  source 1..20: mol_type = other DNA
catagggctggtaatgcttg

SEQ ID NO: 17913 - DNA, 20 bp, synthetic construct
  source 1..20: mol_type = other DNA
ttcaggtttactcaaaaacg

SEQ ID NO: 17914 - DNA, 20 bp, synthetic construct
  source 1..20: mol_type = other DNA
ctcttctcattgtctaggta

SEQ ID NO: 17915 - DNA, 20 bp, synthetic construct
  source 1..20: mol_type = other DNA
aggtgaggagtaagaggagc

SEQ ID NO: 17916 - DNA, 20 bp, synthetic construct
  source 1..20: mol_type = other DNA
tgcagaagtaaatatctgtt

SEQ ID NO: 17917 - DNA, 20 bp, synthetic construct
  source 1..20: mol_type = other DNA
ctcccttgagaagagattgt

SEQ ID NO: 17918 - DNA, 20 bp, synthetic construct
  source 1..20: mol_type = other DNA
cattgctcttctcattgtct

SEQ ID NO: 17919 - DNA, 20 bp, synthetic construct
  source 1..20: mol_type = other DNA
gcttgtagcgtacgacaatg

SEQ ID NO: 17920 - DNA, 20 bp, synthetic construct
  source 1..20: mol_type = other DNA
tcaccaaaatcttgtttcct

SEQ ID NO: 17921 - DNA, 20 bp, synthetic construct
  source 1..20: mol_type = other DNA
tcccccaggaaacaagattt

SEQ ID NO: 17922 - DNA, 20 bp, synthetic construct
  source 1..20: mol_type = other DNA
actatccagtcctttgtgaa

SEQ ID NO: 17923 - DNA, 20 bp, synthetic construct
  source 1..20: mol_type = other DNA
ttctaagcccttttgggtgc

SEQ ID NO: 17924 - DNA, 20 bp, synthetic construct
  source 1..20: mol_type = other DNA
ctgagagtctccgtcatcca

SEQ ID NO: 17925 - DNA, 20 bp, synthetic construct
  source 1..20: mol_type = other DNA
cactatccagtcctttgtga

SEQ ID NO: 17926 - DNA, 20 bp, synthetic construct
  source 1..20: mol_type = other DNA
aaaacggggttcaactgtga

SEQ ID NO: 17927 - DNA, 20 bp, synthetic construct
  source 1..20: mol_type = other DNA
atctcttctcaagggagttc

SEQ ID NO: 17928 - DNA, 20 bp, synthetic construct
  source 1..20: mol_type = other DNA
ctatagcttgctagtaacag

SEQ ID NO: 17929 - DNA, 20 bp, synthetic construct
  source 1..20: mol_type = other DNA
acatgactccccgccgcccc

SEQ ID NO: 17930 - DNA, 20 bp, synthetic construct
  source 1..20: mol_type = other DNA
ggcatcccttcacaaaggac

SEQ ID NO: 17931 - DNA, 20 bp, synthetic construct
  source 1..20: mol_type = other DNA
gcagcctatcgctcctgaca

SEQ ID NO: 17932 - DNA, 20 bp, synthetic construct
  source 1..20: mol_type = other DNA
gttcaactgtgatgggaaat

SEQ ID NO: 17933 - DNA, 20 bp, synthetic construct
  source 1..20: mol_type = other DNA
tcatctgcggagaaagggga

SEQ ID NO: 17934 - DNA, 20 bp, synthetic construct
  source 1..20: mol_type = other DNA
caccaaccccgaggagaccg

SEQ ID NO: 17935 - DNA, 20 bp, synthetic construct
  source 1..20: mol_type = other DNA
gtgggcatttgcctgggcgt

SEQ ID NO: 17936 - DNA, 20 bp, synthetic construct
  source 1..20: mol_type = other DNA
ctgatcgctgacggcggcgg

SEQ ID NO: 17937 - DNA, 20 bp, synthetic construct
  source 1..20: mol_type = other DNA
tacagcgcagggcactccgc

SEQ ID NO: 17938 - DNA, 20 bp, synthetic construct
  source 1..20: mol_type = other DNA
caaggtaaggctactccagg

SEQ ID NO: 17939 - DNA, 20 bp, synthetic construct
  source 1..20: mol_type = other DNA
gctctcagacattacaagac

SEQ ID NO: 17940 - DNA, 20 bp, synthetic construct
  source 1..20: mol_type = other DNA
tccctctacccatgtgatgc

SEQ ID NO: 17941 - DNA, 20 bp, synthetic construct
  source 1..20: mol_type = other DNA
tacacctatatattcctcgt

SEQ ID NO: 17942 - DNA, 20 bp, synthetic construct
  source 1..20: mol_type = other DNA
agtgacaatgatgccagcca

SEQ ID NO: 17943 - DNA, 20 bp, synthetic construct
  source 1..20: mol_type = other DNA
tcctctataggtatcttgaa

SEQ ID NO: 17944 - DNA, 20 bp, synthetic construct
  source 1..20: mol_type = other DNA
gacaatgatgccagccacgg

SEQ ID NO: 17945 - DNA, 20 bp, synthetic construct
  source 1..20: mol_type = other DNA
gtgccagagctgtgtggagc

SEQ ID NO: 17946 - DNA, 20 bp, synthetic construct
  source 1..20: mol_type = other DNA
ttgcaataccagcatcacat

SEQ ID NO: 17947 - DNA, 20 bp, synthetic construct
  source 1..20: mol_type = other DNA
catcacatgggtagagggaa

SEQ ID NO: 17948 - DNA, 20 bp, synthetic construct
  source 1..20: mol_type = other DNA
tcgcaaggtaaggctactcc

SEQ ID NO: 17949 - DNA, 20 bp, synthetic construct
  source 1..20: mol_type = other DNA
tgccactctgctccttgctt

SEQ ID NO: 17950 - DNA, 20 bp, synthetic construct
  source 1..20: mol_type = other DNA
gaaggctgtctgggggttag

SEQ ID NO: 17951 - DNA, 20 bp, synthetic construct
  source 1..20: mol_type = other DNA
cctctataggtatcttgaag

SEQ ID NO: 17952 - DNA, 20 bp, synthetic construct
  source 1..20: mol_type = other DNA
acttcgataatgaacttgca

SEQ ID NO: 17953 - DNA, 20 bp, synthetic construct
  source 1..20: mol_type = other DNA
accagcatcacatgggtaga

SEQ ID NO: 17954 - DNA, 20 bp, synthetic construct
  source 1..20: mol_type = other DNA
agagaagggtagccagtacc

SEQ ID NO: 17955 - DNA, 20 bp, synthetic construct
  source 1..20: mol_type = other DNA
cgaggaatatataggtgtaa

SEQ ID NO: 17956 - DNA, 20 bp, synthetic construct
  source 1..20: mol_type = other DNA
acatgggtagagggaacggt

SEQ ID NO: 17957 - DNA, 20 bp, synthetic construct
  source 1..20: mol_type = other DNA
tacccttctctcgcaaggta

SEQ ID NO: 17958 - DNA, 20 bp, synthetic construct
  source 1..20: mol_type = other DNA
tcccaaagcaaggagcagag

SEQ ID NO: 17959 - DNA, 20 bp, synthetic construct
  source 1..20: mol_type = other DNA
gacattacaagactggacct

SEQ ID NO: 17960 - DNA, 20 bp, synthetic construct
  source 1..20: mol_type = other DNA
ctctggcacactgtggggga

SEQ ID NO: 17961 - DNA, 20 bp, synthetic construct
  source 1..20: mol_type = other DNA
ggtccaggatgcgttttccc

SEQ ID NO: 17962 - DNA, 20 bp, synthetic construct
  source 1..20: mol_type = other DNA
ttacacctatatattcctcg

SEQ ID NO: 17963 - DNA, 20 bp, synthetic construct
  source 1..20: mol_type = other DNA
ttcctctataggtatcttga

SEQ ID NO: 17964 - DNA, 20 bp, synthetic construct
  source 1..20: mol_type = other DNA
tggacccacgaggaatatat

SEQ ID NO: 17965 - DNA, 20 bp, synthetic construct
  source 1..20: mol_type = other DNA
acacagctctggcacactgt

SEQ ID NO: 17966 - DNA, 20 bp, synthetic construct
  source 1..20: mol_type = other DNA
tgagactggaaggctgtctg

SEQ ID NO: 17967 - DNA, 20 bp, synthetic construct
  source 1..20: mol_type = other DNA
cacagtgtgccagagctgtg

SEQ ID NO: 17968 - DNA, 20 bp, synthetic construct
  source 1..20: mol_type = other DNA
ctgtcctcaagttcctctat

SEQ ID NO: 17969 - DNA, 20 bp, synthetic construct
  source 1..20: mol_type = other DNA
ccccttcaagatacctatag

SEQ ID NO: 17970 - DNA, 20 bp, synthetic construct
  source 1..20: mol_type = other DNA
aaacgcatcctggacccacg

SEQ ID NO: 17971 - DNA, 20 bp, synthetic construct
  source 1..20: mol_type = other DNA
gatccagctccacacagctc

SEQ ID NO: 17972 - DNA, 20 bp, synthetic construct
  source 1..20: mol_type = other DNA
gaggaatatataggtgtaat

SEQ ID NO: 17973 - DNA, 20 bp, synthetic construct
  source 1..20: mol_type = other DNA
ggagctggatccagccaccg

SEQ ID NO: 17974 - DNA, 20 bp, synthetic construct
  source 1..20: mol_type = other DNA
agccttaccttgcgagagaa

SEQ ID NO: 17975 - DNA, 20 bp, synthetic construct
  source 1..20: mol_type = other DNA
tctggcacactgtgggggaa

SEQ ID NO: 17976 - DNA, 20 bp, synthetic construct
  source 1..20: mol_type = other DNA
cacagctctggcacactgtg

SEQ ID NO: 17977 - DNA, 20 bp, synthetic construct
  source 1..20: mol_type = other DNA
tatatattcctcgtgggtcc

SEQ ID NO: 17978 - DNA, 20 bp, synthetic construct
  source 1..20: mol_type = other DNA
tagccttaccttgcgagaga

SEQ ID NO: 17979 - DNA, 20 bp, synthetic construct
  source 1..20: mol_type = other DNA
agcagaagactcccaaagca

SEQ ID NO: 17980 - DNA, 20 bp, synthetic construct
  source 1..20: mol_type = other DNA
gagactggaaggctgtctgg

SEQ ID NO: 17981 - DNA, 20 bp, synthetic construct
  source 1..20: mol_type = other DNA
tgctatgttccatctcccag

SEQ ID NO: 17982 - DNA, 20 bp, synthetic construct
  source 1..20: mol_type = other DNA
acagctctggcacactgtgg

SEQ ID NO: 17983 - DNA, 20 bp, synthetic construct
  source 1..20: mol_type = other DNA
atcttgaaggggctcactaa

SEQ ID NO: 17984 - DNA, 20 bp, synthetic construct
  source 1..20: mol_type = other DNA
gtttctctctggcctggtac

SEQ ID NO: 17985 - DNA, 20 bp, synthetic construct
  source 1..20: mol_type = other DNA
taccagcatcacatgggtag

SEQ ID NO: 17986 - DNA, 20 bp, synthetic construct
  source 1..20: mol_type = other DNA
cacacagctctggcacactg

SEQ ID NO: 17987 - DNA, 20 bp, synthetic construct
  source 1..20: mol_type = other DNA
cttgaaggggctcactaaag

SEQ ID NO: 17988 - DNA, 20 bp, synthetic construct
  source 1..20: mol_type = other DNA
tcttgaaggggctcactaaa

SEQ ID NO: 17989 - DNA, 20 bp, synthetic construct
  source 1..20: mol_type = other DNA
ggcacactgtgggggaaggg

SEQ ID NO: 17990 - DNA, 20 bp, synthetic construct
  source 1..20: mol_type = other DNA
ttatatgctggggagaaaga

SEQ ID NO: 17991 - DNA, 20 bp, synthetic construct
  source 1..20: mol_type = other DNA
agcccatccggaaaggccag

SEQ ID NO: 17992 - DNA, 20 bp, synthetic construct
  source 1..20: mol_type = other DNA
cagttctcacacactgtggg

SEQ ID NO: 17993 - DNA, 20 bp, synthetic construct
  source 1..20: mol_type = other DNA
cttctggtttgcttcctctg

SEQ ID NO: 17994 - DNA, 20 bp, synthetic construct
  source 1..20: mol_type = other DNA
ggagatggatgtgatgtcgg

SEQ ID NO: 17995 - DNA, 20 bp, synthetic construct
  source 1..20: mol_type = other DNA
tagtctgggttgggaacagg

SEQ ID NO: 17996 - DNA, 20 bp, synthetic construct
  source 1..20: mol_type = other DNA
ctgcctcttatcaggtgagt

SEQ ID NO: 17997 - DNA, 20 bp, synthetic construct
  source 1..20: mol_type = other DNA
atgcagttctcacacactgt

SEQ ID NO: 17998 - DNA, 20 bp, synthetic construct
  source 1..20: mol_type = other DNA
gatgtccactatgacaattg

SEQ ID NO: 17999 - DNA, 20 bp, synthetic construct
  source 1..20: mol_type = other DNA
atagtggacatctgcatcac

SEQ ID NO: 18000 - DNA, 20 bp, synthetic construct
  source 1..20: mol_type = other DNA
cactgggggcttgctgctgc

SEQ ID NO: 18001 - DNA, 20 bp, synthetic construct
  source 1..20: mol_type = other DNA
acacgaggagcgggtgctgg

SEQ ID NO: 18002 - DNA, 20 bp, synthetic construct
  source 1..20: mol_type = other DNA
cgaacttttatctctacctg

SEQ ID NO: 18003 - DNA, 20 bp, synthetic construct
  source 1..20: mol_type = other DNA
gggctgggggtgaaatagag

SEQ ID NO: 18004 - DNA, 20 bp, synthetic construct
  source 1..20: mol_type = other DNA
ccgactgcatctttgtttca

SEQ ID NO: 18005 - DNA, 20 bp, synthetic construct
  source 1..20: mol_type = other DNA
tatatgctggggagaaagaa

SEQ ID NO: 18006 - DNA, 20 bp, synthetic construct
  source 1..20: mol_type = other DNA
gtcccgctggcctttccgga

SEQ ID NO: 18007 - DNA, 20 bp, synthetic construct
  source 1..20: mol_type = other DNA
catcctactcacctgataag

SEQ ID NO: 18008 - DNA, 20 bp, synthetic construct
  source 1..20: mol_type = other DNA
tgccatagtatttcagatcc

SEQ ID NO: 18009 - DNA, 20 bp, synthetic construct
  source 1..20: mol_type = other DNA
gtggacatctgcatcactgg

SEQ ID NO: 18010 - DNA, 20 bp, synthetic construct
  source 1..20: mol_type = other DNA
tattactgtggttccagaga

SEQ ID NO: 18011 - DNA, 20 bp, synthetic construct
  source 1..20: mol_type = other DNA
caacacaatgataaaaacat

SEQ ID NO: 18012 - DNA, 20 bp, synthetic construct
  source 1..20: mol_type = other DNA
gctgggggtgaaatagagag

SEQ ID NO: 18013 - DNA, 20 bp, synthetic construct
  source 1..20: mol_type = other DNA
ggccagcgggacctgtattc

SEQ ID NO: 18014 - DNA, 20 bp, synthetic construct
  source 1..20: mol_type = other DNA
gttacctcatagtctgggtt

SEQ ID NO: 18015 - DNA, 20 bp, synthetic construct
  source 1..20: mol_type = other DNA
ctgagggcaagaggtaatcc

SEQ ID NO: 18016 - DNA, 20 bp, synthetic construct
  source 1..20: mol_type = other DNA
agggcatgtcaatattactg

SEQ ID NO: 18017 - DNA, 20 bp, synthetic construct
  source 1..20: mol_type = other DNA
ttgacatgccctcagtatcc

SEQ ID NO: 18018 - DNA, 20 bp, synthetic construct
  source 1..20: mol_type = other DNA
ttttgtcctgcggaggaagg

SEQ ID NO: 18019 - DNA, 20 bp, synthetic construct
  source 1..20: mol_type = other DNA
gcccatccggaaaggccagc

SEQ ID NO: 18020 - DNA, 20 bp, synthetic construct
  source 1..20: mol_type = other DNA
gtgacacgaggagcgggtgc

SEQ ID NO: 18021 - DNA, 20 bp, synthetic construct
  source 1..20: mol_type = other DNA
agatggagactttatatgct

SEQ ID NO: 18022 - DNA, 20 bp, synthetic construct
  source 1..20: mol_type = other DNA
cacaatgataaaaacatagg

SEQ ID NO: 18023 - DNA, 20 bp, synthetic construct
  source 1..20: mol_type = other DNA
ggctgggggtgaaatagaga

SEQ ID NO: 18024 - DNA, 20 bp, synthetic construct
  source 1..20: mol_type = other DNA
catgcagttctcacacactg

SEQ ID NO: 18025 - DNA, 20 bp, synthetic construct
  source 1..20: mol_type = other DNA
tttcagatccaggatactga

SEQ ID NO: 18026 - DNA, 20 bp, synthetic construct
  source 1..20: mol_type = other DNA
ctggattacctcttgccctc

SEQ ID NO: 18027 - DNA, 20 bp, synthetic construct
  source 1..20: mol_type = other DNA
tgcagttctcacacactgtg

SEQ ID NO: 18028 - DNA, 20 bp, synthetic construct
  source 1..20: mol_type = other DNA
gcatataaagtctccatctc

SEQ ID NO: 18029 - DNA, 20 bp, synthetic construct
  source 1..20: mol_type = other DNA
tcttctggtttgcttcctct

SEQ ID NO: 18030 - DNA, 20 bp, synthetic construct
  source 1..20: mol_type = other DNA
atttcagatccaggatactg

SEQ ID NO: 18031 - DNA, 20 bp, synthetic construct
  source 1..20: mol_type = other DNA
catggagatggatgtgatgt

SEQ ID NO: 18032 - DNA, 20 bp, synthetic construct
  source 1..20: mol_type = other DNA
tagtggacatctgcatcact

SEQ ID NO: 18033 - DNA, 20 bp, synthetic construct
  source 1..20: mol_type = other DNA
agatgcagtcgggcactcac

SEQ ID NO: 18034 - DNA, 20 bp, synthetic construct
  source 1..20: mol_type = other DNA
gcagttctcacacactgtgg

SEQ ID NO: 18035 - DNA, 20 bp, synthetic construct
  source 1..20: mol_type = other DNA
cacagtgtgtgagaactgca

SEQ ID NO: 18036 - DNA, 20 bp, synthetic construct
  source 1..20: mol_type = other DNA
actcacctgataagaggcag

SEQ ID NO: 18037 - DNA, 20 bp, synthetic construct
  source 1..20: mol_type = other DNA
tttgtcctgcggaggaagga

SEQ ID NO: 18038 - DNA, 20 bp, synthetic construct
  source 1..20: mol_type = other DNA
cgactgcatctttgtttcat

SEQ ID NO: 18039 - DNA, 20 bp, synthetic construct
  source 1..20: mol_type = other DNA
ccgcaggacaaaacaaggag

SEQ ID NO: 18040 - DNA, 20 bp, synthetic construct
  source 1..20: mol_type = other DNA
tatctctacctgagggcaag

SEQ ID NO: 18041 - DNA, 20 bp, synthetic construct
  source 1..20: mol_type = other DNA
tattatgtctgctaccccag

SEQ ID NO: 18042 - DNA, 20 bp, synthetic construct
  source 1..20: mol_type = other DNA
ctcacacactgtggggggtg

SEQ ID NO: 18043 - DNA, 20 bp, synthetic construct
  source 1..20: mol_type = other DNA
agtggacatctgcatcactg

SEQ ID NO: 18044 - DNA, 20 bp, synthetic construct
  source 1..20: mol_type = other DNA
attttctagttggcgtttgg

SEQ ID NO: 18045 - DNA, 20 bp, synthetic construct
  source 1..20: mol_type = other DNA
atcttctggtttgcttcctc

SEQ ID NO: 18046 - DNA, 20 bp, synthetic construct
  source 1..20: mol_type = other DNA
atcaggtgagtaggatggag

SEQ ID NO: 18047 - DNA, 20 bp, synthetic construct
  source 1..20: mol_type = other DNA
cgttacctcatagtctgggt

SEQ ID NO: 18048 - DNA, 20 bp, synthetic construct
  source 1..20: mol_type = other DNA
ctgaaaattccttcagtgac

SEQ ID NO: 18049 - DNA, 20 bp, synthetic construct
  source 1..20: mol_type = other DNA
tcatagtctgggttgggaac

SEQ ID NO: 18050 - DNA, 20 bp, synthetic construct
  source 1..20: mol_type = other DNA
gagatggagactttatatgc

SEQ ID NO: 18051 - DNA, 20 bp, synthetic construct
  source 1..20: mol_type = other DNA
ctcttatcaggtgagtagga

SEQ ID NO: 18052 - DNA, 20 bp, synthetic construct
  source 1..20: mol_type = other DNA
gatggagactttatatgctg

SEQ ID NO: 18053 - DNA, 20 bp, synthetic construct
  source 1..20: mol_type = other DNA
ccatgtcagtctctgtcctc

SEQ ID NO: 18054 - DNA, 20 bp, synthetic construct
  source 1..20: mol_type = other DNA
tgactatcaagaagatggtt

SEQ ID NO: 18055 - DNA, 20 bp, synthetic construct
  source 1..20: mol_type = other DNA
aaagagaaagccagatatgg

SEQ ID NO: 18056 - DNA, 20 bp, synthetic construct
  source 1..20: mol_type = other DNA
gactgacatggaacagggga

SEQ ID NO: 18057 - DNA, 20 bp, synthetic construct
  source 1..20: mol_type = other DNA
tctgacacactgtagggaaa

SEQ ID NO: 18058 - DNA, 20 bp, synthetic construct
  source 1..20: mol_type = other DNA
cagagactgacatggaacag

SEQ ID NO: 18059 - DNA, 20 bp, synthetic construct
  source 1..20: mol_type = other DNA
ttcaaggtaagggcctacta

SEQ ID NO: 18060 - DNA, 20 bp, synthetic construct
  source 1..20: mol_type = other DNA
cgagggatgtatcagtgtaa

SEQ ID NO: 18061 - DNA, 20 bp, synthetic construct
  source 1..20: mol_type = other DNA
catggaacaggggaagggcc

SEQ ID NO: 18062 - DNA, 20 bp, synthetic construct
  source 1..20: mol_type = other DNA
actttggcccagtcaatcaa

SEQ ID NO: 18063 - DNA, 20 bp, synthetic construct
  source 1..20: mol_type = other DNA
atgcagttctgacacactgt

SEQ ID NO: 18064 - DNA, 20 bp, synthetic construct
  source 1..20: mol_type = other DNA
actgacatggaacaggggaa

SEQ ID NO: 18065 - DNA, 20 bp, synthetic construct
  source 1..20: mol_type = other DNA
tcctgaaatgagaaaagccg

SEQ ID NO: 18066 - DNA, 20 bp, synthetic construct
  source 1..20: mol_type = other DNA
cttctgtaatacacttggag

SEQ ID NO: 18067 - DNA, 20 bp, synthetic construct
  source 1..20: mol_type = other DNA
tcaaggtaagggcctactag

SEQ ID NO: 18068 - DNA, 20 bp, synthetic construct
  source 1..20: mol_type = other DNA
ttacactgatacatccctcg

SEQ ID NO: 18069 - DNA, 20 bp, synthetic construct
  source 1..20: mol_type = other DNA
acatacttctgtaatacact

SEQ ID NO: 18070 - DNA, 20 bp, synthetic construct
  source 1..20: mol_type = other DNA
tgaagtagaccccaacagca

SEQ ID NO: 18071 - DNA, 20 bp, synthetic construct
  source 1..20: mol_type = other DNA
tgcagttctgacacactgta

SEQ ID NO: 18072 - DNA, 20 bp, synthetic construct
  source 1..20: mol_type = other DNA
atacatccctcgagggtcct

SEQ ID NO: 18073 - DNA, 20 bp, synthetic construct
  source 1..20: mol_type = other DNA
tggcccagtcaatcaaaggt

SEQ ID NO: 18074 - DNA, 20 bp, synthetic construct
  source 1..20: mol_type = other DNA
tcctaccattatgtacccaa

SEQ ID NO: 18075 - DNA, 20 bp, synthetic construct
  source 1..20: mol_type = other DNA
ttcaggaaaccacttggtta

SEQ ID NO: 18076 - DNA, 20 bp, synthetic construct
  source 1..20: mol_type = other DNA
tacactgatacatccctcga

SEQ ID NO: 18077 - DNA, 20 bp, synthetic construct
  source 1..20: mol_type = other DNA
agtcatacaccttaaccaag

SEQ ID NO: 18078 - DNA, 20 bp, synthetic construct
  source 1..20: mol_type = other DNA
agcaaagagaaagccagata

SEQ ID NO: 18079 - DNA, 20 bp, synthetic construct
  source 1..20: mol_type = other DNA
tggggcagggtgaggtggag

SEQ ID NO: 18080 - DNA, 20 bp, synthetic construct
  source 1..20: mol_type = other DNA
tgggtccttacccttgatgt

SEQ ID NO: 18081 - DNA, 20 bp, synthetic construct
  source 1..20: mol_type = other DNA
ggcaggtcttcttctcactg

SEQ ID NO: 18082 - DNA, 20 bp, synthetic construct
  source 1..20: mol_type = other DNA
ctggacagcgccaagcagag

SEQ ID NO: 18083 - DNA, 20 bp, synthetic construct
  source 1..20: mol_type = other DNA
accatgtgggcagaactgca

SEQ ID NO: 18084 - DNA, 20 bp, synthetic construct
  source 1..20: mol_type = other DNA
gtcaaaggtgatccaagact

SEQ ID NO: 18085 - DNA, 20 bp, synthetic construct
  source 1..20: mol_type = other DNA
ccagaagcaagtgcctaaaa

SEQ ID NO: 18086 - DNA, 20 bp, synthetic construct
  source 1..20: mol_type = other DNA
tcagtaaggatctgggagga

SEQ ID NO: 18087 - DNA, 20 bp, synthetic construct
  source 1..20: mol_type = other DNA
gctgtggtggcaggcggaga

SEQ ID NO: 18088 - DNA, 20 bp, synthetic construct
  source 1..20: mol_type = other DNA
ccagaaaaatttgacctgtg

SEQ ID NO: 18089 - DNA, 20 bp, synthetic construct
  source 1..20: mol_type = other DNA
cattgtggccttgccgaggg

SEQ ID NO: 18090 - DNA, 20 bp, synthetic construct
  source 1..20: mol_type = other DNA
agagccagcatactgaggca

SEQ ID NO: 18091 - DNA, 20 bp, synthetic construct
  source 1..20: mol_type = other DNA
cagcatagtctataagaaag

SEQ ID NO: 18092 - DNA, 20 bp, synthetic construct
  source 1..20: mol_type = other DNA
ggatgtgagtggggcaggtg

SEQ ID NO: 18093 - DNA, 20 bp, synthetic construct
  source 1..20: mol_type = other DNA
tgactcgggacaggtcctgc

SEQ ID NO: 18094 - DNA, 20 bp, synthetic construct
  source 1..20: mol_type = other DNA
cggatgtgagtggggcaggt

SEQ ID NO: 18095 - DNA, 20 bp, synthetic construct
  source 1..20: mol_type = other DNA
cagtgtctgctgagtgactc

SEQ ID NO: 18096 - DNA, 20 bp, synthetic construct
  source 1..20: mol_type = other DNA
gctccttcttaactaaaggt

SEQ ID NO: 18097 - DNA, 20 bp, synthetic construct
  source 1..20: mol_type = other DNA
ccaggaccctaagctccaga

SEQ ID NO: 18098 - DNA, 20 bp, synthetic construct
  source 1..20: mol_type = other DNA
aaccctacctttagttaaga

SEQ ID NO: 18099 - DNA, 20 bp, synthetic construct
  source 1..20: mol_type = other DNA
gcatactgaggcaaggcctg

SEQ ID NO: 18100 - DNA, 20 bp, synthetic construct
  source 1..20: mol_type = other DNA
ttgcctcagtatgctggctc

SEQ ID NO: 18101 - DNA, 20 bp, synthetic construct
  source 1..20: mol_type = other DNA
cttgcagaaccagaagaagg

SEQ ID NO: 18102 - DNA, 20 bp, synthetic construct
  source 1..20: mol_type = other DNA
tcagggaaagaaagtggtgc

SEQ ID NO: 18103 - DNA, 20 bp, synthetic construct
  source 1..20: mol_type = other DNA
ggttcattgtggccttgccg

SEQ ID NO: 18104 - DNA, 20 bp, synthetic construct
  source 1..20: mol_type = other DNA
actgccacatccccgcctca

SEQ ID NO: 18105 - DNA, 20 bp, synthetic construct
  source 1..20: mol_type = other DNA
tcggatgtgagtggggcagg

SEQ ID NO: 18106 - DNA, 20 bp, synthetic construct
  source 1..20: mol_type = other DNA
tctgagacatccgctctgct

SEQ ID NO: 18107 - DNA, 20 bp, synthetic construct
  source 1..20: mol_type = other DNA
gttcattgtggccttgccga

SEQ ID NO: 18108 - DNA, 20 bp, synthetic construct
  source 1..20: mol_type = other DNA
aaaggtgatccaagacttgg

SEQ ID NO: 18109 - DNA, 20 bp, synthetic construct
  source 1..20: mol_type = other DNA
cagtaaggatctgggaggag

SEQ ID NO: 18110 - DNA, 20 bp, synthetic construct
  source 1..20: mol_type = other DNA
ggtgatccaagacttggagg

SEQ ID NO: 18111 - DNA, 20 bp, synthetic construct
  source 1..20: mol_type = other DNA
gcagtgtctgctgagtgact

SEQ ID NO: 18112 - DNA, 20 bp, synthetic construct
  source 1..20: mol_type = other DNA
taagattctctcgaatctac

SEQ ID NO: 18113 - DNA, 20 bp, synthetic construct
  source 1..20: mol_type = other DNA
tccccttaggacactcacat

SEQ ID NO: 18114 - DNA, 20 bp, synthetic construct
  source 1..20: mol_type = other DNA
ggaggccgctgacctctgca

SEQ ID NO: 18115 - DNA, 20 bp, synthetic construct
  source 1..20: mol_type = other DNA
tccatggtgtccggagcgaa

SEQ ID NO: 18116 - DNA, 20 bp, synthetic construct
  source 1..20: mol_type = other DNA
gaagcaatatgtgtcatact

SEQ ID NO: 18117 - DNA, 20 bp, synthetic construct
  source 1..20: mol_type = other DNA
aatcaaagccaaggccaaga

SEQ ID NO: 18118 - DNA, 20 bp, synthetic construct
  source 1..20: mol_type = other DNA
tgaagcaatatgtgtcatac

SEQ ID NO: 18119 - DNA, 20 bp, synthetic construct
  source 1..20: mol_type = other DNA
ggcactcaccgatctgcgcc

SEQ ID NO: 18120 - DNA, 20 bp, synthetic construct
  source 1..20: mol_type = other DNA
gcaatatgtgtcatactggg

SEQ ID NO: 18121 - DNA, 20 bp, synthetic construct
  source 1..20: mol_type = other DNA
tgccaaaccactgttccttc

SEQ ID NO: 18122 - DNA, 20 bp, synthetic construct
  source 1..20: mol_type = other DNA
cggcacgaggcagagtcccc

SEQ ID NO: 18123 - DNA, 20 bp, synthetic construct
  source 1..20: mol_type = other DNA
gcttcaggttggttctcagg

SEQ ID NO: 18124 - DNA, 20 bp, synthetic construct
  source 1..20: mol_type = other DNA
gcgccaggctcagcggcacg

SEQ ID NO: 18125 - DNA, 20 bp, synthetic construct
  source 1..20: mol_type = other DNA
gaatacacctgcaaagcggc

SEQ ID NO: 18126 - DNA, 20 bp, synthetic construct
  source 1..20: mol_type = other DNA
acaccatggacaagttttgg

SEQ ID NO: 18127 - DNA, 20 bp, synthetic construct
  source 1..20: mol_type = other DNA
cgtggaatacacctgcaaag

SEQ ID NO: 18128 - DNA, 20 bp, synthetic construct
  source 1..20: mol_type = other DNA
cggacaccatggacaagttt

SEQ ID NO: 18129 - DNA, 20 bp, synthetic construct
  source 1..20: mol_type = other DNA
gatgtacaatcttcttcagg

SEQ ID NO: 18130 - DNA, 20 bp, synthetic construct
  source 1..20: mol_type = other DNA
gaaggtaaggggctgtcctg

SEQ ID NO: 18131 - DNA, 20 bp, synthetic construct
  source 1..20: mol_type = other DNA
cttcttcaggtggagctatg

SEQ ID NO: 18132 - DNA, 20 bp, synthetic construct
  source 1..20: mol_type = other DNA
tgcttcaggttggttctcag

SEQ ID NO: 18133 - DNA, 20 bp, synthetic construct
  source 1..20: mol_type = other DNA
tctcatcagctgtcataaac

SEQ ID NO: 18134 - DNA, 20 bp, synthetic construct
  source 1..20: mol_type = other DNA
ttattctccttactggtagc

SEQ ID NO: 18135 - DNA, 20 bp, synthetic construct
  source 1..20: mol_type = other DNA
ccgatctgcgccaggctcag

SEQ ID NO: 18136 - DNA, 20 bp, synthetic construct
  source 1..20: mol_type = other DNA
tcatttagttattacttaat

SEQ ID NO: 18137 - DNA, 20 bp, synthetic construct
  source 1..20: mol_type = other DNA
atagtatgggtggcaagagg

SEQ ID NO: 18138 - DNA, 20 bp, synthetic construct
  source 1..20: mol_type = other DNA
agttatgtttgaatgcgata

SEQ ID NO: 18139 - DNA, 20 bp, synthetic construct
  source 1..20: mol_type = other DNA
gtagattataagtgtaaaaa

SEQ ID NO: 18140 - DNA, 20 bp, synthetic construct
  source 1..20: mol_type = other DNA
tttaaaggatcccgtatata

SEQ ID NO: 18141 - DNA, 20 bp, synthetic construct
  source 1..20: mol_type = other DNA
gcgagtgtccctttccttcc

SEQ ID NO: 18142 - DNA, 20 bp, synthetic construct
  source 1..20: mol_type = other DNA
tttacttactttcacatatt

SEQ ID NO: 18143 - DNA, 20 bp, synthetic construct
  source 1..20: mol_type = other DNA
acaataagaatattttcatt

SEQ ID NO: 18144 - DNA, 20 bp, synthetic construct
  source 1..20: mol_type = other DNA
cactactatgtgtttagtac

SEQ ID NO: 18145 - DNA, 20 bp, synthetic construct
  source 1..20: mol_type = other DNA
actaaagtcagtggggacag

SEQ ID NO: 18146 - DNA, 20 bp, synthetic construct
  source 1..20: mol_type = other DNA
cacggtggcaagcatcatcc

SEQ ID NO: 18147 - DNA, 20 bp, synthetic construct
  source 1..20: mol_type = other DNA
ctggcacttcgagttggaac

SEQ ID NO: 18148 - DNA, 20 bp, synthetic construct
  source 1..20: mol_type = other DNA
agaagctagtgaagaaatgt

SEQ ID NO: 18149 - DNA, 20 bp, synthetic construct
  source 1..20: mol_type = other DNA
cagcatccccagcaggtaca

SEQ ID NO: 18150 - DNA, 20 bp, synthetic construct
  source 1..20: mol_type = other DNA
cggccagcactgtgccggcg

SEQ ID NO: 18151 - DNA, 20 bp, synthetic construct
  source 1..20: mol_type = other DNA
cacactggaggttgttgcag

SEQ ID NO: 18152 - DNA, 20 bp, synthetic construct
  source 1..20: mol_type = other DNA
ctggaggtctacctcaagga

SEQ ID NO: 18153 - DNA, 20 bp, synthetic construct
  source 1..20: mol_type = other DNA
taccatcagctatgaggccc

SEQ ID NO: 18154 - DNA, 20 bp, synthetic construct
  source 1..20: mol_type = other DNA
caggtcctgggtcttgtcct

SEQ ID NO: 18155 - DNA, 20 bp, synthetic construct
  source 1..20: mol_type = other DNA
ccagctggaggtctacctca

SEQ ID NO: 18156 - DNA, 20 bp, synthetic construct
  source 1..20: mol_type = other DNA
gcagcaccaccaggagcacc

SEQ ID NO: 18157 - DNA, 20 bp, synthetic construct
  source 1..20: mol_type = other DNA
gctgcagcctgggaggagct

SEQ ID NO: 18158 - DNA, 20 bp, synthetic construct
  source 1..20: mol_type = other DNA
ctagcttcttgtaggcaagg

SEQ ID NO: 18159 - DNA, 20 bp, synthetic construct
  source 1..20: mol_type = other DNA
aaagacactgggcagatggt

SEQ ID NO: 18160 - DNA, 20 bp, synthetic construct
  source 1..20: mol_type = other DNA
atgatctgcatggggctcag

SEQ ID NO: 18161 - DNA, 20 bp, synthetic construct
  source 1..20: mol_type = other DNA
gtattcgttatccacgtggg

SEQ ID NO: 18162 - DNA, 20 bp, synthetic construct
  source 1..20: mol_type = other DNA
cagccaggagctcgctgcgg

SEQ ID NO: 18163 - DNA, 20 bp, synthetic construct
  source 1..20: mol_type = other DNA
tgagccttgcctggaaatct

SEQ ID NO: 18164 - DNA, 20 bp, synthetic construct
  source 1..20: mol_type = other DNA
cgccagtggattggcccaac

SEQ ID NO: 18165 - DNA, 20 bp, synthetic construct
  source 1..20: mol_type = other DNA
tagcagatgattgagctctg

SEQ ID NO: 18166 - DNA, 20 bp, synthetic construct
  source 1..20: mol_type = other DNA
gcactgggacagcttctgat

SEQ ID NO: 18167 - DNA, 20 bp, synthetic construct
  source 1..20: mol_type = other DNA
gacccccagatttccaggca

SEQ ID NO: 18168 - DNA, 20 bp, synthetic construct
  source 1..20: mol_type = other DNA
gcggtgggaggaggtgtgcc

SEQ ID NO: 18169 - DNA, 20 bp, synthetic construct
  source 1..20: mol_type = other DNA
caggcagagcccaagaccca

SEQ ID NO: 18170 - DNA, 20 bp, synthetic construct
  source 1..20: mol_type = other DNA
atcttccattggattggcaa

SEQ ID NO: 18171 - DNA, 20 bp, synthetic construct
  source 1..20: mol_type = other DNA
agcaggtacaaggtggccag

SEQ ID NO: 18172 - DNA, 20 bp, synthetic construct
  source 1..20: mol_type = other DNA
gacacatgtcatttctgctg

SEQ ID NO: 18173 - DNA, 20 bp, synthetic construct
  source 1..20: mol_type = other DNA
gcaccccacagttcagccgc

SEQ ID NO: 18174 - DNA, 20 bp, synthetic construct
  source 1..20: mol_type = other DNA
cttcagccaggagctcgctg

SEQ ID NO: 18175 - DNA, 20 bp, synthetic construct
  source 1..20: mol_type = other DNA
gctgtattcgttatccacgt

SEQ ID NO: 18176 - DNA, 20 bp, synthetic construct
  source 1..20: mol_type = other DNA
acgaatacagccaacctccc

SEQ ID NO: 18177 - DNA, 20 bp, synthetic construct
  source 1..20: mol_type = other DNA
cctcaaggacggatggcaca

SEQ ID NO: 18178 - DNA, 20 bp, synthetic construct
  source 1..20: mol_type = other DNA
atctgggggtcagaaaggtg

SEQ ID NO: 18179 - DNA, 20 bp, synthetic construct
  source 1..20: mol_type = other DNA
ctgcagctggtggcacagtc

SEQ ID NO: 18180 - DNA, 20 bp, synthetic construct
  source 1..20: mol_type = other DNA
cactagcttcttgtaggcaa

SEQ ID NO: 18181 - DNA, 20 bp, synthetic construct
  source 1..20: mol_type = other DNA
ttctggatcttccattggat

SEQ ID NO: 18182 - DNA, 20 bp, synthetic construct
  source 1..20: mol_type = other DNA
catggggtctctgcaaccgc

SEQ ID NO: 18183 - DNA, 20 bp, synthetic construct
  source 1..20: mol_type = other DNA
cagacttttgacgcttgact

SEQ ID NO: 18184 - DNA, 20 bp, synthetic construct
  source 1..20: mol_type = other DNA
ccggagctccaagcagtggg

SEQ ID NO: 18185 - DNA, 20 bp, synthetic construct
  source 1..20: mol_type = other DNA
tcctatcgagtgctggacgc

SEQ ID NO: 18186 - DNA, 20 bp, synthetic construct
  source 1..20: mol_type = other DNA
ctgccagcggctgaactgtg

SEQ ID NO: 18187 - DNA, 20 bp, synthetic construct
  source 1..20: mol_type = other DNA
gaagtgccagggccagctgg

SEQ ID NO: 18188 - DNA, 20 bp, synthetic construct
  source 1..20: mol_type = other DNA
aggtctacctcaaggacgga

SEQ ID NO: 18189 - DNA, 20 bp, synthetic construct
  source 1..20: mol_type = other DNA
atggaaagacactgggcaga

SEQ ID NO: 18190 - DNA, 20 bp, synthetic construct
  source 1..20: mol_type = other DNA
tcaagaaggagccacactgg

SEQ ID NO: 18191 - DNA, 20 bp, synthetic construct
  source 1..20: mol_type = other DNA
ggtagacctccagctggccc

SEQ ID NO: 18192 - DNA, 20 bp, synthetic construct
  source 1..20: mol_type = other DNA
actgcagaaagaagagagga

SEQ ID NO: 18193 - DNA, 20 bp, synthetic construct
  source 1..20: mol_type = other DNA
gctgtggctgcagttggaga

SEQ ID NO: 18194 - DNA, 20 bp, synthetic construct
  source 1..20: mol_type = other DNA
tgaggcccaggacaagaccc

SEQ ID NO: 18195 - DNA, 20 bp, synthetic construct
  source 1..20: mol_type = other DNA
gactgcagaaagaagagagg

SEQ ID NO: 18196 - DNA, 20 bp, synthetic construct
  source 1..20: mol_type = other DNA
gctctggagttgtggtgggc

SEQ ID NO: 18197 - DNA, 20 bp, synthetic construct
  source 1..20: mol_type = other DNA
cagcatctgtgaaggcaccg

SEQ ID NO: 18198 - DNA, 20 bp, synthetic construct
  source 1..20: mol_type = other DNA
gcccaaggtgcagagccgtc

SEQ ID NO: 18199 - DNA, 20 bp, synthetic construct
  source 1..20: mol_type = other DNA
agccaggagctcgctgcggt

SEQ ID NO: 18200 - DNA, 20 bp, synthetic construct
  source 1..20: mol_type = other DNA
tccactggcgctgcttcttc

SEQ ID NO: 18201 - DNA, 20 bp, synthetic construct
  source 1..20: mol_type = other DNA
ctctgcaacaacctccagtg

SEQ ID NO: 18202 - DNA, 20 bp, synthetic construct
  source 1..20: mol_type = other DNA
tccattggattggcaagggc

SEQ ID NO: 18203 - DNA, 20 bp, synthetic construct
  source 1..20: mol_type = other DNA
ctcccaaagttcgtggcact

SEQ ID NO: 18204 - DNA, 20 bp, synthetic construct
  source 1..20: mol_type = other DNA
cctggcacttcgagttggaa

SEQ ID NO: 18205 - DNA, 20 bp, synthetic construct
  source 1..20: mol_type = other DNA
tttgcagccagagctggggc

SEQ ID NO: 18206 - DNA, 20 bp, synthetic construct
  source 1..20: mol_type = other DNA
gttacccacctaagcaggtc

SEQ ID NO: 18207 - DNA, 20 bp, synthetic construct
  source 1..20: mol_type = other DNA
ccagcactgtgccggcgtgg

SEQ ID NO: 18208 - DNA, 20 bp, synthetic construct
  source 1..20: mol_type = other DNA
tctctgggcctgacctgctt

SEQ ID NO: 18209 - DNA, 20 bp, synthetic construct
  source 1..20: mol_type = other DNA
ctcccaccgcagcgagctcc

SEQ ID NO: 18210 - DNA, 20 bp, synthetic construct
  source 1..20: mol_type = other DNA
catagctgatggtacccccc

SEQ ID NO: 18211 - DNA, 20 bp, synthetic construct
  source 1..20: mol_type = other DNA
tcctcccaggctgcagctgg

SEQ ID NO: 18212 - DNA, 20 bp, synthetic construct
  source 1..20: mol_type = other DNA
gggaggtacagcttgagttc

SEQ ID NO: 18213 - DNA, 20 bp, synthetic construct
  source 1..20: mol_type = other DNA
agcctgggaggagctaggag

SEQ ID NO: 18214 - DNA, 20 bp, synthetic construct
  source 1..20: mol_type = other DNA
ccttgggctggaaacctgag

SEQ ID NO: 18215 - DNA, 20 bp, synthetic construct
  source 1..20: mol_type = other DNA
gttcttgccctcctttgctc

SEQ ID NO: 18216 - DNA, 20 bp, synthetic construct
  source 1..20: mol_type = other DNA
gtgcagagccgtctggtggg

SEQ ID NO: 18217 - DNA, 20 bp, synthetic construct
  source 1..20: mol_type = other DNA
cagaagagcccccgggatgt

SEQ ID NO: 18218 - DNA, 20 bp, synthetic construct
  source 1..20: mol_type = other DNA
gtcccagtgccacgaacttt

SEQ ID NO: 18219 - DNA, 20 bp, synthetic construct
  source 1..20: mol_type = other DNA
ggctgtattcgttatccacg

SEQ ID NO: 18220 - DNA, 20 bp, synthetic construct
  source 1..20: mol_type = other DNA
tggaaatctgggggtcagaa

SEQ ID NO: 18221 - DNA, 20 bp, synthetic construct
  source 1..20: mol_type = other DNA
tctggcggccagcactgtgc

SEQ ID NO: 18222 - DNA, 20 bp, synthetic construct
  source 1..20: mol_type = other DNA
agaactcggccacttttctg

SEQ ID NO: 18223 - DNA, 20 bp, synthetic construct
  source 1..20: mol_type = other DNA
tggggttctcagcatgggat

SEQ ID NO: 18224 - DNA, 20 bp, synthetic construct
  source 1..20: mol_type = other DNA
aagcgtcaaaagtctgccag

SEQ ID NO: 18225 - DNA, 20 bp, synthetic construct
  source 1..20: mol_type = other DNA
ttcccgttgggccaatccac

SEQ ID NO: 18226 - DNA, 20 bp, synthetic construct
  source 1..20: mol_type = other DNA
actcacccagcatccccagc

SEQ ID NO: 18227 - DNA, 20 bp, synthetic construct
  source 1..20: mol_type = other DNA
ttgggctggaaacctgagag

SEQ ID NO: 18228 - DNA, 20 bp, synthetic construct
  source 1..20: mol_type = other DNA
cggctcagctggtatgaccc

SEQ ID NO: 18229 - DNA, 20 bp, synthetic construct
  source 1..20: mol_type = other DNA
ggggccggagctccaagcag

SEQ ID NO: 18230 - DNA, 20 bp, synthetic construct
  source 1..20: mol_type = other DNA
tgctgctgccccccaccaga

SEQ ID NO: 18231 - DNA, 20 bp, synthetic construct
  source 1..20: mol_type = other DNA
ggcactgggacagcttctga

SEQ ID NO: 18232 - DNA, 20 bp, synthetic construct
  source 1..20: mol_type = other DNA
agaggaagttctccaggtcc

SEQ ID NO: 18233 - DNA, 20 bp, synthetic construct
  source 1..20: mol_type = other DNA
tcacttacctgagcaaagga

SEQ ID NO: 18234 - DNA, 20 bp, synthetic construct
  source 1..20: mol_type = other DNA
ccgttccaactcgaagtgcc

SEQ ID NO: 18235 - DNA, 20 bp, synthetic construct
  source 1..20: mol_type = other DNA
tgtcccagtgccacgaactt

SEQ ID NO: 18236 - DNA, 20 bp, synthetic construct
  source 1..20: mol_type = other DNA
gatgcttgccaccgtgcctg

SEQ ID NO: 18237 - DNA, 20 bp, synthetic construct
  source 1..20: mol_type = other DNA
ttctacagcggcagcctggg

SEQ ID NO: 18238 - DNA, 20 bp, synthetic construct
  source 1..20: mol_type = other DNA
gatcttccattggattggca

SEQ ID NO: 18239 - DNA, 20 bp, synthetic construct
  source 1..20: mol_type = other DNA
cagtgactatgatctgcatg

SEQ ID NO: 18240 - DNA, 20 bp, synthetic construct
  source 1..20: mol_type = other DNA
ctggggaaggaggaagagtt

SEQ ID NO: 18241 - DNA, 20 bp, synthetic construct
  source 1..20: mol_type = other DNA
cagtaagtgtccccggaggc

SEQ ID NO: 18242 - DNA, 20 bp, synthetic construct
  source 1..20: mol_type = other DNA
gtgggctctggagttgtggt

SEQ ID NO: 18243 - DNA, 20 bp, synthetic construct
  source 1..20: mol_type = other DNA
ccaggtcctgggtcttgtcc

SEQ ID NO: 18244 - DNA, 20 bp, synthetic construct
  source 1..20: mol_type = other DNA
gccaccagctgcagcctggg

SEQ ID NO: 18245 - DNA, 20 bp, synthetic construct
  source 1..20: mol_type = other DNA
ggaggagttgtcaggctgca

SEQ ID NO: 18246 - DNA, 20 bp, synthetic construct
  source 1..20: mol_type = other DNA
gacaaacaccttcttgcagt

SEQ ID NO: 18247 - DNA, 20 bp, synthetic construct
  source 1..20: mol_type = other DNA
gactgggcaagagacaagaa

SEQ ID NO: 18248 - DNA, 20 bp, synthetic construct
  source 1..20: mol_type = other DNA
ggctctggagttgtggtggg

SEQ ID NO: 18249 - DNA, 20 bp, synthetic construct
  source 1..20: mol_type = other DNA
ggtgcagagccgtctggtgg

SEQ ID NO: 18250 - DNA, 20 bp, synthetic construct
  source 1..20: mol_type = other DNA
caaggtgcagagccgtctgg

SEQ ID NO: 18251 - DNA, 20 bp, synthetic construct
  source 1..20: mol_type = other DNA
tgtgggctctggagttgtgg

SEQ ID NO: 18252 - DNA, 20 bp, synthetic construct
  source 1..20: mol_type = other DNA
gcaccgtggaggtgcgccag

SEQ ID NO: 18253 - DNA, 20 bp, synthetic construct
  source 1..20: mol_type = other DNA
gcgccagtggattggcccaa

SEQ ID NO: 18254 - DNA, 20 bp, synthetic construct
  source 1..20: mol_type = other DNA
gcttcaagaaggagccacac

SEQ ID NO: 18255 - DNA, 20 bp, synthetic construct
  source 1..20: mol_type = other DNA
gttctacagcggcagcctgg

SEQ ID NO: 18256 - DNA, 20 bp, synthetic construct
  source 1..20: mol_type = other DNA
gcaggcagagcccaagaccc

SEQ ID NO: 18257 - DNA, 20 bp, synthetic construct
  source 1..20: mol_type = other DNA
aatcatctgctacggacaac

SEQ ID NO: 18258 - DNA, 20 bp, synthetic construct
  source 1..20: mol_type = other DNA
gagccttgcctggaaatctg

SEQ ID NO: 18259 - DNA, 20 bp, synthetic construct
  source 1..20: mol_type = other DNA
cagatcatagtcactgtcgg

SEQ ID NO: 18260 - DNA, 20 bp, synthetic construct
  source 1..20: mol_type = other DNA
tcactagcttcttgtaggca

SEQ ID NO: 18261 - DNA, 20 bp, synthetic construct
  source 1..20: mol_type = other DNA
accagacggctctgcacctt

SEQ ID NO: 18262 - DNA, 20 bp, synthetic construct
  source 1..20: mol_type = other DNA
accaaaacagtaagtgtccc

SEQ ID NO: 18263 - DNA, 20 bp, synthetic construct
  source 1..20: mol_type = other DNA
tcactgtcggaggagttgtc

SEQ ID NO: 18264 - DNA, 20 bp, synthetic construct
  source 1..20: mol_type = other DNA
ctgttttggttcattcccgt

SEQ ID NO: 18265 - DNA, 20 bp, synthetic construct
  source 1..20: mol_type = other DNA
acctgtgggctctggagttg

SEQ ID NO: 18266 - DNA, 20 bp, synthetic construct
  source 1..20: mol_type = other DNA
catctgccagagactgaggc

SEQ ID NO: 18267 - DNA, 20 bp, synthetic construct
  source 1..20: mol_type = other DNA
gcagacttttgacgcttgac

SEQ ID NO: 18268 - DNA, 20 bp, synthetic construct
  source 1..20: mol_type = other DNA
aacctgagaggggaagcaat

SEQ ID NO: 18269 - DNA, 20 bp, synthetic construct
  source 1..20: mol_type = other DNA
ccttgaggtagacctccagc

SEQ ID NO: 18270 - DNA, 20 bp, synthetic construct
  source 1..20: mol_type = other DNA
ctggccctggcacttcgagt

SEQ ID NO: 18271 - DNA, 20 bp, synthetic construct
  source 1..20: mol_type = other DNA
cctgaagcaatgctccaggg

SEQ ID NO: 18272 - DNA, 20 bp, synthetic construct
  source 1..20: mol_type = other DNA
aaaatcaagccccagaaaag

SEQ ID NO: 18273 - DNA, 20 bp, synthetic construct
  source 1..20: mol_type = other DNA
cgtgcctgcggccaggcctg

SEQ ID NO: 18274 - DNA, 20 bp, synthetic construct
  source 1..20: mol_type = other DNA
gaggaagttctccaggtcct

SEQ ID NO: 18275 - DNA, 20 bp, synthetic construct
  source 1..20: mol_type = other DNA
agacttttgacgcttgactg

SEQ ID NO: 18276 - DNA, 20 bp, synthetic construct
  source 1..20: mol_type = other DNA
gctgggtgagtacccctccc

SEQ ID NO: 18277 - DNA, 20 bp, synthetic construct
  source 1..20: mol_type = other DNA
ttttcctgaagcaatgctcc

SEQ ID NO: 18278 - DNA, 20 bp, synthetic construct
  source 1..20: mol_type = other DNA
agttctacagcggcagcctg

SEQ ID NO: 18279 - DNA, 20 bp, synthetic construct
  source 1..20: mol_type = other DNA
cctctcaggtttccagccca

SEQ ID NO: 18280 - DNA, 20 bp, synthetic construct
  source 1..20: mol_type = other DNA
tctcccaaagttcgtggcac

SEQ ID NO: 18281 - DNA, 20 bp, synthetic construct
  source 1..20: mol_type = other DNA
aaaacagtaagtgtccccgg

SEQ ID NO: 18282 - DNA, 20 bp, synthetic construct
  source 1..20: mol_type = other DNA
ggagttgtcaggctgcatgg

SEQ ID NO: 18283 - DNA, 20 bp, synthetic construct
  source 1..20: mol_type = other DNA
ggcgtggtggagttctacag

SEQ ID NO: 18284 - DNA, 20 bp, synthetic construct
  source 1..20: mol_type = other DNA
cgttccaactcgaagtgcca

SEQ ID NO: 18285 - DNA, 20 bp, synthetic construct
  source 1..20: mol_type = other DNA
gacggctctgcaccttgggc

SEQ ID NO: 18286 - DNA, 20 bp, synthetic construct
  source 1..20: mol_type = other DNA
aaggtgcagagccgtctggt

SEQ ID NO: 18287 - DNA, 20 bp, synthetic construct
  source 1..20: mol_type = other DNA
agccttgcctggaaatctgg

SEQ ID NO: 18288 - DNA, 20 bp, synthetic construct
  source 1..20: mol_type = other DNA
cagcaccaccaggagcacca

SEQ ID NO: 18289 - DNA, 20 bp, synthetic construct
  source 1..20: mol_type = other DNA
tctgccagcggctgaactgt

SEQ ID NO: 18290 - DNA, 20 bp, synthetic construct
  source 1..20: mol_type = other DNA
cgctgccacactgctgctcc

SEQ ID NO: 18291 - DNA, 20 bp, synthetic construct
  source 1..20: mol_type = other DNA
ccatgtgccatccgtccttg

SEQ ID NO: 18292 - DNA, 20 bp, synthetic construct
  source 1..20: mol_type = other DNA
gctggccaccttgtacctgc

SEQ ID NO: 18293 - DNA, 20 bp, synthetic construct
  source 1..20: mol_type = other DNA
gctgtagaactccaccacgc

SEQ ID NO: 18294 - DNA, 20 bp, synthetic construct
  source 1..20: mol_type = other DNA
ggcaagcatcatcctggccc

SEQ ID NO: 18295 - DNA, 20 bp, synthetic construct
  source 1..20: mol_type = other DNA
ccaggacaagacccaggacc

SEQ ID NO: 18296 - DNA, 20 bp, synthetic construct
  source 1..20: mol_type = other DNA
tcccacctgtcagcttatcc

SEQ ID NO: 18297 - DNA, 20 bp, synthetic construct
  source 1..20: mol_type = other DNA
ctggccaccttgtacctgct

SEQ ID NO: 18298 - DNA, 20 bp, synthetic construct
  source 1..20: mol_type = other DNA
cttgggctggaaacctgaga

SEQ ID NO: 18299 - DNA, 20 bp, synthetic construct
  source 1..20: mol_type = other DNA
aagaagcagcgccagtggat

SEQ ID NO: 18300 - DNA, 20 bp, synthetic construct
  source 1..20: mol_type = other DNA
ctctggagttgtggtgggcg

SEQ ID NO: 18301 - DNA, 20 bp, synthetic construct
  source 1..20: mol_type = other DNA
gccagaagaagcagcgccag

SEQ ID NO: 18302 - DNA, 20 bp, synthetic construct
  source 1..20: mol_type = other DNA
cttatccaggtaagcaccag

SEQ ID NO: 18303 - DNA, 20 bp, synthetic construct
  source 1..20: mol_type = other DNA
ccaagacccaggggagccac

SEQ ID NO: 18304 - DNA, 20 bp, synthetic construct
  source 1..20: mol_type = other DNA
actggcgctgcttcttctgg

SEQ ID NO: 18305 - DNA, 20 bp, synthetic construct
  source 1..20: mol_type = other DNA
cctcccactgcttggagctc

SEQ ID NO: 18306 - DNA, 20 bp, synthetic construct
  source 1..20: mol_type = other DNA
cagtcgcttcctgcctcgga

SEQ ID NO: 18307 - DNA, 20 bp, synthetic construct
  source 1..20: mol_type = other DNA
atcctcttacctgtgggctc

SEQ ID NO: 18308 - DNA, 20 bp, synthetic construct
  source 1..20: mol_type = other DNA
gtgagccttgcctggaaatc

SEQ ID NO: 18309 - DNA, 20 bp, synthetic construct
  source 1..20: mol_type = other DNA
ccaccacgccggcacagtgc

SEQ ID NO: 18310 - DNA, 20 bp, synthetic construct
  source 1..20: mol_type = other DNA
gtgaagaaatgtaggtgtca

SEQ ID NO: 18311 - DNA, 20 bp, synthetic construct
  source 1..20: mol_type = other DNA
aggcagagcccaagacccag

SEQ ID NO: 18312 - DNA, 20 bp, synthetic construct
  source 1..20: mol_type = other DNA
gagttctacagcggcagcct

SEQ ID NO: 18313 - DNA, 20 bp, synthetic construct
  source 1..20: mol_type = other DNA
ctctggcagatgcttcaaga

SEQ ID NO: 18314 - DNA, 20 bp, synthetic construct
  source 1..20: mol_type = other DNA
catccccagcaggtacaagg

SEQ ID NO: 18315 - DNA, 20 bp, synthetic construct
  source 1..20: mol_type = other DNA
ggttctgcaatgagacactc

SEQ ID NO: 18316 - DNA, 20 bp, synthetic construct
  source 1..20: mol_type = other DNA
aggtgcagagccgtctggtg

SEQ ID NO: 18317 - DNA, 20 bp, synthetic construct
  source 1..20: mol_type = other DNA
agcgactgcagaaagaagag

SEQ ID NO: 18318 - DNA, 20 bp, synthetic construct
  source 1..20: mol_type = other DNA
tacctggataagctgacagg

SEQ ID NO: 18319 - DNA, 20 bp, synthetic construct
  source 1..20: mol_type = other DNA
gggccggagctccaagcagt

SEQ ID NO: 18320 - DNA, 20 bp, synthetic construct
  source 1..20: mol_type = other DNA
ggtgtgtaggtgacaaggaa

SEQ ID NO: 18321 - DNA, 20 bp, synthetic construct
  source 1..20: mol_type = other DNA
cagctggtggcacagtctgg

SEQ ID NO: 18322 - DNA, 20 bp, synthetic construct
  source 1..20: mol_type = other DNA
gagctaggagaggagagagc

SEQ ID NO: 18323 - DNA, 20 bp, synthetic construct
  source 1..20: mol_type = other DNA
ctcctctcctagctcctccc

SEQ ID NO: 18324 - DNA, 20 bp, synthetic construct
  source 1..20: mol_type = other DNA
ctaggagaggagagagcagg

SEQ ID NO: 18325 - DNA, 20 bp, synthetic construct
  source 1..20: mol_type = other DNA
tttcctgaagcaatgctcca

SEQ ID NO: 18326 - DNA, 20 bp, synthetic construct
  source 1..20: mol_type = other DNA
agaagagcccccgggatgtt

SEQ ID NO: 18327 - DNA, 20 bp, synthetic construct
  source 1..20: mol_type = other DNA
tgttttggttcattcccgtt

SEQ ID NO: 18328 - DNA, 20 bp, synthetic construct
  source 1..20: mol_type = other DNA
aaccccgcaggcctggccgc

SEQ ID NO: 18329 - DNA, 20 bp, synthetic construct
  source 1..20: mol_type = other DNA
aatttctctcccaaagttcg

SEQ ID NO: 18330 - DNA, 20 bp, synthetic construct
  source 1..20: mol_type = other DNA
caccagacggctctgcacct

SEQ ID NO: 18331 - DNA, 20 bp, synthetic construct
  source 1..20: mol_type = other DNA
cataccagctgagccgtccg

SEQ ID NO: 18332 - DNA, 20 bp, synthetic construct
  source 1..20: mol_type = other DNA
gtctgccagcggctgaactg

SEQ ID NO: 18333 - DNA, 20 bp, synthetic construct
  source 1..20: mol_type = other DNA
cactgggacagcttctgatg

SEQ ID NO: 18334 - DNA, 20 bp, synthetic construct
  source 1..20: mol_type = other DNA
gtgcctgcggccaggcctgc

SEQ ID NO: 18335 - DNA, 20 bp, synthetic construct
  source 1..20: mol_type = other DNA
tgcctgcggccaggcctgcg

SEQ ID NO: 18336 - DNA, 20 bp, synthetic construct
  source 1..20: mol_type = other DNA
agctcctcccaggctgcagc

SEQ ID NO: 18337 - DNA, 20 bp, synthetic construct
  source 1..20: mol_type = other DNA
gcttacctggataagctgac

SEQ ID NO: 18338 - DNA, 20 bp, synthetic construct
  source 1..20: mol_type = other DNA
atgcagatcatagtcactgt

SEQ ID NO: 18339 - DNA, 20 bp, synthetic construct
  source 1..20: mol_type = other DNA
accagcccttgccaatccaa

SEQ ID NO: 18340 - DNA, 20 bp, synthetic construct
  source 1..20: mol_type = other DNA
ggtgcgccagggggctcagt

SEQ ID NO: 18341 - DNA, 20 bp, synthetic construct
  source 1..20: mol_type = other DNA
cagctggtatgacccaggta

SEQ ID NO: 18342 - DNA, 20 bp, synthetic construct
  source 1..20: mol_type = other DNA
tggaacgggtgagccttgcc

SEQ ID NO: 18343 - DNA, 20 bp, synthetic construct
  source 1..20: mol_type = other DNA
ggccaggatccaaaccccgc

SEQ ID NO: 18344 - DNA, 20 bp, synthetic construct
  source 1..20: mol_type = other DNA
agcaaaggagggcaagaact

SEQ ID NO: 18345 - DNA, 20 bp, synthetic construct
  source 1..20: mol_type = other DNA
tgttgcagaggaagttctcc

SEQ ID NO: 18346 - DNA, 20 bp, synthetic construct
  source 1..20: mol_type = other DNA
gttctcagcatgggatcgga

SEQ ID NO: 18347 - DNA, 20 bp, synthetic construct
  source 1..20: mol_type = other DNA
ccagctgagccgtccgaggc

SEQ ID NO: 18348 - DNA, 20 bp, synthetic construct
  source 1..20: mol_type = other DNA
actagcttcttgtaggcaag

SEQ ID NO: 18349 - DNA, 20 bp, synthetic construct
  source 1..20: mol_type = other DNA
cgcaggcctggccgcaggca

SEQ ID NO: 18350 - DNA, 20 bp, synthetic construct
  source 1..20: mol_type = other DNA
cagagctcaatcatctgcta

SEQ ID NO: 18351 - DNA, 20 bp, synthetic construct
  source 1..20: mol_type = other DNA
ccaccaggagcaccagggcc

SEQ ID NO: 18352 - DNA, 20 bp, synthetic construct
  source 1..20: mol_type = other DNA
ccaggtaaggaagagccaca

SEQ ID NO: 18353 - DNA, 20 bp, synthetic construct
  source 1..20: mol_type = other DNA
tctgcagtcgcttcctgcct

SEQ ID NO: 18354 - DNA, 20 bp, synthetic construct
  source 1..20: mol_type = other DNA
tgtatctgtaggaggagaag

SEQ ID NO: 18355 - DNA, 20 bp, synthetic construct
  source 1..20: mol_type = other DNA
ccaggaggctgatggtgagt

SEQ ID NO: 18356 - DNA, 20 bp, synthetic construct
  source 1..20: mol_type = other DNA
taccataaccaggaggctga

SEQ ID NO: 18357 - DNA, 20 bp, synthetic construct
  source 1..20: mol_type = other DNA
agagtccagtttgtatctgt

SEQ ID NO: 18358 - DNA, 20 bp, synthetic construct
  source 1..20: mol_type = other DNA
ctcttacctgtaccataacc

SEQ ID NO: 18359 - DNA, 20 bp, synthetic construct
  source 1..20: mol_type = other DNA
ttacctgtaccataaccagg

SEQ ID NO: 18360 - DNA, 20 bp, synthetic construct
  source 1..20: mol_type = other DNA
tctgttcatatacaaagagc

SEQ ID NO: 18361 - DNA, 20 bp, synthetic construct
  source 1..20: mol_type = other DNA
tgcccagctgaatgagtatg

SEQ ID NO: 18362 - DNA, 20 bp, synthetic construct
  source 1..20: mol_type = other DNA
cctccacttttcgatctgag

SEQ ID NO: 18363 - DNA, 20 bp, synthetic construct
  source 1..20: mol_type = other DNA
agtacatgatggagttgctc

SEQ ID NO: 18364 - DNA, 20 bp, synthetic construct
  source 1..20: mol_type = other DNA
tacatctgggcgcccttggc

SEQ ID NO: 18365 - DNA, 20 bp, synthetic construct
  source 1..20: mol_type = other DNA
ggactggcggcggcgccgcg

SEQ ID NO: 18366 - DNA, 20 bp, synthetic construct
  source 1..20: mol_type = other DNA
gcgatggtgggcgccggtgt

SEQ ID NO: 18367 - DNA, 20 bp, synthetic construct
  source 1..20: mol_type = other DNA
tctctcggcggaagtcgctc

SEQ ID NO: 18368 - DNA, 20 bp, synthetic construct
  source 1..20: mol_type = other DNA
gtctatcttattggtgacct

SEQ ID NO: 18369 - DNA, 20 bp, synthetic construct
  source 1..20: mol_type = other DNA
acattgtctagggatataaa

SEQ ID NO: 18370 - DNA, 20 bp, synthetic construct
  source 1..20: mol_type = other DNA
agggtcactgaagatgtagc

SEQ ID NO: 18371 - DNA, 20 bp, synthetic construct
  source 1..20: mol_type = other DNA
atgcttgttctgtatccaga

SEQ ID NO: 18372 - DNA, 20 bp, synthetic construct
  source 1..20: mol_type = other DNA
gaaaatgtttatgctacact

SEQ ID NO: 18373 - DNA, 20 bp, synthetic construct
  source 1..20: mol_type = other DNA
caagtgtacttgatgggagg

SEQ ID NO: 18374 - DNA, 20 bp, synthetic construct
  source 1..20: mol_type = other DNA
gaaaagatcacttttctctt

SEQ ID NO: 18375 - DNA, 20 bp, synthetic construct
  source 1..20: mol_type = other DNA
tgagtcccaacaagcaagaa

SEQ ID NO: 18376 - DNA, 20 bp, synthetic construct
  source 1..20: mol_type = other DNA
tcagcagtctctggagtgat

SEQ ID NO: 18377 - DNA, 20 bp, synthetic construct
  source 1..20: mol_type = other DNA
actagaaatacatctgtttg

SEQ ID NO: 18378 - DNA, 20 bp, synthetic construct
  source 1..20: mol_type = other DNA
acagtcggtacatattccga

SEQ ID NO: 18379 - DNA, 20 bp, synthetic construct
  source 1..20: mol_type = other DNA
tcaaaaagtccaagagtata

SEQ ID NO: 18380 - DNA, 20 bp, synthetic construct
  source 1..20: mol_type = other DNA
ccacatacttgacagccttc

SEQ ID NO: 18381 - DNA, 20 bp, synthetic construct
  source 1..20: mol_type = other DNA
ctctctacaagacagagggg

SEQ ID NO: 18382 - DNA, 20 bp, synthetic construct
  source 1..20: mol_type = other DNA
gacaattaagtgtgttgttg

SEQ ID NO: 18383 - DNA, 20 bp, synthetic construct
  source 1..20: mol_type = other DNA
tgcacttacacaggtaagaa

SEQ ID NO: 18384 - DNA, 20 bp, synthetic construct
  source 1..20: mol_type = other DNA
tgtaccgactgtaagtataa

SEQ ID NO: 18385 - DNA, 20 bp, synthetic construct
  source 1..20: mol_type = other DNA
ggacagtggtgagttatctc

SEQ ID NO: 18386 - DNA, 20 bp, synthetic construct
  source 1..20: mol_type = other DNA
gccagcttttcagcagtctc

SEQ ID NO: 18387 - DNA, 20 bp, synthetic construct
  source 1..20: mol_type = other DNA
gcagtcacagttatgattgg

SEQ ID NO: 18388 - DNA, 20 bp, synthetic construct
  source 1..20: mol_type = other DNA
gcaagtttctcaatagtaga

SEQ ID NO: 18389 - DNA, 20 bp, synthetic construct
  source 1..20: mol_type = other DNA
cagcaccgccacctcgcgga

SEQ ID NO: 18390 - DNA, 20 bp, synthetic construct
  source 1..20: mol_type = other DNA
cgtgcgggtgcagaccggcg

SEQ ID NO: 18391 - DNA, 20 bp, synthetic construct
  source 1..20: mol_type = other DNA
gccgctctccaccatccgcg

SEQ ID NO: 18392 - DNA, 20 bp, synthetic construct
  source 1..20: mol_type = other DNA
acctagaagaaaaaacaaag

SEQ ID NO: 18393 - DNA, 20 bp, synthetic construct
  source 1..20: mol_type = other DNA
tgggtgagacagggcactgt

SEQ ID NO: 18394 - DNA, 20 bp, synthetic construct
  source 1..20: mol_type = other DNA
aatgaagaaagtccagacct

SEQ ID NO: 18395 - DNA, 20 bp, synthetic construct
  source 1..20: mol_type = other DNA
cctgtctcacccatacttcc

SEQ ID NO: 18396 - DNA, 20 bp, synthetic construct
  source 1..20: mol_type = other DNA
ccaggcggcatggagaagga

SEQ ID NO: 18397 - DNA, 20 bp, synthetic construct
  source 1..20: mol_type = other DNA
gccaacactccagagatcca

SEQ ID NO: 18398 - DNA, 20 bp, synthetic construct
  source 1..20: mol_type = other DNA
gatacctttatggtttcagt

SEQ ID NO: 18399 - DNA, 20 bp, synthetic construct
  source 1..20: mol_type = other DNA
gaccacgttggggtgctcga

SEQ ID NO: 18400 - DNA, 20 bp, synthetic construct
  source 1..20: mol_type = other DNA
acgaatgcgtggcggagatc

SEQ ID NO: 18401 - DNA, 20 bp, synthetic construct
  source 1..20: mol_type = other DNA
atgatgtttcagcttctccg

SEQ ID NO: 18402 - DNA, 20 bp, synthetic construct
  source 1..20: mol_type = other DNA
gaccttcgagcaccccaacg

SEQ ID NO: 18403 - DNA, 20 bp, synthetic construct
  source 1..20: mol_type = other DNA
actaggcaaagacctacttc

SEQ ID NO: 18404 - DNA, 20 bp, synthetic construct
  source 1..20: mol_type = other DNA
ctaggccagtcttcttctcc

SEQ ID NO: 18405 - DNA, 20 bp, synthetic construct
  source 1..20: mol_type = other DNA
ggccttgaacaccttcccat

SEQ ID NO: 18406 - DNA, 20 bp, synthetic construct
  source 1..20: mol_type = other DNA
tcgagcaccccaacgtggtc

SEQ ID NO: 18407 - DNA, 20 bp, synthetic construct
  source 1..20: mol_type = other DNA
actccagagatccacggggg

SEQ ID NO: 18408 - DNA, 20 bp, synthetic construct
  source 1..20: mol_type = other DNA
gcgggtgcagaccggcgagg

SEQ ID NO: 18409 - DNA, 20 bp, synthetic construct
  source 1..20: mol_type = other DNA
tcacccatacttccaggacc

SEQ ID NO: 18410 - DNA, 20 bp, synthetic construct
  source 1..20: mol_type = other DNA
tctgaacttccacgaaaaag

SEQ ID NO: 18411 - DNA, 20 bp, synthetic construct
  source 1..20: mol_type = other DNA
ccagcagtacgaatgcgtgg

SEQ ID NO: 18412 - DNA, 20 bp, synthetic construct
  source 1..20: mol_type = other DNA
tgacgacctgcaatggcaag

SEQ ID NO: 18413 - DNA, 20 bp, synthetic construct
  source 1..20: mol_type = other DNA
aacactccagagatccacgg

SEQ ID NO: 18414 - DNA, 20 bp, synthetic construct
  source 1..20: mol_type = other DNA
tgatcaactaggaaaaatct

SEQ ID NO: 18415 - DNA, 20 bp, synthetic construct
  source 1..20: mol_type = other DNA
cggggagggcgcctatggga

SEQ ID NO: 18416 - DNA, 20 bp, synthetic construct
  source 1..20: mol_type = other DNA
ctggctcacctgaccacgtt

SEQ ID NO: 18417 - DNA, 20 bp, synthetic construct
  source 1..20: mol_type = other DNA
cgggggtggcgtagctggac

SEQ ID NO: 18418 - DNA, 20 bp, synthetic construct
  source 1..20: mol_type = other DNA
tccgcgaggtggcggtgctg

SEQ ID NO: 18419 - DNA, 20 bp, synthetic construct
  source 1..20: mol_type = other DNA
cgggtgcagaccggcgagga

SEQ ID NO: 18420 - DNA, 20 bp, synthetic construct
  source 1..20: mol_type = other DNA
ctggtcaccagaatgttctg

SEQ ID NO: 18421 - DNA, 20 bp, synthetic construct
  source 1..20: mol_type = other DNA
ggtggcggtgctgaggcacc

SEQ ID NO: 18422 - DNA, 20 bp, synthetic construct
  source 1..20: mol_type = other DNA
tgaccagcagtacgaatgcg

SEQ ID NO: 18423 - DNA, 20 bp, synthetic construct
  source 1..20: mol_type = other DNA
ccgccacgcattcgtactgc

SEQ ID NO: 18424 - DNA, 20 bp, synthetic construct
  source 1..20: mol_type = other DNA
aaggcccgcgacttgaagaa

SEQ ID NO: 18425 - DNA, 20 bp, synthetic construct
  source 1..20: mol_type = other DNA
cattgcaggtcgtcacgctg

SEQ ID NO: 18426 - DNA, 20 bp, synthetic construct
  source 1..20: mol_type = other DNA
tgtagcgtgattggactccc

SEQ ID NO: 18427 - DNA, 20 bp, synthetic construct
  source 1..20: mol_type = other DNA
cgcgcttcaacgccacgaaa

SEQ ID NO: 18428 - DNA, 20 bp, synthetic construct
  source 1..20: mol_type = other DNA
tcaggctgtattcagctccg

SEQ ID NO: 18429 - DNA, 20 bp, synthetic construct
  source 1..20: mol_type = other DNA
attcgtactgctggtcagcg

SEQ ID NO: 18430 - DNA, 20 bp, synthetic construct
  source 1..20: mol_type = other DNA
ccaacgtggtcaggtgagcc

SEQ ID NO: 18431 - DNA, 20 bp, synthetic construct
  source 1..20: mol_type = other DNA
cctggctcacctgaccacgt

SEQ ID NO: 18432 - DNA, 20 bp, synthetic construct
  source 1..20: mol_type = other DNA
ctggaagtatgggtgagaca

SEQ ID NO: 18433 - DNA, 20 bp, synthetic construct
  source 1..20: mol_type = other DNA
cgctacaaaagaaccacaca

SEQ ID NO: 18434 - DNA, 20 bp, synthetic construct
  source 1..20: mol_type = other DNA
taggccagtcttcttctcct

SEQ ID NO: 18435 - DNA, 20 bp, synthetic construct
  source 1..20: mol_type = other DNA
cccgtggatctctggagtgt

SEQ ID NO: 18436 - DNA, 20 bp, synthetic construct
  source 1..20: mol_type = other DNA
gtccagctacgccacccccg

SEQ ID NO: 18437 - DNA, 20 bp, synthetic construct
  source 1..20: mol_type = other DNA
ctggactggagcaagacttc

SEQ ID NO: 18438 - DNA, 20 bp, synthetic construct
  source 1..20: mol_type = other DNA
atgcgtggcggagatcgggg

SEQ ID NO: 18439 - DNA, 20 bp, synthetic construct
  source 1..20: mol_type = other DNA
caacactccagagatccacg

SEQ ID NO: 18440 - DNA, 20 bp, synthetic construct
  source 1..20: mol_type = other DNA
gcctcagcaccgccacctcg

SEQ ID NO: 18441 - DNA, 20 bp, synthetic construct
  source 1..20: mol_type = other DNA
ctgggaagggcaacatctct

SEQ ID NO: 18442 - DNA, 20 bp, synthetic construct
  source 1..20: mol_type = other DNA
cgaatgcgtggcggagatcg

SEQ ID NO: 18443 - DNA, 20 bp, synthetic construct
  source 1..20: mol_type = other DNA
ccaacactccagagatccac

SEQ ID NO: 18444 - DNA, 20 bp, synthetic construct
  source 1..20: mol_type = other DNA
cacagcgtgacgacctgcaa

SEQ ID NO: 18445 - DNA, 20 bp, synthetic construct
  source 1..20: mol_type = other DNA
aatgaaaagcctgcctggga

SEQ ID NO: 18446 - DNA, 20 bp, synthetic construct
  source 1..20: mol_type = other DNA
caacgtggtcaggtgagcca

SEQ ID NO: 18447 - DNA, 20 bp, synthetic construct
  source 1..20: mol_type = other DNA
caccgccacctcgcggatgg

SEQ ID NO: 18448 - DNA, 20 bp, synthetic construct
  source 1..20: mol_type = other DNA
ccagatggctctaacctcag

SEQ ID NO: 18449 - DNA, 20 bp, synthetic construct
  source 1..20: mol_type = other DNA
tgcgtggcggagatcgggga

SEQ ID NO: 18450 - DNA, 20 bp, synthetic construct
  source 1..20: mol_type = other DNA
gcccgcgacttgaagaacgg

SEQ ID NO: 18451 - DNA, 20 bp, synthetic construct
  source 1..20: mol_type = other DNA
tggctcacctgaccacgttg

SEQ ID NO: 18452 - DNA, 20 bp, synthetic construct
  source 1..20: mol_type = other DNA
acctcgcggatggtggagag

SEQ ID NO: 18453 - DNA, 20 bp, synthetic construct
  source 1..20: mol_type = other DNA
tgatacctttatggtttcag

SEQ ID NO: 18454 - DNA, 20 bp, synthetic construct
  source 1..20: mol_type = other DNA
gctggactggagcaagactt

SEQ ID NO: 18455 - DNA, 20 bp, synthetic construct
  source 1..20: mol_type = other DNA
ggggaactgggtgagaaaga

SEQ ID NO: 18456 - DNA, 20 bp, synthetic construct
  source 1..20: mol_type = other DNA
cgatgaggtccagtgcgtat

SEQ ID NO: 18457 - DNA, 20 bp, synthetic construct
  source 1..20: mol_type = other DNA
ccagaagaagtcgtggttga

SEQ ID NO: 18458 - DNA, 20 bp, synthetic construct
  source 1..20: mol_type = other DNA
ctcgaacatggacgtcaggt

SEQ ID NO: 18459 - DNA, 20 bp, synthetic construct
  source 1..20: mol_type = other DNA
ggtgcatcatggcagagatg

SEQ ID NO: 18460 - DNA, 20 bp, synthetic construct
  source 1..20: mol_type = other DNA
ctatgcaggatctgcaggaa

SEQ ID NO: 18461 - DNA, 20 bp, synthetic construct
  source 1..20: mol_type = other DNA
aaactccgtctggttggtgg

SEQ ID NO: 18462 - DNA, 20 bp, synthetic construct
  source 1..20: mol_type = other DNA
gttccccattacagccttgc

SEQ ID NO: 18463 - DNA, 20 bp, synthetic construct
  source 1..20: mol_type = other DNA
gccgcagagctgactgatga

SEQ ID NO: 18464 - DNA, 20 bp, synthetic construct
  source 1..20: mol_type = other DNA
cctcaccgagcaacagctcc

SEQ ID NO: 18465 - DNA, 20 bp, synthetic construct
  source 1..20: mol_type = other DNA
ggagagcatgcccttgaggt

SEQ ID NO: 18466 - DNA, 20 bp, synthetic construct
  source 1..20: mol_type = other DNA
ggtaccagagtgtcaccaca

SEQ ID NO: 18467 - DNA, 20 bp, synthetic construct
  source 1..20: mol_type = other DNA
tcctcaccgagcaacagctc

SEQ ID NO: 18468 - DNA, 20 bp, synthetic construct
  source 1..20: mol_type = other DNA
tggggaactgggtgagaaag

SEQ ID NO: 18469 - DNA, 20 bp, synthetic construct
  source 1..20: mol_type = other DNA
ccttcttcagagccaccttc

SEQ ID NO: 18470 - DNA, 20 bp, synthetic construct
  source 1..20: mol_type = other DNA
accagaagaagtcgtggttg

SEQ ID NO: 18471 - DNA, 20 bp, synthetic construct
  source 1..20: mol_type = other DNA
agacgcgctcaaactccgtc

SEQ ID NO: 18472 - DNA, 20 bp, synthetic construct
  source 1..20: mol_type = other DNA
gcaaggctgtaatggggaac

SEQ ID NO: 18473 - DNA, 20 bp, synthetic construct
  source 1..20: mol_type = other DNA
ccagagtgtcaccacacggt

SEQ ID NO: 18474 - DNA, 20 bp, synthetic construct
  source 1..20: mol_type = other DNA
ggcagactttgggctggccc

SEQ ID NO: 18475 - DNA, 20 bp, synthetic construct
  source 1..20: mol_type = other DNA
gaacatggacgtcaggtggg

SEQ ID NO: 18476 - DNA, 20 bp, synthetic construct
  source 1..20: mol_type = other DNA
ggccacacctgggagggagg

SEQ ID NO: 18477 - DNA, 20 bp, synthetic construct
  source 1..20: mol_type = other DNA
ggctctgaagaaggtgctga

SEQ ID NO: 18478 - DNA, 20 bp, synthetic construct
  source 1..20: mol_type = other DNA
acatccacagaaacaaggtg

SEQ ID NO: 18479 - DNA, 20 bp, synthetic construct
  source 1..20: mol_type = other DNA
aggcaccttcgggtaaggct

SEQ ID NO: 18480 - DNA, 20 bp, synthetic construct
  source 1..20: mol_type = other DNA
tgagcgcgtcttctgagggc

SEQ ID NO: 18481 - DNA, 20 bp, synthetic construct
  source 1..20: mol_type = other DNA
catccacagaaacaaggtgg

SEQ ID NO: 18482 - DNA, 20 bp, synthetic construct
  source 1..20: mol_type = other DNA
ttggccacacctgggaggga

SEQ ID NO: 18483 - DNA, 20 bp, synthetic construct
  source 1..20: mol_type = other DNA
ggtcggaccagaagaagtcg

SEQ ID NO: 18484 - DNA, 20 bp, synthetic construct
  source 1..20: mol_type = other DNA
ctcaccgagcaacagctccg

SEQ ID NO: 18485 - DNA, 20 bp, synthetic construct
  source 1..20: mol_type = other DNA
ctcaaactccgtctggttgg

SEQ ID NO: 18486 - DNA, 20 bp, synthetic construct
  source 1..20: mol_type = other DNA
tcaccacacggttggtgtag

SEQ ID NO: 18487 - DNA, 20 bp, synthetic construct
  source 1..20: mol_type = other DNA
cgagcaacagctccgggggc

SEQ ID NO: 18488 - DNA, 20 bp, synthetic construct
  source 1..20: mol_type = other DNA
cccggagctgttgctcggtg

SEQ ID NO: 18489 - DNA, 20 bp, synthetic construct
  source 1..20: mol_type = other DNA
cctgggaagaagagcgcacc

SEQ ID NO: 18490 - DNA, 20 bp, synthetic construct
  source 1..20: mol_type = other DNA
tccgtctggttggtggtggc

SEQ ID NO: 18491 - DNA, 20 bp, synthetic construct
  source 1..20: mol_type = other DNA
aaggcaccttcgggtaaggc

SEQ ID NO: 18492 - DNA, 20 bp, synthetic construct
  source 1..20: mol_type = other DNA
tgatgcacccagcaccccac

SEQ ID NO: 18493 - DNA, 20 bp, synthetic construct
  source 1..20: mol_type = other DNA
gcaccagcagcttgtcgatg

SEQ ID NO: 18494 - DNA, 20 bp, synthetic construct
  source 1..20: mol_type = other DNA
cctatgcaggatctgcagga

SEQ ID NO: 18495 - DNA, 20 bp, synthetic construct
  source 1..20: mol_type = other DNA
ctcccaggtgtggccaaacg

SEQ ID NO: 18496 - DNA, 20 bp, synthetic construct
  source 1..20: mol_type = other DNA
tcaccgagcaacagctccgg

SEQ ID NO: 18497 - DNA, 20 bp, synthetic construct
  source 1..20: mol_type = other DNA
gctcgcagaagtcgaacacc

SEQ ID NO: 18498 - DNA, 20 bp, synthetic construct
  source 1..20: mol_type = other DNA
agccgcagagctgactgatg

SEQ ID NO: 18499 - DNA, 20 bp, synthetic construct
  source 1..20: mol_type = other DNA
tcgatgaggtccagtgcgta

SEQ ID NO: 18500 - DNA, 20 bp, synthetic construct
  source 1..20: mol_type = other DNA
agttccccattacagccttg

SEQ ID NO: 18501 - DNA, 20 bp, synthetic construct
  source 1..20: mol_type = other DNA
taatcaacagtggctgtgta

SEQ ID NO: 18502 - DNA, 20 bp, synthetic construct
  source 1..20: mol_type = other DNA
gagtcaggaccgtgtgctca

SEQ ID NO: 18503 - DNA, 20 bp, synthetic construct
  source 1..20: mol_type = other DNA
atcatctgcagccatttacc

SEQ ID NO: 18504 - DNA, 20 bp, synthetic construct
  source 1..20: mol_type = other DNA
cagttaaaacacagaccttc

SEQ ID NO: 18505 - DNA, 20 bp, synthetic construct
  source 1..20: mol_type = other DNA
catctctgtgctgtcactgt

SEQ ID NO: 18506 - DNA, 20 bp, synthetic construct
  source 1..20: mol_type = other DNA
ggaacagggcaatagtatga

SEQ ID NO: 18507 - DNA, 20 bp, synthetic construct
  source 1..20: mol_type = other DNA
aaagctccaataatcaacag

SEQ ID NO: 18508 - DNA, 20 bp, synthetic construct
  source 1..20: mol_type = other DNA
tccattaatacaaaacatct

SEQ ID NO: 18509 - DNA, 20 bp, synthetic construct
  source 1..20: mol_type = other DNA
gccccgggggccgctccatg

SEQ ID NO: 18510 - DNA, 20 bp, synthetic construct
  source 1..20: mol_type = other DNA
cagtattccattgctagaag

SEQ ID NO: 18511 - DNA, 20 bp, synthetic construct
  source 1..20: mol_type = other DNA
ccatggggcgggagggcaag

SEQ ID NO: 18512 - DNA, 20 bp, synthetic construct
  source 1..20: mol_type = other DNA
gagatctccgaaaggtagtg

SEQ ID NO: 18513 - DNA, 20 bp, synthetic construct
  source 1..20: mol_type = other DNA
gcaggctctttcagggacaa

SEQ ID NO: 18514 - DNA, 20 bp, synthetic construct
  source 1..20: mol_type = other DNA
ttatacagctgcgtaaagtg

SEQ ID NO: 18515 - DNA, 20 bp, synthetic construct
  source 1..20: mol_type = other DNA
agcttctttgatattactga

SEQ ID NO: 18516 - DNA, 20 bp, synthetic construct
  source 1..20: mol_type = other DNA
cagcttctttgatattactg

SEQ ID NO: 18517 - DNA, 20 bp, synthetic construct
  source 1..20: mol_type = other DNA
gtaccagcatcgggtgaggc

SEQ ID NO: 18518 - DNA, 20 bp, synthetic construct
  source 1..20: mol_type = other DNA
ctagcaatggaatactgttc

SEQ ID NO: 18519 - DNA, 20 bp, synthetic construct
  source 1..20: mol_type = other DNA
tgggaccctcagcagagagg

SEQ ID NO: 18520 - DNA, 20 bp, synthetic construct
  source 1..20: mol_type = other DNA
ccgggggccgctccatgggg

SEQ ID NO: 18521 - DNA, 20 bp, synthetic construct
  source 1..20: mol_type = other DNA
ggcagccatgctgatgtctg

SEQ ID NO: 18522 - DNA, 20 bp, synthetic construct
  source 1..20: mol_type = other DNA
ttttacctcagcatagtgga

SEQ ID NO: 18523 - DNA, 20 bp, synthetic construct
  source 1..20: mol_type = other DNA
agcaatacattcaaatacca

SEQ ID NO: 18524 - DNA, 20 bp, synthetic construct
  source 1..20: mol_type = other DNA
gccccatggagcggcccccg

SEQ ID NO: 18525 - DNA, 20 bp, synthetic construct
  source 1..20: mol_type = other DNA
tgtaccagcatcgggtgagg

SEQ ID NO: 18526 - DNA, 20 bp, synthetic construct
  source 1..20: mol_type = other DNA
cgccccatggagcggccccc

SEQ ID NO: 18527 - DNA, 20 bp, synthetic construct
  source 1..20: mol_type = other DNA
ctacaaaggctatttggttg

SEQ ID NO: 18528 - DNA, 20 bp, synthetic construct
  source 1..20: mol_type = other DNA
tgggagatgcgggagcggct

SEQ ID NO: 18529 - DNA, 20 bp, synthetic construct
  source 1..20: mol_type = other DNA
tctactccctaaggtggaag

SEQ ID NO: 18530 - DNA, 20 bp, synthetic construct
  source 1..20: mol_type = other DNA
caggatgttggtggaaaggt

SEQ ID NO: 18531 - DNA, 20 bp, synthetic construct
  source 1..20: mol_type = other DNA
gcttattctcaaagagctct

SEQ ID NO: 18532 - DNA, 20 bp, synthetic construct
  source 1..20: mol_type = other DNA
acaaagggcagcaatgtaag

SEQ ID NO: 18533 - DNA, 20 bp, synthetic construct
  source 1..20: mol_type = other DNA
tcatgaggcaaatgaggaac

SEQ ID NO: 18534 - DNA, 20 bp, synthetic construct
  source 1..20: mol_type = other DNA
tatacagctgcgtaaagtgt

SEQ ID NO: 18535 - DNA, 20 bp, synthetic construct
  source 1..20: mol_type = other DNA
taccagcatcgggtgaggcg

SEQ ID NO: 18536 - DNA, 20 bp, synthetic construct
  source 1..20: mol_type = other DNA
gggccgctccatggggcggg

SEQ ID NO: 18537 - DNA, 20 bp, synthetic construct
  source 1..20: mol_type = other DNA
ctataaaagacatcagtcag

SEQ ID NO: 18538 - DNA, 20 bp, synthetic construct
  source 1..20: mol_type = other DNA
gaaaaaggcagaaagaaata

SEQ ID NO: 18539 - DNA, 20 bp, synthetic construct
  source 1..20: mol_type = other DNA
tcttcaggatgttggtggaa

SEQ ID NO: 18540 - DNA, 20 bp, synthetic construct
  source 1..20: mol_type = other DNA
cgggggccgctccatggggc

SEQ ID NO: 18541 - DNA, 20 bp, synthetic construct
  source 1..20: mol_type = other DNA
ttctggaggagatctccgaa

SEQ ID NO: 18542 - DNA, 20 bp, synthetic construct
  source 1..20: mol_type = other DNA
gcagccatgctgatgtctga

SEQ ID NO: 18543 - DNA, 20 bp, synthetic construct
  source 1..20: mol_type = other DNA
tcccagggcccgcccgcgcc

SEQ ID NO: 18544 - DNA, 20 bp, synthetic construct
  source 1..20: mol_type = other DNA
cagccgctcccgcatctccc

SEQ ID NO: 18545 - DNA, 20 bp, synthetic construct
  source 1..20: mol_type = other DNA
ggtaagttttgtgtggatat

SEQ ID NO: 18546 - DNA, 20 bp, synthetic construct
  source 1..20: mol_type = other DNA
aactagaaaacatacaaaat

SEQ ID NO: 18547 - DNA, 20 bp, synthetic construct
  source 1..20: mol_type = other DNA
cgggcgggccctgggagatg

SEQ ID NO: 18548 - DNA, 20 bp, synthetic construct
  source 1..20: mol_type = other DNA
acagacgttcccgaagccgc

SEQ ID NO: 18549 - DNA, 20 bp, synthetic construct
  source 1..20: mol_type = other DNA
gggcgggccctgggagatgc

SEQ ID NO: 18550 - DNA, 20 bp, synthetic construct
  source 1..20: mol_type = other DNA
gtctgtaccagcatcgggtg

SEQ ID NO: 18551 - DNA, 20 bp, synthetic construct
  source 1..20: mol_type = other DNA
ggccgctccatggggcggga

SEQ ID NO: 18552 - DNA, 20 bp, synthetic construct
  source 1..20: mol_type = other DNA
tcgacgaacactacgagtac

SEQ ID NO: 18553 - DNA, 20 bp, synthetic construct
  source 1..20: mol_type = other DNA
actgcagatcatctcaaccc

SEQ ID NO: 18554 - DNA, 20 bp, synthetic construct
  source 1..20: mol_type = other DNA
gagctctgcaacaaaaacag

SEQ ID NO: 18555 - DNA, 20 bp, synthetic construct
  source 1..20: mol_type = other DNA
cctttgctgcaacagaaacc

SEQ ID NO: 18556 - DNA, 20 bp, synthetic construct
  source 1..20: mol_type = other DNA
tcggccagcgttaggtggtg

SEQ ID NO: 18557 - DNA, 20 bp, synthetic construct
  source 1..20: mol_type = other DNA
accaggttgggcaggacccg

SEQ ID NO: 18558 - DNA, 20 bp, synthetic construct
  source 1..20: mol_type = other DNA
aggcacacggccaccaggtt

SEQ ID NO: 18559 - DNA, 20 bp, synthetic construct
  source 1..20: mol_type = other DNA
aagacgttcagctgctgtcc

SEQ ID NO: 18560 - DNA, 20 bp, synthetic construct
  source 1..20: mol_type = other DNA
acagatcctgtgcttgatgc

SEQ ID NO: 18561 - DNA, 20 bp, synthetic construct
  source 1..20: mol_type = other DNA
gagctgtaaacagtacttcg

SEQ ID NO: 18562 - DNA, 20 bp, synthetic construct
  source 1..20: mol_type = other DNA
ttaccttccattgcagagaa

SEQ ID NO: 18563 - DNA, 20 bp, synthetic construct
  source 1..20: mol_type = other DNA
tgtcagggccatgtccacca

SEQ ID NO: 18564 - DNA, 20 bp, synthetic construct
  source 1..20: mol_type = other DNA
ggatctgtccagaaccgcag

SEQ ID NO: 18565 - DNA, 20 bp, synthetic construct
  source 1..20: mol_type = other DNA
gcaggccagcgtctgtgacc

SEQ ID NO: 18566 - DNA, 20 bp, synthetic construct
  source 1..20: mol_type = other DNA
tccttacctccaccatggtc

SEQ ID NO: 18567 - DNA, 20 bp, synthetic construct
  source 1..20: mol_type = other DNA
cgctggccttcggctcctgt

SEQ ID NO: 18568 - DNA, 20 bp, synthetic construct
  source 1..20: mol_type = other DNA
ccaggttgggcaggacccgg

SEQ ID NO: 18569 - DNA, 20 bp, synthetic construct
  source 1..20: mol_type = other DNA
caggttcagcacctggagca

SEQ ID NO: 18570 - DNA, 20 bp, synthetic construct
  source 1..20: mol_type = other DNA
gcttcccaatttgaaggaag

SEQ ID NO: 18571 - DNA, 20 bp, synthetic construct
  source 1..20: mol_type = other DNA
tgttttctgccagggagagc

SEQ ID NO: 18572 - DNA, 20 bp, synthetic construct
  source 1..20: mol_type = other DNA
gtgagctgtaaacagtactt

SEQ ID NO: 18573 - DNA, 20 bp, synthetic construct
  source 1..20: mol_type = other DNA
ttacagctcacgattcctgg

SEQ ID NO: 18574 - DNA, 20 bp, synthetic construct
  source 1..20: mol_type = other DNA
atgtcagggccatgtccacc

SEQ ID NO: 18575 - DNA, 20 bp, synthetic construct
  source 1..20: mol_type = other DNA
aggccaaactgaggttctcc

SEQ ID NO: 18576 - DNA, 20 bp, synthetic construct
  source 1..20: mol_type = other DNA
ccagcgcctcaggaatttcg

SEQ ID NO: 18577 - DNA, 20 bp, synthetic construct
  source 1..20: mol_type = other DNA
ggagggcagtgttagcctgg

SEQ ID NO: 18578 - DNA, 20 bp, synthetic construct
  source 1..20: mol_type = other DNA
tttgatgaggtgctcggcgc

SEQ ID NO: 18579 - DNA, 20 bp, synthetic construct
  source 1..20: mol_type = other DNA
tgggaagcttggcctggggg

SEQ ID NO: 18580 - DNA, 20 bp, synthetic construct
  source 1..20: mol_type = other DNA
gagccaagtcagcgtcctgc

SEQ ID NO: 18581 - DNA, 20 bp, synthetic construct
  source 1..20: mol_type = other DNA
caggcacacggccaccaggt

SEQ ID NO: 18582 - DNA, 20 bp, synthetic construct
  source 1..20: mol_type = other DNA
tggtgcgttccacctccacg

SEQ ID NO: 18583 - DNA, 20 bp, synthetic construct
  source 1..20: mol_type = other DNA
tgctgcaacagaaaccaggc

SEQ ID NO: 18584 - DNA, 20 bp, synthetic construct
  source 1..20: mol_type = other DNA
agacgttcagctgctgtcct

SEQ ID NO: 18585 - DNA, 20 bp, synthetic construct
  source 1..20: mol_type = other DNA
agcactgcagagagcggccc

SEQ ID NO: 18586 - DNA, 20 bp, synthetic construct
  source 1..20: mol_type = other DNA
aatggaaccactggtctcgc

SEQ ID NO: 18587 - DNA, 20 bp, synthetic construct
  source 1..20: mol_type = other DNA
gcatgctggaaaaaagcaga

SEQ ID NO: 18588 - DNA, 20 bp, synthetic construct
  source 1..20: mol_type = other DNA
tcaggaagccacgctgtctg

SEQ ID NO: 18589 - DNA, 20 bp, synthetic construct
  source 1..20: mol_type = other DNA
ttcaccaggcttcggtgtag

SEQ ID NO: 18590 - DNA, 20 bp, synthetic construct
  source 1..20: mol_type = other DNA
cagcctgtaacgacaagaac

SEQ ID NO: 18591 - DNA, 20 bp, synthetic construct
  source 1..20: mol_type = other DNA
tgcagtaagacagttccccc

SEQ ID NO: 18592 - DNA, 20 bp, synthetic construct
  source 1..20: mol_type = other DNA
cgagccaagtcagcgtcctg

SEQ ID NO: 18593 - DNA, 20 bp, synthetic construct
  source 1..20: mol_type = other DNA
aattaccttcagatcttcgt

SEQ ID NO: 18594 - DNA, 20 bp, synthetic construct
  source 1..20: mol_type = other DNA
agtctgacctagaatgagag

SEQ ID NO: 18595 - DNA, 20 bp, synthetic construct
  source 1..20: mol_type = other DNA
caggccagcgtctgtgaccg

SEQ ID NO: 18596 - DNA, 20 bp, synthetic construct
  source 1..20: mol_type = other DNA
tactctttggggaatggaat

SEQ ID NO: 18597 - DNA, 20 bp, synthetic construct
  source 1..20: mol_type = other DNA
tctgcaccccagcccggacc

SEQ ID NO: 18598 - DNA, 20 bp, synthetic construct
  source 1..20: mol_type = other DNA
tctctgtgaattcttttgca

SEQ ID NO: 18599 - DNA, 20 bp, synthetic construct
  source 1..20: mol_type = other DNA
caactcactgtggacttgga

SEQ ID NO: 18600 - DNA, 20 bp, synthetic construct
  source 1..20: mol_type = other DNA
aggcagtttgatgaggtgct

SEQ ID NO: 18601 - DNA, 20 bp, synthetic construct
  source 1..20: mol_type = other DNA
cagaggtaaaacccctcccc

SEQ ID NO: 18602 - DNA, 20 bp, synthetic construct
  source 1..20: mol_type = other DNA
tccagcatgcacggccccac

SEQ ID NO: 18603 - DNA, 20 bp, synthetic construct
  source 1..20: mol_type = other DNA
ccaccaggttgggcaggacc

SEQ ID NO: 18604 - DNA, 20 bp, synthetic construct
  source 1..20: mol_type = other DNA
gtctgacctagaatgagaga

SEQ ID NO: 18605 - DNA, 20 bp, synthetic construct
  source 1..20: mol_type = other DNA
ctcacaggtgcacatcctca

SEQ ID NO: 18606 - DNA, 20 bp, synthetic construct
  source 1..20: mol_type = other DNA
tcacaggtgcacatcctcat

SEQ ID NO: 18607 - DNA, 20 bp, synthetic construct
  source 1..20: mol_type = other DNA
gaggtgctcggcgcaggcac

SEQ ID NO: 18608 - DNA, 20 bp, synthetic construct
  source 1..20: mol_type = other DNA
gtggaggtaaggagctggtc

SEQ ID NO: 18609 - DNA, 20 bp, synthetic construct
  source 1..20: mol_type = other DNA
ggcgcaggcactggttacat

SEQ ID NO: 18610 - DNA, 20 bp, synthetic construct
  source 1..20: mol_type = other DNA
aggttcagctgcttgagcga

SEQ ID NO: 18611 - DNA, 20 bp, synthetic construct
  source 1..20: mol_type = other DNA
caccaggttgggcaggaccc

SEQ ID NO: 18612 - DNA, 20 bp, synthetic construct
  source 1..20: mol_type = other DNA
ctgttgcagcaaaggaaagg

SEQ ID NO: 18613 - DNA, 20 bp, synthetic construct
  source 1..20: mol_type = other DNA
tggaggtaaggagctggtcg

SEQ ID NO: 18614 - DNA, 20 bp, synthetic construct
  source 1..20: mol_type = other DNA
ccccaggccgaccgcacgct

SEQ ID NO: 18615 - DNA, 20 bp, synthetic construct
  source 1..20: mol_type = other DNA
attgcagagaatggaaccac

SEQ ID NO: 18616 - DNA, 20 bp, synthetic construct
  source 1..20: mol_type = other DNA
ttccagctctacagccccgg

SEQ ID NO: 18617 - DNA, 20 bp, synthetic construct
  source 1..20: mol_type = other DNA
tgttgcagcaaaggaaaggc

SEQ ID NO: 18618 - DNA, 20 bp, synthetic construct
  source 1..20: mol_type = other DNA
gctgcaggagggcgacattc

SEQ ID NO: 18619 - DNA, 20 bp, synthetic construct
  source 1..20: mol_type = other DNA
cactcaccgtggcggacgcc

SEQ ID NO: 18620 - DNA, 20 bp, synthetic construct
  source 1..20: mol_type = other DNA
ccaactcactgtggacttgg

SEQ ID NO: 18621 - DNA, 20 bp, synthetic construct
  source 1..20: mol_type = other DNA
ctgagctgtgagtgcctccg

SEQ ID NO: 18622 - DNA, 20 bp, synthetic construct
  source 1..20: mol_type = other DNA
gggacttactctttggggaa

SEQ ID NO: 18623 - DNA, 20 bp, synthetic construct
  source 1..20: mol_type = other DNA
cttgaggattcgctgcacca

SEQ ID NO: 18624 - DNA, 20 bp, synthetic construct
  source 1..20: mol_type = other DNA
caggatctgtccagaaccgc

SEQ ID NO: 18625 - DNA, 20 bp, synthetic construct
  source 1..20: mol_type = other DNA
cctcgatgaccaccatggac

SEQ ID NO: 18626 - DNA, 20 bp, synthetic construct
  source 1..20: mol_type = other DNA
ggagccgcaccacctaacgc

SEQ ID NO: 18627 - DNA, 20 bp, synthetic construct
  source 1..20: mol_type = other DNA
gtactcactctgatttgcct

SEQ ID NO: 18628 - DNA, 20 bp, synthetic construct
  source 1..20: mol_type = other DNA
ctctccagtccagatcgacc

SEQ ID NO: 18629 - DNA, 20 bp, synthetic construct
  source 1..20: mol_type = other DNA
gacttaccttgagcaggctc

SEQ ID NO: 18630 - DNA, 20 bp, synthetic construct
  source 1..20: mol_type = other DNA
tctcttcgccgctcggcctc

SEQ ID NO: 18631 - DNA, 20 bp, synthetic construct
  source 1..20: mol_type = other DNA
gcggaggcggcaggaggagg

SEQ ID NO: 18632 - DNA, 20 bp, synthetic construct
  source 1..20: mol_type = other DNA
gagaaccctccccgaggccc

SEQ ID NO: 18633 - DNA, 20 bp, synthetic construct
  source 1..20: mol_type = other DNA
ctgcccgccctcgcgtcgcc

SEQ ID NO: 18634 - DNA, 20 bp, synthetic construct
  source 1..20: mol_type = other DNA
caccagcaggaggaggctgg

SEQ ID NO: 18635 - DNA, 20 bp, synthetic construct
  source 1..20: mol_type = other DNA
ctgctggtgttcgcgagctc

SEQ ID NO: 18636 - DNA, 20 bp, synthetic construct
  source 1..20: mol_type = other DNA
gcttcttctcctccaagccc

SEQ ID NO: 18637 - DNA, 20 bp, synthetic construct
  source 1..20: mol_type = other DNA
agactactggcgagaactgg

SEQ ID NO: 18638 - DNA, 20 bp, synthetic construct
  source 1..20: mol_type = other DNA
gcgtcgccggggcctcgggg

SEQ ID NO: 18639 - DNA, 20 bp, synthetic construct
  source 1..20: mol_type = other DNA
cttctcttctggcagagcag

SEQ ID NO: 18640 - DNA, 20 bp, synthetic construct
  source 1..20: mol_type = other DNA
cggcgctgggggagccgagt

SEQ ID NO: 18641 - DNA, 20 bp, synthetic construct
  source 1..20: mol_type = other DNA
aaagagagaagaaggggaca

SEQ ID NO: 18642 - DNA, 20 bp, synthetic construct
  source 1..20: mol_type = other DNA
cctgcagcggggagcgctcg

SEQ ID NO: 18643 - DNA, 20 bp, synthetic construct
  source 1..20: mol_type = other DNA
cagcggagcctggaagcgcc

SEQ ID NO: 18644 - DNA, 20 bp, synthetic construct
  source 1..20: mol_type = other DNA
tagagaacttggcgtatcac

SEQ ID NO: 18645 - DNA, 20 bp, synthetic construct
  source 1..20: mol_type = other DNA
acagattgccacattagccc

SEQ ID NO: 18646 - DNA, 20 bp, synthetic construct
  source 1..20: mol_type = other DNA
tggctgggatgatgccctca

SEQ ID NO: 18647 - DNA, 20 bp, synthetic construct
  source 1..20: mol_type = other DNA
tcgcccagcatcacgtctgg

SEQ ID NO: 18648 - DNA, 20 bp, synthetic construct
  source 1..20: mol_type = other DNA
ccatgacctttggtttaatg

SEQ ID NO: 18649 - DNA, 20 bp, synthetic construct
  source 1..20: mol_type = other DNA
cagccccaccttctctctca

SEQ ID NO: 18650 - DNA, 20 bp, synthetic construct
  source 1..20: mol_type = other DNA
attaaaccaaaggtcatgga

SEQ ID NO: 18651 - DNA, 20 bp, synthetic construct
  source 1..20: mol_type = other DNA
ctgtaggaaggagggccgca

SEQ ID NO: 18652 - DNA, 20 bp, synthetic construct
  source 1..20: mol_type = other DNA
tgcctggggcaggacgagag

SEQ ID NO: 18653 - DNA, 20 bp, synthetic construct
  source 1..20: mol_type = other DNA
acgctgtgcgtgagctgcga

SEQ ID NO: 18654 - DNA, 20 bp, synthetic construct
  source 1..20: mol_type = other DNA
agtggagaatttctgccatg

SEQ ID NO: 18655 - DNA, 20 bp, synthetic construct
  source 1..20: mol_type = other DNA
taggaaggagggccgcatgg

SEQ ID NO: 18656 - DNA, 20 bp, synthetic construct
  source 1..20: mol_type = other DNA
ccgcaatgtgctggtgtctg

SEQ ID NO: 18657 - DNA, 20 bp, synthetic construct
  source 1..20: mol_type = other DNA
cgatgctgagcttgctggca

SEQ ID NO: 18658 - DNA, 20 bp, synthetic construct
  source 1..20: mol_type = other DNA
tgctgcagggtgtggggggc

SEQ ID NO: 18659 - DNA, 20 bp, synthetic construct
  source 1..20: mol_type = other DNA
gttgccctccaggtattcca

SEQ ID NO: 18660 - DNA, 20 bp, synthetic construct
  source 1..20: mol_type = other DNA
cactgagtacatggccaagg

SEQ ID NO: 18661 - DNA, 20 bp, synthetic construct
  source 1..20: mol_type = other DNA
aggagtagatttcccagaga

SEQ ID NO: 18662 - DNA, 20 bp, synthetic construct
  source 1..20: mol_type = other DNA
cttcaggggctgtggccagg

SEQ ID NO: 18663 - DNA, 20 bp, synthetic construct
  source 1..20: mol_type = other DNA
cgtgtagtctccggggtagt

SEQ ID NO: 18664 - DNA, 20 bp, synthetic construct
  source 1..20: mol_type = other DNA
tggataaggcactcgcccaa

SEQ ID NO: 18665 - DNA, 20 bp, synthetic construct
  source 1..20: mol_type = other DNA
cattaaaccaaaggtcatgg

SEQ ID NO: 18666 - DNA, 20 bp, synthetic construct
  source 1..20: mol_type = other DNA
cagcaatacaggtaccacag

SEQ ID NO: 18667 - DNA, 20 bp, synthetic construct
  source 1..20: mol_type = other DNA
gtacaaagccaaaaacaagg

SEQ ID NO: 18668 - DNA, 20 bp, synthetic construct
  source 1..20: mol_type = other DNA
ctggtacaaagccaaaaaca

SEQ ID NO: 18669 - DNA, 20 bp, synthetic construct
  source 1..20: mol_type = other DNA
cggcaagatcacacgggagc

SEQ ID NO: 18670 - DNA, 20 bp, synthetic construct
  source 1..20: mol_type = other DNA
cactacacctcagacgcaga

SEQ ID NO: 18671 - DNA, 20 bp, synthetic construct
  source 1..20: mol_type = other DNA
gctgcagggtgtggggggca

SEQ ID NO: 18672 - DNA, 20 bp, synthetic construct
  source 1..20: mol_type = other DNA
cgccactgcccaggccttcc

SEQ ID NO: 18673 - DNA, 20 bp, synthetic construct
  source 1..20: mol_type = other DNA
ttgtaccagttggggtcctg

SEQ ID NO: 18674 - DNA, 20 bp, synthetic construct
  source 1..20: mol_type = other DNA
atgccgtgagtaccacgagg

SEQ ID NO: 18675 - DNA, 20 bp, synthetic construct
  source 1..20: mol_type = other DNA
tcacggcatgaggctgagtt

SEQ ID NO: 18676 - DNA, 20 bp, synthetic construct
  source 1..20: mol_type = other DNA
tgtattgctgacatcttctc

SEQ ID NO: 18677 - DNA, 20 bp, synthetic construct
  source 1..20: mol_type = other DNA
acgcacagcgtgtagtctcc

SEQ ID NO: 18678 - DNA, 20 bp, synthetic construct
  source 1..20: mol_type = other DNA
gtagtgctgcagggtgtggg

SEQ ID NO: 18679 - DNA, 20 bp, synthetic construct
  source 1..20: mol_type = other DNA
actgagtacatggccaaggt

SEQ ID NO: 18680 - DNA, 20 bp, synthetic construct
  source 1..20: mol_type = other DNA
tacgcgcctcattaaaccaa

SEQ ID NO: 18681 - DNA, 20 bp, synthetic construct
  source 1..20: mol_type = other DNA
ttatccaagaattgtgagta

SEQ ID NO: 18682 - DNA, 20 bp, synthetic construct
  source 1..20: mol_type = other DNA
gagaccaaagtcgctgacct

SEQ ID NO: 18683 - DNA, 20 bp, synthetic construct
  source 1..20: mol_type = other DNA
ctacatcgtcactgagtaca

SEQ ID NO: 18684 - DNA, 20 bp, synthetic construct
  source 1..20: mol_type = other DNA
ccctgaggccctgagagaga

SEQ ID NO: 18685 - DNA, 20 bp, synthetic construct
  source 1..20: mol_type = other DNA
ggccaggcggcctgcaaggc

SEQ ID NO: 18686 - DNA, 20 bp, synthetic construct
  source 1..20: mol_type = other DNA
caactacgtccagaagcggg

SEQ ID NO: 18687 - DNA, 20 bp, synthetic construct
  source 1..20: mol_type = other DNA
tcacctccaccagctgcatg

SEQ ID NO: 18688 - DNA, 20 bp, synthetic construct
  source 1..20: mol_type = other DNA
tgccgtgagtaccacgagga

SEQ ID NO: 18689 - DNA, 20 bp, synthetic construct
  source 1..20: mol_type = other DNA
ctgcaaggcaggtgacacgt

SEQ ID NO: 18690 - DNA, 20 bp, synthetic construct
  source 1..20: mol_type = other DNA
caggacctgcccttctgcaa

SEQ ID NO: 18691 - DNA, 20 bp, synthetic construct
  source 1..20: mol_type = other DNA
tcttgccgtggaaccaactg

SEQ ID NO: 18692 - DNA, 20 bp, synthetic construct
  source 1..20: mol_type = other DNA
ccccactcacgtcatgactg

SEQ ID NO: 18693 - DNA, 20 bp, synthetic construct
  source 1..20: mol_type = other DNA
ctggggagcagcagggctgg

SEQ ID NO: 18694 - DNA, 20 bp, synthetic construct
  source 1..20: mol_type = other DNA
ggcccagccgcctgtgggga

SEQ ID NO: 18695 - DNA, 20 bp, synthetic construct
  source 1..20: mol_type = other DNA
accaggaacaggcctgtctc

SEQ ID NO: 18696 - DNA, 20 bp, synthetic construct
  source 1..20: mol_type = other DNA
actgcggtagaactcatcct

SEQ ID NO: 18697 - DNA, 20 bp, synthetic construct
  source 1..20: mol_type = other DNA
aggaacaggcctgtctccgg

SEQ ID NO: 18698 - DNA, 20 bp, synthetic construct
  source 1..20: mol_type = other DNA
gtccttcaggggctgtggcc

SEQ ID NO: 18699 - DNA, 20 bp, synthetic construct
  source 1..20: mol_type = other DNA
ttgtagcccttctccacccg

SEQ ID NO: 18700 - DNA, 20 bp, synthetic construct
  source 1..20: mol_type = other DNA
cttcatgacttcatagactg

SEQ ID NO: 18701 - DNA, 20 bp, synthetic construct
  source 1..20: mol_type = other DNA
tacccccagagatgtctgcg

SEQ ID NO: 18702 - DNA, 20 bp, synthetic construct
  source 1..20: mol_type = other DNA
tgcagctggtggaggtgagc

SEQ ID NO: 18703 - DNA, 20 bp, synthetic construct
  source 1..20: mol_type = other DNA
tcacacgggagcaggctgag

SEQ ID NO: 18704 - DNA, 20 bp, synthetic construct
  source 1..20: mol_type = other DNA
caagctcagcatcgacgagg

SEQ ID NO: 18705 - DNA, 20 bp, synthetic construct
  source 1..20: mol_type = other DNA
cgaggccatggaatacctgg

SEQ ID NO: 18706 - DNA, 20 bp, synthetic construct
  source 1..20: mol_type = other DNA
tgctctcccgcaccaggaac

SEQ ID NO: 18707 - DNA, 20 bp, synthetic construct
  source 1..20: mol_type = other DNA
ctcagacaccagcacattgc

SEQ ID NO: 18708 - DNA, 20 bp, synthetic construct
  source 1..20: mol_type = other DNA
aatcgcccagcatcacgtct

SEQ ID NO: 18709 - DNA, 20 bp, synthetic construct
  source 1..20: mol_type = other DNA
gctgcagaccatcgggaagg

SEQ ID NO: 18710 - DNA, 20 bp, synthetic construct
  source 1..20: mol_type = other DNA
tgagaacctcatgcagctgg

SEQ ID NO: 18711 - DNA, 20 bp, synthetic construct
  source 1..20: mol_type = other DNA
gtcagcaatacaggtaccac

SEQ ID NO: 18712 - DNA, 20 bp, synthetic construct
  source 1..20: mol_type = other DNA
tacaaagccaaaaacaaggt

SEQ ID NO: 18713 - DNA, 20 bp, synthetic construct
  source 1..20: mol_type = other DNA
cagccaactacgtccagaag

SEQ ID NO: 18714 - DNA, 20 bp, synthetic construct
  source 1..20: mol_type = other DNA
acagagtccatctgcgtctg

SEQ ID NO: 18715 - DNA, 20 bp, synthetic construct
  source 1..20: mol_type = other DNA
agtgccgtggaagttgtact

SEQ ID NO: 18716 - DNA, 20 bp, synthetic construct
  source 1..20: mol_type = other DNA
gctcctgggcgtgatcgtgg

SEQ ID NO: 18717 - DNA, 20 bp, synthetic construct
  source 1..20: mol_type = other DNA
gtcatgacgtgagtgggggc

SEQ ID NO: 18718 - DNA, 20 bp, synthetic construct
  source 1..20: mol_type = other DNA
cgactttggtctcaccaagg

SEQ ID NO: 18719 - DNA, 20 bp, synthetic construct
  source 1..20: mol_type = other DNA
cgggcaagctgccagtcaag

SEQ ID NO: 18720 - DNA, 20 bp, synthetic construct
  source 1..20: mol_type = other DNA
taccttggtgacggccacaa

SEQ ID NO: 18721 - DNA, 20 bp, synthetic construct
  source 1..20: mol_type = other DNA
atactcacaattcttggata

SEQ ID NO: 18722 - DNA, 20 bp, synthetic construct
  source 1..20: mol_type = other DNA
tgacatcttctcaggagctc

SEQ ID NO: 18723 - DNA, 20 bp, synthetic construct
  source 1..20: mol_type = other DNA
agccaggaaggcctgggcag

SEQ ID NO: 18724 - DNA, 20 bp, synthetic construct
  source 1..20: mol_type = other DNA
attgccaagtacaacttcca

SEQ ID NO: 18725 - DNA, 20 bp, synthetic construct
  source 1..20: mol_type = other DNA
aggtgtagtgctgcagggtg

SEQ ID NO: 18726 - DNA, 20 bp, synthetic construct
  source 1..20: mol_type = other DNA
cagcaagctcagcatcgacg

SEQ ID NO: 18727 - DNA, 20 bp, synthetic construct
  source 1..20: mol_type = other DNA
cctcattaaaccaaaggtca

SEQ ID NO: 18728 - DNA, 20 bp, synthetic construct
  source 1..20: mol_type = other DNA
gtctaggggtcggtcagtgc

SEQ ID NO: 18729 - DNA, 20 bp, synthetic construct
  source 1..20: mol_type = other DNA
atcgcccagcatcacgtctg

SEQ ID NO: 18730 - DNA, 20 bp, synthetic construct
  source 1..20: mol_type = other DNA
gagaatttctgccatgtgga

SEQ ID NO: 18731 - DNA, 20 bp, synthetic construct
  source 1..20: mol_type = other DNA
agccaactacgtccagaagc

SEQ ID NO: 18732 - DNA, 20 bp, synthetic construct
  source 1..20: mol_type = other DNA
ctgtggggaggggccagtga

SEQ ID NO: 18733 - DNA, 20 bp, synthetic construct
  source 1..20: mol_type = other DNA
gccgtcacaggtgcagctcg

SEQ ID NO: 18734 - DNA, 20 bp, synthetic construct
  source 1..20: mol_type = other DNA
atggcctcgcagacatctct

SEQ ID NO: 18735 - DNA, 20 bp, synthetic construct
  source 1..20: mol_type = other DNA
tctgggaaatctactccttt

SEQ ID NO: 18736 - DNA, 20 bp, synthetic construct
  source 1..20: mol_type = other DNA
ggggagttcggaggtgagct

SEQ ID NO: 18737 - DNA, 20 bp, synthetic construct
  source 1..20: mol_type = other DNA
ggttccacggcaagatcaca

SEQ ID NO: 18738 - DNA, 20 bp, synthetic construct
  source 1..20: mol_type = other DNA
gcagctcctgggcgtgatcg

SEQ ID NO: 18739 - DNA, 20 bp, synthetic construct
  source 1..20: mol_type = other DNA
aaaggtcatggagggcacag

SEQ ID NO: 18740 - DNA, 20 bp, synthetic construct
  source 1..20: mol_type = other DNA
ccagttggggtcctggggag

SEQ ID NO: 18741 - DNA, 20 bp, synthetic construct
  source 1..20: mol_type = other DNA
ctgtgagtgaagcagcctct

SEQ ID NO: 18742 - DNA, 20 bp, synthetic construct
  source 1..20: mol_type = other DNA
ggcctcgcagacatctctgg

SEQ ID NO: 18743 - DNA, 20 bp, synthetic construct
  source 1..20: mol_type = other DNA
caactggggagcagcagggc

SEQ ID NO: 18744 - DNA, 20 bp, synthetic construct
  source 1..20: mol_type = other DNA
tacaagatggatgcccccga

SEQ ID NO: 18745 - DNA, 20 bp, synthetic construct
  source 1..20: mol_type = other DNA
gcttcagctccttcatgttc

SEQ ID NO: 18746 - DNA, 20 bp, synthetic construct
  source 1..20: mol_type = other DNA
agttcggaggtgagctgggc

SEQ ID NO: 18747 - DNA, 20 bp, synthetic construct
  source 1..20: mol_type = other DNA
gaggccatggaatacctgga

SEQ ID NO: 18748 - DNA, 20 bp, synthetic construct
  source 1..20: mol_type = other DNA
ccttcaggggctgtggccag

SEQ ID NO: 18749 - DNA, 20 bp, synthetic construct
  source 1..20: mol_type = other DNA
aactacgtccagaagcggga

SEQ ID NO: 18750 - DNA, 20 bp, synthetic construct
  source 1..20: mol_type = other DNA
ggaacaggcctgtctccggc

SEQ ID NO: 18751 - DNA, 20 bp, synthetic construct
  source 1..20: mol_type = other DNA
gggcccagccgcctgtgggg

SEQ ID NO: 18752 - DNA, 20 bp, synthetic construct
  source 1..20: mol_type = other DNA
ctggcagcttgcccgtgtcc

SEQ ID NO: 18753 - DNA, 20 bp, synthetic construct
  source 1..20: mol_type = other DNA
ttttggctttgtaccagttg

SEQ ID NO: 18754 - DNA, 20 bp, synthetic construct
  source 1..20: mol_type = other DNA
gctgctgcagaccatcggga

SEQ ID NO: 18755 - DNA, 20 bp, synthetic construct
  source 1..20: mol_type = other DNA
tggcctcgcagacatctctg

SEQ ID NO: 18756 - DNA, 20 bp, synthetic construct
  source 1..20: mol_type = other DNA
ttcatgacttcatagactgc

SEQ ID NO: 18757 - DNA, 20 bp, synthetic construct
  source 1..20: mol_type = other DNA
atgccgcagttgcctggggc

SEQ ID NO: 18758 - DNA, 20 bp, synthetic construct
  source 1..20: mol_type = other DNA
gcaatacattctgtaccgga

SEQ ID NO: 18759 - DNA, 20 bp, synthetic construct
  source 1..20: mol_type = other DNA
caccattgtggccgtcacca

SEQ ID NO: 18760 - DNA, 20 bp, synthetic construct
  source 1..20: mol_type = other DNA
ttcagggcccagccgcctgt

SEQ ID NO: 18761 - DNA, 20 bp, synthetic construct
  source 1..20: mol_type = other DNA
cactgcggtagaactcatcc

SEQ ID NO: 18762 - DNA, 20 bp, synthetic construct
  source 1..20: mol_type = other DNA
gtgtagtgctgcagggtgtg

SEQ ID NO: 18763 - DNA, 20 bp, synthetic construct
  source 1..20: mol_type = other DNA
tagaccgcaggtagtccaca

SEQ ID NO: 18764 - DNA, 20 bp, synthetic construct
  source 1..20: mol_type = other DNA
ctcgtcgatgctgagcttgc

SEQ ID NO: 18765 - DNA, 20 bp, synthetic construct
  source 1..20: mol_type = other DNA
cctgcaaggcaggtgacacg

SEQ ID NO: 18766 - DNA, 20 bp, synthetic construct
  source 1..20: mol_type = other DNA
tatccaagaattgtgagtat

SEQ ID NO: 18767 - DNA, 20 bp, synthetic construct
  source 1..20: mol_type = other DNA
gcagctggtggaggtgagct

SEQ ID NO: 18768 - DNA, 20 bp, synthetic construct
  source 1..20: mol_type = other DNA
gactgaggcttcagccagga

SEQ ID NO: 18769 - DNA, 20 bp, synthetic construct
  source 1..20: mol_type = other DNA
gcaactgcggcatagcaacc

SEQ ID NO: 18770 - DNA, 20 bp, synthetic construct
  source 1..20: mol_type = other DNA
cttcagctccttcatgttca

SEQ ID NO: 18771 - DNA, 20 bp, synthetic construct
  source 1..20: mol_type = other DNA
ccttcacgccctcccgcttc

SEQ ID NO: 18772 - DNA, 20 bp, synthetic construct
  source 1..20: mol_type = other DNA
ttctgtaccggatggccagg

SEQ ID NO: 18773 - DNA, 20 bp, synthetic construct
  source 1..20: mol_type = other DNA
ctgaccgacccctagaccgc

SEQ ID NO: 18774 - DNA, 20 bp, synthetic construct
  source 1..20: mol_type = other DNA
tcactcacagcgagaacttg

SEQ ID NO: 18775 - DNA, 20 bp, synthetic construct
  source 1..20: mol_type = other DNA
ggagccttgtggactacctg

SEQ ID NO: 18776 - DNA, 20 bp, synthetic construct
  source 1..20: mol_type = other DNA
ccgtcacaggtgcagctcgt

SEQ ID NO: 18777 - DNA, 20 bp, synthetic construct
  source 1..20: mol_type = other DNA
ggatggccaggcggcctgca

SEQ ID NO: 18778 - DNA, 20 bp, synthetic construct
  source 1..20: mol_type = other DNA
gcccagccgcctgtggggag

SEQ ID NO: 18779 - DNA, 20 bp, synthetic construct
  source 1..20: mol_type = other DNA
taatcgcccagcatcacgtc

SEQ ID NO: 18780 - DNA, 20 bp, synthetic construct
  source 1..20: mol_type = other DNA
tgctgcagaccatcgggaag

SEQ ID NO: 18781 - DNA, 20 bp, synthetic construct
  source 1..20: mol_type = other DNA
cgtcactgagtacatggcca

SEQ ID NO: 18782 - DNA, 20 bp, synthetic construct
  source 1..20: mol_type = other DNA
ggtgtagtgctgcagggtgt

SEQ ID NO: 18783 - DNA, 20 bp, synthetic construct
  source 1..20: mol_type = other DNA
tcagggcccagccgcctgtg

SEQ ID NO: 18784 - DNA, 20 bp, synthetic construct
  source 1..20: mol_type = other DNA
actccacacgtcagacttag

SEQ ID NO: 18785 - DNA, 20 bp, synthetic construct
  source 1..20: mol_type = other DNA
cgtctgaggtgtagtgctgc

SEQ ID NO: 18786 - DNA, 20 bp, synthetic construct
  source 1..20: mol_type = other DNA
ctttgtaccagttggggtcc

SEQ ID NO: 18787 - DNA, 20 bp, synthetic construct
  source 1..20: mol_type = other DNA
cagttggggtcctggggaga

SEQ ID NO: 18788 - DNA, 20 bp, synthetic construct
  source 1..20: mol_type = other DNA
gaacctcatgcagctggtgg

SEQ ID NO: 18789 - DNA, 20 bp, synthetic construct
  source 1..20: mol_type = other DNA
gcttctggacgtagttggct

SEQ ID NO: 18790 - DNA, 20 bp, synthetic construct
  source 1..20: mol_type = other DNA
cctcagacaccagcacattg

SEQ ID NO: 18791 - DNA, 20 bp, synthetic construct
  source 1..20: mol_type = other DNA
ctgctgcagaccatcgggaa

SEQ ID NO: 18792 - DNA, 20 bp, synthetic construct
  source 1..20: mol_type = other DNA
cttggcaatacattctgtac

SEQ ID NO: 18793 - DNA, 20 bp, synthetic construct
  source 1..20: mol_type = other DNA
tccgaactcccccttcccga

SEQ ID NO: 18794 - DNA, 20 bp, synthetic construct
  source 1..20: mol_type = other DNA
tgtagtgctgcagggtgtgg

SEQ ID NO: 18795 - DNA, 20 bp, synthetic construct
  source 1..20: mol_type = other DNA
tctaggggtcggtcagtgct

SEQ ID NO: 18796 - DNA, 20 bp, synthetic construct
  source 1..20: mol_type = other DNA
ggaaccaactggggagcagc

SEQ ID NO: 18797 - DNA, 20 bp, synthetic construct
  source 1..20: mol_type = other DNA
cgcacagcgtgtagtctccg

SEQ ID NO: 18798 - DNA, 20 bp, synthetic construct
  source 1..20: mol_type = other DNA
tcgcagacatctctgggggt

SEQ ID NO: 18799 - DNA, 20 bp, synthetic construct
  source 1..20: mol_type = other DNA
ctcatgccgtgagtaccacg

SEQ ID NO: 18800 - DNA, 20 bp, synthetic construct
  source 1..20: mol_type = other DNA
cacaaggctcccctgggggc

SEQ ID NO: 18801 - DNA, 20 bp, synthetic construct
  source 1..20: mol_type = other DNA
gctcccgtgtgatcttgccg

SEQ ID NO: 18802 - DNA, 20 bp, synthetic construct
  source 1..20: mol_type = other DNA
tgagcggcttctgtacccgc

SEQ ID NO: 18803 - DNA, 20 bp, synthetic construct
  source 1..20: mol_type = other DNA
caaaaacaaggtgggccgtg

SEQ ID NO: 18804 - DNA, 20 bp, synthetic construct
  source 1..20: mol_type = other DNA
gccgtgagtaccacgaggag

SEQ ID NO: 18805 - DNA, 20 bp, synthetic construct
  source 1..20: mol_type = other DNA
aggctcccctgggggcagga

SEQ ID NO: 18806 - DNA, 20 bp, synthetic construct
  source 1..20: mol_type = other DNA
gaaccaactggggagcagca

SEQ ID NO: 18807 - DNA, 20 bp, synthetic construct
  source 1..20: mol_type = other DNA
gttccacggcaagatcacac

SEQ ID NO: 18808 - DNA, 20 bp, synthetic construct
  source 1..20: mol_type = other DNA
tcacgcccaggagctgcacc

SEQ ID NO: 18809 - DNA, 20 bp, synthetic construct
  source 1..20: mol_type = other DNA
gttcagggcccagccgcctg

SEQ ID NO: 18810 - DNA, 20 bp, synthetic construct
  source 1..20: mol_type = other DNA
ggctgtggccagggggaggc

SEQ ID NO: 18811 - DNA, 20 bp, synthetic construct
  source 1..20: mol_type = other DNA
tcatgactgaggcttcagcc

SEQ ID NO: 18812 - DNA, 20 bp, synthetic construct
  source 1..20: mol_type = other DNA
tgtggactacctgcggtcta

SEQ ID NO: 18813 - DNA, 20 bp, synthetic construct
  source 1..20: mol_type = other DNA
agaattgtgagtatgggtac

SEQ ID NO: 18814 - DNA, 20 bp, synthetic construct
  source 1..20: mol_type = other DNA
cgggagagcaccaactaccc

SEQ ID NO: 18815 - DNA, 20 bp, synthetic construct
  source 1..20: mol_type = other DNA
tcagcaatacaggtaccaca

SEQ ID NO: 18816 - DNA, 20 bp, synthetic construct
  source 1..20: mol_type = other DNA
cacgcacagcgtgtagtctc

SEQ ID NO: 18817 - DNA, 20 bp, synthetic construct
  source 1..20: mol_type = other DNA
tacaggtaccacaggggtga

SEQ ID NO: 18818 - DNA, 20 bp, synthetic construct
  source 1..20: mol_type = other DNA
gcagaagggcaggtcctgct

SEQ ID NO: 18819 - DNA, 20 bp, synthetic construct
  source 1..20: mol_type = other DNA
tttgtaccagttggggtcct

SEQ ID NO: 18820 - DNA, 20 bp, synthetic construct
  source 1..20: mol_type = other DNA
gtctgaggtgtagtgctgca

SEQ ID NO: 18821 - DNA, 20 bp, synthetic construct
  source 1..20: mol_type = other DNA
ccagaagcgggagggcgtga

SEQ ID NO: 18822 - DNA, 20 bp, synthetic construct
  source 1..20: mol_type = other DNA
caaggaggcgtccagcaccc

SEQ ID NO: 18823 - DNA, 20 bp, synthetic construct
  source 1..20: mol_type = other DNA
cagcgactttggtctcacca

SEQ ID NO: 18824 - DNA, 20 bp, synthetic construct
  source 1..20: mol_type = other DNA
ctcagtcatgacgtgagtgg

SEQ ID NO: 18825 - DNA, 20 bp, synthetic construct
  source 1..20: mol_type = other DNA
taagaacgacgccactgccc

SEQ ID NO: 18826 - DNA, 20 bp, synthetic construct
  source 1..20: mol_type = other DNA
agtcaagtggacagcccctg

SEQ ID NO: 18827 - DNA, 20 bp, synthetic construct
  source 1..20: mol_type = other DNA
actcacctttgcagaagaca

SEQ ID NO: 18828 - DNA, 20 bp, synthetic construct
  source 1..20: mol_type = other DNA
gtgtgtgagtatgcatctcc

SEQ ID NO: 18829 - DNA, 20 bp, synthetic construct
  source 1..20: mol_type = other DNA
ggaacccagatttatgtaat

SEQ ID NO: 18830 - DNA, 20 bp, synthetic construct
  source 1..20: mol_type = other DNA
tcacctgaatcagtagtttg

SEQ ID NO: 18831 - DNA, 20 bp, synthetic construct
  source 1..20: mol_type = other DNA
gttacttggcttaacccttc

SEQ ID NO: 18832 - DNA, 20 bp, synthetic construct
  source 1..20: mol_type = other DNA
gggttaagccaagtaactgt

SEQ ID NO: 18833 - DNA, 20 bp, synthetic construct
  source 1..20: mol_type = other DNA
tatcctgcttcagtacaaca

SEQ ID NO: 18834 - DNA, 20 bp, synthetic construct
  source 1..20: mol_type = other DNA
tttttcatatattcagtaac

SEQ ID NO: 18835 - DNA, 20 bp, synthetic construct
  source 1..20: mol_type = other DNA
gccgcctatgcaacaagata

SEQ ID NO: 18836 - DNA, 20 bp, synthetic construct
  source 1..20: mol_type = other DNA
tcaaaccaagcacgaggagc

SEQ ID NO: 18837 - DNA, 20 bp, synthetic construct
  source 1..20: mol_type = other DNA
cgtcacttgcactgttctgg

SEQ ID NO: 18838 - DNA, 20 bp, synthetic construct
  source 1..20: mol_type = other DNA
taatcttgtatctagaatcc

SEQ ID NO: 18839 - DNA, 20 bp, synthetic construct
  source 1..20: mol_type = other DNA
accttaataaaattatatct

SEQ ID NO: 18840 - DNA, 20 bp, synthetic construct
  source 1..20: mol_type = other DNA
tcctcactcagctgtcctcc

SEQ ID NO: 18841 - DNA, 20 bp, synthetic construct
  source 1..20: mol_type = other DNA
gagctccatatatctggact

SEQ ID NO: 18842 - DNA, 20 bp, synthetic construct
  source 1..20: mol_type = other DNA
tttcagttccaagaacccag

SEQ ID NO: 18843 - DNA, 20 bp, synthetic construct
  source 1..20: mol_type = other DNA
ttaataccttttcttcaaca

SEQ ID NO: 18844 - DNA, 20 bp, synthetic construct
  source 1..20: mol_type = other DNA
cacggatactcacagtctag

SEQ ID NO: 18845 - DNA, 20 bp, synthetic construct
  source 1..20: mol_type = other DNA
gcatccagcaggtgtacaca

SEQ ID NO: 18846 - DNA, 20 bp, synthetic construct
  source 1..20: mol_type = other DNA
cgtatcctcctgcctagcgc

SEQ ID NO: 18847 - DNA, 20 bp, synthetic construct
  source 1..20: mol_type = other DNA
ccactgtgggacggaagaga

SEQ ID NO: 18848 - DNA, 20 bp, synthetic construct
  source 1..20: mol_type = other DNA
ggcgaacccaatgtctattg

SEQ ID NO: 18849 - DNA, 20 bp, synthetic construct
  source 1..20: mol_type = other DNA
cgtgtagagctccatatatc

SEQ ID NO: 18850 - DNA, 20 bp, synthetic construct
  source 1..20: mol_type = other DNA
cactgtctgtacatacattt

SEQ ID NO: 18851 - DNA, 20 bp, synthetic construct
  source 1..20: mol_type = other DNA
aacccaatgtctattgaggt

SEQ ID NO: 18852 - DNA, 20 bp, synthetic construct
  source 1..20: mol_type = other DNA
acaccagcagttacttggcg

SEQ ID NO: 18853 - DNA, 20 bp, synthetic construct
  source 1..20: mol_type = other DNA
tgaggaacaacgaagagttc

SEQ ID NO: 18854 - DNA, 20 bp, synthetic construct
  source 1..20: mol_type = other DNA
caccagtcaaaccaagcacg

SEQ ID NO: 18855 - DNA, 20 bp, synthetic construct
  source 1..20: mol_type = other DNA
agtcctgtaccttgatcaca

SEQ ID NO: 18856 - DNA, 20 bp, synthetic construct
  source 1..20: mol_type = other DNA
catccttacctctgacggca

SEQ ID NO: 18857 - DNA, 20 bp, synthetic construct
  source 1..20: mol_type = other DNA
tcttactatcaagaaaaatg

SEQ ID NO: 18858 - DNA, 20 bp, synthetic construct
  source 1..20: mol_type = other DNA
caagcagacgagcctctgcc

SEQ ID NO: 18859 - DNA, 20 bp, synthetic construct
  source 1..20: mol_type = other DNA
accttgatcacagggactcg

SEQ ID NO: 18860 - DNA, 20 bp, synthetic construct
  source 1..20: mol_type = other DNA
gcacacaagatgaattagca

SEQ ID NO: 18861 - DNA, 20 bp, synthetic construct
  source 1..20: mol_type = other DNA
tgtgtacacctgctggatgc

SEQ ID NO: 18862 - DNA, 20 bp, synthetic construct
  source 1..20: mol_type = other DNA
ggtcagctgctgcacagtgt

SEQ ID NO: 18863 - DNA, 20 bp, synthetic construct
  source 1..20: mol_type = other DNA
aagtcctgtaccttgatcac

SEQ ID NO: 18864 - DNA, 20 bp, synthetic construct
  source 1..20: mol_type = other DNA
cagcgcatgtttcaagacat

SEQ ID NO: 18865 - DNA, 20 bp, synthetic construct
  source 1..20: mol_type = other DNA
gtaggtacctgtttattcag

SEQ ID NO: 18866 - DNA, 20 bp, synthetic construct
  source 1..20: mol_type = other DNA
aggaatatatgaaatctatt

SEQ ID NO: 18867 - DNA, 20 bp, synthetic construct
  source 1..20: mol_type = other DNA
catgacttggagaaaagtta

SEQ ID NO: 18868 - DNA, 20 bp, synthetic construct
  source 1..20: mol_type = other DNA
gttgaatgcagacattacca

SEQ ID NO: 18869 - DNA, 20 bp, synthetic construct
  source 1..20: mol_type = other DNA
tcataaaaaatacaatgccc

SEQ ID NO: 18870 - DNA, 20 bp, synthetic construct
  source 1..20: mol_type = other DNA
gcattcaagtgctgagctcc

SEQ ID NO: 18871 - DNA, 20 bp, synthetic construct
  source 1..20: mol_type = other DNA
agcattcaagtgctgagctc

SEQ ID NO: 18872 - DNA, 20 bp, synthetic construct
  source 1..20: mol_type = other DNA
cttggagatcatgctggctt

SEQ ID NO: 18873 - DNA, 20 bp, synthetic construct
  source 1..20: mol_type = other DNA
tgagaggtattcaggagacc

SEQ ID NO: 18874 - DNA, 20 bp, synthetic construct
  source 1..20: mol_type = other DNA
gccctacagtccctcgcctg

SEQ ID NO: 18875 - DNA, 20 bp, synthetic construct
  source 1..20: mol_type = other DNA
gttcttccgttgatttgtca

SEQ ID NO: 18876 - DNA, 20 bp, synthetic construct
  source 1..20: mol_type = other DNA
catccacattcagtctgtgg

SEQ ID NO: 18877 - DNA, 20 bp, synthetic construct
  source 1..20: mol_type = other DNA
aagtaactggctctaataca

SEQ ID NO: 18878 - DNA, 20 bp, synthetic construct
  source 1..20: mol_type = other DNA
gcacaatgttctagtagcgg

SEQ ID NO: 18879 - DNA, 20 bp, synthetic construct
  source 1..20: mol_type = other DNA
tttacataggtatctttagg

SEQ ID NO: 18880 - DNA, 20 bp, synthetic construct
  source 1..20: mol_type = other DNA
gttattaagaaacgtattga

SEQ ID NO: 18881 - DNA, 20 bp, synthetic construct
  source 1..20: mol_type = other DNA
gaatcctgttgactatatcc

SEQ ID NO: 18882 - DNA, 20 bp, synthetic construct
  source 1..20: mol_type = other DNA
attataaacaacacttggca

SEQ ID NO: 18883 - DNA, 20 bp, synthetic construct
  source 1..20: mol_type = other DNA
atccagcgtaagaataacag

SEQ ID NO: 18884 - DNA, 20 bp, synthetic construct
  source 1..20: mol_type = other DNA
taccttatttatgagatgtt

SEQ ID NO: 18885 - DNA, 20 bp, synthetic construct
  source 1..20: mol_type = other DNA
cagttcacgtcaaaactgga

SEQ ID NO: 18886 - DNA, 20 bp, synthetic construct
  source 1..20: mol_type = other DNA
aggcaacatctacaggcaac

SEQ ID NO: 18887 - DNA, 20 bp, synthetic construct
  source 1..20: mol_type = other DNA
ctatagaaatgcatatacaa

SEQ ID NO: 18888 - DNA, 20 bp, synthetic construct
  source 1..20: mol_type = other DNA
tagagacatactaatgtaca

SEQ ID NO: 18889 - DNA, 20 bp, synthetic construct
  source 1..20: mol_type = other DNA
ttctacttagccaaacacag

SEQ ID NO: 18890 - DNA, 20 bp, synthetic construct
  source 1..20: mol_type = other DNA
cgagatcaagttgtacgtta

SEQ ID NO: 18891 - DNA, 20 bp, synthetic construct
  source 1..20: mol_type = other DNA
gtgtatactttgcgatcctc

SEQ ID NO: 18892 - DNA, 20 bp, synthetic construct
  source 1..20: mol_type = other DNA
cctgtggtaaaccaacacag

SEQ ID NO: 18893 - DNA, 20 bp, synthetic construct
  source 1..20: mol_type = other DNA
tgacatccacattcagtctg

SEQ ID NO: 18894 - DNA, 20 bp, synthetic construct
  source 1..20: mol_type = other DNA
agatagaagctgctatagtg

SEQ ID NO: 18895 - DNA, 20 bp, synthetic construct
  source 1..20: mol_type = other DNA
ctgtggtaaaccaacacagc

SEQ ID NO: 18896 - DNA, 20 bp, synthetic construct
  source 1..20: mol_type = other DNA
gaatgatcatcaaacagcta

SEQ ID NO: 18897 - DNA, 20 bp, synthetic construct
  source 1..20: mol_type = other DNA
cttacctggatatagtcaac

SEQ ID NO: 18898 - DNA, 20 bp, synthetic construct
  source 1..20: mol_type = other DNA
tatatacttacacatcttga

SEQ ID NO: 18899 - DNA, 20 bp, synthetic construct
  source 1..20: mol_type = other DNA
tattttctgctaaaaatttc

SEQ ID NO: 18900 - DNA, 20 bp, synthetic construct
  source 1..20: mol_type = other DNA
gcagcacaatgttctagtag

SEQ ID NO: 18901 - DNA, 20 bp, synthetic construct
  source 1..20: mol_type = other DNA
ttcaaacgctaaatcaagct

SEQ ID NO: 18902 - DNA, 20 bp, synthetic construct
  source 1..20: mol_type = other DNA
aaccttcagtaaatcaaacc

SEQ ID NO: 18903 - DNA, 20 bp, synthetic construct
  source 1..20: mol_type = other DNA
gcactgccttgacaaatcaa

SEQ ID NO: 18904 - DNA, 20 bp, synthetic construct
  source 1..20: mol_type = other DNA
tttgtaagaacccgctgtgt

SEQ ID NO: 18905 - DNA, 20 bp, synthetic construct
  source 1..20: mol_type = other DNA
gtataaccaaatcaacctca

SEQ ID NO: 18906 - DNA, 20 bp, synthetic construct
  source 1..20: mol_type = other DNA
aaacccttacaacacaagaa

SEQ ID NO: 18907 - DNA, 20 bp, synthetic construct
  source 1..20: mol_type = other DNA
ctgtatttctgttactgatg

SEQ ID NO: 18908 - DNA, 20 bp, synthetic construct
  source 1..20: mol_type = other DNA
ccgcccggatcgatgaatgt

SEQ ID NO: 18909 - DNA, 20 bp, synthetic construct
  source 1..20: mol_type = other DNA
ttgaagtgactaatggcagt

SEQ ID NO: 18910 - DNA, 20 bp, synthetic construct
  source 1..20: mol_type = other DNA
gtactcacattgacctccat

SEQ ID NO: 18911 - DNA, 20 bp, synthetic construct
  source 1..20: mol_type = other DNA
tactcacattgacctccata

SEQ ID NO: 18912 - DNA, 20 bp, synthetic construct
  source 1..20: mol_type = other DNA
agaatatcagttagtacaag

SEQ ID NO: 18913 - DNA, 20 bp, synthetic construct
  source 1..20: mol_type = other DNA
tacgacctggtgttccaacc

SEQ ID NO: 18914 - DNA, 20 bp, synthetic construct
  source 1..20: mol_type = other DNA
tgaaaccaagaaagaagccc

SEQ ID NO: 18915 - DNA, 20 bp, synthetic construct
  source 1..20: mol_type = other DNA
caggcagagctggaaggacg

SEQ ID NO: 18916 - DNA, 20 bp, synthetic construct
  source 1..20: mol_type = other DNA
ggatgaagtggaccagatgt

SEQ ID NO: 18917 - DNA, 20 bp, synthetic construct
  source 1..20: mol_type = other DNA
tgtataaccaaatcaacctc

SEQ ID NO: 18918 - DNA, 20 bp, synthetic construct
  source 1..20: mol_type = other DNA
tttgaagtgactaatggcag

SEQ ID NO: 18919 - DNA, 20 bp, synthetic construct
  source 1..20: mol_type = other DNA
ctcaatcaaagggatggcaa

SEQ ID NO: 18920 - DNA, 20 bp, synthetic construct
  source 1..20: mol_type = other DNA
gtggaccagatgttggatat

SEQ ID NO: 18921 - DNA, 20 bp, synthetic construct
  source 1..20: mol_type = other DNA
gacaggcagagctggaagga

SEQ ID NO: 18922 - DNA, 20 bp, synthetic construct
  source 1..20: mol_type = other DNA
tgagaagctgatagaggaga

SEQ ID NO: 18923 - DNA, 20 bp, synthetic construct
  source 1..20: mol_type = other DNA
agtacaagtggagcaaaaag

SEQ ID NO: 18924 - DNA, 20 bp, synthetic construct
  source 1..20: mol_type = other DNA
cctacattcatcgatccggg

SEQ ID NO: 18925 - DNA, 20 bp, synthetic construct
  source 1..20: mol_type = other DNA
acaggcagagctggaaggac

SEQ ID NO: 18926 - DNA, 20 bp, synthetic construct
  source 1..20: mol_type = other DNA
cgagtatatagtggtcatca

SEQ ID NO: 18927 - DNA, 20 bp, synthetic construct
  source 1..20: mol_type = other DNA
acagagcaaccagaactgga

SEQ ID NO: 18928 - DNA, 20 bp, synthetic construct
  source 1..20: mol_type = other DNA
aggcagagctggaaggacgg

SEQ ID NO: 18929 - DNA, 20 bp, synthetic construct
  source 1..20: mol_type = other DNA
ggcggacaggcagagctgga

SEQ ID NO: 18930 - DNA, 20 bp, synthetic construct
  source 1..20: mol_type = other DNA
cttgatgaccactatatact

SEQ ID NO: 18931 - DNA, 20 bp, synthetic construct
  source 1..20: mol_type = other DNA
caaagggaaatcaccctgaa

SEQ ID NO: 18932 - DNA, 20 bp, synthetic construct
  source 1..20: mol_type = other DNA
tatacaaagctctccaccaa

SEQ ID NO: 18933 - DNA, 20 bp, synthetic construct
  source 1..20: mol_type = other DNA
taccacatttgagttgatca

SEQ ID NO: 18934 - DNA, 20 bp, synthetic construct
  source 1..20: mol_type = other DNA
gaaataggaaggtcactcct

SEQ ID NO: 18935 - DNA, 20 bp, synthetic construct
  source 1..20: mol_type = other DNA
tcagaaaacggcaataactg

SEQ ID NO: 18936 - DNA, 20 bp, synthetic construct
  source 1..20: mol_type = other DNA
gaaaacggcaataactgtgg

SEQ ID NO: 18937 - DNA, 20 bp, synthetic construct
  source 1..20: mol_type = other DNA
agtggaccagatgttggata

SEQ ID NO: 18938 - DNA, 20 bp, synthetic construct
  source 1..20: mol_type = other DNA
ccagaattcagctataaagc

SEQ ID NO: 18939 - DNA, 20 bp, synthetic construct
  source 1..20: mol_type = other DNA
gacggccaagaagaactatc

SEQ ID NO: 18940 - DNA, 20 bp, synthetic construct
  source 1..20: mol_type = other DNA
tgtccaggatgtacttgttg

SEQ ID NO: 18941 - DNA, 20 bp, synthetic construct
  source 1..20: mol_type = other DNA
ccagacgctgagccccccgg

SEQ ID NO: 18942 - DNA, 20 bp, synthetic construct
  source 1..20: mol_type = other DNA
cgcggtaaaggcgtaccaga

SEQ ID NO: 18943 - DNA, 20 bp, synthetic construct
  source 1..20: mol_type = other DNA
cagccggatcgccatctgga

SEQ ID NO: 18944 - DNA, 20 bp, synthetic construct
  source 1..20: mol_type = other DNA
catggttcctgatgaggtga

SEQ ID NO: 18945 - DNA, 20 bp, synthetic construct
  source 1..20: mol_type = other DNA
caagtcccagctcaaggtga

SEQ ID NO: 18946 - DNA, 20 bp, synthetic construct
  source 1..20: mol_type = other DNA
attccacctggagcaggaga

SEQ ID NO: 18947 - DNA, 20 bp, synthetic construct
  source 1..20: mol_type = other DNA
cacactgctgcgtggaggtg

SEQ ID NO: 18948 - DNA, 20 bp, synthetic construct
  source 1..20: mol_type = other DNA
ctggtacgcctttaccgcgc

SEQ ID NO: 18949 - DNA, 20 bp, synthetic construct
  source 1..20: mol_type = other DNA
cctcttcaacttcctgtctg

SEQ ID NO: 18950 - DNA, 20 bp, synthetic construct
  source 1..20: mol_type = other DNA
aagtacatcctggacaaggt

SEQ ID NO: 18951 - DNA, 20 bp, synthetic construct
  source 1..20: mol_type = other DNA
caggttgtgggacagcacct

SEQ ID NO: 18952 - DNA, 20 bp, synthetic construct
  source 1..20: mol_type = other DNA
ggctgagatggagctgaagg

SEQ ID NO: 18953 - DNA, 20 bp, synthetic construct
  source 1..20: mol_type = other DNA
gcaggagcgctacatcgaac

SEQ ID NO: 18954 - DNA, 20 bp, synthetic construct
  source 1..20: mol_type = other DNA
gcaggaggccctgcaactag

SEQ ID NO: 18955 - DNA, 20 bp, synthetic construct
  source 1..20: mol_type = other DNA
agcacctggcacagggtagg

SEQ ID NO: 18956 - DNA, 20 bp, synthetic construct
  source 1..20: mol_type = other DNA
tgagctgtgctggacgctga

SEQ ID NO: 18957 - DNA, 20 bp, synthetic construct
  source 1..20: mol_type = other DNA
cctccagggccacggggtca

SEQ ID NO: 18958 - DNA, 20 bp, synthetic construct
  source 1..20: mol_type = other DNA
gcaggagctggagctgctgc

SEQ ID NO: 18959 - DNA, 20 bp, synthetic construct
  source 1..20: mol_type = other DNA
caacaagtacatcctggaca

SEQ ID NO: 18960 - DNA, 20 bp, synthetic construct
  source 1..20: mol_type = other DNA
cttgagcagttccttgcgca

SEQ ID NO: 18961 - DNA, 20 bp, synthetic construct
  source 1..20: mol_type = other DNA
tctggatggctgccgaagag

SEQ ID NO: 18962 - DNA, 20 bp, synthetic construct
  source 1..20: mol_type = other DNA
atgtatccctggctggacac

SEQ ID NO: 18963 - DNA, 20 bp, synthetic construct
  source 1..20: mol_type = other DNA
ctacctcaacaagtacatcc

SEQ ID NO: 18964 - DNA, 20 bp, synthetic construct
  source 1..20: mol_type = other DNA
tggctgccgaagagcgggag

SEQ ID NO: 18965 - DNA, 20 bp, synthetic construct
  source 1..20: mol_type = other DNA
ctccagggccacggggtcat

SEQ ID NO: 18966 - DNA, 20 bp, synthetic construct
  source 1..20: mol_type = other DNA
ccaaagtagcagaggcagct

SEQ ID NO: 18967 - DNA, 20 bp, synthetic construct
  source 1..20: mol_type = other DNA
ggaggtgaggggcaggatgg

SEQ ID NO: 18968 - DNA, 20 bp, synthetic construct
  source 1..20: mol_type = other DNA
gcaggcccagcagcagctgg

SEQ ID NO: 18969 - DNA, 20 bp, synthetic construct
  source 1..20: mol_type = other DNA
ggacatcttggatgagctcc

SEQ ID NO: 18970 - DNA, 20 bp, synthetic construct
  source 1..20: mol_type = other DNA
actcaccagctgtccactcc

SEQ ID NO: 18971 - DNA, 20 bp, synthetic construct
  source 1..20: mol_type = other DNA
gaagaggcaccagaggcgga

SEQ ID NO: 18972 - DNA, 20 bp, synthetic construct
  source 1..20: mol_type = other DNA
ccttgatgcgctgccgctgc

SEQ ID NO: 18973 - DNA, 20 bp, synthetic construct
  source 1..20: mol_type = other DNA
acatgcagcgctttccgtcg

SEQ ID NO: 18974 - DNA, 20 bp, synthetic construct
  source 1..20: mol_type = other DNA
gcacatcccccatgaccccg

SEQ ID NO: 18975 - DNA, 20 bp, synthetic construct
  source 1..20: mol_type = other DNA
gcaggctgagatggagctga

SEQ ID NO: 18976 - DNA, 20 bp, synthetic construct
  source 1..20: mol_type = other DNA
gcagcgggagcggcgccggg

SEQ ID NO: 18977 - DNA, 20 bp, synthetic construct
  source 1..20: mol_type = other DNA
aggtgcggcagaaccggcag

SEQ ID NO: 18978 - DNA, 20 bp, synthetic construct
  source 1..20: mol_type = other DNA
ctgccagacgctgagccccc

SEQ ID NO: 18979 - DNA, 20 bp, synthetic construct
  source 1..20: mol_type = other DNA
gatgcagcagcggttgcagg

SEQ ID NO: 18980 - DNA, 20 bp, synthetic construct
  source 1..20: mol_type = other DNA
aggaactgctcaagtccatc

SEQ ID NO: 18981 - DNA, 20 bp, synthetic construct
  source 1..20: mol_type = other DNA
tcatcaggaaccatgatcag

SEQ ID NO: 18982 - DNA, 20 bp, synthetic construct
  source 1..20: mol_type = other DNA
tgcaactagaggtgaaagct

SEQ ID NO: 18983 - DNA, 20 bp, synthetic construct
  source 1..20: mol_type = other DNA
ggatgtgcaggaccgtgtac

SEQ ID NO: 18984 - DNA, 20 bp, synthetic construct
  source 1..20: mol_type = other DNA
ccaactgcgcgaggcggagc

SEQ ID NO: 18985 - DNA, 20 bp, synthetic construct
  source 1..20: mol_type = other DNA
gctgcaggaggcgcagcggc

SEQ ID NO: 18986 - DNA, 20 bp, synthetic construct
  source 1..20: mol_type = other DNA
ccacaggtagccctgccagc

SEQ ID NO: 18987 - DNA, 20 bp, synthetic construct
  source 1..20: mol_type = other DNA
ggaagagctgcagcaggaga

SEQ ID NO: 18988 - DNA, 20 bp, synthetic construct
  source 1..20: mol_type = other DNA
tgtatccctggctggacaca

SEQ ID NO: 18989 - DNA, 20 bp, synthetic construct
  source 1..20: mol_type = other DNA
aagtcccagctcaaggtgag

SEQ ID NO: 18990 - DNA, 20 bp, synthetic construct
  source 1..20: mol_type = other DNA
ggtgagcttgggtgagctgg

SEQ ID NO: 18991 - DNA, 20 bp, synthetic construct
  source 1..20: mol_type = other DNA
caggatgtacttgttgaggt

SEQ ID NO: 18992 - DNA, 20 bp, synthetic construct
  source 1..20: mol_type = other DNA
ctcgtggatggccatgctga

SEQ ID NO: 18993 - DNA, 20 bp, synthetic construct
  source 1..20: mol_type = other DNA
cactgctgcgtggaggtgag

SEQ ID NO: 18994 - DNA, 20 bp, synthetic construct
  source 1..20: mol_type = other DNA
ccaccggggggctcagcgtc

SEQ ID NO: 18995 - DNA, 20 bp, synthetic construct
  source 1..20: mol_type = other DNA
agggctacctgtggaagcga

SEQ ID NO: 18996 - DNA, 20 bp, synthetic construct
  source 1..20: mol_type = other DNA
gaagcagttgatgcagctga

SEQ ID NO: 18997 - DNA, 20 bp, synthetic construct
  source 1..20: mol_type = other DNA
gcaggtattccacctggagc

SEQ ID NO: 18998 - DNA, 20 bp, synthetic construct
  source 1..20: mol_type = other DNA
tgacctgcttcaggacatct

SEQ ID NO: 18999 - DNA, 20 bp, synthetic construct
  source 1..20: mol_type = other DNA
agcagaaacggcgcgagcag

SEQ ID NO: 19000 - DNA, 20 bp, synthetic construct
  source 1..20: mol_type = other DNA
atggaggcccgggcctgtgg

SEQ ID NO: 19001 - DNA, 20 bp, synthetic construct
  source 1..20: mol_type = other DNA
atgcatccaattgagcctgg

SEQ ID NO: 19002 - DNA, 20 bp, synthetic construct
  source 1..20: mol_type = other DNA
ccatgaccccgtggccctgg

SEQ ID NO: 19003 - DNA, 20 bp, synthetic construct
  source 1..20: mol_type = other DNA
gcagcgcatcaaggagctgg

SEQ ID NO: 19004 - DNA, 20 bp, synthetic construct
  source 1..20: mol_type = other DNA
ccagatggcgatccggctgc

SEQ ID NO: 19005 - DNA, 20 bp, synthetic construct
  source 1..20: mol_type = other DNA
tgcccagagaaaactgcgcc

SEQ ID NO: 19006 - DNA, 20 bp, synthetic construct
  source 1..20: mol_type = other DNA
caagtacatcctggacaagg

SEQ ID NO: 19007 - DNA, 20 bp, synthetic construct
  source 1..20: mol_type = other DNA
gatggagctgaaggaggagg

SEQ ID NO: 19008 - DNA, 20 bp, synthetic construct
  source 1..20: mol_type = other DNA
cctcagcatggccatccacg

SEQ ID NO: 19009 - DNA, 20 bp, synthetic construct
  source 1..20: mol_type = other DNA
gctcagaccaggtaggcctg

SEQ ID NO: 19010 - DNA, 20 bp, synthetic construct
  source 1..20: mol_type = other DNA
ggggaagacgtccctacaca

SEQ ID NO: 19011 - DNA, 20 bp, synthetic construct
  source 1..20: mol_type = other DNA
cgcctttaccgcgctggacg

SEQ ID NO: 19012 - DNA, 20 bp, synthetic construct
  source 1..20: mol_type = other DNA
ctccatctcagcctgcatgg

SEQ ID NO: 19013 - DNA, 20 bp, synthetic construct
  source 1..20: mol_type = other DNA
tctgcttcaggtccttgtgt

SEQ ID NO: 19014 - DNA, 20 bp, synthetic construct
  source 1..20: mol_type = other DNA
ccagcaccgcgagctgcagc

SEQ ID NO: 19015 - DNA, 20 bp, synthetic construct
  source 1..20: mol_type = other DNA
tggaggcccgggcctgtgga

SEQ ID NO: 19016 - DNA, 20 bp, synthetic construct
  source 1..20: mol_type = other DNA
actatcgggcagatagcaac

SEQ ID NO: 19017 - DNA, 20 bp, synthetic construct
  source 1..20: mol_type = other DNA
aggatgtacttgttgaggta

SEQ ID NO: 19018 - DNA, 20 bp, synthetic construct
  source 1..20: mol_type = other DNA
ctcagccatggccctgcgca

SEQ ID NO: 19019 - DNA, 20 bp, synthetic construct
  source 1..20: mol_type = other DNA
ggaggtgagcttgggtgagc

SEQ ID NO: 19020 - DNA, 20 bp, synthetic construct
  source 1..20: mol_type = other DNA
acgcagcagtgtgcatccag

SEQ ID NO: 19021 - DNA, 20 bp, synthetic construct
  source 1..20: mol_type = other DNA
ctgtgcgaatcgctcagacc

SEQ ID NO: 19022 - DNA, 20 bp, synthetic construct
  source 1..20: mol_type = other DNA
ccatggctgaggcgcccgcc

SEQ ID NO: 19023 - DNA, 20 bp, synthetic construct
  source 1..20: mol_type = other DNA
tgcgcgaggcggagcaggtg

SEQ ID NO: 19024 - DNA, 20 bp, synthetic construct
  source 1..20: mol_type = other DNA
ctgcttcaggtccttgtgta

SEQ ID NO: 19025 - DNA, 20 bp, synthetic construct
  source 1..20: mol_type = other DNA
gctggatgcacactgctgcg

SEQ ID NO: 19026 - DNA, 20 bp, synthetic construct
  source 1..20: mol_type = other DNA
tctgatcatggttcctgatg

SEQ ID NO: 19027 - DNA, 20 bp, synthetic construct
  source 1..20: mol_type = other DNA
gaacagtatgctctccaatc

SEQ ID NO: 19028 - DNA, 20 bp, synthetic construct
  source 1..20: mol_type = other DNA
gaggcggaaggcatcctgat

SEQ ID NO: 19029 - DNA, 20 bp, synthetic construct
  source 1..20: mol_type = other DNA
gctcgagggccaactgcgcg

SEQ ID NO: 19030 - DNA, 20 bp, synthetic construct
  source 1..20: mol_type = other DNA
tgagctcctggtagacctcg

SEQ ID NO: 19031 - DNA, 20 bp, synthetic construct
  source 1..20: mol_type = other DNA
cgagggccaactgcgcgagg

SEQ ID NO: 19032 - DNA, 20 bp, synthetic construct
  source 1..20: mol_type = other DNA
gcacctgggatagagtagag

SEQ ID NO: 19033 - DNA, 20 bp, synthetic construct
  source 1..20: mol_type = other DNA
tgaggtagggcatgtatccc

SEQ ID NO: 19034 - DNA, 20 bp, synthetic construct
  source 1..20: mol_type = other DNA
cgaacgggcgcagcaggaga

SEQ ID NO: 19035 - DNA, 20 bp, synthetic construct
  source 1..20: mol_type = other DNA
cggcagactgctggaagagg

SEQ ID NO: 19036 - DNA, 20 bp, synthetic construct
  source 1..20: mol_type = other DNA
atcaggatgccttccgcctc

SEQ ID NO: 19037 - DNA, 20 bp, synthetic construct
  source 1..20: mol_type = other DNA
cttcactcccaaagtagcag

SEQ ID NO: 19038 - DNA, 20 bp, synthetic construct
  source 1..20: mol_type = other DNA
ggtgcggcagaaccggcaga

SEQ ID NO: 19039 - DNA, 20 bp, synthetic construct
  source 1..20: mol_type = other DNA
cacttccgagatgatgatga

SEQ ID NO: 19040 - DNA, 20 bp, synthetic construct
  source 1..20: mol_type = other DNA
aggaggaggctgcccggcag

SEQ ID NO: 19041 - DNA, 20 bp, synthetic construct
  source 1..20: mol_type = other DNA
gtggaggtgaggggcaggat

SEQ ID NO: 19042 - DNA, 20 bp, synthetic construct
  source 1..20: mol_type = other DNA
gagggtacttgtcctcagac

SEQ ID NO: 19043 - DNA, 20 bp, synthetic construct
  source 1..20: mol_type = other DNA
catcaggaaccatgatcaga

SEQ ID NO: 19044 - DNA, 20 bp, synthetic construct
  source 1..20: mol_type = other DNA
ggagctggagctgctgcagg

SEQ ID NO: 19045 - DNA, 20 bp, synthetic construct
  source 1..20: mol_type = other DNA
ggtgcccctcaccttgagct

SEQ ID NO: 19046 - DNA, 20 bp, synthetic construct
  source 1..20: mol_type = other DNA
agctgggccccaccttgtcc

SEQ ID NO: 19047 - DNA, 20 bp, synthetic construct
  source 1..20: mol_type = other DNA
cagttccttgcgcagggcca

SEQ ID NO: 19048 - DNA, 20 bp, synthetic construct
  source 1..20: mol_type = other DNA
tcaggtgccctcgcttccac

SEQ ID NO: 19049 - DNA, 20 bp, synthetic construct
  source 1..20: mol_type = other DNA
ggaggagcttctggcccagg

SEQ ID NO: 19050 - DNA, 20 bp, synthetic construct
  source 1..20: mol_type = other DNA
ccaggtggcccagaccaccg

SEQ ID NO: 19051 - DNA, 20 bp, synthetic construct
  source 1..20: mol_type = other DNA
actcttctccacgtccagcg

SEQ ID NO: 19052 - DNA, 20 bp, synthetic construct
  source 1..20: mol_type = other DNA
gaagagtgcaaagagaaaag

SEQ ID NO: 19053 - DNA, 20 bp, synthetic construct
  source 1..20: mol_type = other DNA
gagctgcagcaggcgctcga

SEQ ID NO: 19054 - DNA, 20 bp, synthetic construct
  source 1..20: mol_type = other DNA
gctcaaggtgaggggcaccc

SEQ ID NO: 19055 - DNA, 20 bp, synthetic construct
  source 1..20: mol_type = other DNA
tgaagcaggtcaggcaagct

SEQ ID NO: 19056 - DNA, 20 bp, synthetic construct
  source 1..20: mol_type = other DNA
agcaggagcgctacatcgaa

SEQ ID NO: 19057 - DNA, 20 bp, synthetic construct
  source 1..20: mol_type = other DNA
ccaagtcccagctcaaggtg

SEQ ID NO: 19058 - DNA, 20 bp, synthetic construct
  source 1..20: mol_type = other DNA
gcgctggacgtggagaagag

SEQ ID NO: 19059 - DNA, 20 bp, synthetic construct
  source 1..20: mol_type = other DNA
cgtggaggtgaggggcagga

SEQ ID NO: 19060 - DNA, 20 bp, synthetic construct
  source 1..20: mol_type = other DNA
ccagggccacggggtcatgg

SEQ ID NO: 19061 - DNA, 20 bp, synthetic construct
  source 1..20: mol_type = other DNA
tgacggccaagaagaactat

SEQ ID NO: 19062 - DNA, 20 bp, synthetic construct
  source 1..20: mol_type = other DNA
ggaagttgaagaggcaccag

SEQ ID NO: 19063 - DNA, 20 bp, synthetic construct
  source 1..20: mol_type = other DNA
atctcggaagtgttcctcca

SEQ ID NO: 19064 - DNA, 20 bp, synthetic construct
  source 1..20: mol_type = other DNA
acttgagcagttccttgcgc

SEQ ID NO: 19065 - DNA, 20 bp, synthetic construct
  source 1..20: mol_type = other DNA
tccagggccacggggtcatg

SEQ ID NO: 19066 - DNA, 20 bp, synthetic construct
  source 1..20: mol_type = other DNA
aggcgcagcggcaggccgag

SEQ ID NO: 19067 - DNA, 20 bp, synthetic construct
  source 1..20: mol_type = other DNA
agtacatcctggacaaggtg

SEQ ID NO: 19068 - DNA, 20 bp, synthetic construct
  source 1..20: mol_type = other DNA
ccggcagcggcagcgcatca

SEQ ID NO: 19069 - DNA, 20 bp, synthetic construct
  source 1..20: mol_type = other DNA
acccggcagactgctggaag

SEQ ID NO: 19070 - DNA, 20 bp, synthetic construct
  source 1..20: mol_type = other DNA
agttgaagaggcaccagagg

SEQ ID NO: 19071 - DNA, 20 bp, synthetic construct
  source 1..20: mol_type = other DNA
cctcagacaggaagttgaag

SEQ ID NO: 19072 - DNA, 20 bp, synthetic construct
  source 1..20: mol_type = other DNA
cttgcgcagggccatggctg

SEQ ID NO: 19073 - DNA, 20 bp, synthetic construct
  source 1..20: mol_type = other DNA
ggaagcgagggcacctgaga

SEQ ID NO: 19074 - DNA, 20 bp, synthetic construct
  source 1..20: mol_type = other DNA
cagctgtccactcctggcgc

SEQ ID NO: 19075 - DNA, 20 bp, synthetic construct
  source 1..20: mol_type = other DNA
gaaggaactgggccgaacgc

SEQ ID NO: 19076 - DNA, 20 bp, synthetic construct
  source 1..20: mol_type = other DNA
cagggctacctgtggaagcg

SEQ ID NO: 19077 - DNA, 20 bp, synthetic construct
  source 1..20: mol_type = other DNA
gcagagggctgacgaggatg

SEQ ID NO: 19078 - DNA, 20 bp, synthetic construct
  source 1..20: mol_type = other DNA
agctcaaggtgaggggcacc

SEQ ID NO: 19079 - DNA, 20 bp, synthetic construct
  source 1..20: mol_type = other DNA
aggcgctcatctcatacgtg

SEQ ID NO: 19080 - DNA, 20 bp, synthetic construct
  source 1..20: mol_type = other DNA
catctcggaagtgttcctcc

SEQ ID NO: 19081 - DNA, 20 bp, synthetic construct
  source 1..20: mol_type = other DNA
cagccatccagatggcgatc

SEQ ID NO: 19082 - DNA, 20 bp, synthetic construct
  source 1..20: mol_type = other DNA
ctcctcttccagcagtctgc

SEQ ID NO: 19083 - DNA, 20 bp, synthetic construct
  source 1..20: mol_type = other DNA
cagcgctttccgtcgcggtc

SEQ ID NO: 19084 - DNA, 20 bp, synthetic construct
  source 1..20: mol_type = other DNA
catccaagatgtcctgaagc

SEQ ID NO: 19085 - DNA, 20 bp, synthetic construct
  source 1..20: mol_type = other DNA
gcggcagcgcatcaaggagc

SEQ ID NO: 19086 - DNA, 20 bp, synthetic construct
  source 1..20: mol_type = other DNA
ctacatcgaacgggcgcagc

SEQ ID NO: 19087 - DNA, 20 bp, synthetic construct
  source 1..20: mol_type = other DNA
tcaattcgggccgctgcctg

SEQ ID NO: 19088 - DNA, 20 bp, synthetic construct
  source 1..20: mol_type = other DNA
actcagcagcatgagcttgg

SEQ ID NO: 19089 - DNA, 20 bp, synthetic construct
  source 1..20: mol_type = other DNA
gtgaagagtgcaaagagaaa

SEQ ID NO: 19090 - DNA, 20 bp, synthetic construct
  source 1..20: mol_type = other DNA
gagggcacctgagaaggaac

SEQ ID NO: 19091 - DNA, 20 bp, synthetic construct
  source 1..20: mol_type = other DNA
ggacaagtaccctctgatca

SEQ ID NO: 19092 - DNA, 20 bp, synthetic construct
  source 1..20: mol_type = other DNA
gctcagcgtctggcagttcc

SEQ ID NO: 19093 - DNA, 20 bp, synthetic construct
  source 1..20: mol_type = other DNA
gcagttgatgcagctgaagg

SEQ ID NO: 19094 - DNA, 20 bp, synthetic construct
  source 1..20: mol_type = other DNA
gtgtagggacgtcttcccct

SEQ ID NO: 19095 - DNA, 20 bp, synthetic construct
  source 1..20: mol_type = other DNA
cgcagcagtgtgcatccagc

SEQ ID NO: 19096 - DNA, 20 bp, synthetic construct
  source 1..20: mol_type = other DNA
acaggttgtgggacagcacc

SEQ ID NO: 19097 - DNA, 20 bp, synthetic construct
  source 1..20: mol_type = other DNA
ggccgagcggctgctgcagg

SEQ ID NO: 19098 - DNA, 20 bp, synthetic construct
  source 1..20: mol_type = other DNA
ggcgctttagggaggagtca

SEQ ID NO: 19099 - DNA, 20 bp, synthetic construct
  source 1..20: mol_type = other DNA
agtgttcctccagggccacg

SEQ ID NO: 19100 - DNA, 20 bp, synthetic construct
  source 1..20: mol_type = other DNA
cctcaccttgagctgggact

SEQ ID NO: 19101 - DNA, 20 bp, synthetic construct
  source 1..20: mol_type = other DNA
cccccatgaccccgtggccc

SEQ ID NO: 19102 - DNA, 20 bp, synthetic construct
  source 1..20: mol_type = other DNA
gcaggccgagcggctgctgc

SEQ ID NO: 19103 - DNA, 20 bp, synthetic construct
  source 1..20: mol_type = other DNA
ctgcagctggaaccagcgtt

SEQ ID NO: 19104 - DNA, 20 bp, synthetic construct
  source 1..20: mol_type = other DNA
cagctccatctcagcctgca

SEQ ID NO: 19105 - DNA, 20 bp, synthetic construct
  source 1..20: mol_type = other DNA
cagggccgtcatcatcatct

SEQ ID NO: 19106 - DNA, 20 bp, synthetic construct
  source 1..20: mol_type = other DNA
caggtggcccagaccaccgg

SEQ ID NO: 19107 - DNA, 20 bp, synthetic construct
  source 1..20: mol_type = other DNA
gctgtcccacaacctgtaca

SEQ ID NO: 19108 - DNA, 20 bp, synthetic construct
  source 1..20: mol_type = other DNA
ttttcagcaggtattccacc

SEQ ID NO: 19109 - DNA, 20 bp, synthetic construct
  source 1..20: mol_type = other DNA
aactatcgggcagatagcaa

SEQ ID NO: 19110 - DNA, 20 bp, synthetic construct
  source 1..20: mol_type = other DNA
tcctcttccagcagtctgcc

SEQ ID NO: 19111 - DNA, 20 bp, synthetic construct
  source 1..20: mol_type = other DNA
agtctccaagtcccagctca

SEQ ID NO: 19112 - DNA, 20 bp, synthetic construct
  source 1..20: mol_type = other DNA
cgagctgcagcaggcgctcg

SEQ ID NO: 19113 - DNA, 20 bp, synthetic construct
  source 1..20: mol_type = other DNA
gcgaatcgctcagaccaggt

SEQ ID NO: 19114 - DNA, 20 bp, synthetic construct
  source 1..20: mol_type = other DNA
gcagagccgctccctgcagc

SEQ ID NO: 19115 - DNA, 20 bp, synthetic construct
  source 1..20: mol_type = other DNA
gcaggaccgtgtacaggttg

SEQ ID NO: 19116 - DNA, 20 bp, synthetic construct
  source 1..20: mol_type = other DNA
cccaaagtagcagaggcagc

SEQ ID NO: 19117 - DNA, 20 bp, synthetic construct
  source 1..20: mol_type = other DNA
agctggaggagatgcagcag

SEQ ID NO: 19118 - DNA, 20 bp, synthetic construct
  source 1..20: mol_type = other DNA
agaggctaattttctggtgc

SEQ ID NO: 19119 - DNA, 20 bp, synthetic construct
  source 1..20: mol_type = other DNA
cctcgtggatggccatgctg

SEQ ID NO: 19120 - DNA, 20 bp, synthetic construct
  source 1..20: mol_type = other DNA
ctcctggtagacctcgtgga

SEQ ID NO: 19121 - DNA, 20 bp, synthetic construct
  source 1..20: mol_type = other DNA
ctggatggctgccgaagagc

SEQ ID NO: 19122 - DNA, 20 bp, synthetic construct
  source 1..20: mol_type = other DNA
cctgcagccggatcgccatc

SEQ ID NO: 19123 - DNA, 20 bp, synthetic construct
  source 1..20: mol_type = other DNA
caaggtggggcccagcttgt

SEQ ID NO: 19124 - DNA, 20 bp, synthetic construct
  source 1..20: mol_type = other DNA
ctccacgtccagcgcggtaa

SEQ ID NO: 19125 - DNA, 20 bp, synthetic construct
  source 1..20: mol_type = other DNA
ggagaaggaagagctgcagc

SEQ ID NO: 19126 - DNA, 20 bp, synthetic construct
  source 1..20: mol_type = other DNA
tcaagatcgtgtctgcagtg

SEQ ID NO: 19127 - DNA, 20 bp, synthetic construct
  source 1..20: mol_type = other DNA
cctaaaaccatggaggaggg

SEQ ID NO: 19128 - DNA, 20 bp, synthetic construct
  source 1..20: mol_type = other DNA
tctctagattgttggtgacg

SEQ ID NO: 19129 - DNA, 20 bp, synthetic construct
  source 1..20: mol_type = other DNA
agaggcatcctggagagttc

SEQ ID NO: 19130 - DNA, 20 bp, synthetic construct
  source 1..20: mol_type = other DNA
ccacgatgactgcctgcaag

SEQ ID NO: 19131 - DNA, 20 bp, synthetic construct
  source 1..20: mol_type = other DNA
ctgtacccgcagagcctcag

SEQ ID NO: 19132 - DNA, 20 bp, synthetic construct
  source 1..20: mol_type = other DNA
cccaggggcaacacagcaac

SEQ ID NO: 19133 - DNA, 20 bp, synthetic construct
  source 1..20: mol_type = other DNA
gagggtctcaccaggacact

SEQ ID NO: 19134 - DNA, 20 bp, synthetic construct
  source 1..20: mol_type = other DNA
cgtgagtaatgggagctggg

SEQ ID NO: 19135 - DNA, 20 bp, synthetic construct
  source 1..20: mol_type = other DNA
cagcagcactagcagtggca

SEQ ID NO: 19136 - DNA, 20 bp, synthetic construct
  source 1..20: mol_type = other DNA
ctgggatagatggaagatgg

SEQ ID NO: 19137 - DNA, 20 bp, synthetic construct
  source 1..20: mol_type = other DNA
agctcaagaatgctggacgt

SEQ ID NO: 19138 - DNA, 20 bp, synthetic construct
  source 1..20: mol_type = other DNA
cacaggttttcaggatatca

SEQ ID NO: 19139 - DNA, 20 bp, synthetic construct
  source 1..20: mol_type = other DNA
gctcgatgcctaagatgggg

SEQ ID NO: 19140 - DNA, 20 bp, synthetic construct
  source 1..20: mol_type = other DNA
aggagatgtgagtggcagct

SEQ ID NO: 19141 - DNA, 20 bp, synthetic construct
  source 1..20: mol_type = other DNA
cacggacagaaatgggatcc

SEQ ID NO: 19142 - DNA, 20 bp, synthetic construct
  source 1..20: mol_type = other DNA
ggaggttgaacacctgtcga

SEQ ID NO: 19143 - DNA, 20 bp, synthetic construct
  source 1..20: mol_type = other DNA
taactacttctctattggcg

SEQ ID NO: 19144 - DNA, 20 bp, synthetic construct
  source 1..20: mol_type = other DNA
gctcctctcacctggtacac

SEQ ID NO: 19145 - DNA, 20 bp, synthetic construct
  source 1..20: mol_type = other DNA
tagaggcatcctggagagtt

SEQ ID NO: 19146 - DNA, 20 bp, synthetic construct
  source 1..20: mol_type = other DNA
agacccagcagcactagcag

SEQ ID NO: 19147 - DNA, 20 bp, synthetic construct
  source 1..20: mol_type = other DNA
acccttcccatgcaaattga

SEQ ID NO: 19148 - DNA, 20 bp, synthetic construct
  source 1..20: mol_type = other DNA
caccttcaagctgtacgaca

SEQ ID NO: 19149 - DNA, 20 bp, synthetic construct
  source 1..20: mol_type = other DNA
ctgacagcggtcgcagcgcc

SEQ ID NO: 19150 - DNA, 20 bp, synthetic construct
  source 1..20: mol_type = other DNA
gatcttgatctggaagggaa

SEQ ID NO: 19151 - DNA, 20 bp, synthetic construct
  source 1..20: mol_type = other DNA
ctggctcgatgcctaagatg

SEQ ID NO: 19152 - DNA, 20 bp, synthetic construct
  source 1..20: mol_type = other DNA
aaagaaattggtggagcggg

SEQ ID NO: 19153 - DNA, 20 bp, synthetic construct
  source 1..20: mol_type = other DNA
aacatccctagcatgcatgg

SEQ ID NO: 19154 - DNA, 20 bp, synthetic construct
  source 1..20: mol_type = other DNA
gtgggtgatcttgatctgga

SEQ ID NO: 19155 - DNA, 20 bp, synthetic construct
  source 1..20: mol_type = other DNA
gactgtggggtgttttaggg

SEQ ID NO: 19156 - DNA, 20 bp, synthetic construct
  source 1..20: mol_type = other DNA
agattgcagtagactggtct

SEQ ID NO: 19157 - DNA, 20 bp, synthetic construct
  source 1..20: mol_type = other DNA
tatgtccaaggagatgtgag

SEQ ID NO: 19158 - DNA, 20 bp, synthetic construct
  source 1..20: mol_type = other DNA
ctcgcacccacacatgtgat

SEQ ID NO: 19159 - DNA, 20 bp, synthetic construct
  source 1..20: mol_type = other DNA
tgtccttcataacctaggag

SEQ ID NO: 19160 - DNA, 20 bp, synthetic construct
  source 1..20: mol_type = other DNA
ttaggtctggggacgaagta

SEQ ID NO: 19161 - DNA, 20 bp, synthetic construct
  source 1..20: mol_type = other DNA
aggggcaacacagcaacagg

SEQ ID NO: 19162 - DNA, 20 bp, synthetic construct
  source 1..20: mol_type = other DNA
ctaaaggatggtcctgagat

SEQ ID NO: 19163 - DNA, 20 bp, synthetic construct
  source 1..20: mol_type = other DNA
gagcacctctgaggctctgc

SEQ ID NO: 19164 - DNA, 20 bp, synthetic construct
  source 1..20: mol_type = other DNA
gctgtgttgcccctgggtac

SEQ ID NO: 19165 - DNA, 20 bp, synthetic construct
  source 1..20: mol_type = other DNA
tgctacttttcccttctgga

SEQ ID NO: 19166 - DNA, 20 bp, synthetic construct
  source 1..20: mol_type = other DNA
gcaccatacacaatgcagcc

SEQ ID NO: 19167 - DNA, 20 bp, synthetic construct
  source 1..20: mol_type = other DNA
ctccagaagggaaaagtagc

SEQ ID NO: 19168 - DNA, 20 bp, synthetic construct
  source 1..20: mol_type = other DNA
agtggctgaatacctggatt

SEQ ID NO: 19169 - DNA, 20 bp, synthetic construct
  source 1..20: mol_type = other DNA
accgctgtcagaaaaagatc

SEQ ID NO: 19170 - DNA, 20 bp, synthetic construct
  source 1..20: mol_type = other DNA
ggttttcaggatatcagggt

SEQ ID NO: 19171 - DNA, 20 bp, synthetic construct
  source 1..20: mol_type = other DNA
tggagccaccatgcatgcta

SEQ ID NO: 19172 - DNA, 20 bp, synthetic construct
  source 1..20: mol_type = other DNA
gctggagggtgcaattgaga

SEQ ID NO: 19173 - DNA, 20 bp, synthetic construct
  source 1..20: mol_type = other DNA
tgagaagatggattcagatg

SEQ ID NO: 19174 - DNA, 20 bp, synthetic construct
  source 1..20: mol_type = other DNA
cccaactcactgagctgtcc

SEQ ID NO: 19175 - DNA, 20 bp, synthetic construct
  source 1..20: mol_type = other DNA
caagctgagtgggtccgggc

SEQ ID NO: 19176 - DNA, 20 bp, synthetic construct
  source 1..20: mol_type = other DNA
agatcatttccagtacccag

SEQ ID NO: 19177 - DNA, 20 bp, synthetic construct
  source 1..20: mol_type = other DNA
atctgagcacagagtggaaa

SEQ ID NO: 19178 - DNA, 20 bp, synthetic construct
  source 1..20: mol_type = other DNA
tatcctacagatgatgcgag

SEQ ID NO: 19179 - DNA, 20 bp, synthetic construct
  source 1..20: mol_type = other DNA
tgcgagtcaagcattggtct

SEQ ID NO: 19180 - DNA, 20 bp, synthetic construct
  source 1..20: mol_type = other DNA
tctggctcgatgcctaagat

SEQ ID NO: 19181 - DNA, 20 bp, synthetic construct
  source 1..20: mol_type = other DNA
caatcacatgtgtgggtgcg

SEQ ID NO: 19182 - DNA, 20 bp, synthetic construct
  source 1..20: mol_type = other DNA
agcacatgtggaggcccaag

SEQ ID NO: 19183 - DNA, 20 bp, synthetic construct
  source 1..20: mol_type = other DNA
catggtggctccaacctctg

SEQ ID NO: 19184 - DNA, 20 bp, synthetic construct
  source 1..20: mol_type = other DNA
tgtggtgctataggaggcca

SEQ ID NO: 19185 - DNA, 20 bp, synthetic construct
  source 1..20: mol_type = other DNA
ggtgctgacttcacaaggca

SEQ ID NO: 19186 - DNA, 20 bp, synthetic construct
  source 1..20: mol_type = other DNA
gtggaatcgatgagcaatag

SEQ ID NO: 19187 - DNA, 20 bp, synthetic construct
  source 1..20: mol_type = other DNA
tcgcacagattgcagtagac

SEQ ID NO: 19188 - DNA, 20 bp, synthetic construct
  source 1..20: mol_type = other DNA
cttaggtctggggacgaagt

SEQ ID NO: 19189 - DNA, 20 bp, synthetic construct
  source 1..20: mol_type = other DNA
gccaaagaaattggtggagc

SEQ ID NO: 19190 - DNA, 20 bp, synthetic construct
  source 1..20: mol_type = other DNA
agtctcttgtcacttaggtc

SEQ ID NO: 19191 - DNA, 20 bp, synthetic construct
  source 1..20: mol_type = other DNA
tttgtcaatcctaagagtgg

SEQ ID NO: 19192 - DNA, 20 bp, synthetic construct
  source 1..20: mol_type = other DNA
gggaagcaggggcaaaggtg

SEQ ID NO: 19193 - DNA, 20 bp, synthetic construct
  source 1..20: mol_type = other DNA
ccaacctctggggtgatacc

SEQ ID NO: 19194 - DNA, 20 bp, synthetic construct
  source 1..20: mol_type = other DNA
tgatcttgatctggaaggga

SEQ ID NO: 19195 - DNA, 20 bp, synthetic construct
  source 1..20: mol_type = other DNA
ccacacatgtgattggacct

SEQ ID NO: 19196 - DNA, 20 bp, synthetic construct
  source 1..20: mol_type = other DNA
ccagatcatttccagtaccc

SEQ ID NO: 19197 - DNA, 20 bp, synthetic construct
  source 1..20: mol_type = other DNA
ttataggccattgggtacga

SEQ ID NO: 19198 - DNA, 20 bp, synthetic construct
  source 1..20: mol_type = other DNA
caccaggacactgggataga

SEQ ID NO: 19199 - DNA, 20 bp, synthetic construct
  source 1..20: mol_type = other DNA
tctcaggctccgattattca

SEQ ID NO: 19200 - DNA, 20 bp, synthetic construct
  source 1..20: mol_type = other DNA
caagaagccaaagaaattgg

SEQ ID NO: 19201 - DNA, 20 bp, synthetic construct
  source 1..20: mol_type = other DNA
tcacatgtgtgggtgcgagg

SEQ ID NO: 19202 - DNA, 20 bp, synthetic construct
  source 1..20: mol_type = other DNA
gtggatctgaaagacgaggt

SEQ ID NO: 19203 - DNA, 20 bp, synthetic construct
  source 1..20: mol_type = other DNA
acagcttgaaggtgactgtg

SEQ ID NO: 19204 - DNA, 20 bp, synthetic construct
  source 1..20: mol_type = other DNA
cagcaggttagggaaaggag

SEQ ID NO: 19205 - DNA, 20 bp, synthetic construct
  source 1..20: mol_type = other DNA
acctgtgctcaccctatctc

SEQ ID NO: 19206 - DNA, 20 bp, synthetic construct
  source 1..20: mol_type = other DNA
aagtgacaagagactggaag

SEQ ID NO: 19207 - DNA, 20 bp, synthetic construct
  source 1..20: mol_type = other DNA
ctctcaagctgagtgggtcc

SEQ ID NO: 19208 - DNA, 20 bp, synthetic construct
  source 1..20: mol_type = other DNA
aggaggttgaacacctgtcg

SEQ ID NO: 19209 - DNA, 20 bp, synthetic construct
  source 1..20: mol_type = other DNA
tccgtcgtccttcagagtct

SEQ ID NO: 19210 - DNA, 20 bp, synthetic construct
  source 1..20: mol_type = other DNA
tgattggaccttggggagaa

SEQ ID NO: 19211 - DNA, 20 bp, synthetic construct
  source 1..20: mol_type = other DNA
cagtaaggaagactccacca

SEQ ID NO: 19212 - DNA, 20 bp, synthetic construct
  source 1..20: mol_type = other DNA
cctggacagctcagtgagtt

SEQ ID NO: 19213 - DNA, 20 bp, synthetic construct
  source 1..20: mol_type = other DNA
tcgtccttcagagtctagga

SEQ ID NO: 19214 - DNA, 20 bp, synthetic construct
  source 1..20: mol_type = other DNA
tgcgaggaggctgtgagtcc

SEQ ID NO: 19215 - DNA, 20 bp, synthetic construct
  source 1..20: mol_type = other DNA
tgcatggtggctccaacctc

SEQ ID NO: 19216 - DNA, 20 bp, synthetic construct
  source 1..20: mol_type = other DNA
tacagcttgaaggtgactgt

SEQ ID NO: 19217 - DNA, 20 bp, synthetic construct
  source 1..20: mol_type = other DNA
ctggagagttcgggacatga

SEQ ID NO: 19218 - DNA, 20 bp, synthetic construct
  source 1..20: mol_type = other DNA
cttctcaacatgcaaaaagc

SEQ ID NO: 19219 - DNA, 20 bp, synthetic construct
  source 1..20: mol_type = other DNA
gcatggtggctccaacctct

SEQ ID NO: 19220 - DNA, 20 bp, synthetic construct
  source 1..20: mol_type = other DNA
ttggagccaccatgcatgct

SEQ ID NO: 19221 - DNA, 20 bp, synthetic construct
  source 1..20: mol_type = other DNA
agcaggttagggaaaggagg

SEQ ID NO: 19222 - DNA, 20 bp, synthetic construct
  source 1..20: mol_type = other DNA
gattgcagtagactggtctg

SEQ ID NO: 19223 - DNA, 20 bp, synthetic construct
  source 1..20: mol_type = other DNA
ccaaggtccaatcacatgtg

SEQ ID NO: 19224 - DNA, 20 bp, synthetic construct
  source 1..20: mol_type = other DNA
ctgctacttttcccttctgg

SEQ ID NO: 19225 - DNA, 20 bp, synthetic construct
  source 1..20: mol_type = other DNA
tatggatcgatggtctgtgg

SEQ ID NO: 19226 - DNA, 20 bp, synthetic construct
  source 1..20: mol_type = other DNA
ctcccaaactgacctctagg

SEQ ID NO: 19227 - DNA, 20 bp, synthetic construct
  source 1..20: mol_type = other DNA
gagtggctgaatacctggat

SEQ ID NO: 19228 - DNA, 20 bp, synthetic construct
  source 1..20: mol_type = other DNA
acgacggacagcacatgtgg

SEQ ID NO: 19229 - DNA, 20 bp, synthetic construct
  source 1..20: mol_type = other DNA
tgcaaattgacggagaaccc

SEQ ID NO: 19230 - DNA, 20 bp, synthetic construct
  source 1..20: mol_type = other DNA
gcataggtgctgacttcaca

SEQ ID NO: 19231 - DNA, 20 bp, synthetic construct
  source 1..20: mol_type = other DNA
cactagcagtggcacggtgg

SEQ ID NO: 19232 - DNA, 20 bp, synthetic construct
  source 1..20: mol_type = other DNA
aatctgagcacagagtggaa

SEQ ID NO: 19233 - DNA, 20 bp, synthetic construct
  source 1..20: mol_type = other DNA
gtccttccgagacttggcat

SEQ ID NO: 19234 - DNA, 20 bp, synthetic construct
  source 1..20: mol_type = other DNA
cccaggcctaccctctgaag

SEQ ID NO: 19235 - DNA, 20 bp, synthetic construct
  source 1..20: mol_type = other DNA
tcagcacctatgccaagtct

SEQ ID NO: 19236 - DNA, 20 bp, synthetic construct
  source 1..20: mol_type = other DNA
gatgcgagtggctgaatacc

SEQ ID NO: 19237 - DNA, 20 bp, synthetic construct
  source 1..20: mol_type = other DNA
acaggtgttcaacctcctaa

SEQ ID NO: 19238 - DNA, 20 bp, synthetic construct
  source 1..20: mol_type = other DNA
ttccagagcaccctgtgtgt

SEQ ID NO: 19239 - DNA, 20 bp, synthetic construct
  source 1..20: mol_type = other DNA
gatagatggaagatggaggc

SEQ ID NO: 19240 - DNA, 20 bp, synthetic construct
  source 1..20: mol_type = other DNA
cacctatgccaagtctcgga

SEQ ID NO: 19241 - DNA, 20 bp, synthetic construct
  source 1..20: mol_type = other DNA
gtacagcttgaaggtgactg

SEQ ID NO: 19242 - DNA, 20 bp, synthetic construct
  source 1..20: mol_type = other DNA
tcctggacagctcagtgagt

SEQ ID NO: 19243 - DNA, 20 bp, synthetic construct
  source 1..20: mol_type = other DNA
gcagggctttcatggcacac

SEQ ID NO: 19244 - DNA, 20 bp, synthetic construct
  source 1..20: mol_type = other DNA
tcctagactctgaaggacga

SEQ ID NO: 19245 - DNA, 20 bp, synthetic construct
  source 1..20: mol_type = other DNA
aaaggtatggtcaagcaggt

SEQ ID NO: 19246 - DNA, 20 bp, synthetic construct
  source 1..20: mol_type = other DNA
ctggacagctcagtgagttg

SEQ ID NO: 19247 - DNA, 20 bp, synthetic construct
  source 1..20: mol_type = other DNA
cctaagagtggcgggaagca

SEQ ID NO: 19248 - DNA, 20 bp, synthetic construct
  source 1..20: mol_type = other DNA
cagatcatttccagtaccca

SEQ ID NO: 19249 - DNA, 20 bp, synthetic construct
  source 1..20: mol_type = other DNA
caaggtccaatcacatgtgt

SEQ ID NO: 19250 - DNA, 20 bp, synthetic construct
  source 1..20: mol_type = other DNA
gccaagtctcggaaggacat

SEQ ID NO: 19251 - DNA, 20 bp, synthetic construct
  source 1..20: mol_type = other DNA
gcatgggcatctggttcttg

SEQ ID NO: 19252 - DNA, 20 bp, synthetic construct
  source 1..20: mol_type = other DNA
cagcactagcagtggcacgg

SEQ ID NO: 19253 - DNA, 20 bp, synthetic construct
  source 1..20: mol_type = other DNA
ttgtcaatcctaagagtggc

SEQ ID NO: 19254 - DNA, 20 bp, synthetic construct
  source 1..20: mol_type = other DNA
acagcaggttagggaaagga

SEQ ID NO: 19255 - DNA, 20 bp, synthetic construct
  source 1..20: mol_type = other DNA
gtgcgaggaggctgtgagtc

SEQ ID NO: 19256 - DNA, 20 bp, synthetic construct
  source 1..20: mol_type = other DNA
agatagggtgagcacaggtt

SEQ ID NO: 19257 - DNA, 20 bp, synthetic construct
  source 1..20: mol_type = other DNA
ctccgtcaatttgcatggga

SEQ ID NO: 19258 - DNA, 20 bp, synthetic construct
  source 1..20: mol_type = other DNA
tccgtcaatttgcatgggaa

SEQ ID NO: 19259 - DNA, 20 bp, synthetic construct
  source 1..20: mol_type = other DNA
ttctctattggcgtggtcag

SEQ ID NO: 19260 - DNA, 20 bp, synthetic construct
  source 1..20: mol_type = other DNA
ctaagagtggcgggaagcag

SEQ ID NO: 19261 - DNA, 20 bp, synthetic construct
  source 1..20: mol_type = other DNA
ctggccgaccaccctccaga

SEQ ID NO: 19262 - DNA, 20 bp, synthetic construct
  source 1..20: mol_type = other DNA
aatgcagcccggtcagactg

SEQ ID NO: 19263 - DNA, 20 bp, synthetic construct
  source 1..20: mol_type = other DNA
gtacagggcgtctgcatcca

SEQ ID NO: 19264 - DNA, 20 bp, synthetic construct
  source 1..20: mol_type = other DNA
tctgtgtcagccccaacaca

SEQ ID NO: 19265 - DNA, 20 bp, synthetic construct
  source 1..20: mol_type = other DNA
gggttctccgtcaatttgca

SEQ ID NO: 19266 - DNA, 20 bp, synthetic construct
  source 1..20: mol_type = other DNA
catcgtggatctgaaagacg

SEQ ID NO: 19267 - DNA, 20 bp, synthetic construct
  source 1..20: mol_type = other DNA
tgtacagggcgtctgcatcc

SEQ ID NO: 19268 - DNA, 20 bp, synthetic construct
  source 1..20: mol_type = other DNA
ttcacaaggcagggctttca

SEQ ID NO: 19269 - DNA, 20 bp, synthetic construct
  source 1..20: mol_type = other DNA
tgaagaatctgagcacagag

SEQ ID NO: 19270 - DNA, 20 bp, synthetic construct
  source 1..20: mol_type = other DNA
tgatgatttgaaaggggact

SEQ ID NO: 19271 - DNA, 20 bp, synthetic construct
  source 1..20: mol_type = other DNA
tacttacagactgagggaga

SEQ ID NO: 19272 - DNA, 20 bp, synthetic construct
  source 1..20: mol_type = other DNA
aacagcaggttagggaaagg

SEQ ID NO: 19273 - DNA, 20 bp, synthetic construct
  source 1..20: mol_type = other DNA
tgggtgatcttgatctggaa

SEQ ID NO: 19274 - DNA, 20 bp, synthetic construct
  source 1..20: mol_type = other DNA
ctctgaagaggtccaagcaa

SEQ ID NO: 19275 - DNA, 20 bp, synthetic construct
  source 1..20: mol_type = other DNA
ctgcgatgccttctagggac

SEQ ID NO: 19276 - DNA, 20 bp, synthetic construct
  source 1..20: mol_type = other DNA
aacgacttggcccgagtact

SEQ ID NO: 19277 - DNA, 20 bp, synthetic construct
  source 1..20: mol_type = other DNA
accaaaaactggggtcacaa

SEQ ID NO: 19278 - DNA, 20 bp, synthetic construct
  source 1..20: mol_type = other DNA
gacctgggcgtgaccaaggt

SEQ ID NO: 19279 - DNA, 20 bp, synthetic construct
  source 1..20: mol_type = other DNA
tctccgacagttcacctctg

SEQ ID NO: 19280 - DNA, 20 bp, synthetic construct
  source 1..20: mol_type = other DNA
ggcccaccttggtcacgccc

SEQ ID NO: 19281 - DNA, 20 bp, synthetic construct
  source 1..20: mol_type = other DNA
aagcttcctacccgaggtgt

SEQ ID NO: 19282 - DNA, 20 bp, synthetic construct
  source 1..20: mol_type = other DNA
acagacactgaccagagaca

SEQ ID NO: 19283 - DNA, 20 bp, synthetic construct
  source 1..20: mol_type = other DNA
acactttgcacaggccaagt

SEQ ID NO: 19284 - DNA, 20 bp, synthetic construct
  source 1..20: mol_type = other DNA
gcacccagagaagtgcaggt

SEQ ID NO: 19285 - DNA, 20 bp, synthetic construct
  source 1..20: mol_type = other DNA
accagtttgggcaggcagca

SEQ ID NO: 19286 - DNA, 20 bp, synthetic construct
  source 1..20: mol_type = other DNA
gcctctccgtccacctgcac

SEQ ID NO: 19287 - DNA, 20 bp, synthetic construct
  source 1..20: mol_type = other DNA
cctctgactcagagaggccc

SEQ ID NO: 19288 - DNA, 20 bp, synthetic construct
  source 1..20: mol_type = other DNA
gatcttgtggacgctgtgct

SEQ ID NO: 19289 - DNA, 20 bp, synthetic construct
  source 1..20: mol_type = other DNA
gggcatggcgtccaggacct

SEQ ID NO: 19290 - DNA, 20 bp, synthetic construct
  source 1..20: mol_type = other DNA
atggatgttaaataacttgg

SEQ ID NO: 19291 - DNA, 20 bp, synthetic construct
  source 1..20: mol_type = other DNA
tgcagactatgggaagggat

SEQ ID NO: 19292 - DNA, 20 bp, synthetic construct
  source 1..20: mol_type = other DNA
agaagatggaagcggagagg

SEQ ID NO: 19293 - DNA, 20 bp, synthetic construct
  source 1..20: mol_type = other DNA
atggggagccttgggcccaa

SEQ ID NO: 19294 - DNA, 20 bp, synthetic construct
  source 1..20: mol_type = other DNA
ggagtgttgcctttgggtac

SEQ ID NO: 19295 - DNA, 20 bp, synthetic construct
  source 1..20: mol_type = other DNA
tctctaggatctgaggaagt

SEQ ID NO: 19296 - DNA, 20 bp, synthetic construct
  source 1..20: mol_type = other DNA
ttttacctcgtagggttctc

SEQ ID NO: 19297 - DNA, 20 bp, synthetic construct
  source 1..20: mol_type = other DNA
tttaatgtggaacatttctc

SEQ ID NO: 19298 - DNA, 20 bp, synthetic construct
  source 1..20: mol_type = other DNA
ttctgtggccatcctgcccc

SEQ ID NO: 19299 - DNA, 20 bp, synthetic construct
  source 1..20: mol_type = other DNA
aagggtgtgtacgtgcgggt

SEQ ID NO: 19300 - DNA, 20 bp, synthetic construct
  source 1..20: mol_type = other DNA
caggccgggctgccggggcg

SEQ ID NO: 19301 - DNA, 20 bp, synthetic construct
  source 1..20: mol_type = other DNA
ggcctctggcgtggcctcgc

SEQ ID NO: 19302 - DNA, 20 bp, synthetic construct
  source 1..20: mol_type = other DNA
tgacgcctgggctgggggca

SEQ ID NO: 19303 - DNA, 20 bp, synthetic construct
  source 1..20: mol_type = other DNA
gagcttccagctggtggagg

SEQ ID NO: 19304 - DNA, 20 bp, synthetic construct
  source 1..20: mol_type = other DNA
ccagctggtggaggtggcga

SEQ ID NO: 19305 - DNA, 20 bp, synthetic construct
  source 1..20: mol_type = other DNA
ggctccccgtccacctgcac

SEQ ID NO: 19306 - DNA, 20 bp, synthetic construct
  source 1..20: mol_type = other DNA
ttcgtgaaccccaagagtgg

SEQ ID NO: 19307 - DNA, 20 bp, synthetic construct
  source 1..20: mol_type = other DNA
caggcacgggaagaggagcc

SEQ ID NO: 19308 - DNA, 20 bp, synthetic construct
  source 1..20: mol_type = other DNA
caaggccaccccggtgcagg

SEQ ID NO: 19309 - DNA, 20 bp, synthetic construct
  source 1..20: mol_type = other DNA
gcagagccccccaaggtaca

SEQ ID NO: 19310 - DNA, 20 bp, synthetic construct
  source 1..20: mol_type = other DNA
cccgtccacctgcaccgggg

SEQ ID NO: 19311 - DNA, 20 bp, synthetic construct
  source 1..20: mol_type = other DNA
agggcacctgggagaacagg

SEQ ID NO: 19312 - DNA, 20 bp, synthetic construct
  source 1..20: mol_type = other DNA
tctgtggccatcctgcccct

SEQ ID NO: 19313 - DNA, 20 bp, synthetic construct
  source 1..20: mol_type = other DNA
tcggaggagggcagaagccc

SEQ ID NO: 19314 - DNA, 20 bp, synthetic construct
  source 1..20: mol_type = other DNA
aggccaagcagaagccgagg

SEQ ID NO: 19315 - DNA, 20 bp, synthetic construct
  source 1..20: mol_type = other DNA
tgtggtactgaggagagcga

SEQ ID NO: 19316 - DNA, 20 bp, synthetic construct
  source 1..20: mol_type = other DNA
agaggatccagcccacctgg

SEQ ID NO: 19317 - DNA, 20 bp, synthetic construct
  source 1..20: mol_type = other DNA
ccccgcacgccaggatccgc

SEQ ID NO: 19318 - DNA, 20 bp, synthetic construct
  source 1..20: mol_type = other DNA
atccaaggccatcccggtgc

SEQ ID NO: 19319 - DNA, 20 bp, synthetic construct
  source 1..20: mol_type = other DNA
ctgagcccaaccccgaggca

SEQ ID NO: 19320 - DNA, 20 bp, synthetic construct
  source 1..20: mol_type = other DNA
tcaagtccattccatcacac

SEQ ID NO: 19321 - DNA, 20 bp, synthetic construct
  source 1..20: mol_type = other DNA
ctgagggtagacaggatgga

SEQ ID NO: 19322 - DNA, 20 bp, synthetic construct
  source 1..20: mol_type = other DNA
tggccgcctacctggagaac

SEQ ID NO: 19323 - DNA, 20 bp, synthetic construct
  source 1..20: mol_type = other DNA
gcctgtgggcacaggaagct

SEQ ID NO: 19324 - DNA, 20 bp, synthetic construct
  source 1..20: mol_type = other DNA
agaagagggcatccttcaag

SEQ ID NO: 19325 - DNA, 20 bp, synthetic construct
  source 1..20: mol_type = other DNA
ccagcaggggcttcatgagc

SEQ ID NO: 19326 - DNA, 20 bp, synthetic construct
  source 1..20: mol_type = other DNA
tggcttcaccatgacgtcgt

SEQ ID NO: 19327 - DNA, 20 bp, synthetic construct
  source 1..20: mol_type = other DNA
ggtgcagctcctggagctga

SEQ ID NO: 19328 - DNA, 20 bp, synthetic construct
  source 1..20: mol_type = other DNA
gtactgtgtagccaggatgc

SEQ ID NO: 19329 - DNA, 20 bp, synthetic construct
  source 1..20: mol_type = other DNA
agctgtctgtgggagacaga

SEQ ID NO: 19330 - DNA, 20 bp, synthetic construct
  source 1..20: mol_type = other DNA
gggacgtactcgctgtgcag

SEQ ID NO: 19331 - DNA, 20 bp, synthetic construct
  source 1..20: mol_type = other DNA
accgcaaagtgcacaacctg

SEQ ID NO: 19332 - DNA, 20 bp, synthetic construct
  source 1..20: mol_type = other DNA
gagccagggagggcccaagg

SEQ ID NO: 19333 - DNA, 20 bp, synthetic construct
  source 1..20: mol_type = other DNA
ctctgggtggagacaagcag

SEQ ID NO: 19334 - DNA, 20 bp, synthetic construct
  source 1..20: mol_type = other DNA
caccggggcgtgggtgagca

SEQ ID NO: 19335 - DNA, 20 bp, synthetic construct
  source 1..20: mol_type = other DNA
gcgtggacccccagcgagca

SEQ ID NO: 19336 - DNA, 20 bp, synthetic construct
  source 1..20: mol_type = other DNA
ctgggtggagacaagcagtg

SEQ ID NO: 19337 - DNA, 20 bp, synthetic construct
  source 1..20: mol_type = other DNA
tgaagcaggacaccttgctg

SEQ ID NO: 19338 - DNA, 20 bp, synthetic construct
  source 1..20: mol_type = other DNA
caagtcttcgacctgagcca

SEQ ID NO: 19339 - DNA, 20 bp, synthetic construct
  source 1..20: mol_type = other DNA
gttctacgccggggtgagtg

SEQ ID NO: 19340 - DNA, 20 bp, synthetic construct
  source 1..20: mol_type = other DNA
gacgccaggacggcaagtgt

SEQ ID NO: 19341 - DNA, 20 bp, synthetic construct
  source 1..20: mol_type = other DNA
tgtttgtgaaccccaagagt

SEQ ID NO: 19342 - DNA, 20 bp, synthetic construct
  source 1..20: mol_type = other DNA
cctggttgcgcagggcgatg

SEQ ID NO: 19343 - DNA, 20 bp, synthetic construct
  source 1..20: mol_type = other DNA
tgaacatccccaggtgagga

SEQ ID NO: 19344 - DNA, 20 bp, synthetic construct
  source 1..20: mol_type = other DNA
ggggttcacaaacaccagca

SEQ ID NO: 19345 - DNA, 20 bp, synthetic construct
  source 1..20: mol_type = other DNA
caccgggatggccttggatg

SEQ ID NO: 19346 - DNA, 20 bp, synthetic construct
  source 1..20: mol_type = other DNA
caaggccatcccggtgcagg

SEQ ID NO: 19347 - DNA, 20 bp, synthetic construct
  source 1..20: mol_type = other DNA
catggtggcctggttgcgca

SEQ ID NO: 19348 - DNA, 20 bp, synthetic construct
  source 1..20: mol_type = other DNA
catctccagcctgggctcat

SEQ ID NO: 19349 - DNA, 20 bp, synthetic construct
  source 1..20: mol_type = other DNA
caagtgtcggcactgtggga

SEQ ID NO: 19350 - DNA, 20 bp, synthetic construct
  source 1..20: mol_type = other DNA
gtagctggtccagggtggag

SEQ ID NO: 19351 - DNA, 20 bp, synthetic construct
  source 1..20: mol_type = other DNA
ggagaggatccagcccacct

SEQ ID NO: 19352 - DNA, 20 bp, synthetic construct
  source 1..20: mol_type = other DNA
gccagtacccaggggcagga

SEQ ID NO: 19353 - DNA, 20 bp, synthetic construct
  source 1..20: mol_type = other DNA
ccactcggatgtgcttggcc

SEQ ID NO: 19354 - DNA, 20 bp, synthetic construct
  source 1..20: mol_type = other DNA
cccactcaccaacgacgtca

SEQ ID NO: 19355 - DNA, 20 bp, synthetic construct
  source 1..20: mol_type = other DNA
gagcccaggtgagcgattgc

SEQ ID NO: 19356 - DNA, 20 bp, synthetic construct
  source 1..20: mol_type = other DNA
cgttgccagtacccaggggc

SEQ ID NO: 19357 - DNA, 20 bp, synthetic construct
  source 1..20: mol_type = other DNA
caccgtggtccagcaggtag

SEQ ID NO: 19358 - DNA, 20 bp, synthetic construct
  source 1..20: mol_type = other DNA
accacgactttgagccccag

SEQ ID NO: 19359 - DNA, 20 bp, synthetic construct
  source 1..20: mol_type = other DNA
tttgtgaaccccaagagtgg

SEQ ID NO: 19360 - DNA, 20 bp, synthetic construct
  source 1..20: mol_type = other DNA
cacggaaggacggcttacag

SEQ ID NO: 19361 - DNA, 20 bp, synthetic construct
  source 1..20: mol_type = other DNA
ggagtctctcaatgtgggca

SEQ ID NO: 19362 - DNA, 20 bp, synthetic construct
  source 1..20: mol_type = other DNA
caatcagctcttcacctgca

SEQ ID NO: 19363 - DNA, 20 bp, synthetic construct
  source 1..20: mol_type = other DNA
gcgcggaggatccaggtggg

SEQ ID NO: 19364 - DNA, 20 bp, synthetic construct
  source 1..20: mol_type = other DNA
gtgcccacaggccgcgctgc

SEQ ID NO: 19365 - DNA, 20 bp, synthetic construct
  source 1..20: mol_type = other DNA
gaacatccccaggtgaggag

SEQ ID NO: 19366 - DNA, 20 bp, synthetic construct
  source 1..20: mol_type = other DNA
gcccgaaccctcaactgggg

SEQ ID NO: 19367 - DNA, 20 bp, synthetic construct
  source 1..20: mol_type = other DNA
ctcggtcgatcctgtagaag

SEQ ID NO: 19368 - DNA, 20 bp, synthetic construct
  source 1..20: mol_type = other DNA
aggtgggcggacacggcgag

SEQ ID NO: 19369 - DNA, 20 bp, synthetic construct
  source 1..20: mol_type = other DNA
ctccagcaggtaaggggtgg

SEQ ID NO: 19370 - DNA, 20 bp, synthetic construct
  source 1..20: mol_type = other DNA
gctgactcctagccacggga

SEQ ID NO: 19371 - DNA, 20 bp, synthetic construct
  source 1..20: mol_type = other DNA
ggagctgagggcaggaggca

SEQ ID NO: 19372 - DNA, 20 bp, synthetic construct
  source 1..20: mol_type = other DNA
cgctccagtccactgtactc

SEQ ID NO: 19373 - DNA, 20 bp, synthetic construct
  source 1..20: mol_type = other DNA
ggatccagcccacctggggg

SEQ ID NO: 19374 - DNA, 20 bp, synthetic construct
  source 1..20: mol_type = other DNA
caggtgagcagacggcaggc

SEQ ID NO: 19375 - DNA, 20 bp, synthetic construct
  source 1..20: mol_type = other DNA
ttgtggccatcagctgctcg

SEQ ID NO: 19376 - DNA, 20 bp, synthetic construct
  source 1..20: mol_type = other DNA
tgttctacgccggggtgagt

SEQ ID NO: 19377 - DNA, 20 bp, synthetic construct
  source 1..20: mol_type = other DNA
tagttgaggtgctcctgtgg

SEQ ID NO: 19378 - DNA, 20 bp, synthetic construct
  source 1..20: mol_type = other DNA
gcagcgggctgagaaggctc

SEQ ID NO: 19379 - DNA, 20 bp, synthetic construct
  source 1..20: mol_type = other DNA
gccgctggggctcaaagtcg

SEQ ID NO: 19380 - DNA, 20 bp, synthetic construct
  source 1..20: mol_type = other DNA
cgcggaggatccaggtgggc

SEQ ID NO: 19381 - DNA, 20 bp, synthetic construct
  source 1..20: mol_type = other DNA
gcaagtacttacgcctcctt

SEQ ID NO: 19382 - DNA, 20 bp, synthetic construct
  source 1..20: mol_type = other DNA
cccaggggcaggatggcaac

SEQ ID NO: 19383 - DNA, 20 bp, synthetic construct
  source 1..20: mol_type = other DNA
cctgtagaagcggctggcag

SEQ ID NO: 19384 - DNA, 20 bp, synthetic construct
  source 1..20: mol_type = other DNA
ggggcttcatgagcggggag

SEQ ID NO: 19385 - DNA, 20 bp, synthetic construct
  source 1..20: mol_type = other DNA
ctcgagactcgtggaactcc

SEQ ID NO: 19386 - DNA, 20 bp, synthetic construct
  source 1..20: mol_type = other DNA
gtcgatcctgtagaagcggc

SEQ ID NO: 19387 - DNA, 20 bp, synthetic construct
  source 1..20: mol_type = other DNA
ggcgtcgtctgtgtacccag

SEQ ID NO: 19388 - DNA, 20 bp, synthetic construct
  source 1..20: mol_type = other DNA
tctgttgcaggtcactgcaa

SEQ ID NO: 19389 - DNA, 20 bp, synthetic construct
  source 1..20: mol_type = other DNA
cagtactcacctggggcctc

SEQ ID NO: 19390 - DNA, 20 bp, synthetic construct
  source 1..20: mol_type = other DNA
caggagctgcaccgagctgg

SEQ ID NO: 19391 - DNA, 20 bp, synthetic construct
  source 1..20: mol_type = other DNA
ttctccagctgctcgatgca

SEQ ID NO: 19392 - DNA, 20 bp, synthetic construct
  source 1..20: mol_type = other DNA
cccagagatccttgatgcgg

SEQ ID NO: 19393 - DNA, 20 bp, synthetic construct
  source 1..20: mol_type = other DNA
agcggctgttgaatttctct

SEQ ID NO: 19394 - DNA, 20 bp, synthetic construct
  source 1..20: mol_type = other DNA
tgcccgcacagtacctgcaa

SEQ ID NO: 19395 - DNA, 20 bp, synthetic construct
  source 1..20: mol_type = other DNA
caccaccactcggatgtgct

SEQ ID NO: 19396 - DNA, 20 bp, synthetic construct
  source 1..20: mol_type = other DNA
gtggtactgaggagagcgag

SEQ ID NO: 19397 - DNA, 20 bp, synthetic construct
  source 1..20: mol_type = other DNA
cttcatgctgcagcagatcg

SEQ ID NO: 19398 - DNA, 20 bp, synthetic construct
  source 1..20: mol_type = other DNA
cggaataagatgttctacgc

SEQ ID NO: 19399 - DNA, 20 bp, synthetic construct
  source 1..20: mol_type = other DNA
gtcggggattgagataccag

SEQ ID NO: 19400 - DNA, 20 bp, synthetic construct
  source 1..20: mol_type = other DNA
tccaggagctgcaccgagct

SEQ ID NO: 19401 - DNA, 20 bp, synthetic construct
  source 1..20: mol_type = other DNA
gaaggctcaggacaccgagc

SEQ ID NO: 19402 - DNA, 20 bp, synthetic construct
  source 1..20: mol_type = other DNA
aagtcgttgccagtacccag

SEQ ID NO: 19403 - DNA, 20 bp, synthetic construct
  source 1..20: mol_type = other DNA
gctcagcgtggaggtcccag

SEQ ID NO: 19404 - DNA, 20 bp, synthetic construct
  source 1..20: mol_type = other DNA
cctgtgggcacaggaagctt

SEQ ID NO: 19405 - DNA, 20 bp, synthetic construct
  source 1..20: mol_type = other DNA
cccacctgcagcgcggcctg

SEQ ID NO: 19406 - DNA, 20 bp, synthetic construct
  source 1..20: mol_type = other DNA
ccccccagagatccttgatg

SEQ ID NO: 19407 - DNA, 20 bp, synthetic construct
  source 1..20: mol_type = other DNA
ggtttcaggtcctggatctt

SEQ ID NO: 19408 - DNA, 20 bp, synthetic construct
  source 1..20: mol_type = other DNA
atccaggggcaactggaaaa

SEQ ID NO: 19409 - DNA, 20 bp, synthetic construct
  source 1..20: mol_type = other DNA
gagcctgattcacggaagga

SEQ ID NO: 19410 - DNA, 20 bp, synthetic construct
  source 1..20: mol_type = other DNA
tgcaggtgaagagctgattg

SEQ ID NO: 19411 - DNA, 20 bp, synthetic construct
  source 1..20: mol_type = other DNA
gtggaggaaaagtaagtatc

SEQ ID NO: 19412 - DNA, 20 bp, synthetic construct
  source 1..20: mol_type = other DNA
cacactggaggcgggcgggg

SEQ ID NO: 19413 - DNA, 20 bp, synthetic construct
  source 1..20: mol_type = other DNA
gtccagcaagaaagggcctg

SEQ ID NO: 19414 - DNA, 20 bp, synthetic construct
  source 1..20: mol_type = other DNA
atgtcgctgactcctagcca

SEQ ID NO: 19415 - DNA, 20 bp, synthetic construct
  source 1..20: mol_type = other DNA
ctgactcctagccacgggat

SEQ ID NO: 19416 - DNA, 20 bp, synthetic construct
  source 1..20: mol_type = other DNA
ccacctggatcctccgcgcc

SEQ ID NO: 19417 - DNA, 20 bp, synthetic construct
  source 1..20: mol_type = other DNA
cccaacgtagcagaagtccc

SEQ ID NO: 19418 - DNA, 20 bp, synthetic construct
  source 1..20: mol_type = other DNA
ttgcaccaagcagcggccct

SEQ ID NO: 19419 - DNA, 20 bp, synthetic construct
  source 1..20: mol_type = other DNA
ggcaactggaaaaaggtcaa

SEQ ID NO: 19420 - DNA, 20 bp, synthetic construct
  source 1..20: mol_type = other DNA
gctcaggtcgaagacttgtc

SEQ ID NO: 19421 - DNA, 20 bp, synthetic construct
  source 1..20: mol_type = other DNA
tgtggaaggtgaacttctgc

SEQ ID NO: 19422 - DNA, 20 bp, synthetic construct
  source 1..20: mol_type = other DNA
gcaaacaggtctccccgctg

SEQ ID NO: 19423 - DNA, 20 bp, synthetic construct
  source 1..20: mol_type = other DNA
gtgcgcagcctgcaagattg

SEQ ID NO: 19424 - DNA, 20 bp, synthetic construct
  source 1..20: mol_type = other DNA
cctggatcctccgcgcccgg

SEQ ID NO: 19425 - DNA, 20 bp, synthetic construct
  source 1..20: mol_type = other DNA
ctggagttccacgagtctcg

SEQ ID NO: 19426 - DNA, 20 bp, synthetic construct
  source 1..20: mol_type = other DNA
gtgcaaacaggtctccccgc

SEQ ID NO: 19427 - DNA, 20 bp, synthetic construct
  source 1..20: mol_type = other DNA
ccccagctcggtgcagctcc

SEQ ID NO: 19428 - DNA, 20 bp, synthetic construct
  source 1..20: mol_type = other DNA
ctaggagtcagcgacatatg

SEQ ID NO: 19429 - DNA, 20 bp, synthetic construct
  source 1..20: mol_type = other DNA
tcgagactcgtggaactcca

SEQ ID NO: 19430 - DNA, 20 bp, synthetic construct
  source 1..20: mol_type = other DNA
accagcaggggcttcatgag

SEQ ID NO: 19431 - DNA, 20 bp, synthetic construct
  source 1..20: mol_type = other DNA
tccatcacactggaggcggg

SEQ ID NO: 19432 - DNA, 20 bp, synthetic construct
  source 1..20: mol_type = other DNA
acggcaagtgtcggcactgt

SEQ ID NO: 19433 - DNA, 20 bp, synthetic construct
  source 1..20: mol_type = other DNA
tgctgccagtgctgactgcg

SEQ ID NO: 19434 - DNA, 20 bp, synthetic construct
  source 1..20: mol_type = other DNA
tggtgcaagcaggcagtgag

SEQ ID NO: 19435 - DNA, 20 bp, synthetic construct
  source 1..20: mol_type = other DNA
ccgcacagtacctgcaaagg

SEQ ID NO: 19436 - DNA, 20 bp, synthetic construct
  source 1..20: mol_type = other DNA
ggtagccgtcgtcatgccgc

SEQ ID NO: 19437 - DNA, 20 bp, synthetic construct
  source 1..20: mol_type = other DNA
gggaccaccacagtgcccag

SEQ ID NO: 19438 - DNA, 20 bp, synthetic construct
  source 1..20: mol_type = other DNA
cagcactggcagcaaggatg

SEQ ID NO: 19439 - DNA, 20 bp, synthetic construct
  source 1..20: mol_type = other DNA
gctctaggtcactgtctcct

SEQ ID NO: 19440 - DNA, 20 bp, synthetic construct
  source 1..20: mol_type = other DNA
agactccagcaggtaagggg

SEQ ID NO: 19441 - DNA, 20 bp, synthetic construct
  source 1..20: mol_type = other DNA
ccatcacactggaggcgggc

SEQ ID NO: 19442 - DNA, 20 bp, synthetic construct
  source 1..20: mol_type = other DNA
tgctggctgtcgggcagggc

SEQ ID NO: 19443 - DNA, 20 bp, synthetic construct
  source 1..20: mol_type = other DNA
gccatccacctgcaccggga

SEQ ID NO: 19444 - DNA, 20 bp, synthetic construct
  source 1..20: mol_type = other DNA
ctccaggagctgcaccgagc

SEQ ID NO: 19445 - DNA, 20 bp, synthetic construct
  source 1..20: mol_type = other DNA
acaagtcttcgacctgagcc

SEQ ID NO: 19446 - DNA, 20 bp, synthetic construct
  source 1..20: mol_type = other DNA
acactggaggcgggcgggga

SEQ ID NO: 19447 - DNA, 20 bp, synthetic construct
  source 1..20: mol_type = other DNA
acttggcccgaaccctcaac

SEQ ID NO: 19448 - DNA, 20 bp, synthetic construct
  source 1..20: mol_type = other DNA
atagttgaggtgctcctgtg

SEQ ID NO: 19449 - DNA, 20 bp, synthetic construct
  source 1..20: mol_type = other DNA
cgtccaggaagcaccacttg

SEQ ID NO: 19450 - DNA, 20 bp, synthetic construct
  source 1..20: mol_type = other DNA
ggctaggagtcagcgacata

SEQ ID NO: 19451 - DNA, 20 bp, synthetic construct
  source 1..20: mol_type = other DNA
gtggaactccagggtgacgt

SEQ ID NO: 19452 - DNA, 20 bp, synthetic construct
  source 1..20: mol_type = other DNA
gaggggaagtgggggttggg

SEQ ID NO: 19453 - DNA, 20 bp, synthetic construct
  source 1..20: mol_type = other DNA
aagcaagcaagaagaagaag

SEQ ID NO: 19454 - DNA, 20 bp, synthetic construct
  source 1..20: mol_type = other DNA
tgggacgtactcgctgtgca

SEQ ID NO: 19455 - DNA, 20 bp, synthetic construct
  source 1..20: mol_type = other DNA
ctgcggatcctggcgtgcgg

SEQ ID NO: 19456 - DNA, 20 bp, synthetic construct
  source 1..20: mol_type = other DNA
cctggagctgggcgctggag

SEQ ID NO: 19457 - DNA, 20 bp, synthetic construct
  source 1..20: mol_type = other DNA
ccatggtggcctggttgcgc

SEQ ID NO: 19458 - DNA, 20 bp, synthetic construct
  source 1..20: mol_type = other DNA
ggctcgccatccacctgcac

SEQ ID NO: 19459 - DNA, 20 bp, synthetic construct
  source 1..20: mol_type = other DNA
gctgacgcagtgtcgcgagg

SEQ ID NO: 19460 - DNA, 20 bp, synthetic construct
  source 1..20: mol_type = other DNA
agcctgggctcatgggaaga

SEQ ID NO: 19461 - DNA, 20 bp, synthetic construct
  source 1..20: mol_type = other DNA
cagtggtgccgtacaaaggt

SEQ ID NO: 19462 - DNA, 20 bp, synthetic construct
  source 1..20: mol_type = other DNA
aggctccaggaatgtccgcg

SEQ ID NO: 19463 - DNA, 20 bp, synthetic construct
  source 1..20: mol_type = other DNA
caggggcaggatggcaacag

SEQ ID NO: 19464 - DNA, 20 bp, synthetic construct
  source 1..20: mol_type = other DNA
cccgaaccctcaactggggt

SEQ ID NO: 19465 - DNA, 20 bp, synthetic construct
  source 1..20: mol_type = other DNA
gagaggatccagcccacctg

SEQ ID NO: 19466 - DNA, 20 bp, synthetic construct
  source 1..20: mol_type = other DNA
tactgaggagagcgaggggc

SEQ ID NO: 19467 - DNA, 20 bp, synthetic construct
  source 1..20: mol_type = other DNA
cctgttgccatcctgcccct

SEQ ID NO: 19468 - DNA, 20 bp, synthetic construct
  source 1..20: mol_type = other DNA
agatccggagtacagtggac

SEQ ID NO: 19469 - DNA, 20 bp, synthetic construct
  source 1..20: mol_type = other DNA
cctgcggatcctggcgtgcg

SEQ ID NO: 19470 - DNA, 20 bp, synthetic construct
  source 1..20: mol_type = other DNA
agtactcacctggggcctcc

SEQ ID NO: 19471 - DNA, 20 bp, synthetic construct
  source 1..20: mol_type = other DNA
gtgccgtacaaaggttggct

SEQ ID NO: 19472 - DNA, 20 bp, synthetic construct
  source 1..20: mol_type = other DNA
aagcggctgttgaatttctc

SEQ ID NO: 19473 - DNA, 20 bp, synthetic construct
  source 1..20: mol_type = other DNA
cattccatcacactggaggc

SEQ ID NO: 19474 - DNA, 20 bp, synthetic construct
  source 1..20: mol_type = other DNA
ccaggccaccatggtgcaga

SEQ ID NO: 19475 - DNA, 20 bp, synthetic construct
  source 1..20: mol_type = other DNA
cgtgaggctgcaagcttgca

SEQ ID NO: 19476 - DNA, 20 bp, synthetic construct
  source 1..20: mol_type = other DNA
agttgaggtgctcctgtggg

SEQ ID NO: 19477 - DNA, 20 bp, synthetic construct
  source 1..20: mol_type = other DNA
tgcttaccccaccccagttg

SEQ ID NO: 19478 - DNA, 20 bp, synthetic construct
  source 1..20: mol_type = other DNA
ggacgtactcgctgtgcagg

SEQ ID NO: 19479 - DNA, 20 bp, synthetic construct
  source 1..20: mol_type = other DNA
gccatcctgcccctgggtac

SEQ ID NO: 19480 - DNA, 20 bp, synthetic construct
  source 1..20: mol_type = other DNA
tggtgaagccaatgacctcg

SEQ ID NO: 19481 - DNA, 20 bp, synthetic construct
  source 1..20: mol_type = other DNA
ctacgacaaggagcagctca

SEQ ID NO: 19482 - DNA, 20 bp, synthetic construct
  source 1..20: mol_type = other DNA
tggagaggatccagcccacc

SEQ ID NO: 19483 - DNA, 20 bp, synthetic construct
  source 1..20: mol_type = other DNA
gtgtccgcccacctgcagcg

SEQ ID NO: 19484 - DNA, 20 bp, synthetic construct
  source 1..20: mol_type = other DNA
tggaatccctgagggtagac

SEQ ID NO: 19485 - DNA, 20 bp, synthetic construct
  source 1..20: mol_type = other DNA
agtgcacaacctgcggatcc

SEQ ID NO: 19486 - DNA, 20 bp, synthetic construct
  source 1..20: mol_type = other DNA
gttcgagaccaacgtgtccg

SEQ ID NO: 19487 - DNA, 20 bp, synthetic construct
  source 1..20: mol_type = other DNA
gtagccgtcgtcatgccgct

SEQ ID NO: 19488 - DNA, 20 bp, synthetic construct
  source 1..20: mol_type = other DNA
catcacactggaggcgggcg

SEQ ID NO: 19489 - DNA, 20 bp, synthetic construct
  source 1..20: mol_type = other DNA
tgttcaggaaaacaacacac

SEQ ID NO: 19490 - DNA, 20 bp, synthetic construct
  source 1..20: mol_type = other DNA
gcatgacgacggctacctcg

SEQ ID NO: 19491 - DNA, 20 bp, synthetic construct
  source 1..20: mol_type = other DNA
ccacgtggaggaggggaacg

SEQ ID NO: 19492 - DNA, 20 bp, synthetic construct
  source 1..20: mol_type = other DNA
ctgcaccacgcagtcagcac

SEQ ID NO: 19493 - DNA, 20 bp, synthetic construct
  source 1..20: mol_type = other DNA
cgacatatggggagcacatc

SEQ ID NO: 19494 - DNA, 20 bp, synthetic construct
  source 1..20: mol_type = other DNA
ccacaggccgcgctgcaggt

SEQ ID NO: 19495 - DNA, 20 bp, synthetic construct
  source 1..20: mol_type = other DNA
ggcacggtgagctccccgca

SEQ ID NO: 19496 - DNA, 20 bp, synthetic construct
  source 1..20: mol_type = other DNA
gcatgaggtcgcccccagct

SEQ ID NO: 19497 - DNA, 20 bp, synthetic construct
  source 1..20: mol_type = other DNA
ccaagtcgttgccagtaccc

SEQ ID NO: 19498 - DNA, 20 bp, synthetic construct
  source 1..20: mol_type = other DNA
tcaaagtcgtggtgctcccc

SEQ ID NO: 19499 - DNA, 20 bp, synthetic construct
  source 1..20: mol_type = other DNA
cagctcctggagctgagggc

SEQ ID NO: 19500 - DNA, 20 bp, synthetic construct
  source 1..20: mol_type = other DNA
cggtgcagctcctggagctg

SEQ ID NO: 19501 - DNA, 20 bp, synthetic construct
  source 1..20: mol_type = other DNA
ggccgctgcttggtgcaaac

SEQ ID NO: 19502 - DNA, 20 bp, synthetic construct
  source 1..20: mol_type = other DNA
ccttccgtgaatcaggctcc

SEQ ID NO: 19503 - DNA, 20 bp, synthetic construct
  source 1..20: mol_type = other DNA
cctgggtactggcaacgact

SEQ ID NO: 19504 - DNA, 20 bp, synthetic construct
  source 1..20: mol_type = other DNA
tgacgtgggcgtcaaagccc

SEQ ID NO: 19505 - DNA, 20 bp, synthetic construct
  source 1..20: mol_type = other DNA
tttgcaccctggatgggatg

SEQ ID NO: 19506 - DNA, 20 bp, synthetic construct
  source 1..20: mol_type = other DNA
caccacatccaaggccatcc

SEQ ID NO: 19507 - DNA, 20 bp, synthetic construct
  source 1..20: mol_type = other DNA
agttccacgagtctcgaggt

SEQ ID NO: 19508 - DNA, 20 bp, synthetic construct
  source 1..20: mol_type = other DNA
cacgttcccctcctccacgt

SEQ ID NO: 19509 - DNA, 20 bp, synthetic construct
  source 1..20: mol_type = other DNA
cgtggaactccagggtgacg

SEQ ID NO: 19510 - DNA, 20 bp, synthetic construct
  source 1..20: mol_type = other DNA
gccatcccggtgcaggtgga

SEQ ID NO: 19511 - DNA, 20 bp, synthetic construct
  source 1..20: mol_type = other DNA
tgtgcgggcaccatgccctg

SEQ ID NO: 19512 - DNA, 20 bp, synthetic construct
  source 1..20: mol_type = other DNA
tcttcgacctgagccaggga

SEQ ID NO: 19513 - DNA, 20 bp, synthetic construct
  source 1..20: mol_type = other DNA
tcccccagccaacctttgta

SEQ ID NO: 19514 - DNA, 20 bp, synthetic construct
  source 1..20: mol_type = other DNA
tacccagtggtgccgtacaa

SEQ ID NO: 19515 - DNA, 20 bp, synthetic construct
  source 1..20: mol_type = other DNA
ctcctggagctgagggcagg

SEQ ID NO: 19516 - DNA, 20 bp, synthetic construct
  source 1..20: mol_type = other DNA
gtagttgttgaagacatcca

SEQ ID NO: 19517 - DNA, 20 bp, synthetic construct
  source 1..20: mol_type = other DNA
accagggccacccccacctc

SEQ ID NO: 19518 - DNA, 20 bp, synthetic construct
  source 1..20: mol_type = other DNA
catccgagtggtggtgagcg

SEQ ID NO: 19519 - DNA, 20 bp, synthetic construct
  source 1..20: mol_type = other DNA
cttacagaagtcgttcctct

SEQ ID NO: 19520 - DNA, 20 bp, synthetic construct
  source 1..20: mol_type = other DNA
gtttgtgaaccccaagagtg

SEQ ID NO: 19521 - DNA, 20 bp, synthetic construct
  source 1..20: mol_type = other DNA
caaacaggtctccccgctgg

SEQ ID NO: 19522 - DNA, 20 bp, synthetic construct
  source 1..20: mol_type = other DNA
ccgcatcaaggatctctggg

SEQ ID NO: 19523 - DNA, 20 bp, synthetic construct
  source 1..20: mol_type = other DNA
ctgagggcaggaggcatggc

SEQ ID NO: 19524 - DNA, 20 bp, synthetic construct
  source 1..20: mol_type = other DNA
tgagataccagaggaaagac

SEQ ID NO: 19525 - DNA, 20 bp, synthetic construct
  source 1..20: mol_type = other DNA
gagccccagcggcatgacga

SEQ ID NO: 19526 - DNA, 20 bp, synthetic construct
  source 1..20: mol_type = other DNA
tgggggcaaccaggtgaacg

SEQ ID NO: 19527 - DNA, 20 bp, synthetic construct
  source 1..20: mol_type = other DNA
catcgagcagctggagaagg

SEQ ID NO: 19528 - DNA, 20 bp, synthetic construct
  source 1..20: mol_type = other DNA
ttcaggaaaacaacacactg

SEQ ID NO: 19529 - DNA, 20 bp, synthetic construct
  source 1..20: mol_type = other DNA
ttcctgaacatccccaggtg

SEQ ID NO: 19530 - DNA, 20 bp, synthetic construct
  source 1..20: mol_type = other DNA
ggtgccgtacaaaggttggc

SEQ ID NO: 19531 - DNA, 20 bp, synthetic construct
  source 1..20: mol_type = other DNA
ggaataagatgttctacgcc

SEQ ID NO: 19532 - DNA, 20 bp, synthetic construct
  source 1..20: mol_type = other DNA
cagggcgatgcggatgcgtg

SEQ ID NO: 19533 - DNA, 20 bp, synthetic construct
  source 1..20: mol_type = other DNA
cgcagtcagcactggcagca

SEQ ID NO: 19534 - DNA, 20 bp, synthetic construct
  source 1..20: mol_type = other DNA
aacttctgctggaatccctg

SEQ ID NO: 19535 - DNA, 20 bp, synthetic construct
  source 1..20: mol_type = other DNA
cttcatgagcggggaggggg

SEQ ID NO: 19536 - DNA, 20 bp, synthetic construct
  source 1..20: mol_type = other DNA
gacctgtttgcaccaagcag

SEQ ID NO: 19537 - DNA, 20 bp, synthetic construct
  source 1..20: mol_type = other DNA
gaataagatgttctacgccg

SEQ ID NO: 19538 - DNA, 20 bp, synthetic construct
  source 1..20: mol_type = other DNA
ctttgacgcccacgtcaccc

SEQ ID NO: 19539 - DNA, 20 bp, synthetic construct
  source 1..20: mol_type = other DNA
tggacggtgagtctactccc

SEQ ID NO: 19540 - DNA, 20 bp, synthetic construct
  source 1..20: mol_type = other DNA
cctggggcctccgggcgcgg

SEQ ID NO: 19541 - DNA, 20 bp, synthetic construct
  source 1..20: mol_type = other DNA
caggcgtagctggtccaggg

SEQ ID NO: 19542 - DNA, 20 bp, synthetic construct
  source 1..20: mol_type = other DNA
tcaccggggcgtgggtgagc

SEQ ID NO: 19543 - DNA, 20 bp, synthetic construct
  source 1..20: mol_type = other DNA
accgcatcaaggatctctgg

SEQ ID NO: 19544 - DNA, 20 bp, synthetic construct
  source 1..20: mol_type = other DNA
ggccaagcacatccgagtgg

SEQ ID NO: 19545 - DNA, 20 bp, synthetic construct
  source 1..20: mol_type = other DNA
agatcatccagtctttcctc

SEQ ID NO: 19546 - DNA, 20 bp, synthetic construct
  source 1..20: mol_type = other DNA
tagccgtcgtcatgccgctg

SEQ ID NO: 19547 - DNA, 20 bp, synthetic construct
  source 1..20: mol_type = other DNA
ccgaaccctcaactggggtg

SEQ ID NO: 19548 - DNA, 20 bp, synthetic construct
  source 1..20: mol_type = other DNA
ccgtccaggaagcaccactt

SEQ ID NO: 19549 - DNA, 20 bp, synthetic construct
  source 1..20: mol_type = other DNA
ccttgggccctccctggctc

SEQ ID NO: 19550 - DNA, 20 bp, synthetic construct
  source 1..20: mol_type = other DNA
agtgccgacacttgccgtcc

SEQ ID NO: 19551 - DNA, 20 bp, synthetic construct
  source 1..20: mol_type = other DNA
aggggcaggatggcaacagg

SEQ ID NO: 19552 - DNA, 20 bp, synthetic construct
  source 1..20: mol_type = other DNA
cctggttgcccccactcttg

SEQ ID NO: 19553 - DNA, 20 bp, synthetic construct
  source 1..20: mol_type = other DNA
ccaggagctgcaccgagctg

SEQ ID NO: 19554 - DNA, 20 bp, synthetic construct
  source 1..20: mol_type = other DNA
tccgcaggttgtgcactttg

SEQ ID NO: 19555 - DNA, 20 bp, synthetic construct
  source 1..20: mol_type = other DNA
caagtcgttgccagtaccca

SEQ ID NO: 19556 - DNA, 20 bp, synthetic construct
  source 1..20: mol_type = other DNA
ctcaggtcgaagacttgtcg

SEQ ID NO: 19557 - DNA, 20 bp, synthetic construct
  source 1..20: mol_type = other DNA
gggcaactggaaaaaggtca

SEQ ID NO: 19558 - DNA, 20 bp, synthetic construct
  source 1..20: mol_type = other DNA
ggctcaggtcgaagacttgt

SEQ ID NO: 19559 - DNA, 20 bp, synthetic construct
  source 1..20: mol_type = other DNA
aacatccccaggtgaggagg

SEQ ID NO: 19560 - DNA, 20 bp, synthetic construct
  source 1..20: mol_type = other DNA
cgacaaggagcagctcaagg

SEQ ID NO: 19561 - DNA, 20 bp, synthetic construct
  source 1..20: mol_type = other DNA
tcctccagggcgacactccc

SEQ ID NO: 19562 - DNA, 20 bp, synthetic construct
  source 1..20: mol_type = other DNA
ctatgtgactgagatcgcac

SEQ ID NO: 19563 - DNA, 20 bp, synthetic construct
  source 1..20: mol_type = other DNA
ccacctgcagcgcggcctgt

SEQ ID NO: 19564 - DNA, 20 bp, synthetic construct
  source 1..20: mol_type = other DNA
ggcagatggtgcgctggccc

SEQ ID NO: 19565 - DNA, 20 bp, synthetic construct
  source 1..20: mol_type = other DNA
atcgagcagctggagaaggt

SEQ ID NO: 19566 - DNA, 20 bp, synthetic construct
  source 1..20: mol_type = other DNA
aggaggcctgtgagtgcggt

SEQ ID NO: 19567 - DNA, 20 bp, synthetic construct
  source 1..20: mol_type = other DNA
ggcaagtacttacgcctcct

SEQ ID NO: 19568 - DNA, 20 bp, synthetic construct
  source 1..20: mol_type = other DNA
gtgtttgtgaaccccaagag

SEQ ID NO: 19569 - DNA, 20 bp, synthetic construct
  source 1..20: mol_type = other DNA
gacgtactcgctgtgcaggg

SEQ ID NO: 19570 - DNA, 20 bp, synthetic construct
  source 1..20: mol_type = other DNA
ctacaggatcgaccgagccc

SEQ ID NO: 19571 - DNA, 20 bp, synthetic construct
  source 1..20: mol_type = other DNA
agtagttgttgaagacatcc

SEQ ID NO: 19572 - DNA, 20 bp, synthetic construct
  source 1..20: mol_type = other DNA
cttggcccgaaccctcaact

SEQ ID NO: 19573 - DNA, 20 bp, synthetic construct
  source 1..20: mol_type = other DNA
cttccacagcaaggagattg

SEQ ID NO: 19574 - DNA, 20 bp, synthetic construct
  source 1..20: mol_type = other DNA
gtacacagacgacgccagga

SEQ ID NO: 19575 - DNA, 20 bp, synthetic construct
  source 1..20: mol_type = other DNA
gtgggacgtactcgctgtgc

SEQ ID NO: 19576 - DNA, 20 bp, synthetic construct
  source 1..20: mol_type = other DNA
ctgaacatccccaggtgagg

SEQ ID NO: 19577 - DNA, 20 bp, synthetic construct
  source 1..20: mol_type = other DNA
ggaggcctgtgagtgcggtg

SEQ ID NO: 19578 - DNA, 20 bp, synthetic construct
  source 1..20: mol_type = other DNA
ggtggggagaggggaagtgg

SEQ ID NO: 19579 - DNA, 20 bp, synthetic construct
  source 1..20: mol_type = other DNA
acttctgctggaatccctga

SEQ ID NO: 19580 - DNA, 20 bp, synthetic construct
  source 1..20: mol_type = other DNA
ctgtggtactgaggagagcg

SEQ ID NO: 19581 - DNA, 20 bp, synthetic construct
  source 1..20: mol_type = other DNA
acgtggtacagctggaccgc

SEQ ID NO: 19582 - DNA, 20 bp, synthetic construct
  source 1..20: mol_type = other DNA
ccaggggcaggatggcaaca

SEQ ID NO: 19583 - DNA, 20 bp, synthetic construct
  source 1..20: mol_type = other DNA
cccaccccagttgagggttc

SEQ ID NO: 19584 - DNA, 20 bp, synthetic construct
  source 1..20: mol_type = other DNA
gtgctgccggttctccaggt

SEQ ID NO: 19585 - DNA, 20 bp, synthetic construct
  source 1..20: mol_type = other DNA
ctgtgtagcgggccgcccac

SEQ ID NO: 19586 - DNA, 20 bp, synthetic construct
  source 1..20: mol_type = other DNA
ccaggtgggcgggatgacca

SEQ ID NO: 19587 - DNA, 20 bp, synthetic construct
  source 1..20: mol_type = other DNA
tggaggaaaagtaagtatct

SEQ ID NO: 19588 - DNA, 20 bp, synthetic construct
  source 1..20: mol_type = other DNA
tttgcaccaagcagcggccc

SEQ ID NO: 19589 - DNA, 20 bp, synthetic construct
  source 1..20: mol_type = other DNA
aaggaggcctgtgagtgcgg

SEQ ID NO: 19590 - DNA, 20 bp, synthetic construct
  source 1..20: mol_type = other DNA
cgggcgcggaggatccaggt

SEQ ID NO: 19591 - DNA, 20 bp, synthetic construct
  source 1..20: mol_type = other DNA
caggccgcgctgcaggtggg

SEQ ID NO: 19592 - DNA, 20 bp, synthetic construct
  source 1..20: mol_type = other DNA
agctctaggtcactgtctcc

SEQ ID NO: 19593 - DNA, 20 bp, synthetic construct
  source 1..20: mol_type = other DNA
ccctgttgccatcctgcccc

SEQ ID NO: 19594 - DNA, 20 bp, synthetic construct
  source 1..20: mol_type = other DNA
caggggcttcatgagcgggg

SEQ ID NO: 19595 - DNA, 20 bp, synthetic construct
  source 1..20: mol_type = other DNA
acctgcggatcctggcgtgc

SEQ ID NO: 19596 - DNA, 20 bp, synthetic construct
  source 1..20: mol_type = other DNA
ccactgccagccgcttctac

SEQ ID NO: 19597 - DNA, 20 bp, synthetic construct
  source 1..20: mol_type = other DNA
gctcgccatccacctgcacc

SEQ ID NO: 19598 - DNA, 20 bp, synthetic construct
  source 1..20: mol_type = other DNA
cggggacttctgctacgttg

SEQ ID NO: 19599 - DNA, 20 bp, synthetic construct
  source 1..20: mol_type = other DNA
ctcctgggagacaaggtgag

SEQ ID NO: 19600 - DNA, 20 bp, synthetic construct
  source 1..20: mol_type = other DNA
agtcagagaaagctgtctgt

SEQ ID NO: 19601 - DNA, 20 bp, synthetic construct
  source 1..20: mol_type = other DNA
accgtccaggaagcaccact

SEQ ID NO: 19602 - DNA, 20 bp, synthetic construct
  source 1..20: mol_type = other DNA
gtagaagcggctggcagtgg

SEQ ID NO: 19603 - DNA, 20 bp, synthetic construct
  source 1..20: mol_type = other DNA
acaggatgagatttatatcc

SEQ ID NO: 19604 - DNA, 20 bp, synthetic construct
  source 1..20: mol_type = other DNA
gagacactgacttctgctgc

SEQ ID NO: 19605 - DNA, 20 bp, synthetic construct
  source 1..20: mol_type = other DNA
gcggcagatccggagtacag

SEQ ID NO: 19606 - DNA, 20 bp, synthetic construct
  source 1..20: mol_type = other DNA
cctggccaagcacatccgag

SEQ ID NO: 19607 - DNA, 20 bp, synthetic construct
  source 1..20: mol_type = other DNA
gcgctgcaggtgggcggaca

SEQ ID NO: 19608 - DNA, 20 bp, synthetic construct
  source 1..20: mol_type = other DNA
gatgatctttgcaccctgga

SEQ ID NO: 19609 - DNA, 20 bp, synthetic construct
  source 1..20: mol_type = other DNA
agtccattccatcacactgg

SEQ ID NO: 19610 - DNA, 20 bp, synthetic construct
  source 1..20: mol_type = other DNA
ggcaggatggcaacaggggg

SEQ ID NO: 19611 - DNA, 20 bp, synthetic construct
  source 1..20: mol_type = other DNA
cagcaggggcttcatgagcg

SEQ ID NO: 19612 - DNA, 20 bp, synthetic construct
  source 1..20: mol_type = other DNA
aagctgtctgtgggagacag

SEQ ID NO: 19613 - DNA, 20 bp, synthetic construct
  source 1..20: mol_type = other DNA
acgagcactcaccagcatcc

SEQ ID NO: 19614 - DNA, 20 bp, synthetic construct
  source 1..20: mol_type = other DNA
gcagcgcggcctgtgggcac

SEQ ID NO: 19615 - DNA, 20 bp, synthetic construct
  source 1..20: mol_type = other DNA
tgggagaggatcttggacac

SEQ ID NO: 19616 - DNA, 20 bp, synthetic construct
  source 1..20: mol_type = other DNA
ggcctgtgagtgcggtgggg

SEQ ID NO: 19617 - DNA, 20 bp, synthetic construct
  source 1..20: mol_type = other DNA
cttctccagctgctcgatgc

SEQ ID NO: 19618 - DNA, 20 bp, synthetic construct
  source 1..20: mol_type = other DNA
tctgggtggagacaagcagt

SEQ ID NO: 19619 - DNA, 20 bp, synthetic construct
  source 1..20: mol_type = other DNA
gggtttcaggtcctggatct

SEQ ID NO: 19620 - DNA, 20 bp, synthetic construct
  source 1..20: mol_type = other DNA
gctgtgtagcgggccgccca

SEQ ID NO: 19621 - DNA, 20 bp, synthetic construct
  source 1..20: mol_type = other DNA
gcgtgaggctgcaagcttgc

SEQ ID NO: 19622 - DNA, 20 bp, synthetic construct
  source 1..20: mol_type = other DNA
cacaatctccttgctgtgga

SEQ ID NO: 19623 - DNA, 20 bp, synthetic construct
  source 1..20: mol_type = other DNA
gttcaggaaaacaacacact

SEQ ID NO: 19624 - DNA, 20 bp, synthetic construct
  source 1..20: mol_type = other DNA
gctcctgtggggggaggtca

SEQ ID NO: 19625 - DNA, 20 bp, synthetic construct
  source 1..20: mol_type = other DNA
atccctgagggtagacagga

SEQ ID NO: 19626 - DNA, 20 bp, synthetic construct
  source 1..20: mol_type = other DNA
cccacaggccgcgctgcagg

SEQ ID NO: 19627 - DNA, 20 bp, synthetic construct
  source 1..20: mol_type = other DNA
tggccacaatctccttgctg

SEQ ID NO: 19628 - DNA, 20 bp, synthetic construct
  source 1..20: mol_type = other DNA
aacctgcggatcctggcgtg

SEQ ID NO: 19629 - DNA, 20 bp, synthetic construct
  source 1..20: mol_type = other DNA
agaacatcttattccgaaag

SEQ ID NO: 19630 - DNA, 20 bp, synthetic construct
  source 1..20: mol_type = other DNA
gctttctctgacttcctgat

SEQ ID NO: 19631 - DNA, 20 bp, synthetic construct
  source 1..20: mol_type = other DNA
ccattccatcacactggagg

SEQ ID NO: 19632 - DNA, 20 bp, synthetic construct
  source 1..20: mol_type = other DNA
tctctgggttggcctctggg

SEQ ID NO: 19633 - DNA, 20 bp, synthetic construct
  source 1..20: mol_type = other DNA
cctgctggagtctctcaatg

SEQ ID NO: 19634 - DNA, 20 bp, synthetic construct
  source 1..20: mol_type = other DNA
caagatcctctcccacgtgg

SEQ ID NO: 19635 - DNA, 20 bp, synthetic construct
  source 1..20: mol_type = other DNA
ctgttgcaggtcactgcaag

SEQ ID NO: 19636 - DNA, 20 bp, synthetic construct
  source 1..20: mol_type = other DNA
cacactggggtttcaggtcc

SEQ ID NO: 19637 - DNA, 20 bp, synthetic construct
  source 1..20: mol_type = other DNA
ccggggacttctgctacgtt

SEQ ID NO: 19638 - DNA, 20 bp, synthetic construct
  source 1..20: mol_type = other DNA
gctaggagtcagcgacatat

SEQ ID NO: 19639 - DNA, 20 bp, synthetic construct
  source 1..20: mol_type = other DNA
caaagtcgtggtgctcccca

SEQ ID NO: 19640 - DNA, 20 bp, synthetic construct
  source 1..20: mol_type = other DNA
cgcgaggtaagtgcccaggg

SEQ ID NO: 19641 - DNA, 20 bp, synthetic construct
  source 1..20: mol_type = other DNA
gctgttgaatttctctgggt

SEQ ID NO: 19642 - DNA, 20 bp, synthetic construct
  source 1..20: mol_type = other DNA
gtcttcgacctgagccaggg

SEQ ID NO: 19643 - DNA, 20 bp, synthetic construct
  source 1..20: mol_type = other DNA
ctgctggagtctctcaatgt

SEQ ID NO: 19644 - DNA, 20 bp, synthetic construct
  source 1..20: mol_type = other DNA
ccggctcaccgtggtccagc

SEQ ID NO: 19645 - DNA, 20 bp, synthetic construct
  source 1..20: mol_type = other DNA
ctgctgcaggacaggaagag

SEQ ID NO: 19646 - DNA, 20 bp, synthetic construct
  source 1..20: mol_type = other DNA
gcacggtgagctccccgcat

SEQ ID NO: 19647 - DNA, 20 bp, synthetic construct
  source 1..20: mol_type = other DNA
ctctcctcagtaccacagca

SEQ ID NO: 19648 - DNA, 20 bp, synthetic construct
  source 1..20: mol_type = other DNA
caaggtgaggcctctccctc

SEQ ID NO: 19649 - DNA, 20 bp, synthetic construct
  source 1..20: mol_type = other DNA
gcagaagtccccggacacgt

SEQ ID NO: 19650 - DNA, 20 bp, synthetic construct
  source 1..20: mol_type = other DNA
gcgggatgaccacggctgcg

SEQ ID NO: 19651 - DNA, 20 bp, synthetic construct
  source 1..20: mol_type = other DNA
gtccaggaagcaccacttgg

SEQ ID NO: 19652 - DNA, 20 bp, synthetic construct
  source 1..20: mol_type = other DNA
gacggcaagtgtcggcactg

SEQ ID NO: 19653 - DNA, 20 bp, synthetic construct
  source 1..20: mol_type = other DNA
aagtcagagaaagctgtctg

SEQ ID NO: 19654 - DNA, 20 bp, synthetic construct
  source 1..20: mol_type = other DNA
tggtgcagaaggccaagcgg

SEQ ID NO: 19655 - DNA, 20 bp, synthetic construct
  source 1..20: mol_type = other DNA
cgatctcagtcacatagttg

SEQ ID NO: 19656 - DNA, 20 bp, synthetic construct
  source 1..20: mol_type = other DNA
cgcacagtacctgcaaaggc

SEQ ID NO: 19657 - DNA, 20 bp, synthetic construct
  source 1..20: mol_type = other DNA
gcttaccccaccccagttga

SEQ ID NO: 19658 - DNA, 20 bp, synthetic construct
  source 1..20: mol_type = other DNA
gcggctgacgcagtgtcgcg

SEQ ID NO: 19659 - DNA, 20 bp, synthetic construct
  source 1..20: mol_type = other DNA
ccatgacgtcgttggtgagt

SEQ ID NO: 19660 - DNA, 20 bp, synthetic construct
  source 1..20: mol_type = other DNA
cagctgctcgtggtgcaagc

SEQ ID NO: 19661 - DNA, 20 bp, synthetic construct
  source 1..20: mol_type = other DNA
ttggcccgaaccctcaactg

SEQ ID NO: 19662 - DNA, 20 bp, synthetic construct
  source 1..20: mol_type = other DNA
cttgcaccacgagcagctga

SEQ ID NO: 19663 - DNA, 20 bp, synthetic construct
  source 1..20: mol_type = other DNA
aggatgacagtattctcagc

SEQ ID NO: 19664 - DNA, 20 bp, synthetic construct
  source 1..20: mol_type = other DNA
atgaatagtagtattagttc

SEQ ID NO: 19665 - DNA, 20 bp, synthetic construct
  source 1..20: mol_type = other DNA
actggtcaacacagatagct

SEQ ID NO: 19666 - DNA, 20 bp, synthetic construct
  source 1..20: mol_type = other DNA
tggaaatcagcatattcctg

SEQ ID NO: 19667 - DNA, 20 bp, synthetic construct
  source 1..20: mol_type = other DNA
ccaatgcgccatcggtgact

SEQ ID NO: 19668 - DNA, 20 bp, synthetic construct
  source 1..20: mol_type = other DNA
tgatggtgcccgtcttcacc

SEQ ID NO: 19669 - DNA, 20 bp, synthetic construct
  source 1..20: mol_type = other DNA
gggctccatgaggcgtggct

SEQ ID NO: 19670 - DNA, 20 bp, synthetic construct
  source 1..20: mol_type = other DNA
tctggattggcttcaggtag

SEQ ID NO: 19671 - DNA, 20 bp, synthetic construct
  source 1..20: mol_type = other DNA
cagccggttgtgcttgttgg

SEQ ID NO: 19672 - DNA, 20 bp, synthetic construct
  source 1..20: mol_type = other DNA
tgtccatgatggcgcggatc

SEQ ID NO: 19673 - DNA, 20 bp, synthetic construct
  source 1..20: mol_type = other DNA
gtccacgctgacagactccc

SEQ ID NO: 19674 - DNA, 20 bp, synthetic construct
  source 1..20: mol_type = other DNA
ccacggccactctgacaaca

SEQ ID NO: 19675 - DNA, 20 bp, synthetic construct
  source 1..20: mol_type = other DNA
tgtcgaaggggtctccgggc

SEQ ID NO: 19676 - DNA, 20 bp, synthetic construct
  source 1..20: mol_type = other DNA
acctacggcgagggcgagag

SEQ ID NO: 19677 - DNA, 20 bp, synthetic construct
  source 1..20: mol_type = other DNA
gagggagatggcactgatgg

SEQ ID NO: 19678 - DNA, 20 bp, synthetic construct
  source 1..20: mol_type = other DNA
ccacctgccctcccctgtga

SEQ ID NO: 19679 - DNA, 20 bp, synthetic construct
  source 1..20: mol_type = other DNA
ctcggccaggccgtcgggga

SEQ ID NO: 19680 - DNA, 20 bp, synthetic construct
  source 1..20: mol_type = other DNA
tagaggtcctccttcttccc

SEQ ID NO: 19681 - DNA, 20 bp, synthetic construct
  source 1..20: mol_type = other DNA
gtaccatgatgttgcccatg

SEQ ID NO: 19682 - DNA, 20 bp, synthetic construct
  source 1..20: mol_type = other DNA
agaaggcaaacccctgctga

SEQ ID NO: 19683 - DNA, 20 bp, synthetic construct
  source 1..20: mol_type = other DNA
tccgaccccatggtgcaggt

SEQ ID NO: 19684 - DNA, 20 bp, synthetic construct
  source 1..20: mol_type = other DNA
gccagtggtcaaacacacac

SEQ ID NO: 19685 - DNA, 20 bp, synthetic construct
  source 1..20: mol_type = other DNA
gcatgtcgacttctcctcgg

SEQ ID NO: 19686 - DNA, 20 bp, synthetic construct
  source 1..20: mol_type = other DNA
ccgagtcaccgatggcgcat

SEQ ID NO: 19687 - DNA, 20 bp, synthetic construct
  source 1..20: mol_type = other DNA
ctcaccatggtggcggatgg

SEQ ID NO: 19688 - DNA, 20 bp, synthetic construct
  source 1..20: mol_type = other DNA
atcagtgaagcgtgtctccc

SEQ ID NO: 19689 - DNA, 20 bp, synthetic construct
  source 1..20: mol_type = other DNA
cctcaccttgatggggatgc

SEQ ID NO: 19690 - DNA, 20 bp, synthetic construct
  source 1..20: mol_type = other DNA
gcccatcatcaagattgttc

SEQ ID NO: 19691 - DNA, 20 bp, synthetic construct
  source 1..20: mol_type = other DNA
cgaggagaagtcgacatgcc

SEQ ID NO: 19692 - DNA, 20 bp, synthetic construct
  source 1..20: mol_type = other DNA
gcacaaccggctgtacatga

SEQ ID NO: 19693 - DNA, 20 bp, synthetic construct
  source 1..20: mol_type = other DNA
gcccacctgcaccatggggt

SEQ ID NO: 19694 - DNA, 20 bp, synthetic construct
  source 1..20: mol_type = other DNA
acagccggttgtgcttgttg

SEQ ID NO: 19695 - DNA, 20 bp, synthetic construct
  source 1..20: mol_type = other DNA
ccagactttccagcgcatcg

SEQ ID NO: 19696 - DNA, 20 bp, synthetic construct
  source 1..20: mol_type = other DNA
gtcacagcttttaatgcctg

SEQ ID NO: 19697 - DNA, 20 bp, synthetic construct
  source 1..20: mol_type = other DNA
actggcgcctcaccttgatg

SEQ ID NO: 19698 - DNA, 20 bp, synthetic construct
  source 1..20: mol_type = other DNA
ctatacccctgggaagaagg

SEQ ID NO: 19699 - DNA, 20 bp, synthetic construct
  source 1..20: mol_type = other DNA
tgaagcgtgtctccccggcc

SEQ ID NO: 19700 - DNA, 20 bp, synthetic construct
  source 1..20: mol_type = other DNA
ccctgttgtcagagtggccg

SEQ ID NO: 19701 - DNA, 20 bp, synthetic construct
  source 1..20: mol_type = other DNA
cgcgtgctcgaaggtggtga

SEQ ID NO: 19702 - DNA, 20 bp, synthetic construct
  source 1..20: mol_type = other DNA
aggcttgatgcgctcggcaa

SEQ ID NO: 19703 - DNA, 20 bp, synthetic construct
  source 1..20: mol_type = other DNA
gagatggcactgatggaggg

SEQ ID NO: 19704 - DNA, 20 bp, synthetic construct
  source 1..20: mol_type = other DNA
ccgtaccatgatgttgccca

SEQ ID NO: 19705 - DNA, 20 bp, synthetic construct
  source 1..20: mol_type = other DNA
cccagtgtgtgtttgaccac

SEQ ID NO: 19706 - DNA, 20 bp, synthetic construct
  source 1..20: mol_type = other DNA
aagcgcaagggcctgaaaga

SEQ ID NO: 19707 - DNA, 20 bp, synthetic construct
  source 1..20: mol_type = other DNA
acgcttcactgatacccgga

SEQ ID NO: 19708 - DNA, 20 bp, synthetic construct
  source 1..20: mol_type = other DNA
cgtaccatgatgttgcccat

SEQ ID NO: 19709 - DNA, 20 bp, synthetic construct
  source 1..20: mol_type = other DNA
tctccgagagctcgtagaag

SEQ ID NO: 19710 - DNA, 20 bp, synthetic construct
  source 1..20: mol_type = other DNA
atcagctggcagaaggtgcg

SEQ ID NO: 19711 - DNA, 20 bp, synthetic construct
  source 1..20: mol_type = other DNA
cggcgtgcagggtgacgtcg

SEQ ID NO: 19712 - DNA, 20 bp, synthetic construct
  source 1..20: mol_type = other DNA
tctcctcacacagtgcgccc

SEQ ID NO: 19713 - DNA, 20 bp, synthetic construct
  source 1..20: mol_type = other DNA
ggagctgcagctggagcccg

SEQ ID NO: 19714 - DNA, 20 bp, synthetic construct
  source 1..20: mol_type = other DNA
tcctttggtgagtgcctgcc

SEQ ID NO: 19715 - DNA, 20 bp, synthetic construct
  source 1..20: mol_type = other DNA
cccaggcgtgtgcgtgcaga

SEQ ID NO: 19716 - DNA, 20 bp, synthetic construct
  source 1..20: mol_type = other DNA
acatcataagagggcctttg

SEQ ID NO: 19717 - DNA, 20 bp, synthetic construct
  source 1..20: mol_type = other DNA
acctcacctggatctccaca

SEQ ID NO: 19718 - DNA, 20 bp, synthetic construct
  source 1..20: mol_type = other DNA
tgttgtcagagtggccgtgg

SEQ ID NO: 19719 - DNA, 20 bp, synthetic construct
  source 1..20: mol_type = other DNA
gggcgatgacagacatgttg

SEQ ID NO: 19720 - DNA, 20 bp, synthetic construct
  source 1..20: mol_type = other DNA
cacagtgcgccctgggggag

SEQ ID NO: 19721 - DNA, 20 bp, synthetic construct
  source 1..20: mol_type = other DNA
agtcaccgatggcgcattgg

SEQ ID NO: 19722 - DNA, 20 bp, synthetic construct
  source 1..20: mol_type = other DNA
caaggtagatgggctccatg

SEQ ID NO: 19723 - DNA, 20 bp, synthetic construct
  source 1..20: mol_type = other DNA
gggagtcaatgaggttgatg

SEQ ID NO: 19724 - DNA, 20 bp, synthetic construct
  source 1..20: mol_type = other DNA
accggctgtacatgaaggcg

SEQ ID NO: 19725 - DNA, 20 bp, synthetic construct
  source 1..20: mol_type = other DNA
atagaggcagcgccgtgctg

SEQ ID NO: 19726 - DNA, 20 bp, synthetic construct
  source 1..20: mol_type = other DNA
cgcaggctgtgatgcgccgc

SEQ ID NO: 19727 - DNA, 20 bp, synthetic construct
  source 1..20: mol_type = other DNA
gaggagaagtcgacatgccc

SEQ ID NO: 19728 - DNA, 20 bp, synthetic construct
  source 1..20: mol_type = other DNA
cttgatgatgggccgctacg

SEQ ID NO: 19729 - DNA, 20 bp, synthetic construct
  source 1..20: mol_type = other DNA
tgatgcccgccttgcacacc

SEQ ID NO: 19730 - DNA, 20 bp, synthetic construct
  source 1..20: mol_type = other DNA
ctcacctctggattggcttc

SEQ ID NO: 19731 - DNA, 20 bp, synthetic construct
  source 1..20: mol_type = other DNA
accatggtggcggatggcgg

SEQ ID NO: 19732 - DNA, 20 bp, synthetic construct
  source 1..20: mol_type = other DNA
cgggcatgtcgacttctcct

SEQ ID NO: 19733 - DNA, 20 bp, synthetic construct
  source 1..20: mol_type = other DNA
gctgcagctccagcagggcg

SEQ ID NO: 19734 - DNA, 20 bp, synthetic construct
  source 1..20: mol_type = other DNA
ctgcaccatggggtcggact

SEQ ID NO: 19735 - DNA, 20 bp, synthetic construct
  source 1..20: mol_type = other DNA
gagcatatcatcgcgggcgc

SEQ ID NO: 19736 - DNA, 20 bp, synthetic construct
  source 1..20: mol_type = other DNA
ctccgggcaggatctgccag

SEQ ID NO: 19737 - DNA, 20 bp, synthetic construct
  source 1..20: mol_type = other DNA
cttggtggcccactggaagc

SEQ ID NO: 19738 - DNA, 20 bp, synthetic construct
  source 1..20: mol_type = other DNA
ggatgatctggccccctccg

SEQ ID NO: 19739 - DNA, 20 bp, synthetic construct
  source 1..20: mol_type = other DNA
ctcaccaaaggactcgttga

SEQ ID NO: 19740 - DNA, 20 bp, synthetic construct
  source 1..20: mol_type = other DNA
tcctcgatgatgcactgaaa

SEQ ID NO: 19741 - DNA, 20 bp, synthetic construct
  source 1..20: mol_type = other DNA
aagttcacctgggcaagaca

SEQ ID NO: 19742 - DNA, 20 bp, synthetic construct
  source 1..20: mol_type = other DNA
cacgccgacgccatccaccg

SEQ ID NO: 19743 - DNA, 20 bp, synthetic construct
  source 1..20: mol_type = other DNA
gagctcgtagaagagggaga

SEQ ID NO: 19744 - DNA, 20 bp, synthetic construct
  source 1..20: mol_type = other DNA
gtagaaccgacctttgtcgg

SEQ ID NO: 19745 - DNA, 20 bp, synthetic construct
  source 1..20: mol_type = other DNA
gccgacgccatccaccgcgg

SEQ ID NO: 19746 - DNA, 20 bp, synthetic construct
  source 1..20: mol_type = other DNA
gaacgcctggccgcccgtgt

SEQ ID NO: 19747 - DNA, 20 bp, synthetic construct
  source 1..20: mol_type = other DNA
aggcccacaatgttcccaca

SEQ ID NO: 19748 - DNA, 20 bp, synthetic construct
  source 1..20: mol_type = other DNA
cggcgcatcacagcctgcgg

SEQ ID NO: 19749 - DNA, 20 bp, synthetic construct
  source 1..20: mol_type = other DNA
ttcacctgggcaagacaagg

SEQ ID NO: 19750 - DNA, 20 bp, synthetic construct
  source 1..20: mol_type = other DNA
cccactcgtacttctcggcc

SEQ ID NO: 19751 - DNA, 20 bp, synthetic construct
  source 1..20: mol_type = other DNA
aacagcagcagcagcagcag

SEQ ID NO: 19752 - DNA, 20 bp, synthetic construct
  source 1..20: mol_type = other DNA
ggcaagcgtaagggcgttcg

SEQ ID NO: 19753 - DNA, 20 bp, synthetic construct
  source 1..20: mol_type = other DNA
catgcagatgcggcactgga

SEQ ID NO: 19754 - DNA, 20 bp, synthetic construct
  source 1..20: mol_type = other DNA
atgggtatgaggtggtggcc

SEQ ID NO: 19755 - DNA, 20 bp, synthetic construct
  source 1..20: mol_type = other DNA
gggtgcggctctccaggccc

SEQ ID NO: 19756 - DNA, 20 bp, synthetic construct
  source 1..20: mol_type = other DNA
gcctgtgtgggtgcggatgt

SEQ ID NO: 19757 - DNA, 20 bp, synthetic construct
  source 1..20: mol_type = other DNA
tgtgtgggtgcggatgtggg

SEQ ID NO: 19758 - DNA, 20 bp, synthetic construct
  source 1..20: mol_type = other DNA
gagatgtcaggaaaagactc

SEQ ID NO: 19759 - DNA, 20 bp, synthetic construct
  source 1..20: mol_type = other DNA
agcagcagcagcagcggggg

SEQ ID NO: 19760 - DNA, 20 bp, synthetic construct
  source 1..20: mol_type = other DNA
acgcccttacgcttgcccag

SEQ ID NO: 19761 - DNA, 20 bp, synthetic construct
  source 1..20: mol_type = other DNA
tgcggatgtgggtggtgagg

SEQ ID NO: 19762 - DNA, 20 bp, synthetic construct
  source 1..20: mol_type = other DNA
cgccacatccgcatccacac

SEQ ID NO: 19763 - DNA, 20 bp, synthetic construct
  source 1..20: mol_type = other DNA
atgcagatgcggcactggaa

SEQ ID NO: 19764 - DNA, 20 bp, synthetic construct
  source 1..20: mol_type = other DNA
agcagcagcagcagcagcgg

SEQ ID NO: 19765 - DNA, 20 bp, synthetic construct
  source 1..20: mol_type = other DNA
gggtgcggatgtgggtggtg

SEQ ID NO: 19766 - DNA, 20 bp, synthetic construct
  source 1..20: mol_type = other DNA
tccacagatgtcgcaggcga

SEQ ID NO: 19767 - DNA, 20 bp, synthetic construct
  source 1..20: mol_type = other DNA
tggatggcactgcgcagctc

SEQ ID NO: 19768 - DNA, 20 bp, synthetic construct
  source 1..20: mol_type = other DNA
acccacatccgcacccacac

SEQ ID NO: 19769 - DNA, 20 bp, synthetic construct
  source 1..20: mol_type = other DNA
cagcagcagcagcagcagcg

SEQ ID NO: 19770 - DNA, 20 bp, synthetic construct
  source 1..20: mol_type = other DNA
gggacccgccagagcgcagg

SEQ ID NO: 19771 - DNA, 20 bp, synthetic construct
  source 1..20: mol_type = other DNA
ctttgaccagatgaacggag

SEQ ID NO: 19772 - DNA, 20 bp, synthetic construct
  source 1..20: mol_type = other DNA
ggtgtgggtgcggatatggg

SEQ ID NO: 19773 - DNA, 20 bp, synthetic construct
  source 1..20: mol_type = other DNA
tccacctgagacagaaagag

SEQ ID NO: 19774 - DNA, 20 bp, synthetic construct
  source 1..20: mol_type = other DNA
ccgtgtcagctcgtcagagc

SEQ ID NO: 19775 - DNA, 20 bp, synthetic construct
  source 1..20: mol_type = other DNA
tgcgcatgcagatccgacac

SEQ ID NO: 19776 - DNA, 20 bp, synthetic construct
  source 1..20: mol_type = other DNA
aaccagaccttcacttacat

SEQ ID NO: 19777 - DNA, 20 bp, synthetic construct
  source 1..20: mol_type = other DNA
tgcggatatgggtggtgagg

SEQ ID NO: 19778 - DNA, 20 bp, synthetic construct
  source 1..20: mol_type = other DNA
gccgtgtcagctcgtcagag

SEQ ID NO: 19779 - DNA, 20 bp, synthetic construct
  source 1..20: mol_type = other DNA
cgtcagagcgggagaaccgc

SEQ ID NO: 19780 - DNA, 20 bp, synthetic construct
  source 1..20: mol_type = other DNA
ggcccctttgaccagatgaa

SEQ ID NO: 19781 - DNA, 20 bp, synthetic construct
  source 1..20: mol_type = other DNA
cccttcgcctgtgactactg

SEQ ID NO: 19782 - DNA, 20 bp, synthetic construct
  source 1..20: mol_type = other DNA
ccctctacagcctcctgctc

SEQ ID NO: 19783 - DNA, 20 bp, synthetic construct
  source 1..20: mol_type = other DNA
tttcccaatgccgaactggg

SEQ ID NO: 19784 - DNA, 20 bp, synthetic construct
  source 1..20: mol_type = other DNA
ggcacatccgaatccacact

SEQ ID NO: 19785 - DNA, 20 bp, synthetic construct
  source 1..20: mol_type = other DNA
atgcagatccgacactggaa

SEQ ID NO: 19786 - DNA, 20 bp, synthetic construct
  source 1..20: mol_type = other DNA
caatccgtaactttaccctg

SEQ ID NO: 19787 - DNA, 20 bp, synthetic construct
  source 1..20: mol_type = other DNA
gccgcagtggcaggtggtgt

SEQ ID NO: 19788 - DNA, 20 bp, synthetic construct
  source 1..20: mol_type = other DNA
tgacaacatctacccggtgg

SEQ ID NO: 19789 - DNA, 20 bp, synthetic construct
  source 1..20: mol_type = other DNA
caggtggtgtgggttatagg

SEQ ID NO: 19790 - DNA, 20 bp, synthetic construct
  source 1..20: mol_type = other DNA
gtcccagacccagcctgacc

SEQ ID NO: 19791 - DNA, 20 bp, synthetic construct
  source 1..20: mol_type = other DNA
ggggccagtggaggcagcga

SEQ ID NO: 19792 - DNA, 20 bp, synthetic construct
  source 1..20: mol_type = other DNA
tctcctgcacagccagaata

SEQ ID NO: 19793 - DNA, 20 bp, synthetic construct
  source 1..20: mol_type = other DNA
cactccgttcatctggtcaa

SEQ ID NO: 19794 - DNA, 20 bp, synthetic construct
  source 1..20: mol_type = other DNA
taagtgaaggtctggtttct

SEQ ID NO: 19795 - DNA, 20 bp, synthetic construct
  source 1..20: mol_type = other DNA
catgcagatccgacactgga

SEQ ID NO: 19796 - DNA, 20 bp, synthetic construct
  source 1..20: mol_type = other DNA
cagtgccagagagacctaca

SEQ ID NO: 19797 - DNA, 20 bp, synthetic construct
  source 1..20: mol_type = other DNA
catcactccgggcaaacttt

SEQ ID NO: 19798 - DNA, 20 bp, synthetic construct
  source 1..20: mol_type = other DNA
cgaagggcttctcaccggtg

SEQ ID NO: 19799 - DNA, 20 bp, synthetic construct
  source 1..20: mol_type = other DNA
tccgctctttctgtctcagg

SEQ ID NO: 19800 - DNA, 20 bp, synthetic construct
  source 1..20: mol_type = other DNA
taaggaggaggaggcggtgg

SEQ ID NO: 19801 - DNA, 20 bp, synthetic construct
  source 1..20: mol_type = other DNA
acaggcgaagggcttctcac

SEQ ID NO: 19802 - DNA, 20 bp, synthetic construct
  source 1..20: mol_type = other DNA
cgcagccttctgctgggcac

SEQ ID NO: 19803 - DNA, 20 bp, synthetic construct
  source 1..20: mol_type = other DNA
gccggtcgcagccttctgct

SEQ ID NO: 19804 - DNA, 20 bp, synthetic construct
  source 1..20: mol_type = other DNA
gggtgcggatatgggtggtg

SEQ ID NO: 19805 - DNA, 20 bp, synthetic construct
  source 1..20: mol_type = other DNA
ggaagggcttatgcccagtg

SEQ ID NO: 19806 - DNA, 20 bp, synthetic construct
  source 1..20: mol_type = other DNA
accggtgtgggtgcggatat

SEQ ID NO: 19807 - DNA, 20 bp, synthetic construct
  source 1..20: mol_type = other DNA
tccatcccccaagccagcca

SEQ ID NO: 19808 - DNA, 20 bp, synthetic construct
  source 1..20: mol_type = other DNA
cctgcacagccagaataagg

SEQ ID NO: 19809 - DNA, 20 bp, synthetic construct
  source 1..20: mol_type = other DNA
cggcacatccgaatccacac

SEQ ID NO: 19810 - DNA, 20 bp, synthetic construct
  source 1..20: mol_type = other DNA
ctttcggccacagtagtcac

SEQ ID NO: 19811 - DNA, 20 bp, synthetic construct
  source 1..20: mol_type = other DNA
cagatgaacggagtggccgg

SEQ ID NO: 19812 - DNA, 20 bp, synthetic construct
  source 1..20: mol_type = other DNA
ggcataagcccttccagtgt

SEQ ID NO: 19813 - DNA, 20 bp, synthetic construct
  source 1..20: mol_type = other DNA
gccacagtagtcacaggcga

SEQ ID NO: 19814 - DNA, 20 bp, synthetic construct
  source 1..20: mol_type = other DNA
tacaatccgtaactttaccc

SEQ ID NO: 19815 - DNA, 20 bp, synthetic construct
  source 1..20: mol_type = other DNA
tcgcagccttctgctgggca

SEQ ID NO: 19816 - DNA, 20 bp, synthetic construct
  source 1..20: mol_type = other DNA
agtttgcccggagtgatgag

SEQ ID NO: 19817 - DNA, 20 bp, synthetic construct
  source 1..20: mol_type = other DNA
acccatatccgcacccacac

SEQ ID NO: 19818 - DNA, 20 bp, synthetic construct
  source 1..20: mol_type = other DNA
gcccgaggaggctggggccg

SEQ ID NO: 19819 - DNA, 20 bp, synthetic construct
  source 1..20: mol_type = other DNA
atgcccgaggaggctggggc

SEQ ID NO: 19820 - DNA, 20 bp, synthetic construct
  source 1..20: mol_type = other DNA
catgcagatccggcactgga

SEQ ID NO: 19821 - DNA, 20 bp, synthetic construct
  source 1..20: mol_type = other DNA
tccgcatgcagatccggcac

SEQ ID NO: 19822 - DNA, 20 bp, synthetic construct
  source 1..20: mol_type = other DNA
tgcggatgtgagtggtgagg

SEQ ID NO: 19823 - DNA, 20 bp, synthetic construct
  source 1..20: mol_type = other DNA
atgcagatccggcactggaa

SEQ ID NO: 19824 - DNA, 20 bp, synthetic construct
  source 1..20: mol_type = other DNA
cgtccgaacggctgaaacgg

SEQ ID NO: 19825 - DNA, 20 bp, synthetic construct
  source 1..20: mol_type = other DNA
agccctcggccgggcacgcg

SEQ ID NO: 19826 - DNA, 20 bp, synthetic construct
  source 1..20: mol_type = other DNA
agaactggtctgacacgctg

SEQ ID NO: 19827 - DNA, 20 bp, synthetic construct
  source 1..20: mol_type = other DNA
aagctgcaagacatgttgga

SEQ ID NO: 19828 - DNA, 20 bp, synthetic construct
  source 1..20: mol_type = other DNA
ctcaccattgtatgtggagg

SEQ ID NO: 19829 - DNA, 20 bp, synthetic construct
  source 1..20: mol_type = other DNA
cacactccaaaccatgaaga

SEQ ID NO: 19830 - DNA, 20 bp, synthetic construct
  source 1..20: mol_type = other DNA
tacatctccttcaagatatg

SEQ ID NO: 19831 - DNA, 20 bp, synthetic construct
  source 1..20: mol_type = other DNA
tattaccttggcaatcagac

SEQ ID NO: 19832 - DNA, 20 bp, synthetic construct
  source 1..20: mol_type = other DNA
gcccaacggtaccttcttca

SEQ ID NO: 19833 - DNA, 20 bp, synthetic construct
  source 1..20: mol_type = other DNA
attaccttggcaatcagacg

SEQ ID NO: 19834 - DNA, 20 bp, synthetic construct
  source 1..20: mol_type = other DNA
aagaagaggtcatcatcagc

SEQ ID NO: 19835 - DNA, 20 bp, synthetic construct
  source 1..20: mol_type = other DNA
agttagaacaagagggccca

SEQ ID NO: 19836 - DNA, 20 bp, synthetic construct
  source 1..20: mol_type = other DNA
tacgagtaagcaaagtgctc

SEQ ID NO: 19837 - DNA, 20 bp, synthetic construct
  source 1..20: mol_type = other DNA
tccaacgtgtaagtaaagct

SEQ ID NO: 19838 - DNA, 20 bp, synthetic construct
  source 1..20: mol_type = other DNA
cattgtcaatggatctcatg

SEQ ID NO: 19839 - DNA, 20 bp, synthetic construct
  source 1..20: mol_type = other DNA
cagacattttggcttattag

SEQ ID NO: 19840 - DNA, 20 bp, synthetic construct
  source 1..20: mol_type = other DNA
accatgaagaaggtaccgtt

SEQ ID NO: 19841 - DNA, 20 bp, synthetic construct
  source 1..20: mol_type = other DNA
gatgccccgtctgattgcca

SEQ ID NO: 19842 - DNA, 20 bp, synthetic construct
  source 1..20: mol_type = other DNA
aaccatgaagaaggtaccgt

SEQ ID NO: 19843 - DNA, 20 bp, synthetic construct
  source 1..20: mol_type = other DNA
ttaacaggtggtgtattcga

SEQ ID NO: 19844 - DNA, 20 bp, synthetic construct
  source 1..20: mol_type = other DNA
tttgcagaaaaagaaagaag

SEQ ID NO: 19845 - DNA, 20 bp, synthetic construct
  source 1..20: mol_type = other DNA
gagatccattgacaatgtaa

SEQ ID NO: 19846 - DNA, 20 bp, synthetic construct
  source 1..20: mol_type = other DNA
ttaccttaacaaaatcaaag

SEQ ID NO: 19847 - DNA, 20 bp, synthetic construct
  source 1..20: mol_type = other DNA
ttgcagaaaaagaaagaaga

SEQ ID NO: 19848 - DNA, 20 bp, synthetic construct
  source 1..20: mol_type = other DNA
gcagaggaagaatcttctgg

SEQ ID NO: 19849 - DNA, 20 bp, synthetic construct
  source 1..20: mol_type = other DNA
gcatcttgtagcgatagaac

SEQ ID NO: 19850 - DNA, 20 bp, synthetic construct
  source 1..20: mol_type = other DNA
ggaaaaggtggggaatacat

SEQ ID NO: 19851 - DNA, 20 bp, synthetic construct
  source 1..20: mol_type = other DNA
gcactcaccattgtatgtgg

SEQ ID NO: 19852 - DNA, 20 bp, synthetic construct
  source 1..20: mol_type = other DNA
ggaagctcaaaggcgtcgaa

SEQ ID NO: 19853 - DNA, 20 bp, synthetic construct
  source 1..20: mol_type = other DNA
tctgtagagaatagtgacag

SEQ ID NO: 19854 - DNA, 20 bp, synthetic construct
  source 1..20: mol_type = other DNA
aagctttacttacacgttgg

SEQ ID NO: 19855 - DNA, 20 bp, synthetic construct
  source 1..20: mol_type = other DNA
caagacagttatagtcaaca

SEQ ID NO: 19856 - DNA, 20 bp, synthetic construct
  source 1..20: mol_type = other DNA
cttgtcctaaatacatcaag

SEQ ID NO: 19857 - DNA, 20 bp, synthetic construct
  source 1..20: mol_type = other DNA
cttttgccagaatacccctt

SEQ ID NO: 19858 - DNA, 20 bp, synthetic construct
  source 1..20: mol_type = other DNA
aataggtactattaccaaag

SEQ ID NO: 19859 - DNA, 20 bp, synthetic construct
  source 1..20: mol_type = other DNA
agaaaaatatgcagactcac

SEQ ID NO: 19860 - DNA, 20 bp, synthetic construct
  source 1..20: mol_type = other DNA
aagcagtgtccaggttgtgg

SEQ ID NO: 19861 - DNA, 20 bp, synthetic construct
  source 1..20: mol_type = other DNA
gatatgaattatgagaccat

SEQ ID NO: 19862 - DNA, 20 bp, synthetic construct
  source 1..20: mol_type = other DNA
tttatatatataagatcttt

SEQ ID NO: 19863 - DNA, 20 bp, synthetic construct
  source 1..20: mol_type = other DNA
tcttatatatataaatgatg

SEQ ID NO: 19864 - DNA, 20 bp, synthetic construct
  source 1..20: mol_type = other DNA
ccagtacaggctgtcccaga

SEQ ID NO: 19865 - DNA, 20 bp, synthetic construct
  source 1..20: mol_type = other DNA
atacctgagtgctcttccca

SEQ ID NO: 19866 - DNA, 20 bp, synthetic construct
  source 1..20: mol_type = other DNA
agaccatgggaagagcactc

SEQ ID NO: 19867 - DNA, 20 bp, synthetic construct
  source 1..20: mol_type = other DNA
aaggggtattctggcaaaag

SEQ ID NO: 19868 - DNA, 20 bp, synthetic construct
  source 1..20: mol_type = other DNA
ctaaagcagtgtccaggttg

SEQ ID NO: 19869 - DNA, 20 bp, synthetic construct
  source 1..20: mol_type = other DNA
tttgtgcttcccccacaacc

SEQ ID NO: 19870 - DNA, 20 bp, synthetic construct
  source 1..20: mol_type = other DNA
tactagcaaattcaaatact

SEQ ID NO: 19871 - DNA, 20 bp, synthetic construct
  source 1..20: mol_type = other DNA
ttctcacctaatactctgaa

SEQ ID NO: 19872 - DNA, 20 bp, synthetic construct
  source 1..20: mol_type = other DNA
tgaagcttcttgtcatgacg

SEQ ID NO: 19873 - DNA, 20 bp, synthetic construct
  source 1..20: mol_type = other DNA
tgaataggtactattaccaa

SEQ ID NO: 19874 - DNA, 20 bp, synthetic construct
  source 1..20: mol_type = other DNA
aagtggacccagcgagagaa

SEQ ID NO: 19875 - DNA, 20 bp, synthetic construct
  source 1..20: mol_type = other DNA
tgatatgaattatgagacca

SEQ ID NO: 19876 - DNA, 20 bp, synthetic construct
  source 1..20: mol_type = other DNA
caaataggaatcaaaccagc

SEQ ID NO: 19877 - DNA, 20 bp, synthetic construct
  source 1..20: mol_type = other DNA
catatcctacccagctcttc

SEQ ID NO: 19878 - DNA, 20 bp, synthetic construct
  source 1..20: mol_type = other DNA
tcatgtagtacagccagtac

SEQ ID NO: 19879 - DNA, 20 bp, synthetic construct
  source 1..20: mol_type = other DNA
ctattaccaaaggggtattc

SEQ ID NO: 19880 - DNA, 20 bp, synthetic construct
  source 1..20: mol_type = other DNA
tggattctaaagcagtgtcc

SEQ ID NO: 19881 - DNA, 20 bp, synthetic construct
  source 1..20: mol_type = other DNA
aaaaatgcctttctctcgct

SEQ ID NO: 19882 - DNA, 20 bp, synthetic construct
  source 1..20: mol_type = other DNA
gaataggtactattaccaaa

SEQ ID NO: 19883 - DNA, 20 bp, synthetic construct
  source 1..20: mol_type = other DNA
cagatgcagtaaatcagggt

SEQ ID NO: 19884 - DNA, 20 bp, synthetic construct
  source 1..20: mol_type = other DNA
gtgacgggggcccccatgga

SEQ ID NO: 19885 - DNA, 20 bp, synthetic construct
  source 1..20: mol_type = other DNA
ggccgtggaggcctgaggtg

SEQ ID NO: 19886 - DNA, 20 bp, synthetic construct
  source 1..20: mol_type = other DNA
ggggagaaaggggctggggt

SEQ ID NO: 19887 - DNA, 20 bp, synthetic construct
  source 1..20: mol_type = other DNA
agtagtatctagaggaagag

SEQ ID NO: 19888 - DNA, 20 bp, synthetic construct
  source 1..20: mol_type = other DNA
ccacagcttggacacagctt

SEQ ID NO: 19889 - DNA, 20 bp, synthetic construct
  source 1..20: mol_type = other DNA
cctgtcccaagtacatcaag

SEQ ID NO: 19890 - DNA, 20 bp, synthetic construct
  source 1..20: mol_type = other DNA
cccctggaaaccacctgggt

SEQ ID NO: 19891 - DNA, 20 bp, synthetic construct
  source 1..20: mol_type = other DNA
tctggatgagaccctggagc

SEQ ID NO: 19892 - DNA, 20 bp, synthetic construct
  source 1..20: mol_type = other DNA
ccaacagtggggcggctggg

SEQ ID NO: 19893 - DNA, 20 bp, synthetic construct
  source 1..20: mol_type = other DNA
ggcccccgtggggtcgggct

SEQ ID NO: 19894 - DNA, 20 bp, synthetic construct
  source 1..20: mol_type = other DNA
ttgaatggggagaaaggggc

SEQ ID NO: 19895 - DNA, 20 bp, synthetic construct
  source 1..20: mol_type = other DNA
ccagtttaaggagatgccca

SEQ ID NO: 19896 - DNA, 20 bp, synthetic construct
  source 1..20: mol_type = other DNA
tctagatactactaccaaag

SEQ ID NO: 19897 - DNA, 20 bp, synthetic construct
  source 1..20: mol_type = other DNA
ggggctccactgattctcag

SEQ ID NO: 19898 - DNA, 20 bp, synthetic construct
  source 1..20: mol_type = other DNA
gaagatgcctttctctcgct

SEQ ID NO: 19899 - DNA, 20 bp, synthetic construct
  source 1..20: mol_type = other DNA
agtcccagggggctgagagc

SEQ ID NO: 19900 - DNA, 20 bp, synthetic construct
  source 1..20: mol_type = other DNA
gtcttggcaccaggctgagg

SEQ ID NO: 19901 - DNA, 20 bp, synthetic construct
  source 1..20: mol_type = other DNA
ctgaagaaggaactgccaca

SEQ ID NO: 19902 - DNA, 20 bp, synthetic construct
  source 1..20: mol_type = other DNA
gcttgttctgaggcttctgc

SEQ ID NO: 19903 - DNA, 20 bp, synthetic construct
  source 1..20: mol_type = other DNA
tatggacgaaatgggtggtg

SEQ ID NO: 19904 - DNA, 20 bp, synthetic construct
  source 1..20: mol_type = other DNA
aacatggatccaatgacagt

SEQ ID NO: 19905 - DNA, 20 bp, synthetic construct
  source 1..20: mol_type = other DNA
ttggatgatggcaagacact

SEQ ID NO: 19906 - DNA, 20 bp, synthetic construct
  source 1..20: mol_type = other DNA
cttcagttcgaacaccgtgc

SEQ ID NO: 19907 - DNA, 20 bp, synthetic construct
  source 1..20: mol_type = other DNA
gctgtacaaggtgggtcccg

SEQ ID NO: 19908 - DNA, 20 bp, synthetic construct
  source 1..20: mol_type = other DNA
atcatgaggaacacgtcctg

SEQ ID NO: 19909 - DNA, 20 bp, synthetic construct
  source 1..20: mol_type = other DNA
ccgtgaagatggtggtcttg

SEQ ID NO: 19910 - DNA, 20 bp, synthetic construct
  source 1..20: mol_type = other DNA
gatcatgaggaacacgtcct

SEQ ID NO: 19911 - DNA, 20 bp, synthetic construct
  source 1..20: mol_type = other DNA
atcacatcgggcagctctgg

SEQ ID NO: 19912 - DNA, 20 bp, synthetic construct
  source 1..20: mol_type = other DNA
tccaagagttggtcatcctg

SEQ ID NO: 19913 - DNA, 20 bp, synthetic construct
  source 1..20: mol_type = other DNA
ggacgccaaggagtccagca

SEQ ID NO: 19914 - DNA, 20 bp, synthetic construct
  source 1..20: mol_type = other DNA
gagcagcggctgtacaaggt

SEQ ID NO: 19915 - DNA, 20 bp, synthetic construct
  source 1..20: mol_type = other DNA
cgcgatggtgagcgggcgtg

SEQ ID NO: 19916 - DNA, 20 bp, synthetic construct
  source 1..20: mol_type = other DNA
gatgaccaactcttggatga

SEQ ID NO: 19917 - DNA, 20 bp, synthetic construct
  source 1..20: mol_type = other DNA
tcttgccatcatccaagagt

SEQ ID NO: 19918 - DNA, 20 bp, synthetic construct
  source 1..20: mol_type = other DNA
aaggccagccccactgtggc

SEQ ID NO: 19919 - DNA, 20 bp, synthetic construct
  source 1..20: mol_type = other DNA
gtgcagtgaggacccccaag

SEQ ID NO: 19920 - DNA, 20 bp, synthetic construct
  source 1..20: mol_type = other DNA
cgaactgaagcgcatcgtcg

SEQ ID NO: 19921 - DNA, 20 bp, synthetic construct
  source 1..20: mol_type = other DNA
ttgtacagccgctgctcgtc

SEQ ID NO: 19922 - DNA, 20 bp, synthetic construct
  source 1..20: mol_type = other DNA
tacagccgctgctcgtcagg

SEQ ID NO: 19923 - DNA, 20 bp, synthetic construct
  source 1..20: mol_type = other DNA
ggccagccccactgtggctg

SEQ ID NO: 19924 - DNA, 20 bp, synthetic construct
  source 1..20: mol_type = other DNA
gaacaccgtgctggactcct

SEQ ID NO: 19925 - DNA, 20 bp, synthetic construct
  source 1..20: mol_type = other DNA
gcgatggtgagcgggcgtgg

SEQ ID NO: 19926 - DNA, 20 bp, synthetic construct
  source 1..20: mol_type = other DNA
gccgcgatggtgagcgggcg

SEQ ID NO: 19927 - DNA, 20 bp, synthetic construct
  source 1..20: mol_type = other DNA
tgacgagcagcggctgtaca

SEQ ID NO: 19928 - DNA, 20 bp, synthetic construct
  source 1..20: mol_type = other DNA
gccacaggccccagccacag

SEQ ID NO: 19929 - DNA, 20 bp, synthetic construct
  source 1..20: mol_type = other DNA
aggccagccccactgtggct

SEQ ID NO: 19930 - DNA, 20 bp, synthetic construct
  source 1..20: mol_type = other DNA
cttggcgtccgtgaagatgg

SEQ ID NO: 19931 - DNA, 20 bp, synthetic construct
  source 1..20: mol_type = other DNA
gcttcaccagtcaaacagca

SEQ ID NO: 19932 - DNA, 20 bp, synthetic construct
  source 1..20: mol_type = other DNA
caccatcttcacggacgcca

SEQ ID NO: 19933 - DNA, 20 bp, synthetic construct
  source 1..20: mol_type = other DNA
gctcgtcaggaggccgcttg

SEQ ID NO: 19934 - DNA, 20 bp, synthetic construct
  source 1..20: mol_type = other DNA
gaactgaagcgcatcgtcga

SEQ ID NO: 19935 - DNA, 20 bp, synthetic construct
  source 1..20: mol_type = other DNA
tacaaggtgggtcccgcggg

SEQ ID NO: 19936 - DNA, 20 bp, synthetic construct
  source 1..20: mol_type = other DNA
ccgcgatggtgagcgggcgt

SEQ ID NO: 19937 - DNA, 20 bp, synthetic construct
  source 1..20: mol_type = other DNA
gaacacgtcctgggggcggc

SEQ ID NO: 19938 - DNA, 20 bp, synthetic construct
  source 1..20: mol_type = other DNA
acaaggtgggtcccgcgggc

SEQ ID NO: 19939 - DNA, 20 bp, synthetic construct
  source 1..20: mol_type = other DNA
tcctcaggatgaccaactct

SEQ ID NO: 19940 - DNA, 20 bp, synthetic construct
  source 1..20: mol_type = other DNA
cagtcaaacagcacggccac

SEQ ID NO: 19941 - DNA, 20 bp, synthetic construct
  source 1..20: mol_type = other DNA
gggcctctcacctgcccgga

SEQ ID NO: 19942 - DNA, 20 bp, synthetic construct
  source 1..20: mol_type = other DNA
ggaacacgtcctgggggcgg

SEQ ID NO: 19943 - DNA, 20 bp, synthetic construct
  source 1..20: mol_type = other DNA
ctcaaaggtgtcatctgtgg

SEQ ID NO: 19944 - DNA, 20 bp, synthetic construct
  source 1..20: mol_type = other DNA
ggatcatgaggaacacgtcc

SEQ ID NO: 19945 - DNA, 20 bp, synthetic construct
  source 1..20: mol_type = other DNA
agatggtggtcttgtggcgc

SEQ ID NO: 19946 - DNA, 20 bp, synthetic construct
  source 1..20: mol_type = other DNA
cagcagccgcgatggtgagc

SEQ ID NO: 19947 - DNA, 20 bp, synthetic construct
  source 1..20: mol_type = other DNA
agcggcctcctgacgagcag

SEQ ID NO: 19948 - DNA, 20 bp, synthetic construct
  source 1..20: mol_type = other DNA
cgagcagcggctgtacaagg

SEQ ID NO: 19949 - DNA, 20 bp, synthetic construct
  source 1..20: mol_type = other DNA
cttggatgatggcaagacac

SEQ ID NO: 19950 - DNA, 20 bp, synthetic construct
  source 1..20: mol_type = other DNA
ccacaggccccagccacagt

SEQ ID NO: 19951 - DNA, 20 bp, synthetic construct
  source 1..20: mol_type = other DNA
tggaaaacggctcgatgcac

SEQ ID NO: 19952 - DNA, 20 bp, synthetic construct
  source 1..20: mol_type = other DNA
tcatgaggaacacgtcctgg

SEQ ID NO: 19953 - DNA, 20 bp, synthetic construct
  source 1..20: mol_type = other DNA
ctgtacaaggtgggtcccgc

SEQ ID NO: 19954 - DNA, 20 bp, synthetic construct
  source 1..20: mol_type = other DNA
ggcaagacactgggcgagtg

SEQ ID NO: 19955 - DNA, 20 bp, synthetic construct
  source 1..20: mol_type = other DNA
ctccacagatgacacctttg

SEQ ID NO: 19956 - DNA, 20 bp, synthetic construct
  source 1..20: mol_type = other DNA
cacaggccccagccacagtg

SEQ ID NO: 19957 - DNA, 20 bp, synthetic construct
  source 1..20: mol_type = other DNA
ggcctcaaaggtgtcatctg

SEQ ID NO: 19958 - DNA, 20 bp, synthetic construct
  source 1..20: mol_type = other DNA
tgaggaacacgtcctggggg

SEQ ID NO: 19959 - DNA, 20 bp, synthetic construct
  source 1..20: mol_type = other DNA
gtcatcctgaggagagaagc

SEQ ID NO: 19960 - DNA, 20 bp, synthetic construct
  source 1..20: mol_type = other DNA
ccggaaggccagccccactg

SEQ ID NO: 19961 - DNA, 20 bp, synthetic construct
  source 1..20: mol_type = other DNA
agagtccaccaggactggga

SEQ ID NO: 19962 - DNA, 20 bp, synthetic construct
  source 1..20: mol_type = other DNA
gggctgagaccaccagcaag

SEQ ID NO: 19963 - DNA, 20 bp, synthetic construct
  source 1..20: mol_type = other DNA
gtataagaatgaggatgtga

SEQ ID NO: 19964 - DNA, 20 bp, synthetic construct
  source 1..20: mol_type = other DNA
ggaaagagtccctgaatctc

SEQ ID NO: 19965 - DNA, 20 bp, synthetic construct
  source 1..20: mol_type = other DNA
gcaggcgtggcggtgtttac

SEQ ID NO: 19966 - DNA, 20 bp, synthetic construct
  source 1..20: mol_type = other DNA
tgcagtaatgtcagcgagaa

SEQ ID NO: 19967 - DNA, 20 bp, synthetic construct
  source 1..20: mol_type = other DNA
aaccatgaggaagacatagg

SEQ ID NO: 19968 - DNA, 20 bp, synthetic construct
  source 1..20: mol_type = other DNA
ggtggagtgggagagaggtg

SEQ ID NO: 19969 - DNA, 20 bp, synthetic construct
  source 1..20: mol_type = other DNA
ctttcatcctggatataaga

SEQ ID NO: 19970 - DNA, 20 bp, synthetic construct
  source 1..20: mol_type = other DNA
ataggactctgtgatgaagc

SEQ ID NO: 19971 - DNA, 20 bp, synthetic construct
  source 1..20: mol_type = other DNA
ccagatgaggtaaggaagga

SEQ ID NO: 19972 - DNA, 20 bp, synthetic construct
  source 1..20: mol_type = other DNA
aatttcaggtggccaggaga

SEQ ID NO: 19973 - DNA, 20 bp, synthetic construct
  source 1..20: mol_type = other DNA
ttgctgcttggagttaatag

SEQ ID NO: 19974 - DNA, 20 bp, synthetic construct
  source 1..20: mol_type = other DNA
tgacccagatgaggtaagga

SEQ ID NO: 19975 - DNA, 20 bp, synthetic construct
  source 1..20: mol_type = other DNA
ctccattcatacagaacttc

SEQ ID NO: 19976 - DNA, 20 bp, synthetic construct
  source 1..20: mol_type = other DNA
catggcgtgcagctcctcag

SEQ ID NO: 19977 - DNA, 20 bp, synthetic construct
  source 1..20: mol_type = other DNA
cttactaatgaagtaatccg

SEQ ID NO: 19978 - DNA, 20 bp, synthetic construct
  source 1..20: mol_type = other DNA
cactaaagaacagcaacgac

SEQ ID NO: 19979 - DNA, 20 bp, synthetic construct
  source 1..20: mol_type = other DNA
tgctgcttggagttaatagt

SEQ ID NO: 19980 - DNA, 20 bp, synthetic construct
  source 1..20: mol_type = other DNA
ggctgctccaggactgggtg

SEQ ID NO: 19981 - DNA, 20 bp, synthetic construct
  source 1..20: mol_type = other DNA
catgggtttctgtccactgc

SEQ ID NO: 19982 - DNA, 20 bp, synthetic construct
  source 1..20: mol_type = other DNA
cgtaatagtagcgtaggcca

SEQ ID NO: 19983 - DNA, 20 bp, synthetic construct
  source 1..20: mol_type = other DNA
gctcttccgagctgatggga

SEQ ID NO: 19984 - DNA, 20 bp, synthetic construct
  source 1..20: mol_type = other DNA
ctgtaatgaacagataggga

SEQ ID NO: 19985 - DNA, 20 bp, synthetic construct
  source 1..20: mol_type = other DNA
atcctctgtaatgaacagat

SEQ ID NO: 19986 - DNA, 20 bp, synthetic construct
  source 1..20: mol_type = other DNA
tcctctgtaatgaacagata

SEQ ID NO: 19987 - DNA, 20 bp, synthetic construct
  source 1..20: mol_type = other DNA
ttttgtcgtaatagtagcgt

SEQ ID NO: 19988 - DNA, 20 bp, synthetic construct
  source 1..20: mol_type = other DNA
gagaaagcagtctttaccca

SEQ ID NO: 19989 - DNA, 20 bp, synthetic construct
  source 1..20: mol_type = other DNA
ccccagacaacatgtgcatg

SEQ ID NO: 19990 - DNA, 20 bp, synthetic construct
  source 1..20: mol_type = other DNA
atttcaggtggccaggagat

SEQ ID NO: 19991 - DNA, 20 bp, synthetic construct
  source 1..20: mol_type = other DNA
gggtttctgtccactgccgg

SEQ ID NO: 19992 - DNA, 20 bp, synthetic construct
  source 1..20: mol_type = other DNA
ggctctgagaactccgatgg

SEQ ID NO: 19993 - DNA, 20 bp, synthetic construct
  source 1..20: mol_type = other DNA
agtttacctggaggtaaagg

SEQ ID NO: 19994 - DNA, 20 bp, synthetic construct
  source 1..20: mol_type = other DNA
ccttgggcttgtggttgggc

SEQ ID NO: 19995 - DNA, 20 bp, synthetic construct
  source 1..20: mol_type = other DNA
agtttctcataattcatctt

SEQ ID NO: 19996 - DNA, 20 bp, synthetic construct
  source 1..20: mol_type = other DNA
agggcagcagcaggaatgac

SEQ ID NO: 19997 - DNA, 20 bp, synthetic construct
  source 1..20: mol_type = other DNA
agaaactgccatagctggat

SEQ ID NO: 19998 - DNA, 20 bp, synthetic construct
  source 1..20: mol_type = other DNA
gacgctccatcccatcagct

SEQ ID NO: 19999 - DNA, 20 bp, synthetic construct
  source 1..20: mol_type = other DNA
cctacctgtgtagccagcta

SEQ ID NO: 20000 - DNA, 20 bp, synthetic construct
  source 1..20: mol_type = other DNA
caacgactggggatcccaaa

SEQ ID NO: 20001 - DNA, 20 bp, synthetic construct
  source 1..20: mol_type = other DNA
tccccatgcacatgttgtct

SEQ ID NO: 20002 - DNA, 20 bp, synthetic construct
  source 1..20: mol_type = other DNA
cagctggacaggagatggct

SEQ ID NO: 20003 - DNA, 20 bp, synthetic construct
  source 1..20: mol_type = other DNA
gcctacctgtgtagccagct

SEQ ID NO: 20004 - DNA, 20 bp, synthetic construct
  source 1..20: mol_type = other DNA
ccctagctggctacacaggt

SEQ ID NO: 20005 - DNA, 20 bp, synthetic construct
  source 1..20: mol_type = other DNA
cagatgaggtaaggaaggag

SEQ ID NO: 20006 - DNA, 20 bp, synthetic construct
  source 1..20: mol_type = other DNA
actaaagaacagcaacgact

SEQ ID NO: 20007 - DNA, 20 bp, synthetic construct
  source 1..20: mol_type = other DNA
gtggacagaaacccatgttc

SEQ ID NO: 20008 - DNA, 20 bp, synthetic construct
  source 1..20: mol_type = other DNA
tttcctcagacccccggcag

SEQ ID NO: 20009 - DNA, 20 bp, synthetic construct
  source 1..20: mol_type = other DNA
acatcacccagtcccgaaca

SEQ ID NO: 20010 - DNA, 20 bp, synthetic construct
  source 1..20: mol_type = other DNA
tgtaccccagcaggctctgc

SEQ ID NO: 20011 - DNA, 20 bp, synthetic construct
  source 1..20: mol_type = other DNA
caccccagacaacatgtgca

SEQ ID NO: 20012 - DNA, 20 bp, synthetic construct
  source 1..20: mol_type = other DNA
tgtccactgccgggggtctg

SEQ ID NO: 20013 - DNA, 20 bp, synthetic construct
  source 1..20: mol_type = other DNA
catcacccagtcccgaacat

SEQ ID NO: 20014 - DNA, 20 bp, synthetic construct
  source 1..20: mol_type = other DNA
gctggccccagactttgttg

SEQ ID NO: 20015 - DNA, 20 bp, synthetic construct
  source 1..20: mol_type = other DNA
actggggatcccaaaaggta

SEQ ID NO: 20016 - DNA, 20 bp, synthetic construct
  source 1..20: mol_type = other DNA
gtgacctgcagagcctgctg

SEQ ID NO: 20017 - DNA, 20 bp, synthetic construct
  source 1..20: mol_type = other DNA
tttcaggtggccaggagatg

SEQ ID NO: 20018 - DNA, 20 bp, synthetic construct
  source 1..20: mol_type = other DNA
cagaaacccatgttcgggac

SEQ ID NO: 20019 - DNA, 20 bp, synthetic construct
  source 1..20: mol_type = other DNA
ctctgagtcgaagctgtcat

SEQ ID NO: 20020 - DNA, 20 bp, synthetic construct
  source 1..20: mol_type = other DNA
ccagctgataaaagactgac

SEQ ID NO: 20021 - DNA, 20 bp, synthetic construct
  source 1..20: mol_type = other DNA
actccgatggtggaacacac

SEQ ID NO: 20022 - DNA, 20 bp, synthetic construct
  source 1..20: mol_type = other DNA
ctaaagaacagcaacgactg

SEQ ID NO: 20023 - DNA, 20 bp, synthetic construct
  source 1..20: mol_type = other DNA
gctactttgtggattctgct

SEQ ID NO: 20024 - DNA, 20 bp, synthetic construct
  source 1..20: mol_type = other DNA
cctccttccttacctcatct

SEQ ID NO: 20025 - DNA, 20 bp, synthetic construct
  source 1..20: mol_type = other DNA
taccatagcctggaaacaaa

SEQ ID NO: 20026 - DNA, 20 bp, synthetic construct
  source 1..20: mol_type = other DNA
cgagaaagcagtctttaccc

SEQ ID NO: 20027 - DNA, 20 bp, synthetic construct
  source 1..20: mol_type = other DNA
accccagacaacatgtgcat

SEQ ID NO: 20028 - DNA, 20 bp, synthetic construct
  source 1..20: mol_type = other DNA
cctgcagaaaggtaaatatg

SEQ ID NO: 20029 - DNA, 20 bp, synthetic construct
  source 1..20: mol_type = other DNA
agcgtttccccgctgtcttg

SEQ ID NO: 20030 - DNA, 20 bp, synthetic construct
  source 1..20: mol_type = other DNA
agatgtccccaacaaagtct

SEQ ID NO: 20031 - DNA, 20 bp, synthetic construct
  source 1..20: mol_type = other DNA
aattatgagaaactgagccg

SEQ ID NO: 20032 - DNA, 20 bp, synthetic construct
  source 1..20: mol_type = other DNA
ctatgacagcttcgactcag

SEQ ID NO: 20033 - DNA, 20 bp, synthetic construct
  source 1..20: mol_type = other DNA
taggactctgtgatgaagct

SEQ ID NO: 20034 - DNA, 20 bp, synthetic construct
  source 1..20: mol_type = other DNA
ctggaggtaaaggaggaggt

SEQ ID NO: 20035 - DNA, 20 bp, synthetic construct
  source 1..20: mol_type = other DNA
tggcccccgagtttacctgg

SEQ ID NO: 20036 - DNA, 20 bp, synthetic construct
  source 1..20: mol_type = other DNA
catctagagatcctgcagaa

SEQ ID NO: 20037 - DNA, 20 bp, synthetic construct
  source 1..20: mol_type = other DNA
tgcccagtgtgttccaccat

SEQ ID NO: 20038 - DNA, 20 bp, synthetic construct
  source 1..20: mol_type = other DNA
tctgcaggtcacacacaaag

SEQ ID NO: 20039 - DNA, 20 bp, synthetic construct
  source 1..20: mol_type = other DNA
cccagatgaggtaaggaagg

SEQ ID NO: 20040 - DNA, 20 bp, synthetic construct
  source 1..20: mol_type = other DNA
cctcaggggtgtaccccagc

SEQ ID NO: 20041 - DNA, 20 bp, synthetic construct
  source 1..20: mol_type = other DNA
gatgtccccaacaaagtctg

SEQ ID NO: 20042 - DNA, 20 bp, synthetic construct
  source 1..20: mol_type = other DNA
aagatgtccccaacaaagtc

SEQ ID NO: 20043 - DNA, 20 bp, synthetic construct
  source 1..20: mol_type = other DNA
tggagcagccctctgcgccc

SEQ ID NO: 20044 - DNA, 20 bp, synthetic construct
  source 1..20: mol_type = other DNA
ccgagtttacctggaggtaa

SEQ ID NO: 20045 - DNA, 20 bp, synthetic construct
  source 1..20: mol_type = other DNA
ttccagaagttctgtatgaa

SEQ ID NO: 20046 - DNA, 20 bp, synthetic construct
  source 1..20: mol_type = other DNA
tgggtttctgtccactgccg

SEQ ID NO: 20047 - DNA, 20 bp, synthetic construct
  source 1..20: mol_type = other DNA
acttactctttggaatgccc

SEQ ID NO: 20048 - DNA, 20 bp, synthetic construct
  source 1..20: mol_type = other DNA
aggtatgccagtggcttctc

SEQ ID NO: 20049 - DNA, 20 bp, synthetic construct
  source 1..20: mol_type = other DNA
cgtaatagtagcgtaagccc

SEQ ID NO: 20050 - DNA, 20 bp, synthetic construct
  source 1..20: mol_type = other DNA
agcgctcggcgtcctctctg

SEQ ID NO: 20051 - DNA, 20 bp, synthetic construct
  source 1..20: mol_type = other DNA
ccggcgccctcgccctcgcc

SEQ ID NO: 20052 - DNA, 20 bp, synthetic construct
  source 1..20: mol_type = other DNA
acttcctgcggggagaggga

SEQ ID NO: 20053 - DNA, 20 bp, synthetic construct
  source 1..20: mol_type = other DNA
aggagtgacccagtggagca

SEQ ID NO: 20054 - DNA, 20 bp, synthetic construct
  source 1..20: mol_type = other DNA
gcgctcgccctggccgacgc

SEQ ID NO: 20055 - DNA, 20 bp, synthetic construct
  source 1..20: mol_type = other DNA
caggcatgagcgccacggtg

SEQ ID NO: 20056 - DNA, 20 bp, synthetic construct
  source 1..20: mol_type = other DNA
gtacatctccacgcccgcgt

SEQ ID NO: 20057 - DNA, 20 bp, synthetic construct
  source 1..20: mol_type = other DNA
ggcggcggcgcccctgcggc

SEQ ID NO: 20058 - DNA, 20 bp, synthetic construct
  source 1..20: mol_type = other DNA
cgcccgggggagcgcggcgc

SEQ ID NO: 20059 - DNA, 20 bp, synthetic construct
  source 1..20: mol_type = other DNA
cgagctgcgcgcgcgggtag

SEQ ID NO: 20060 - DNA, 20 bp, synthetic construct
  source 1..20: mol_type = other DNA
gcgcgcgcagctcgaggtgt

SEQ ID NO: 20061 - DNA, 20 bp, synthetic construct
  source 1..20: mol_type = other DNA
ggccagggcgagcgcggcgg

SEQ ID NO: 20062 - DNA, 20 bp, synthetic construct
  source 1..20: mol_type = other DNA
gacacctcgagctgcgcgcg

SEQ ID NO: 20063 - DNA, 20 bp, synthetic construct
  source 1..20: mol_type = other DNA
catgagcgccacggtgaggc

SEQ ID NO: 20064 - DNA, 20 bp, synthetic construct
  source 1..20: mol_type = other DNA
cctgtgctgaatcaggtggc

SEQ ID NO: 20065 - DNA, 20 bp, synthetic construct
  source 1..20: mol_type = other DNA
cctcgagccgcgtggggtcc

SEQ ID NO: 20066 - DNA, 20 bp, synthetic construct
  source 1..20: mol_type = other DNA
gtcggccagggcgagcgcgg

SEQ ID NO: 20067 - DNA, 20 bp, synthetic construct
  source 1..20: mol_type = other DNA
ggaggacggtggctcggccc

SEQ ID NO: 20068 - DNA, 20 bp, synthetic construct
  source 1..20: mol_type = other DNA
cgcgtcggccagggcgagcg

SEQ ID NO: 20069 - DNA, 20 bp, synthetic construct
  source 1..20: mol_type = other DNA
cctccgcccagctctctgtc

SEQ ID NO: 20070 - DNA, 20 bp, synthetic construct
  source 1..20: mol_type = other DNA
gagcaggcgaccgcgcagcg

SEQ ID NO: 20071 - DNA, 20 bp, synthetic construct
  source 1..20: mol_type = other DNA
gcgctcttcctcgagccgcg

SEQ ID NO: 20072 - DNA, 20 bp, synthetic construct
  source 1..20: mol_type = other DNA
ctccaggtaggccgagccct

SEQ ID NO: 20073 - DNA, 20 bp, synthetic construct
  source 1..20: mol_type = other DNA
ggtaggccgagcccttggcc

SEQ ID NO: 20074 - DNA, 20 bp, synthetic construct
  source 1..20: mol_type = other DNA
cgccctggccgacgcgggcg

SEQ ID NO: 20075 - DNA, 20 bp, synthetic construct
  source 1..20: mol_type = other DNA
tcggcctacctggaggcggg

SEQ ID NO: 20076 - DNA, 20 bp, synthetic construct
  source 1..20: mol_type = other DNA
gcagctgtacgcggccgacg

SEQ ID NO: 20077 - DNA, 20 bp, synthetic construct
  source 1..20: mol_type = other DNA
gctcttcctcgagccgcgtg

SEQ ID NO: 20078 - DNA, 20 bp, synthetic construct
  source 1..20: mol_type = other DNA
acaggatccagatctaactt

SEQ ID NO: 20079 - DNA, 20 bp, synthetic construct
  source 1..20: mol_type = other DNA
tctccaactttaaatcctgt

SEQ ID NO: 20080 - DNA, 20 bp, synthetic construct
  source 1..20: mol_type = other DNA
cgtgccctgccaagaaggga

SEQ ID NO: 20081 - DNA, 20 bp, synthetic construct
  source 1..20: mol_type = other DNA
actaacagtctactgaaagg

SEQ ID NO: 20082 - DNA, 20 bp, synthetic construct
  source 1..20: mol_type = other DNA
tagtgccatgaggaagaccc

SEQ ID NO: 20083 - DNA, 20 bp, synthetic construct
  source 1..20: mol_type = other DNA
ggcggcggaggtggtagtgg

SEQ ID NO: 20084 - DNA, 20 bp, synthetic construct
  source 1..20: mol_type = other DNA
tctccttgtgatgtttttca

SEQ ID NO: 20085 - DNA, 20 bp, synthetic construct
  source 1..20: mol_type = other DNA
ctgcactactgggcagatgt

SEQ ID NO: 20086 - DNA, 20 bp, synthetic construct
  source 1..20: mol_type = other DNA
actgtgcctggaggggccca

SEQ ID NO: 20087 - DNA, 20 bp, synthetic construct
  source 1..20: mol_type = other DNA
agtggaggcagtggtggcgg

SEQ ID NO: 20088 - DNA, 20 bp, synthetic construct
  source 1..20: mol_type = other DNA
atatccccagatctactggg

SEQ ID NO: 20089 - DNA, 20 bp, synthetic construct
  source 1..20: mol_type = other DNA
agtggtggcggcggcggcgg

SEQ ID NO: 20090 - DNA, 20 bp, synthetic construct
  source 1..20: mol_type = other DNA
ggtggcggtggcggtggtgg

SEQ ID NO: 20091 - DNA, 20 bp, synthetic construct
  source 1..20: mol_type = other DNA
tctgggcacagaggttggac

SEQ ID NO: 20092 - DNA, 20 bp, synthetic construct
  source 1..20: mol_type = other DNA
ggtggcggcggcggcggagg

SEQ ID NO: 20093 - DNA, 20 bp, synthetic construct
  source 1..20: mol_type = other DNA
agacggtgagtagtggcgcg

SEQ ID NO: 20094 - DNA, 20 bp, synthetic construct
  source 1..20: mol_type = other DNA
tgatccgaggctgggaagaa

SEQ ID NO: 20095 - DNA, 20 bp, synthetic construct
  source 1..20: mol_type = other DNA
ggagttgaggaggctggagt

SEQ ID NO: 20096 - DNA, 20 bp, synthetic construct
  source 1..20: mol_type = other DNA
ggggcaggtcctggatgtgc

SEQ ID NO: 20097 - DNA, 20 bp, synthetic construct
  source 1..20: mol_type = other DNA
atggagggtttcgtgctgga

SEQ ID NO: 20098 - DNA, 20 bp, synthetic construct
  source 1..20: mol_type = other DNA
caagaagtttgcgcggctgc

SEQ ID NO: 20099 - DNA, 20 bp, synthetic construct
  source 1..20: mol_type = other DNA
gggtgcgctgggtgctccgc

SEQ ID NO: 20100 - DNA, 20 bp, synthetic construct
  source 1..20: mol_type = other DNA
cacggtcagccgcagcctcg

SEQ ID NO: 20101 - DNA, 20 bp, synthetic construct
  source 1..20: mol_type = other DNA
gaagtagccgccctggggga

SEQ ID NO: 20102 - DNA, 20 bp, synthetic construct
  source 1..20: mol_type = other DNA
caggtaatctgggtggaggg

SEQ ID NO: 20103 - DNA, 20 bp, synthetic construct
  source 1..20: mol_type = other DNA
acccacatgtagacctgtgg

SEQ ID NO: 20104 - DNA, 20 bp, synthetic construct
  source 1..20: mol_type = other DNA
agaggagaagcagccagagg

SEQ ID NO: 20105 - DNA, 20 bp, synthetic construct
  source 1..20: mol_type = other DNA
gcttcccttgatctgactgg

SEQ ID NO: 20106 - DNA, 20 bp, synthetic construct
  source 1..20: mol_type = other DNA
gtccttctatgcagcagact

SEQ ID NO: 20107 - DNA, 20 bp, synthetic construct
  source 1..20: mol_type = other DNA
ggcagctgcacagctgggga

SEQ ID NO: 20108 - DNA, 20 bp, synthetic construct
  source 1..20: mol_type = other DNA
ggccatgggccccatcccca

SEQ ID NO: 20109 - DNA, 20 bp, synthetic construct
  source 1..20: mol_type = other DNA
cctccgctggggcttactcc

SEQ ID NO: 20110 - DNA, 20 bp, synthetic construct
  source 1..20: mol_type = other DNA
aggagaagcgaagggtgcgc

SEQ ID NO: 20111 - DNA, 20 bp, synthetic construct
  source 1..20: mol_type = other DNA
ctcctgaggccagggaggcc

SEQ ID NO: 20112 - DNA, 20 bp, synthetic construct
  source 1..20: mol_type = other DNA
ctaaatgcaggaaccggcgg

SEQ ID NO: 20113 - DNA, 20 bp, synthetic construct
  source 1..20: mol_type = other DNA
cttcgcttctcctcttcctc

SEQ ID NO: 20114 - DNA, 20 bp, synthetic construct
  source 1..20: mol_type = other DNA
actgggccatggaagagatg

SEQ ID NO: 20115 - DNA, 20 bp, synthetic construct
  source 1..20: mol_type = other DNA
tgaggagctgcagaagcaga

SEQ ID NO: 20116 - DNA, 20 bp, synthetic construct
  source 1..20: mol_type = other DNA
ccagatcagcccggaggaag

SEQ ID NO: 20117 - DNA, 20 bp, synthetic construct
  source 1..20: mol_type = other DNA
aacttctaaggaataagaaa

SEQ ID NO: 20118 - DNA, 20 bp, synthetic construct
  source 1..20: mol_type = other DNA
tctctgtcagctcccggcgt

SEQ ID NO: 20119 - DNA, 20 bp, synthetic construct
  source 1..20: mol_type = other DNA
ctcacatccctctctttccg

SEQ ID NO: 20120 - DNA, 20 bp, synthetic construct
  source 1..20: mol_type = other DNA
ccaagtgccggaaccgacgc

SEQ ID NO: 20121 - DNA, 20 bp, synthetic construct
  source 1..20: mol_type = other DNA
caagtgccggaaccgacgcc

SEQ ID NO: 20122 - DNA, 20 bp, synthetic construct
  source 1..20: mol_type = other DNA
tctcctgccacggaaagaga

SEQ ID NO: 20123 - DNA, 20 bp, synthetic construct
  source 1..20: mol_type = other DNA
cctcttcaggagacagctag

SEQ ID NO: 20124 - DNA, 20 bp, synthetic construct
  source 1..20: mol_type = other DNA
ggcggccagcaggtaggtgc

SEQ ID NO: 20125 - DNA, 20 bp, synthetic construct
  source 1..20: mol_type = other DNA
ccagcttgttcctctcccgc

SEQ ID NO: 20126 - DNA, 20 bp, synthetic construct
  source 1..20: mol_type = other DNA
atacctcatccacagaagac

SEQ ID NO: 20127 - DNA, 20 bp, synthetic construct
  source 1..20: mol_type = other DNA
cggggacttccagggcccgg

SEQ ID NO: 20128 - DNA, 20 bp, synthetic construct
  source 1..20: mol_type = other DNA
acaggttgccccacgcgttg

SEQ ID NO: 20129 - DNA, 20 bp, synthetic construct
  source 1..20: mol_type = other DNA
gtcgcagatctacgagtgga

SEQ ID NO: 20130 - DNA, 20 bp, synthetic construct
  source 1..20: mol_type = other DNA
tcggcgggctggaaggtgag

SEQ ID NO: 20131 - DNA, 20 bp, synthetic construct
  source 1..20: mol_type = other DNA
gagggtgctggggacagccc

SEQ ID NO: 20132 - DNA, 20 bp, synthetic construct
  source 1..20: mol_type = other DNA
cagtctggccaggagggtgc

SEQ ID NO: 20133 - DNA, 20 bp, synthetic construct
  source 1..20: mol_type = other DNA
agtctggccaggagggtgct

SEQ ID NO: 20134 - DNA, 20 bp, synthetic construct
  source 1..20: mol_type = other DNA
caaggccatcgagagctcgg

SEQ ID NO: 20135 - DNA, 20 bp, synthetic construct
  source 1..20: mol_type = other DNA
ccagggcactcatctgcatg

SEQ ID NO: 20136 - DNA, 20 bp, synthetic construct
  source 1..20: mol_type = other DNA
gttgccccacgcgttgcggc

SEQ ID NO: 20137 - DNA, 20 bp, synthetic construct
  source 1..20: mol_type = other DNA
atttggaaaactgtgatcca

SEQ ID NO: 20138 - DNA, 20 bp, synthetic construct
  source 1..20: mol_type = other DNA
caagagcgtgccctacttca

SEQ ID NO: 20139 - DNA, 20 bp, synthetic construct
  source 1..20: mol_type = other DNA
catgaggtcattccgaatga

SEQ ID NO: 20140 - DNA, 20 bp, synthetic construct
  source 1..20: mol_type = other DNA
gatgcctatacaaacacttc

SEQ ID NO: 20141 - DNA, 20 bp, synthetic construct
  source 1..20: mol_type = other DNA
cgtgcacctggccgctgccc

SEQ ID NO: 20142 - DNA, 20 bp, synthetic construct
  source 1..20: mol_type = other DNA
acaggatgatcttggagaag

SEQ ID NO: 20143 - DNA, 20 bp, synthetic construct
  source 1..20: mol_type = other DNA
cgggacgagctgctcttgcg

SEQ ID NO: 20144 - DNA, 20 bp, synthetic construct
  source 1..20: mol_type = other DNA
aactaccaaaaatatacata

SEQ ID NO: 20145 - DNA, 20 bp, synthetic construct
  source 1..20: mol_type = other DNA
cccatgcagatgagtgccct

SEQ ID NO: 20146 - DNA, 20 bp, synthetic construct
  source 1..20: mol_type = other DNA
ttggtggatgctcaatccag

SEQ ID NO: 20147 - DNA, 20 bp, synthetic construct
  source 1..20: mol_type = other DNA
ccccatgcagatgagtgccc

SEQ ID NO: 20148 - DNA, 20 bp, synthetic construct
  source 1..20: mol_type = other DNA
atgcagatgagtgccctggg

SEQ ID NO: 20149 - DNA, 20 bp, synthetic construct
  source 1..20: mol_type = other DNA
gcccgccgcggcgtcggggt

SEQ ID NO: 20150 - DNA, 20 bp, synthetic construct
  source 1..20: mol_type = other DNA
tctgggccagaacgtcatga

SEQ ID NO: 20151 - DNA, 20 bp, synthetic construct
  source 1..20: mol_type = other DNA
caggtgtcttcacttgggtc

SEQ ID NO: 20152 - DNA, 20 bp, synthetic construct
  source 1..20: mol_type = other DNA
agtcacttgggagcttctcc

SEQ ID NO: 20153 - DNA, 20 bp, synthetic construct
  source 1..20: mol_type = other DNA
gccaggtgcacgagcgcggc

SEQ ID NO: 20154 - DNA, 20 bp, synthetic construct
  source 1..20: mol_type = other DNA
tgatgaggtcggcgtaggac

SEQ ID NO: 20155 - DNA, 20 bp, synthetic construct
  source 1..20: mol_type = other DNA
aacaggatgatcttggagaa

SEQ ID NO: 20156 - DNA, 20 bp, synthetic construct
  source 1..20: mol_type = other DNA
ctccggcctgggcagcggcc

SEQ ID NO: 20157 - DNA, 20 bp, synthetic construct
  source 1..20: mol_type = other DNA
caggctgagggttagtgagc

SEQ ID NO: 20158 - DNA, 20 bp, synthetic construct
  source 1..20: mol_type = other DNA
ccgggcggcgggggctgcgg

SEQ ID NO: 20159 - DNA, 20 bp, synthetic construct
  source 1..20: mol_type = other DNA
atgacgaattgaattctgta

SEQ ID NO: 20160 - DNA, 20 bp, synthetic construct
  source 1..20: mol_type = other DNA
ggctggaaggtgagtggact

SEQ ID NO: 20161 - DNA, 20 bp, synthetic construct
  source 1..20: mol_type = other DNA
cacgaatgaacttgctgtgt

SEQ ID NO: 20162 - DNA, 20 bp, synthetic construct
  source 1..20: mol_type = other DNA
tcgtcccgccgcaacgcgtg

SEQ ID NO: 20163 - DNA, 20 bp, synthetic construct
  source 1..20: mol_type = other DNA
cggcggcggggggcaccggc

SEQ ID NO: 20164 - DNA, 20 bp, synthetic construct
  source 1..20: mol_type = other DNA
ctgggccagaacgtcatgat

SEQ ID NO: 20165 - DNA, 20 bp, synthetic construct
  source 1..20: mol_type = other DNA
cacttgggagcttctcctgg

SEQ ID NO: 20166 - DNA, 20 bp, synthetic construct
  source 1..20: mol_type = other DNA
caagacaacgacacatagct

SEQ ID NO: 20167 - DNA, 20 bp, synthetic construct
  source 1..20: mol_type = other DNA
acgacacatagctgggtgtc

SEQ ID NO: 20168 - DNA, 20 bp, synthetic construct
  source 1..20: mol_type = other DNA
acgaatgaacttgctgtgta

SEQ ID NO: 20169 - DNA, 20 bp, synthetic construct
  source 1..20: mol_type = other DNA
gtctggccaggagggtgctg

SEQ ID NO: 20170 - DNA, 20 bp, synthetic construct
  source 1..20: mol_type = other DNA
catgcagatgagtgccctgg

SEQ ID NO: 20171 - DNA, 20 bp, synthetic construct
  source 1..20: mol_type = other DNA
ccggtgccccccgccgccgc

SEQ ID NO: 20172 - DNA, 20 bp, synthetic construct
  source 1..20: mol_type = other DNA
gcaggcgcccggctccgtgg

SEQ ID NO: 20173 - DNA, 20 bp, synthetic construct
  source 1..20: mol_type = other DNA
cttggtgatgaggtcggcgt

SEQ ID NO: 20174 - DNA, 20 bp, synthetic construct
  source 1..20: mol_type = other DNA
ggttgccccacgcgttgcgg

SEQ ID NO: 20175 - DNA, 20 bp, synthetic construct
  source 1..20: mol_type = other DNA
catttggaaaactgtgatcc

SEQ ID NO: 20176 - DNA, 20 bp, synthetic construct
  source 1..20: mol_type = other DNA
tcgagagctcggcggagaag

SEQ ID NO: 20177 - DNA, 20 bp, synthetic construct
  source 1..20: mol_type = other DNA
cgccgagctctcgatggcct

SEQ ID NO: 20178 - DNA, 20 bp, synthetic construct
  source 1..20: mol_type = other DNA
gacagcggcccgggcggcgg

SEQ ID NO: 20179 - DNA, 20 bp, synthetic construct
  source 1..20: mol_type = other DNA
gtgacatggaatccatcatt

SEQ ID NO: 20180 - DNA, 20 bp, synthetic construct
  source 1..20: mol_type = other DNA
gtgccctacttcaaggataa

SEQ ID NO: 20181 - DNA, 20 bp, synthetic construct
  source 1..20: mol_type = other DNA
ccccgcgagcggcccagcgg

SEQ ID NO: 20182 - DNA, 20 bp, synthetic construct
  source 1..20: mol_type = other DNA
caccaaggccatcgagagct

SEQ ID NO: 20183 - DNA, 20 bp, synthetic construct
  source 1..20: mol_type = other DNA
gacaataagtcgagttatgg

SEQ ID NO: 20184 - DNA, 20 bp, synthetic construct
  source 1..20: mol_type = other DNA
cagcagacatctgcagttaa

SEQ ID NO: 20185 - DNA, 20 bp, synthetic construct
  source 1..20: mol_type = other DNA
ccatgcagatgagtgccctg

SEQ ID NO: 20186 - DNA, 20 bp, synthetic construct
  source 1..20: mol_type = other DNA
ctacgccgacctcatcacca

SEQ ID NO: 20187 - DNA, 20 bp, synthetic construct
  source 1..20: mol_type = other DNA
catcattcggaatgacctca

SEQ ID NO: 20188 - DNA, 20 bp, synthetic construct
  source 1..20: mol_type = other DNA
ccaatgtatctccatccatg

SEQ ID NO: 20189 - DNA, 20 bp, synthetic construct
  source 1..20: mol_type = other DNA
gccgctgtcgcagcacccgc

SEQ ID NO: 20190 - DNA, 20 bp, synthetic construct
  source 1..20: mol_type = other DNA
gatggccttggtgatgaggt

SEQ ID NO: 20191 - DNA, 20 bp, synthetic construct
  source 1..20: mol_type = other DNA
ttcattcgtgtgcagaatga

SEQ ID NO: 20192 - DNA, 20 bp, synthetic construct
  source 1..20: mol_type = other DNA
gaacaggatgatcttggaga

SEQ ID NO: 20193 - DNA, 20 bp, synthetic construct
  source 1..20: mol_type = other DNA
cgctgtcgcagatctacgag

SEQ ID NO: 20194 - DNA, 20 bp, synthetic construct
  source 1..20: mol_type = other DNA
caggacaataagtcgagtta

SEQ ID NO: 20195 - DNA, 20 bp, synthetic construct
  source 1..20: mol_type = other DNA
cgtgtgcagaatgaaggaac

SEQ ID NO: 20196 - DNA, 20 bp, synthetic construct
  source 1..20: mol_type = other DNA
cccgcaggcgcccggctccg

SEQ ID NO: 20197 - DNA, 20 bp, synthetic construct
  source 1..20: mol_type = other DNA
caccatccactcgtagatct

SEQ ID NO: 20198 - DNA, 20 bp, synthetic construct
  source 1..20: mol_type = other DNA
accgcggcgggcgggctgag

SEQ ID NO: 20199 - DNA, 20 bp, synthetic construct
  source 1..20: mol_type = other DNA
gacatggaagagaaggtagc

SEQ ID NO: 20200 - DNA, 20 bp, synthetic construct
  source 1..20: mol_type = other DNA
gtcccagatctacgagtgga

SEQ ID NO: 20201 - DNA, 20 bp, synthetic construct
  source 1..20: mol_type = other DNA
ccgcggcgggcgggctgagc

SEQ ID NO: 20202 - DNA, 20 bp, synthetic construct
  source 1..20: mol_type = other DNA
gaggacggcgggggacgggc

SEQ ID NO: 20203 - DNA, 20 bp, synthetic construct
  source 1..20: mol_type = other DNA
tgcccagatctacgagtgga

SEQ ID NO: 20204 - DNA, 20 bp, synthetic construct
  source 1..20: mol_type = other DNA
gtaccctacttcaaggacaa

SEQ ID NO: 20205 - DNA, 20 bp, synthetic construct
  source 1..20: mol_type = other DNA
gccggctctgggagccgaga

SEQ ID NO: 20206 - DNA, 20 bp, synthetic construct
  source 1..20: mol_type = other DNA
tgttatccatgtcacactcc

SEQ ID NO: 20207 - DNA, 20 bp, synthetic construct
  source 1..20: mol_type = other DNA
aatactcacacggcttgcat

SEQ ID NO: 20208 - DNA, 20 bp, synthetic construct
  source 1..20: mol_type = other DNA
cgtggaaggtaagctttctc

SEQ ID NO: 20209 - DNA, 20 bp, synthetic construct
  source 1..20: mol_type = other DNA
cactcccaaaagggaaaggt

SEQ ID NO: 20210 - DNA, 20 bp, synthetic construct
  source 1..20: mol_type = other DNA
taccttgagcaagaggttga

SEQ ID NO: 20211 - DNA, 20 bp, synthetic construct
  source 1..20: mol_type = other DNA
aatacttacgggctgagggg

SEQ ID NO: 20212 - DNA, 20 bp, synthetic construct
  source 1..20: mol_type = other DNA
aattacctgttgaagcatga

SEQ ID NO: 20213 - DNA, 20 bp, synthetic construct
  source 1..20: mol_type = other DNA
aaagatgcatatgtaaatgg

SEQ ID NO: 20214 - DNA, 20 bp, synthetic construct
  source 1..20: mol_type = other DNA
caattacctgttgaagcatg

SEQ ID NO: 20215 - DNA, 20 bp, synthetic construct
  source 1..20: mol_type = other DNA
tccacgtggccgcgttgcgt

SEQ ID NO: 20216 - DNA, 20 bp, synthetic construct
  source 1..20: mol_type = other DNA
tctctgtcatggtcaaaatc

SEQ ID NO: 20217 - DNA, 20 bp, synthetic construct
  source 1..20: mol_type = other DNA
agagttttataaaaaacaac

SEQ ID NO: 20218 - DNA, 20 bp, synthetic construct
  source 1..20: mol_type = other DNA
acctgtaaagctgcattgag

SEQ ID NO: 20219 - DNA, 20 bp, synthetic construct
  source 1..20: mol_type = other DNA
catagagaggatggctatgg

SEQ ID NO: 20220 - DNA, 20 bp, synthetic construct
  source 1..20: mol_type = other DNA
tccgacgcaacgcggccacg

SEQ ID NO: 20221 - DNA, 20 bp, synthetic construct
  source 1..20: mol_type = other DNA
catacaccatgtccatagag

SEQ ID NO: 20222 - DNA, 20 bp, synthetic construct
  source 1..20: mol_type = other DNA
ggaagagctgaacggggcaa

SEQ ID NO: 20223 - DNA, 20 bp, synthetic construct
  source 1..20: mol_type = other DNA
tcccaccgtgtgcatgctgg

SEQ ID NO: 20224 - DNA, 20 bp, synthetic construct
  source 1..20: mol_type = other DNA
tgtgtggaccgtggatgagc

SEQ ID NO: 20225 - DNA, 20 bp, synthetic construct
  source 1..20: mol_type = other DNA
tgggccaagggccaaggaag

SEQ ID NO: 20226 - DNA, 20 bp, synthetic construct
  source 1..20: mol_type = other DNA
tgaggtggcggtgactggga

SEQ ID NO: 20227 - DNA, 20 bp, synthetic construct
  source 1..20: mol_type = other DNA
cttgagggagaagaccccag

SEQ ID NO: 20228 - DNA, 20 bp, synthetic construct
  source 1..20: mol_type = other DNA
agcaggtaatgccagggcgg

SEQ ID NO: 20229 - DNA, 20 bp, synthetic construct
  source 1..20: mol_type = other DNA
caggatggcctggaagttgg

SEQ ID NO: 20230 - DNA, 20 bp, synthetic construct
  source 1..20: mol_type = other DNA
gcgggtggagagcgagaagg

SEQ ID NO: 20231 - DNA, 20 bp, synthetic construct
  source 1..20: mol_type = other DNA
tcatggctgggctctccagg

SEQ ID NO: 20232 - DNA, 20 bp, synthetic construct
  source 1..20: mol_type = other DNA
cacccaggcatcatccgaca

SEQ ID NO: 20233 - DNA, 20 bp, synthetic construct
  source 1..20: mol_type = other DNA
ctgacctcaagatcaaggaa

SEQ ID NO: 20234 - DNA, 20 bp, synthetic construct
  source 1..20: mol_type = other DNA
cctgtggaaacccagggaac

SEQ ID NO: 20235 - DNA, 20 bp, synthetic construct
  source 1..20: mol_type = other DNA
cttacaggttttcaccaggt

SEQ ID NO: 20236 - DNA, 20 bp, synthetic construct
  source 1..20: mol_type = other DNA
gccataaagactcttaaacc

SEQ ID NO: 20237 - DNA, 20 bp, synthetic construct
  source 1..20: mol_type = other DNA
gtgctggagcaggtggagcg

SEQ ID NO: 20238 - DNA, 20 bp, synthetic construct
  source 1..20: mol_type = other DNA
ttggtactggggctctgtcg

SEQ ID NO: 20239 - DNA, 20 bp, synthetic construct
  source 1..20: mol_type = other DNA
acagagccccagtaccaacc

SEQ ID NO: 20240 - DNA, 20 bp, synthetic construct
  source 1..20: mol_type = other DNA
gggccttacaggttttcacc

SEQ ID NO: 20241 - DNA, 20 bp, synthetic construct
  source 1..20: mol_type = other DNA
tgcaggcatgaacaaccggg

SEQ ID NO: 20242 - DNA, 20 bp, synthetic construct
  source 1..20: mol_type = other DNA
cgagtatatgaacaaaggtt

SEQ ID NO: 20243 - DNA, 20 bp, synthetic construct
  source 1..20: mol_type = other DNA
tactcggtgacgatgtagat

SEQ ID NO: 20244 - DNA, 20 bp, synthetic construct
  source 1..20: mol_type = other DNA
cccgtacagggctgcctcgg

SEQ ID NO: 20245 - DNA, 20 bp, synthetic construct
  source 1..20: mol_type = other DNA
ctttggtggtttcactctcg

SEQ ID NO: 20246 - DNA, 20 bp, synthetic construct
  source 1..20: mol_type = other DNA
atggggcagtcctgcgggca

SEQ ID NO: 20247 - DNA, 20 bp, synthetic construct
  source 1..20: mol_type = other DNA
cgggggccgtccacttgatg

SEQ ID NO: 20248 - DNA, 20 bp, synthetic construct
  source 1..20: mol_type = other DNA
ccgggaggtgctggagcagg

SEQ ID NO: 20249 - DNA, 20 bp, synthetic construct
  source 1..20: mol_type = other DNA
ggataagaaaggtacctctt

SEQ ID NO: 20250 - DNA, 20 bp, synthetic construct
  source 1..20: mol_type = other DNA
gcaaacattctagtggggaa

SEQ ID NO: 20251 - DNA, 20 bp, synthetic construct
  source 1..20: mol_type = other DNA
tcgcggtaaagtagtcttcc

SEQ ID NO: 20252 - DNA, 20 bp, synthetic construct
  source 1..20: mol_type = other DNA
gctggtccagctctatgcag

SEQ ID NO: 20253 - DNA, 20 bp, synthetic construct
  source 1..20: mol_type = other DNA
gatgacctgagttttcacaa

SEQ ID NO: 20254 - DNA, 20 bp, synthetic construct
  source 1..20: mol_type = other DNA
ttcactctcgcggataagaa

SEQ ID NO: 20255 - DNA, 20 bp, synthetic construct
  source 1..20: mol_type = other DNA
ctacaggatgccctgcccgc

SEQ ID NO: 20256 - DNA, 20 bp, synthetic construct
  source 1..20: mol_type = other DNA
cccccgaggcagccctgtac

SEQ ID NO: 20257 - DNA, 20 bp, synthetic construct
  source 1..20: mol_type = other DNA
caaccgggaggtgctggagc

SEQ ID NO: 20258 - DNA, 20 bp, synthetic construct
  source 1..20: mol_type = other DNA
ttacagggaaggagattggt

SEQ ID NO: 20259 - DNA, 20 bp, synthetic construct
  source 1..20: mol_type = other DNA
gatggggcagtcctgcgggc

SEQ ID NO: 20260 - DNA, 20 bp, synthetic construct
  source 1..20: mol_type = other DNA
catgagctcatgcagagaga

SEQ ID NO: 20261 - DNA, 20 bp, synthetic construct
  source 1..20: mol_type = other DNA
ccgagtatatgaacaaaggt

SEQ ID NO: 20262 - DNA, 20 bp, synthetic construct
  source 1..20: mol_type = other DNA
cgaagctggggtagtgctga

SEQ ID NO: 20263 - DNA, 20 bp, synthetic construct
  source 1..20: mol_type = other DNA
tccacaggtggctgcaggaa

SEQ ID NO: 20264 - DNA, 20 bp, synthetic construct
  source 1..20: mol_type = other DNA
tttacagggaaggagattgg

SEQ ID NO: 20265 - DNA, 20 bp, synthetic construct
  source 1..20: mol_type = other DNA
ccctttatgactatgaagca

SEQ ID NO: 20266 - DNA, 20 bp, synthetic construct
  source 1..20: mol_type = other DNA
ctttgcaggcatgaacaacc

SEQ ID NO: 20267 - DNA, 20 bp, synthetic construct
  source 1..20: mol_type = other DNA
ccaacctttgttcatatact

SEQ ID NO: 20268 - DNA, 20 bp, synthetic construct
  source 1..20: mol_type = other DNA
tgggtatggcactcttcctt

SEQ ID NO: 20269 - DNA, 20 bp, synthetic construct
  source 1..20: mol_type = other DNA
cagtttggggaagtatggat

SEQ ID NO: 20270 - DNA, 20 bp, synthetic construct
  source 1..20: mol_type = other DNA
gccatacccaggtaagagca

SEQ ID NO: 20271 - DNA, 20 bp, synthetic construct
  source 1..20: mol_type = other DNA
attcactttctatccgtgat

SEQ ID NO: 20272 - DNA, 20 bp, synthetic construct
  source 1..20: mol_type = other DNA
ggtacctcttgggtttccaa

SEQ ID NO: 20273 - DNA, 20 bp, synthetic construct
  source 1..20: mol_type = other DNA
catgaacaaccgggaggtgc

SEQ ID NO: 20274 - DNA, 20 bp, synthetic construct
  source 1..20: mol_type = other DNA
acagacagatcggtaagcct

SEQ ID NO: 20275 - DNA, 20 bp, synthetic construct
  source 1..20: mol_type = other DNA
tgccatacccaggtaagagc

SEQ ID NO: 20276 - DNA, 20 bp, synthetic construct
  source 1..20: mol_type = other DNA
tctgcaagtactcaaaagtg

SEQ ID NO: 20277 - DNA, 20 bp, synthetic construct
  source 1..20: mol_type = other DNA
caaggactcaccgtctttgg

SEQ ID NO: 20278 - DNA, 20 bp, synthetic construct
  source 1..20: mol_type = other DNA
cggataagaaaggtacctct

SEQ ID NO: 20279 - DNA, 20 bp, synthetic construct
  source 1..20: mol_type = other DNA
gccattcctgcagccacctg

SEQ ID NO: 20280 - DNA, 20 bp, synthetic construct
  source 1..20: mol_type = other DNA
gattgtgaacctcccgtaca

SEQ ID NO: 20281 - DNA, 20 bp, synthetic construct
  source 1..20: mol_type = other DNA
gtggacatggcagcacaggt

SEQ ID NO: 20282 - DNA, 20 bp, synthetic construct
  source 1..20: mol_type = other DNA
atagaaagtgaataggcacc

SEQ ID NO: 20283 - DNA, 20 bp, synthetic construct
  source 1..20: mol_type = other DNA
catcaagtggacggcccccg

SEQ ID NO: 20284 - DNA, 20 bp, synthetic construct
  source 1..20: mol_type = other DNA
ggcaggagtgacactctttg

SEQ ID NO: 20285 - DNA, 20 bp, synthetic construct
  source 1..20: mol_type = other DNA
atatgcaagattgctgactt

SEQ ID NO: 20286 - DNA, 20 bp, synthetic construct
  source 1..20: mol_type = other DNA
ttcctcaaggaatgattcgg

SEQ ID NO: 20287 - DNA, 20 bp, synthetic construct
  source 1..20: mol_type = other DNA
agcccacaggcattgcagac

SEQ ID NO: 20288 - DNA, 20 bp, synthetic construct
  source 1..20: mol_type = other DNA
tggtcagcatgtggctggag

SEQ ID NO: 20289 - DNA, 20 bp, synthetic construct
  source 1..20: mol_type = other DNA
ggtagggatccatgaagcag

SEQ ID NO: 20290 - DNA, 20 bp, synthetic construct
  source 1..20: mol_type = other DNA
cgggtgctgcccgttgagca

SEQ ID NO: 20291 - DNA, 20 bp, synthetic construct
  source 1..20: mol_type = other DNA
cctgtggggcaacggggaaa

SEQ ID NO: 20292 - DNA, 20 bp, synthetic construct
  source 1..20: mol_type = other DNA
accccactgtggcggcgaga

SEQ ID NO: 20293 - DNA, 20 bp, synthetic construct
  source 1..20: mol_type = other DNA
gcagggagtgtgtgaactgt

SEQ ID NO: 20294 - DNA, 20 bp, synthetic construct
  source 1..20: mol_type = other DNA
gctgagattccagggggagg

SEQ ID NO: 20295 - DNA, 20 bp, synthetic construct
  source 1..20: mol_type = other DNA
cctccagagtgtggttgtgg

SEQ ID NO: 20296 - DNA, 20 bp, synthetic construct
  source 1..20: mol_type = other DNA
cagccactcctacatggacg

SEQ ID NO: 20297 - DNA, 20 bp, synthetic construct
  source 1..20: mol_type = other DNA
ccttccttcttcatagtcag

SEQ ID NO: 20298 - DNA, 20 bp, synthetic construct
  source 1..20: mol_type = other DNA
ccacaaccacactctggagg

SEQ ID NO: 20299 - DNA, 20 bp, synthetic construct
  source 1..20: mol_type = other DNA
cagggcggtcatgctgccac

SEQ ID NO: 20300 - DNA, 20 bp, synthetic construct
  source 1..20: mol_type = other DNA
ggcagggagtgtgtgaactg

SEQ ID NO: 20301 - DNA, 20 bp, synthetic construct
  source 1..20: mol_type = other DNA
ttcccccccagcagcctgct

SEQ ID NO: 20302 - DNA, 20 bp, synthetic construct
  source 1..20: mol_type = other DNA
gccttcgcttgggcttaatg

SEQ ID NO: 20303 - DNA, 20 bp, synthetic construct
  source 1..20: mol_type = other DNA
gcgcactcaccgtggtgggt

SEQ ID NO: 20304 - DNA, 20 bp, synthetic construct
  source 1..20: mol_type = other DNA
gtgccatctcgccgccacag

SEQ ID NO: 20305 - DNA, 20 bp, synthetic construct
  source 1..20: mol_type = other DNA
gctgcccgttgagcacggcg

SEQ ID NO: 20306 - DNA, 20 bp, synthetic construct
  source 1..20: mol_type = other DNA
gggctctatcacaaaatgaa

SEQ ID NO: 20307 - DNA, 20 bp, synthetic construct
  source 1..20: mol_type = other DNA
gaaggggctgagattccagg

SEQ ID NO: 20308 - DNA, 20 bp, synthetic construct
  source 1..20: mol_type = other DNA
ggtggctcacccagcgcggc

SEQ ID NO: 20309 - DNA, 20 bp, synthetic construct
  source 1..20: mol_type = other DNA
cgaggccatggaggtgacgg

SEQ ID NO: 20310 - DNA, 20 bp, synthetic construct
  source 1..20: mol_type = other DNA
tcgccgccacagtggggtcg

SEQ ID NO: 20311 - DNA, 20 bp, synthetic construct
  source 1..20: mol_type = other DNA
cagtctgcagccaggagagc

SEQ ID NO: 20312 - DNA, 20 bp, synthetic construct
  source 1..20: mol_type = other DNA
cctgaccgagtttccgtagt

SEQ ID NO: 20313 - DNA, 20 bp, synthetic construct
  source 1..20: mol_type = other DNA
gtgctgcccgttgagcacgg

SEQ ID NO: 20314 - DNA, 20 bp, synthetic construct
  source 1..20: mol_type = other DNA
cttcacaatgtaagtggact

SEQ ID NO: 20315 - DNA, 20 bp, synthetic construct
  source 1..20: mol_type = other DNA
cagcttcatgctgtcgggca

SEQ ID NO: 20316 - DNA, 20 bp, synthetic construct
  source 1..20: mol_type = other DNA
tccaagacgtccatccacca

SEQ ID NO: 20317 - DNA, 20 bp, synthetic construct
  source 1..20: mol_type = other DNA
tacaagcttcacaatgtaag

SEQ ID NO: 20318 - DNA, 20 bp, synthetic construct
  source 1..20: mol_type = other DNA
acaggacgtccctgctctcc

SEQ ID NO: 20319 - DNA, 20 bp, synthetic construct
  source 1..20: mol_type = other DNA
gcgaaggctggtaagttctc

SEQ ID NO: 20320 - DNA, 20 bp, synthetic construct
  source 1..20: mol_type = other DNA
ccccccagcagcctgctggg

SEQ ID NO: 20321 - DNA, 20 bp, synthetic construct
  source 1..20: mol_type = other DNA
ggctcctacctgtgctggac

SEQ ID NO: 20322 - DNA, 20 bp, synthetic construct
  source 1..20: mol_type = other DNA
cggtcagggccacggtgcag

SEQ ID NO: 20323 - DNA, 20 bp, synthetic construct
  source 1..20: mol_type = other DNA
cccctgactatgaagaagga

SEQ ID NO: 20324 - DNA, 20 bp, synthetic construct
  source 1..20: mol_type = other DNA
gcctcgtcctcctccttgtc

SEQ ID NO: 20325 - DNA, 20 bp, synthetic construct
  source 1..20: mol_type = other DNA
cgtgctcaacgggcagcacc

SEQ ID NO: 20326 - DNA, 20 bp, synthetic construct
  source 1..20: mol_type = other DNA
ccctgtggggcaacggggaa

SEQ ID NO: 20327 - DNA, 20 bp, synthetic construct
  source 1..20: mol_type = other DNA
gaagggcgagatgtggctca

SEQ ID NO: 20328 - DNA, 20 bp, synthetic construct
  source 1..20: mol_type = other DNA
ctggaggaggaatgccaatg

SEQ ID NO: 20329 - DNA, 20 bp, synthetic construct
  source 1..20: mol_type = other DNA
cccaaggcccggtccagcac

SEQ ID NO: 20330 - DNA, 20 bp, synthetic construct
  source 1..20: mol_type = other DNA
ggtggtctgacagttcgcac

SEQ ID NO: 20331 - DNA, 20 bp, synthetic construct
  source 1..20: mol_type = other DNA
tgtgtctggagagggcggcc

SEQ ID NO: 20332 - DNA, 20 bp, synthetic construct
  source 1..20: mol_type = other DNA
gattccagggggaggcggtg

SEQ ID NO: 20333 - DNA, 20 bp, synthetic construct
  source 1..20: mol_type = other DNA
gccatctcgccgccacagtg

SEQ ID NO: 20334 - DNA, 20 bp, synthetic construct
  source 1..20: mol_type = other DNA
accaccccgccgtgctcaac

SEQ ID NO: 20335 - DNA, 20 bp, synthetic construct
  source 1..20: mol_type = other DNA
ccccggggagccgtggtgga

SEQ ID NO: 20336 - DNA, 20 bp, synthetic construct
  source 1..20: mol_type = other DNA
cctgcccgacagcatgaagc

SEQ ID NO: 20337 - DNA, 20 bp, synthetic construct
  source 1..20: mol_type = other DNA
cctcctccagagtgtggttg

SEQ ID NO: 20338 - DNA, 20 bp, synthetic construct
  source 1..20: mol_type = other DNA
agcgaaggctggtaagttct

SEQ ID NO: 20339 - DNA, 20 bp, synthetic construct
  source 1..20: mol_type = other DNA
ggctggtaagttctcgggaa

SEQ ID NO: 20340 - DNA, 20 bp, synthetic construct
  source 1..20: mol_type = other DNA
cggtgaccatgctggagggg

SEQ ID NO: 20341 - DNA, 20 bp, synthetic construct
  source 1..20: mol_type = other DNA
actcaccgtggtgggtcgga

SEQ ID NO: 20342 - DNA, 20 bp, synthetic construct
  source 1..20: mol_type = other DNA
gcacccggacacgcaccacc

SEQ ID NO: 20343 - DNA, 20 bp, synthetic construct
  source 1..20: mol_type = other DNA
cagacccctgactatgaaga

SEQ ID NO: 20344 - DNA, 20 bp, synthetic construct
  source 1..20: mol_type = other DNA
caccaccccgccgtgctcaa

SEQ ID NO: 20345 - DNA, 20 bp, synthetic construct
  source 1..20: mol_type = other DNA
tggtggtggctcacccagcg

SEQ ID NO: 20346 - DNA, 20 bp, synthetic construct
  source 1..20: mol_type = other DNA
aggtaccctccgacccacca

SEQ ID NO: 20347 - DNA, 20 bp, synthetic construct
  source 1..20: mol_type = other DNA
ccaccacggtgagtgcgccc

SEQ ID NO: 20348 - DNA, 20 bp, synthetic construct
  source 1..20: mol_type = other DNA
ccaccacaaccacactctgg

SEQ ID NO: 20349 - DNA, 20 bp, synthetic construct
  source 1..20: mol_type = other DNA
ggcccgggtggtgcgtgtcc

SEQ ID NO: 20350 - DNA, 20 bp, synthetic construct
  source 1..20: mol_type = other DNA
cactacctgtgcaacgcctg

SEQ ID NO: 20351 - DNA, 20 bp, synthetic construct
  source 1..20: mol_type = other DNA
tgccttccttcttcatagtc

SEQ ID NO: 20352 - DNA, 20 bp, synthetic construct
  source 1..20: mol_type = other DNA
ttcacacactccctgccttc

SEQ ID NO: 20353 - DNA, 20 bp, synthetic construct
  source 1..20: mol_type = other DNA
cctggctgcagactgagagt

SEQ ID NO: 20354 - DNA, 20 bp, synthetic construct
  source 1..20: mol_type = other DNA
gcccacaggcattgcagaca

SEQ ID NO: 20355 - DNA, 20 bp, synthetic construct
  source 1..20: mol_type = other DNA
tggctccctgtggggcaacg

SEQ ID NO: 20356 - DNA, 20 bp, synthetic construct
  source 1..20: mol_type = other DNA
gcccgttgagcacggcgggg

SEQ ID NO: 20357 - DNA, 20 bp, synthetic construct
  source 1..20: mol_type = other DNA
cagggagtgtgtgaactgtg

SEQ ID NO: 20358 - DNA, 20 bp, synthetic construct
  source 1..20: mol_type = other DNA
caccacggtgagtgcgcccg

SEQ ID NO: 20359 - DNA, 20 bp, synthetic construct
  source 1..20: mol_type = other DNA
ggcattcctcctccagagtg

SEQ ID NO: 20360 - DNA, 20 bp, synthetic construct
  source 1..20: mol_type = other DNA
aagcttgtagtagagcccac

SEQ ID NO: 20361 - DNA, 20 bp, synthetic construct
  source 1..20: mol_type = other DNA
gaacttaccagccttcgctt

SEQ ID NO: 20362 - DNA, 20 bp, synthetic construct
  source 1..20: mol_type = other DNA
caacctcgaccccactgtgg

SEQ ID NO: 20363 - DNA, 20 bp, synthetic construct
  source 1..20: mol_type = other DNA
gcagtacccgctgccggagg

SEQ ID NO: 20364 - DNA, 20 bp, synthetic construct
  source 1..20: mol_type = other DNA
cgcggcgcagtacccgctgc

SEQ ID NO: 20365 - DNA, 20 bp, synthetic construct
  source 1..20: mol_type = other DNA
agagcccgcaggcgttgcac

SEQ ID NO: 20366 - DNA, 20 bp, synthetic construct
  source 1..20: mol_type = other DNA
ccctcattaagcccaagcga

SEQ ID NO: 20367 - DNA, 20 bp, synthetic construct
  source 1..20: mol_type = other DNA
tccagggggaggcggtgtgg

SEQ ID NO: 20368 - DNA, 20 bp, synthetic construct
  source 1..20: mol_type = other DNA
ctctggaggaggaatgccaa

SEQ ID NO: 20369 - DNA, 20 bp, synthetic construct
  source 1..20: mol_type = other DNA
gccgccgtccagccagggta

SEQ ID NO: 20370 - DNA, 20 bp, synthetic construct
  source 1..20: mol_type = other DNA
gcttcacaatgtaagtggac

SEQ ID NO: 20371 - DNA, 20 bp, synthetic construct
  source 1..20: mol_type = other DNA
ccgccatccagcctgtcctt

SEQ ID NO: 20372 - DNA, 20 bp, synthetic construct
  source 1..20: mol_type = other DNA
gggcaacctcgaccccactg

SEQ ID NO: 20373 - DNA, 20 bp, synthetic construct
  source 1..20: mol_type = other DNA
gggatccatgaagcagaggc

SEQ ID NO: 20374 - DNA, 20 bp, synthetic construct
  source 1..20: mol_type = other DNA
ggcgcagtacccgctgccgg

SEQ ID NO: 20375 - DNA, 20 bp, synthetic construct
  source 1..20: mol_type = other DNA
ctgtggcggcgagatggcac

SEQ ID NO: 20376 - DNA, 20 bp, synthetic construct
  source 1..20: mol_type = other DNA
gccttccttcttcatagtca

SEQ ID NO: 20377 - DNA, 20 bp, synthetic construct
  source 1..20: mol_type = other DNA
acatccacctcctccggcag

SEQ ID NO: 20378 - DNA, 20 bp, synthetic construct
  source 1..20: mol_type = other DNA
actgtggcggcgagatggca

SEQ ID NO: 20379 - DNA, 20 bp, synthetic construct
  source 1..20: mol_type = other DNA
gctcctacctgtgctggacc

SEQ ID NO: 20380 - DNA, 20 bp, synthetic construct
  source 1..20: mol_type = other DNA
actacctgtgcaacgcctgc

SEQ ID NO: 20381 - DNA, 20 bp, synthetic construct
  source 1..20: mol_type = other DNA
gagaaggggctgagattcca

SEQ ID NO: 20382 - DNA, 20 bp, synthetic construct
  source 1..20: mol_type = other DNA
agaccaccacaaccacactc

SEQ ID NO: 20383 - DNA, 20 bp, synthetic construct
  source 1..20: mol_type = other DNA
cctggctccctgtggggcaa

SEQ ID NO: 20384 - DNA, 20 bp, synthetic construct
  source 1..20: mol_type = other DNA
gcgccgcgtccatgtaggag

SEQ ID NO: 20385 - DNA, 20 bp, synthetic construct
  source 1..20: mol_type = other DNA
tccctaccctggctggacgg

SEQ ID NO: 20386 - DNA, 20 bp, synthetic construct
  source 1..20: mol_type = other DNA
ctccagcatggtcaccgcca

SEQ ID NO: 20387 - DNA, 20 bp, synthetic construct
  source 1..20: mol_type = other DNA
cctactacggaaactcggtc

SEQ ID NO: 20388 - DNA, 20 bp, synthetic construct
  source 1..20: mol_type = other DNA
cttcgcttgggcttaatgag

SEQ ID NO: 20389 - DNA, 20 bp, synthetic construct
  source 1..20: mol_type = other DNA
agaacttaccagccttcgct

SEQ ID NO: 20390 - DNA, 20 bp, synthetic construct
  source 1..20: mol_type = other DNA
tgctgtcgggcaggggcacc

SEQ ID NO: 20391 - DNA, 20 bp, synthetic construct
  source 1..20: mol_type = other DNA
ctggctgcagactgagagtg

SEQ ID NO: 20392 - DNA, 20 bp, synthetic construct
  source 1..20: mol_type = other DNA
cccgccctactacggaaact

SEQ ID NO: 20393 - DNA, 20 bp, synthetic construct
  source 1..20: mol_type = other DNA
cactcaccgtggtgggtcgg

SEQ ID NO: 20394 - DNA, 20 bp, synthetic construct
  source 1..20: mol_type = other DNA
tctggaggaggaatgccaat

SEQ ID NO: 20395 - DNA, 20 bp, synthetic construct
  source 1..20: mol_type = other DNA
gtggccccccgacaaggagg

SEQ ID NO: 20396 - DNA, 20 bp, synthetic construct
  source 1..20: mol_type = other DNA
attgcagacagggtccccat

SEQ ID NO: 20397 - DNA, 20 bp, synthetic construct
  source 1..20: mol_type = other DNA
ccccgacaaggaggaggacg

SEQ ID NO: 20398 - DNA, 20 bp, synthetic construct
  source 1..20: mol_type = other DNA
catccacctcctccggcagc

SEQ ID NO: 20399 - DNA, 20 bp, synthetic construct
  source 1..20: mol_type = other DNA
cgccgtcacctccatggcct

SEQ ID NO: 20400 - DNA, 20 bp, synthetic construct
  source 1..20: mol_type = other DNA
tcgtcctcctccttgtcggg

SEQ ID NO: 20401 - DNA, 20 bp, synthetic construct
  source 1..20: mol_type = other DNA
ctgtactcgggcacgtaggg

SEQ ID NO: 20402 - DNA, 20 bp, synthetic construct
  source 1..20: mol_type = other DNA
ctactacggaaactcggtca

SEQ ID NO: 20403 - DNA, 20 bp, synthetic construct
  source 1..20: mol_type = other DNA
ccaggcagagaacttactca

SEQ ID NO: 20404 - DNA, 20 bp, synthetic construct
  source 1..20: mol_type = other DNA
gccggtccaccaggatgggt

SEQ ID NO: 20405 - DNA, 20 bp, synthetic construct
  source 1..20: mol_type = other DNA
gctgtatgactttgaggccc

SEQ ID NO: 20406 - DNA, 20 bp, synthetic construct
  source 1..20: mol_type = other DNA
gtagattttaagtaaccaag

SEQ ID NO: 20407 - DNA, 20 bp, synthetic construct
  source 1..20: mol_type = other DNA
cgaaggcctctctcgacacc

SEQ ID NO: 20408 - DNA, 20 bp, synthetic construct
  source 1..20: mol_type = other DNA
atagctccaacccatcctgg

SEQ ID NO: 20409 - DNA, 20 bp, synthetic construct
  source 1..20: mol_type = other DNA
aggatgggttggagctatcc

SEQ ID NO: 20410 - DNA, 20 bp, synthetic construct
  source 1..20: mol_type = other DNA
agacccagtgcagctccagg

SEQ ID NO: 20411 - DNA, 20 bp, synthetic construct
  source 1..20: mol_type = other DNA
ggccctggaggatgacgagc

SEQ ID NO: 20412 - DNA, 20 bp, synthetic construct
  source 1..20: mol_type = other DNA
acaagggtaattactttctg

SEQ ID NO: 20413 - DNA, 20 bp, synthetic construct
  source 1..20: mol_type = other DNA
agtgcagctccaggcggcag

SEQ ID NO: 20414 - DNA, 20 bp, synthetic construct
  source 1..20: mol_type = other DNA
cctcttccctgccaactacg

SEQ ID NO: 20415 - DNA, 20 bp, synthetic construct
  source 1..20: mol_type = other DNA
agacagaacccgagaagacc

SEQ ID NO: 20416 - DNA, 20 bp, synthetic construct
  source 1..20: mol_type = other DNA
ggccagccagagctccccag

SEQ ID NO: 20417 - DNA, 20 bp, synthetic construct
  source 1..20: mol_type = other DNA
ggccttcgtgaaaccatctg

SEQ ID NO: 20418 - DNA, 20 bp, synthetic construct
  source 1..20: mol_type = other DNA
ccagtgcagctccaggcggc

SEQ ID NO: 20419 - DNA, 20 bp, synthetic construct
  source 1..20: mol_type = other DNA
caggcagagaacttactcat

SEQ ID NO: 20420 - DNA, 20 bp, synthetic construct
  source 1..20: mol_type = other DNA
gggaggcccacacctcagtg

SEQ ID NO: 20421 - DNA, 20 bp, synthetic construct
  source 1..20: mol_type = other DNA
ggcgctggggcatattgcgg

SEQ ID NO: 20422 - DNA, 20 bp, synthetic construct
  source 1..20: mol_type = other DNA
gttttgaaggtaggtgacct

SEQ ID NO: 20423 - DNA, 20 bp, synthetic construct
  source 1..20: mol_type = other DNA
ctgccgcctggagctgcact

SEQ ID NO: 20424 - DNA, 20 bp, synthetic construct
  source 1..20: mol_type = other DNA
agagaacttactcatgggca

SEQ ID NO: 20425 - DNA, 20 bp, synthetic construct
  source 1..20: mol_type = other DNA
cagatacctggtggaaatgg

SEQ ID NO: 20426 - DNA, 20 bp, synthetic construct
  source 1..20: mol_type = other DNA
ccccacagatggtttcacga

SEQ ID NO: 20427 - DNA, 20 bp, synthetic construct
  source 1..20: mol_type = other DNA
tcacactggagatgttttga

SEQ ID NO: 20428 - DNA, 20 bp, synthetic construct
  source 1..20: mol_type = other DNA
ttttaagtaaccaagaggag

SEQ ID NO: 20429 - DNA, 20 bp, synthetic construct
  source 1..20: mol_type = other DNA
gccttcgtgaaaccatctgt

SEQ ID NO: 20430 - DNA, 20 bp, synthetic construct
  source 1..20: mol_type = other DNA
cagtgcagctccaggcggca

SEQ ID NO: 20431 - DNA, 20 bp, synthetic construct
  source 1..20: mol_type = other DNA
gtgcaggcggccggtccacc

SEQ ID NO: 20432 - DNA, 20 bp, synthetic construct
  source 1..20: mol_type = other DNA
ccccagctcgtcatcctcca

SEQ ID NO: 20433 - DNA, 20 bp, synthetic construct
  source 1..20: mol_type = other DNA
gttcccatacccctgccgcc

SEQ ID NO: 20434 - DNA, 20 bp, synthetic construct
  source 1..20: mol_type = other DNA
tgttttgaaggtaggtgacc

SEQ ID NO: 20435 - DNA, 20 bp, synthetic construct
  source 1..20: mol_type = other DNA
agtggtttaaggcggagctt

SEQ ID NO: 20436 - DNA, 20 bp, synthetic construct
  source 1..20: mol_type = other DNA
tgaagcagtgaaatcaaact

SEQ ID NO: 20437 - DNA, 20 bp, synthetic construct
  source 1..20: mol_type = other DNA
tccaacccatcctggtggac

SEQ ID NO: 20438 - DNA, 20 bp, synthetic construct
  source 1..20: mol_type = other DNA
tggagcatacctggtcttct

SEQ ID NO: 20439 - DNA, 20 bp, synthetic construct
  source 1..20: mol_type = other DNA
cccccaacagcgagtgcggt

SEQ ID NO: 20440 - DNA, 20 bp, synthetic construct
  source 1..20: mol_type = other DNA
agaggcccagcttgttgtgc

SEQ ID NO: 20441 - DNA, 20 bp, synthetic construct
  source 1..20: mol_type = other DNA
cgggccagccagagctcccc

SEQ ID NO: 20442 - DNA, 20 bp, synthetic construct
  source 1..20: mol_type = other DNA
aggcggccggtccaccagga

SEQ ID NO: 20443 - DNA, 20 bp, synthetic construct
  source 1..20: mol_type = other DNA
cctgccgcctggagctgcac

SEQ ID NO: 20444 - DNA, 20 bp, synthetic construct
  source 1..20: mol_type = other DNA
agaagtcccctggggagctc

SEQ ID NO: 20445 - DNA, 20 bp, synthetic construct
  source 1..20: mol_type = other DNA
cagatacttacttgggaaac

SEQ ID NO: 20446 - DNA, 20 bp, synthetic construct
  source 1..20: mol_type = other DNA
gcagcaccaccatttccacc

SEQ ID NO: 20447 - DNA, 20 bp, synthetic construct
  source 1..20: mol_type = other DNA
ggcagccttgacataaatga

SEQ ID NO: 20448 - DNA, 20 bp, synthetic construct
  source 1..20: mol_type = other DNA
tctaccagcttatttaggga

SEQ ID NO: 20449 - DNA, 20 bp, synthetic construct
  source 1..20: mol_type = other DNA
actggagatgttttgaaggt

SEQ ID NO: 20450 - DNA, 20 bp, synthetic construct
  source 1..20: mol_type = other DNA
cagcttgttgtgcaggcggc

SEQ ID NO: 20451 - DNA, 20 bp, synthetic construct
  source 1..20: mol_type = other DNA
ggcggccggtccaccaggat

SEQ ID NO: 20452 - DNA, 20 bp, synthetic construct
  source 1..20: mol_type = other DNA
ggcccaccgcactcgctgtt

SEQ ID NO: 20453 - DNA, 20 bp, synthetic construct
  source 1..20: mol_type = other DNA
atcctcatgcctggagatca

SEQ ID NO: 20454 - DNA, 20 bp, synthetic construct
  source 1..20: mol_type = other DNA
gctggggttccacagcgggg

SEQ ID NO: 20455 - DNA, 20 bp, synthetic construct
  source 1..20: mol_type = other DNA
cttcgtgaaaccatctgtgg

SEQ ID NO: 20456 - DNA, 20 bp, synthetic construct
  source 1..20: mol_type = other DNA
cacagacccagtgcagctcc

SEQ ID NO: 20457 - DNA, 20 bp, synthetic construct
  source 1..20: mol_type = other DNA
tgggtgccacgtagttggca

SEQ ID NO: 20458 - DNA, 20 bp, synthetic construct
  source 1..20: mol_type = other DNA
ttgaacgtcatcctcatgcc

SEQ ID NO: 20459 - DNA, 20 bp, synthetic construct
  source 1..20: mol_type = other DNA
ccttcgtgaaaccatctgtg

SEQ ID NO: 20460 - DNA, 20 bp, synthetic construct
  source 1..20: mol_type = other DNA
gccctggaggatgacgagct

SEQ ID NO: 20461 - DNA, 20 bp, synthetic construct
  source 1..20: mol_type = other DNA
ataagctggtagactactac

SEQ ID NO: 20462 - DNA, 20 bp, synthetic construct
  source 1..20: mol_type = other DNA
ctggggagctctggctggcc

SEQ ID NO: 20463 - DNA, 20 bp, synthetic construct
  source 1..20: mol_type = other DNA
cggccgcctgcacaacaagc

SEQ ID NO: 20464 - DNA, 20 bp, synthetic construct
  source 1..20: mol_type = other DNA
acagagatggagaagtcccc

SEQ ID NO: 20465 - DNA, 20 bp, synthetic construct
  source 1..20: mol_type = other DNA
gggccagccagagctcccca

SEQ ID NO: 20466 - DNA, 20 bp, synthetic construct
  source 1..20: mol_type = other DNA
cccaccgcactcgctgttgg

SEQ ID NO: 20467 - DNA, 20 bp, synthetic construct
  source 1..20: mol_type = other DNA
ggccgcctgcacaacaagct

SEQ ID NO: 20468 - DNA, 20 bp, synthetic construct
  source 1..20: mol_type = other DNA
ccgccttaaaccactcctct

SEQ ID NO: 20469 - DNA, 20 bp, synthetic construct
  source 1..20: mol_type = other DNA
acagcgagtgcggtgggccc

SEQ ID NO: 20470 - DNA, 20 bp, synthetic construct
  source 1..20: mol_type = other DNA
ccatgagtaagttctctgcc

SEQ ID NO: 20471 - DNA, 20 bp, synthetic construct
  source 1..20: mol_type = other DNA
taaaatctacatggaagaaa

SEQ ID NO: 20472 - DNA, 20 bp, synthetic construct
  source 1..20: mol_type = other DNA
ggatgacgttcaacacttca

SEQ ID NO: 20473 - DNA, 20 bp, synthetic construct
  source 1..20: mol_type = other DNA
gacgagctggggttccacag

SEQ ID NO: 20474 - DNA, 20 bp, synthetic construct
  source 1..20: mol_type = other DNA
gggcccaccgcactcgctgt

SEQ ID NO: 20475 - DNA, 20 bp, synthetic construct
  source 1..20: mol_type = other DNA
ccctggaggatgacgagctg

SEQ ID NO: 20476 - DNA, 20 bp, synthetic construct
  source 1..20: mol_type = other DNA
agagatggagaagtcccctg

SEQ ID NO: 20477 - DNA, 20 bp, synthetic construct
  source 1..20: mol_type = other DNA
cctcaaagtcatacagcgcc

SEQ ID NO: 20478 - DNA, 20 bp, synthetic construct
  source 1..20: mol_type = other DNA
tgtttctaggaacgccgagg

SEQ ID NO: 20479 - DNA, 20 bp, synthetic construct
  source 1..20: mol_type = other DNA
cagggaggcccacacctcag

SEQ ID NO: 20480 - DNA, 20 bp, synthetic construct
  source 1..20: mol_type = other DNA
tgtgtgtctccgatgcatga

SEQ ID NO: 20481 - DNA, 20 bp, synthetic construct
  source 1..20: mol_type = other DNA
gggacttctccatctctgtc

SEQ ID NO: 20482 - DNA, 20 bp, synthetic construct
  source 1..20: mol_type = other DNA
ccacgtagttggcagggaag

SEQ ID NO: 20483 - DNA, 20 bp, synthetic construct
  source 1..20: mol_type = other DNA
tccatgctgtaacgtgaagc

SEQ ID NO: 20484 - DNA, 20 bp, synthetic construct
  source 1..20: mol_type = other DNA
aatgcccatcatttatgtca

SEQ ID NO: 20485 - DNA, 20 bp, synthetic construct
  source 1..20: mol_type = other DNA
cctccaccacctccccgctg

SEQ ID NO: 20486 - DNA, 20 bp, synthetic construct
  source 1..20: mol_type = other DNA
ggcccagcttgttgtgcagg

SEQ ID NO: 20487 - DNA, 20 bp, synthetic construct
  source 1..20: mol_type = other DNA
tcccccaacagcgagtgcgg

SEQ ID NO: 20488 - DNA, 20 bp, synthetic construct
  source 1..20: mol_type = other DNA
aaggtcatgcgagacaacaa

SEQ ID NO: 20489 - DNA, 20 bp, synthetic construct
  source 1..20: mol_type = other DNA
tggatagctccaacccatcc

SEQ ID NO: 20490 - DNA, 20 bp, synthetic construct
  source 1..20: mol_type = other DNA
accccagctcgtcatcctcc

SEQ ID NO: 20491 - DNA, 20 bp, synthetic construct
  source 1..20: mol_type = other DNA
gaacttactcatgggcaagg

SEQ ID NO: 20492 - DNA, 20 bp, synthetic construct
  source 1..20: mol_type = other DNA
tggtcagtacctgacagaga

SEQ ID NO: 20493 - DNA, 20 bp, synthetic construct
  source 1..20: mol_type = other DNA
ccaagaggagtggtttaagg

SEQ ID NO: 20494 - DNA, 20 bp, synthetic construct
  source 1..20: mol_type = other DNA
ccaccaggtatctggaaaga

SEQ ID NO: 20495 - DNA, 20 bp, synthetic construct
  source 1..20: mol_type = other DNA
gtagtctaccagcttattta

SEQ ID NO: 20496 - DNA, 20 bp, synthetic construct
  source 1..20: mol_type = other DNA
cggggaggtggtggaggtcc

SEQ ID NO: 20497 - DNA, 20 bp, synthetic construct
  source 1..20: mol_type = other DNA
acgagctggggttccacagc

SEQ ID NO: 20498 - DNA, 20 bp, synthetic construct
  source 1..20: mol_type = other DNA
gcccaccgcactcgctgttg

SEQ ID NO: 20499 - DNA, 20 bp, synthetic construct
  source 1..20: mol_type = other DNA
ctcaaagtcatacagcgccc

SEQ ID NO: 20500 - DNA, 20 bp, synthetic construct
  source 1..20: mol_type = other DNA
gtatgactttgaggccctgg

SEQ ID NO: 20501 - DNA, 20 bp, synthetic construct
  source 1..20: mol_type = other DNA
cagagatggagaagtcccct

SEQ ID NO: 20502 - DNA, 20 bp, synthetic construct
  source 1..20: mol_type = other DNA
caaggtcatgcgagacaaca

SEQ ID NO: 20503 - DNA, 20 bp, synthetic construct
  source 1..20: mol_type = other DNA
aaggaagatctgcttctgtc

SEQ ID NO: 20504 - DNA, 20 bp, synthetic construct
  source 1..20: mol_type = other DNA
ttccagatacctggtggaaa

SEQ ID NO: 20505 - DNA, 20 bp, synthetic construct
  source 1..20: mol_type = other DNA
cgagctggggttccacagcg

SEQ ID NO: 20506 - DNA, 20 bp, synthetic construct
  source 1..20: mol_type = other DNA
ctgtgtgtctccgatgcatg

SEQ ID NO: 20507 - DNA, 20 bp, synthetic construct
  source 1..20: mol_type = other DNA
gatgaactgagctttcacac

SEQ ID NO: 20508 - DNA, 20 bp, synthetic construct
  source 1..20: mol_type = other DNA
ggagcatacctggtcttctc

SEQ ID NO: 20509 - DNA, 20 bp, synthetic construct
  source 1..20: mol_type = other DNA
gctccaggcggcaggggtat

SEQ ID NO: 20510 - DNA, 20 bp, synthetic construct
  source 1..20: mol_type = other DNA
gtttccatccctaaataagc

SEQ ID NO: 20511 - DNA, 20 bp, synthetic construct
  source 1..20: mol_type = other DNA
ttactcatgggcaaggaggt

SEQ ID NO: 20512 - DNA, 20 bp, synthetic construct
  source 1..20: mol_type = other DNA
ttttgaaggtaggtgacctg

SEQ ID NO: 20513 - DNA, 20 bp, synthetic construct
  source 1..20: mol_type = other DNA
tggtggaaaggagcttgcca

SEQ ID NO: 20514 - DNA, 20 bp, synthetic construct
  source 1..20: mol_type = other DNA
ctcactctctcggataagaa

SEQ ID NO: 20515 - DNA, 20 bp, synthetic construct
  source 1..20: mol_type = other DNA
tagcaaacagcggcacgatg

SEQ ID NO: 20516 - DNA, 20 bp, synthetic construct
  source 1..20: mol_type = other DNA
gggagattttatccatgtca

SEQ ID NO: 20517 - DNA, 20 bp, synthetic construct
  source 1..20: mol_type = other DNA
ctttgactttgatccccagg

SEQ ID NO: 20518 - DNA, 20 bp, synthetic construct
  source 1..20: mol_type = other DNA
tcagaccccaactggtggaa

SEQ ID NO: 20519 - DNA, 20 bp, synthetic construct
  source 1..20: mol_type = other DNA
aattgaacttcaccacccag

SEQ ID NO: 20520 - DNA, 20 bp, synthetic construct
  source 1..20: mol_type = other DNA
cacttcaaggtgctccgaga

SEQ ID NO: 20521 - DNA, 20 bp, synthetic construct
  source 1..20: mol_type = other DNA
gccaaaaaaccacctaagga

SEQ ID NO: 20522 - DNA, 20 bp, synthetic construct
  source 1..20: mol_type = other DNA
cgacgagctgagcttcaaaa

SEQ ID NO: 20523 - DNA, 20 bp, synthetic construct
  source 1..20: mol_type = other DNA
gaaatacttacttgacagag

SEQ ID NO: 20524 - DNA, 20 bp, synthetic construct
  source 1..20: mol_type = other DNA
gccacaggtaagcctcatca

SEQ ID NO: 20525 - DNA, 20 bp, synthetic construct
  source 1..20: mol_type = other DNA
gaaacatgccggtctgcccg

SEQ ID NO: 20526 - DNA, 20 bp, synthetic construct
  source 1..20: mol_type = other DNA
tgtcccgcaggaatatctgc

SEQ ID NO: 20527 - DNA, 20 bp, synthetic construct
  source 1..20: mol_type = other DNA
ataactcagaccccaactgg

SEQ ID NO: 20528 - DNA, 20 bp, synthetic construct
  source 1..20: mol_type = other DNA
cccagctctccatcctcctg

SEQ ID NO: 20529 - DNA, 20 bp, synthetic construct
  source 1..20: mol_type = other DNA
aagctcctttccaccagttg

SEQ ID NO: 20530 - DNA, 20 bp, synthetic construct
  source 1..20: mol_type = other DNA
acagagagggagaagtcccc

SEQ ID NO: 20531 - DNA, 20 bp, synthetic construct
  source 1..20: mol_type = other DNA
gcagcagccgacatacgtcc

SEQ ID NO: 20532 - DNA, 20 bp, synthetic construct
  source 1..20: mol_type = other DNA
ggtctgagttatccatgaca

SEQ ID NO: 20533 - DNA, 20 bp, synthetic construct
  source 1..20: mol_type = other DNA
tggagagctgggcttccgcc

SEQ ID NO: 20534 - DNA, 20 bp, synthetic construct
  source 1..20: mol_type = other DNA
atggagagctgggcttccgc

SEQ ID NO: 20535 - DNA, 20 bp, synthetic construct
  source 1..20: mol_type = other DNA
gatcaaagtcaaagagggcc

SEQ ID NO: 20536 - DNA, 20 bp, synthetic construct
  source 1..20: mol_type = other DNA
catggataaaatctccccgg

SEQ ID NO: 20537 - DNA, 20 bp, synthetic construct
  source 1..20: mol_type = other DNA
gttcaattctttgaatgagc

SEQ ID NO: 20538 - DNA, 20 bp, synthetic construct
  source 1..20: mol_type = other DNA
gagagagtgagagcgctcct

SEQ ID NO: 20539 - DNA, 20 bp, synthetic construct
  source 1..20: mol_type = other DNA
cacccagaggaagtacttcc

SEQ ID NO: 20540 - DNA, 20 bp, synthetic construct
  source 1..20: mol_type = other DNA
aaaaaccacctaaggaagga

SEQ ID NO: 20541 - DNA, 20 bp, synthetic construct
  source 1..20: mol_type = other DNA
gaaaccagcagatattcctg

SEQ ID NO: 20542 - DNA, 20 bp, synthetic construct
  source 1..20: mol_type = other DNA
aagagggcctggacgtatgt

SEQ ID NO: 20543 - DNA, 20 bp, synthetic construct
  source 1..20: mol_type = other DNA
tggataactcagaccccaac

SEQ ID NO: 20544 - DNA, 20 bp, synthetic construct
  source 1..20: mol_type = other DNA
attatgtcacccccgtgaac

SEQ ID NO: 20545 - DNA, 20 bp, synthetic construct
  source 1..20: mol_type = other DNA
atgtgatcagaactggtaca

SEQ ID NO: 20546 - DNA, 20 bp, synthetic construct
  source 1..20: mol_type = other DNA
cctaaggaaggaaggcaagc

SEQ ID NO: 20547 - DNA, 20 bp, synthetic construct
  source 1..20: mol_type = other DNA
ttagcaaacagcggcacgat

SEQ ID NO: 20548 - DNA, 20 bp, synthetic construct
  source 1..20: mol_type = other DNA
ctggggatcaaagtcaaaga

SEQ ID NO: 20549 - DNA, 20 bp, synthetic construct
  source 1..20: mol_type = other DNA
ccccaggaggatggagagct

SEQ ID NO: 20550 - DNA, 20 bp, synthetic construct
  source 1..20: mol_type = other DNA
agcccagctctccatcctcc

SEQ ID NO: 20551 - DNA, 20 bp, synthetic construct
  source 1..20: mol_type = other DNA
acgagctgagcttcaaaagg

SEQ ID NO: 20552 - DNA, 20 bp, synthetic construct
  source 1..20: mol_type = other DNA
gacgagctgagcttcaaaag

SEQ ID NO: 20553 - DNA, 20 bp, synthetic construct
  source 1..20: mol_type = other DNA
cgagagagtgagagcgctcc

SEQ ID NO: 20554 - DNA, 20 bp, synthetic construct
  source 1..20: mol_type = other DNA
gcccagctctccatcctcct

SEQ ID NO: 20555 - DNA, 20 bp, synthetic construct
  source 1..20: mol_type = other DNA
ggctgctgcaaaacaggagc

SEQ ID NO: 20556 - DNA, 20 bp, synthetic construct
  source 1..20: mol_type = other DNA
ggacatagaacaggtgccac

SEQ ID NO: 20557 - DNA, 20 bp, synthetic construct
  source 1..20: mol_type = other DNA
gtgaagtctctctgccgagt

SEQ ID NO: 20558 - DNA, 20 bp, synthetic construct
  source 1..20: mol_type = other DNA
tgccccagcagacgggcacg

SEQ ID NO: 20559 - DNA, 20 bp, synthetic construct
  source 1..20: mol_type = other DNA
tatagcagagacacagacac

SEQ ID NO: 20560 - DNA, 20 bp, synthetic construct
  source 1..20: mol_type = other DNA
gatggtaagcctcatcacag

SEQ ID NO: 20561 - DNA, 20 bp, synthetic construct
  source 1..20: mol_type = other DNA
ttgataaggcctctgtgatg

SEQ ID NO: 20562 - DNA, 20 bp, synthetic construct
  source 1..20: mol_type = other DNA
gtgaggaaacttctggatgc

SEQ ID NO: 20563 - DNA, 20 bp, synthetic construct
  source 1..20: mol_type = other DNA
acacaggtattgcactgcac

SEQ ID NO: 20564 - DNA, 20 bp, synthetic construct
  source 1..20: mol_type = other DNA
ttcacaaatcagcaccaagc

SEQ ID NO: 20565 - DNA, 20 bp, synthetic construct
  source 1..20: mol_type = other DNA
cctaaaaagggcacaagaag

SEQ ID NO: 20566 - DNA, 20 bp, synthetic construct
  source 1..20: mol_type = other DNA
tgtttacagtttgaactaac

SEQ ID NO: 20567 - DNA, 20 bp, synthetic construct
  source 1..20: mol_type = other DNA
tttcagaactacagttcctg

SEQ ID NO: 20568 - DNA, 20 bp, synthetic construct
  source 1..20: mol_type = other DNA
gataatattcataaattgag

SEQ ID NO: 20569 - DNA, 20 bp, synthetic construct
  source 1..20: mol_type = other DNA
ttctttacttcgccgagatc

SEQ ID NO: 20570 - DNA, 20 bp, synthetic construct
  source 1..20: mol_type = other DNA
tacaggatgcttgccaaaag

SEQ ID NO: 20571 - DNA, 20 bp, synthetic construct
  source 1..20: mol_type = other DNA
cttactatcatgatgagttt

SEQ ID NO: 20572 - DNA, 20 bp, synthetic construct
  source 1..20: mol_type = other DNA
cagacacctagtccttccga

SEQ ID NO: 20573 - DNA, 20 bp, synthetic construct
  source 1..20: mol_type = other DNA
ccatcagctatttgcgtgtg

SEQ ID NO: 20574 - DNA, 20 bp, synthetic construct
  source 1..20: mol_type = other DNA
acagtaaccaacctcagtgt

SEQ ID NO: 20575 - DNA, 20 bp, synthetic construct
  source 1..20: mol_type = other DNA
cactagacaaagttcacctg

SEQ ID NO: 20576 - DNA, 20 bp, synthetic construct
  source 1..20: mol_type = other DNA
aagcgaaaaatggaacatga

SEQ ID NO: 20577 - DNA, 20 bp, synthetic construct
  source 1..20: mol_type = other DNA
aacagtaaccaacctcagtg

SEQ ID NO: 20578 - DNA, 20 bp, synthetic construct
  source 1..20: mol_type = other DNA
atcagcaccaagcaggtcat

SEQ ID NO: 20579 - DNA, 20 bp, synthetic construct
  source 1..20: mol_type = other DNA
cctggctggagaaggccccc

SEQ ID NO: 20580 - DNA, 20 bp, synthetic construct
  source 1..20: mol_type = other DNA
cagggctccttactgcagaa

SEQ ID NO: 20581 - DNA, 20 bp, synthetic construct
  source 1..20: mol_type = other DNA
gagccatggtggccatgaag

SEQ ID NO: 20582 - DNA, 20 bp, synthetic construct
  source 1..20: mol_type = other DNA
cggcacactctgtgcctgcg

SEQ ID NO: 20583 - DNA, 20 bp, synthetic construct
  source 1..20: mol_type = other DNA
gttggtgaacgtaggaccca

SEQ ID NO: 20584 - DNA, 20 bp, synthetic construct
  source 1..20: mol_type = other DNA
tctccaccacggctttctgg

SEQ ID NO: 20585 - DNA, 20 bp, synthetic construct
  source 1..20: mol_type = other DNA
tcacccatgcagggcaggga

SEQ ID NO: 20586 - DNA, 20 bp, synthetic construct
  source 1..20: mol_type = other DNA
cggaggaaccgtttcaagtg

SEQ ID NO: 20587 - DNA, 20 bp, synthetic construct
  source 1..20: mol_type = other DNA
gcacaacatcccacagcggg

SEQ ID NO: 20588 - DNA, 20 bp, synthetic construct
  source 1..20: mol_type = other DNA
gagccccttcatggccacca

SEQ ID NO: 20589 - DNA, 20 bp, synthetic construct
  source 1..20: mol_type = other DNA
agaaggcatcctccactccc

SEQ ID NO: 20590 - DNA, 20 bp, synthetic construct
  source 1..20: mol_type = other DNA
actccctgggaaaggaggga

SEQ ID NO: 20591 - DNA, 20 bp, synthetic construct
  source 1..20: mol_type = other DNA
aaaagacttggtgttgttga

SEQ ID NO: 20592 - DNA, 20 bp, synthetic construct
  source 1..20: mol_type = other DNA
tgacctggctgcacgcactg

SEQ ID NO: 20593 - DNA, 20 bp, synthetic construct
  source 1..20: mol_type = other DNA
ccaagatcaataccaactgc

SEQ ID NO: 20594 - DNA, 20 bp, synthetic construct
  source 1..20: mol_type = other DNA
tggcactgtgaccacagcat

SEQ ID NO: 20595 - DNA, 20 bp, synthetic construct
  source 1..20: mol_type = other DNA
ctactgggtccagggtgcca

SEQ ID NO: 20596 - DNA, 20 bp, synthetic construct
  source 1..20: mol_type = other DNA
taatcaacctcttcaatggt

SEQ ID NO: 20597 - DNA, 20 bp, synthetic construct
  source 1..20: mol_type = other DNA
ggaacacctcggggtgcagg

SEQ ID NO: 20598 - DNA, 20 bp, synthetic construct
  source 1..20: mol_type = other DNA
ctcttcaatggtgggccctg

SEQ ID NO: 20599 - DNA, 20 bp, synthetic construct
  source 1..20: mol_type = other DNA
tcaccaaaaactgtgttggt

SEQ ID NO: 20600 - DNA, 20 bp, synthetic construct
  source 1..20: mol_type = other DNA
gattactatcactaatgaca

SEQ ID NO: 20601 - DNA, 20 bp, synthetic construct
  source 1..20: mol_type = other DNA
tacgagtagaaccaccaacc

SEQ ID NO: 20602 - DNA, 20 bp, synthetic construct
  source 1..20: mol_type = other DNA
agtgaaggtctgtgtctgct

SEQ ID NO: 20603 - DNA, 20 bp, synthetic construct
  source 1..20: mol_type = other DNA
attactatcactaatgacaa

SEQ ID NO: 20604 - DNA, 20 bp, synthetic construct
  source 1..20: mol_type = other DNA
ggcaccacctactcttgtgt

SEQ ID NO: 20605 - DNA, 20 bp, synthetic construct
  source 1..20: mol_type = other DNA
caaccgttcagtgtccgtaa

SEQ ID NO: 20606 - DNA, 20 bp, synthetic construct
  source 1..20: mol_type = other DNA
gtctagtttggcatctcgaa

SEQ ID NO: 20607 - DNA, 20 bp, synthetic construct
  source 1..20: mol_type = other DNA
accatagaagacacctcctc

SEQ ID NO: 20608 - DNA, 20 bp, synthetic construct
  source 1..20: mol_type = other DNA
tcccttggtattgaaactgc

SEQ ID NO: 20609 - DNA, 20 bp, synthetic construct
  source 1..20: mol_type = other DNA
ggcttaatcaacctcttcaa

SEQ ID NO: 20610 - DNA, 20 bp, synthetic construct
  source 1..20: mol_type = other DNA
gttgaagatgagaaacttca

SEQ ID NO: 20611 - DNA, 20 bp, synthetic construct
  source 1..20: mol_type = other DNA
tcaaaagtgacttcaatctg

SEQ ID NO: 20612 - DNA, 20 bp, synthetic construct
  source 1..20: mol_type = other DNA
gccaatgtttcatatcagac

SEQ ID NO: 20613 - DNA, 20 bp, synthetic construct
  source 1..20: mol_type = other DNA
taagcaatagcagcagcagt

SEQ ID NO: 20614 - DNA, 20 bp, synthetic construct
  source 1..20: mol_type = other DNA
gctggagacacccacttggg

SEQ ID NO: 20615 - DNA, 20 bp, synthetic construct
  source 1..20: mol_type = other DNA
gagagaatcgatctcaatac

SEQ ID NO: 20616 - DNA, 20 bp, synthetic construct
  source 1..20: mol_type = other DNA
gaagctgttgcttatggtgc

SEQ ID NO: 20617 - DNA, 20 bp, synthetic construct
  source 1..20: mol_type = other DNA
accagcagtttcaataccaa

SEQ ID NO: 20618 - DNA, 20 bp, synthetic construct
  source 1..20: mol_type = other DNA
ccataagcaacagcttcatc

SEQ ID NO: 20619 - DNA, 20 bp, synthetic construct
  source 1..20: mol_type = other DNA
catcaaaagtgccacctccc

SEQ ID NO: 20620 - DNA, 20 bp, synthetic construct
  source 1..20: mol_type = other DNA
gaaacattggccctttatgg

SEQ ID NO: 20621 - DNA, 20 bp, synthetic construct
  source 1..20: mol_type = other DNA
aaggtccaagtagaatacaa

SEQ ID NO: 20622 - DNA, 20 bp, synthetic construct
  source 1..20: mol_type = other DNA
gtccaggcagccatcttgtc

SEQ ID NO: 20623 - DNA, 20 bp, synthetic construct
  source 1..20: mol_type = other DNA
tcaatcctcactattgagga

SEQ ID NO: 20624 - DNA, 20 bp, synthetic construct
  source 1..20: mol_type = other DNA
tgaccctagggggcgagaga

SEQ ID NO: 20625 - DNA, 20 bp, synthetic construct
  source 1..20: mol_type = other DNA
tcggagctggcggggggctg

SEQ ID NO: 20626 - DNA, 20 bp, synthetic construct
  source 1..20: mol_type = other DNA
gagccctgagagaggagggg

SEQ ID NO: 20627 - DNA, 20 bp, synthetic construct
  source 1..20: mol_type = other DNA
tcctgaaggtgtccaggggc

SEQ ID NO: 20628 - DNA, 20 bp, synthetic construct
  source 1..20: mol_type = other DNA
ggcatgagaaaggggctccg

SEQ ID NO: 20629 - DNA, 20 bp, synthetic construct
  source 1..20: mol_type = other DNA
acgtcttcagggagcaccaa

SEQ ID NO: 20630 - DNA, 20 bp, synthetic construct
  source 1..20: mol_type = other DNA
ctaaaggcggggcattgccc

SEQ ID NO: 20631 - DNA, 20 bp, synthetic construct
  source 1..20: mol_type = other DNA
tggcaacaaagttgtgattc

SEQ ID NO: 20632 - DNA, 20 bp, synthetic construct
  source 1..20: mol_type = other DNA
ccagtgcccagccccgacca

SEQ ID NO: 20633 - DNA, 20 bp, synthetic construct
  source 1..20: mol_type = other DNA
cccccgtggggtgtccaggg

SEQ ID NO: 20634 - DNA, 20 bp, synthetic construct
  source 1..20: mol_type = other DNA
ggttctggggggcccagggg

SEQ ID NO: 20635 - DNA, 20 bp, synthetic construct
  source 1..20: mol_type = other DNA
caggtgagccggggaaggag

SEQ ID NO: 20636 - DNA, 20 bp, synthetic construct
  source 1..20: mol_type = other DNA
catcgctcctgttccacctc

SEQ ID NO: 20637 - DNA, 20 bp, synthetic construct
  source 1..20: mol_type = other DNA
cataaatcagtggataatcc

SEQ ID NO: 20638 - DNA, 20 bp, synthetic construct
  source 1..20: mol_type = other DNA
gtacattgtataaagaccac

SEQ ID NO: 20639 - DNA, 20 bp, synthetic construct
  source 1..20: mol_type = other DNA
cctataacacaaatataagt

SEQ ID NO: 20640 - DNA, 20 bp, synthetic construct
  source 1..20: mol_type = other DNA
ttatcataaccaaaggaggt

SEQ ID NO: 20641 - DNA, 20 bp, synthetic construct
  source 1..20: mol_type = other DNA
tatcataaccaaaggaggtg

SEQ ID NO: 20642 - DNA, 20 bp, synthetic construct
  source 1..20: mol_type = other DNA
tgataaaccacatgtgctag

SEQ ID NO: 20643 - DNA, 20 bp, synthetic construct
  source 1..20: mol_type = other DNA
ccttttctaaggaaaatggc

SEQ ID NO: 20644 - DNA, 20 bp, synthetic construct
  source 1..20: mol_type = other DNA
tctccatttacaaaaactga

SEQ ID NO: 20645 - DNA, 20 bp, synthetic construct
  source 1..20: mol_type = other DNA
atcataaccaaaggaggtgg

SEQ ID NO: 20646 - DNA, 20 bp, synthetic construct
  source 1..20: mol_type = other DNA
tgttggtctataaccaatca

SEQ ID NO: 20647 - DNA, 20 bp, synthetic construct
  source 1..20: mol_type = other DNA
ggtcctgagttgggagccag

SEQ ID NO: 20648 - DNA, 20 bp, synthetic construct
  source 1..20: mol_type = other DNA
caagtcatcctgatctccgt

SEQ ID NO: 20649 - DNA, 20 bp, synthetic construct
  source 1..20: mol_type = other DNA
tgatgagggagccttctcct

SEQ ID NO: 20650 - DNA, 20 bp, synthetic construct
  source 1..20: mol_type = other DNA
gcatggccccgggcgctcgg

SEQ ID NO: 20651 - DNA, 20 bp, synthetic construct
  source 1..20: mol_type = other DNA
ctacgccttcgagctgagct

SEQ ID NO: 20652 - DNA, 20 bp, synthetic construct
  source 1..20: mol_type = other DNA
gccgaagctccagtagtcga

SEQ ID NO: 20653 - DNA, 20 bp, synthetic construct
  source 1..20: mol_type = other DNA
cgccttcttccagctgagga

SEQ ID NO: 20654 - DNA, 20 bp, synthetic construct
  source 1..20: mol_type = other DNA
gtcactcagcaaggtgagga

SEQ ID NO: 20655 - DNA, 20 bp, synthetic construct
  source 1..20: mol_type = other DNA
tggggcctgcagcaacagga

SEQ ID NO: 20656 - DNA, 20 bp, synthetic construct
  source 1..20: mol_type = other DNA
tacctcttcttggctggctc

SEQ ID NO: 20657 - DNA, 20 bp, synthetic construct
  source 1..20: mol_type = other DNA
gctgcaggagaagcggcaga

SEQ ID NO: 20658 - DNA, 20 bp, synthetic construct
  source 1..20: mol_type = other DNA
ttttagagaggagcaagcaa

SEQ ID NO: 20659 - DNA, 20 bp, synthetic construct
  source 1..20: mol_type = other DNA
ctccagttcaagagcccaag

SEQ ID NO: 20660 - DNA, 20 bp, synthetic construct
  source 1..20: mol_type = other DNA
agattgccatcaagcagtgc

SEQ ID NO: 20661 - DNA, 20 bp, synthetic construct
  source 1..20: mol_type = other DNA
tccggaaggtgaggctccca

SEQ ID NO: 20662 - DNA, 20 bp, synthetic construct
  source 1..20: mol_type = other DNA
gggcccactcaccactgcac

SEQ ID NO: 20663 - DNA, 20 bp, synthetic construct
  source 1..20: mol_type = other DNA
atacacaaaattattgacct

SEQ ID NO: 20664 - DNA, 20 bp, synthetic construct
  source 1..20: mol_type = other DNA
agcaagcaagggagctgtac

SEQ ID NO: 20665 - DNA, 20 bp, synthetic construct
  source 1..20: mol_type = other DNA
cagccattgggcccatacgt

SEQ ID NO: 20666 - DNA, 20 bp, synthetic construct
  source 1..20: mol_type = other DNA
catgtctgcgttgtcaggga

SEQ ID NO: 20667 - DNA, 20 bp, synthetic construct
  source 1..20: mol_type = other DNA
ggcctacctgattgtgccat

SEQ ID NO: 20668 - DNA, 20 bp, synthetic construct
  source 1..20: mol_type = other DNA
tcagtgtatttcagacggca

SEQ ID NO: 20669 - DNA, 20 bp, synthetic construct
  source 1..20: mol_type = other DNA
tttgctcgctgtacttctcc

SEQ ID NO: 20670 - DNA, 20 bp, synthetic construct
  source 1..20: mol_type = other DNA
acttcttaccaggtactgca

SEQ ID NO: 20671 - DNA, 20 bp, synthetic construct
  source 1..20: mol_type = other DNA
cctgacaacgcagacatgtg

SEQ ID NO: 20672 - DNA, 20 bp, synthetic construct
  source 1..20: mol_type = other DNA
gccactcagtgtatttcaga

SEQ ID NO: 20673 - DNA, 20 bp, synthetic construct
  source 1..20: mol_type = other DNA
ctgttaagattattggggta

SEQ ID NO: 20674 - DNA, 20 bp, synthetic construct
  source 1..20: mol_type = other DNA
gctgcaggccccagagctac

SEQ ID NO: 20675 - DNA, 20 bp, synthetic construct
  source 1..20: mol_type = other DNA
ccaaggaggagatctccgga

SEQ ID NO: 20676 - DNA, 20 bp, synthetic construct
  source 1..20: mol_type = other DNA
ggcctggagggaaatggagc

SEQ ID NO: 20677 - DNA, 20 bp, synthetic construct
  source 1..20: mol_type = other DNA
cttacctgttaagattattg

SEQ ID NO: 20678 - DNA, 20 bp, synthetic construct
  source 1..20: mol_type = other DNA
ccctgacaacgcagacatgt

SEQ ID NO: 20679 - DNA, 20 bp, synthetic construct
  source 1..20: mol_type = other DNA
aggacctacctcttcttggc

SEQ ID NO: 20680 - DNA, 20 bp, synthetic construct
  source 1..20: mol_type = other DNA
gctgacccaccccaatgtgg

SEQ ID NO: 20681 - DNA, 20 bp, synthetic construct
  source 1..20: mol_type = other DNA
ggccagcaggggcaggtcat

SEQ ID NO: 20682 - DNA, 20 bp, synthetic construct
  source 1..20: mol_type = other DNA
ctctccagaccagcgaactg

SEQ ID NO: 20683 - DNA, 20 bp, synthetic construct
  source 1..20: mol_type = other DNA
attttagagaggagcaagca

SEQ ID NO: 20684 - DNA, 20 bp, synthetic construct
  source 1..20: mol_type = other DNA
atccgatggcacaatcaggt

SEQ ID NO: 20685 - DNA, 20 bp, synthetic construct
  source 1..20: mol_type = other DNA
gtcccctagagcaaggtccg

SEQ ID NO: 20686 - DNA, 20 bp, synthetic construct
  source 1..20: mol_type = other DNA
gaaaacatcgtcctgcagca

SEQ ID NO: 20687 - DNA, 20 bp, synthetic construct
  source 1..20: mol_type = other DNA
agactaagggaaaaacctcg

SEQ ID NO: 20688 - DNA, 20 bp, synthetic construct
  source 1..20: mol_type = other DNA
tcctacagaaacagcacagt

SEQ ID NO: 20689 - DNA, 20 bp, synthetic construct
  source 1..20: mol_type = other DNA
gagcaggctgtggagctctg

SEQ ID NO: 20690 - DNA, 20 bp, synthetic construct
  source 1..20: mol_type = other DNA
tccagatcatgagaaggtga

SEQ ID NO: 20691 - DNA, 20 bp, synthetic construct
  source 1..20: mol_type = other DNA
accaccgctctcggttccgg

SEQ ID NO: 20692 - DNA, 20 bp, synthetic construct
  source 1..20: mol_type = other DNA
gccggcaggagctcagcccc

SEQ ID NO: 20693 - DNA, 20 bp, synthetic construct
  source 1..20: mol_type = other DNA
ctggggcctgcagcaacagg

SEQ ID NO: 20694 - DNA, 20 bp, synthetic construct
  source 1..20: mol_type = other DNA
ggctgcaactgatgctgatg

SEQ ID NO: 20695 - DNA, 20 bp, synthetic construct
  source 1..20: mol_type = other DNA
gaccacagcagttctcaaac

SEQ ID NO: 20696 - DNA, 20 bp, synthetic construct
  source 1..20: mol_type = other DNA
acactcactgatcccaaact

SEQ ID NO: 20697 - DNA, 20 bp, synthetic construct
  source 1..20: mol_type = other DNA
ggcagtactccatggccagc

SEQ ID NO: 20698 - DNA, 20 bp, synthetic construct
  source 1..20: mol_type = other DNA
agcaggctgtggagctctgt

SEQ ID NO: 20699 - DNA, 20 bp, synthetic construct
  source 1..20: mol_type = other DNA
tattgacctaggatatgcca

SEQ ID NO: 20700 - DNA, 20 bp, synthetic construct
  source 1..20: mol_type = other DNA
gccatggagtactgccaagg

SEQ ID NO: 20701 - DNA, 20 bp, synthetic construct
  source 1..20: mol_type = other DNA
ttccaaatccccctgtccca

SEQ ID NO: 20702 - DNA, 20 bp, synthetic construct
  source 1..20: mol_type = other DNA
gcagccattgggcccatacg

SEQ ID NO: 20703 - DNA, 20 bp, synthetic construct
  source 1..20: mol_type = other DNA
gtgcagtggtgagtgggccc

SEQ ID NO: 20704 - DNA, 20 bp, synthetic construct
  source 1..20: mol_type = other DNA
aaccagtttgagaactgctg

SEQ ID NO: 20705 - DNA, 20 bp, synthetic construct
  source 1..20: mol_type = other DNA
tttctggctttagatcccga

SEQ ID NO: 20706 - DNA, 20 bp, synthetic construct
  source 1..20: mol_type = other DNA
caagatccatgtccaatgtg

SEQ ID NO: 20707 - DNA, 20 bp, synthetic construct
  source 1..20: mol_type = other DNA
gcatgagaatcacttgaacc

SEQ ID NO: 20708 - DNA, 20 bp, synthetic construct
  source 1..20: mol_type = other DNA
gcagtactccatggccagca

SEQ ID NO: 20709 - DNA, 20 bp, synthetic construct
  source 1..20: mol_type = other DNA
cctgttaagattattggggt

SEQ ID NO: 20710 - DNA, 20 bp, synthetic construct
  source 1..20: mol_type = other DNA
tcctccttggcagtactcca

SEQ ID NO: 20711 - DNA, 20 bp, synthetic construct
  source 1..20: mol_type = other DNA
ttctcatgatctggatctcc

SEQ ID NO: 20712 - DNA, 20 bp, synthetic construct
  source 1..20: mol_type = other DNA
cccaataatcttaacaggta

SEQ ID NO: 20713 - DNA, 20 bp, synthetic construct
  source 1..20: mol_type = other DNA
ctgcagtacctggtaagaag

SEQ ID NO: 20714 - DNA, 20 bp, synthetic construct
  source 1..20: mol_type = other DNA
tctggatgctgtgccagacc

SEQ ID NO: 20715 - DNA, 20 bp, synthetic construct
  source 1..20: mol_type = other DNA
tgtgtattaactaaaacaaa

SEQ ID NO: 20716 - DNA, 20 bp, synthetic construct
  source 1..20: mol_type = other DNA
gcagcccgtgcagtggtgag

SEQ ID NO: 20717 - DNA, 20 bp, synthetic construct
  source 1..20: mol_type = other DNA
gccctcaccttctcatgatc

SEQ ID NO: 20718 - DNA, 20 bp, synthetic construct
  source 1..20: mol_type = other DNA
caccaccgctctcggttccg

SEQ ID NO: 20719 - DNA, 20 bp, synthetic construct
  source 1..20: mol_type = other DNA
ccaactggcagcccgtgcag

SEQ ID NO: 20720 - DNA, 20 bp, synthetic construct
  source 1..20: mol_type = other DNA
gagggaaatggagcaggctg

SEQ ID NO: 20721 - DNA, 20 bp, synthetic construct
  source 1..20: mol_type = other DNA
ggctctgcagaccgacattg

SEQ ID NO: 20722 - DNA, 20 bp, synthetic construct
  source 1..20: mol_type = other DNA
tgcagtacctggtaagaagt

SEQ ID NO: 20723 - DNA, 20 bp, synthetic construct
  source 1..20: mol_type = other DNA
ggatccgtgcccctctgtcg

SEQ ID NO: 20724 - DNA, 20 bp, synthetic construct
  source 1..20: mol_type = other DNA
ggaggaccaggagctgctgc

SEQ ID NO: 20725 - DNA, 20 bp, synthetic construct
  source 1..20: mol_type = other DNA
cgtggggaccctgcagtacc

SEQ ID NO: 20726 - DNA, 20 bp, synthetic construct
  source 1..20: mol_type = other DNA
caatgtcactcagcaaggtg

SEQ ID NO: 20727 - DNA, 20 bp, synthetic construct
  source 1..20: mol_type = other DNA
cgtgatgcactcaaaggcca

SEQ ID NO: 20728 - DNA, 20 bp, synthetic construct
  source 1..20: mol_type = other DNA
ccaggagctgctgcaggaag

SEQ ID NO: 20729 - DNA, 20 bp, synthetic construct
  source 1..20: mol_type = other DNA
cagtactccatggccagcag

SEQ ID NO: 20730 - DNA, 20 bp, synthetic construct
  source 1..20: mol_type = other DNA
gtggagctctgtgggcgggt

SEQ ID NO: 20731 - DNA, 20 bp, synthetic construct
  source 1..20: mol_type = other DNA
ggcaccaccgctctcggttc

SEQ ID NO: 20732 - DNA, 20 bp, synthetic construct
  source 1..20: mol_type = other DNA
agcagttctcaaactggttc

SEQ ID NO: 20733 - DNA, 20 bp, synthetic construct
  source 1..20: mol_type = other DNA
atgaaggtatctaagcgcag

SEQ ID NO: 20734 - DNA, 20 bp, synthetic construct
  source 1..20: mol_type = other DNA
cctgcagcaaggagaacaga

SEQ ID NO: 20735 - DNA, 20 bp, synthetic construct
  source 1..20: mol_type = other DNA
aagctgttggaggccgtgga

SEQ ID NO: 20736 - DNA, 20 bp, synthetic construct
  source 1..20: mol_type = other DNA
tcagccaggacactgtggag

SEQ ID NO: 20737 - DNA, 20 bp, synthetic construct
  source 1..20: mol_type = other DNA
cctacagaaacagcacagtg

SEQ ID NO: 20738 - DNA, 20 bp, synthetic construct
  source 1..20: mol_type = other DNA
gcgcagaggctgaggaagag

SEQ ID NO: 20739 - DNA, 20 bp, synthetic construct
  source 1..20: mol_type = other DNA
tttgcaggcattcaaaagtg

SEQ ID NO: 20740 - DNA, 20 bp, synthetic construct
  source 1..20: mol_type = other DNA
tccctgacaacgcagacatg

SEQ ID NO: 20741 - DNA, 20 bp, synthetic construct
  source 1..20: mol_type = other DNA
atatgccaaggagctggatc

SEQ ID NO: 20742 - DNA, 20 bp, synthetic construct
  source 1..20: mol_type = other DNA
gctctggggcctgcagcaac

SEQ ID NO: 20743 - DNA, 20 bp, synthetic construct
  source 1..20: mol_type = other DNA
atccagatcatgagaaggtg

SEQ ID NO: 20744 - DNA, 20 bp, synthetic construct
  source 1..20: mol_type = other DNA
atgaaaacagaatcatccat

SEQ ID NO: 20745 - DNA, 20 bp, synthetic construct
  source 1..20: mol_type = other DNA
gccagcaggggcaggtcatt

SEQ ID NO: 20746 - DNA, 20 bp, synthetic construct
  source 1..20: mol_type = other DNA
tattaactaaaacaaaagga

SEQ ID NO: 20747 - DNA, 20 bp, synthetic construct
  source 1..20: mol_type = other DNA
tatgccaaggagctggatca

SEQ ID NO: 20748 - DNA, 20 bp, synthetic construct
  source 1..20: mol_type = other DNA
tgccatcaagcagtgccggc

SEQ ID NO: 20749 - DNA, 20 bp, synthetic construct
  source 1..20: mol_type = other DNA
tttaccaatgtcactcagca

SEQ ID NO: 20750 - DNA, 20 bp, synthetic construct
  source 1..20: mol_type = other DNA
gtgacagtcaggaaatggta

SEQ ID NO: 20751 - DNA, 20 bp, synthetic construct
  source 1..20: mol_type = other DNA
gcccccggaaccgagagcgg

SEQ ID NO: 20752 - DNA, 20 bp, synthetic construct
  source 1..20: mol_type = other DNA
tggagatccagatcatgaga

SEQ ID NO: 20753 - DNA, 20 bp, synthetic construct
  source 1..20: mol_type = other DNA
ttcctacagaaacagcacag

SEQ ID NO: 20754 - DNA, 20 bp, synthetic construct
  source 1..20: mol_type = other DNA
gcaccaccgctctcggttcc

SEQ ID NO: 20755 - DNA, 20 bp, synthetic construct
  source 1..20: mol_type = other DNA
gttgcgggccttgtacacac

SEQ ID NO: 20756 - DNA, 20 bp, synthetic construct
  source 1..20: mol_type = other DNA
acgaggcgcatgatgttccc

SEQ ID NO: 20757 - DNA, 20 bp, synthetic construct
  source 1..20: mol_type = other DNA
aaccgcatcatcgaacggta

SEQ ID NO: 20758 - DNA, 20 bp, synthetic construct
  source 1..20: mol_type = other DNA
ctcatcctcaggcagcccaa

SEQ ID NO: 20759 - DNA, 20 bp, synthetic construct
  source 1..20: mol_type = other DNA
ggaacatcatgcgcctcgta

SEQ ID NO: 20760 - DNA, 20 bp, synthetic construct
  source 1..20: mol_type = other DNA
ccaaaatatcacggagaccc

SEQ ID NO: 20761 - DNA, 20 bp, synthetic construct
  source 1..20: mol_type = other DNA
acacccacctctcagttccc

SEQ ID NO: 20762 - DNA, 20 bp, synthetic construct
  source 1..20: mol_type = other DNA
atcctagacacagccgtggt

SEQ ID NO: 20763 - DNA, 20 bp, synthetic construct
  source 1..20: mol_type = other DNA
caggagagtctcagcaaggt

SEQ ID NO: 20764 - DNA, 20 bp, synthetic construct
  source 1..20: mol_type = other DNA
tgggagcctgctgagtgtgc

SEQ ID NO: 20765 - DNA, 20 bp, synthetic construct
  source 1..20: mol_type = other DNA
catggacgacaactcgctgc

SEQ ID NO: 20766 - DNA, 20 bp, synthetic construct
  source 1..20: mol_type = other DNA
ggccactgccagtgtgtaca

SEQ ID NO: 20767 - DNA, 20 bp, synthetic construct
  source 1..20: mol_type = other DNA
tgtgcatcgcgacatcaagc

SEQ ID NO: 20768 - DNA, 20 bp, synthetic construct
  source 1..20: mol_type = other DNA
gacagacttcggcgctgccc

SEQ ID NO: 20769 - DNA, 20 bp, synthetic construct
  source 1..20: mol_type = other DNA
gtggtgatccggtacctgcg

SEQ ID NO: 20770 - DNA, 20 bp, synthetic construct
  source 1..20: mol_type = other DNA
cggaagccggcagaaggtac

SEQ ID NO: 20771 - DNA, 20 bp, synthetic construct
  source 1..20: mol_type = other DNA
tgtgtacaaggcccgcaaca

SEQ ID NO: 20772 - DNA, 20 bp, synthetic construct
  source 1..20: mol_type = other DNA
acagatgacctgctggggca

SEQ ID NO: 20773 - DNA, 20 bp, synthetic construct
  source 1..20: mol_type = other DNA
tagctcctgcccatccagca

SEQ ID NO: 20774 - DNA, 20 bp, synthetic construct
  source 1..20: mol_type = other DNA
tccagggcttggctacaacg

SEQ ID NO: 20775 - DNA, 20 bp, synthetic construct
  source 1..20: mol_type = other DNA
ctgtgagtgggaccctgctg

SEQ ID NO: 20776 - DNA, 20 bp, synthetic construct
  source 1..20: mol_type = other DNA
catacatgtcgggatgctgc

SEQ ID NO: 20777 - DNA, 20 bp, synthetic construct
  source 1..20: mol_type = other DNA
tgagggagtttgaggtcctg

SEQ ID NO: 20778 - DNA, 20 bp, synthetic construct
  source 1..20: mol_type = other DNA
caccaaaggggatgaagggc

SEQ ID NO: 20779 - DNA, 20 bp, synthetic construct
  source 1..20: mol_type = other DNA
gatgaagggcaggctgccag

SEQ ID NO: 20780 - DNA, 20 bp, synthetic construct
  source 1..20: mol_type = other DNA
ggcggattacaacactgcca

SEQ ID NO: 20781 - DNA, 20 bp, synthetic construct
  source 1..20: mol_type = other DNA
ttccagagtccgtctgcatg

SEQ ID NO: 20782 - DNA, 20 bp, synthetic construct
  source 1..20: mol_type = other DNA
acaccaggagtacctctttg

SEQ ID NO: 20783 - DNA, 20 bp, synthetic construct
  source 1..20: mol_type = other DNA
actgaatctgctggatgctg

SEQ ID NO: 20784 - DNA, 20 bp, synthetic construct
  source 1..20: mol_type = other DNA
ccatcaccagtaccttctgc

SEQ ID NO: 20785 - DNA, 20 bp, synthetic construct
  source 1..20: mol_type = other DNA
tccctcacctgcacctcgcg

SEQ ID NO: 20786 - DNA, 20 bp, synthetic construct
  source 1..20: mol_type = other DNA
ctatgggactgaggagtacc

SEQ ID NO: 20787 - DNA, 20 bp, synthetic construct
  source 1..20: mol_type = other DNA
tccaggatgttggccaggat

SEQ ID NO: 20788 - DNA, 20 bp, synthetic construct
  source 1..20: mol_type = other DNA
cacgtaagtgggggcgaggg

SEQ ID NO: 20789 - DNA, 20 bp, synthetic construct
  source 1..20: mol_type = other DNA
gccctatgggtgggacagag

SEQ ID NO: 20790 - DNA, 20 bp, synthetic construct
  source 1..20: mol_type = other DNA
tggccggcatgaaccacctg

SEQ ID NO: 20791 - DNA, 20 bp, synthetic construct
  source 1..20: mol_type = other DNA
tcacacacggcaagaggatg

SEQ ID NO: 20792 - DNA, 20 bp, synthetic construct
  source 1..20: mol_type = other DNA
atctgctggatgctgtgggc

SEQ ID NO: 20793 - DNA, 20 bp, synthetic construct
  source 1..20: mol_type = other DNA
ctcccgcaggtggttcatgc

SEQ ID NO: 20794 - DNA, 20 bp, synthetic construct
  source 1..20: mol_type = other DNA
tgatggagtactgctccagt

SEQ ID NO: 20795 - DNA, 20 bp, synthetic construct
  source 1..20: mol_type = other DNA
cacagatgacctgctggggc

SEQ ID NO: 20796 - DNA, 20 bp, synthetic construct
  source 1..20: mol_type = other DNA
cctggccaacatcctggagg

SEQ ID NO: 20797 - DNA, 20 bp, synthetic construct
  source 1..20: mol_type = other DNA
ccatgtcttctccctgtccc

SEQ ID NO: 20798 - DNA, 20 bp, synthetic construct
  source 1..20: mol_type = other DNA
agaagcaggtcctttcgtgt

SEQ ID NO: 20799 - DNA, 20 bp, synthetic construct
  source 1..20: mol_type = other DNA
ctcactcacagtccgcagcc

SEQ ID NO: 20800 - DNA, 20 bp, synthetic construct
  source 1..20: mol_type = other DNA
ccggatcaccacggagaagc

SEQ ID NO: 20801 - DNA, 20 bp, synthetic construct
  source 1..20: mol_type = other DNA
gcaggctgccagtggctgca

SEQ ID NO: 20802 - DNA, 20 bp, synthetic construct
  source 1..20: mol_type = other DNA
gtgcccagaggcgggagaac

SEQ ID NO: 20803 - DNA, 20 bp, synthetic construct
  source 1..20: mol_type = other DNA
cggatttctgccattgggga

SEQ ID NO: 20804 - DNA, 20 bp, synthetic construct
  source 1..20: mol_type = other DNA
tgcatcgcgacatcaagccg

SEQ ID NO: 20805 - DNA, 20 bp, synthetic construct
  source 1..20: mol_type = other DNA
gtgacagctggcaggtgatg

SEQ ID NO: 20806 - DNA, 20 bp, synthetic construct
  source 1..20: mol_type = other DNA
tcccgacatgtatgagcggg

SEQ ID NO: 20807 - DNA, 20 bp, synthetic construct
  source 1..20: mol_type = other DNA
tgcccttcatcccctttggt

SEQ ID NO: 20808 - DNA, 20 bp, synthetic construct
  source 1..20: mol_type = other DNA
gtgatggagtactgctccag

SEQ ID NO: 20809 - DNA, 20 bp, synthetic construct
  source 1..20: mol_type = other DNA
gtgcatcgcgacatcaagcc

SEQ ID NO: 20810 - DNA, 20 bp, synthetic construct
  source 1..20: mol_type = other DNA
ctgcatctcctgccctgagc

SEQ ID NO: 20811 - DNA, 20 bp, synthetic construct
  source 1..20: mol_type = other DNA
cactgtgagtgggaccctgc

SEQ ID NO: 20812 - DNA, 20 bp, synthetic construct
  source 1..20: mol_type = other DNA
gggactgaggagtacctggt

SEQ ID NO: 20813 - DNA, 20 bp, synthetic construct
  source 1..20: mol_type = other DNA
ctccaggatgttggccagga

SEQ ID NO: 20814 - DNA, 20 bp, synthetic construct
  source 1..20: mol_type = other DNA
agcatcccgacatgtatgag

SEQ ID NO: 20815 - DNA, 20 bp, synthetic construct
  source 1..20: mol_type = other DNA
aaggaatgccaggctctgga

SEQ ID NO: 20816 - DNA, 20 bp, synthetic construct
  source 1..20: mol_type = other DNA
gctcactcaccaggggcggg

SEQ ID NO: 20817 - DNA, 20 bp, synthetic construct
  source 1..20: mol_type = other DNA
gcagcagcagcacagcgtgc

SEQ ID NO: 20818 - DNA, 20 bp, synthetic construct
  source 1..20: mol_type = other DNA
ggggcctgatactggcactt

SEQ ID NO: 20819 - DNA, 20 bp, synthetic construct
  source 1..20: mol_type = other DNA
ggaactccttctcctccctc

SEQ ID NO: 20820 - DNA, 20 bp, synthetic construct
  source 1..20: mol_type = other DNA
ccgccttgtagatatccgcc

SEQ ID NO: 20821 - DNA, 20 bp, synthetic construct
  source 1..20: mol_type = other DNA
gtccttgctcggggagctgc

SEQ ID NO: 20822 - DNA, 20 bp, synthetic construct
  source 1..20: mol_type = other DNA
ccaggtgacgtccttgctcg

SEQ ID NO: 20823 - DNA, 20 bp, synthetic construct
  source 1..20: mol_type = other DNA
ctcacctgggccttcagcac

SEQ ID NO: 20824 - DNA, 20 bp, synthetic construct
  source 1..20: mol_type = other DNA
tctgcagggtgtccatatca

SEQ ID NO: 20825 - DNA, 20 bp, synthetic construct
  source 1..20: mol_type = other DNA
ggggagaggagaggtaggct

SEQ ID NO: 20826 - DNA, 20 bp, synthetic construct
  source 1..20: mol_type = other DNA
gcctggcaaatccaacagaa

SEQ ID NO: 20827 - DNA, 20 bp, synthetic construct
  source 1..20: mol_type = other DNA
aagcgagtgagtgcgaccac

SEQ ID NO: 20828 - DNA, 20 bp, synthetic construct
  source 1..20: mol_type = other DNA
gtggaccagctgcgcatgca

SEQ ID NO: 20829 - DNA, 20 bp, synthetic construct
  source 1..20: mol_type = other DNA
cactaaggaatgccaggctc

SEQ ID NO: 20830 - DNA, 20 bp, synthetic construct
  source 1..20: mol_type = other DNA
gaaggagcaggctctgcggg

SEQ ID NO: 20831 - DNA, 20 bp, synthetic construct
  source 1..20: mol_type = other DNA
ctcaccgaccctccagagcc

SEQ ID NO: 20832 - DNA, 20 bp, synthetic construct
  source 1..20: mol_type = other DNA
tgtcgtattcttggaagagc

SEQ ID NO: 20833 - DNA, 20 bp, synthetic construct
  source 1..20: mol_type = other DNA
ctgcaggagctccttcttct

SEQ ID NO: 20834 - DNA, 20 bp, synthetic construct
  source 1..20: mol_type = other DNA
gaaggccagctgtcaggagt

SEQ ID NO: 20835 - DNA, 20 bp, synthetic construct
  source 1..20: mol_type = other DNA
ttgggacagcagaagtcagg

SEQ ID NO: 20836 - DNA, 20 bp, synthetic construct
  source 1..20: mol_type = other DNA
gcgagtgagtgcgaccactg

SEQ ID NO: 20837 - DNA, 20 bp, synthetic construct
  source 1..20: mol_type = other DNA
ggatggcatctggtggcaga

SEQ ID NO: 20838 - DNA, 20 bp, synthetic construct
  source 1..20: mol_type = other DNA
cgaggtgaggaaagagtcag

SEQ ID NO: 20839 - DNA, 20 bp, synthetic construct
  source 1..20: mol_type = other DNA
tgtcatggagtgcattgagt

SEQ ID NO: 20840 - DNA, 20 bp, synthetic construct
  source 1..20: mol_type = other DNA
cacttgggacagcagaagtc

SEQ ID NO: 20841 - DNA, 20 bp, synthetic construct
  source 1..20: mol_type = other DNA
tgcatttccaagccagccag

SEQ ID NO: 20842 - DNA, 20 bp, synthetic construct
  source 1..20: mol_type = other DNA
aactaaggcccagagaagtg

SEQ ID NO: 20843 - DNA, 20 bp, synthetic construct
  source 1..20: mol_type = other DNA
gcagctggagagtgagcgcg

SEQ ID NO: 20844 - DNA, 20 bp, synthetic construct
  source 1..20: mol_type = other DNA
ggaggagaagtgagtcagcg

SEQ ID NO: 20845 - DNA, 20 bp, synthetic construct
  source 1..20: mol_type = other DNA
ccagcttcctcctgaggaaa

SEQ ID NO: 20846 - DNA, 20 bp, synthetic construct
  source 1..20: mol_type = other DNA
aggggcctgatactggcact

SEQ ID NO: 20847 - DNA, 20 bp, synthetic construct
  source 1..20: mol_type = other DNA
caccctgcagatacatgtca

SEQ ID NO: 20848 - DNA, 20 bp, synthetic construct
  source 1..20: mol_type = other DNA
gaggaagctggcccagttgc

SEQ ID NO: 20849 - DNA, 20 bp, synthetic construct
  source 1..20: mol_type = other DNA
catgaggaagcggcatgtcg

SEQ ID NO: 20850 - DNA, 20 bp, synthetic construct
  source 1..20: mol_type = other DNA
ctgtcccaagtgccagtatc

SEQ ID NO: 20851 - DNA, 20 bp, synthetic construct
  source 1..20: mol_type = other DNA
ctgcagggtgtccatatcag

SEQ ID NO: 20852 - DNA, 20 bp, synthetic construct
  source 1..20: mol_type = other DNA
gactcacttctcctccgagg

SEQ ID NO: 20853 - DNA, 20 bp, synthetic construct
  source 1..20: mol_type = other DNA
cggatggcatctggtggcag

SEQ ID NO: 20854 - DNA, 20 bp, synthetic construct
  source 1..20: mol_type = other DNA
cgagcagcacaagattgtga

SEQ ID NO: 20855 - DNA, 20 bp, synthetic construct
  source 1..20: mol_type = other DNA
gccagcttcctcctgaggaa

SEQ ID NO: 20856 - DNA, 20 bp, synthetic construct
  source 1..20: mol_type = other DNA
actccatgacatgtatctgc

SEQ ID NO: 20857 - DNA, 20 bp, synthetic construct
  source 1..20: mol_type = other DNA
cagagcctggcattccttag

SEQ ID NO: 20858 - DNA, 20 bp, synthetic construct
  source 1..20: mol_type = other DNA
ttgccaggcggatatctaca

SEQ ID NO: 20859 - DNA, 20 bp, synthetic construct
  source 1..20: mol_type = other DNA
ccaccagtttcctggcctcc

SEQ ID NO: 20860 - DNA, 20 bp, synthetic construct
  source 1..20: mol_type = other DNA
actgggccagcttcctcctg

SEQ ID NO: 20861 - DNA, 20 bp, synthetic construct
  source 1..20: mol_type = other DNA
ggagctcttgattctcctcc

SEQ ID NO: 20862 - DNA, 20 bp, synthetic construct
  source 1..20: mol_type = other DNA
ggcagagcaaccagattctg

SEQ ID NO: 20863 - DNA, 20 bp, synthetic construct
  source 1..20: mol_type = other DNA
cccaggtgacgtccttgctc

SEQ ID NO: 20864 - DNA, 20 bp, synthetic construct
  source 1..20: mol_type = other DNA
caggtagtcggggcagggcc

SEQ ID NO: 20865 - DNA, 20 bp, synthetic construct
  source 1..20: mol_type = other DNA
ggacttccaggctgagaggc

SEQ ID NO: 20866 - DNA, 20 bp, synthetic construct
  source 1..20: mol_type = other DNA
gaagctggcccagttgcagg

SEQ ID NO: 20867 - DNA, 20 bp, synthetic construct
  source 1..20: mol_type = other DNA
gagatgccagcaggtagtcg

SEQ ID NO: 20868 - DNA, 20 bp, synthetic construct
  source 1..20: mol_type = other DNA
ccaggaggccaggaaactgg

SEQ ID NO: 20869 - DNA, 20 bp, synthetic construct
  source 1..20: mol_type = other DNA
cccgagcaaggacgtcacct

SEQ ID NO: 20870 - DNA, 20 bp, synthetic construct
  source 1..20: mol_type = other DNA
ccagctgtcaggagtcggcc

SEQ ID NO: 20871 - DNA, 20 bp, synthetic construct
  source 1..20: mol_type = other DNA
tcttcagatcgagcttctcc

SEQ ID NO: 20872 - DNA, 20 bp, synthetic construct
  source 1..20: mol_type = other DNA
gagggagtacagcaaactga

SEQ ID NO: 20873 - DNA, 20 bp, synthetic construct
  source 1..20: mol_type = other DNA
gagtagggccggccagtgca

SEQ ID NO: 20874 - DNA, 20 bp, synthetic construct
  source 1..20: mol_type = other DNA
ctacctgctggcatctcttc

SEQ ID NO: 20875 - DNA, 20 bp, synthetic construct
  source 1..20: mol_type = other DNA
gccagcaggtagtcggggca

SEQ ID NO: 20876 - DNA, 20 bp, synthetic construct
  source 1..20: mol_type = other DNA
tccaggctgagaggcaggcc

SEQ ID NO: 20877 - DNA, 20 bp, synthetic construct
  source 1..20: mol_type = other DNA
cgagaagaaggagctcctgc

SEQ ID NO: 20878 - DNA, 20 bp, synthetic construct
  source 1..20: mol_type = other DNA
acagcagctccagcaggccg

SEQ ID NO: 20879 - DNA, 20 bp, synthetic construct
  source 1..20: mol_type = other DNA
gctgctccagctgctcctgc

SEQ ID NO: 20880 - DNA, 20 bp, synthetic construct
  source 1..20: mol_type = other DNA
ggtggaccagctgcgcatgc

SEQ ID NO: 20881 - DNA, 20 bp, synthetic construct
  source 1..20: mol_type = other DNA
ggccctggtggccaaacagg

SEQ ID NO: 20882 - DNA, 20 bp, synthetic construct
  source 1..20: mol_type = other DNA
gctgtcaggagtcggccagg

SEQ ID NO: 20883 - DNA, 20 bp, synthetic construct
  source 1..20: mol_type = other DNA
gcagcagatggctgaggaca

SEQ ID NO: 20884 - DNA, 20 bp, synthetic construct
  source 1..20: mol_type = other DNA
tgccagcaggtagtcggggc

SEQ ID NO: 20885 - DNA, 20 bp, synthetic construct
  source 1..20: mol_type = other DNA
tcaccaggggcggggggcaa

SEQ ID NO: 20886 - DNA, 20 bp, synthetic construct
  source 1..20: mol_type = other DNA
ctgtcaggagtcggccaggt

SEQ ID NO: 20887 - DNA, 20 bp, synthetic construct
  source 1..20: mol_type = other DNA
ccaggcggatatctacaagg

SEQ ID NO: 20888 - DNA, 20 bp, synthetic construct
  source 1..20: mol_type = other DNA
aggcggacttccaggctgag

SEQ ID NO: 20889 - DNA, 20 bp, synthetic construct
  source 1..20: mol_type = other DNA
gcaggagagccagagtcgct

SEQ ID NO: 20890 - DNA, 20 bp, synthetic construct
  source 1..20: mol_type = other DNA
gctgactcacttctcctccg

SEQ ID NO: 20891 - DNA, 20 bp, synthetic construct
  source 1..20: mol_type = other DNA
cacatcaagagcagcgtggt

SEQ ID NO: 20892 - DNA, 20 bp, synthetic construct
  source 1..20: mol_type = other DNA
tcgctcactcaccaggggcg

SEQ ID NO: 20893 - DNA, 20 bp, synthetic construct
  source 1..20: mol_type = other DNA
tgcccccttccagaaagctc

SEQ ID NO: 20894 - DNA, 20 bp, synthetic construct
  source 1..20: mol_type = other DNA
ccccgagcaaggacgtcacc

SEQ ID NO: 20895 - DNA, 20 bp, synthetic construct
  source 1..20: mol_type = other DNA
ctcctgcagctccccgagca

SEQ ID NO: 20896 - DNA, 20 bp, synthetic construct
  source 1..20: mol_type = other DNA
caaccacatcaagagcagcg

SEQ ID NO: 20897 - DNA, 20 bp, synthetic construct
  source 1..20: mol_type = other DNA
gatcgataagctgaaggagg

SEQ ID NO: 20898 - DNA, 20 bp, synthetic construct
  source 1..20: mol_type = other DNA
atctgcagggtgtccatatc

SEQ ID NO: 20899 - DNA, 20 bp, synthetic construct
  source 1..20: mol_type = other DNA
acttctcctccgaggcggcc

SEQ ID NO: 20900 - DNA, 20 bp, synthetic construct
  source 1..20: mol_type = other DNA
cggaggagaagtgagtcagc

SEQ ID NO: 20901 - DNA, 20 bp, synthetic construct
  source 1..20: mol_type = other DNA
gcagcagcacagcgtgcagg

SEQ ID NO: 20902 - DNA, 20 bp, synthetic construct
  source 1..20: mol_type = other DNA
tatcctgcagcagatggctg

SEQ ID NO: 20903 - DNA, 20 bp, synthetic construct
  source 1..20: mol_type = other DNA
caaggcctctgtgaaagccc

SEQ ID NO: 20904 - DNA, 20 bp, synthetic construct
  source 1..20: mol_type = other DNA
gcacctgaagagatgccagc

SEQ ID NO: 20905 - DNA, 20 bp, synthetic construct
  source 1..20: mol_type = other DNA
ccagggcctcctcggcctgc

SEQ ID NO: 20906 - DNA, 20 bp, synthetic construct
  source 1..20: mol_type = other DNA
gcccaggtgacgtccttgct

SEQ ID NO: 20907 - DNA, 20 bp, synthetic construct
  source 1..20: mol_type = other DNA
ctccatgacatgtatctgca

SEQ ID NO: 20908 - DNA, 20 bp, synthetic construct
  source 1..20: mol_type = other DNA
gtcatggagtgcattgagta

SEQ ID NO: 20909 - DNA, 20 bp, synthetic construct
  source 1..20: mol_type = other DNA
ggtgatcgataagctgaagg

SEQ ID NO: 20910 - DNA, 20 bp, synthetic construct
  source 1..20: mol_type = other DNA
taaggtctcacctgaaactt

SEQ ID NO: 20911 - DNA, 20 bp, synthetic construct
  source 1..20: mol_type = other DNA
gcacatcaagctgcattccg

SEQ ID NO: 20912 - DNA, 20 bp, synthetic construct
  source 1..20: mol_type = other DNA
gcagcttgatgtgccggagc

SEQ ID NO: 20913 - DNA, 20 bp, synthetic construct
  source 1..20: mol_type = other DNA
gcatttgaagggcttctccc

SEQ ID NO: 20914 - DNA, 20 bp, synthetic construct
  source 1..20: mol_type = other DNA
gcccccgggcggttccgagg

SEQ ID NO: 20915 - DNA, 20 bp, synthetic construct
  source 1..20: mol_type = other DNA
cctcacaaatgtggatattg

SEQ ID NO: 20916 - DNA, 20 bp, synthetic construct
  source 1..20: mol_type = other DNA
ggcacatcaagctgcattcc

SEQ ID NO: 20917 - DNA, 20 bp, synthetic construct
  source 1..20: mol_type = other DNA
ctcagataacctgaggacca

SEQ ID NO: 20918 - DNA, 20 bp, synthetic construct
  source 1..20: mol_type = other DNA
gctgaaagaaacaatacagg

SEQ ID NO: 20919 - DNA, 20 bp, synthetic construct
  source 1..20: mol_type = other DNA
ggacaccgagagcaacaacg

SEQ ID NO: 20920 - DNA, 20 bp, synthetic construct
  source 1..20: mol_type = other DNA
ctggctgaaagaaacaatac

SEQ ID NO: 20921 - DNA, 20 bp, synthetic construct
  source 1..20: mol_type = other DNA
gctgcacaagccgctcgcgg

SEQ ID NO: 20922 - DNA, 20 bp, synthetic construct
  source 1..20: mol_type = other DNA
taaacagcgaagctctttag

SEQ ID NO: 20923 - DNA, 20 bp, synthetic construct
  source 1..20: mol_type = other DNA
ttacgaatgcttgatgcctc

SEQ ID NO: 20924 - DNA, 20 bp, synthetic construct
  source 1..20: mol_type = other DNA
ggctttagctcatgtggaag

SEQ ID NO: 20925 - DNA, 20 bp, synthetic construct
  source 1..20: mol_type = other DNA
acctgaggacgcactccggt

SEQ ID NO: 20926 - DNA, 20 bp, synthetic construct
  source 1..20: mol_type = other DNA
ggaagccgtggcagcccatg

SEQ ID NO: 20927 - DNA, 20 bp, synthetic construct
  source 1..20: mol_type = other DNA
cggaatgcagcttgatgtgc

SEQ ID NO: 20928 - DNA, 20 bp, synthetic construct
  source 1..20: mol_type = other DNA
gttatctgagaaagagagga

SEQ ID NO: 20929 - DNA, 20 bp, synthetic construct
  source 1..20: mol_type = other DNA
tcaggttatctgagaaagag

SEQ ID NO: 20930 - DNA, 20 bp, synthetic construct
  source 1..20: mol_type = other DNA
ccgcactgattgcactggaa

SEQ ID NO: 20931 - DNA, 20 bp, synthetic construct
  source 1..20: mol_type = other DNA
cccgctggtgcagacgcccc

SEQ ID NO: 20932 - DNA, 20 bp, synthetic construct
  source 1..20: mol_type = other DNA
ttgcagaggtggcatttgaa

SEQ ID NO: 20933 - DNA, 20 bp, synthetic construct
  source 1..20: mol_type = other DNA
ggcaggcgtagttgcagagg

SEQ ID NO: 20934 - DNA, 20 bp, synthetic construct
  source 1..20: mol_type = other DNA
gcaactacgcctgccgccgg

SEQ ID NO: 20935 - DNA, 20 bp, synthetic construct
  source 1..20: mol_type = other DNA
aggaccatggatgctgatga

SEQ ID NO: 20936 - DNA, 20 bp, synthetic construct
  source 1..20: mol_type = other DNA
gccgtggcagcccatgtgga

SEQ ID NO: 20937 - DNA, 20 bp, synthetic construct
  source 1..20: mol_type = other DNA
taccggagtgcgtcctcagg

SEQ ID NO: 20938 - DNA, 20 bp, synthetic construct
  source 1..20: mol_type = other DNA
cgaggacctctccaccacct

SEQ ID NO: 20939 - DNA, 20 bp, synthetic construct
  source 1..20: mol_type = other DNA
cactggaagggccgttctcc

SEQ ID NO: 20940 - DNA, 20 bp, synthetic construct
  source 1..20: mol_type = other DNA
gccggagcaggttgcccttc

SEQ ID NO: 20941 - DNA, 20 bp, synthetic construct
  source 1..20: mol_type = other DNA
cccttccagtgcaatcagtg

SEQ ID NO: 20942 - DNA, 20 bp, synthetic construct
  source 1..20: mol_type = other DNA
cccgcactgattgcactgga

SEQ ID NO: 20943 - DNA, 20 bp, synthetic construct
  source 1..20: mol_type = other DNA
cccagaagggcaacctgctc

SEQ ID NO: 20944 - DNA, 20 bp, synthetic construct
  source 1..20: mol_type = other DNA
cttccgggcacactgtaccc

SEQ ID NO: 20945 - DNA, 20 bp, synthetic construct
  source 1..20: mol_type = other DNA
cgcgtcctgcgagttctcgg

SEQ ID NO: 20946 - DNA, 20 bp, synthetic construct
  source 1..20: mol_type = other DNA
caaggccaagttggtgccct

SEQ ID NO: 20947 - DNA, 20 bp, synthetic construct
  source 1..20: mol_type = other DNA
cgccgcctccgagaactcgc

SEQ ID NO: 20948 - DNA, 20 bp, synthetic construct
  source 1..20: mol_type = other DNA
ccttttgagtgcaacatgtg

SEQ ID NO: 20949 - DNA, 20 bp, synthetic construct
  source 1..20: mol_type = other DNA
acgccctcactggccacctg

SEQ ID NO: 20950 - DNA, 20 bp, synthetic construct
  source 1..20: mol_type = other DNA
gttggtaaacctcacaaatg

SEQ ID NO: 20951 - DNA, 20 bp, synthetic construct
  source 1..20: mol_type = other DNA
gaggaccatggatgctgatg

SEQ ID NO: 20952 - DNA, 20 bp, synthetic construct
  source 1..20: mol_type = other DNA
actggaagggccgttctcct

SEQ ID NO: 20953 - DNA, 20 bp, synthetic construct
  source 1..20: mol_type = other DNA
tctgcaactacgcctgccgc

SEQ ID NO: 20954 - DNA, 20 bp, synthetic construct
  source 1..20: mol_type = other DNA
ccttccagtgcaatcagtgc

SEQ ID NO: 20955 - DNA, 20 bp, synthetic construct
  source 1..20: mol_type = other DNA
acgcactccggtaggtcccc

SEQ ID NO: 20956 - DNA, 20 bp, synthetic construct
  source 1..20: mol_type = other DNA
cgttctcctgggacggagag

SEQ ID NO: 20957 - DNA, 20 bp, synthetic construct
  source 1..20: mol_type = other DNA
actcagagtgatgaagagaa

SEQ ID NO: 20958 - DNA, 20 bp, synthetic construct
  source 1..20: mol_type = other DNA
cccaggtaagcgctgctgct

SEQ ID NO: 20959 - DNA, 20 bp, synthetic construct
  source 1..20: mol_type = other DNA
ccagctgcacaagccgctcg

SEQ ID NO: 20960 - DNA, 20 bp, synthetic construct
  source 1..20: mol_type = other DNA
gcgtcctcaggtggccagtg

SEQ ID NO: 20961 - DNA, 20 bp, synthetic construct
  source 1..20: mol_type = other DNA
caactacgcctgccgccgga

SEQ ID NO: 20962 - DNA, 20 bp, synthetic construct
  source 1..20: mol_type = other DNA
ctcgtcgcacataacgcgag

SEQ ID NO: 20963 - DNA, 20 bp, synthetic construct
  source 1..20: mol_type = other DNA
gaggtcctcggggatcggca

SEQ ID NO: 20964 - DNA, 20 bp, synthetic construct
  source 1..20: mol_type = other DNA
caaggcagctcggctttgtc

SEQ ID NO: 20965 - DNA, 20 bp, synthetic construct
  source 1..20: mol_type = other DNA
ccacaatatccacatttgtg

SEQ ID NO: 20966 - DNA, 20 bp, synthetic construct
  source 1..20: mol_type = other DNA
caaaagaagccacactggta

SEQ ID NO: 20967 - DNA, 20 bp, synthetic construct
  source 1..20: mol_type = other DNA
tcacactttagttttccgtt

SEQ ID NO: 20968 - DNA, 20 bp, synthetic construct
  source 1..20: mol_type = other DNA
acctaccggagtgcgtcctc

SEQ ID NO: 20969 - DNA, 20 bp, synthetic construct
  source 1..20: mol_type = other DNA
gaagccacactggtaaggcc

SEQ ID NO: 20970 - DNA, 20 bp, synthetic construct
  source 1..20: mol_type = other DNA
ggcggcaggcgtagttgcag

SEQ ID NO: 20971 - DNA, 20 bp, synthetic construct
  source 1..20: mol_type = other DNA
ggggcctcattcacccagaa

SEQ ID NO: 20972 - DNA, 20 bp, synthetic construct
  source 1..20: mol_type = other DNA
ggccacctgaggacgcactc

SEQ ID NO: 20973 - DNA, 20 bp, synthetic construct
  source 1..20: mol_type = other DNA
ctcggcccaggacagcgccg

SEQ ID NO: 20974 - DNA, 20 bp, synthetic construct
  source 1..20: mol_type = other DNA
ccgcacatgttgcactcaaa

SEQ ID NO: 20975 - DNA, 20 bp, synthetic construct
  source 1..20: mol_type = other DNA
tgtgcgacgagaactcgtac

SEQ ID NO: 20976 - DNA, 20 bp, synthetic construct
  source 1..20: mol_type = other DNA
cggggcctcattcacccaga

SEQ ID NO: 20977 - DNA, 20 bp, synthetic construct
  source 1..20: mol_type = other DNA
cggggacgcctcgcgctccg

SEQ ID NO: 20978 - DNA, 20 bp, synthetic construct
  source 1..20: mol_type = other DNA
gttcacaaaagaagccacac

SEQ ID NO: 20979 - DNA, 20 bp, synthetic construct
  source 1..20: mol_type = other DNA
acgagaactcgtaccggtcc

SEQ ID NO: 20980 - DNA, 20 bp, synthetic construct
  source 1..20: mol_type = other DNA
tgttgcactcaaaaggatca

SEQ ID NO: 20981 - DNA, 20 bp, synthetic construct
  source 1..20: mol_type = other DNA
aggccccgcactgattgcac

SEQ ID NO: 20982 - DNA, 20 bp, synthetic construct
  source 1..20: mol_type = other DNA
cgtgatccaggaagagcacc

SEQ ID NO: 20983 - DNA, 20 bp, synthetic construct
  source 1..20: mol_type = other DNA
cttccagtgcaatcagtgcg

SEQ ID NO: 20984 - DNA, 20 bp, synthetic construct
  source 1..20: mol_type = other DNA
cggcacatcaagctgcattc

SEQ ID NO: 20985 - DNA, 20 bp, synthetic construct
  source 1..20: mol_type = other DNA
gaagggccgttctcctggga

SEQ ID NO: 20986 - DNA, 20 bp, synthetic construct
  source 1..20: mol_type = other DNA
tgtacaagtgcgaacactgc

SEQ ID NO: 20987 - DNA, 20 bp, synthetic construct
  source 1..20: mol_type = other DNA
accatccacatgggctgcca

SEQ ID NO: 20988 - DNA, 20 bp, synthetic construct
  source 1..20: mol_type = other DNA
gttgcccttctgggtgaatg

SEQ ID NO: 20989 - DNA, 20 bp, synthetic construct
  source 1..20: mol_type = other DNA
actcgtaccggtcctggctg

SEQ ID NO: 20990 - DNA, 20 bp, synthetic construct
  source 1..20: mol_type = other DNA
gacctctccaccacctcggg

SEQ ID NO: 20991 - DNA, 20 bp, synthetic construct
  source 1..20: mol_type = other DNA
gaggacctctccaccacctc

SEQ ID NO: 20992 - DNA, 20 bp, synthetic construct
  source 1..20: mol_type = other DNA
ctcgcaggacgcgctccgcg

SEQ ID NO: 20993 - DNA, 20 bp, synthetic construct
  source 1..20: mol_type = other DNA
cgtcctcaggtggccagtga

SEQ ID NO: 20994 - DNA, 20 bp, synthetic construct
  source 1..20: mol_type = other DNA
gttgcagaggtggcatttga

SEQ ID NO: 20995 - DNA, 20 bp, synthetic construct
  source 1..20: mol_type = other DNA
tctcggaggcggcgcgcagc

SEQ ID NO: 20996 - DNA, 20 bp, synthetic construct
  source 1..20: mol_type = other DNA
ataaggtctcacctgaaact

SEQ ID NO: 20997 - DNA, 20 bp, synthetic construct
  source 1..20: mol_type = other DNA
ccttgtcccctgtggaaagc

SEQ ID NO: 20998 - DNA, 20 bp, synthetic construct
  source 1..20: mol_type = other DNA
gtcatgtacaccatccacat

SEQ ID NO: 20999 - DNA, 20 bp, synthetic construct
  source 1..20: mol_type = other DNA
gactaaagtcaaagacagag

SEQ ID NO: 21000 - DNA, 20 bp, synthetic construct
  source 1..20: mol_type = other DNA
cagtgagggcgtccctccgg

SEQ ID NO: 21001 - DNA, 20 bp, synthetic construct
  source 1..20: mol_type = other DNA
ccacagggaccaaggcagct

SEQ ID NO: 21002 - DNA, 20 bp, synthetic construct
  source 1..20: mol_type = other DNA
ccccgctggtgctgaccacg

SEQ ID NO: 21003 - DNA, 20 bp, synthetic construct
  source 1..20: mol_type = other DNA
ggcgtgcctgtgaaatgaat

SEQ ID NO: 21004 - DNA, 20 bp, synthetic construct
  source 1..20: mol_type = other DNA
tataagctcagcttattctc

SEQ ID NO: 21005 - DNA, 20 bp, synthetic construct
  source 1..20: mol_type = other DNA
taaggaacaagagcctatta

SEQ ID NO: 21006 - DNA, 20 bp, synthetic construct
  source 1..20: mol_type = other DNA
tttcatcacacattgttcga

SEQ ID NO: 21007 - DNA, 20 bp, synthetic construct
  source 1..20: mol_type = other DNA
gaataagctgagcttataac

SEQ ID NO: 21008 - DNA, 20 bp, synthetic construct
  source 1..20: mol_type = other DNA
cctttcgagtgtaacatgtg

SEQ ID NO: 21009 - DNA, 20 bp, synthetic construct
  source 1..20: mol_type = other DNA
tgttacactcgaaagggtca

SEQ ID NO: 21010 - DNA, 20 bp, synthetic construct
  source 1..20: mol_type = other DNA
ttgtatatctgaaaagaaag

SEQ ID NO: 21011 - DNA, 20 bp, synthetic construct
  source 1..20: mol_type = other DNA
ccattccagtgtaatcagtg

SEQ ID NO: 21012 - DNA, 20 bp, synthetic construct
  source 1..20: mol_type = other DNA
cactcccatcacagtagccc

SEQ ID NO: 21013 - DNA, 20 bp, synthetic construct
  source 1..20: mol_type = other DNA
cgagagtggtgagcctgtga

SEQ ID NO: 21014 - DNA, 20 bp, synthetic construct
  source 1..20: mol_type = other DNA
actatccacatgggctgcca

SEQ ID NO: 21015 - DNA, 20 bp, synthetic construct
  source 1..20: mol_type = other DNA
gagatgagtccccgctacct

SEQ ID NO: 21016 - DNA, 20 bp, synthetic construct
  source 1..20: mol_type = other DNA
tctcctagccgctcactcag

SEQ ID NO: 21017 - DNA, 20 bp, synthetic construct
  source 1..20: mol_type = other DNA
cggatgcccccaggggagtg

SEQ ID NO: 21018 - DNA, 20 bp, synthetic construct
  source 1..20: mol_type = other DNA
tctcttcccacattgtccgg

SEQ ID NO: 21019 - DNA, 20 bp, synthetic construct
  source 1..20: mol_type = other DNA
gggtgtggaacgcttgcgtt

SEQ ID NO: 21020 - DNA, 20 bp, synthetic construct
  source 1..20: mol_type = other DNA
caaagtacatatcacagtgc

SEQ ID NO: 21021 - DNA, 20 bp, synthetic construct
  source 1..20: mol_type = other DNA
tctgatgtgttcaataagcc

SEQ ID NO: 21022 - DNA, 20 bp, synthetic construct
  source 1..20: mol_type = other DNA
gtcctggaccggcagggctg

SEQ ID NO: 21023 - DNA, 20 bp, synthetic construct
  source 1..20: mol_type = other DNA
tggtaccaattaaaggtact

SEQ ID NO: 21024 - DNA, 20 bp, synthetic construct
  source 1..20: mol_type = other DNA
gaacataattcacatttgta

SEQ ID NO: 21025 - DNA, 20 bp, synthetic construct
  source 1..20: mol_type = other DNA
gtagcaggtgagtggggcac

SEQ ID NO: 21026 - DNA, 20 bp, synthetic construct
  source 1..20: mol_type = other DNA
tcctgcctcgtcacaacaac

SEQ ID NO: 21027 - DNA, 20 bp, synthetic construct
  source 1..20: mol_type = other DNA
cccttacctgcctggcagcc

SEQ ID NO: 21028 - DNA, 20 bp, synthetic construct
  source 1..20: mol_type = other DNA
ttttcaaatacagacagaaa

SEQ ID NO: 21029 - DNA, 20 bp, synthetic construct
  source 1..20: mol_type = other DNA
ttctactcttcctcctgtag

SEQ ID NO: 21030 - DNA, 20 bp, synthetic construct
  source 1..20: mol_type = other DNA
cctggctgccaggcaggtaa

SEQ ID NO: 21031 - DNA, 20 bp, synthetic construct
  source 1..20: mol_type = other DNA
ttgaactgtgaatgcaagag

SEQ ID NO: 21032 - DNA, 20 bp, synthetic construct
  source 1..20: mol_type = other DNA
catatttacaacagagtacc

SEQ ID NO: 21033 - DNA, 20 bp, synthetic construct
  source 1..20: mol_type = other DNA
aacctgaagaacagaaagaa

SEQ ID NO: 21034 - DNA, 20 bp, synthetic construct
  source 1..20: mol_type = other DNA
tgaggcttctcttcacctgg

SEQ ID NO: 21035 - DNA, 20 bp, synthetic construct
  source 1..20: mol_type = other DNA
gacagaaatggctgcaacca

SEQ ID NO: 21036 - DNA, 20 bp, synthetic construct
  source 1..20: mol_type = other DNA
agagagaatttatcatttcg

SEQ ID NO: 21037 - DNA, 20 bp, synthetic construct
  source 1..20: mol_type = other DNA
ggttccttccttgtaggcca

SEQ ID NO: 21038 - DNA, 20 bp, synthetic construct
  source 1..20: mol_type = other DNA
ggtttccgcagaataaaaag

SEQ ID NO: 21039 - DNA, 20 bp, synthetic construct
  source 1..20: mol_type = other DNA
tcactctatatgctctgtac

SEQ ID NO: 21040 - DNA, 20 bp, synthetic construct
  source 1..20: mol_type = other DNA
tctgtggcttcattttccca

SEQ ID NO: 21041 - DNA, 20 bp, synthetic construct
  source 1..20: mol_type = other DNA
gaatccatcttcctgaccct

SEQ ID NO: 21042 - DNA, 20 bp, synthetic construct
  source 1..20: mol_type = other DNA
aatgtggcgtgtgggatctc

SEQ ID NO: 21043 - DNA, 20 bp, synthetic construct
  source 1..20: mol_type = other DNA
aaagccatggcctacaagga

SEQ ID NO: 21044 - DNA, 20 bp, synthetic construct
  source 1..20: mol_type = other DNA
ggcagcggagacagtaagtg

SEQ ID NO: 21045 - DNA, 20 bp, synthetic construct
  source 1..20: mol_type = other DNA
gaaatgataaattctctctg

SEQ ID NO: 21046 - DNA, 20 bp, synthetic construct
  source 1..20: mol_type = other DNA
gtggcttcattttcccatgg

SEQ ID NO: 21047 - DNA, 20 bp, synthetic construct
  source 1..20: mol_type = other DNA
gggactgctcacgttcatca

SEQ ID NO: 21048 - DNA, 20 bp, synthetic construct
  source 1..20: mol_type = other DNA
tcagtgcgtccagggataca

SEQ ID NO: 21049 - DNA, 20 bp, synthetic construct
  source 1..20: mol_type = other DNA
gaatttatcatttcgtggtg

SEQ ID NO: 21050 - DNA, 20 bp, synthetic construct
  source 1..20: mol_type = other DNA
tgtgtagagccctgtatccc

SEQ ID NO: 21051 - DNA, 20 bp, synthetic construct
  source 1..20: mol_type = other DNA
aagcctcaggcaagccccga

SEQ ID NO: 21052 - DNA, 20 bp, synthetic construct
  source 1..20: mol_type = other DNA
caccctacctggaaactgac

SEQ ID NO: 21053 - DNA, 20 bp, synthetic construct
  source 1..20: mol_type = other DNA
acctgttgttgtgacgaggc

SEQ ID NO: 21054 - DNA, 20 bp, synthetic construct
  source 1..20: mol_type = other DNA
tcacctgtgcatatgagctg

SEQ ID NO: 21055 - DNA, 20 bp, synthetic construct
  source 1..20: mol_type = other DNA
tttcacctgtgcatatgagc

SEQ ID NO: 21056 - DNA, 20 bp, synthetic construct
  source 1..20: mol_type = other DNA
atcagtgcgtccagggatac

SEQ ID NO: 21057 - DNA, 20 bp, synthetic construct
  source 1..20: mol_type = other DNA
ctgaggcttctcttcacctg

SEQ ID NO: 21058 - DNA, 20 bp, synthetic construct
  source 1..20: mol_type = other DNA
gagtggctagaaaatataga

SEQ ID NO: 21059 - DNA, 20 bp, synthetic construct
  source 1..20: mol_type = other DNA
aaatgacccacgggaagaca

SEQ ID NO: 21060 - DNA, 20 bp, synthetic construct
  source 1..20: mol_type = other DNA
gaaactctagccactcgtcc

SEQ ID NO: 21061 - DNA, 20 bp, synthetic construct
  source 1..20: mol_type = other DNA
agaccagtcagtttccaggt

SEQ ID NO: 21062 - DNA, 20 bp, synthetic construct
  source 1..20: mol_type = other DNA
gatcagcaggaaaacacagc

SEQ ID NO: 21063 - DNA, 20 bp, synthetic construct
  source 1..20: mol_type = other DNA
cactctcaggacggccttcg

SEQ ID NO: 21064 - DNA, 20 bp, synthetic construct
  source 1..20: mol_type = other DNA
cacttactgtctccgctgcc

SEQ ID NO: 21065 - DNA, 20 bp, synthetic construct
  source 1..20: mol_type = other DNA
atggctttgaatgtggcgtg

SEQ ID NO: 21066 - DNA, 20 bp, synthetic construct
  source 1..20: mol_type = other DNA
agtaccaggtagcaggtgag

SEQ ID NO: 21067 - DNA, 20 bp, synthetic construct
  source 1..20: mol_type = other DNA
gctcatatgcacaggtgaaa

SEQ ID NO: 21068 - DNA, 20 bp, synthetic construct
  source 1..20: mol_type = other DNA
tcagcgtcctcctcctgagt

SEQ ID NO: 21069 - DNA, 20 bp, synthetic construct
  source 1..20: mol_type = other DNA
caatgtcaatgcacaagctc

SEQ ID NO: 21070 - DNA, 20 bp, synthetic construct
  source 1..20: mol_type = other DNA
tggattcatacctgctgatg

SEQ ID NO: 21071 - DNA, 20 bp, synthetic construct
  source 1..20: mol_type = other DNA
aggtgagcccactcaggagg

SEQ ID NO: 21072 - DNA, 20 bp, synthetic construct
  source 1..20: mol_type = other DNA
ggaggaggacgctgatcagc

SEQ ID NO: 21073 - DNA, 20 bp, synthetic construct
  source 1..20: mol_type = other DNA
acacgccacattcaaagcca

SEQ ID NO: 21074 - DNA, 20 bp, synthetic construct
  source 1..20: mol_type = other DNA
cctcgtcacaacaacaggtg

SEQ ID NO: 21075 - DNA, 20 bp, synthetic construct
  source 1..20: mol_type = other DNA
gtgacccgctttttattctg

SEQ ID NO: 21076 - DNA, 20 bp, synthetic construct
  source 1..20: mol_type = other DNA
caggtagggtggctcccttc

SEQ ID NO: 21077 - DNA, 20 bp, synthetic construct
  source 1..20: mol_type = other DNA
ttcacctgtgcatatgagct

SEQ ID NO: 21078 - DNA, 20 bp, synthetic construct
  source 1..20: mol_type = other DNA
gggtccaccttgtcttcccg

SEQ ID NO: 21079 - DNA, 20 bp, synthetic construct
  source 1..20: mol_type = other DNA
ggtccaccttgtcttcccgt

SEQ ID NO: 21080 - DNA, 20 bp, synthetic construct
  source 1..20: mol_type = other DNA
aatccatcttcctgaccctt

SEQ ID NO: 21081 - DNA, 20 bp, synthetic construct
  source 1..20: mol_type = other DNA
gccaggcaggtaagggcctg

SEQ ID NO: 21082 - DNA, 20 bp, synthetic construct
  source 1..20: mol_type = other DNA
ctgtgcatatgagctggggc

SEQ ID NO: 21083 - DNA, 20 bp, synthetic construct
  source 1..20: mol_type = other DNA
cggccactgtcaatagagag

SEQ ID NO: 21084 - DNA, 20 bp, synthetic construct
  source 1..20: mol_type = other DNA
agcgtctgcaaaatgaccca

SEQ ID NO: 21085 - DNA, 20 bp, synthetic construct
  source 1..20: mol_type = other DNA
ccaggcaggtaagggcctgt

SEQ ID NO: 21086 - DNA, 20 bp, synthetic construct
  source 1..20: mol_type = other DNA
gcttggtccactggctgcat

SEQ ID NO: 21087 - DNA, 20 bp, synthetic construct
  source 1..20: mol_type = other DNA
tgccccactcacctgctacc

SEQ ID NO: 21088 - DNA, 20 bp, synthetic construct
  source 1..20: mol_type = other DNA
ggtttattatcagtgcgtcc

SEQ ID NO: 21089 - DNA, 20 bp, synthetic construct
  source 1..20: mol_type = other DNA
tggcgtgtgggatctctggc

SEQ ID NO: 21090 - DNA, 20 bp, synthetic construct
  source 1..20: mol_type = other DNA
gtggcgtgtgggatctctgg

SEQ ID NO: 21091 - DNA, 20 bp, synthetic construct
  source 1..20: mol_type = other DNA
gtttccgcagaataaaaagc

SEQ ID NO: 21092 - DNA, 20 bp, synthetic construct
  source 1..20: mol_type = other DNA
cctgaggcttctcttcacct

SEQ ID NO: 21093 - DNA, 20 bp, synthetic construct
  source 1..20: mol_type = other DNA
cagagcttgtgcattgacat

SEQ ID NO: 21094 - DNA, 20 bp, synthetic construct
  source 1..20: mol_type = other DNA
acaacagagtaccaggtagc

SEQ ID NO: 21095 - DNA, 20 bp, synthetic construct
  source 1..20: mol_type = other DNA
gaccagtcagtttccaggta

SEQ ID NO: 21096 - DNA, 20 bp, synthetic construct
  source 1..20: mol_type = other DNA
cttgcattcacagttcaaca

SEQ ID NO: 21097 - DNA, 20 bp, synthetic construct
  source 1..20: mol_type = other DNA
gtttattatcagtgcgtcca

SEQ ID NO: 21098 - DNA, 20 bp, synthetic construct
  source 1..20: mol_type = other DNA
ggattcatacctgctgatgt

SEQ ID NO: 21099 - DNA, 20 bp, synthetic construct
  source 1..20: mol_type = other DNA
tgtgcatatgagctggggct

SEQ ID NO: 21100 - DNA, 20 bp, synthetic construct
  source 1..20: mol_type = other DNA
gtggaccaagcgagccttcc

SEQ ID NO: 21101 - DNA, 20 bp, synthetic construct
  source 1..20: mol_type = other DNA
ctcacgttcatcatggtgcc

SEQ ID NO: 21102 - DNA, 20 bp, synthetic construct
  source 1..20: mol_type = other DNA
ggatacagggctctacacag

SEQ ID NO: 21103 - DNA, 20 bp, synthetic construct
  source 1..20: mol_type = other DNA
gccaggtgagcccactcagg

SEQ ID NO: 21104 - DNA, 20 bp, synthetic construct
  source 1..20: mol_type = other DNA
gattcatacctgctgatgtg

SEQ ID NO: 21105 - DNA, 20 bp, synthetic construct
  source 1..20: mol_type = other DNA
ctcgtcacaacaacaggtgc

SEQ ID NO: 21106 - DNA, 20 bp, synthetic construct
  source 1..20: mol_type = other DNA
atggagaccagtcagtttcc

SEQ ID NO: 21107 - DNA, 20 bp, synthetic construct
  source 1..20: mol_type = other DNA
agaatttatcatttcgtggt

SEQ ID NO: 21108 - DNA, 20 bp, synthetic construct
  source 1..20: mol_type = other DNA
aggaagtctcactctcagga

SEQ ID NO: 21109 - DNA, 20 bp, synthetic construct
  source 1..20: mol_type = other DNA
gcttcattttcccatggtgg

SEQ ID NO: 21110 - DNA, 20 bp, synthetic construct
  source 1..20: mol_type = other DNA
gcattgacattggttgtccc

SEQ ID NO: 21111 - DNA, 20 bp, synthetic construct
  source 1..20: mol_type = other DNA
tggctttgaatgtggcgtgt

SEQ ID NO: 21112 - DNA, 20 bp, synthetic construct
  source 1..20: mol_type = other DNA
caacatggttccttccttgt

SEQ ID NO: 21113 - DNA, 20 bp, synthetic construct
  source 1..20: mol_type = other DNA
tctttctgttcttcaggttg

SEQ ID NO: 21114 - DNA, 20 bp, synthetic construct
  source 1..20: mol_type = other DNA
gcctggctgccaggcaggta

SEQ ID NO: 21115 - DNA, 20 bp, synthetic construct
  source 1..20: mol_type = other DNA
gctgccaggtgagcccactc

SEQ ID NO: 21116 - DNA, 20 bp, synthetic construct
  source 1..20: mol_type = other DNA
tgagcagtccccacatcagc

SEQ ID NO: 21117 - DNA, 20 bp, synthetic construct
  source 1..20: mol_type = other DNA
taccaggtagcaggtgagtg

SEQ ID NO: 21118 - DNA, 20 bp, synthetic construct
  source 1..20: mol_type = other DNA
cccaggtgaagagaagcctc

SEQ ID NO: 21119 - DNA, 20 bp, synthetic construct
  source 1..20: mol_type = other DNA
gtaccaggtagcaggtgagt

SEQ ID NO: 21120 - DNA, 20 bp, synthetic construct
  source 1..20: mol_type = other DNA
gtaggccatggctttgaatg

SEQ ID NO: 21121 - DNA, 20 bp, synthetic construct
  source 1..20: mol_type = other DNA
actgcagggaacctccacca

SEQ ID NO: 21122 - DNA, 20 bp, synthetic construct
  source 1..20: mol_type = other DNA
ggaaggctcgcttggtccac

SEQ ID NO: 21123 - DNA, 20 bp, synthetic construct
  source 1..20: mol_type = other DNA
attttgcagacgctctcagc

SEQ ID NO: 21124 - DNA, 20 bp, synthetic construct
  source 1..20: mol_type = other DNA
ggccactgtcaatagagaga

SEQ ID NO: 21125 - DNA, 20 bp, synthetic construct
  source 1..20: mol_type = other DNA
cagtaagtgtggcatcacca

SEQ ID NO: 21126 - DNA, 20 bp, synthetic construct
  source 1..20: mol_type = other DNA
gcaaagtccaatgcagccag

SEQ ID NO: 21127 - DNA, 20 bp, synthetic construct
  source 1..20: mol_type = other DNA
aaactctagccactcgtcct

SEQ ID NO: 21128 - DNA, 20 bp, synthetic construct
  source 1..20: mol_type = other DNA
atcagcgtcctcctcctgag

SEQ ID NO: 21129 - DNA, 20 bp, synthetic construct
  source 1..20: mol_type = other DNA
gcgtctgcaaaatgacccac

SEQ ID NO: 21130 - DNA, 20 bp, synthetic construct
  source 1..20: mol_type = other DNA
ccgcacctgttgttgtgacg

SEQ ID NO: 21131 - DNA, 20 bp, synthetic construct
  source 1..20: mol_type = other DNA
gcagtgacctggaagatgga

SEQ ID NO: 21132 - DNA, 20 bp, synthetic construct
  source 1..20: mol_type = other DNA
tcatttcgtggtggggcaga

SEQ ID NO: 21133 - DNA, 20 bp, synthetic construct
  source 1..20: mol_type = other DNA
attggttgtcccaggacgag

SEQ ID NO: 21134 - DNA, 20 bp, synthetic construct
  source 1..20: mol_type = other DNA
gagaatttatcatttcgtgg

SEQ ID NO: 21135 - DNA, 20 bp, synthetic construct
  source 1..20: mol_type = other DNA
gcctgaggcttctcttcacc

SEQ ID NO: 21136 - DNA, 20 bp, synthetic construct
  source 1..20: mol_type = other DNA
cagccccagctcatatgcac

SEQ ID NO: 21137 - DNA, 20 bp, synthetic construct
  source 1..20: mol_type = other DNA
cagtcagtttccaggtaggg

SEQ ID NO: 21138 - DNA, 20 bp, synthetic construct
  source 1..20: mol_type = other DNA
ccctgcagtgacctggaaga

SEQ ID NO: 21139 - DNA, 20 bp, synthetic construct
  source 1..20: mol_type = other DNA
ggaggttccctgcagtgacc

SEQ ID NO: 21140 - DNA, 20 bp, synthetic construct
  source 1..20: mol_type = other DNA
ctgcagggaacctccaccat

SEQ ID NO: 21141 - DNA, 20 bp, synthetic construct
  source 1..20: mol_type = other DNA
cccagtatgagtttcaggtg

SEQ ID NO: 21142 - DNA, 20 bp, synthetic construct
  source 1..20: mol_type = other DNA
ggcgaactggagacaacagg

SEQ ID NO: 21143 - DNA, 20 bp, synthetic construct
  source 1..20: mol_type = other DNA
ctcacggcacagcaccctca

SEQ ID NO: 21144 - DNA, 20 bp, synthetic construct
  source 1..20: mol_type = other DNA
tgcatctgtgggtctccacg

SEQ ID NO: 21145 - DNA, 20 bp, synthetic construct
  source 1..20: mol_type = other DNA
gtggcgagatctcaggtgcc

SEQ ID NO: 21146 - DNA, 20 bp, synthetic construct
  source 1..20: mol_type = other DNA
gcgaagagagccacttctgg

SEQ ID NO: 21147 - DNA, 20 bp, synthetic construct
  source 1..20: mol_type = other DNA
aggccaggggctggctccag

SEQ ID NO: 21148 - DNA, 20 bp, synthetic construct
  source 1..20: mol_type = other DNA
gcaggtactggtgggcggca

SEQ ID NO: 21149 - DNA, 20 bp, synthetic construct
  source 1..20: mol_type = other DNA
gaaaagaacttcgaggggtc

SEQ ID NO: 21150 - DNA, 20 bp, synthetic construct
  source 1..20: mol_type = other DNA
actggagacaacagggggta

SEQ ID NO: 21151 - DNA, 20 bp, synthetic construct
  source 1..20: mol_type = other DNA
tgtagacagatggccagggt

SEQ ID NO: 21152 - DNA, 20 bp, synthetic construct
  source 1..20: mol_type = other DNA
ccaggtgtctttcaaagtag

SEQ ID NO: 21153 - DNA, 20 bp, synthetic construct
  source 1..20: mol_type = other DNA
ccctttgagaaccgtgagtg

SEQ ID NO: 21154 - DNA, 20 bp, synthetic construct
  source 1..20: mol_type = other DNA
agttgtagaagcatgtgaac

SEQ ID NO: 21155 - DNA, 20 bp, synthetic construct
  source 1..20: mol_type = other DNA
acgaggaggtggccgagcca

SEQ ID NO: 21156 - DNA, 20 bp, synthetic construct
  source 1..20: mol_type = other DNA
gttgtagaagcatgtgaact

SEQ ID NO: 21157 - DNA, 20 bp, synthetic construct
  source 1..20: mol_type = other DNA
gtgtggccggggcacccaca

SEQ ID NO: 21158 - DNA, 20 bp, synthetic construct
  source 1..20: mol_type = other DNA
agatgcccaagaggtagcca

SEQ ID NO: 21159 - DNA, 20 bp, synthetic construct
  source 1..20: mol_type = other DNA
tccctctccagcacttctag

SEQ ID NO: 21160 - DNA, 20 bp, synthetic construct
  source 1..20: mol_type = other DNA
tctgcttgagagtcagcagg

SEQ ID NO: 21161 - DNA, 20 bp, synthetic construct
  source 1..20: mol_type = other DNA
ctgagactgcaagggaagga

SEQ ID NO: 21162 - DNA, 20 bp, synthetic construct
  source 1..20: mol_type = other DNA
gtggcctggggacagcgtcc

SEQ ID NO: 21163 - DNA, 20 bp, synthetic construct
  source 1..20: mol_type = other DNA
cagctgagctcagagcatgg

SEQ ID NO: 21164 - DNA, 20 bp, synthetic construct
  source 1..20: mol_type = other DNA
tgaagcagctggtcagcgag

SEQ ID NO: 21165 - DNA, 20 bp, synthetic construct
  source 1..20: mol_type = other DNA
caacccctgcagcctctgtc

SEQ ID NO: 21166 - DNA, 20 bp, synthetic construct
  source 1..20: mol_type = other DNA
ccctcatcgtccttcagccc

SEQ ID NO: 21167 - DNA, 20 bp, synthetic construct
  source 1..20: mol_type = other DNA
tcccagctgagctcagagca

SEQ ID NO: 21168 - DNA, 20 bp, synthetic construct
  source 1..20: mol_type = other DNA
ctggagacaacagggggtag

SEQ ID NO: 21169 - DNA, 20 bp, synthetic construct
  source 1..20: mol_type = other DNA
tctgtctacaccaagtgagt

SEQ ID NO: 21170 - DNA, 20 bp, synthetic construct
  source 1..20: mol_type = other DNA
ccctccatcgcaccccctca

SEQ ID NO: 21171 - DNA, 20 bp, synthetic construct
  source 1..20: mol_type = other DNA
ctgatcaactgcaggaacac

SEQ ID NO: 21172 - DNA, 20 bp, synthetic construct
  source 1..20: mol_type = other DNA
ctggcaggcctctatctcca

SEQ ID NO: 21173 - DNA, 20 bp, synthetic construct
  source 1..20: mol_type = other DNA
agatgtgagtagcccaccca

SEQ ID NO: 21174 - DNA, 20 bp, synthetic construct
  source 1..20: mol_type = other DNA
agcctgcaggtactggtggg

SEQ ID NO: 21175 - DNA, 20 bp, synthetic construct
  source 1..20: mol_type = other DNA
ttacttcttcttccacctcc

SEQ ID NO: 21176 - DNA, 20 bp, synthetic construct
  source 1..20: mol_type = other DNA
aagtaggcatcagtgttcag

SEQ ID NO: 21177 - DNA, 20 bp, synthetic construct
  source 1..20: mol_type = other DNA
agccacttctggtgggagaa

SEQ ID NO: 21178 - DNA, 20 bp, synthetic construct
  source 1..20: mol_type = other DNA
acttctagtggcgagatctc

SEQ ID NO: 21179 - DNA, 20 bp, synthetic construct
  source 1..20: mol_type = other DNA
tgtccggccaggcatggact

SEQ ID NO: 21180 - DNA, 20 bp, synthetic construct
  source 1..20: mol_type = other DNA
ttggtgtagacagatggcca

SEQ ID NO: 21181 - DNA, 20 bp, synthetic construct
  source 1..20: mol_type = other DNA
aggcgaactggagacaacag

SEQ ID NO: 21182 - DNA, 20 bp, synthetic construct
  source 1..20: mol_type = other DNA
gaggtggccgagccacggaa

SEQ ID NO: 21183 - DNA, 20 bp, synthetic construct
  source 1..20: mol_type = other DNA
cggccaggcatggacttggc

SEQ ID NO: 21184 - DNA, 20 bp, synthetic construct
  source 1..20: mol_type = other DNA
aactggagacaacagggggt

SEQ ID NO: 21185 - DNA, 20 bp, synthetic construct
  source 1..20: mol_type = other DNA
cctgcagcctctgtcagggg

SEQ ID NO: 21186 - DNA, 20 bp, synthetic construct
  source 1..20: mol_type = other DNA
ggtggaagaagaagtaaccc

SEQ ID NO: 21187 - DNA, 20 bp, synthetic construct
  source 1..20: mol_type = other DNA
ccagcttatgttgcatctgt

SEQ ID NO: 21188 - DNA, 20 bp, synthetic construct
  source 1..20: mol_type = other DNA
aaagggcttgaagtcctgga

SEQ ID NO: 21189 - DNA, 20 bp, synthetic construct
  source 1..20: mol_type = other DNA
accctggttggtgaagcagc

SEQ ID NO: 21190 - DNA, 20 bp, synthetic construct
  source 1..20: mol_type = other DNA
gggccgccattacatccaca

SEQ ID NO: 21191 - DNA, 20 bp, synthetic construct
  source 1..20: mol_type = other DNA
gtaagtaaagtacacctggc

SEQ ID NO: 21192 - DNA, 20 bp, synthetic construct
  source 1..20: mol_type = other DNA
gagttcttggagggacaagt

SEQ ID NO: 21193 - DNA, 20 bp, synthetic construct
  source 1..20: mol_type = other DNA
ccactactttgaaagacacc

SEQ ID NO: 21194 - DNA, 20 bp, synthetic construct
  source 1..20: mol_type = other DNA
cccagcttatgttgcatctg

SEQ ID NO: 21195 - DNA, 20 bp, synthetic construct
  source 1..20: mol_type = other DNA
caagtaggcatcagtgttca

SEQ ID NO: 21196 - DNA, 20 bp, synthetic construct
  source 1..20: mol_type = other DNA
tgcaaggcgagttcacgacc

SEQ ID NO: 21197 - DNA, 20 bp, synthetic construct
  source 1..20: mol_type = other DNA
cagttgacatcgtcaccctg

SEQ ID NO: 21198 - DNA, 20 bp, synthetic construct
  source 1..20: mol_type = other DNA
ccccgctgaggcccacgagg

SEQ ID NO: 21199 - DNA, 20 bp, synthetic construct
  source 1..20: mol_type = other DNA
ggtcagtttctgagactgca

SEQ ID NO: 21200 - DNA, 20 bp, synthetic construct
  source 1..20: mol_type = other DNA
gcctctatctccaaggcatc

SEQ ID NO: 21201 - DNA, 20 bp, synthetic construct
  source 1..20: mol_type = other DNA
cggggagcagctcacaggtt

SEQ ID NO: 21202 - DNA, 20 bp, synthetic construct
  source 1..20: mol_type = other DNA
ggggccgccattacatccac

SEQ ID NO: 21203 - DNA, 20 bp, synthetic construct
  source 1..20: mol_type = other DNA
cttgtccctccaagaactcc

SEQ ID NO: 21204 - DNA, 20 bp, synthetic construct
  source 1..20: mol_type = other DNA
cccaggatgcttgactcacg

SEQ ID NO: 21205 - DNA, 20 bp, synthetic construct
  source 1..20: mol_type = other DNA
tactcacatctggggctccg

SEQ ID NO: 21206 - DNA, 20 bp, synthetic construct
  source 1..20: mol_type = other DNA
cggacagacggtgagtccac

SEQ ID NO: 21207 - DNA, 20 bp, synthetic construct
  source 1..20: mol_type = other DNA
gtcagtttctgagactgcaa

SEQ ID NO: 21208 - DNA, 20 bp, synthetic construct
  source 1..20: mol_type = other DNA
ggcccaggatgcttgactca

SEQ ID NO: 21209 - DNA, 20 bp, synthetic construct
  source 1..20: mol_type = other DNA
catctggggctccgaggatc

SEQ ID NO: 21210 - DNA, 20 bp, synthetic construct
  source 1..20: mol_type = other DNA
cagggtgacgatgtcaactg

SEQ ID NO: 21211 - DNA, 20 bp, synthetic construct
  source 1..20: mol_type = other DNA
ggctccgaggatcaggttgc

SEQ ID NO: 21212 - DNA, 20 bp, synthetic construct
  source 1..20: mol_type = other DNA
caaagcctgcaggtactggt

SEQ ID NO: 21213 - DNA, 20 bp, synthetic construct
  source 1..20: mol_type = other DNA
aagccccgctgaggcccacg

SEQ ID NO: 21214 - DNA, 20 bp, synthetic construct
  source 1..20: mol_type = other DNA
gctccagacacaggagatgt

SEQ ID NO: 21215 - DNA, 20 bp, synthetic construct
  source 1..20: mol_type = other DNA
gatctcgccactagaagtgc

SEQ ID NO: 21216 - DNA, 20 bp, synthetic construct
  source 1..20: mol_type = other DNA
gtgaactgggaagtgcctgc

SEQ ID NO: 21217 - DNA, 20 bp, synthetic construct
  source 1..20: mol_type = other DNA
gcccaggatgcttgactcac

SEQ ID NO: 21218 - DNA, 20 bp, synthetic construct
  source 1..20: mol_type = other DNA
cgtgagtgaggaagccaggg

SEQ ID NO: 21219 - DNA, 20 bp, synthetic construct
  source 1..20: mol_type = other DNA
ccgccattacatccacaggg

SEQ ID NO: 21220 - DNA, 20 bp, synthetic construct
  source 1..20: mol_type = other DNA
acctgcaggctttgtcctga

SEQ ID NO: 21221 - DNA, 20 bp, synthetic construct
  source 1..20: mol_type = other DNA
ctgtctacaccaagtgagtt

SEQ ID NO: 21222 - DNA, 20 bp, synthetic construct
  source 1..20: mol_type = other DNA
tctgagactgcaagggaagg

SEQ ID NO: 21223 - DNA, 20 bp, synthetic construct
  source 1..20: mol_type = other DNA
acccctgcagcctctgtcag

SEQ ID NO: 21224 - DNA, 20 bp, synthetic construct
  source 1..20: mol_type = other DNA
ccagtatgagtttcaggtgc

SEQ ID NO: 21225 - DNA, 20 bp, synthetic construct
  source 1..20: mol_type = other DNA
cccctgggcagcccttggga

SEQ ID NO: 21226 - DNA, 20 bp, synthetic construct
  source 1..20: mol_type = other DNA
caggcgaactggagacaaca

SEQ ID NO: 21227 - DNA, 20 bp, synthetic construct
  source 1..20: mol_type = other DNA
ctgcttgagagtcagcaggg

SEQ ID NO: 21228 - DNA, 20 bp, synthetic construct
  source 1..20: mol_type = other DNA
ctccctccaagttgtccacg

SEQ ID NO: 21229 - DNA, 20 bp, synthetic construct
  source 1..20: mol_type = other DNA
ttgggaaggacaccattccg

SEQ ID NO: 21230 - DNA, 20 bp, synthetic construct
  source 1..20: mol_type = other DNA
gaggatcaggttgcaggccc

SEQ ID NO: 21231 - DNA, 20 bp, synthetic construct
  source 1..20: mol_type = other DNA
gactcaccgtctgtccggcc

SEQ ID NO: 21232 - DNA, 20 bp, synthetic construct
  source 1..20: mol_type = other DNA
agtgcctgccgggcaagatg

SEQ ID NO: 21233 - DNA, 20 bp, synthetic construct
  source 1..20: mol_type = other DNA
aggacaaagcctgcaggtac

SEQ ID NO: 21234 - DNA, 20 bp, synthetic construct
  source 1..20: mol_type = other DNA
ggggtggctgaaaatccacc

SEQ ID NO: 21235 - DNA, 20 bp, synthetic construct
  source 1..20: mol_type = other DNA
ttgtccctccaagaactcca

SEQ ID NO: 21236 - DNA, 20 bp, synthetic construct
  source 1..20: mol_type = other DNA
cccgcacctgaaactcatac

SEQ ID NO: 21237 - DNA, 20 bp, synthetic construct
  source 1..20: mol_type = other DNA
ccgcacctgaaactcatact

SEQ ID NO: 21238 - DNA, 20 bp, synthetic construct
  source 1..20: mol_type = other DNA
gaaggccaggggctggctcc

SEQ ID NO: 21239 - DNA, 20 bp, synthetic construct
  source 1..20: mol_type = other DNA
cgctgaggcccacgaggagg

SEQ ID NO: 21240 - DNA, 20 bp, synthetic construct
  source 1..20: mol_type = other DNA
cctcactcacggttctcaaa

SEQ ID NO: 21241 - DNA, 20 bp, synthetic construct
  source 1..20: mol_type = other DNA
ctatctccaaggcatccggg

SEQ ID NO: 21242 - DNA, 20 bp, synthetic construct
  source 1..20: mol_type = other DNA
ggtcgtaagtaaagtacacc

SEQ ID NO: 21243 - DNA, 20 bp, synthetic construct
  source 1..20: mol_type = other DNA
gaagaagaagtaaccctggt

SEQ ID NO: 21244 - DNA, 20 bp, synthetic construct
  source 1..20: mol_type = other DNA
ctcacctcccaggtgtggcc

SEQ ID NO: 21245 - DNA, 20 bp, synthetic construct
  source 1..20: mol_type = other DNA
aaagaacttcgaggggtctg

SEQ ID NO: 21246 - DNA, 20 bp, synthetic construct
  source 1..20: mol_type = other DNA
ggggcaggaggaggatgagg

SEQ ID NO: 21247 - DNA, 20 bp, synthetic construct
  source 1..20: mol_type = other DNA
acaagtaggcatcagtgttc

SEQ ID NO: 21248 - DNA, 20 bp, synthetic construct
  source 1..20: mol_type = other DNA
gtgtagacagatggccaggg

SEQ ID NO: 21249 - DNA, 20 bp, synthetic construct
  source 1..20: mol_type = other DNA
acattctcacctcccaggtg

SEQ ID NO: 21250 - DNA, 20 bp, synthetic construct
  source 1..20: mol_type = other DNA
ttgtcctgaaggccaggggc

SEQ ID NO: 21251 - DNA, 20 bp, synthetic construct
  source 1..20: mol_type = other DNA
agttgacatcgtcaccctga

SEQ ID NO: 21252 - DNA, 20 bp, synthetic construct
  source 1..20: mol_type = other DNA
atagatagtggctgcacttc

SEQ ID NO: 21253 - DNA, 20 bp, synthetic construct
  source 1..20: mol_type = other DNA
gttcagccccactcccagca

SEQ ID NO: 21254 - DNA, 20 bp, synthetic construct
  source 1..20: mol_type = other DNA
aacgctacacgtttcgtgtt

SEQ ID NO: 21255 - DNA, 20 bp, synthetic construct
  source 1..20: mol_type = other DNA
cagctggactgtgagtgact

SEQ ID NO: 21256 - DNA, 20 bp, synthetic construct
  source 1..20: mol_type = other DNA
cactcagtttgtgaagtgtt

SEQ ID NO: 21257 - DNA, 20 bp, synthetic construct
  source 1..20: mol_type = other DNA
tcgagtacatgaattgcact

SEQ ID NO: 21258 - DNA, 20 bp, synthetic construct
  source 1..20: mol_type = other DNA
ctcctctaggtacaagaact

SEQ ID NO: 21259 - DNA, 20 bp, synthetic construct
  source 1..20: mol_type = other DNA
cctgtttgcattggaagccg

SEQ ID NO: 21260 - DNA, 20 bp, synthetic construct
  source 1..20: mol_type = other DNA
ttctccttgcctagtgtgga

SEQ ID NO: 21261 - DNA, 20 bp, synthetic construct
  source 1..20: mol_type = other DNA
aatcccagctagaactgaac

SEQ ID NO: 21262 - DNA, 20 bp, synthetic construct
  source 1..20: mol_type = other DNA
ctgcagttttagcatctgtg

SEQ ID NO: 21263 - DNA, 20 bp, synthetic construct
  source 1..20: mol_type = other DNA
atcctctaggttcttcaggg

SEQ ID NO: 21264 - DNA, 20 bp, synthetic construct
  source 1..20: mol_type = other DNA
gaaccactgtttggagcact

SEQ ID NO: 21265 - DNA, 20 bp, synthetic construct
  source 1..20: mol_type = other DNA
ggactgactgggaccacagc

SEQ ID NO: 21266 - DNA, 20 bp, synthetic construct
  source 1..20: mol_type = other DNA
ggagccacccaatccactgg

SEQ ID NO: 21267 - DNA, 20 bp, synthetic construct
  source 1..20: mol_type = other DNA
gcctggagtggtgtgtctaa

SEQ ID NO: 21268 - DNA, 20 bp, synthetic construct
  source 1..20: mol_type = other DNA
aaaacactgaacctctggga

SEQ ID NO: 21269 - DNA, 20 bp, synthetic construct
  source 1..20: mol_type = other DNA
cataccaataatgcagagtg

SEQ ID NO: 21270 - DNA, 20 bp, synthetic construct
  source 1..20: mol_type = other DNA
ggagctgaacaacaaatgtt

SEQ ID NO: 21271 - DNA, 20 bp, synthetic construct
  source 1..20: mol_type = other DNA
gcagagtgaggttggtaggc

SEQ ID NO: 21272 - DNA, 20 bp, synthetic construct
  source 1..20: mol_type = other DNA
gtgctcagcattggagtgaa

SEQ ID NO: 21273 - DNA, 20 bp, synthetic construct
  source 1..20: mol_type = other DNA
agccgctttaacccactctg

SEQ ID NO: 21274 - DNA, 20 bp, synthetic construct
  source 1..20: mol_type = other DNA
aacacaaaacactgaacctc

SEQ ID NO: 21275 - DNA, 20 bp, synthetic construct
  source 1..20: mol_type = other DNA
aatggagccacccaatccac

SEQ ID NO: 21276 - DNA, 20 bp, synthetic construct
  source 1..20: mol_type = other DNA
tggagcacttggtgcagtac

SEQ ID NO: 21277 - DNA, 20 bp, synthetic construct
  source 1..20: mol_type = other DNA
caaaacactgaacctctggg

SEQ ID NO: 21278 - DNA, 20 bp, synthetic construct
  source 1..20: mol_type = other DNA
ccaataatgcagagtgaggt

SEQ ID NO: 21279 - DNA, 20 bp, synthetic construct
  source 1..20: mol_type = other DNA
aagatcctctaggttcttca

SEQ ID NO: 21280 - DNA, 20 bp, synthetic construct
  source 1..20: mol_type = other DNA
tggagccacccaatccactg

SEQ ID NO: 21281 - DNA, 20 bp, synthetic construct
  source 1..20: mol_type = other DNA
aacctctgggaggggcagag

SEQ ID NO: 21282 - DNA, 20 bp, synthetic construct
  source 1..20: mol_type = other DNA
ccacggcttccaatgcaaac

SEQ ID NO: 21283 - DNA, 20 bp, synthetic construct
  source 1..20: mol_type = other DNA
tctggagcccaggggatcac

SEQ ID NO: 21284 - DNA, 20 bp, synthetic construct
  source 1..20: mol_type = other DNA
ttccacagagtgggttaaag

SEQ ID NO: 21285 - DNA, 20 bp, synthetic construct
  source 1..20: mol_type = other DNA
tgctcccccagtggattggg

SEQ ID NO: 21286 - DNA, 20 bp, synthetic construct
  source 1..20: mol_type = other DNA
agggatgtgaatggtaatga

SEQ ID NO: 21287 - DNA, 20 bp, synthetic construct
  source 1..20: mol_type = other DNA
tccaggacccacgggaaccc

SEQ ID NO: 21288 - DNA, 20 bp, synthetic construct
  source 1..20: mol_type = other DNA
taatgcagagtgaggttggt

SEQ ID NO: 21289 - DNA, 20 bp, synthetic construct
  source 1..20: mol_type = other DNA
gggcagctgcaggaataaga

SEQ ID NO: 21290 - DNA, 20 bp, synthetic construct
  source 1..20: mol_type = other DNA
cagattcttgaaccactgtt

SEQ ID NO: 21291 - DNA, 20 bp, synthetic construct
  source 1..20: mol_type = other DNA
gcttccaatgcaaacaggaa

SEQ ID NO: 21292 - DNA, 20 bp, synthetic construct
  source 1..20: mol_type = other DNA
gaagccgtggttatctctgt

SEQ ID NO: 21293 - DNA, 20 bp, synthetic construct
  source 1..20: mol_type = other DNA
tgttccagttcagttctagc

SEQ ID NO: 21294 - DNA, 20 bp, synthetic construct
  source 1..20: mol_type = other DNA
gagggagtcagtgggcatag

SEQ ID NO: 21295 - DNA, 20 bp, synthetic construct
  source 1..20: mol_type = other DNA
gttaggttctctggagccca

SEQ ID NO: 21296 - DNA, 20 bp, synthetic construct
  source 1..20: mol_type = other DNA
aaaaggaggggcccttgggg

SEQ ID NO: 21297 - DNA, 20 bp, synthetic construct
  source 1..20: mol_type = other DNA
atggagccacccaatccact

SEQ ID NO: 21298 - DNA, 20 bp, synthetic construct
  source 1..20: mol_type = other DNA
cctagaggagaaaggttgga

SEQ ID NO: 21299 - DNA, 20 bp, synthetic construct
  source 1..20: mol_type = other DNA
tggtgcagtaccggactgac

SEQ ID NO: 21300 - DNA, 20 bp, synthetic construct
  source 1..20: mol_type = other DNA
ggtgcagtaccggactgact

SEQ ID NO: 21301 - DNA, 20 bp, synthetic construct
  source 1..20: mol_type = other DNA
gttccagttcagttctagct

SEQ ID NO: 21302 - DNA, 20 bp, synthetic construct
  source 1..20: mol_type = other DNA
ccaacctcactctgcattat

SEQ ID NO: 21303 - DNA, 20 bp, synthetic construct
  source 1..20: mol_type = other DNA
ctgcattattggtatgagaa

SEQ ID NO: 21304 - DNA, 20 bp, synthetic construct
  source 1..20: mol_type = other DNA
gagtggtgtgtctaagggac

SEQ ID NO: 21305 - DNA, 20 bp, synthetic construct
  source 1..20: mol_type = other DNA
aaacactgaacctctgggag

SEQ ID NO: 21306 - DNA, 20 bp, synthetic construct
  source 1..20: mol_type = other DNA
gtcaggaagaaatctagatt

SEQ ID NO: 21307 - DNA, 20 bp, synthetic construct
  source 1..20: mol_type = other DNA
ctcccagcaggggcagctgc

SEQ ID NO: 21308 - DNA, 20 bp, synthetic construct
  source 1..20: mol_type = other DNA
agctgtggtcccagtcagtc

SEQ ID NO: 21309 - DNA, 20 bp, synthetic construct
  source 1..20: mol_type = other DNA
ttctcaccgaaaagttcccg

SEQ ID NO: 21310 - DNA, 20 bp, synthetic construct
  source 1..20: mol_type = other DNA
tctgtggaagtgctcagcat

SEQ ID NO: 21311 - DNA, 20 bp, synthetic construct
  source 1..20: mol_type = other DNA
ggcctggagtggtgtgtcta

SEQ ID NO: 21312 - DNA, 20 bp, synthetic construct
  source 1..20: mol_type = other DNA
agctggactgtgagtgacta

SEQ ID NO: 21313 - DNA, 20 bp, synthetic construct
  source 1..20: mol_type = other DNA
agtcactcacagtccagctg

SEQ ID NO: 21314 - DNA, 20 bp, synthetic construct
  source 1..20: mol_type = other DNA
agagtgaggttggtaggctg

SEQ ID NO: 21315 - DNA, 20 bp, synthetic construct
  source 1..20: mol_type = other DNA
ggagccaacagagataacca

SEQ ID NO: 21316 - DNA, 20 bp, synthetic construct
  source 1..20: mol_type = other DNA
gcaccaagtgctccaaacag

SEQ ID NO: 21317 - DNA, 20 bp, synthetic construct
  source 1..20: mol_type = other DNA
aggaataagagggatgtgaa

SEQ ID NO: 21318 - DNA, 20 bp, synthetic construct
  source 1..20: mol_type = other DNA
tcccaccctgaagaacctag

SEQ ID NO: 21319 - DNA, 20 bp, synthetic construct
  source 1..20: mol_type = other DNA
ggggcagctgcaggaataag

SEQ ID NO: 21320 - DNA, 20 bp, synthetic construct
  source 1..20: mol_type = other DNA
ggtcaggaagaaatctagat

SEQ ID NO: 21321 - DNA, 20 bp, synthetic construct
  source 1..20: mol_type = other DNA
gcctgtctcctgggttcccg

SEQ ID NO: 21322 - DNA, 20 bp, synthetic construct
  source 1..20: mol_type = other DNA
gcagctgcccctgctgggag

SEQ ID NO: 21323 - DNA, 20 bp, synthetic construct
  source 1..20: mol_type = other DNA
tcctgggttcccgtgggtcc

SEQ ID NO: 21324 - DNA, 20 bp, synthetic construct
  source 1..20: mol_type = other DNA
gcctaaagacagatatgtcc

SEQ ID NO: 21325 - DNA, 20 bp, synthetic construct
  source 1..20: mol_type = other DNA
attgttccttgaggagaaag

SEQ ID NO: 21326 - DNA, 20 bp, synthetic construct
  source 1..20: mol_type = other DNA
cagagtgaggttggtaggct

SEQ ID NO: 21327 - DNA, 20 bp, synthetic construct
  source 1..20: mol_type = other DNA
tcctctaggttcttcagggt

SEQ ID NO: 21328 - DNA, 20 bp, synthetic construct
  source 1..20: mol_type = other DNA
tgttaggttctctggagccc

SEQ ID NO: 21329 - DNA, 20 bp, synthetic construct
  source 1..20: mol_type = other DNA
ttcttcttgatttgatccca

SEQ ID NO: 21330 - DNA, 20 bp, synthetic construct
  source 1..20: mol_type = other DNA
actttctccttccaaatcaa

SEQ ID NO: 21331 - DNA, 20 bp, synthetic construct
  source 1..20: mol_type = other DNA
agcattgccagctcctcccc

SEQ ID NO: 21332 - DNA, 20 bp, synthetic construct
  source 1..20: mol_type = other DNA
acctctgtactgatggaggt

SEQ ID NO: 21333 - DNA, 20 bp, synthetic construct
  source 1..20: mol_type = other DNA
cacttcgactgaggaggagc

SEQ ID NO: 21334 - DNA, 20 bp, synthetic construct
  source 1..20: mol_type = other DNA
ctcccctggacatgagagag

SEQ ID NO: 21335 - DNA, 20 bp, synthetic construct
  source 1..20: mol_type = other DNA
gcacctacggtgaggcgccc

SEQ ID NO: 21336 - DNA, 20 bp, synthetic construct
  source 1..20: mol_type = other DNA
tgccgatcacgtaaatgtca

SEQ ID NO: 21337 - DNA, 20 bp, synthetic construct
  source 1..20: mol_type = other DNA
ttcacaaagtctggaaggaa

SEQ ID NO: 21338 - DNA, 20 bp, synthetic construct
  source 1..20: mol_type = other DNA
tggggatcttaactaccgtg

SEQ ID NO: 21339 - DNA, 20 bp, synthetic construct
  source 1..20: mol_type = other DNA
cagtacagatgtggctgatc

SEQ ID NO: 21340 - DNA, 20 bp, synthetic construct
  source 1..20: mol_type = other DNA
caggacgtgatcttcttggg

SEQ ID NO: 21341 - DNA, 20 bp, synthetic construct
  source 1..20: mol_type = other DNA
cttatggtgagttcaaacac

SEQ ID NO: 21342 - DNA, 20 bp, synthetic construct
  source 1..20: mol_type = other DNA
agggaacaagggagccgtgg

SEQ ID NO: 21343 - DNA, 20 bp, synthetic construct
  source 1..20: mol_type = other DNA
acaggcattgcaaacacact

SEQ ID NO: 21344 - DNA, 20 bp, synthetic construct
  source 1..20: mol_type = other DNA
ccagaggactcggtcacacc

SEQ ID NO: 21345 - DNA, 20 bp, synthetic construct
  source 1..20: mol_type = other DNA
ctgttggaggacaaaaaggc

SEQ ID NO: 21346 - DNA, 20 bp, synthetic construct
  source 1..20: mol_type = other DNA
aggacgtgatcttcttggga

SEQ ID NO: 21347 - DNA, 20 bp, synthetic construct
  source 1..20: mol_type = other DNA
gacatgatcaccatcttcat

SEQ ID NO: 21348 - DNA, 20 bp, synthetic construct
  source 1..20: mol_type = other DNA
tacaccaagcagaaagcgac

SEQ ID NO: 21349 - DNA, 20 bp, synthetic construct
  source 1..20: mol_type = other DNA
caggaggctgatcgcggcga

SEQ ID NO: 21350 - DNA, 20 bp, synthetic construct
  source 1..20: mol_type = other DNA
gccactccttctcactcagg

SEQ ID NO: 21351 - DNA, 20 bp, synthetic construct
  source 1..20: mol_type = other DNA
gtcttatcccctggtgcacg

SEQ ID NO: 21352 - DNA, 20 bp, synthetic construct
  source 1..20: mol_type = other DNA
agccactccttctcactcag

SEQ ID NO: 21353 - DNA, 20 bp, synthetic construct
  source 1..20: mol_type = other DNA
ctgatccggttctcgtgctc

SEQ ID NO: 21354 - DNA, 20 bp, synthetic construct
  source 1..20: mol_type = other DNA
gcagctggtcgtgggacagg

SEQ ID NO: 21355 - DNA, 20 bp, synthetic construct
  source 1..20: mol_type = other DNA
tggactcgctggcacgcacg

SEQ ID NO: 21356 - DNA, 20 bp, synthetic construct
  source 1..20: mol_type = other DNA
gcacgcagagcgcgtatgcc

SEQ ID NO: 21357 - DNA, 20 bp, synthetic construct
  source 1..20: mol_type = other DNA
ccaagcctgagcacgagaac

SEQ ID NO: 21358 - DNA, 20 bp, synthetic construct
  source 1..20: mol_type = other DNA
cagccactccttctcactca

SEQ ID NO: 21359 - DNA, 20 bp, synthetic construct
  source 1..20: mol_type = other DNA
ggcctgtcaactccccatgg

SEQ ID NO: 21360 - DNA, 20 bp, synthetic construct
  source 1..20: mol_type = other DNA
gcagctcctccgccttggag

SEQ ID NO: 21361 - DNA, 20 bp, synthetic construct
  source 1..20: mol_type = other DNA
aggcggaggagctgctttcc

SEQ ID NO: 21362 - DNA, 20 bp, synthetic construct
  source 1..20: mol_type = other DNA
ccgtcttcacaaagtctgga

SEQ ID NO: 21363 - DNA, 20 bp, synthetic construct
  source 1..20: mol_type = other DNA
gttccaggtgccgatgaaga

SEQ ID NO: 21364 - DNA, 20 bp, synthetic construct
  source 1..20: mol_type = other DNA
atggtgatcatgtcgggctc

SEQ ID NO: 21365 - DNA, 20 bp, synthetic construct
  source 1..20: mol_type = other DNA
cgctccgtcttcacaaagtc

SEQ ID NO: 21366 - DNA, 20 bp, synthetic construct
  source 1..20: mol_type = other DNA
ttccagcaggggaccatggt

SEQ ID NO: 21367 - DNA, 20 bp, synthetic construct
  source 1..20: mol_type = other DNA
acgtcctggtttctctccaa

SEQ ID NO: 21368 - DNA, 20 bp, synthetic construct
  source 1..20: mol_type = other DNA
gctggtctagcaggtactca

SEQ ID NO: 21369 - DNA, 20 bp, synthetic construct
  source 1..20: mol_type = other DNA
ctgggacttggtcttcaatg

SEQ ID NO: 21370 - DNA, 20 bp, synthetic construct
  source 1..20: mol_type = other DNA
tcacaaagtctggaaggaaa

SEQ ID NO: 21371 - DNA, 20 bp, synthetic construct
  source 1..20: mol_type = other DNA
ggcggctggccgggaggtgt

SEQ ID NO: 21372 - DNA, 20 bp, synthetic construct
  source 1..20: mol_type = other DNA
taaggtgaaggcagagtctc

SEQ ID NO: 21373 - DNA, 20 bp, synthetic construct
  source 1..20: mol_type = other DNA
catgaggttcttcaccaagc

SEQ ID NO: 21374 - DNA, 20 bp, synthetic construct
  source 1..20: mol_type = other DNA
accagctgctcacagagagg

SEQ ID NO: 21375 - DNA, 20 bp, synthetic construct
  source 1..20: mol_type = other DNA
acgaccagctgctcacagag

SEQ ID NO: 21376 - DNA, 20 bp, synthetic construct
  source 1..20: mol_type = other DNA
ctgacacaccacgtgcacca

SEQ ID NO: 21377 - DNA, 20 bp, synthetic construct
  source 1..20: mol_type = other DNA
caacatcacccgctccaagg

SEQ ID NO: 21378 - DNA, 20 bp, synthetic construct
  source 1..20: mol_type = other DNA
acggagcgtgatgaatccag

SEQ ID NO: 21379 - DNA, 20 bp, synthetic construct
  source 1..20: mol_type = other DNA
tactggagagaacagcagga

SEQ ID NO: 21380 - DNA, 20 bp, synthetic construct
  source 1..20: mol_type = other DNA
gggataagggagggccggtg

SEQ ID NO: 21381 - DNA, 20 bp, synthetic construct
  source 1..20: mol_type = other DNA
acacactgggtgagcagggc

SEQ ID NO: 21382 - DNA, 20 bp, synthetic construct
  source 1..20: mol_type = other DNA
ccagctgctcacagagagga

SEQ ID NO: 21383 - DNA, 20 bp, synthetic construct
  source 1..20: mol_type = other DNA
gttttacaagaaggaaaaca

SEQ ID NO: 21384 - DNA, 20 bp, synthetic construct
  source 1..20: mol_type = other DNA
tcctggaacaagaacatgcc

SEQ ID NO: 21385 - DNA, 20 bp, synthetic construct
  source 1..20: mol_type = other DNA
cctggaacaagaacatgccc

SEQ ID NO: 21386 - DNA, 20 bp, synthetic construct
  source 1..20: mol_type = other DNA
tctgacagcgacgaatccta

SEQ ID NO: 21387 - DNA, 20 bp, synthetic construct
  source 1..20: mol_type = other DNA
cggagcgtgatgaatccagt

SEQ ID NO: 21388 - DNA, 20 bp, synthetic construct
  source 1..20: mol_type = other DNA
cctcaaatgtggcaaagaca

SEQ ID NO: 21389 - DNA, 20 bp, synthetic construct
  source 1..20: mol_type = other DNA
gttccagcgactgcaaagca

SEQ ID NO: 21390 - DNA, 20 bp, synthetic construct
  source 1..20: mol_type = other DNA
ccaaggggcagggaaagacg

SEQ ID NO: 21391 - DNA, 20 bp, synthetic construct
  source 1..20: mol_type = other DNA
cgatcacgtaaatgtcatgg

SEQ ID NO: 21392 - DNA, 20 bp, synthetic construct
  source 1..20: mol_type = other DNA
gccgatcacgtaaatgtcat

SEQ ID NO: 21393 - DNA, 20 bp, synthetic construct
  source 1..20: mol_type = other DNA
gatgaagatggtgatcatgt

SEQ ID NO: 21394 - DNA, 20 bp, synthetic construct
  source 1..20: mol_type = other DNA
taccgttcttggagacaaac

SEQ ID NO: 21395 - DNA, 20 bp, synthetic construct
  source 1..20: mol_type = other DNA
gtgccagcgagtccatctcc

SEQ ID NO: 21396 - DNA, 20 bp, synthetic construct
  source 1..20: mol_type = other DNA
acaccaagcagaaagcgaca

SEQ ID NO: 21397 - DNA, 20 bp, synthetic construct
  source 1..20: mol_type = other DNA
tgcggatgttccagagcgtg

SEQ ID NO: 21398 - DNA, 20 bp, synthetic construct
  source 1..20: mol_type = other DNA
ccctcgcctgcagggaaagt

SEQ ID NO: 21399 - DNA, 20 bp, synthetic construct
  source 1..20: mol_type = other DNA
gacaggcattgcaaacacac

SEQ ID NO: 21400 - DNA, 20 bp, synthetic construct
  source 1..20: mol_type = other DNA
ccaggggataagacttccag

SEQ ID NO: 21401 - DNA, 20 bp, synthetic construct
  source 1..20: mol_type = other DNA
aaggtgaaggcagagtctct

SEQ ID NO: 21402 - DNA, 20 bp, synthetic construct
  source 1..20: mol_type = other DNA
accgtgtggatctgcctacc

SEQ ID NO: 21403 - DNA, 20 bp, synthetic construct
  source 1..20: mol_type = other DNA
gtcactcgtcatgatgtcgc

SEQ ID NO: 21404 - DNA, 20 bp, synthetic construct
  source 1..20: mol_type = other DNA
tcccagtttgtctccaagaa

SEQ ID NO: 21405 - DNA, 20 bp, synthetic construct
  source 1..20: mol_type = other DNA
ctcccaagaagatcacgtcc

SEQ ID NO: 21406 - DNA, 20 bp, synthetic construct
  source 1..20: mol_type = other DNA
cgtcctggtttctctccaag

SEQ ID NO: 21407 - DNA, 20 bp, synthetic construct
  source 1..20: mol_type = other DNA
gcaataccctgtgccgctgg

SEQ ID NO: 21408 - DNA, 20 bp, synthetic construct
  source 1..20: mol_type = other DNA
ccttggctgtcaacagtccc

SEQ ID NO: 21409 - DNA, 20 bp, synthetic construct
  source 1..20: mol_type = other DNA
gctgttgacgaaccctaagg

SEQ ID NO: 21410 - DNA, 20 bp, synthetic construct
  source 1..20: mol_type = other DNA
tctgcagcttgatctccccc

SEQ ID NO: 21411 - DNA, 20 bp, synthetic construct
  source 1..20: mol_type = other DNA
cacgcagagcgcgtatgccc

SEQ ID NO: 21412 - DNA, 20 bp, synthetic construct
  source 1..20: mol_type = other DNA
tagggaacaagggagccgtg

SEQ ID NO: 21413 - DNA, 20 bp, synthetic construct
  source 1..20: mol_type = other DNA
cagcgacgaatcctatggta

SEQ ID NO: 21414 - DNA, 20 bp, synthetic construct
  source 1..20: mol_type = other DNA
ccccatgacatttacgtgat

SEQ ID NO: 21415 - DNA, 20 bp, synthetic construct
  source 1..20: mol_type = other DNA
cccactgcttcatggggtcg

SEQ ID NO: 21416 - DNA, 20 bp, synthetic construct
  source 1..20: mol_type = other DNA
agtcagtctctcaaaacggt

SEQ ID NO: 21417 - DNA, 20 bp, synthetic construct
  source 1..20: mol_type = other DNA
gcaaacacactgggtgagca

SEQ ID NO: 21418 - DNA, 20 bp, synthetic construct
  source 1..20: mol_type = other DNA
tgagcagctggtcgtgggac

SEQ ID NO: 21419 - DNA, 20 bp, synthetic construct
  source 1..20: mol_type = other DNA
aagacgagggagaagctcta

SEQ ID NO: 21420 - DNA, 20 bp, synthetic construct
  source 1..20: mol_type = other DNA
cagaaggtcttcctacactt

SEQ ID NO: 21421 - DNA, 20 bp, synthetic construct
  source 1..20: mol_type = other DNA
tgcccgggagatggactcgc

SEQ ID NO: 21422 - DNA, 20 bp, synthetic construct
  source 1..20: mol_type = other DNA
catctgcaaatcaaagtcat

SEQ ID NO: 21423 - DNA, 20 bp, synthetic construct
  source 1..20: mol_type = other DNA
tcacgttgtcagtacagatg

SEQ ID NO: 21424 - DNA, 20 bp, synthetic construct
  source 1..20: mol_type = other DNA
gctctggaacatccgcatcg

SEQ ID NO: 21425 - DNA, 20 bp, synthetic construct
  source 1..20: mol_type = other DNA
agcgacgaatcctatggtaa

SEQ ID NO: 21426 - DNA, 20 bp, synthetic construct
  source 1..20: mol_type = other DNA
tctccaagaacggtaagcaa

SEQ ID NO: 21427 - DNA, 20 bp, synthetic construct
  source 1..20: mol_type = other DNA
tactctccaagcagctcgag

SEQ ID NO: 21428 - DNA, 20 bp, synthetic construct
  source 1..20: mol_type = other DNA
gagctccttgcagagcagtg

SEQ ID NO: 21429 - DNA, 20 bp, synthetic construct
  source 1..20: mol_type = other DNA
ccagccactccttctcactc

SEQ ID NO: 21430 - DNA, 20 bp, synthetic construct
  source 1..20: mol_type = other DNA
gagcgcgtatgcccgggaga

SEQ ID NO: 21431 - DNA, 20 bp, synthetic construct
  source 1..20: mol_type = other DNA
gaacatgaacgacaccccca

SEQ ID NO: 21432 - DNA, 20 bp, synthetic construct
  source 1..20: mol_type = other DNA
ccaggaggctgatcgcggcg

SEQ ID NO: 21433 - DNA, 20 bp, synthetic construct
  source 1..20: mol_type = other DNA
ccgatcacgtaaatgtcatg

SEQ ID NO: 21434 - DNA, 20 bp, synthetic construct
  source 1..20: mol_type = other DNA
actcagcttcttgtcgccca

SEQ ID NO: 21435 - DNA, 20 bp, synthetic construct
  source 1..20: mol_type = other DNA
gcttggccagcaccacgatg

SEQ ID NO: 21436 - DNA, 20 bp, synthetic construct
  source 1..20: mol_type = other DNA
agtcccgggacctggaacag

SEQ ID NO: 21437 - DNA, 20 bp, synthetic construct
  source 1..20: mol_type = other DNA
gctctaggcccagtgacctg

SEQ ID NO: 21438 - DNA, 20 bp, synthetic construct
  source 1..20: mol_type = other DNA
atgctggagccactgcacgg

SEQ ID NO: 21439 - DNA, 20 bp, synthetic construct
  source 1..20: mol_type = other DNA
tttctactggagagaacagc

SEQ ID NO: 21440 - DNA, 20 bp, synthetic construct
  source 1..20: mol_type = other DNA
gcctcaaatgtggcaaagac

SEQ ID NO: 21441 - DNA, 20 bp, synthetic construct
  source 1..20: mol_type = other DNA
ctctgtgagcagctggtcgt

SEQ ID NO: 21442 - DNA, 20 bp, synthetic construct
  source 1..20: mol_type = other DNA
ggaaagcagctcctccgcct

SEQ ID NO: 21443 - DNA, 20 bp, synthetic construct
  source 1..20: mol_type = other DNA
caaaggtgactggagggata

SEQ ID NO: 21444 - DNA, 20 bp, synthetic construct
  source 1..20: mol_type = other DNA
gtcctgcctagaggccctgg

SEQ ID NO: 21445 - DNA, 20 bp, synthetic construct
  source 1..20: mol_type = other DNA
acccaccatggggagttgac

SEQ ID NO: 21446 - DNA, 20 bp, synthetic construct
  source 1..20: mol_type = other DNA
ggcttgatgggcctcttggc

SEQ ID NO: 21447 - DNA, 20 bp, synthetic construct
  source 1..20: mol_type = other DNA
ggggagctggtggtgaagtt

SEQ ID NO: 21448 - DNA, 20 bp, synthetic construct
  source 1..20: mol_type = other DNA
taagatccccaaaccagaag

SEQ ID NO: 21449 - DNA, 20 bp, synthetic construct
  source 1..20: mol_type = other DNA
tttccaggacaggcaaggac

SEQ ID NO: 21450 - DNA, 20 bp, synthetic construct
  source 1..20: mol_type = other DNA
caggaagtgaaaagaaactc

SEQ ID NO: 21451 - DNA, 20 bp, synthetic construct
  source 1..20: mol_type = other DNA
ccgcgtctttccctgcccct

SEQ ID NO: 21452 - DNA, 20 bp, synthetic construct
  source 1..20: mol_type = other DNA
tctgcaataccctgtgccgc

SEQ ID NO: 21453 - DNA, 20 bp, synthetic construct
  source 1..20: mol_type = other DNA
caagaacggtaagcaaagga

SEQ ID NO: 21454 - DNA, 20 bp, synthetic construct
  source 1..20: mol_type = other DNA
agtggcctgtcaactcccca

SEQ ID NO: 21455 - DNA, 20 bp, synthetic construct
  source 1..20: mol_type = other DNA
tgacacaccacgtgcaccag

SEQ ID NO: 21456 - DNA, 20 bp, synthetic construct
  source 1..20: mol_type = other DNA
tgtcgcccagggccaggaac

SEQ ID NO: 21457 - DNA, 20 bp, synthetic construct
  source 1..20: mol_type = other DNA
ttagggaacaagggagccgt

SEQ ID NO: 21458 - DNA, 20 bp, synthetic construct
  source 1..20: mol_type = other DNA
gaacaagcactcagagcagc

SEQ ID NO: 21459 - DNA, 20 bp, synthetic construct
  source 1..20: mol_type = other DNA
aaagacgcgggacgactctg

SEQ ID NO: 21460 - DNA, 20 bp, synthetic construct
  source 1..20: mol_type = other DNA
tttacaagaaggaaaacatg

SEQ ID NO: 21461 - DNA, 20 bp, synthetic construct
  source 1..20: mol_type = other DNA
actgatcattaagaagtcca

SEQ ID NO: 21462 - DNA, 20 bp, synthetic construct
  source 1..20: mol_type = other DNA
gtgggtgagaggcgtgtaga

SEQ ID NO: 21463 - DNA, 20 bp, synthetic construct
  source 1..20: mol_type = other DNA
aggtgaaggcagagtctctg

SEQ ID NO: 21464 - DNA, 20 bp, synthetic construct
  source 1..20: mol_type = other DNA
agaaggaagtgagggggagc

SEQ ID NO: 21465 - DNA, 20 bp, synthetic construct
  source 1..20: mol_type = other DNA
tgccagcgagtccatctccc

SEQ ID NO: 21466 - DNA, 20 bp, synthetic construct
  source 1..20: mol_type = other DNA
caccaagcagaaagcgacag

SEQ ID NO: 21467 - DNA, 20 bp, synthetic construct
  source 1..20: mol_type = other DNA
caaggggcagggaaagacgc

SEQ ID NO: 21468 - DNA, 20 bp, synthetic construct
  source 1..20: mol_type = other DNA
atcattaagaagtccaagga

SEQ ID NO: 21469 - DNA, 20 bp, synthetic construct
  source 1..20: mol_type = other DNA
gccctcgcctgcagggaaag

SEQ ID NO: 21470 - DNA, 20 bp, synthetic construct
  source 1..20: mol_type = other DNA
tccttggctgtcaacagtcc

SEQ ID NO: 21471 - DNA, 20 bp, synthetic construct
  source 1..20: mol_type = other DNA
ctttccaggacaggcaagga

SEQ ID NO: 21472 - DNA, 20 bp, synthetic construct
  source 1..20: mol_type = other DNA
gatgttccagagcgtgtgga

SEQ ID NO: 21473 - DNA, 20 bp, synthetic construct
  source 1..20: mol_type = other DNA
cgcctaatgcaaggaaaaag

SEQ ID NO: 21474 - DNA, 20 bp, synthetic construct
  source 1..20: mol_type = other DNA
agagcgtgtggatggcgacc

SEQ ID NO: 21475 - DNA, 20 bp, synthetic construct
  source 1..20: mol_type = other DNA
ccctgtgccgctggaggaag

SEQ ID NO: 21476 - DNA, 20 bp, synthetic construct
  source 1..20: mol_type = other DNA
accagaagaggtgcgtgaag

SEQ ID NO: 21477 - DNA, 20 bp, synthetic construct
  source 1..20: mol_type = other DNA
tgggtgagaggcgtgtagat

SEQ ID NO: 21478 - DNA, 20 bp, synthetic construct
  source 1..20: mol_type = other DNA
gtacatcaagacgggaaggc

SEQ ID NO: 21479 - DNA, 20 bp, synthetic construct
  source 1..20: mol_type = other DNA
tctctcctggcctcagcgac

SEQ ID NO: 21480 - DNA, 20 bp, synthetic construct
  source 1..20: mol_type = other DNA
gccccgcactgtctgtgtcc

SEQ ID NO: 21481 - DNA, 20 bp, synthetic construct
  source 1..20: mol_type = other DNA
agcctacctggcagtggaga

SEQ ID NO: 21482 - DNA, 20 bp, synthetic construct
  source 1..20: mol_type = other DNA
gcaccagtcggcgggctcca

SEQ ID NO: 21483 - DNA, 20 bp, synthetic construct
  source 1..20: mol_type = other DNA
tggcccggacacagacagtg

SEQ ID NO: 21484 - DNA, 20 bp, synthetic construct
  source 1..20: mol_type = other DNA
tctctgctgccctgcgctcc

SEQ ID NO: 21485 - DNA, 20 bp, synthetic construct
  source 1..20: mol_type = other DNA
ggccggggggccgggcccgg

SEQ ID NO: 21486 - DNA, 20 bp, synthetic construct
  source 1..20: mol_type = other DNA
acagcttcttaaaactttat

SEQ ID NO: 21487 - DNA, 20 bp, synthetic construct
  source 1..20: mol_type = other DNA
ttctgctagtcatgactgtc

SEQ ID NO: 21488 - DNA, 20 bp, synthetic construct
  source 1..20: mol_type = other DNA
ttaatctgcatctctagcca

SEQ ID NO: 21489 - DNA, 20 bp, synthetic construct
  source 1..20: mol_type = other DNA
aggagccagatcccaagacg

SEQ ID NO: 21490 - DNA, 20 bp, synthetic construct
  source 1..20: mol_type = other DNA
tccgactgctccaagagctg

SEQ ID NO: 21491 - DNA, 20 bp, synthetic construct
  source 1..20: mol_type = other DNA
ggcccagctccggaacaaac

SEQ ID NO: 21492 - DNA, 20 bp, synthetic construct
  source 1..20: mol_type = other DNA
catccgagtgatgggcatgt

SEQ ID NO: 21493 - DNA, 20 bp, synthetic construct
  source 1..20: mol_type = other DNA
gaactccctgccagatatcg

SEQ ID NO: 21494 - DNA, 20 bp, synthetic construct
  source 1..20: mol_type = other DNA
cccatgccctccacctctga

SEQ ID NO: 21495 - DNA, 20 bp, synthetic construct
  source 1..20: mol_type = other DNA
tgaggaagggaaattacctg

SEQ ID NO: 21496 - DNA, 20 bp, synthetic construct
  source 1..20: mol_type = other DNA
gtccagcccacctctgtcta

SEQ ID NO: 21497 - DNA, 20 bp, synthetic construct
  source 1..20: mol_type = other DNA
agatgatcttccagatccca

SEQ ID NO: 21498 - DNA, 20 bp, synthetic construct
  source 1..20: mol_type = other DNA
ctcatgcgcatccgagtgat

SEQ ID NO: 21499 - DNA, 20 bp, synthetic construct
  source 1..20: mol_type = other DNA
acaaggatgcctgtttgttc

SEQ ID NO: 21500 - DNA, 20 bp, synthetic construct
  source 1..20: mol_type = other DNA
cagccaacatgcccatcact

SEQ ID NO: 21501 - DNA, 20 bp, synthetic construct
  source 1..20: mol_type = other DNA
gatgagccccgggatttggt

SEQ ID NO: 21502 - DNA, 20 bp, synthetic construct
  source 1..20: mol_type = other DNA
tgcctgtttgttccggagct

SEQ ID NO: 21503 - DNA, 20 bp, synthetic construct
  source 1..20: mol_type = other DNA
gcatgctgccaagcatggct

SEQ ID NO: 21504 - DNA, 20 bp, synthetic construct
  source 1..20: mol_type = other DNA
atcctcatctgttgtagctg

SEQ ID NO: 21505 - DNA, 20 bp, synthetic construct
  source 1..20: mol_type = other DNA
attcacacaggtgtgtgcct

SEQ ID NO: 21506 - DNA, 20 bp, synthetic construct
  source 1..20: mol_type = other DNA
aaccagagaaaaggtatcca

SEQ ID NO: 21507 - DNA, 20 bp, synthetic construct
  source 1..20: mol_type = other DNA
ctggaagttgtacagatcac

SEQ ID NO: 21508 - DNA, 20 bp, synthetic construct
  source 1..20: mol_type = other DNA
ctcggatgcgcatgagaccc

SEQ ID NO: 21509 - DNA, 20 bp, synthetic construct
  source 1..20: mol_type = other DNA
catcccagtggaagttgtgc

SEQ ID NO: 21510 - DNA, 20 bp, synthetic construct
  source 1..20: mol_type = other DNA
agctacaacagatgaggatg

SEQ ID NO: 21511 - DNA, 20 bp, synthetic construct
  source 1..20: mol_type = other DNA
ctgtgtgaatggcccagctc

SEQ ID NO: 21512 - DNA, 20 bp, synthetic construct
  source 1..20: mol_type = other DNA
gccttccacgtcttgggatc

SEQ ID NO: 21513 - DNA, 20 bp, synthetic construct
  source 1..20: mol_type = other DNA
cagccgagatgctaagagca

SEQ ID NO: 21514 - DNA, 20 bp, synthetic construct
  source 1..20: mol_type = other DNA
ctccctgccagatatcgagg

SEQ ID NO: 21515 - DNA, 20 bp, synthetic construct
  source 1..20: mol_type = other DNA
tggcagccaacaaacgtgga

SEQ ID NO: 21516 - DNA, 20 bp, synthetic construct
  source 1..20: mol_type = other DNA
ccactgggatgtgccagtcg

SEQ ID NO: 21517 - DNA, 20 bp, synthetic construct
  source 1..20: mol_type = other DNA
ccgatacaaagcaggggaaa

SEQ ID NO: 21518 - DNA, 20 bp, synthetic construct
  source 1..20: mol_type = other DNA
tccagatgagccccgggatt

SEQ ID NO: 21519 - DNA, 20 bp, synthetic construct
  source 1..20: mol_type = other DNA
tccccagctcttggagcagt

SEQ ID NO: 21520 - DNA, 20 bp, synthetic construct
  source 1..20: mol_type = other DNA
gataccttttctctggttct

SEQ ID NO: 21521 - DNA, 20 bp, synthetic construct
  source 1..20: mol_type = other DNA
aggaggtgaaagaccagagc

SEQ ID NO: 21522 - DNA, 20 bp, synthetic construct
  source 1..20: mol_type = other DNA
gttcatggcacagcgaaagt

SEQ ID NO: 21523 - DNA, 20 bp, synthetic construct
  source 1..20: mol_type = other DNA
ttattaatccagatgagccc

SEQ ID NO: 21524 - DNA, 20 bp, synthetic construct
  source 1..20: mol_type = other DNA
aaagaccagagcaggaacaa

SEQ ID NO: 21525 - DNA, 20 bp, synthetic construct
  source 1..20: mol_type = other DNA
ctctaggccgatacaaagca

SEQ ID NO: 21526 - DNA, 20 bp, synthetic construct
  source 1..20: mol_type = other DNA
gcttggcagcatgcttccat

SEQ ID NO: 21527 - DNA, 20 bp, synthetic construct
  source 1..20: mol_type = other DNA
atccacagctacaacagatg

SEQ ID NO: 21528 - DNA, 20 bp, synthetic construct
  source 1..20: mol_type = other DNA
tttgtatcggcctagagggc

SEQ ID NO: 21529 - DNA, 20 bp, synthetic construct
  source 1..20: mol_type = other DNA
ggcagccaacaaacgtggat

SEQ ID NO: 21530 - DNA, 20 bp, synthetic construct
  source 1..20: mol_type = other DNA
tattaatccagatgagcccc

SEQ ID NO: 21531 - DNA, 20 bp, synthetic construct
  source 1..20: mol_type = other DNA
ctacatgcaggacttggagg

SEQ ID NO: 21532 - DNA, 20 bp, synthetic construct
  source 1..20: mol_type = other DNA
actccgactgctccaagagc

SEQ ID NO: 21533 - DNA, 20 bp, synthetic construct
  source 1..20: mol_type = other DNA
gttgatgtcccagccatgct

SEQ ID NO: 21534 - DNA, 20 bp, synthetic construct
  source 1..20: mol_type = other DNA
cctctaggccgatacaaagc

SEQ ID NO: 21535 - DNA, 20 bp, synthetic construct
  source 1..20: mol_type = other DNA
gaaagaccagagcaggaaca

SEQ ID NO: 21536 - DNA, 20 bp, synthetic construct
  source 1..20: mol_type = other DNA
cggagctgggccattcacac

SEQ ID NO: 21537 - DNA, 20 bp, synthetic construct
  source 1..20: mol_type = other DNA
ggagtggcagccaacaaacg

SEQ ID NO: 21538 - DNA, 20 bp, synthetic construct
  source 1..20: mol_type = other DNA
cagcatgcttccatgggatc

SEQ ID NO: 21539 - DNA, 20 bp, synthetic construct
  source 1..20: mol_type = other DNA
cacctcctcgatatctggca

SEQ ID NO: 21540 - DNA, 20 bp, synthetic construct
  source 1..20: mol_type = other DNA
gctcagctgtgcgagtgtac

SEQ ID NO: 21541 - DNA, 20 bp, synthetic construct
  source 1..20: mol_type = other DNA
gcaggacttggaggtggagc

SEQ ID NO: 21542 - DNA, 20 bp, synthetic construct
  source 1..20: mol_type = other DNA
tggaagcatgctgccaagca

SEQ ID NO: 21543 - DNA, 20 bp, synthetic construct
  source 1..20: mol_type = other DNA
tttaccttcatgatgtcctc

SEQ ID NO: 21544 - DNA, 20 bp, synthetic construct
  source 1..20: mol_type = other DNA
ttaattccaaccaaatcccg

SEQ ID NO: 21545 - DNA, 20 bp, synthetic construct
  source 1..20: mol_type = other DNA
tctaggccgatacaaagcag

SEQ ID NO: 21546 - DNA, 20 bp, synthetic construct
  source 1..20: mol_type = other DNA
agaaaagtggtgaggggagt

SEQ ID NO: 21547 - DNA, 20 bp, synthetic construct
  source 1..20: mol_type = other DNA
gcccaggcctggggcaacag

SEQ ID NO: 21548 - DNA, 20 bp, synthetic construct
  source 1..20: mol_type = other DNA
catccagaatgtcttcctgg

SEQ ID NO: 21549 - DNA, 20 bp, synthetic construct
  source 1..20: mol_type = other DNA
aggggaacaggacctggtcc

SEQ ID NO: 21550 - DNA, 20 bp, synthetic construct
  source 1..20: mol_type = other DNA
ggaccacgcccctctccagg

SEQ ID NO: 21551 - DNA, 20 bp, synthetic construct
  source 1..20: mol_type = other DNA
tgtcaaagagcttgcaggtc

SEQ ID NO: 21552 - DNA, 20 bp, synthetic construct
  source 1..20: mol_type = other DNA
caatcctgtacactttgtac

SEQ ID NO: 21553 - DNA, 20 bp, synthetic construct
  source 1..20: mol_type = other DNA
agtacaggcagatgtgcagc

SEQ ID NO: 21554 - DNA, 20 bp, synthetic construct
  source 1..20: mol_type = other DNA
gctgaccacgtccagccccg

SEQ ID NO: 21555 - DNA, 20 bp, synthetic construct
  source 1..20: mol_type = other DNA
gccgcgctcttcaaggtctc

SEQ ID NO: 21556 - DNA, 20 bp, synthetic construct
  source 1..20: mol_type = other DNA
agagcaggatctactgggac

SEQ ID NO: 21557 - DNA, 20 bp, synthetic construct
  source 1..20: mol_type = other DNA
ccgcatcccctggaagcacg

SEQ ID NO: 21558 - DNA, 20 bp, synthetic construct
  source 1..20: mol_type = other DNA
ccctggcgctgtgcaacgac

SEQ ID NO: 21559 - DNA, 20 bp, synthetic construct
  source 1..20: mol_type = other DNA
acgggtctgagatgtccagc

SEQ ID NO: 21560 - DNA, 20 bp, synthetic construct
  source 1..20: mol_type = other DNA
ctgaccacgtccagccccga

SEQ ID NO: 21561 - DNA, 20 bp, synthetic construct
  source 1..20: mol_type = other DNA
cagacccgtacaaagtgtac

SEQ ID NO: 21562 - DNA, 20 bp, synthetic construct
  source 1..20: mol_type = other DNA
tgggagatccggcagccctc

SEQ ID NO: 21563 - DNA, 20 bp, synthetic construct
  source 1..20: mol_type = other DNA
cgtcccggatcagccacacc

SEQ ID NO: 21564 - DNA, 20 bp, synthetic construct
  source 1..20: mol_type = other DNA
aaggcgttgtcatggtgtag

SEQ ID NO: 21565 - DNA, 20 bp, synthetic construct
  source 1..20: mol_type = other DNA
ttcccctacccagaggacaa

SEQ ID NO: 21566 - DNA, 20 bp, synthetic construct
  source 1..20: mol_type = other DNA
catacctgggctgggagcga

SEQ ID NO: 21567 - DNA, 20 bp, synthetic construct
  source 1..20: mol_type = other DNA
tcttcaaggtctccggcctc

SEQ ID NO: 21568 - DNA, 20 bp, synthetic construct
  source 1..20: mol_type = other DNA
gcttgcccgcgtgcttccag

SEQ ID NO: 21569 - DNA, 20 bp, synthetic construct
  source 1..20: mol_type = other DNA
caagcaggactacaaccgcg

SEQ ID NO: 21570 - DNA, 20 bp, synthetic construct
  source 1..20: mol_type = other DNA
gaacaagagcaatgactttg

SEQ ID NO: 21571 - DNA, 20 bp, synthetic construct
  source 1..20: mol_type = other DNA
aggagtttccagaccctcag

SEQ ID NO: 21572 - DNA, 20 bp, synthetic construct
  source 1..20: mol_type = other DNA
catagagtcacctggaatct

SEQ ID NO: 21573 - DNA, 20 bp, synthetic construct
  source 1..20: mol_type = other DNA
tgcttgcccgcgtgcttcca

SEQ ID NO: 21574 - DNA, 20 bp, synthetic construct
  source 1..20: mol_type = other DNA
gcaccgcaggcgcgtcttcc

SEQ ID NO: 21575 - DNA, 20 bp, synthetic construct
  source 1..20: mol_type = other DNA
gccttgccagtggtggccgc

SEQ ID NO: 21576 - DNA, 20 bp, synthetic construct
  source 1..20: mol_type = other DNA
ggccttgccagtggtggccg

SEQ ID NO: 21577 - DNA, 20 bp, synthetic construct
  source 1..20: mol_type = other DNA
cgttctcccacaccagcccg

SEQ ID NO: 21578 - DNA, 20 bp, synthetic construct
  source 1..20: mol_type = other DNA
ggaggacgccgcgctcttca

SEQ ID NO: 21579 - DNA, 20 bp, synthetic construct
  source 1..20: mol_type = other DNA
gtccctccagcttcggtcga

SEQ ID NO: 21580 - DNA, 20 bp, synthetic construct
  source 1..20: mol_type = other DNA
ggacatctgcgggtcctcca

SEQ ID NO: 21581 - DNA, 20 bp, synthetic construct
  source 1..20: mol_type = other DNA
tcgttctcccacaccagccc

SEQ ID NO: 21582 - DNA, 20 bp, synthetic construct
  source 1..20: mol_type = other DNA
agtgtacaggattgttcctg

SEQ ID NO: 21583 - DNA, 20 bp, synthetic construct
  source 1..20: mol_type = other DNA
cgtccagccccgagggctgc

SEQ ID NO: 21584 - DNA, 20 bp, synthetic construct
  source 1..20: mol_type = other DNA
gcaagtaccccgggctggtg

SEQ ID NO: 21585 - DNA, 20 bp, synthetic construct
  source 1..20: mol_type = other DNA
ctggaagcacgcgggcaagc

SEQ ID NO: 21586 - DNA, 20 bp, synthetic construct
  source 1..20: mol_type = other DNA
cgcatcccctggaagcacgc

SEQ ID NO: 21587 - DNA, 20 bp, synthetic construct
  source 1..20: mol_type = other DNA
acagcagttcttgtcaggta

SEQ ID NO: 21588 - DNA, 20 bp, synthetic construct
  source 1..20: mol_type = other DNA
tgggctgggagcgaagggta

SEQ ID NO: 21589 - DNA, 20 bp, synthetic construct
  source 1..20: mol_type = other DNA
ctgctaaaggagtgcaggag

SEQ ID NO: 21590 - DNA, 20 bp, synthetic construct
  source 1..20: mol_type = other DNA
ccttgccagtggtggccgcg

SEQ ID NO: 21591 - DNA, 20 bp, synthetic construct
  source 1..20: mol_type = other DNA
gggagatccggcagccctcg

SEQ ID NO: 21592 - DNA, 20 bp, synthetic construct
  source 1..20: mol_type = other DNA
ggcatgagcgcggtgagctg

SEQ ID NO: 21593 - DNA, 20 bp, synthetic construct
  source 1..20: mol_type = other DNA
ggcgcgtcttccaggtggga

SEQ ID NO: 21594 - DNA, 20 bp, synthetic construct
  source 1..20: mol_type = other DNA
ttccaggtgactctatgctt

SEQ ID NO: 21595 - DNA, 20 bp, synthetic construct
  source 1..20: mol_type = other DNA
ccccgcggccaccactggca

SEQ ID NO: 21596 - DNA, 20 bp, synthetic construct
  source 1..20: mol_type = other DNA
agagcgcggcgtcctcctcg

SEQ ID NO: 21597 - DNA, 20 bp, synthetic construct
  source 1..20: mol_type = other DNA
ccgctccctgccaagattcc

SEQ ID NO: 21598 - DNA, 20 bp, synthetic construct
  source 1..20: mol_type = other DNA
cgcaggcgcgtcttccaggt

SEQ ID NO: 21599 - DNA, 20 bp, synthetic construct
  source 1..20: mol_type = other DNA
ctgcaagcgtttgctcacca

SEQ ID NO: 21600 - DNA, 20 bp, synthetic construct
  source 1..20: mol_type = other DNA
tgccacccctcgaccgaagc

SEQ ID NO: 21601 - DNA, 20 bp, synthetic construct
  source 1..20: mol_type = other DNA
ccgcaggcgcgtcttccagg

SEQ ID NO: 21602 - DNA, 20 bp, synthetic construct
  source 1..20: mol_type = other DNA
cagagcaggatctactggga

SEQ ID NO: 21603 - DNA, 20 bp, synthetic construct
  source 1..20: mol_type = other DNA
ctctctccagtttgttgggc

SEQ ID NO: 21604 - DNA, 20 bp, synthetic construct
  source 1..20: mol_type = other DNA
gcagccctcggggctggacg

SEQ ID NO: 21605 - DNA, 20 bp, synthetic construct
  source 1..20: mol_type = other DNA
tatagttgtctggctagcag

SEQ ID NO: 21606 - DNA, 20 bp, synthetic construct
  source 1..20: mol_type = other DNA
cacccctcgaccgaagctgg

SEQ ID NO: 21607 - DNA, 20 bp, synthetic construct
  source 1..20: mol_type = other DNA
tgtgccagagcaggatctac

SEQ ID NO: 21608 - DNA, 20 bp, synthetic construct
  source 1..20: mol_type = other DNA
tcttgttcaaagcgcaccgc

SEQ ID NO: 21609 - DNA, 20 bp, synthetic construct
  source 1..20: mol_type = other DNA
acgtggtcagctccttcacg

SEQ ID NO: 21610 - DNA, 20 bp, synthetic construct
  source 1..20: mol_type = other DNA
aggcgcgtcttccaggtggg

SEQ ID NO: 21611 - DNA, 20 bp, synthetic construct
  source 1..20: mol_type = other DNA
atacctgggctgggagcgaa

SEQ ID NO: 21612 - DNA, 20 bp, synthetic construct
  source 1..20: mol_type = other DNA
ctgatcgaccagatcgacag

SEQ ID NO: 21613 - DNA, 20 bp, synthetic construct
  source 1..20: mol_type = other DNA
cagcggcaagtaccccgggc

SEQ ID NO: 21614 - DNA, 20 bp, synthetic construct
  source 1..20: mol_type = other DNA
tccttaccattttcacaagc

SEQ ID NO: 21615 - DNA, 20 bp, synthetic construct
  source 1..20: mol_type = other DNA
ctccagcttcggtcgagggg

SEQ ID NO: 21616 - DNA, 20 bp, synthetic construct
  source 1..20: mol_type = other DNA
ccttaccattttcacaagct

SEQ ID NO: 21617 - DNA, 20 bp, synthetic construct
  source 1..20: mol_type = other DNA
gtgccagagcaggatctact

SEQ ID NO: 21618 - DNA, 20 bp, synthetic construct
  source 1..20: mol_type = other DNA
tggacatctgcgggtcctcc

SEQ ID NO: 21619 - DNA, 20 bp, synthetic construct
  source 1..20: mol_type = other DNA
gtcttccaggtgggagggtc

SEQ ID NO: 21620 - DNA, 20 bp, synthetic construct
  source 1..20: mol_type = other DNA
ccacctggaagacgcgcctg

SEQ ID NO: 21621 - DNA, 20 bp, synthetic construct
  source 1..20: mol_type = other DNA
gcaggactacaaccgcgagg

SEQ ID NO: 21622 - DNA, 20 bp, synthetic construct
  source 1..20: mol_type = other DNA
taaacagtgcccaagcctgg

SEQ ID NO: 21623 - DNA, 20 bp, synthetic construct
  source 1..20: mol_type = other DNA
gacacacagcagttcttgtc

SEQ ID NO: 21624 - DNA, 20 bp, synthetic construct
  source 1..20: mol_type = other DNA
caagtaccccgggctggtgt

SEQ ID NO: 21625 - DNA, 20 bp, synthetic construct
  source 1..20: mol_type = other DNA
agcaaaataatatagttgtc

SEQ ID NO: 21626 - DNA, 20 bp, synthetic construct
  source 1..20: mol_type = other DNA
tccctccagcttcggtcgag

SEQ ID NO: 21627 - DNA, 20 bp, synthetic construct
  source 1..20: mol_type = other DNA
caggtatggtggagggcact

SEQ ID NO: 21628 - DNA, 20 bp, synthetic construct
  source 1..20: mol_type = other DNA
cccatgacgtttggaccccg

SEQ ID NO: 21629 - DNA, 20 bp, synthetic construct
  source 1..20: mol_type = other DNA
cgggagcctgggactcaggt

SEQ ID NO: 21630 - DNA, 20 bp, synthetic construct
  source 1..20: mol_type = other DNA
aaacagtgcccaagcctggt

SEQ ID NO: 21631 - DNA, 20 bp, synthetic construct
  source 1..20: mol_type = other DNA
tcgacagcggcaagtacccc

SEQ ID NO: 21632 - DNA, 20 bp, synthetic construct
  source 1..20: mol_type = other DNA
ggtgactctatgctttggag

SEQ ID NO: 21633 - DNA, 20 bp, synthetic construct
  source 1..20: mol_type = other DNA
atcgacagcggcaagtaccc

SEQ ID NO: 21634 - DNA, 20 bp, synthetic construct
  source 1..20: mol_type = other DNA
ctccaaagcatagagtcacc

SEQ ID NO: 21635 - DNA, 20 bp, synthetic construct
  source 1..20: mol_type = other DNA
tttaaaggaaagttccgaga

SEQ ID NO: 21636 - DNA, 20 bp, synthetic construct
  source 1..20: mol_type = other DNA
atgggagatccggcagccct

SEQ ID NO: 21637 - DNA, 20 bp, synthetic construct
  source 1..20: mol_type = other DNA
gtgtacaggattgttcctga

SEQ ID NO: 21638 - DNA, 20 bp, synthetic construct
  source 1..20: mol_type = other DNA
agtccctccagcttcggtcg

SEQ ID NO: 21639 - DNA, 20 bp, synthetic construct
  source 1..20: mol_type = other DNA
cgtcccagtagatcctgctc

SEQ ID NO: 21640 - DNA, 20 bp, synthetic construct
  source 1..20: mol_type = other DNA
ctaccgggaaatcctcgtga

SEQ ID NO: 21641 - DNA, 20 bp, synthetic construct
  source 1..20: mol_type = other DNA
agccaagcagctcaccctgg

SEQ ID NO: 21642 - DNA, 20 bp, synthetic construct
  source 1..20: mol_type = other DNA
gccggagaccttgaagagcg

SEQ ID NO: 21643 - DNA, 20 bp, synthetic construct
  source 1..20: mol_type = other DNA
ctggtctggcggcggctcct

SEQ ID NO: 21644 - DNA, 20 bp, synthetic construct
  source 1..20: mol_type = other DNA
catcacagtcacctctgggc

SEQ ID NO: 21645 - DNA, 20 bp, synthetic construct
  source 1..20: mol_type = other DNA
caacgacggccgctgtcacc

SEQ ID NO: 21646 - DNA, 20 bp, synthetic construct
  source 1..20: mol_type = other DNA
gcctgaaggcaaacgggggc

SEQ ID NO: 21647 - DNA, 20 bp, synthetic construct
  source 1..20: mol_type = other DNA
cgacgatggcggcgatgttg

SEQ ID NO: 21648 - DNA, 20 bp, synthetic construct
  source 1..20: mol_type = other DNA
tgggtagtcctggagagagg

SEQ ID NO: 21649 - DNA, 20 bp, synthetic construct
  source 1..20: mol_type = other DNA
ggctgacttggggatgatct

SEQ ID NO: 21650 - DNA, 20 bp, synthetic construct
  source 1..20: mol_type = other DNA
agaggactgagggacgaggc

SEQ ID NO: 21651 - DNA, 20 bp, synthetic construct
  source 1..20: mol_type = other DNA
cagcatgtcctgtggaggga

SEQ ID NO: 21652 - DNA, 20 bp, synthetic construct
  source 1..20: mol_type = other DNA
caggtgacagcggccgtcgt

SEQ ID NO: 21653 - DNA, 20 bp, synthetic construct
  source 1..20: mol_type = other DNA
agctcccccacggctgactt

SEQ ID NO: 21654 - DNA, 20 bp, synthetic construct
  source 1..20: mol_type = other DNA
gcatgtcctgtggagggaag

SEQ ID NO: 21655 - DNA, 20 bp, synthetic construct
  source 1..20: mol_type = other DNA
cagcggcctcaccgggcagg

SEQ ID NO: 21656 - DNA, 20 bp, synthetic construct
  source 1..20: mol_type = other DNA
aacctggatgcacccgaggg

SEQ ID NO: 21657 - DNA, 20 bp, synthetic construct
  source 1..20: mol_type = other DNA
ggtgacagcggccgtcgttg

SEQ ID NO: 21658 - DNA, 20 bp, synthetic construct
  source 1..20: mol_type = other DNA
ccccaccagggcgagcagtg

SEQ ID NO: 21659 - DNA, 20 bp, synthetic construct
  source 1..20: mol_type = other DNA
tacgactccttctgcagcaa

SEQ ID NO: 21660 - DNA, 20 bp, synthetic construct
  source 1..20: mol_type = other DNA
gaacttcaggcactcggcgc

SEQ ID NO: 21661 - DNA, 20 bp, synthetic construct
  source 1..20: mol_type = other DNA
cccgaagcctgcagggcaca

SEQ ID NO: 21662 - DNA, 20 bp, synthetic construct
  source 1..20: mol_type = other DNA
ccaccagggcgagcagtggg

SEQ ID NO: 21663 - DNA, 20 bp, synthetic construct
  source 1..20: mol_type = other DNA
tggcgtgcagatcaatgtcc

SEQ ID NO: 21664 - DNA, 20 bp, synthetic construct
  source 1..20: mol_type = other DNA
actcacatgtacttgccaca

SEQ ID NO: 21665 - DNA, 20 bp, synthetic construct
  source 1..20: mol_type = other DNA
tgatgacggcttccatttcg

SEQ ID NO: 21666 - DNA, 20 bp, synthetic construct
  source 1..20: mol_type = other DNA
ctcaccaatgcggccggact

SEQ ID NO: 21667 - DNA, 20 bp, synthetic construct
  source 1..20: mol_type = other DNA
gcgccagctggcccaccgat

SEQ ID NO: 21668 - DNA, 20 bp, synthetic construct
  source 1..20: mol_type = other DNA
ctccaaccagtttcagaccg

SEQ ID NO: 21669 - DNA, 20 bp, synthetic construct
  source 1..20: mol_type = other DNA
tgcaggcttcgggtccttcg

SEQ ID NO: 21670 - DNA, 20 bp, synthetic construct
  source 1..20: mol_type = other DNA
cgagggagagcagccccacc

SEQ ID NO: 21671 - DNA, 20 bp, synthetic construct
  source 1..20: mol_type = other DNA
gcccgcagaaactctcctcc

SEQ ID NO: 21672 - DNA, 20 bp, synthetic construct
  source 1..20: mol_type = other DNA
ttcttccccagtgtgagtgc

SEQ ID NO: 21673 - DNA, 20 bp, synthetic construct
  source 1..20: mol_type = other DNA
cgcatacgttgcagcggcac

SEQ ID NO: 21674 - DNA, 20 bp, synthetic construct
  source 1..20: mol_type = other DNA
acctggatgcacccgagggt

SEQ ID NO: 21675 - DNA, 20 bp, synthetic construct
  source 1..20: mol_type = other DNA
ggagtcgtaggtgactttca

SEQ ID NO: 21676 - DNA, 20 bp, synthetic construct
  source 1..20: mol_type = other DNA
attcctgaggtcatcaagca

SEQ ID NO: 21677 - DNA, 20 bp, synthetic construct
  source 1..20: mol_type = other DNA
cccaccagggcgagcagtgg

SEQ ID NO: 21678 - DNA, 20 bp, synthetic construct
  source 1..20: mol_type = other DNA
gctggaaggaagctgccgga

SEQ ID NO: 21679 - DNA, 20 bp, synthetic construct
  source 1..20: mol_type = other DNA
aggagaagctcaagtcccag

SEQ ID NO: 21680 - DNA, 20 bp, synthetic construct
  source 1..20: mol_type = other DNA
aggcccagcatgtcctgtgg

SEQ ID NO: 21681 - DNA, 20 bp, synthetic construct
  source 1..20: mol_type = other DNA
ctaccagctgcctctgtgcc

SEQ ID NO: 21682 - DNA, 20 bp, synthetic construct
  source 1..20: mol_type = other DNA
tcagatagtacaggtcgatg

SEQ ID NO: 21683 - DNA, 20 bp, synthetic construct
  source 1..20: mol_type = other DNA
caggtcgatggggtagccct

SEQ ID NO: 21684 - DNA, 20 bp, synthetic construct
  source 1..20: mol_type = other DNA
catcgacctgtactatctga

SEQ ID NO: 21685 - DNA, 20 bp, synthetic construct
  source 1..20: mol_type = other DNA
gcggtgagttctgtgttcca

SEQ ID NO: 21686 - DNA, 20 bp, synthetic construct
  source 1..20: mol_type = other DNA
cggagcagccaggagctgga

SEQ ID NO: 21687 - DNA, 20 bp, synthetic construct
  source 1..20: mol_type = other DNA
catcaagcatggagtaggag

SEQ ID NO: 21688 - DNA, 20 bp, synthetic construct
  source 1..20: mol_type = other DNA
catcagatagtacaggtcga

SEQ ID NO: 21689 - DNA, 20 bp, synthetic construct
  source 1..20: mol_type = other DNA
atcaccgagtccggccgcat

SEQ ID NO: 21690 - DNA, 20 bp, synthetic construct
  source 1..20: mol_type = other DNA
gcactcggcgcaggagctgc

SEQ ID NO: 21691 - DNA, 20 bp, synthetic construct
  source 1..20: mol_type = other DNA
tacaacggccaggtctgcgg

SEQ ID NO: 21692 - DNA, 20 bp, synthetic construct
  source 1..20: mol_type = other DNA
gctcagcgtgccagtgcgag

SEQ ID NO: 21693 - DNA, 20 bp, synthetic construct
  source 1..20: mol_type = other DNA
ggcactcgcatacgttgcag

SEQ ID NO: 21694 - DNA, 20 bp, synthetic construct
  source 1..20: mol_type = other DNA
gagccgaggtgaggccgctg

SEQ ID NO: 21695 - DNA, 20 bp, synthetic construct
  source 1..20: mol_type = other DNA
gagggagagcagccccacca

SEQ ID NO: 21696 - DNA, 20 bp, synthetic construct
  source 1..20: mol_type = other DNA
actcctggcacagaggcagc

SEQ ID NO: 21697 - DNA, 20 bp, synthetic construct
  source 1..20: mol_type = other DNA
cgatgggtagtcctggagag

SEQ ID NO: 21698 - DNA, 20 bp, synthetic construct
  source 1..20: mol_type = other DNA
agcatgtcctgtggagggaa

SEQ ID NO: 21699 - DNA, 20 bp, synthetic construct
  source 1..20: mol_type = other DNA
cttctcaggaggaaatcggc

SEQ ID NO: 21700 - DNA, 20 bp, synthetic construct
  source 1..20: mol_type = other DNA
gtgacagcggccgtcgttgg

SEQ ID NO: 21701 - DNA, 20 bp, synthetic construct
  source 1..20: mol_type = other DNA
ccactacactcaacacgccg

SEQ ID NO: 21702 - DNA, 20 bp, synthetic construct
  source 1..20: mol_type = other DNA
gactttcagggtgtcgggga

SEQ ID NO: 21703 - DNA, 20 bp, synthetic construct
  source 1..20: mol_type = other DNA
cacctggaaggtgatctgca

SEQ ID NO: 21704 - DNA, 20 bp, synthetic construct
  source 1..20: mol_type = other DNA
tcatccccaagtcagccgtg

SEQ ID NO: 21705 - DNA, 20 bp, synthetic construct
  source 1..20: mol_type = other DNA
aggagctggaaggaagctgc

SEQ ID NO: 21706 - DNA, 20 bp, synthetic construct
  source 1..20: mol_type = other DNA
cagaagcagagccccctccc

SEQ ID NO: 21707 - DNA, 20 bp, synthetic construct
  source 1..20: mol_type = other DNA
cactcacatgtacttgccac

SEQ ID NO: 21708 - DNA, 20 bp, synthetic construct
  source 1..20: mol_type = other DNA
tgggctggacgccatgatgc

SEQ ID NO: 21709 - DNA, 20 bp, synthetic construct
  source 1..20: mol_type = other DNA
aacccaggaagaccacaatg

SEQ ID NO: 21710 - DNA, 20 bp, synthetic construct
  source 1..20: mol_type = other DNA
aggtgacagcggccgtcgtt

SEQ ID NO: 21711 - DNA, 20 bp, synthetic construct
  source 1..20: mol_type = other DNA
cagcttcagcacgtgcctga

SEQ ID NO: 21712 - DNA, 20 bp, synthetic construct
  source 1..20: mol_type = other DNA
ggaaacctggatgcacccga

SEQ ID NO: 21713 - DNA, 20 bp, synthetic construct
  source 1..20: mol_type = other DNA
cccagtgtgagtgccggtgc

SEQ ID NO: 21714 - DNA, 20 bp, synthetic construct
  source 1..20: mol_type = other DNA
gtgtcgcagcgaatggagtc

SEQ ID NO: 21715 - DNA, 20 bp, synthetic construct
  source 1..20: mol_type = other DNA
gtgatccaggaagaccctgg

SEQ ID NO: 21716 - DNA, 20 bp, synthetic construct
  source 1..20: mol_type = other DNA
ctggcactctttctccttgt

SEQ ID NO: 21717 - DNA, 20 bp, synthetic construct
  source 1..20: mol_type = other DNA
ggagtacaggcgctttgaga

SEQ ID NO: 21718 - DNA, 20 bp, synthetic construct
  source 1..20: mol_type = other DNA
agaggtccatcagatagtac

SEQ ID NO: 21719 - DNA, 20 bp, synthetic construct
  source 1..20: mol_type = other DNA
ggcccagcatgtcctgtgga

SEQ ID NO: 21720 - DNA, 20 bp, synthetic construct
  source 1..20: mol_type = other DNA
gctcccccacggctgacttg

SEQ ID NO: 21721 - DNA, 20 bp, synthetic construct
  source 1..20: mol_type = other DNA
gactgagggacgaggccggc

SEQ ID NO: 21722 - DNA, 20 bp, synthetic construct
  source 1..20: mol_type = other DNA
caagtacatgtgagtgcagg

SEQ ID NO: 21723 - DNA, 20 bp, synthetic construct
  source 1..20: mol_type = other DNA
cgacggccgctgtcacctgg

SEQ ID NO: 21724 - DNA, 20 bp, synthetic construct
  source 1..20: mol_type = other DNA
ctccaggactacccatcggt

SEQ ID NO: 21725 - DNA, 20 bp, synthetic construct
  source 1..20: mol_type = other DNA
gggaagtgccgctgccaccc

SEQ ID NO: 21726 - DNA, 20 bp, synthetic construct
  source 1..20: mol_type = other DNA
tgtactcccggaggtcgctc

SEQ ID NO: 21727 - DNA, 20 bp, synthetic construct
  source 1..20: mol_type = other DNA
tgcgccagctggcccaccga

SEQ ID NO: 21728 - DNA, 20 bp, synthetic construct
  source 1..20: mol_type = other DNA
tcctgagaagaaggcgtggg

SEQ ID NO: 21729 - DNA, 20 bp, synthetic construct
  source 1..20: mol_type = other DNA
caaagcgcctgtactcccgg

SEQ ID NO: 21730 - DNA, 20 bp, synthetic construct
  source 1..20: mol_type = other DNA
acttaccagcttctggcacc

SEQ ID NO: 21731 - DNA, 20 bp, synthetic construct
  source 1..20: mol_type = other DNA
tgaaaaggggattatcctgg

SEQ ID NO: 21732 - DNA, 20 bp, synthetic construct
  source 1..20: mol_type = other DNA
ttctggcaccaggtgcagcc

SEQ ID NO: 21733 - DNA, 20 bp, synthetic construct
  source 1..20: mol_type = other DNA
tcccagtggaacaatgtaag

SEQ ID NO: 21734 - DNA, 20 bp, synthetic construct
  source 1..20: mol_type = other DNA
cgaaggacccgaagcctgca

SEQ ID NO: 21735 - DNA, 20 bp, synthetic construct
  source 1..20: mol_type = other DNA
gccccaccagggcgagcagt

SEQ ID NO: 21736 - DNA, 20 bp, synthetic construct
  source 1..20: mol_type = other DNA
agccccaccagggcgagcag

SEQ ID NO: 21737 - DNA, 20 bp, synthetic construct
  source 1..20: mol_type = other DNA
acgaaggacccgaagcctgc

SEQ ID NO: 21738 - DNA, 20 bp, synthetic construct
  source 1..20: mol_type = other DNA
ctgggcctcaccaatgcggc

SEQ ID NO: 21739 - DNA, 20 bp, synthetic construct
  source 1..20: mol_type = other DNA
cactacactcaacacgccgc

SEQ ID NO: 21740 - DNA, 20 bp, synthetic construct
  source 1..20: mol_type = other DNA
gaaaaggggattatcctggt

SEQ ID NO: 21741 - DNA, 20 bp, synthetic construct
  source 1..20: mol_type = other DNA
tttcaagagcgccaccacga

SEQ ID NO: 21742 - DNA, 20 bp, synthetic construct
  source 1..20: mol_type = other DNA
ctctctccaggactacccat

SEQ ID NO: 21743 - DNA, 20 bp, synthetic construct
  source 1..20: mol_type = other DNA
cggactcggtgatctcgttg

SEQ ID NO: 21744 - DNA, 20 bp, synthetic construct
  source 1..20: mol_type = other DNA
accagtttcagaccgaggtc

SEQ ID NO: 21745 - DNA, 20 bp, synthetic construct
  source 1..20: mol_type = other DNA
tccccagaacttcacagggc

SEQ ID NO: 21746 - DNA, 20 bp, synthetic construct
  source 1..20: mol_type = other DNA
aatgagatggaccacattgc

SEQ ID NO: 21747 - DNA, 20 bp, synthetic construct
  source 1..20: mol_type = other DNA
gattcactggtggagagtcc

SEQ ID NO: 21748 - DNA, 20 bp, synthetic construct
  source 1..20: mol_type = other DNA
gctatcaaaaccattcggga

SEQ ID NO: 21749 - DNA, 20 bp, synthetic construct
  source 1..20: mol_type = other DNA
ggatgacacatgcctcttcc

SEQ ID NO: 21750 - DNA, 20 bp, synthetic construct
  source 1..20: mol_type = other DNA
catttggtgagtgtcatgct

SEQ ID NO: 21751 - DNA, 20 bp, synthetic construct
  source 1..20: mol_type = other DNA
ctcaaacaccaggcagatgg

SEQ ID NO: 21752 - DNA, 20 bp, synthetic construct
  source 1..20: mol_type = other DNA
gggcatggcctacctggaag

SEQ ID NO: 21753 - DNA, 20 bp, synthetic construct
  source 1..20: mol_type = other DNA
caaactggtgcagctgtatg

SEQ ID NO: 21754 - DNA, 20 bp, synthetic construct
  source 1..20: mol_type = other DNA
gctccttctttgccctggaa

SEQ ID NO: 21755 - DNA, 20 bp, synthetic construct
  source 1..20: mol_type = other DNA
gcaatttgggttggtgcatc

SEQ ID NO: 21756 - DNA, 20 bp, synthetic construct
  source 1..20: mol_type = other DNA
aactatcaccaacataatgg

SEQ ID NO: 21757 - DNA, 20 bp, synthetic construct
  source 1..20: mol_type = other DNA
cgctgccggctctcacgatc

SEQ ID NO: 21758 - DNA, 20 bp, synthetic construct
  source 1..20: mol_type = other DNA
accagattatgaatcactgc

SEQ ID NO: 21759 - DNA, 20 bp, synthetic construct
  source 1..20: mol_type = other DNA
gcttacctcctccattatgt

SEQ ID NO: 21760 - DNA, 20 bp, synthetic construct
  source 1..20: mol_type = other DNA
cactgctggaaagaggtcag

SEQ ID NO: 21761 - DNA, 20 bp, synthetic construct
  source 1..20: mol_type = other DNA
tggtgatagttgatgagaag

SEQ ID NO: 21762 - DNA, 20 bp, synthetic construct
  source 1..20: mol_type = other DNA
atagttgatgagaagaggga

SEQ ID NO: 21763 - DNA, 20 bp, synthetic construct
  source 1..20: mol_type = other DNA
gatcttctggtctctggaga

SEQ ID NO: 21764 - DNA, 20 bp, synthetic construct
  source 1..20: mol_type = other DNA
tgaaggctccttctttgccc

SEQ ID NO: 21765 - DNA, 20 bp, synthetic construct
  source 1..20: mol_type = other DNA
ttcaggtaagtccatcaggt

SEQ ID NO: 21766 - DNA, 20 bp, synthetic construct
  source 1..20: mol_type = other DNA
caggttcccaaagtggtcgc

SEQ ID NO: 21767 - DNA, 20 bp, synthetic construct
  source 1..20: mol_type = other DNA
agtctcttaccattcttggt

SEQ ID NO: 21768 - DNA, 20 bp, synthetic construct
  source 1..20: mol_type = other DNA
ccgtttcaggtaagtccatc

SEQ ID NO: 21769 - DNA, 20 bp, synthetic construct
  source 1..20: mol_type = other DNA
aggaggtaagctctagagca

SEQ ID NO: 21770 - DNA, 20 bp, synthetic construct
  source 1..20: mol_type = other DNA
aatctcaacacatttgattc

SEQ ID NO: 21771 - DNA, 20 bp, synthetic construct
  source 1..20: mol_type = other DNA
cagaaagccccagttacagc

SEQ ID NO: 21772 - DNA, 20 bp, synthetic construct
  source 1..20: mol_type = other DNA
cagctggagaagcttgcaac

SEQ ID NO: 21773 - DNA, 20 bp, synthetic construct
  source 1..20: mol_type = other DNA
tgatcatccagaacgaacct

SEQ ID NO: 21774 - DNA, 20 bp, synthetic construct
  source 1..20: mol_type = other DNA
ctttggttaacacaaagaag

SEQ ID NO: 21775 - DNA, 20 bp, synthetic construct
  source 1..20: mol_type = other DNA
gaggaggtaagctctagagc

SEQ ID NO: 21776 - DNA, 20 bp, synthetic construct
  source 1..20: mol_type = other DNA
cctggaatggttagaaagaa

SEQ ID NO: 21777 - DNA, 20 bp, synthetic construct
  source 1..20: mol_type = other DNA
cgcagcagtctggagaaggc

SEQ ID NO: 21778 - DNA, 20 bp, synthetic construct
  source 1..20: mol_type = other DNA
gtcagaagaggacttcatag

SEQ ID NO: 21779 - DNA, 20 bp, synthetic construct
  source 1..20: mol_type = other DNA
gaagcggactttaaagttcg

SEQ ID NO: 21780 - DNA, 20 bp, synthetic construct
  source 1..20: mol_type = other DNA
tgacatagccccttcccgaa

SEQ ID NO: 21781 - DNA, 20 bp, synthetic construct
  source 1..20: mol_type = other DNA
caatatgatccaaccaagaa

SEQ ID NO: 21782 - DNA, 20 bp, synthetic construct
  source 1..20: mol_type = other DNA
atgtgggaagttttcagtga

SEQ ID NO: 21783 - DNA, 20 bp, synthetic construct
  source 1..20: mol_type = other DNA
tcttgtaggtgtgctgatgt

SEQ ID NO: 21784 - DNA, 20 bp, synthetic construct
  source 1..20: mol_type = other DNA
gagacttggtatgagcatgc

SEQ ID NO: 21785 - DNA, 20 bp, synthetic construct
  source 1..20: mol_type = other DNA
ccgaagcaactcagaggtgg

SEQ ID NO: 21786 - DNA, 20 bp, synthetic construct
  source 1..20: mol_type = other DNA
cctgaaacgggtatttatag

SEQ ID NO: 21787 - DNA, 20 bp, synthetic construct
  source 1..20: mol_type = other DNA
aacgaggaataataacagtt

SEQ ID NO: 21788 - DNA, 20 bp, synthetic construct
  source 1..20: mol_type = other DNA
atatcatcctaatttctgga

SEQ ID NO: 21789 - DNA, 20 bp, synthetic construct
  source 1..20: mol_type = other DNA
atcttcaaagtatgccaggc

SEQ ID NO: 21790 - DNA, 20 bp, synthetic construct
  source 1..20: mol_type = other DNA
tctggatgtgtgtgagggca

SEQ ID NO: 21791 - DNA, 20 bp, synthetic construct
  source 1..20: mol_type = other DNA
aaaccgaagcaactcagagg

SEQ ID NO: 21792 - DNA, 20 bp, synthetic construct
  source 1..20: mol_type = other DNA
gggcttgtacaaccgaaatc

SEQ ID NO: 21793 - DNA, 20 bp, synthetic construct
  source 1..20: mol_type = other DNA
ttgctccagatcgtgagagc

SEQ ID NO: 21794 - DNA, 20 bp, synthetic construct
  source 1..20: mol_type = other DNA
tgaaaaccgaagcaactcag

SEQ ID NO: 21795 - DNA, 20 bp, synthetic construct
  source 1..20: mol_type = other DNA
ctcctactcctgaagacaac

SEQ ID NO: 21796 - DNA, 20 bp, synthetic construct
  source 1..20: mol_type = other DNA
tccagcagtgattcataatc

SEQ ID NO: 21797 - DNA, 20 bp, synthetic construct
  source 1..20: mol_type = other DNA
ctcaccaaatgaccacacat

SEQ ID NO: 21798 - DNA, 20 bp, synthetic construct
  source 1..20: mol_type = other DNA
ttcctggaggaaaaagacaa

SEQ ID NO: 21799 - DNA, 20 bp, synthetic construct
  source 1..20: mol_type = other DNA
ggtatccagtttgttttggg

SEQ ID NO: 21800 - DNA, 20 bp, synthetic construct
  source 1..20: mol_type = other DNA
atcgtgagagccggcagcgc

SEQ ID NO: 21801 - DNA, 20 bp, synthetic construct
  source 1..20: mol_type = other DNA
cataatctggtagacgtgtg

SEQ ID NO: 21802 - DNA, 20 bp, synthetic construct
  source 1..20: mol_type = other DNA
tttgattcgggagagctcaa

SEQ ID NO: 21803 - DNA, 20 bp, synthetic construct
  source 1..20: mol_type = other DNA
ctaccaaaccaatgatcctc

SEQ ID NO: 21804 - DNA, 20 bp, synthetic construct
  source 1..20: mol_type = other DNA
gataccggagtcgagtcacc

SEQ ID NO: 21805 - DNA, 20 bp, synthetic construct
  source 1..20: mol_type = other DNA
tttcctggaggaaaaagaca

SEQ ID NO: 21806 - DNA, 20 bp, synthetic construct
  source 1..20: mol_type = other DNA
ttcttgtaggtgtgctgatg

SEQ ID NO: 21807 - DNA, 20 bp, synthetic construct
  source 1..20: mol_type = other DNA
gggagaaaaccaagtcatca

SEQ ID NO: 21808 - DNA, 20 bp, synthetic construct
  source 1..20: mol_type = other DNA
gatcagtacaccagttccac

SEQ ID NO: 21809 - DNA, 20 bp, synthetic construct
  source 1..20: mol_type = other DNA
gacgatcttcaaagtatgcc

SEQ ID NO: 21810 - DNA, 20 bp, synthetic construct
  source 1..20: mol_type = other DNA
tgatgagctgttcttccagg

SEQ ID NO: 21811 - DNA, 20 bp, synthetic construct
  source 1..20: mol_type = other DNA
atcaactatcaccaacataa

SEQ ID NO: 21812 - DNA, 20 bp, synthetic construct
  source 1..20: mol_type = other DNA
aagcggactttaaagttcga

SEQ ID NO: 21813 - DNA, 20 bp, synthetic construct
  source 1..20: mol_type = other DNA
tatcaccaacataatggagg

SEQ ID NO: 21814 - DNA, 20 bp, synthetic construct
  source 1..20: mol_type = other DNA
gaagtttttcagctttgtct

SEQ ID NO: 21815 - DNA, 20 bp, synthetic construct
  source 1..20: mol_type = other DNA
tcttccccagcgaccacttt

SEQ ID NO: 21816 - DNA, 20 bp, synthetic construct
  source 1..20: mol_type = other DNA
tgctggaaagaggtcagtgg

SEQ ID NO: 21817 - DNA, 20 bp, synthetic construct
  source 1..20: mol_type = other DNA
tcccaaaacaaactggatac

SEQ ID NO: 21818 - DNA, 20 bp, synthetic construct
  source 1..20: mol_type = other DNA
actcaaacaccaggcagatg

SEQ ID NO: 21819 - DNA, 20 bp, synthetic construct
  source 1..20: mol_type = other DNA
catactttgaagatcgtcat

SEQ ID NO: 21820 - DNA, 20 bp, synthetic construct
  source 1..20: mol_type = other DNA
tattgtaccacctgaaagca

SEQ ID NO: 21821 - DNA, 20 bp, synthetic construct
  source 1..20: mol_type = other DNA
catcctaatttctggatgga

SEQ ID NO: 21822 - DNA, 20 bp, synthetic construct
  source 1..20: mol_type = other DNA
ggtgatagttgatgagaaga

SEQ ID NO: 21823 - DNA, 20 bp, synthetic construct
  source 1..20: mol_type = other DNA
tgtctgactttgggatgaca

SEQ ID NO: 21824 - DNA, 20 bp, synthetic construct
  source 1..20: mol_type = other DNA
gcaccaaattcccggtgaag

SEQ ID NO: 21825 - DNA, 20 bp, synthetic construct
  source 1..20: mol_type = other DNA
agccagttgacgcagcagtc

SEQ ID NO: 21826 - DNA, 20 bp, synthetic construct
  source 1..20: mol_type = other DNA
ctactggctcaacaaggaca

SEQ ID NO: 21827 - DNA, 20 bp, synthetic construct
  source 1..20: mol_type = other DNA
gctccatgaactcaaacacc

SEQ ID NO: 21828 - DNA, 20 bp, synthetic construct
  source 1..20: mol_type = other DNA
aggttcccaaagtggtcgct

SEQ ID NO: 21829 - DNA, 20 bp, synthetic construct
  source 1..20: mol_type = other DNA
gtcatcaaggtgtctgactt

SEQ ID NO: 21830 - DNA, 20 bp, synthetic construct
  source 1..20: mol_type = other DNA
caccgtgtctgttttcacca

SEQ ID NO: 21831 - DNA, 20 bp, synthetic construct
  source 1..20: mol_type = other DNA
gacaaggtaaaagagggatg

SEQ ID NO: 21832 - DNA, 20 bp, synthetic construct
  source 1..20: mol_type = other DNA
atgctcataccaagtctctg

SEQ ID NO: 21833 - DNA, 20 bp, synthetic construct
  source 1..20: mol_type = other DNA
caatttctggcagcctggag

SEQ ID NO: 21834 - DNA, 20 bp, synthetic construct
  source 1..20: mol_type = other DNA
catgtgtctggatgtgtgtg

SEQ ID NO: 21835 - DNA, 20 bp, synthetic construct
  source 1..20: mol_type = other DNA
atcctcaggaactcgcactg

SEQ ID NO: 21836 - DNA, 20 bp, synthetic construct
  source 1..20: mol_type = other DNA
atttctggatggatgggaag

SEQ ID NO: 21837 - DNA, 20 bp, synthetic construct
  source 1..20: mol_type = other DNA
tcttgatgagctgttcttcc

SEQ ID NO: 21838 - DNA, 20 bp, synthetic construct
  source 1..20: mol_type = other DNA
ttcatgatccagttcttgaa

SEQ ID NO: 21839 - DNA, 20 bp, synthetic construct
  source 1..20: mol_type = other DNA
gtaagggattccaggactgc

SEQ ID NO: 21840 - DNA, 20 bp, synthetic construct
  source 1..20: mol_type = other DNA
tatcaaaaccattcgggaag

SEQ ID NO: 21841 - DNA, 20 bp, synthetic construct
  source 1..20: mol_type = other DNA
cagaagaagcgcacgctgaa

SEQ ID NO: 21842 - DNA, 20 bp, synthetic construct
  source 1..20: mol_type = other DNA
tcagccacatagtatcgctt

SEQ ID NO: 21843 - DNA, 20 bp, synthetic construct
  source 1..20: mol_type = other DNA
tcatttggtgagtgtcatgc

SEQ ID NO: 21844 - DNA, 20 bp, synthetic construct
  source 1..20: mol_type = other DNA
ggagagtccaggacaggaat

SEQ ID NO: 21845 - DNA, 20 bp, synthetic construct
  source 1..20: mol_type = other DNA
ttgggatgacaaggtaaaag

SEQ ID NO: 21846 - DNA, 20 bp, synthetic construct
  source 1..20: mol_type = other DNA
tggcagtgggcaatttgggt

SEQ ID NO: 21847 - DNA, 20 bp, synthetic construct
  source 1..20: mol_type = other DNA
tccataccttacaacagcct

SEQ ID NO: 21848 - DNA, 20 bp, synthetic construct
  source 1..20: mol_type = other DNA
cattcttggttggatcatat

SEQ ID NO: 21849 - DNA, 20 bp, synthetic construct
  source 1..20: mol_type = other DNA
tggagagtccaggacaggaa

SEQ ID NO: 21850 - DNA, 20 bp, synthetic construct
  source 1..20: mol_type = other DNA
actgaaagagaaaacctctg

SEQ ID NO: 21851 - DNA, 20 bp, synthetic construct
  source 1..20: mol_type = other DNA
cgccgcagtgcgagttcctg

SEQ ID NO: 21852 - DNA, 20 bp, synthetic construct
  source 1..20: mol_type = other DNA
tcctactcctgaagacaaca

SEQ ID NO: 21853 - DNA, 20 bp, synthetic construct
  source 1..20: mol_type = other DNA
caatctcaacacatttgatt

SEQ ID NO: 21854 - DNA, 20 bp, synthetic construct
  source 1..20: mol_type = other DNA
gaacgaacctgggaagagag

SEQ ID NO: 21855 - DNA, 20 bp, synthetic construct
  source 1..20: mol_type = other DNA
agaagaagcgcacgctgaag

SEQ ID NO: 21856 - DNA, 20 bp, synthetic construct
  source 1..20: mol_type = other DNA
aaagtatgccaggctggctt

SEQ ID NO: 21857 - DNA, 20 bp, synthetic construct
  source 1..20: mol_type = other DNA
acagaagaagcgcacgctga

SEQ ID NO: 21858 - DNA, 20 bp, synthetic construct
  source 1..20: mol_type = other DNA
gcatactttgaagatcgtca

SEQ ID NO: 21859 - DNA, 20 bp, synthetic construct
  source 1..20: mol_type = other DNA
atactttgaagatcgtcatg

SEQ ID NO: 21860 - DNA, 20 bp, synthetic construct
  source 1..20: mol_type = other DNA
tataaagcattatcacatca

SEQ ID NO: 21861 - DNA, 20 bp, synthetic construct
  source 1..20: mol_type = other DNA
ggctgccagaaattgtttgg

SEQ ID NO: 21862 - DNA, 20 bp, synthetic construct
  source 1..20: mol_type = other DNA
gaacctgggaagagagtgga

SEQ ID NO: 21863 - DNA, 20 bp, synthetic construct
  source 1..20: mol_type = other DNA
caatcctaagcgatactatg

SEQ ID NO: 21864 - DNA, 20 bp, synthetic construct
  source 1..20: mol_type = other DNA
agaaagccccagttacagca

SEQ ID NO: 21865 - DNA, 20 bp, synthetic construct
  source 1..20: mol_type = other DNA
cccaaactggtgcagctgta

SEQ ID NO: 21866 - DNA, 20 bp, synthetic construct
  source 1..20: mol_type = other DNA
ccaccacctctgagttgctt

SEQ ID NO: 21867 - DNA, 20 bp, synthetic construct
  source 1..20: mol_type = other DNA
ctggccgatcttctggtctc

SEQ ID NO: 21868 - DNA, 20 bp, synthetic construct
  source 1..20: mol_type = other DNA
ggttcccaaagtggtcgctg

SEQ ID NO: 21869 - DNA, 20 bp, synthetic construct
  source 1..20: mol_type = other DNA
tgtgttaaccaaagccagcc

SEQ ID NO: 21870 - DNA, 20 bp, synthetic construct
  source 1..20: mol_type = other DNA
accaaggctgttgtaaggta

SEQ ID NO: 21871 - DNA, 20 bp, synthetic construct
  source 1..20: mol_type = other DNA
gggtgcgtagataatctgac

SEQ ID NO: 21872 - DNA, 20 bp, synthetic construct
  source 1..20: mol_type = other DNA
cggagtcgagtcaccaggcc

SEQ ID NO: 21873 - DNA, 20 bp, synthetic construct
  source 1..20: mol_type = other DNA
tcggttgtacaagccccggc

SEQ ID NO: 21874 - DNA, 20 bp, synthetic construct
  source 1..20: mol_type = other DNA
caggcctggtgactcgactc

SEQ ID NO: 21875 - DNA, 20 bp, synthetic construct
  source 1..20: mol_type = other DNA
gggccagcacccagcgctgc

SEQ ID NO: 21876 - DNA, 20 bp, synthetic construct
  source 1..20: mol_type = other DNA
acgggtatttatagtggcat

SEQ ID NO: 21877 - DNA, 20 bp, synthetic construct
  source 1..20: mol_type = other DNA
ctatcaaaaccattcgggaa

SEQ ID NO: 21878 - DNA, 20 bp, synthetic construct
  source 1..20: mol_type = other DNA
gaaactctctcatcccaaac

SEQ ID NO: 21879 - DNA, 20 bp, synthetic construct
  source 1..20: mol_type = other DNA
atcagcacacctacaagaaa

SEQ ID NO: 21880 - DNA, 20 bp, synthetic construct
  source 1..20: mol_type = other DNA
atgtgtctggatgtgtgtga

SEQ ID NO: 21881 - DNA, 20 bp, synthetic construct
  source 1..20: mol_type = other DNA
tttcaggtaagtccatcagg

SEQ ID NO: 21882 - DNA, 20 bp, synthetic construct
  source 1..20: mol_type = other DNA
tcctcgtttctgaaacaggt

SEQ ID NO: 21883 - DNA, 20 bp, synthetic construct
  source 1..20: mol_type = other DNA
tgatgtgagtgctcagaaca

SEQ ID NO: 21884 - DNA, 20 bp, synthetic construct
  source 1..20: mol_type = other DNA
aatctggtagacgtgtgtgg

SEQ ID NO: 21885 - DNA, 20 bp, synthetic construct
  source 1..20: mol_type = other DNA
gctgccagaaattgtttggt

SEQ ID NO: 21886 - DNA, 20 bp, synthetic construct
  source 1..20: mol_type = other DNA
ggtgtatgttcctgcagtcc

SEQ ID NO: 21887 - DNA, 20 bp, synthetic construct
  source 1..20: mol_type = other DNA
cgatcttctggtctctggag

SEQ ID NO: 21888 - DNA, 20 bp, synthetic construct
  source 1..20: mol_type = other DNA
ctggctcaacaaggacaagg

SEQ ID NO: 21889 - DNA, 20 bp, synthetic construct
  source 1..20: mol_type = other DNA
ctggagcaaacacatatagg

SEQ ID NO: 21890 - DNA, 20 bp, synthetic construct
  source 1..20: mol_type = other DNA
tgtaccaagcagttatctgg

SEQ ID NO: 21891 - DNA, 20 bp, synthetic construct
  source 1..20: mol_type = other DNA
gggcaaagaaggagccttca

SEQ ID NO: 21892 - DNA, 20 bp, synthetic construct
  source 1..20: mol_type = other DNA
tcctggaggaaaaagacaag

SEQ ID NO: 21893 - DNA, 20 bp, synthetic construct
  source 1..20: mol_type = other DNA
ccaaactggtgcagctgtat

SEQ ID NO: 21894 - DNA, 20 bp, synthetic construct
  source 1..20: mol_type = other DNA
tgggatgacaaggtaaaaga

SEQ ID NO: 21895 - DNA, 20 bp, synthetic construct
  source 1..20: mol_type = other DNA
gaatttggtgcctgtggaac

SEQ ID NO: 21896 - DNA, 20 bp, synthetic construct
  source 1..20: mol_type = other DNA
cgactgaaagagaaaacctc

SEQ ID NO: 21897 - DNA, 20 bp, synthetic construct
  source 1..20: mol_type = other DNA
ggtgaagtgggcatccccag

SEQ ID NO: 21898 - DNA, 20 bp, synthetic construct
  source 1..20: mol_type = other DNA
ttgacgcagcagtctggaga

SEQ ID NO: 21899 - DNA, 20 bp, synthetic construct
  source 1..20: mol_type = other DNA
gaagctgaaaagagaaaaac

SEQ ID NO: 21900 - DNA, 20 bp, synthetic construct
  source 1..20: mol_type = other DNA
ggaggtaagctctagagcag

SEQ ID NO: 21901 - DNA, 20 bp, synthetic construct
  source 1..20: mol_type = other DNA
cctggaatcccttaccatga

SEQ ID NO: 21902 - DNA, 20 bp, synthetic construct
  source 1..20: mol_type = other DNA
tcactcaccctgttgtcttc

SEQ ID NO: 21903 - DNA, 20 bp, synthetic construct
  source 1..20: mol_type = other DNA
atcctaatttctggatggat

SEQ ID NO: 21904 - DNA, 20 bp, synthetic construct
  source 1..20: mol_type = other DNA
gtgtttgagttcatggagca

SEQ ID NO: 21905 - DNA, 20 bp, synthetic construct
  source 1..20: mol_type = other DNA
catccagacacatgcccagc

SEQ ID NO: 21906 - DNA, 20 bp, synthetic construct
  source 1..20: mol_type = other DNA
agacttggtatgagcatgca

SEQ ID NO: 21907 - DNA, 20 bp, synthetic construct
  source 1..20: mol_type = other DNA
gatttcggttgtacaagccc

SEQ ID NO: 21908 - DNA, 20 bp, synthetic construct
  source 1..20: mol_type = other DNA
gagaaggctggccgatcttc

SEQ ID NO: 21909 - DNA, 20 bp, synthetic construct
  source 1..20: mol_type = other DNA
tgcccacttcaccgggaatt

SEQ ID NO: 21910 - DNA, 20 bp, synthetic construct
  source 1..20: mol_type = other DNA
gaactcaaacaccaggcaga

SEQ ID NO: 21911 - DNA, 20 bp, synthetic construct
  source 1..20: mol_type = other DNA
agaagaggacttcatagagg

SEQ ID NO: 21912 - DNA, 20 bp, synthetic construct
  source 1..20: mol_type = other DNA
agtcagacaccttgatgact

SEQ ID NO: 21913 - DNA, 20 bp, synthetic construct
  source 1..20: mol_type = other DNA
caatttgggttggtgcatct

SEQ ID NO: 21914 - DNA, 20 bp, synthetic construct
  source 1..20: mol_type = other DNA
ctggggatgcccacttcacc

SEQ ID NO: 21915 - DNA, 20 bp, synthetic construct
  source 1..20: mol_type = other DNA
tttgtgcaagagattggcag

SEQ ID NO: 21916 - DNA, 20 bp, synthetic construct
  source 1..20: mol_type = other DNA
gggatgagagagtttcctgg

SEQ ID NO: 21917 - DNA, 20 bp, synthetic construct
  source 1..20: mol_type = other DNA
tgacttacccattcctgtcc

SEQ ID NO: 21918 - DNA, 20 bp, synthetic construct
  source 1..20: mol_type = other DNA
ccttcatggtaagggattcc

SEQ ID NO: 21919 - DNA, 20 bp, synthetic construct
  source 1..20: mol_type = other DNA
atccagacacatgcccagca

SEQ ID NO: 21920 - DNA, 20 bp, synthetic construct
  source 1..20: mol_type = other DNA
tcatcaaggtgtctgacttt

SEQ ID NO: 21921 - DNA, 20 bp, synthetic construct
  source 1..20: mol_type = other DNA
ctgatcatccagaacgaacc

SEQ ID NO: 21922 - DNA, 20 bp, synthetic construct
  source 1..20: mol_type = other DNA
ttgtgcaagagattggcagt

SEQ ID NO: 21923 - DNA, 20 bp, synthetic construct
  source 1..20: mol_type = other DNA
tcgtgagagccggcagcgct

SEQ ID NO: 21924 - DNA, 20 bp, synthetic construct
  source 1..20: mol_type = other DNA
atatgtaccaagcagttatc

SEQ ID NO: 21925 - DNA, 20 bp, synthetic construct
  source 1..20: mol_type = other DNA
gactgaaagagaaaacctct

SEQ ID NO: 21926 - DNA, 20 bp, synthetic construct
  source 1..20: mol_type = other DNA
ctgttgtcttcaggagtagg

SEQ ID NO: 21927 - DNA, 20 bp, synthetic construct
  source 1..20: mol_type = other DNA
caccaaattcccggtgaagt

SEQ ID NO: 21928 - DNA, 20 bp, synthetic construct
  source 1..20: mol_type = other DNA
ccatacagctgcaccagttt

SEQ ID NO: 21929 - DNA, 20 bp, synthetic construct
  source 1..20: mol_type = other DNA
ggtagttgtcatgcaccacc

SEQ ID NO: 21930 - DNA, 20 bp, synthetic construct
  source 1..20: mol_type = other DNA
accctgttgtcttcaggagt

SEQ ID NO: 21931 - DNA, 20 bp, synthetic construct
  source 1..20: mol_type = other DNA
gagccggcagcgctgggtgc

SEQ ID NO: 21932 - DNA, 20 bp, synthetic construct
  source 1..20: mol_type = other DNA
atagcagcaagtccgatgtg

SEQ ID NO: 21933 - DNA, 20 bp, synthetic construct
  source 1..20: mol_type = other DNA
aacgggtatttatagtggca

SEQ ID NO: 21934 - DNA, 20 bp, synthetic construct
  source 1..20: mol_type = other DNA
ctctccagagaccagaagat

SEQ ID NO: 21935 - DNA, 20 bp, synthetic construct
  source 1..20: mol_type = other DNA
cagattatctacgcacccag

SEQ ID NO: 21936 - DNA, 20 bp, synthetic construct
  source 1..20: mol_type = other DNA
tgcaaggtccgagcccgggg

SEQ ID NO: 21937 - DNA, 20 bp, synthetic construct
  source 1..20: mol_type = other DNA
ccaccgcgacggcgtcgggg

SEQ ID NO: 21938 - DNA, 20 bp, synthetic construct
  source 1..20: mol_type = other DNA
ccacagtagtacacgtcatc

SEQ ID NO: 21939 - DNA, 20 bp, synthetic construct
  source 1..20: mol_type = other DNA
tcacgtttctgaatacctgt

SEQ ID NO: 21940 - DNA, 20 bp, synthetic construct
  source 1..20: mol_type = other DNA
tctgaggtcagtcaggacac

SEQ ID NO: 21941 - DNA, 20 bp, synthetic construct
  source 1..20: mol_type = other DNA
tgtgactgtcatctggccat

SEQ ID NO: 21942 - DNA, 20 bp, synthetic construct
  source 1..20: mol_type = other DNA
gatttctgtggaagagattg

SEQ ID NO: 21943 - DNA, 20 bp, synthetic construct
  source 1..20: mol_type = other DNA
cacaggcatgccgtgagtac

SEQ ID NO: 21944 - DNA, 20 bp, synthetic construct
  source 1..20: mol_type = other DNA
ttggcaactttgaatttcca

SEQ ID NO: 21945 - DNA, 20 bp, synthetic construct
  source 1..20: mol_type = other DNA
gacagccattctgtatgttg

SEQ ID NO: 21946 - DNA, 20 bp, synthetic construct
  source 1..20: mol_type = other DNA
ctcccaagctggggaagctg

SEQ ID NO: 21947 - DNA, 20 bp, synthetic construct
  source 1..20: mol_type = other DNA
ctgtcatggtccaatctggt

SEQ ID NO: 21948 - DNA, 20 bp, synthetic construct
  source 1..20: mol_type = other DNA
tgattcagttaccaaaacac

SEQ ID NO: 21949 - DNA, 20 bp, synthetic construct
  source 1..20: mol_type = other DNA
cgaaactcagctggctcatg

SEQ ID NO: 21950 - DNA, 20 bp, synthetic construct
  source 1..20: mol_type = other DNA
aatgcattgaacgaatccca

SEQ ID NO: 21951 - DNA, 20 bp, synthetic construct
  source 1..20: mol_type = other DNA
aaacacatcgtgtacctcta

SEQ ID NO: 21952 - DNA, 20 bp, synthetic construct
  source 1..20: mol_type = other DNA
tccactaccggatgaggtat

SEQ ID NO: 21953 - DNA, 20 bp, synthetic construct
  source 1..20: mol_type = other DNA
gctgcctcgaagaaggcctg

SEQ ID NO: 21954 - DNA, 20 bp, synthetic construct
  source 1..20: mol_type = other DNA
cacacttactctccacgtcg

SEQ ID NO: 21955 - DNA, 20 bp, synthetic construct
  source 1..20: mol_type = other DNA
gacggtatgttatgcaaggc

SEQ ID NO: 21956 - DNA, 20 bp, synthetic construct
  source 1..20: mol_type = other DNA
agcaccgtaatggggatgcc

SEQ ID NO: 21957 - DNA, 20 bp, synthetic construct
  source 1..20: mol_type = other DNA
cttggtgttcactctcaaca

SEQ ID NO: 21958 - DNA, 20 bp, synthetic construct
  source 1..20: mol_type = other DNA
tccaaaagaccagacgtcag

SEQ ID NO: 21959 - DNA, 20 bp, synthetic construct
  source 1..20: mol_type = other DNA
cggtgcatgaagagatccag

SEQ ID NO: 21960 - DNA, 20 bp, synthetic construct
  source 1..20: mol_type = other DNA
gcctagacagcaccgtaatg

SEQ ID NO: 21961 - DNA, 20 bp, synthetic construct
  source 1..20: mol_type = other DNA
gcaaagaggttgtgacaaag

SEQ ID NO: 21962 - DNA, 20 bp, synthetic construct
  source 1..20: mol_type = other DNA
tgaactatgaccccaatcag

SEQ ID NO: 21963 - DNA, 20 bp, synthetic construct
  source 1..20: mol_type = other DNA
aacttacctctcccaagtca

SEQ ID NO: 21964 - DNA, 20 bp, synthetic construct
  source 1..20: mol_type = other DNA
gccggaagtagccatctacc

SEQ ID NO: 21965 - DNA, 20 bp, synthetic construct
  source 1..20: mol_type = other DNA
gctgctgacaagtggagctt

SEQ ID NO: 21966 - DNA, 20 bp, synthetic construct
  source 1..20: mol_type = other DNA
ggaagaaaggcctctgattg

SEQ ID NO: 21967 - DNA, 20 bp, synthetic construct
  source 1..20: mol_type = other DNA
tattccttaaggcttcccga

SEQ ID NO: 21968 - DNA, 20 bp, synthetic construct
  source 1..20: mol_type = other DNA
gcagttgccagaactgccca

SEQ ID NO: 21969 - DNA, 20 bp, synthetic construct
  source 1..20: mol_type = other DNA
gtatgttgtggacgatcaac

SEQ ID NO: 21970 - DNA, 20 bp, synthetic construct
  source 1..20: mol_type = other DNA
attctggagcataccttgaa

SEQ ID NO: 21971 - DNA, 20 bp, synthetic construct
  source 1..20: mol_type = other DNA
tctccttgatgccagctcac

SEQ ID NO: 21972 - DNA, 20 bp, synthetic construct
  source 1..20: mol_type = other DNA
gtgtactaaaaacctcctcc

SEQ ID NO: 21973 - DNA, 20 bp, synthetic construct
  source 1..20: mol_type = other DNA
gtcggtgcagaggtaatgat

SEQ ID NO: 21974 - DNA, 20 bp, synthetic construct
  source 1..20: mol_type = other DNA
cccctgtattgtccccttcg

SEQ ID NO: 21975 - DNA, 20 bp, synthetic construct
  source 1..20: mol_type = other DNA
ccggaagtagccatctacca

SEQ ID NO: 21976 - DNA, 20 bp, synthetic construct
  source 1..20: mol_type = other DNA
gacagaggaaccttctcacc

SEQ ID NO: 21977 - DNA, 20 bp, synthetic construct
  source 1..20: mol_type = other DNA
gatgggcatctgctgtgagc

SEQ ID NO: 21978 - DNA, 20 bp, synthetic construct
  source 1..20: mol_type = other DNA
tcatccggtagtggagccgg

SEQ ID NO: 21979 - DNA, 20 bp, synthetic construct
  source 1..20: mol_type = other DNA
tctggacagttaggtgggca

SEQ ID NO: 21980 - DNA, 20 bp, synthetic construct
  source 1..20: mol_type = other DNA
atttggagcataccagagct

SEQ ID NO: 21981 - DNA, 20 bp, synthetic construct
  source 1..20: mol_type = other DNA
acattctcaccaagtagctc

SEQ ID NO: 21982 - DNA, 20 bp, synthetic construct
  source 1..20: mol_type = other DNA
cctgcaccagatccttcttg

SEQ ID NO: 21983 - DNA, 20 bp, synthetic construct
  source 1..20: mol_type = other DNA
attacaccgtcaaggatgac

SEQ ID NO: 21984 - DNA, 20 bp, synthetic construct
  source 1..20: mol_type = other DNA
tctccaaagaagcagaaaaa

SEQ ID NO: 21985 - DNA, 20 bp, synthetic construct
  source 1..20: mol_type = other DNA
tgagtgtggctgctgacaag

SEQ ID NO: 21986 - DNA, 20 bp, synthetic construct
  source 1..20: mol_type = other DNA
tgtccctccggctccactac

SEQ ID NO: 21987 - DNA, 20 bp, synthetic construct
  source 1..20: mol_type = other DNA
ggggggccacgtcggtgcag

SEQ ID NO: 21988 - DNA, 20 bp, synthetic construct
  source 1..20: mol_type = other DNA
gccagtgacaccatcatgta

SEQ ID NO: 21989 - DNA, 20 bp, synthetic construct
  source 1..20: mol_type = other DNA
gacaccatcatgtaaggagc

SEQ ID NO: 21990 - DNA, 20 bp, synthetic construct
  source 1..20: mol_type = other DNA
caagtgaaaattggagactt

SEQ ID NO: 21991 - DNA, 20 bp, synthetic construct
  source 1..20: mol_type = other DNA
gacagttaggtgggcacggc

SEQ ID NO: 21992 - DNA, 20 bp, synthetic construct
  source 1..20: mol_type = other DNA
ttgggaaggttgagctctgc

SEQ ID NO: 21993 - DNA, 20 bp, synthetic construct
  source 1..20: mol_type = other DNA
cctccagggccactttggga

SEQ ID NO: 21994 - DNA, 20 bp, synthetic construct
  source 1..20: mol_type = other DNA
cctggaggcccctgagccag

SEQ ID NO: 21995 - DNA, 20 bp, synthetic construct
  source 1..20: mol_type = other DNA
tctgtactagagggagaagt

SEQ ID NO: 21996 - DNA, 20 bp, synthetic construct
  source 1..20: mol_type = other DNA
tcaacttatgaggaaatgct

SEQ ID NO: 21997 - DNA, 20 bp, synthetic construct
  source 1..20: mol_type = other DNA
aacctcctcctggcccgtga

SEQ ID NO: 21998 - DNA, 20 bp, synthetic construct
  source 1..20: mol_type = other DNA
tatcctcctgcagagtaaaa

SEQ ID NO: 21999 - DNA, 20 bp, synthetic construct
  source 1..20: mol_type = other DNA
actccagtgagctggcatca

SEQ ID NO: 22000 - DNA, 20 bp, synthetic construct
  source 1..20: mol_type = other DNA
tgtactctccactgcccagc

SEQ ID NO: 22001 - DNA, 20 bp, synthetic construct
  source 1..20: mol_type = other DNA
cctttttcagatcagctatg

SEQ ID NO: 22002 - DNA, 20 bp, synthetic construct
  source 1..20: mol_type = other DNA
tcttccaccatgatatctgt

SEQ ID NO: 22003 - DNA, 20 bp, synthetic construct
  source 1..20: mol_type = other DNA
catgaggatgttgtcaaagt

SEQ ID NO: 22004 - DNA, 20 bp, synthetic construct
  source 1..20: mol_type = other DNA
gagatttctgtggaagagat

SEQ ID NO: 22005 - DNA, 20 bp, synthetic construct
  source 1..20: mol_type = other DNA
gaccccaagaccgagcagga

SEQ ID NO: 22006 - DNA, 20 bp, synthetic construct
  source 1..20: mol_type = other DNA
catcttgtcatcaacggtga

SEQ ID NO: 22007 - DNA, 20 bp, synthetic construct
  source 1..20: mol_type = other DNA
gcaggatctgcttcttgagg

SEQ ID NO: 22008 - DNA, 20 bp, synthetic construct
  source 1..20: mol_type = other DNA
cacagaaatctccaacctgc

SEQ ID NO: 22009 - DNA, 20 bp, synthetic construct
  source 1..20: mol_type = other DNA
cttcccaaagtggccctgga

SEQ ID NO: 22010 - DNA, 20 bp, synthetic construct
  source 1..20: mol_type = other DNA
catcaggtaaagcttcccac

SEQ ID NO: 22011 - DNA, 20 bp, synthetic construct
  source 1..20: mol_type = other DNA
gatcaacgggggggccacgt

SEQ ID NO: 22012 - DNA, 20 bp, synthetic construct
  source 1..20: mol_type = other DNA
tcctttgtgtccctggtaga

SEQ ID NO: 22013 - DNA, 20 bp, synthetic construct
  source 1..20: mol_type = other DNA
atggtgtcactggcctgcac

SEQ ID NO: 22014 - DNA, 20 bp, synthetic construct
  source 1..20: mol_type = other DNA
agaaatctccaacctgctgg

SEQ ID NO: 22015 - DNA, 20 bp, synthetic construct
  source 1..20: mol_type = other DNA
actctccactgcccagccgg

SEQ ID NO: 22016 - DNA, 20 bp, synthetic construct
  source 1..20: mol_type = other DNA
taaggagtattacaccgtca

SEQ ID NO: 22017 - DNA, 20 bp, synthetic construct
  source 1..20: mol_type = other DNA
actgtgcatcagggctgcac

SEQ ID NO: 22018 - DNA, 20 bp, synthetic construct
  source 1..20: mol_type = other DNA
tcatactgtccctaggagca

SEQ ID NO: 22019 - DNA, 20 bp, synthetic construct
  source 1..20: mol_type = other DNA
tgaataagtccatcagacag

SEQ ID NO: 22020 - DNA, 20 bp, synthetic construct
  source 1..20: mol_type = other DNA
accgggacagccctgtgttt

SEQ ID NO: 22021 - DNA, 20 bp, synthetic construct
  source 1..20: mol_type = other DNA
cctaaagaggatccgtgact

SEQ ID NO: 22022 - DNA, 20 bp, synthetic construct
  source 1..20: mol_type = other DNA
catccggtagtggagccgga

SEQ ID NO: 22023 - DNA, 20 bp, synthetic construct
  source 1..20: mol_type = other DNA
ctctggatctcttcatgcac

SEQ ID NO: 22024 - DNA, 20 bp, synthetic construct
  source 1..20: mol_type = other DNA
acttgtcagcagccacactc

SEQ ID NO: 22025 - DNA, 20 bp, synthetic construct
  source 1..20: mol_type = other DNA
cctgtgggcgagcaggacat

SEQ ID NO: 22026 - DNA, 20 bp, synthetic construct
  source 1..20: mol_type = other DNA
caccaagtagctcagggcac

SEQ ID NO: 22027 - DNA, 20 bp, synthetic construct
  source 1..20: mol_type = other DNA
tcatgaggtctcccaagctg

SEQ ID NO: 22028 - DNA, 20 bp, synthetic construct
  source 1..20: mol_type = other DNA
gaagcgcttttcaaaatgtg

SEQ ID NO: 22029 - DNA, 20 bp, synthetic construct
  source 1..20: mol_type = other DNA
acctcatctggacagttagg

SEQ ID NO: 22030 - DNA, 20 bp, synthetic construct
  source 1..20: mol_type = other DNA
cgcggacacagacgccatag

SEQ ID NO: 22031 - DNA, 20 bp, synthetic construct
  source 1..20: mol_type = other DNA
aaaaattgttccactcttcc

SEQ ID NO: 22032 - DNA, 20 bp, synthetic construct
  source 1..20: mol_type = other DNA
ctctctttctgtaaacaaga

SEQ ID NO: 22033 - DNA, 20 bp, synthetic construct
  source 1..20: mol_type = other DNA
tgtcggacagggagcccctc

SEQ ID NO: 22034 - DNA, 20 bp, synthetic construct
  source 1..20: mol_type = other DNA
ttttaccttacaaatctgaa

SEQ ID NO: 22035 - DNA, 20 bp, synthetic construct
  source 1..20: mol_type = other DNA
gtatgatttggtgaaatgcc

SEQ ID NO: 22036 - DNA, 20 bp, synthetic construct
  source 1..20: mol_type = other DNA
cttagtagccaccagcaggt

SEQ ID NO: 22037 - DNA, 20 bp, synthetic construct
  source 1..20: mol_type = other DNA
ctgcctcgaagaaggcctgt

SEQ ID NO: 22038 - DNA, 20 bp, synthetic construct
  source 1..20: mol_type = other DNA
tgtatgttgtggacgatcaa

SEQ ID NO: 22039 - DNA, 20 bp, synthetic construct
  source 1..20: mol_type = other DNA
caaaggacaaggcctcctcg

SEQ ID NO: 22040 - DNA, 20 bp, synthetic construct
  source 1..20: mol_type = other DNA
tgagccagctgagtttcgat

SEQ ID NO: 22041 - DNA, 20 bp, synthetic construct
  source 1..20: mol_type = other DNA
aaatctctgaagcctgagag

SEQ ID NO: 22042 - DNA, 20 bp, synthetic construct
  source 1..20: mol_type = other DNA
cccacctaactgtccagatg

SEQ ID NO: 22043 - DNA, 20 bp, synthetic construct
  source 1..20: mol_type = other DNA
ctctgggaaatctgctacaa

SEQ ID NO: 22044 - DNA, 20 bp, synthetic construct
  source 1..20: mol_type = other DNA
ggcaagaaggaagcgaggag

SEQ ID NO: 22045 - DNA, 20 bp, synthetic construct
  source 1..20: mol_type = other DNA
tgcgcaggatctgcttcttg

SEQ ID NO: 22046 - DNA, 20 bp, synthetic construct
  source 1..20: mol_type = other DNA
caagtcttgtgactgtcatc

SEQ ID NO: 22047 - DNA, 20 bp, synthetic construct
  source 1..20: mol_type = other DNA
acctcatccggtagtggagc

SEQ ID NO: 22048 - DNA, 20 bp, synthetic construct
  source 1..20: mol_type = other DNA
acggtatgttatgcaaggct

SEQ ID NO: 22049 - DNA, 20 bp, synthetic construct
  source 1..20: mol_type = other DNA
catcatggcatagtgtgaga

SEQ ID NO: 22050 - DNA, 20 bp, synthetic construct
  source 1..20: mol_type = other DNA
gttctcggcaatacgttcac

SEQ ID NO: 22051 - DNA, 20 bp, synthetic construct
  source 1..20: mol_type = other DNA
tgaaatagaacctggaaggc

SEQ ID NO: 22052 - DNA, 20 bp, synthetic construct
  source 1..20: mol_type = other DNA
ctcatgaggtctcccaagct

SEQ ID NO: 22053 - DNA, 20 bp, synthetic construct
  source 1..20: mol_type = other DNA
gcaggtgagtcacggctgca

SEQ ID NO: 22054 - DNA, 20 bp, synthetic construct
  source 1..20: mol_type = other DNA
tcggaagaaaggcctctgat

SEQ ID NO: 22055 - DNA, 20 bp, synthetic construct
  source 1..20: mol_type = other DNA
cctcatctggacagttaggt

SEQ ID NO: 22056 - DNA, 20 bp, synthetic construct
  source 1..20: mol_type = other DNA
aaaggacaaggcctcctcgt

SEQ ID NO: 22057 - DNA, 20 bp, synthetic construct
  source 1..20: mol_type = other DNA
gaaagacaagacgctgattg

SEQ ID NO: 22058 - DNA, 20 bp, synthetic construct
  source 1..20: mol_type = other DNA
actacgaagtgatggtgact

SEQ ID NO: 22059 - DNA, 20 bp, synthetic construct
  source 1..20: mol_type = other DNA
ttttagtacacacatttcca

SEQ ID NO: 22060 - DNA, 20 bp, synthetic construct
  source 1..20: mol_type = other DNA
ctcatgatggctcggaagaa

SEQ ID NO: 22061 - DNA, 20 bp, synthetic construct
  source 1..20: mol_type = other DNA
taatgtctctcatgatggct

SEQ ID NO: 22062 - DNA, 20 bp, synthetic construct
  source 1..20: mol_type = other DNA
aagggccgctacagtctgca

SEQ ID NO: 22063 - DNA, 20 bp, synthetic construct
  source 1..20: mol_type = other DNA
gagaacattgtgaagtacaa

SEQ ID NO: 22064 - DNA, 20 bp, synthetic construct
  source 1..20: mol_type = other DNA
cattctcaccaagtagctca

SEQ ID NO: 22065 - DNA, 20 bp, synthetic construct
  source 1..20: mol_type = other DNA
tcagccagctccttacatga

SEQ ID NO: 22066 - DNA, 20 bp, synthetic construct
  source 1..20: mol_type = other DNA
atgacgagaacaccaagctc

SEQ ID NO: 22067 - DNA, 20 bp, synthetic construct
  source 1..20: mol_type = other DNA
ctgatgtccttgggcagttc

SEQ ID NO: 22068 - DNA, 20 bp, synthetic construct
  source 1..20: mol_type = other DNA
aaacagatactccagtgagc

SEQ ID NO: 22069 - DNA, 20 bp, synthetic construct
  source 1..20: mol_type = other DNA
ctcccaaggtgctcgccctg

SEQ ID NO: 22070 - DNA, 20 bp, synthetic construct
  source 1..20: mol_type = other DNA
caccaaatcatactgtccct

SEQ ID NO: 22071 - DNA, 20 bp, synthetic construct
  source 1..20: mol_type = other DNA
ttcatcaagctcagtgaccc

SEQ ID NO: 22072 - DNA, 20 bp, synthetic construct
  source 1..20: mol_type = other DNA
cggaagaaaggcctctgatt

SEQ ID NO: 22073 - DNA, 20 bp, synthetic construct
  source 1..20: mol_type = other DNA
tacacacatttccatggacc

SEQ ID NO: 22074 - DNA, 20 bp, synthetic construct
  source 1..20: mol_type = other DNA
gattcagttaccaaaacaca

SEQ ID NO: 22075 - DNA, 20 bp, synthetic construct
  source 1..20: mol_type = other DNA
tgcaggtgagtcacggctgc

SEQ ID NO: 22076 - DNA, 20 bp, synthetic construct
  source 1..20: mol_type = other DNA
ctctccactgcccagccgga

SEQ ID NO: 22077 - DNA, 20 bp, synthetic construct
  source 1..20: mol_type = other DNA
gagtatctgtttgctcaggt

SEQ ID NO: 22078 - DNA, 20 bp, synthetic construct
  source 1..20: mol_type = other DNA
tgagaagtctgaggtcagtc

SEQ ID NO: 22079 - DNA, 20 bp, synthetic construct
  source 1..20: mol_type = other DNA
gttcaagaactttcagatcg

SEQ ID NO: 22080 - DNA, 20 bp, synthetic construct
  source 1..20: mol_type = other DNA
tcccaaggtgctcgccctga

SEQ ID NO: 22081 - DNA, 20 bp, synthetic construct
  source 1..20: mol_type = other DNA
aactttgaatttccatggtg

SEQ ID NO: 22082 - DNA, 20 bp, synthetic construct
  source 1..20: mol_type = other DNA
gattgctcctgagtgtgttg

SEQ ID NO: 22083 - DNA, 20 bp, synthetic construct
  source 1..20: mol_type = other DNA
tcaaggagaggggttgcatc

SEQ ID NO: 22084 - DNA, 20 bp, synthetic construct
  source 1..20: mol_type = other DNA
caaagcaattgaaaccgata

SEQ ID NO: 22085 - DNA, 20 bp, synthetic construct
  source 1..20: mol_type = other DNA
caaagcaggtgacggtcatg

SEQ ID NO: 22086 - DNA, 20 bp, synthetic construct
  source 1..20: mol_type = other DNA
ctagagggagaagtaggcaa

SEQ ID NO: 22087 - DNA, 20 bp, synthetic construct
  source 1..20: mol_type = other DNA
ttacaccgtcaaggatgacc

SEQ ID NO: 22088 - DNA, 20 bp, synthetic construct
  source 1..20: mol_type = other DNA
ctctgcaggtatgaccccga

SEQ ID NO: 22089 - DNA, 20 bp, synthetic construct
  source 1..20: mol_type = other DNA
gcttcttgaggtggctcatg

SEQ ID NO: 22090 - DNA, 20 bp, synthetic construct
  source 1..20: mol_type = other DNA
ccgctacagtctgcacggtt

SEQ ID NO: 22091 - DNA, 20 bp, synthetic construct
  source 1..20: mol_type = other DNA
gatattgagaacgagtgtct

SEQ ID NO: 22092 - DNA, 20 bp, synthetic construct
  source 1..20: mol_type = other DNA
gccctgagggaagaagcaga

SEQ ID NO: 22093 - DNA, 20 bp, synthetic construct
  source 1..20: mol_type = other DNA
tcggatcctcaagaaggatc

SEQ ID NO: 22094 - DNA, 20 bp, synthetic construct
  source 1..20: mol_type = other DNA
gacctcagacttctcaaagc

SEQ ID NO: 22095 - DNA, 20 bp, synthetic construct
  source 1..20: mol_type = other DNA
tagccaagtatttcaccttc

SEQ ID NO: 22096 - DNA, 20 bp, synthetic construct
  source 1..20: mol_type = other DNA
ttccctcagggcgagcacct

SEQ ID NO: 22097 - DNA, 20 bp, synthetic construct
  source 1..20: mol_type = other DNA
acgaacctcggggcttgggc

SEQ ID NO: 22098 - DNA, 20 bp, synthetic construct
  source 1..20: mol_type = other DNA
cagggcgagcaccttgggag

SEQ ID NO: 22099 - DNA, 20 bp, synthetic construct
  source 1..20: mol_type = other DNA
caagcaggacaacaagaaaa

SEQ ID NO: 22100 - DNA, 20 bp, synthetic construct
  source 1..20: mol_type = other DNA
ggatccgatcgaaactcagc

SEQ ID NO: 22101 - DNA, 20 bp, synthetic construct
  source 1..20: mol_type = other DNA
ggcagccagcatgatgagac

SEQ ID NO: 22102 - DNA, 20 bp, synthetic construct
  source 1..20: mol_type = other DNA
gcgatgtccttaccacacca

SEQ ID NO: 22103 - DNA, 20 bp, synthetic construct
  source 1..20: mol_type = other DNA
aagaaggcctgtgggcgagc

SEQ ID NO: 22104 - DNA, 20 bp, synthetic construct
  source 1..20: mol_type = other DNA
tccggctccactaccggatg

SEQ ID NO: 22105 - DNA, 20 bp, synthetic construct
  source 1..20: mol_type = other DNA
ccaagtcacggatcctcttt

SEQ ID NO: 22106 - DNA, 20 bp, synthetic construct
  source 1..20: mol_type = other DNA
gcaatacgttcaccgggact

SEQ ID NO: 22107 - DNA, 20 bp, synthetic construct
  source 1..20: mol_type = other DNA
ctgtaaacaagaggggcaca

SEQ ID NO: 22108 - DNA, 20 bp, synthetic construct
  source 1..20: mol_type = other DNA
tttcagatcgaggtgcagaa

SEQ ID NO: 22109 - DNA, 20 bp, synthetic construct
  source 1..20: mol_type = other DNA
aaacctcctcctggcccgtg

SEQ ID NO: 22110 - DNA, 20 bp, synthetic construct
  source 1..20: mol_type = other DNA
ctccactaccggatgaggta

SEQ ID NO: 22111 - DNA, 20 bp, synthetic construct
  source 1..20: mol_type = other DNA
agtgagctggcatcaaggag

SEQ ID NO: 22112 - DNA, 20 bp, synthetic construct
  source 1..20: mol_type = other DNA
gggaaatatccctgtggctg

SEQ ID NO: 22113 - DNA, 20 bp, synthetic construct
  source 1..20: mol_type = other DNA
cggtatgttatgcaaggctg

SEQ ID NO: 22114 - DNA, 20 bp, synthetic construct
  source 1..20: mol_type = other DNA
agcagaggaactgtgcatca

SEQ ID NO: 22115 - DNA, 20 bp, synthetic construct
  source 1..20: mol_type = other DNA
cacactcaggagcaatccat

SEQ ID NO: 22116 - DNA, 20 bp, synthetic construct
  source 1..20: mol_type = other DNA
cagtggagagtacacagcag

SEQ ID NO: 22117 - DNA, 20 bp, synthetic construct
  source 1..20: mol_type = other DNA
catttggtttatgcctccac

SEQ ID NO: 22118 - DNA, 20 bp, synthetic construct
  source 1..20: mol_type = other DNA
gaggataaagacctggtcca

SEQ ID NO: 22119 - DNA, 20 bp, synthetic construct
  source 1..20: mol_type = other DNA
gctgtcccggtcatccttga

SEQ ID NO: 22120 - DNA, 20 bp, synthetic construct
  source 1..20: mol_type = other DNA
gtgttctcgtgcctctccca

SEQ ID NO: 22121 - DNA, 20 bp, synthetic construct
  source 1..20: mol_type = other DNA
ctcccctgtattgtcccctt

SEQ ID NO: 22122 - DNA, 20 bp, synthetic construct
  source 1..20: mol_type = other DNA
gcggcaagaaggaagcgagg

SEQ ID NO: 22123 - DNA, 20 bp, synthetic construct
  source 1..20: mol_type = other DNA
cgatgccctcacgggccagg

SEQ ID NO: 22124 - DNA, 20 bp, synthetic construct
  source 1..20: mol_type = other DNA
aagagagattctatgaaagc

SEQ ID NO: 22125 - DNA, 20 bp, synthetic construct
  source 1..20: mol_type = other DNA
agggaaatatccctgtggct

SEQ ID NO: 22126 - DNA, 20 bp, synthetic construct
  source 1..20: mol_type = other DNA
gattctatgaaagccggtgc

SEQ ID NO: 22127 - DNA, 20 bp, synthetic construct
  source 1..20: mol_type = other DNA
atactgtccctaggagcaag

SEQ ID NO: 22128 - DNA, 20 bp, synthetic construct
  source 1..20: mol_type = other DNA
caggtaggaagtttgggccc

SEQ ID NO: 22129 - DNA, 20 bp, synthetic construct
  source 1..20: mol_type = other DNA
ttctcggcaatacgttcacc

SEQ ID NO: 22130 - DNA, 20 bp, synthetic construct
  source 1..20: mol_type = other DNA
gatacctcatctggacagtt

SEQ ID NO: 22131 - DNA, 20 bp, synthetic construct
  source 1..20: mol_type = other DNA
tactgtccctaggagcaagg

SEQ ID NO: 22132 - DNA, 20 bp, synthetic construct
  source 1..20: mol_type = other DNA
attgcggcaagaaggaagcg

SEQ ID NO: 22133 - DNA, 20 bp, synthetic construct
  source 1..20: mol_type = other DNA
catttcttgctgccaagtcc

SEQ ID NO: 22134 - DNA, 20 bp, synthetic construct
  source 1..20: mol_type = other DNA
ttggtgaaatagaacctgga

SEQ ID NO: 22135 - DNA, 20 bp, synthetic construct
  source 1..20: mol_type = other DNA
tttcaccttcaggtcatgcg

SEQ ID NO: 22136 - DNA, 20 bp, synthetic construct
  source 1..20: mol_type = other DNA
agacttctcaaagcaggtga

SEQ ID NO: 22137 - DNA, 20 bp, synthetic construct
  source 1..20: mol_type = other DNA
tccctcagggcgagcacctt

SEQ ID NO: 22138 - DNA, 20 bp, synthetic construct
  source 1..20: mol_type = other DNA
actggagtatctgtttgctc

SEQ ID NO: 22139 - DNA, 20 bp, synthetic construct
  source 1..20: mol_type = other DNA
ctgggaatcttggaatccag

SEQ ID NO: 22140 - DNA, 20 bp, synthetic construct
  source 1..20: mol_type = other DNA
catgctggctgcctcgaaga

SEQ ID NO: 22141 - DNA, 20 bp, synthetic construct
  source 1..20: mol_type = other DNA
tcccatacctcatccggtag

SEQ ID NO: 22142 - DNA, 20 bp, synthetic construct
  source 1..20: mol_type = other DNA
tcacttccacccctggctca

SEQ ID NO: 22143 - DNA, 20 bp, synthetic construct
  source 1..20: mol_type = other DNA
tgtccagatgaggtatctat

SEQ ID NO: 22144 - DNA, 20 bp, synthetic construct
  source 1..20: mol_type = other DNA
ccaattggtgaaatagaacc

SEQ ID NO: 22145 - DNA, 20 bp, synthetic construct
  source 1..20: mol_type = other DNA
tttgctcaggtaggaagttt

SEQ ID NO: 22146 - DNA, 20 bp, synthetic construct
  source 1..20: mol_type = other DNA
aacatacagaatggctgtca

SEQ ID NO: 22147 - DNA, 20 bp, synthetic construct
  source 1..20: mol_type = other DNA
tctgcaggtatgaccccgaa

SEQ ID NO: 22148 - DNA, 20 bp, synthetic construct
  source 1..20: mol_type = other DNA
gtgagctggcatcaaggaga

SEQ ID NO: 22149 - DNA, 20 bp, synthetic construct
  source 1..20: mol_type = other DNA
taccagggacacaaaggaca

SEQ ID NO: 22150 - DNA, 20 bp, synthetic construct
  source 1..20: mol_type = other DNA
gccatctaccagggacacaa

SEQ ID NO: 22151 - DNA, 20 bp, synthetic construct
  source 1..20: mol_type = other DNA
aatacgccatcaataaattg

SEQ ID NO: 22152 - DNA, 20 bp, synthetic construct
  source 1..20: mol_type = other DNA
acacactcaggagcaatcca

SEQ ID NO: 22153 - DNA, 20 bp, synthetic construct
  source 1..20: mol_type = other DNA
ctcctagggacagtatgatt

SEQ ID NO: 22154 - DNA, 20 bp, synthetic construct
  source 1..20: mol_type = other DNA
tcacaatgttctcatgatag

SEQ ID NO: 22155 - DNA, 20 bp, synthetic construct
  source 1..20: mol_type = other DNA
tccttacatgatggtgtcac

SEQ ID NO: 22156 - DNA, 20 bp, synthetic construct
  source 1..20: mol_type = other DNA
caagaagcagatcctgcgca

SEQ ID NO: 22157 - DNA, 20 bp, synthetic construct
  source 1..20: mol_type = other DNA
agagctcaaccttcccaaag

SEQ ID NO: 22158 - DNA, 20 bp, synthetic construct
  source 1..20: mol_type = other DNA
ttgccagggaaatatccctg

SEQ ID NO: 22159 - DNA, 20 bp, synthetic construct
  source 1..20: mol_type = other DNA
cagcaggttggagatttctg

SEQ ID NO: 22160 - DNA, 20 bp, synthetic construct
  source 1..20: mol_type = other DNA
acgacaatgagcagtcagtg

SEQ ID NO: 22161 - DNA, 20 bp, synthetic construct
  source 1..20: mol_type = other DNA
tagaagatcacttccacccc

SEQ ID NO: 22162 - DNA, 20 bp, synthetic construct
  source 1..20: mol_type = other DNA
actgtcatctggccatgggt

SEQ ID NO: 22163 - DNA, 20 bp, synthetic construct
  source 1..20: mol_type = other DNA
agctttcagaaccttattga

SEQ ID NO: 22164 - DNA, 20 bp, synthetic construct
  source 1..20: mol_type = other DNA
agcgcttttcaaaatgtgtg

SEQ ID NO: 22165 - DNA, 20 bp, synthetic construct
  source 1..20: mol_type = other DNA
tcccctgtattgtccccttc

SEQ ID NO: 22166 - DNA, 20 bp, synthetic construct
  source 1..20: mol_type = other DNA
tgctgccagcccaagccccg

SEQ ID NO: 22167 - DNA, 20 bp, synthetic construct
  source 1..20: mol_type = other DNA
accaaaacacagggctgtcc

SEQ ID NO: 22168 - DNA, 20 bp, synthetic construct
  source 1..20: mol_type = other DNA
ggagctttggaaccacgctc

SEQ ID NO: 22169 - DNA, 20 bp, synthetic construct
  source 1..20: mol_type = other DNA
tcgagaccccaagaccgagc

SEQ ID NO: 22170 - DNA, 20 bp, synthetic construct
  source 1..20: mol_type = other DNA
catactgtccctaggagcaa

SEQ ID NO: 22171 - DNA, 20 bp, synthetic construct
  source 1..20: mol_type = other DNA
tcgcccacaggccttcttcg

SEQ ID NO: 22172 - DNA, 20 bp, synthetic construct
  source 1..20: mol_type = other DNA
gggtcactgagcttgatgaa

SEQ ID NO: 22173 - DNA, 20 bp, synthetic construct
  source 1..20: mol_type = other DNA
caaccttcccaaagtggccc

SEQ ID NO: 22174 - DNA, 20 bp, synthetic construct
  source 1..20: mol_type = other DNA
agttcatgcagcgggtcatg

SEQ ID NO: 22175 - DNA, 20 bp, synthetic construct
  source 1..20: mol_type = other DNA
tgaatttccatggtgtggta

SEQ ID NO: 22176 - DNA, 20 bp, synthetic construct
  source 1..20: mol_type = other DNA
cacttccacccctggctcag

SEQ ID NO: 22177 - DNA, 20 bp, synthetic construct
  source 1..20: mol_type = other DNA
ttctgatgaaatcagtaaca

SEQ ID NO: 22178 - DNA, 20 bp, synthetic construct
  source 1..20: mol_type = other DNA
cacctgctttgagaagtctg

SEQ ID NO: 22179 - DNA, 20 bp, synthetic construct
  source 1..20: mol_type = other DNA
atatgccgttcagatttgta

SEQ ID NO: 22180 - DNA, 20 bp, synthetic construct
  source 1..20: mol_type = other DNA
aaaatgataggcccaaccca

SEQ ID NO: 22181 - DNA, 20 bp, synthetic construct
  source 1..20: mol_type = other DNA
acaaagaggagagatacctg

SEQ ID NO: 22182 - DNA, 20 bp, synthetic construct
  source 1..20: mol_type = other DNA
aagctttacctgatgtcctt

SEQ ID NO: 22183 - DNA, 20 bp, synthetic construct
  source 1..20: mol_type = other DNA
aggaggggatgtacgtgctg

SEQ ID NO: 22184 - DNA, 20 bp, synthetic construct
  source 1..20: mol_type = other DNA
ggaatcttggaatccagtgg

SEQ ID NO: 22185 - DNA, 20 bp, synthetic construct
  source 1..20: mol_type = other DNA
atcagcgtcttgtctttcaa

SEQ ID NO: 22186 - DNA, 20 bp, synthetic construct
  source 1..20: mol_type = other DNA
gaagctttacctgatgtcct

SEQ ID NO: 22187 - DNA, 20 bp, synthetic construct
  source 1..20: mol_type = other DNA
ggatggactatttgggttct

SEQ ID NO: 22188 - DNA, 20 bp, synthetic construct
  source 1..20: mol_type = other DNA
atcacttccacccctggctc

SEQ ID NO: 22189 - DNA, 20 bp, synthetic construct
  source 1..20: mol_type = other DNA
tgagctggcatcaaggagag

SEQ ID NO: 22190 - DNA, 20 bp, synthetic construct
  source 1..20: mol_type = other DNA
gctcatgaggtctcccaagc

SEQ ID NO: 22191 - DNA, 20 bp, synthetic construct
  source 1..20: mol_type = other DNA
cctcaagaaggatctggtgc

SEQ ID NO: 22192 - DNA, 20 bp, synthetic construct
  source 1..20: mol_type = other DNA
tcagcgtcttgtctttcaag

SEQ ID NO: 22193 - DNA, 20 bp, synthetic construct
  source 1..20: mol_type = other DNA
cgttctctactacgaagtga

SEQ ID NO: 22194 - DNA, 20 bp, synthetic construct
  source 1..20: mol_type = other DNA
ctgcaggtatgaccccgaag

SEQ ID NO: 22195 - DNA, 20 bp, synthetic construct
  source 1..20: mol_type = other DNA
gtagcagatttcccagagcg

SEQ ID NO: 22196 - DNA, 20 bp, synthetic construct
  source 1..20: mol_type = other DNA
tcattacctctgcaccgacg

SEQ ID NO: 22197 - DNA, 20 bp, synthetic construct
  source 1..20: mol_type = other DNA
cgtcggtgcagaggtaatga

SEQ ID NO: 22198 - DNA, 20 bp, synthetic construct
  source 1..20: mol_type = other DNA
gatctggtgcaggtgagtca

SEQ ID NO: 22199 - DNA, 20 bp, synthetic construct
  source 1..20: mol_type = other DNA
ctaaagaggatccgtgactt

SEQ ID NO: 22200 - DNA, 20 bp, synthetic construct
  source 1..20: mol_type = other DNA
aaattgaacttagctcatta

SEQ ID NO: 22201 - DNA, 20 bp, synthetic construct
  source 1..20: mol_type = other DNA
aattgaacttagctcattaa

SEQ ID NO: 22202 - DNA, 20 bp, synthetic construct
  source 1..20: mol_type = other DNA
ttacctgatagagttataga

SEQ ID NO: 22203 - DNA, 20 bp, synthetic construct
  source 1..20: mol_type = other DNA
ctctgtaatgttggtgaggt

SEQ ID NO: 22204 - DNA, 20 bp, synthetic construct
  source 1..20: mol_type = other DNA
agagctagatccctaaagga

SEQ ID NO: 22205 - DNA, 20 bp, synthetic construct
  source 1..20: mol_type = other DNA
tccaaagctccaaacatctg

SEQ ID NO: 22206 - DNA, 20 bp, synthetic construct
  source 1..20: mol_type = other DNA
atagagttatagatggccag

SEQ ID NO: 22207 - DNA, 20 bp, synthetic construct
  source 1..20: mol_type = other DNA
cagaatatgggactttcacc

SEQ ID NO: 22208 - DNA, 20 bp, synthetic construct
  source 1..20: mol_type = other DNA
tctgaccttagcaggatcca

SEQ ID NO: 22209 - DNA, 20 bp, synthetic construct
  source 1..20: mol_type = other DNA
tcgcaggaggccgagttccc

SEQ ID NO: 22210 - DNA, 20 bp, synthetic construct
  source 1..20: mol_type = other DNA
tcgctgcttccaggaatgac

SEQ ID NO: 22211 - DNA, 20 bp, synthetic construct
  source 1..20: mol_type = other DNA
ccacggaggacctgtcctgc

SEQ ID NO: 22212 - DNA, 20 bp, synthetic construct
  source 1..20: mol_type = other DNA
gatttctggaaagtcgcaga

SEQ ID NO: 22213 - DNA, 20 bp, synthetic construct
  source 1..20: mol_type = other DNA
gcagggcaggcaggaggcgc

SEQ ID NO: 22214 - DNA, 20 bp, synthetic construct
  source 1..20: mol_type = other DNA
gctcacatcccatcatccgc

SEQ ID NO: 22215 - DNA, 20 bp, synthetic construct
  source 1..20: mol_type = other DNA
gctgcttccaggaatgactg

SEQ ID NO: 22216 - DNA, 20 bp, synthetic construct
  source 1..20: mol_type = other DNA
ctccgcgtggctggtgacgg

SEQ ID NO: 22217 - DNA, 20 bp, synthetic construct
  source 1..20: mol_type = other DNA
cctcctccagcagttccaag

SEQ ID NO: 22218 - DNA, 20 bp, synthetic construct
  source 1..20: mol_type = other DNA
cgaagctccagacgtctgac

SEQ ID NO: 22219 - DNA, 20 bp, synthetic construct
  source 1..20: mol_type = other DNA
accaggcggtgctctccggc

SEQ ID NO: 22220 - DNA, 20 bp, synthetic construct
  source 1..20: mol_type = other DNA
cccgagccaggagcaccttc

SEQ ID NO: 22221 - DNA, 20 bp, synthetic construct
  source 1..20: mol_type = other DNA
cctgctgtacaggattcggt

SEQ ID NO: 22222 - DNA, 20 bp, synthetic construct
  source 1..20: mol_type = other DNA
gctgcaggtggtcaaacagc

SEQ ID NO: 22223 - DNA, 20 bp, synthetic construct
  source 1..20: mol_type = other DNA
ccacggagaagatgtggctc

SEQ ID NO: 22224 - DNA, 20 bp, synthetic construct
  source 1..20: mol_type = other DNA
cgacctggacacagacagtg

SEQ ID NO: 22225 - DNA, 20 bp, synthetic construct
  source 1..20: mol_type = other DNA
caaaggagaaagataggcgc

SEQ ID NO: 22226 - DNA, 20 bp, synthetic construct
  source 1..20: mol_type = other DNA
tcagcagcacctctgtcttt

SEQ ID NO: 22227 - DNA, 20 bp, synthetic construct
  source 1..20: mol_type = other DNA
gaaagtcgcagaagggctgg

SEQ ID NO: 22228 - DNA, 20 bp, synthetic construct
  source 1..20: mol_type = other DNA
catcaacaagctcaagactg

SEQ ID NO: 22229 - DNA, 20 bp, synthetic construct
  source 1..20: mol_type = other DNA
gcaaggaggtggcaccgccg

SEQ ID NO: 22230 - DNA, 20 bp, synthetic construct
  source 1..20: mol_type = other DNA
gtccttcaccaagatttacc

SEQ ID NO: 22231 - DNA, 20 bp, synthetic construct
  source 1..20: mol_type = other DNA
ctgtcctggtaacagtgacc

SEQ ID NO: 22232 - DNA, 20 bp, synthetic construct
  source 1..20: mol_type = other DNA
gaggaagctgtcaaagtcct

SEQ ID NO: 22233 - DNA, 20 bp, synthetic construct
  source 1..20: mol_type = other DNA
gcaggatccagggcactgat

SEQ ID NO: 22234 - DNA, 20 bp, synthetic construct
  source 1..20: mol_type = other DNA
ccgcctcttggaactgctgg

SEQ ID NO: 22235 - DNA, 20 bp, synthetic construct
  source 1..20: mol_type = other DNA
ctctgaccttagcaggatcc

SEQ ID NO: 22236 - DNA, 20 bp, synthetic construct
  source 1..20: mol_type = other DNA
cgcacaggtcctcagccaag

SEQ ID NO: 22237 - DNA, 20 bp, synthetic construct
  source 1..20: mol_type = other DNA
ggggctcacctttgggtctg

SEQ ID NO: 22238 - DNA, 20 bp, synthetic construct
  source 1..20: mol_type = other DNA
cccaggtggggttctgcctg

SEQ ID NO: 22239 - DNA, 20 bp, synthetic construct
  source 1..20: mol_type = other DNA
cacggagaagatgtggctcg

SEQ ID NO: 22240 - DNA, 20 bp, synthetic construct
  source 1..20: mol_type = other DNA
agtaggtgaagagctcgtac

SEQ ID NO: 22241 - DNA, 20 bp, synthetic construct
  source 1..20: mol_type = other DNA
ctcacctcagcagggcaggc

SEQ ID NO: 22242 - DNA, 20 bp, synthetic construct
  source 1..20: mol_type = other DNA
ttttcgcagatacatgtcta

SEQ ID NO: 22243 - DNA, 20 bp, synthetic construct
  source 1..20: mol_type = other DNA
cctgctgattcaacagtgca

SEQ ID NO: 22244 - DNA, 20 bp, synthetic construct
  source 1..20: mol_type = other DNA
tgaccagccgcaggctctgg

SEQ ID NO: 22245 - DNA, 20 bp, synthetic construct
  source 1..20: mol_type = other DNA
ggagctctcgaagactgctg

SEQ ID NO: 22246 - DNA, 20 bp, synthetic construct
  source 1..20: mol_type = other DNA
agtacatcatggacctggag

SEQ ID NO: 22247 - DNA, 20 bp, synthetic construct
  source 1..20: mol_type = other DNA
tctgcgaggaatagagaagg

SEQ ID NO: 22248 - DNA, 20 bp, synthetic construct
  source 1..20: mol_type = other DNA
ggcctcagtctcaaggagca

SEQ ID NO: 22249 - DNA, 20 bp, synthetic construct
  source 1..20: mol_type = other DNA
agaaccccacctgggcaaag

SEQ ID NO: 22250 - DNA, 20 bp, synthetic construct
  source 1..20: mol_type = other DNA
gggcctctggaccggctcat

SEQ ID NO: 22251 - DNA, 20 bp, synthetic construct
  source 1..20: mol_type = other DNA
ctccaggccgccagagcctg

SEQ ID NO: 22252 - DNA, 20 bp, synthetic construct
  source 1..20: mol_type = other DNA
ccagctgtgagatgtacttg

SEQ ID NO: 22253 - DNA, 20 bp, synthetic construct
  source 1..20: mol_type = other DNA
tcataaaattggagtttctg

SEQ ID NO: 22254 - DNA, 20 bp, synthetic construct
  source 1..20: mol_type = other DNA
ggagaaagataggcgctggg

SEQ ID NO: 22255 - DNA, 20 bp, synthetic construct
  source 1..20: mol_type = other DNA
gaagaagtgctgggagtccg

SEQ ID NO: 22256 - DNA, 20 bp, synthetic construct
  source 1..20: mol_type = other DNA
ccaccgcttcgggctacgca

SEQ ID NO: 22257 - DNA, 20 bp, synthetic construct
  source 1..20: mol_type = other DNA
agggtcactcagcttgatga

SEQ ID NO: 22258 - DNA, 20 bp, synthetic construct
  source 1..20: mol_type = other DNA
tgccgccgtcaccagccacg

SEQ ID NO: 22259 - DNA, 20 bp, synthetic construct
  source 1..20: mol_type = other DNA
tcctggtaacagtgaccagg

SEQ ID NO: 22260 - DNA, 20 bp, synthetic construct
  source 1..20: mol_type = other DNA
ccaggagttcctgcggatga

SEQ ID NO: 22261 - DNA, 20 bp, synthetic construct
  source 1..20: mol_type = other DNA
ctcactgtctgtgtccaggt

SEQ ID NO: 22262 - DNA, 20 bp, synthetic construct
  source 1..20: mol_type = other DNA
gctgctccacggcgtgtgca

SEQ ID NO: 22263 - DNA, 20 bp, synthetic construct
  source 1..20: mol_type = other DNA
gtgaaacagctgcagcacag

SEQ ID NO: 22264 - DNA, 20 bp, synthetic construct
  source 1..20: mol_type = other DNA
cttcaggtgcccgctgggac

SEQ ID NO: 22265 - DNA, 20 bp, synthetic construct
  source 1..20: mol_type = other DNA
cctgggcaaagaggtgctcc

SEQ ID NO: 22266 - DNA, 20 bp, synthetic construct
  source 1..20: mol_type = other DNA
tgtcgcctagcgggtcatag

SEQ ID NO: 22267 - DNA, 20 bp, synthetic construct
  source 1..20: mol_type = other DNA
ggaatagagaaggaggcggc

SEQ ID NO: 22268 - DNA, 20 bp, synthetic construct
  source 1..20: mol_type = other DNA
agcttggaagctgacaagtg

SEQ ID NO: 22269 - DNA, 20 bp, synthetic construct
  source 1..20: mol_type = other DNA
gaccacctgcagcttccagc

SEQ ID NO: 22270 - DNA, 20 bp, synthetic construct
  source 1..20: mol_type = other DNA
accaggtcactgcggtgctg

SEQ ID NO: 22271 - DNA, 20 bp, synthetic construct
  source 1..20: mol_type = other DNA
ccatgaccagccgcaggctc

SEQ ID NO: 22272 - DNA, 20 bp, synthetic construct
  source 1..20: mol_type = other DNA
tgaatgatggccggtcctgt

SEQ ID NO: 22273 - DNA, 20 bp, synthetic construct
  source 1..20: mol_type = other DNA
aaggggctcacctttgggtc

SEQ ID NO: 22274 - DNA, 20 bp, synthetic construct
  source 1..20: mol_type = other DNA
gtctctcctcgaagatcgtg

SEQ ID NO: 22275 - DNA, 20 bp, synthetic construct
  source 1..20: mol_type = other DNA
cgctgccaaagttgccctgg

SEQ ID NO: 22276 - DNA, 20 bp, synthetic construct
  source 1..20: mol_type = other DNA
ttggggaagtaaaagctgtg

SEQ ID NO: 22277 - DNA, 20 bp, synthetic construct
  source 1..20: mol_type = other DNA
gtacagcaggacttgggtgc

SEQ ID NO: 22278 - DNA, 20 bp, synthetic construct
  source 1..20: mol_type = other DNA
gcttgcgcgacttcctgcag

SEQ ID NO: 22279 - DNA, 20 bp, synthetic construct
  source 1..20: mol_type = other DNA
catctcttcaggtgcccgct

SEQ ID NO: 22280 - DNA, 20 bp, synthetic construct
  source 1..20: mol_type = other DNA
tgctgtatccccagacccaa

SEQ ID NO: 22281 - DNA, 20 bp, synthetic construct
  source 1..20: mol_type = other DNA
tttctatggggagaggatga

SEQ ID NO: 22282 - DNA, 20 bp, synthetic construct
  source 1..20: mol_type = other DNA
gctctcgcgccatccgggcc

SEQ ID NO: 22283 - DNA, 20 bp, synthetic construct
  source 1..20: mol_type = other DNA
ctcgtgaacctgaggggcgg

SEQ ID NO: 22284 - DNA, 20 bp, synthetic construct
  source 1..20: mol_type = other DNA
agtgaccaggcggtgctctc

SEQ ID NO: 22285 - DNA, 20 bp, synthetic construct
  source 1..20: mol_type = other DNA
cggagaagatgtggctcggg

SEQ ID NO: 22286 - DNA, 20 bp, synthetic construct
  source 1..20: mol_type = other DNA
cctccagcagttccaagagg

SEQ ID NO: 22287 - DNA, 20 bp, synthetic construct
  source 1..20: mol_type = other DNA
cagcgcctatctttctcctt

SEQ ID NO: 22288 - DNA, 20 bp, synthetic construct
  source 1..20: mol_type = other DNA
gcggatgatgggatgtgagc

SEQ ID NO: 22289 - DNA, 20 bp, synthetic construct
  source 1..20: mol_type = other DNA
ttaccggggctgtcgccatg

SEQ ID NO: 22290 - DNA, 20 bp, synthetic construct
  source 1..20: mol_type = other DNA
tccacagcatgtccagctgg

SEQ ID NO: 22291 - DNA, 20 bp, synthetic construct
  source 1..20: mol_type = other DNA
tcgcaccttgcagatctgcg

SEQ ID NO: 22292 - DNA, 20 bp, synthetic construct
  source 1..20: mol_type = other DNA
gcccacgtggaaggtctcgg

SEQ ID NO: 22293 - DNA, 20 bp, synthetic construct
  source 1..20: mol_type = other DNA
aattcctgcaccatggtgcc

SEQ ID NO: 22294 - DNA, 20 bp, synthetic construct
  source 1..20: mol_type = other DNA
gctcatggccaagtacatca

SEQ ID NO: 22295 - DNA, 20 bp, synthetic construct
  source 1..20: mol_type = other DNA
atttctggaaagtcgcagaa

SEQ ID NO: 22296 - DNA, 20 bp, synthetic construct
  source 1..20: mol_type = other DNA
tggccagagcaaagagggag

SEQ ID NO: 22297 - DNA, 20 bp, synthetic construct
  source 1..20: mol_type = other DNA
gagccacatcttctccgtgg

SEQ ID NO: 22298 - DNA, 20 bp, synthetic construct
  source 1..20: mol_type = other DNA
ggcagaccggcactcgctca

SEQ ID NO: 22299 - DNA, 20 bp, synthetic construct
  source 1..20: mol_type = other DNA
ccaggtcactgcggtgctgg

SEQ ID NO: 22300 - DNA, 20 bp, synthetic construct
  source 1..20: mol_type = other DNA
tggagtgggtaagaggccct

SEQ ID NO: 22301 - DNA, 20 bp, synthetic construct
  source 1..20: mol_type = other DNA
tgagaggagctcatagtctg

SEQ ID NO: 22302 - DNA, 20 bp, synthetic construct
  source 1..20: mol_type = other DNA
cagcgccctgggcccccagc

SEQ ID NO: 22303 - DNA, 20 bp, synthetic construct
  source 1..20: mol_type = other DNA
aaccagaaggaaggttcctg

SEQ ID NO: 22304 - DNA, 20 bp, synthetic construct
  source 1..20: mol_type = other DNA
tctgtcgttcgtggcgctcg

SEQ ID NO: 22305 - DNA, 20 bp, synthetic construct
  source 1..20: mol_type = other DNA
ggaggaagctgtcaaagtcc

SEQ ID NO: 22306 - DNA, 20 bp, synthetic construct
  source 1..20: mol_type = other DNA
aaagtccagactgtggggga

SEQ ID NO: 22307 - DNA, 20 bp, synthetic construct
  source 1..20: mol_type = other DNA
ccagggcgctgaatgatggc

SEQ ID NO: 22308 - DNA, 20 bp, synthetic construct
  source 1..20: mol_type = other DNA
ccccacaggaaccttccttc

SEQ ID NO: 22309 - DNA, 20 bp, synthetic construct
  source 1..20: mol_type = other DNA
ctgtgccgctatgacccgct

SEQ ID NO: 22310 - DNA, 20 bp, synthetic construct
  source 1..20: mol_type = other DNA
agaaaagtccaacctgatcg

SEQ ID NO: 22311 - DNA, 20 bp, synthetic construct
  source 1..20: mol_type = other DNA
gcccccagctggacatgctg

SEQ ID NO: 22312 - DNA, 20 bp, synthetic construct
  source 1..20: mol_type = other DNA
cctcacctcctgttctccct

SEQ ID NO: 22313 - DNA, 20 bp, synthetic construct
  source 1..20: mol_type = other DNA
aaatcttggtgaaggaccca

SEQ ID NO: 22314 - DNA, 20 bp, synthetic construct
  source 1..20: mol_type = other DNA
acggtctgggaagtgtttag

SEQ ID NO: 22315 - DNA, 20 bp, synthetic construct
  source 1..20: mol_type = other DNA
atccagggcactgatgggca

SEQ ID NO: 22316 - DNA, 20 bp, synthetic construct
  source 1..20: mol_type = other DNA
cccgctgaaagtccctctgc

SEQ ID NO: 22317 - DNA, 20 bp, synthetic construct
  source 1..20: mol_type = other DNA
atcaggtcgcgcaggcttgg

SEQ ID NO: 22318 - DNA, 20 bp, synthetic construct
  source 1..20: mol_type = other DNA
agcagctgccggcccccaag

SEQ ID NO: 22319 - DNA, 20 bp, synthetic construct
  source 1..20: mol_type = other DNA
tgacgcggaggcgtattcgg

SEQ ID NO: 22320 - DNA, 20 bp, synthetic construct
  source 1..20: mol_type = other DNA
cggaaggagggcctctggac

SEQ ID NO: 22321 - DNA, 20 bp, synthetic construct
  source 1..20: mol_type = other DNA
tccggccgggccaacgcgcg

SEQ ID NO: 22322 - DNA, 20 bp, synthetic construct
  source 1..20: mol_type = other DNA
ctgaagagatgaggctattg

SEQ ID NO: 22323 - DNA, 20 bp, synthetic construct
  source 1..20: mol_type = other DNA
ggaagctgtcaaagtcctgg

SEQ ID NO: 22324 - DNA, 20 bp, synthetic construct
  source 1..20: mol_type = other DNA
ctctccaggcttaacacagc

SEQ ID NO: 22325 - DNA, 20 bp, synthetic construct
  source 1..20: mol_type = other DNA
tacacaggcaggatgcctac

SEQ ID NO: 22326 - DNA, 20 bp, synthetic construct
  source 1..20: mol_type = other DNA
ggaggcgcagacacttagct

SEQ ID NO: 22327 - DNA, 20 bp, synthetic construct
  source 1..20: mol_type = other DNA
gagcactgagggaatgaaag

SEQ ID NO: 22328 - DNA, 20 bp, synthetic construct
  source 1..20: mol_type = other DNA
aggcgacaatacaggtgccc

SEQ ID NO: 22329 - DNA, 20 bp, synthetic construct
  source 1..20: mol_type = other DNA
agatctgcgaggaatagaga

SEQ ID NO: 22330 - DNA, 20 bp, synthetic construct
  source 1..20: mol_type = other DNA
gggttccccaccagaaaatg

SEQ ID NO: 22331 - DNA, 20 bp, synthetic construct
  source 1..20: mol_type = other DNA
ccaaccaggcaccatggtgc

SEQ ID NO: 22332 - DNA, 20 bp, synthetic construct
  source 1..20: mol_type = other DNA
gagagaagatgttgtccgag

SEQ ID NO: 22333 - DNA, 20 bp, synthetic construct
  source 1..20: mol_type = other DNA
gctccaggactggcaggtca

SEQ ID NO: 22334 - DNA, 20 bp, synthetic construct
  source 1..20: mol_type = other DNA
acgctgccaaagttgccctg

SEQ ID NO: 22335 - DNA, 20 bp, synthetic construct
  source 1..20: mol_type = other DNA
gagctcgtgaacctgagggg

SEQ ID NO: 22336 - DNA, 20 bp, synthetic construct
  source 1..20: mol_type = other DNA
ccgggcagagacattgccat

SEQ ID NO: 22337 - DNA, 20 bp, synthetic construct
  source 1..20: mol_type = other DNA
actaaacacttcccagaccg

SEQ ID NO: 22338 - DNA, 20 bp, synthetic construct
  source 1..20: mol_type = other DNA
tccgggcagagacattgcca

SEQ ID NO: 22339 - DNA, 20 bp, synthetic construct
  source 1..20: mol_type = other DNA
caagtggggcttcggcgcca

SEQ ID NO: 22340 - DNA, 20 bp, synthetic construct
  source 1..20: mol_type = other DNA
gtccaggtcggtctactgct

SEQ ID NO: 22341 - DNA, 20 bp, synthetic construct
  source 1..20: mol_type = other DNA
agggccagctctgtccactt

SEQ ID NO: 22342 - DNA, 20 bp, synthetic construct
  source 1..20: mol_type = other DNA
cagtcagacgtctggagctt

SEQ ID NO: 22343 - DNA, 20 bp, synthetic construct
  source 1..20: mol_type = other DNA
cccatggcaatgtctctgcc

SEQ ID NO: 22344 - DNA, 20 bp, synthetic construct
  source 1..20: mol_type = other DNA
cgcgcaagcagccgctgggc

SEQ ID NO: 22345 - DNA, 20 bp, synthetic construct
  source 1..20: mol_type = other DNA
cggctacttccggctgacca

SEQ ID NO: 22346 - DNA, 20 bp, synthetic construct
  source 1..20: mol_type = other DNA
gatcaggttggacttttcta

SEQ ID NO: 22347 - DNA, 20 bp, synthetic construct
  source 1..20: mol_type = other DNA
atcaggttggacttttctat

SEQ ID NO: 22348 - DNA, 20 bp, synthetic construct
  source 1..20: mol_type = other DNA
gtgcaggaatttgtacacct

SEQ ID NO: 22349 - DNA, 20 bp, synthetic construct
  source 1..20: mol_type = other DNA
gccgccgagaccttccacgt

SEQ ID NO: 22350 - DNA, 20 bp, synthetic construct
  source 1..20: mol_type = other DNA
tggaggacctgggaaggagg

SEQ ID NO: 22351 - DNA, 20 bp, synthetic construct
  source 1..20: mol_type = other DNA
accattcagcatgagaacct

SEQ ID NO: 22352 - DNA, 20 bp, synthetic construct
  source 1..20: mol_type = other DNA
cgcagatctgcaaggtgcga

SEQ ID NO: 22353 - DNA, 20 bp, synthetic construct
  source 1..20: mol_type = other DNA
gcacgcagcggcgggagccc

SEQ ID NO: 22354 - DNA, 20 bp, synthetic construct
  source 1..20: mol_type = other DNA
cctgcaccatggtgcctggt

SEQ ID NO: 22355 - DNA, 20 bp, synthetic construct
  source 1..20: mol_type = other DNA
agcactcaccagatagttga

SEQ ID NO: 22356 - DNA, 20 bp, synthetic construct
  source 1..20: mol_type = other DNA
caccgacaggatcccctggg

SEQ ID NO: 22357 - DNA, 20 bp, synthetic construct
  source 1..20: mol_type = other DNA
caggcctttgtcctcctaag

SEQ ID NO: 22358 - DNA, 20 bp, synthetic construct
  source 1..20: mol_type = other DNA
gcctcctgcctgccctgctg

SEQ ID NO: 22359 - DNA, 20 bp, synthetic construct
  source 1..20: mol_type = other DNA
gcccaggttctcatgctgaa

SEQ ID NO: 22360 - DNA, 20 bp, synthetic construct
  source 1..20: mol_type = other DNA
cgtggagcagcacgagatgc

SEQ ID NO: 22361 - DNA, 20 bp, synthetic construct
  source 1..20: mol_type = other DNA
ttggagtttctgagggtgag

SEQ ID NO: 22362 - DNA, 20 bp, synthetic construct
  source 1..20: mol_type = other DNA
ccacgctgccaaagttgccc

SEQ ID NO: 22363 - DNA, 20 bp, synthetic construct
  source 1..20: mol_type = other DNA
ggtcgcgcaggcttgggggt

SEQ ID NO: 22364 - DNA, 20 bp, synthetic construct
  source 1..20: mol_type = other DNA
tggcaggtcaaggatagcac

SEQ ID NO: 22365 - DNA, 20 bp, synthetic construct
  source 1..20: mol_type = other DNA
ccctcacctcctgttctccc

SEQ ID NO: 22366 - DNA, 20 bp, synthetic construct
  source 1..20: mol_type = other DNA
catgtccagctgggggccca

SEQ ID NO: 22367 - DNA, 20 bp, synthetic construct
  source 1..20: mol_type = other DNA
gctcaccgacaggatcccct

SEQ ID NO: 22368 - DNA, 20 bp, synthetic construct
  source 1..20: mol_type = other DNA
atcaacaagctcaagactgg

SEQ ID NO: 22369 - DNA, 20 bp, synthetic construct
  source 1..20: mol_type = other DNA
gcccaggtggggttctgcct

SEQ ID NO: 22370 - DNA, 20 bp, synthetic construct
  source 1..20: mol_type = other DNA
gagcgggcagcagcacatgc

SEQ ID NO: 22371 - DNA, 20 bp, synthetic construct
  source 1..20: mol_type = other DNA
cctcgaagatcgtggggtct

SEQ ID NO: 22372 - DNA, 20 bp, synthetic construct
  source 1..20: mol_type = other DNA
catccgggccaggtccaaca

SEQ ID NO: 22373 - DNA, 20 bp, synthetic construct
  source 1..20: mol_type = other DNA
catgcactgttgaatcagca

SEQ ID NO: 22374 - DNA, 20 bp, synthetic construct
  source 1..20: mol_type = other DNA
cagccccgctgtgttaagcc

SEQ ID NO: 22375 - DNA, 20 bp, synthetic construct
  source 1..20: mol_type = other DNA
cggggaggcgcccactcacc

SEQ ID NO: 22376 - DNA, 20 bp, synthetic construct
  source 1..20: mol_type = other DNA
ggggctgcggcggagaacat

SEQ ID NO: 22377 - DNA, 20 bp, synthetic construct
  source 1..20: mol_type = other DNA
caaggtgcgagggggcgccc

SEQ ID NO: 22378 - DNA, 20 bp, synthetic construct
  source 1..20: mol_type = other DNA
aagggctggaggacctggga

SEQ ID NO: 22379 - DNA, 20 bp, synthetic construct
  source 1..20: mol_type = other DNA
ccgagccaggagcaccttcc

SEQ ID NO: 22380 - DNA, 20 bp, synthetic construct
  source 1..20: mol_type = other DNA
ctccacgaggatgtttcggg

SEQ ID NO: 22381 - DNA, 20 bp, synthetic construct
  source 1..20: mol_type = other DNA
gtgcaggctgccaaggccag

SEQ ID NO: 22382 - DNA, 20 bp, synthetic construct
  source 1..20: mol_type = other DNA
acacaggcaggatgcctaca

SEQ ID NO: 22383 - DNA, 20 bp, synthetic construct
  source 1..20: mol_type = other DNA
cttccaggaatgactgggga

SEQ ID NO: 22384 - DNA, 20 bp, synthetic construct
  source 1..20: mol_type = other DNA
gtcacgaatgacggctcgga

SEQ ID NO: 22385 - DNA, 20 bp, synthetic construct
  source 1..20: mol_type = other DNA
atgcagggcaccagcctccg

SEQ ID NO: 22386 - DNA, 20 bp, synthetic construct
  source 1..20: mol_type = other DNA
ctgcggcgctcacctcagca

SEQ ID NO: 22387 - DNA, 20 bp, synthetic construct
  source 1..20: mol_type = other DNA
cccagggaggcccacgtgga

SEQ ID NO: 22388 - DNA, 20 bp, synthetic construct
  source 1..20: mol_type = other DNA
ggccaagtacatcatggacc

SEQ ID NO: 22389 - DNA, 20 bp, synthetic construct
  source 1..20: mol_type = other DNA
ccaggtcgcggtgcacgcag

SEQ ID NO: 22390 - DNA, 20 bp, synthetic construct
  source 1..20: mol_type = other DNA
taaaatctggttgtctgtcc

SEQ ID NO: 22391 - DNA, 20 bp, synthetic construct
  source 1..20: mol_type = other DNA
ctctgcccggaaggtgctcc

SEQ ID NO: 22392 - DNA, 20 bp, synthetic construct
  source 1..20: mol_type = other DNA
aggttcctgtggggctgcgc

SEQ ID NO: 22393 - DNA, 20 bp, synthetic construct
  source 1..20: mol_type = other DNA
ggagcagccccagcccgtcg

SEQ ID NO: 22394 - DNA, 20 bp, synthetic construct
  source 1..20: mol_type = other DNA
cgtgttggacctggcccgga

SEQ ID NO: 22395 - DNA, 20 bp, synthetic construct
  source 1..20: mol_type = other DNA
ctccaggtccatgatgtact

SEQ ID NO: 22396 - DNA, 20 bp, synthetic construct
  source 1..20: mol_type = other DNA
attcgggggcatacctggag

SEQ ID NO: 22397 - DNA, 20 bp, synthetic construct
  source 1..20: mol_type = other DNA
tccagctggctggcaccagg

SEQ ID NO: 22398 - DNA, 20 bp, synthetic construct
  source 1..20: mol_type = other DNA
atcaagcaggccccgcgcgt

SEQ ID NO: 22399 - DNA, 20 bp, synthetic construct
  source 1..20: mol_type = other DNA
gagcactcaccagatagttg

SEQ ID NO: 22400 - DNA, 20 bp, synthetic construct
  source 1..20: mol_type = other DNA
gacatgtatctgcgaaaacg

SEQ ID NO: 22401 - DNA, 20 bp, synthetic construct
  source 1..20: mol_type = other DNA
caagcggcagcagcttagct

SEQ ID NO: 22402 - DNA, 20 bp, synthetic construct
  source 1..20: mol_type = other DNA
ccgcagggcatggagtacct

SEQ ID NO: 22403 - DNA, 20 bp, synthetic construct
  source 1..20: mol_type = other DNA
cagaaaatggggctctggcc

SEQ ID NO: 22404 - DNA, 20 bp, synthetic construct
  source 1..20: mol_type = other DNA
ggtactccatgccctgcggg

SEQ ID NO: 22405 - DNA, 20 bp, synthetic construct
  source 1..20: mol_type = other DNA
ggtgctggggggccgccaca

SEQ ID NO: 22406 - DNA, 20 bp, synthetic construct
  source 1..20: mol_type = other DNA
cgcctggacccagggagaac

SEQ ID NO: 22407 - DNA, 20 bp, synthetic construct
  source 1..20: mol_type = other DNA
tcatcaagctcgctgcttcc

SEQ ID NO: 22408 - DNA, 20 bp, synthetic construct
  source 1..20: mol_type = other DNA
cagcccatcacgaggtgcca

SEQ ID NO: 22409 - DNA, 20 bp, synthetic construct
  source 1..20: mol_type = other DNA
cccgagccacatcttctccg

SEQ ID NO: 22410 - DNA, 20 bp, synthetic construct
  source 1..20: mol_type = other DNA
tgggtgggctgtgacctctc

SEQ ID NO: 22411 - DNA, 20 bp, synthetic construct
  source 1..20: mol_type = other DNA
cagggccagctctgtccact

SEQ ID NO: 22412 - DNA, 20 bp, synthetic construct
  source 1..20: mol_type = other DNA
ccttataatcaggaccaagg

SEQ ID NO: 22413 - DNA, 20 bp, synthetic construct
  source 1..20: mol_type = other DNA
cgaatgacggctcggaagga

SEQ ID NO: 22414 - DNA, 20 bp, synthetic construct
  source 1..20: mol_type = other DNA
atcctgcacccactaaaatc

SEQ ID NO: 22415 - DNA, 20 bp, synthetic construct
  source 1..20: mol_type = other DNA
ccatgagtgcaacttgcctg

SEQ ID NO: 22416 - DNA, 20 bp, synthetic construct
  source 1..20: mol_type = other DNA
gggcccagggcgctgaatga

SEQ ID NO: 22417 - DNA, 20 bp, synthetic construct
  source 1..20: mol_type = other DNA
gggtcactcagcttgatgaa

SEQ ID NO: 22418 - DNA, 20 bp, synthetic construct
  source 1..20: mol_type = other DNA
gcagcccctcggccgtgagt

SEQ ID NO: 22419 - DNA, 20 bp, synthetic construct
  source 1..20: mol_type = other DNA
tggtgaaggacccatggccc

SEQ ID NO: 22420 - DNA, 20 bp, synthetic construct
  source 1..20: mol_type = other DNA
gaagtaaaagctgtgaggag

SEQ ID NO: 22421 - DNA, 20 bp, synthetic construct
  source 1..20: mol_type = other DNA
gcaaagagggagtggtacac

SEQ ID NO: 22422 - DNA, 20 bp, synthetic construct
  source 1..20: mol_type = other DNA
ggtgagtgggcgcctccccg

SEQ ID NO: 22423 - DNA, 20 bp, synthetic construct
  source 1..20: mol_type = other DNA
cggctcggaaggagggcctc

SEQ ID NO: 22424 - DNA, 20 bp, synthetic construct
  source 1..20: mol_type = other DNA
atgaggcagcccttataatc

SEQ ID NO: 22425 - DNA, 20 bp, synthetic construct
  source 1..20: mol_type = other DNA
gcgagagcaggcccagcggc

SEQ ID NO: 22426 - DNA, 20 bp, synthetic construct
  source 1..20: mol_type = other DNA
cacaggcaggatgcctacag

SEQ ID NO: 22427 - DNA, 20 bp, synthetic construct
  source 1..20: mol_type = other DNA
ggccacccaggggatcctgt

SEQ ID NO: 22428 - DNA, 20 bp, synthetic construct
  source 1..20: mol_type = other DNA
caagatccctgctgacagcc

SEQ ID NO: 22429 - DNA, 20 bp, synthetic construct
  source 1..20: mol_type = other DNA
ttctcatgctgaatggtgag

SEQ ID NO: 22430 - DNA, 20 bp, synthetic construct
  source 1..20: mol_type = other DNA
tcctggcaacctgctgggat

SEQ ID NO: 22431 - DNA, 20 bp, synthetic construct
  source 1..20: mol_type = other DNA
gggccagctctgtccacttg

SEQ ID NO: 22432 - DNA, 20 bp, synthetic construct
  source 1..20: mol_type = other DNA
ggtactccatgaccagccgc

SEQ ID NO: 22433 - DNA, 20 bp, synthetic construct
  source 1..20: mol_type = other DNA
gcagaagggctggaggacct

SEQ ID NO: 22434 - DNA, 20 bp, synthetic construct
  source 1..20: mol_type = other DNA
taggcaggccttgtagctgc

SEQ ID NO: 22435 - DNA, 20 bp, synthetic construct
  source 1..20: mol_type = other DNA
gccgaggctgctggaggaag

SEQ ID NO: 22436 - DNA, 20 bp, synthetic construct
  source 1..20: mol_type = other DNA
tcttcaggtgcccgctggga

SEQ ID NO: 22437 - DNA, 20 bp, synthetic construct
  source 1..20: mol_type = other DNA
gtgcagccccccatcccagc

SEQ ID NO: 22438 - DNA, 20 bp, synthetic construct
  source 1..20: mol_type = other DNA
caccatgcccatcagtgccc

SEQ ID NO: 22439 - DNA, 20 bp, synthetic construct
  source 1..20: mol_type = other DNA
cataaaattggagtttctga

SEQ ID NO: 22440 - DNA, 20 bp, synthetic construct
  source 1..20: mol_type = other DNA
cctggacacagacagtgagg

SEQ ID NO: 22441 - DNA, 20 bp, synthetic construct
  source 1..20: mol_type = other DNA
cccaggtactccatgccctg

SEQ ID NO: 22442 - DNA, 20 bp, synthetic construct
  source 1..20: mol_type = other DNA
agcgggcacctgaagagatg

SEQ ID NO: 22443 - DNA, 20 bp, synthetic construct
  source 1..20: mol_type = other DNA
cagctggacatgctgtggag

SEQ ID NO: 22444 - DNA, 20 bp, synthetic construct
  source 1..20: mol_type = other DNA
ggtgcaggaatttgtacacc

SEQ ID NO: 22445 - DNA, 20 bp, synthetic construct
  source 1..20: mol_type = other DNA
cgaagctcaggccctggatc

SEQ ID NO: 22446 - DNA, 20 bp, synthetic construct
  source 1..20: mol_type = other DNA
gtggaaggtctcggcggccc

SEQ ID NO: 22447 - DNA, 20 bp, synthetic construct
  source 1..20: mol_type = other DNA
ctgtggggctgcgccggatg

SEQ ID NO: 22448 - DNA, 20 bp, synthetic construct
  source 1..20: mol_type = other DNA
gctgaggccaaccagaagga

SEQ ID NO: 22449 - DNA, 20 bp, synthetic construct
  source 1..20: mol_type = other DNA
cagagacattgccatggggc

SEQ ID NO: 22450 - DNA, 20 bp, synthetic construct
  source 1..20: mol_type = other DNA
tcaccaggtcactgcggtgc

SEQ ID NO: 22451 - DNA, 20 bp, synthetic construct
  source 1..20: mol_type = other DNA
gcccactcaccaggtcactg

SEQ ID NO: 22452 - DNA, 20 bp, synthetic construct
  source 1..20: mol_type = other DNA
tcgtggtgtcagctatggcc

SEQ ID NO: 22453 - DNA, 20 bp, synthetic construct
  source 1..20: mol_type = other DNA
ccatcaacaagctcaagact

SEQ ID NO: 22454 - DNA, 20 bp, synthetic construct
  source 1..20: mol_type = other DNA
gcagatctgcaaggtgcgag

SEQ ID NO: 22455 - DNA, 20 bp, synthetic construct
  source 1..20: mol_type = other DNA
tcggggggaaccagcaggac

SEQ ID NO: 22456 - DNA, 20 bp, synthetic construct
  source 1..20: mol_type = other DNA
tccacggagaagatgtggct

SEQ ID NO: 22457 - DNA, 20 bp, synthetic construct
  source 1..20: mol_type = other DNA
ttccctcagtgctcaccgac

SEQ ID NO: 22458 - DNA, 20 bp, synthetic construct
  source 1..20: mol_type = other DNA
catgagctcgtgaacctgag

SEQ ID NO: 22459 - DNA, 20 bp, synthetic construct
  source 1..20: mol_type = other DNA
cccaccagaaaatggggctc

SEQ ID NO: 22460 - DNA, 20 bp, synthetic construct
  source 1..20: mol_type = other DNA
cctggagcacctctttgccc

SEQ ID NO: 22461 - DNA, 20 bp, synthetic construct
  source 1..20: mol_type = other DNA
gggcctcagtctcaaggagc

SEQ ID NO: 22462 - DNA, 20 bp, synthetic construct
  source 1..20: mol_type = other DNA
gctctccacgaggatgtttc

SEQ ID NO: 22463 - DNA, 20 bp, synthetic construct
  source 1..20: mol_type = other DNA
agccagctggaagctgcagg

SEQ ID NO: 22464 - DNA, 20 bp, synthetic construct
  source 1..20: mol_type = other DNA
tcactcagcttgatgaaggg

SEQ ID NO: 22465 - DNA, 20 bp, synthetic construct
  source 1..20: mol_type = other DNA
ttttctatggggagaggatg

SEQ ID NO: 22466 - DNA, 20 bp, synthetic construct
  source 1..20: mol_type = other DNA
aagtatcgtggtgtcagcta

SEQ ID NO: 22467 - DNA, 20 bp, synthetic construct
  source 1..20: mol_type = other DNA
gagcacctctttgcccaggt

SEQ ID NO: 22468 - DNA, 20 bp, synthetic construct
  source 1..20: mol_type = other DNA
tgccacggccccatcacgta

SEQ ID NO: 22469 - DNA, 20 bp, synthetic construct
  source 1..20: mol_type = other DNA
cctccttgcagaagaagtgc

SEQ ID NO: 22470 - DNA, 20 bp, synthetic construct
  source 1..20: mol_type = other DNA
gatacatgtctatggccccc

SEQ ID NO: 22471 - DNA, 20 bp, synthetic construct
  source 1..20: mol_type = other DNA
gatggcaaagtccagactgt

SEQ ID NO: 22472 - DNA, 20 bp, synthetic construct
  source 1..20: mol_type = other DNA
gccccggtaaatcttggtga

SEQ ID NO: 22473 - DNA, 20 bp, synthetic construct
  source 1..20: mol_type = other DNA
cgacaatacaggtgccctgg

SEQ ID NO: 22474 - DNA, 20 bp, synthetic construct
  source 1..20: mol_type = other DNA
gtgtacaaattcctgcacca

SEQ ID NO: 22475 - DNA, 20 bp, synthetic construct
  source 1..20: mol_type = other DNA
aggagaaagataggcgctgg

SEQ ID NO: 22476 - DNA, 20 bp, synthetic construct
  source 1..20: mol_type = other DNA
tccaagaggcggcagagggc

SEQ ID NO: 22477 - DNA, 20 bp, synthetic construct
  source 1..20: mol_type = other DNA
gtatgcccccgaatccctct

SEQ ID NO: 22478 - DNA, 20 bp, synthetic construct
  source 1..20: mol_type = other DNA
ctgaatgatggccggtcctg

SEQ ID NO: 22479 - DNA, 20 bp, synthetic construct
  source 1..20: mol_type = other DNA
aggaactcctggagccaagg

SEQ ID NO: 22480 - DNA, 20 bp, synthetic construct
  source 1..20: mol_type = other DNA
gcatgtccagctgggggccc

SEQ ID NO: 22481 - DNA, 20 bp, synthetic construct
  source 1..20: mol_type = other DNA
tctccggccgggccaacgcg

SEQ ID NO: 22482 - DNA, 20 bp, synthetic construct
  source 1..20: mol_type = other DNA
tggcctatgagccggtccag

SEQ ID NO: 22483 - DNA, 20 bp, synthetic construct
  source 1..20: mol_type = other DNA
gggtggcccccgagtgtctc

SEQ ID NO: 22484 - DNA, 20 bp, synthetic construct
  source 1..20: mol_type = other DNA
tgtagctgcaggggttggag

SEQ ID NO: 22485 - DNA, 20 bp, synthetic construct
  source 1..20: mol_type = other DNA
catggtgcctggttggcagc

SEQ ID NO: 22486 - DNA, 20 bp, synthetic construct
  source 1..20: mol_type = other DNA
cctaccgaatcctgtacagc

SEQ ID NO: 22487 - DNA, 20 bp, synthetic construct
  source 1..20: mol_type = other DNA
gcaggccccgcgcgttggcc

SEQ ID NO: 22488 - DNA, 20 bp, synthetic construct
  source 1..20: mol_type = other DNA
cacgtcaagatcgctgactt

SEQ ID NO: 22489 - DNA, 20 bp, synthetic construct
  source 1..20: mol_type = other DNA
caggaatgactggggaaggt

SEQ ID NO: 22490 - DNA, 20 bp, synthetic construct
  source 1..20: mol_type = other DNA
gcaggcctttgtcctcctaa

SEQ ID NO: 22491 - DNA, 20 bp, synthetic construct
  source 1..20: mol_type = other DNA
cgggcagagacattgccatg

SEQ ID NO: 22492 - DNA, 20 bp, synthetic construct
  source 1..20: mol_type = other DNA
atggcaaagtccagactgtg

SEQ ID NO: 22493 - DNA, 20 bp, synthetic construct
  source 1..20: mol_type = other DNA
cagcgggccagaccagcaga

SEQ ID NO: 22494 - DNA, 20 bp, synthetic construct
  source 1..20: mol_type = other DNA
ttcgggggcatacctggaga

SEQ ID NO: 22495 - DNA, 20 bp, synthetic construct
  source 1..20: mol_type = other DNA
cgagatgccggtacgacact

SEQ ID NO: 22496 - DNA, 20 bp, synthetic construct
  source 1..20: mol_type = other DNA
gcacccaagtcctgctgtac

SEQ ID NO: 22497 - DNA, 20 bp, synthetic construct
  source 1..20: mol_type = other DNA
ggccgcccgaaacatcctcg

SEQ ID NO: 22498 - DNA, 20 bp, synthetic construct
  source 1..20: mol_type = other DNA
attataagggctgcctcatc

SEQ ID NO: 22499 - DNA, 20 bp, synthetic construct
  source 1..20: mol_type = other DNA
gcgaggaatagagaaggagg

SEQ ID NO: 22500 - DNA, 20 bp, synthetic construct
  source 1..20: mol_type = other DNA
gcaaagaggtgctccaggac

SEQ ID NO: 22501 - DNA, 20 bp, synthetic construct
  source 1..20: mol_type = other DNA
atggtgcctggttggcagca

SEQ ID NO: 22502 - DNA, 20 bp, synthetic construct
  source 1..20: mol_type = other DNA
ttcatcaagctgagtgaccc

SEQ ID NO: 22503 - DNA, 20 bp, synthetic construct
  source 1..20: mol_type = other DNA
gcacttcttctgcaaggagg

SEQ ID NO: 22504 - DNA, 20 bp, synthetic construct
  source 1..20: mol_type = other DNA
cctcaagtacatctcacagc

SEQ ID NO: 22505 - DNA, 20 bp, synthetic construct
  source 1..20: mol_type = other DNA
tggcaaagtccagactgtgg

SEQ ID NO: 22506 - DNA, 20 bp, synthetic construct
  source 1..20: mol_type = other DNA
ctattcctcgcagatctgca

SEQ ID NO: 22507 - DNA, 20 bp, synthetic construct
  source 1..20: mol_type = other DNA
ctggcaacctgctgggatgg

SEQ ID NO: 22508 - DNA, 20 bp, synthetic construct
  source 1..20: mol_type = other DNA
ggcgctcacctcagcagggc

SEQ ID NO: 22509 - DNA, 20 bp, synthetic construct
  source 1..20: mol_type = other DNA
gggccaggtccaacacggcc

SEQ ID NO: 22510 - DNA, 20 bp, synthetic construct
  source 1..20: mol_type = other DNA
gcagttccaagaggcggcag

SEQ ID NO: 22511 - DNA, 20 bp, synthetic construct
  source 1..20: mol_type = other DNA
ctccatgcagttcttgtgct

SEQ ID NO: 22512 - DNA, 20 bp, synthetic construct
  source 1..20: mol_type = other DNA
ggctgaggacctgtgcgtgc

SEQ ID NO: 22513 - DNA, 20 bp, synthetic construct
  source 1..20: mol_type = other DNA
ggtcgcggtgcacgcagcgg

SEQ ID NO: 22514 - DNA, 20 bp, synthetic construct
  source 1..20: mol_type = other DNA
aactccaattttatgaggac

SEQ ID NO: 22515 - DNA, 20 bp, synthetic construct
  source 1..20: mol_type = other DNA
ctcgaagactgctgtggggt

SEQ ID NO: 22516 - DNA, 20 bp, synthetic construct
  source 1..20: mol_type = other DNA
tgtctctcctcgaagatcgt

SEQ ID NO: 22517 - DNA, 20 bp, synthetic construct
  source 1..20: mol_type = other DNA
ggcaggcctttgtcctccta

SEQ ID NO: 22518 - DNA, 20 bp, synthetic construct
  source 1..20: mol_type = other DNA
ggatcaggtcgcgcaggctt

SEQ ID NO: 22519 - DNA, 20 bp, synthetic construct
  source 1..20: mol_type = other DNA
gccacctggtgccagccagc

SEQ ID NO: 22520 - DNA, 20 bp, synthetic construct
  source 1..20: mol_type = other DNA
cggcatctcgtgctgctcca

SEQ ID NO: 22521 - DNA, 20 bp, synthetic construct
  source 1..20: mol_type = other DNA
acttcctccagcagcctcgg

SEQ ID NO: 22522 - DNA, 20 bp, synthetic construct
  source 1..20: mol_type = other DNA
ctcagccaagtggtccccaa

SEQ ID NO: 22523 - DNA, 20 bp, synthetic construct
  source 1..20: mol_type = other DNA
agcacctctttgcccaggtg

SEQ ID NO: 22524 - DNA, 20 bp, synthetic construct
  source 1..20: mol_type = other DNA
ccagcacttcttctgcaagg

SEQ ID NO: 22525 - DNA, 20 bp, synthetic construct
  source 1..20: mol_type = other DNA
ttggacttttctatggggag

SEQ ID NO: 22526 - DNA, 20 bp, synthetic construct
  source 1..20: mol_type = other DNA
cctgctgaggtgagcgccgc

SEQ ID NO: 22527 - DNA, 20 bp, synthetic construct
  source 1..20: mol_type = other DNA
gaggcccacgtggaaggtct

SEQ ID NO: 22528 - DNA, 20 bp, synthetic construct
  source 1..20: mol_type = other DNA
gaggacaaaggcctgcccca

SEQ ID NO: 22529 - DNA, 20 bp, synthetic construct
  source 1..20: mol_type = other DNA
gagggattcgggggcatacc

SEQ ID NO: 22530 - DNA, 20 bp, synthetic construct
  source 1..20: mol_type = other DNA
cctcttggaactgctggagg

SEQ ID NO: 22531 - DNA, 20 bp, synthetic construct
  source 1..20: mol_type = other DNA
tgcccaggtggggttctgcc

SEQ ID NO: 22532 - DNA, 20 bp, synthetic construct
  source 1..20: mol_type = other DNA
gatggggccgtggcactgct

SEQ ID NO: 22533 - DNA, 20 bp, synthetic construct
  source 1..20: mol_type = other DNA
tgaggaccggcagcagctgc

SEQ ID NO: 22534 - DNA, 20 bp, synthetic construct
  source 1..20: mol_type = other DNA
tgagactgaggcccacgggg

SEQ ID NO: 22535 - DNA, 20 bp, synthetic construct
  source 1..20: mol_type = other DNA
agcctgcgcgacctgatcca

SEQ ID NO: 22536 - DNA, 20 bp, synthetic construct
  source 1..20: mol_type = other DNA
ggcccggatggcgcgagagc

SEQ ID NO: 22537 - DNA, 20 bp, synthetic construct
  source 1..20: mol_type = other DNA
ctggagtgggtaagaggccc

SEQ ID NO: 22538 - DNA, 20 bp, synthetic construct
  source 1..20: mol_type = other DNA
cgtggtgtcagctatggccc

SEQ ID NO: 22539 - DNA, 20 bp, synthetic construct
  source 1..20: mol_type = other DNA
gtgagtgggcgcctccccgt

SEQ ID NO: 22540 - DNA, 20 bp, synthetic construct
  source 1..20: mol_type = other DNA
ggtggcccccgagtgtctcc

SEQ ID NO: 22541 - DNA, 20 bp, synthetic construct
  source 1..20: mol_type = other DNA
ctggaaagtcgcagaagggc

SEQ ID NO: 22542 - DNA, 20 bp, synthetic construct
  source 1..20: mol_type = other DNA
acagctgggcaaggtaaggt

SEQ ID NO: 22543 - DNA, 20 bp, synthetic construct
  source 1..20: mol_type = other DNA
cagcagcacctctgtctttc

SEQ ID NO: 22544 - DNA, 20 bp, synthetic construct
  source 1..20: mol_type = other DNA
gctggaggacctgggaagga

SEQ ID NO: 22545 - DNA, 20 bp, synthetic construct
  source 1..20: mol_type = other DNA
aaacatcctcgtggagagcg

SEQ ID NO: 22546 - DNA, 20 bp, synthetic construct
  source 1..20: mol_type = other DNA
tggggaggcccgaaagacag

SEQ ID NO: 22547 - DNA, 20 bp, synthetic construct
  source 1..20: mol_type = other DNA
ccaggcggtgctctccggcc

SEQ ID NO: 22548 - DNA, 20 bp, synthetic construct
  source 1..20: mol_type = other DNA
gcaggaatttgtacacctgg

SEQ ID NO: 22549 - DNA, 20 bp, synthetic construct
  source 1..20: mol_type = other DNA
aaggagaaagataggcgctg

SEQ ID NO: 22550 - DNA, 20 bp, synthetic construct
  source 1..20: mol_type = other DNA
gcttccagctggctggcacc

SEQ ID NO: 22551 - DNA, 20 bp, synthetic construct
  source 1..20: mol_type = other DNA
caggtcactgcggtgctggg

SEQ ID NO: 22552 - DNA, 20 bp, synthetic construct
  source 1..20: mol_type = other DNA
cgctctccacgaggatgttt

SEQ ID NO: 22553 - DNA, 20 bp, synthetic construct
  source 1..20: mol_type = other DNA
tgagcgagtgccggtctgcc

SEQ ID NO: 22554 - DNA, 20 bp, synthetic construct
  source 1..20: mol_type = other DNA
cgcaggaggccgagttccca

SEQ ID NO: 22555 - DNA, 20 bp, synthetic construct
  source 1..20: mol_type = other DNA
ccagcaggacaggtcctccg

SEQ ID NO: 22556 - DNA, 20 bp, synthetic construct
  source 1..20: mol_type = other DNA
acagtgcatggcctatgagc

SEQ ID NO: 22557 - DNA, 20 bp, synthetic construct
  source 1..20: mol_type = other DNA
acctgcagcttccagctggc

SEQ ID NO: 22558 - DNA, 20 bp, synthetic construct
  source 1..20: mol_type = other DNA
gttgtccgagagggattcgg

SEQ ID NO: 22559 - DNA, 20 bp, synthetic construct
  source 1..20: mol_type = other DNA
ggagcacctctttgcccagg

SEQ ID NO: 22560 - DNA, 20 bp, synthetic construct
  source 1..20: mol_type = other DNA
agagggagtggtacacaggc

SEQ ID NO: 22561 - DNA, 20 bp, synthetic construct
  source 1..20: mol_type = other DNA
ccttgagactgaggcccacg

SEQ ID NO: 22562 - DNA, 20 bp, synthetic construct
  source 1..20: mol_type = other DNA
agctctgtccacttgggggc

SEQ ID NO: 22563 - DNA, 20 bp, synthetic construct
  source 1..20: mol_type = other DNA
gtgtctctcctcgaagatcg

SEQ ID NO: 22564 - DNA, 20 bp, synthetic construct
  source 1..20: mol_type = other DNA
ccaagaggcggcagagggcg

SEQ ID NO: 22565 - DNA, 20 bp, synthetic construct
  source 1..20: mol_type = other DNA
gcgcaggcttgggggtaggc

SEQ ID NO: 22566 - DNA, 20 bp, synthetic construct
  source 1..20: mol_type = other DNA
agctctcgaagactgctgtg

SEQ ID NO: 22567 - DNA, 20 bp, synthetic construct
  source 1..20: mol_type = other DNA
gccacgaacgacagagcctc

SEQ ID NO: 22568 - DNA, 20 bp, synthetic construct
  source 1..20: mol_type = other DNA
ctcccagcacttcttctgca

SEQ ID NO: 22569 - DNA, 20 bp, synthetic construct
  source 1..20: mol_type = other DNA
ggccagctctgtccacttgg

SEQ ID NO: 22570 - DNA, 20 bp, synthetic construct
  source 1..20: mol_type = other DNA
agcgggcagcagcacatgca

SEQ ID NO: 22571 - DNA, 20 bp, synthetic construct
  source 1..20: mol_type = other DNA
ccgctgcgtgcaccgcgacc

SEQ ID NO: 22572 - DNA, 20 bp, synthetic construct
  source 1..20: mol_type = other DNA
cccactccaggctgtcagca

SEQ ID NO: 22573 - DNA, 20 bp, synthetic construct
  source 1..20: mol_type = other DNA
gcctccgcgtcacgaagctc

SEQ ID NO: 22574 - DNA, 20 bp, synthetic construct
  source 1..20: mol_type = other DNA
aatgactggggaaggtggga

SEQ ID NO: 22575 - DNA, 20 bp, synthetic construct
  source 1..20: mol_type = other DNA
tctctcgccagtcagacgtc

SEQ ID NO: 22576 - DNA, 20 bp, synthetic construct
  source 1..20: mol_type = other DNA
tgggaactcggcctcctgcg

SEQ ID NO: 22577 - DNA, 20 bp, synthetic construct
  source 1..20: mol_type = other DNA
cggccatcattcagcgccct

SEQ ID NO: 22578 - DNA, 20 bp, synthetic construct
  source 1..20: mol_type = other DNA
caccaggtcactgcggtgct

SEQ ID NO: 22579 - DNA, 20 bp, synthetic construct
  source 1..20: mol_type = other DNA
cttgtagctgcaggggttgg

SEQ ID NO: 22580 - DNA, 20 bp, synthetic construct
  source 1..20: mol_type = other DNA
tcatcaagctgagtgaccct

SEQ ID NO: 22581 - DNA, 20 bp, synthetic construct
  source 1..20: mol_type = other DNA
ggggctgcacgtagatgggg

SEQ ID NO: 22582 - DNA, 20 bp, synthetic construct
  source 1..20: mol_type = other DNA
gaagccgactcacggccgag

SEQ ID NO: 22583 - DNA, 20 bp, synthetic construct
  source 1..20: mol_type = other DNA
ccggaaggtgctcctggctc

SEQ ID NO: 22584 - DNA, 20 bp, synthetic construct
  source 1..20: mol_type = other DNA
cgcagaagggctggaggacc

SEQ ID NO: 22585 - DNA, 20 bp, synthetic construct
  source 1..20: mol_type = other DNA
ggccctggatcaggtcgcgc

SEQ ID NO: 22586 - DNA, 20 bp, synthetic construct
  source 1..20: mol_type = other DNA
ggccgccgagaccttccacg

SEQ ID NO: 22587 - DNA, 20 bp, synthetic construct
  source 1..20: mol_type = other DNA
tctgcgaaaacgtggccacc

SEQ ID NO: 22588 - DNA, 20 bp, synthetic construct
  source 1..20: mol_type = other DNA
ctcctggcaacctgctggga

SEQ ID NO: 22589 - DNA, 20 bp, synthetic construct
  source 1..20: mol_type = other DNA
ccttggcagcctgcacgcac

SEQ ID NO: 22590 - DNA, 20 bp, synthetic construct
  source 1..20: mol_type = other DNA
tggatcaggtcgcgcaggct

SEQ ID NO: 22591 - DNA, 20 bp, synthetic construct
  source 1..20: mol_type = other DNA
ttccaagaggcggcagaggg

SEQ ID NO: 22592 - DNA, 20 bp, synthetic construct
  source 1..20: mol_type = other DNA
acttggccatgagcgagtgc

SEQ ID NO: 22593 - DNA, 20 bp, synthetic construct
  source 1..20: mol_type = other DNA
ccatgcactgttgaatcagc

SEQ ID NO: 22594 - DNA, 20 bp, synthetic construct
  source 1..20: mol_type = other DNA
ccaagaccccacgatcttcg

SEQ ID NO: 22595 - DNA, 20 bp, synthetic construct
  source 1..20: mol_type = other DNA
gcggaggcgtattcggagga

SEQ ID NO: 22596 - DNA, 20 bp, synthetic construct
  source 1..20: mol_type = other DNA
tcaggttggacttttctatg

SEQ ID NO: 22597 - DNA, 20 bp, synthetic construct
  source 1..20: mol_type = other DNA
cacgctgccaaagttgccct

SEQ ID NO: 22598 - DNA, 20 bp, synthetic construct
  source 1..20: mol_type = other DNA
ctccctctttgctctggcca

SEQ ID NO: 22599 - DNA, 20 bp, synthetic construct
  source 1..20: mol_type = other DNA
caaagtcctgggggctgcgg

SEQ ID NO: 22600 - DNA, 20 bp, synthetic construct
  source 1..20: mol_type = other DNA
tgaggtcacgaatgacggct

SEQ ID NO: 22601 - DNA, 20 bp, synthetic construct
  source 1..20: mol_type = other DNA
gaaggaggcggctggcatcg

SEQ ID NO: 22602 - DNA, 20 bp, synthetic construct
  source 1..20: mol_type = other DNA
gctatgaaaaggacagggag

SEQ ID NO: 22603 - DNA, 20 bp, synthetic construct
  source 1..20: mol_type = other DNA
ctccttgcagaagaagtgct

SEQ ID NO: 22604 - DNA, 20 bp, synthetic construct
  source 1..20: mol_type = other DNA
ggtccccaaaggagaaagat

SEQ ID NO: 22605 - DNA, 20 bp, synthetic construct
  source 1..20: mol_type = other DNA
gctcgtgaacctgaggggcg

SEQ ID NO: 22606 - DNA, 20 bp, synthetic construct
  source 1..20: mol_type = other DNA
tgccatgagtgcaacttgcc

SEQ ID NO: 22607 - DNA, 20 bp, synthetic construct
  source 1..20: mol_type = other DNA
tccaggtcggtctactgcta

SEQ ID NO: 22608 - DNA, 20 bp, synthetic construct
  source 1..20: mol_type = other DNA
aggcaggccttgtagctgca

SEQ ID NO: 22609 - DNA, 20 bp, synthetic construct
  source 1..20: mol_type = other DNA
cctcctcactgtctgtgtcc

SEQ ID NO: 22610 - DNA, 20 bp, synthetic construct
  source 1..20: mol_type = other DNA
ccagggcaactttggcagcg

SEQ ID NO: 22611 - DNA, 20 bp, synthetic construct
  source 1..20: mol_type = other DNA
aaaggagaaagataggcgct

SEQ ID NO: 22612 - DNA, 20 bp, synthetic construct
  source 1..20: mol_type = other DNA
ctccggccgggccaacgcgc

SEQ ID NO: 22613 - DNA, 20 bp, synthetic construct
  source 1..20: mol_type = other DNA
actctccaggcttaacacag

SEQ ID NO: 22614 - DNA, 20 bp, synthetic construct
  source 1..20: mol_type = other DNA
ccatcatccgcaggaactcc

SEQ ID NO: 22615 - DNA, 20 bp, synthetic construct
  source 1..20: mol_type = other DNA
tgtttcgggcggccaggtcg

SEQ ID NO: 22616 - DNA, 20 bp, synthetic construct
  source 1..20: mol_type = other DNA
ccattccacagcccatcacg

SEQ ID NO: 22617 - DNA, 20 bp, synthetic construct
  source 1..20: mol_type = other DNA
ttcatgagctcgtgaacctg

SEQ ID NO: 22618 - DNA, 20 bp, synthetic construct
  source 1..20: mol_type = other DNA
gagagctcctggcaacctgc

SEQ ID NO: 22619 - DNA, 20 bp, synthetic construct
  source 1..20: mol_type = other DNA
cgctgcttccaggaatgact

SEQ ID NO: 22620 - DNA, 20 bp, synthetic construct
  source 1..20: mol_type = other DNA
gccagccagctggaagctgc

SEQ ID NO: 22621 - DNA, 20 bp, synthetic construct
  source 1..20: mol_type = other DNA
gaatcctgtacagcaggact

SEQ ID NO: 22622 - DNA, 20 bp, synthetic construct
  source 1..20: mol_type = other DNA
tcgcagatctgcaaggtgcg

SEQ ID NO: 22623 - DNA, 20 bp, synthetic construct
  source 1..20: mol_type = other DNA
ggccttgtagctgcaggggt

SEQ ID NO: 22624 - DNA, 20 bp, synthetic construct
  source 1..20: mol_type = other DNA
ttgtagctgcaggggttgga

SEQ ID NO: 22625 - DNA, 20 bp, synthetic construct
  source 1..20: mol_type = other DNA
acgtagtagtctttgtcaag

SEQ ID NO: 22626 - DNA, 20 bp, synthetic construct
  source 1..20: mol_type = other DNA
ccggggctgtcgccatgagg

SEQ ID NO: 22627 - DNA, 20 bp, synthetic construct
  source 1..20: mol_type = other DNA
caggagctatgaaaaggaca

SEQ ID NO: 22628 - DNA, 20 bp, synthetic construct
  source 1..20: mol_type = other DNA
cgagtgccggtctgcctggc

SEQ ID NO: 22629 - DNA, 20 bp, synthetic construct
  source 1..20: mol_type = other DNA
catcaagctgagtgaccctg

SEQ ID NO: 22630 - DNA, 20 bp, synthetic construct
  source 1..20: mol_type = other DNA
cgtgtgcctcgctctccacg

SEQ ID NO: 22631 - DNA, 20 bp, synthetic construct
  source 1..20: mol_type = other DNA
gagctctcgaagactgctgt

SEQ ID NO: 22632 - DNA, 20 bp, synthetic construct
  source 1..20: mol_type = other DNA
ggcaccgccgaggctgctgg

SEQ ID NO: 22633 - DNA, 20 bp, synthetic construct
  source 1..20: mol_type = other DNA
tcgggggcatacctggagag

SEQ ID NO: 22634 - DNA, 20 bp, synthetic construct
  source 1..20: mol_type = other DNA
cctccgtggccagagcaaag

SEQ ID NO: 22635 - DNA, 20 bp, synthetic construct
  source 1..20: mol_type = other DNA
cccccagcaccgcagtgacc

SEQ ID NO: 22636 - DNA, 20 bp, synthetic construct
  source 1..20: mol_type = other DNA
ggcaggccttgtagctgcag

SEQ ID NO: 22637 - DNA, 20 bp, synthetic construct
  source 1..20: mol_type = other DNA
gatcaggtcgcgcaggcttg

SEQ ID NO: 22638 - DNA, 20 bp, synthetic construct
  source 1..20: mol_type = other DNA
tcatctcttcaggtgcccgc

SEQ ID NO: 22639 - DNA, 20 bp, synthetic construct
  source 1..20: mol_type = other DNA
cgcaggaactcctggagcca

SEQ ID NO: 22640 - DNA, 20 bp, synthetic construct
  source 1..20: mol_type = other DNA
tgatgagccaagtgtcgtac

SEQ ID NO: 22641 - DNA, 20 bp, synthetic construct
  source 1..20: mol_type = other DNA
accgcagtgacctggtgagt

SEQ ID NO: 22642 - DNA, 20 bp, synthetic construct
  source 1..20: mol_type = other DNA
ctccgtggccagagcaaaga

SEQ ID NO: 22643 - DNA, 20 bp, synthetic construct
  source 1..20: mol_type = other DNA
ccagaaggaaggttcctgtg

SEQ ID NO: 22644 - DNA, 20 bp, synthetic construct
  source 1..20: mol_type = other DNA
ctcaagtacatctcacagct

SEQ ID NO: 22645 - DNA, 20 bp, synthetic construct
  source 1..20: mol_type = other DNA
tggcaatgtctctgcccgga

SEQ ID NO: 22646 - DNA, 20 bp, synthetic construct
  source 1..20: mol_type = other DNA
ggcaggatgcctacagggga

SEQ ID NO: 22647 - DNA, 20 bp, synthetic construct
  source 1..20: mol_type = other DNA
gtcatggagtacctgcccag

SEQ ID NO: 22648 - DNA, 20 bp, synthetic construct
  source 1..20: mol_type = other DNA
acccactccaggctgtcagc

SEQ ID NO: 22649 - DNA, 20 bp, synthetic construct
  source 1..20: mol_type = other DNA
tcgttcgtggcgctcgtgga

SEQ ID NO: 22650 - DNA, 20 bp, synthetic construct
  source 1..20: mol_type = other DNA
gtaccactccctctttgctc

SEQ ID NO: 22651 - DNA, 20 bp, synthetic construct
  source 1..20: mol_type = other DNA
ggttctcatgctgaatggtg

SEQ ID NO: 22652 - DNA, 20 bp, synthetic construct
  source 1..20: mol_type = other DNA
gccatcaacaagctcaagac

SEQ ID NO: 22653 - DNA, 20 bp, synthetic construct
  source 1..20: mol_type = other DNA
cgctcgtggacggctacttc

SEQ ID NO: 22654 - DNA, 20 bp, synthetic construct
  source 1..20: mol_type = other DNA
gttctcatgctgaatggtga

SEQ ID NO: 22655 - DNA, 20 bp, synthetic construct
  source 1..20: mol_type = other DNA
acaggaaccttccttctggt

SEQ ID NO: 22656 - DNA, 20 bp, synthetic construct
  source 1..20: mol_type = other DNA
acggagaagatgtggctcgg

SEQ ID NO: 22657 - DNA, 20 bp, synthetic construct
  source 1..20: mol_type = other DNA
ccagagcctgcggctggtca

SEQ ID NO: 22658 - DNA, 20 bp, synthetic construct
  source 1..20: mol_type = other DNA
aacctgatcgtggtccagag

SEQ ID NO: 22659 - DNA, 20 bp, synthetic construct
  source 1..20: mol_type = other DNA
caccagatagttgagggcgt

SEQ ID NO: 22660 - DNA, 20 bp, synthetic construct
  source 1..20: mol_type = other DNA
ctccatgccctgcgggcggg

SEQ ID NO: 22661 - DNA, 20 bp, synthetic construct
  source 1..20: mol_type = other DNA
cagagccccattttctggtg

SEQ ID NO: 22662 - DNA, 20 bp, synthetic construct
  source 1..20: mol_type = other DNA
ccagcagagggactttcagc

SEQ ID NO: 22663 - DNA, 20 bp, synthetic construct
  source 1..20: mol_type = other DNA
cagcagtcttcgagagctcc

SEQ ID NO: 22664 - DNA, 20 bp, synthetic construct
  source 1..20: mol_type = other DNA
ctccagccatgcacacgccg

SEQ ID NO: 22665 - DNA, 20 bp, synthetic construct
  source 1..20: mol_type = other DNA
tgcaggaatttgtacacctg

SEQ ID NO: 22666 - DNA, 20 bp, synthetic construct
  source 1..20: mol_type = other DNA
acgaatgacggctcggaagg

SEQ ID NO: 22667 - DNA, 20 bp, synthetic construct
  source 1..20: mol_type = other DNA
aagcctgcgcgacctgatcc

SEQ ID NO: 22668 - DNA, 20 bp, synthetic construct
  source 1..20: mol_type = other DNA
ctgctccgcgtggctggtga

SEQ ID NO: 22669 - DNA, 20 bp, synthetic construct
  source 1..20: mol_type = other DNA
cactcagcttgatgaagggc

SEQ ID NO: 22670 - DNA, 20 bp, synthetic construct
  source 1..20: mol_type = other DNA
ccaggtactccatgccctgc

SEQ ID NO: 22671 - DNA, 20 bp, synthetic construct
  source 1..20: mol_type = other DNA
gccatgagtgcaacttgcct

SEQ ID NO: 22672 - DNA, 20 bp, synthetic construct
  source 1..20: mol_type = other DNA
accagaaggaaggttcctgt

SEQ ID NO: 22673 - DNA, 20 bp, synthetic construct
  source 1..20: mol_type = other DNA
gccagagccccattttctgg

SEQ ID NO: 22674 - DNA, 20 bp, synthetic construct
  source 1..20: mol_type = other DNA
gggaactcggcctcctgcga

SEQ ID NO: 22675 - DNA, 20 bp, synthetic construct
  source 1..20: mol_type = other DNA
gatcctgtcggtgagcactg

SEQ ID NO: 22676 - DNA, 20 bp, synthetic construct
  source 1..20: mol_type = other DNA
ccaggaatgactggggaagg

SEQ ID NO: 22677 - DNA, 20 bp, synthetic construct
  source 1..20: mol_type = other DNA
cgagctcatgaagctgtgct

SEQ ID NO: 22678 - DNA, 20 bp, synthetic construct
  source 1..20: mol_type = other DNA
gtcagacgtctggagcttcg

SEQ ID NO: 22679 - DNA, 20 bp, synthetic construct
  source 1..20: mol_type = other DNA
ggcacttggaggcagcgatg

SEQ ID NO: 22680 - DNA, 20 bp, synthetic construct
  source 1..20: mol_type = other DNA
gagcaggagggcttcgccga

SEQ ID NO: 22681 - DNA, 20 bp, synthetic construct
  source 1..20: mol_type = other DNA
ttgctgaggtttgcgtagac

SEQ ID NO: 22682 - DNA, 20 bp, synthetic construct
  source 1..20: mol_type = other DNA
cttggggcacaggaactggg

SEQ ID NO: 22683 - DNA, 20 bp, synthetic construct
  source 1..20: mol_type = other DNA
ggtcaacggggcaggcatgg

SEQ ID NO: 22684 - DNA, 20 bp, synthetic construct
  source 1..20: mol_type = other DNA
tgagcaggagggcttcgccg

SEQ ID NO: 22685 - DNA, 20 bp, synthetic construct
  source 1..20: mol_type = other DNA
cttccgcttccggcacttgg

SEQ ID NO: 22686 - DNA, 20 bp, synthetic construct
  source 1..20: mol_type = other DNA
tcatacacagctacgggata

SEQ ID NO: 22687 - DNA, 20 bp, synthetic construct
  source 1..20: mol_type = other DNA
cagggctttgacaaagccgt

SEQ ID NO: 22688 - DNA, 20 bp, synthetic construct
  source 1..20: mol_type = other DNA
gacgctcaaggccgagaacg

SEQ ID NO: 22689 - DNA, 20 bp, synthetic construct
  source 1..20: mol_type = other DNA
ggctggcggccaccaagtgc

SEQ ID NO: 22690 - DNA, 20 bp, synthetic construct
  source 1..20: mol_type = other DNA
gtgtaaacgggaggtggctc

SEQ ID NO: 22691 - DNA, 20 bp, synthetic construct
  source 1..20: mol_type = other DNA
ccacacgcgccgcccttcgc

SEQ ID NO: 22692 - DNA, 20 bp, synthetic construct
  source 1..20: mol_type = other DNA
gggtggccaccggcgaaggg

SEQ ID NO: 22693 - DNA, 20 bp, synthetic construct
  source 1..20: mol_type = other DNA
ggaaccgcagaccgtgccgg

SEQ ID NO: 22694 - DNA, 20 bp, synthetic construct
  source 1..20: mol_type = other DNA
tcttggtcttccatgttgat

SEQ ID NO: 22695 - DNA, 20 bp, synthetic construct
  source 1..20: mol_type = other DNA
ctcttggtcttccatgttga

SEQ ID NO: 22696 - DNA, 20 bp, synthetic construct
  source 1..20: mol_type = other DNA
cagtacttttacccccgcgg

SEQ ID NO: 22697 - DNA, 20 bp, synthetic construct
  source 1..20: mol_type = other DNA
cattttagtgcacatccggg

SEQ ID NO: 22698 - DNA, 20 bp, synthetic construct
  source 1..20: mol_type = other DNA
agaccaagagcgcatcaaag

SEQ ID NO: 22699 - DNA, 20 bp, synthetic construct
  source 1..20: mol_type = other DNA
atgttgatgggggacaccgg

SEQ ID NO: 22700 - DNA, 20 bp, synthetic construct
  source 1..20: mol_type = other DNA
ggcgcctcccgaggacgcag

SEQ ID NO: 22701 - DNA, 20 bp, synthetic construct
  source 1..20: mol_type = other DNA
ctgacagccgttgctgacgt

SEQ ID NO: 22702 - DNA, 20 bp, synthetic construct
  source 1..20: mol_type = other DNA
ctgcggttcctccttgaagg

SEQ ID NO: 22703 - DNA, 20 bp, synthetic construct
  source 1..20: mol_type = other DNA
gctgggccacctgctcccgg

SEQ ID NO: 22704 - DNA, 20 bp, synthetic construct
  source 1..20: mol_type = other DNA
ggggccccccggtagcgccc

SEQ ID NO: 22705 - DNA, 20 bp, synthetic construct
  source 1..20: mol_type = other DNA
gggccacctgctcccggagg

SEQ ID NO: 22706 - DNA, 20 bp, synthetic construct
  source 1..20: mol_type = other DNA
cggccaccaagtgccggaag

SEQ ID NO: 22707 - DNA, 20 bp, synthetic construct
  source 1..20: mol_type = other DNA
ctgctcccggaggaggccgg

SEQ ID NO: 22708 - DNA, 20 bp, synthetic construct
  source 1..20: mol_type = other DNA
ggaggaaccgcagaccgtgc

SEQ ID NO: 22709 - DNA, 20 bp, synthetic construct
  source 1..20: mol_type = other DNA
gggcccagccgggggccccc

SEQ ID NO: 22710 - DNA, 20 bp, synthetic construct
  source 1..20: mol_type = other DNA
gcggctgcggaaccggctgg

SEQ ID NO: 22711 - DNA, 20 bp, synthetic construct
  source 1..20: mol_type = other DNA
cgagtaccgccggcctcctc

SEQ ID NO: 22712 - DNA, 20 bp, synthetic construct
  source 1..20: mol_type = other DNA
cacgacgacgcctacacccc

SEQ ID NO: 22713 - DNA, 20 bp, synthetic construct
  source 1..20: mol_type = other DNA
tccccagcctctgcgtcctc

SEQ ID NO: 22714 - DNA, 20 bp, synthetic construct
  source 1..20: mol_type = other DNA
agacgcccccgggcccagcc

SEQ ID NO: 22715 - DNA, 20 bp, synthetic construct
  source 1..20: mol_type = other DNA
caagcggctgcggaaccggc

SEQ ID NO: 22716 - DNA, 20 bp, synthetic construct
  source 1..20: mol_type = other DNA
catcttgtgcagatcgtcca

SEQ ID NO: 22717 - DNA, 20 bp, synthetic construct
  source 1..20: mol_type = other DNA
acacagctacgggatacggc

SEQ ID NO: 22718 - DNA, 20 bp, synthetic construct
  source 1..20: mol_type = other DNA
cttggtcttccatgttgatg

SEQ ID NO: 22719 - DNA, 20 bp, synthetic construct
  source 1..20: mol_type = other DNA
cgctcaaggccgagaacgcg

SEQ ID NO: 22720 - DNA, 20 bp, synthetic construct
  source 1..20: mol_type = other DNA
gctccactttgatgcgctct

SEQ ID NO: 22721 - DNA, 20 bp, synthetic construct
  source 1..20: mol_type = other DNA
ttggtcttccatgttgatgg

SEQ ID NO: 22722 - DNA, 20 bp, synthetic construct
  source 1..20: mol_type = other DNA
caggcgttccagctccgaag

SEQ ID NO: 22723 - DNA, 20 bp, synthetic construct
  source 1..20: mol_type = other DNA
acgctcaaggccgagaacgc

SEQ ID NO: 22724 - DNA, 20 bp, synthetic construct
  source 1..20: mol_type = other DNA
gtgtgggaggtagctgatgg

SEQ ID NO: 22725 - DNA, 20 bp, synthetic construct
  source 1..20: mol_type = other DNA
gggccccccggtagcgccca

SEQ ID NO: 22726 - DNA, 20 bp, synthetic construct
  source 1..20: mol_type = other DNA
tccatgttgatgggggacac

SEQ ID NO: 22727 - DNA, 20 bp, synthetic construct
  source 1..20: mol_type = other DNA
agcgcaagcggctgcggaac

SEQ ID NO: 22728 - DNA, 20 bp, synthetic construct
  source 1..20: mol_type = other DNA
cagcttccgcttccggcact

SEQ ID NO: 22729 - DNA, 20 bp, synthetic construct
  source 1..20: mol_type = other DNA
ccaccgctgccacccccgcg

SEQ ID NO: 22730 - DNA, 20 bp, synthetic construct
  source 1..20: mol_type = other DNA
tgcgctccagcttccgcttc

SEQ ID NO: 22731 - DNA, 20 bp, synthetic construct
  source 1..20: mol_type = other DNA
gcgtcttcaccttgtcctcc

SEQ ID NO: 22732 - DNA, 20 bp, synthetic construct
  source 1..20: mol_type = other DNA
cgccggcctcctccgggagc

SEQ ID NO: 22733 - DNA, 20 bp, synthetic construct
  source 1..20: mol_type = other DNA
cacctgctcccggaggaggc

SEQ ID NO: 22734 - DNA, 20 bp, synthetic construct
  source 1..20: mol_type = other DNA
ggtggcccagctcaaacaga

SEQ ID NO: 22735 - DNA, 20 bp, synthetic construct
  source 1..20: mol_type = other DNA
gctgacagccgttgctgacg

SEQ ID NO: 22736 - DNA, 20 bp, synthetic construct
  source 1..20: mol_type = other DNA
actcgacagccccgcgttct

SEQ ID NO: 22737 - DNA, 20 bp, synthetic construct
  source 1..20: mol_type = other DNA
ccccaggcgctttgagactc

SEQ ID NO: 22738 - DNA, 20 bp, synthetic construct
  source 1..20: mol_type = other DNA
cccggcccagagggcggcgg

SEQ ID NO: 22739 - DNA, 20 bp, synthetic construct
  source 1..20: mol_type = other DNA
ggacaaggtgaagacgctca

SEQ ID NO: 22740 - DNA, 20 bp, synthetic construct
  source 1..20: mol_type = other DNA
catcgcgcgcctggaggaca

SEQ ID NO: 22741 - DNA, 20 bp, synthetic construct
  source 1..20: mol_type = other DNA
caagtgccggaagcggaagc

SEQ ID NO: 22742 - DNA, 20 bp, synthetic construct
  source 1..20: mol_type = other DNA
ggagcgcatcgcgcgcctgg

SEQ ID NO: 22743 - DNA, 20 bp, synthetic construct
  source 1..20: mol_type = other DNA
ggcacttggtggccgccagc

SEQ ID NO: 22744 - DNA, 20 bp, synthetic construct
  source 1..20: mol_type = other DNA
tctggtcagggctcggacac

SEQ ID NO: 22745 - DNA, 20 bp, synthetic construct
  source 1..20: mol_type = other DNA
aagtggagcgcaagcggctg

SEQ ID NO: 22746 - DNA, 20 bp, synthetic construct
  source 1..20: mol_type = other DNA
ggactcagtacgcgggcacc

SEQ ID NO: 22747 - DNA, 20 bp, synthetic construct
  source 1..20: mol_type = other DNA
gctgagcctgagtgagcagg

SEQ ID NO: 22748 - DNA, 20 bp, synthetic construct
  source 1..20: mol_type = other DNA
tctgcttgtgtaaatcctcc

SEQ ID NO: 22749 - DNA, 20 bp, synthetic construct
  source 1..20: mol_type = other DNA
gggccccccggcggcggcgg

SEQ ID NO: 22750 - DNA, 20 bp, synthetic construct
  source 1..20: mol_type = other DNA
ctccgtgttctgactcttga

SEQ ID NO: 22751 - DNA, 20 bp, synthetic construct
  source 1..20: mol_type = other DNA
cgcgtactgagtccgcgcgc

SEQ ID NO: 22752 - DNA, 20 bp, synthetic construct
  source 1..20: mol_type = other DNA
ggcacttggaggcggcgatg

SEQ ID NO: 22753 - DNA, 20 bp, synthetic construct
  source 1..20: mol_type = other DNA
tctcttcctagtctctcaca

SEQ ID NO: 22754 - DNA, 20 bp, synthetic construct
  source 1..20: mol_type = other DNA
gcactggagagcccccacca

SEQ ID NO: 22755 - DNA, 20 bp, synthetic construct
  source 1..20: mol_type = other DNA
tgcagacagtaacttcgtgc

SEQ ID NO: 22756 - DNA, 20 bp, synthetic construct
  source 1..20: mol_type = other DNA
cctgtaccggaagagcggtg

SEQ ID NO: 22757 - DNA, 20 bp, synthetic construct
  source 1..20: mol_type = other DNA
tgtctccttctcctccagcg

SEQ ID NO: 22758 - DNA, 20 bp, synthetic construct
  source 1..20: mol_type = other DNA
ctccttctgaggaaggggct

SEQ ID NO: 22759 - DNA, 20 bp, synthetic construct
  source 1..20: mol_type = other DNA
caggccccctgaccctggtg

SEQ ID NO: 22760 - DNA, 20 bp, synthetic construct
  source 1..20: mol_type = other DNA
gcctaagatgccggccatgc

SEQ ID NO: 22761 - DNA, 20 bp, synthetic construct
  source 1..20: mol_type = other DNA
ggtcgcccttccctggggag

SEQ ID NO: 22762 - DNA, 20 bp, synthetic construct
  source 1..20: mol_type = other DNA
gtggaggtcctcttcatcct

SEQ ID NO: 22763 - DNA, 20 bp, synthetic construct
  source 1..20: mol_type = other DNA
ggcccggctccgccgccggt

SEQ ID NO: 22764 - DNA, 20 bp, synthetic construct
  source 1..20: mol_type = other DNA
ctgcgcgcagctcgtcaggg

SEQ ID NO: 22765 - DNA, 20 bp, synthetic construct
  source 1..20: mol_type = other DNA
tgctgggggaggctctgcag

SEQ ID NO: 22766 - DNA, 20 bp, synthetic construct
  source 1..20: mol_type = other DNA
cattgaagacggctgtggct

SEQ ID NO: 22767 - DNA, 20 bp, synthetic construct
  source 1..20: mol_type = other DNA
gccaggggacagcagggggc

SEQ ID NO: 22768 - DNA, 20 bp, synthetic construct
  source 1..20: mol_type = other DNA
gatcaggtcgcccttccctg

SEQ ID NO: 22769 - DNA, 20 bp, synthetic construct
  source 1..20: mol_type = other DNA
agctgtggacaaggagggtc

SEQ ID NO: 22770 - DNA, 20 bp, synthetic construct
  source 1..20: mol_type = other DNA
ggagacagggactgcgctcc

SEQ ID NO: 22771 - DNA, 20 bp, synthetic construct
  source 1..20: mol_type = other DNA
tattggccttcatgcctccc

SEQ ID NO: 22772 - DNA, 20 bp, synthetic construct
  source 1..20: mol_type = other DNA
tgcctcaagaggcttggggt

SEQ ID NO: 22773 - DNA, 20 bp, synthetic construct
  source 1..20: mol_type = other DNA
atacactggtgtcagagccc

SEQ ID NO: 22774 - DNA, 20 bp, synthetic construct
  source 1..20: mol_type = other DNA
cttcacctcctcagcctcac

SEQ ID NO: 22775 - DNA, 20 bp, synthetic construct
  source 1..20: mol_type = other DNA
gtccaggaaggtgttttgcg

SEQ ID NO: 22776 - DNA, 20 bp, synthetic construct
  source 1..20: mol_type = other DNA
ataaggaaggagaggagaca

SEQ ID NO: 22777 - DNA, 20 bp, synthetic construct
  source 1..20: mol_type = other DNA
gacctccggacctcagtccc

SEQ ID NO: 22778 - DNA, 20 bp, synthetic construct
  source 1..20: mol_type = other DNA
tctctgggccgtagaggaaa

SEQ ID NO: 22779 - DNA, 20 bp, synthetic construct
  source 1..20: mol_type = other DNA
gggggaatgagaagctgagg

SEQ ID NO: 22780 - DNA, 20 bp, synthetic construct
  source 1..20: mol_type = other DNA
tgtccccgcggcctccttgg

SEQ ID NO: 22781 - DNA, 20 bp, synthetic construct
  source 1..20: mol_type = other DNA
cagtcctttatcacatctct

SEQ ID NO: 22782 - DNA, 20 bp, synthetic construct
  source 1..20: mol_type = other DNA
ctccctggagggacacacag

SEQ ID NO: 22783 - DNA, 20 bp, synthetic construct
  source 1..20: mol_type = other DNA
caggacgatagtactgtgtt

SEQ ID NO: 22784 - DNA, 20 bp, synthetic construct
  source 1..20: mol_type = other DNA
gcttcaaatagaaaagtcac

SEQ ID NO: 22785 - DNA, 20 bp, synthetic construct
  source 1..20: mol_type = other DNA
ctagggaaaggggatttaat

SEQ ID NO: 22786 - DNA, 20 bp, synthetic construct
  source 1..20: mol_type = other DNA
tactatggcaacaatacctt

SEQ ID NO: 22787 - DNA, 20 bp, synthetic construct
  source 1..20: mol_type = other DNA
atatagatcttacctccaag

SEQ ID NO: 22788 - DNA, 20 bp, synthetic construct
  source 1..20: mol_type = other DNA
tggggaaacccttagccacc

SEQ ID NO: 22789 - DNA, 20 bp, synthetic construct
  source 1..20: mol_type = other DNA
ctttaagcttaagcccaggt

SEQ ID NO: 22790 - DNA, 20 bp, synthetic construct
  source 1..20: mol_type = other DNA
ctgagctttggggagtttgg

SEQ ID NO: 22791 - DNA, 20 bp, synthetic construct
  source 1..20: mol_type = other DNA
agaggaagagaatctgcttc

SEQ ID NO: 22792 - DNA, 20 bp, synthetic construct
  source 1..20: mol_type = other DNA
gcccacacgaggacgcacac

SEQ ID NO: 22793 - DNA, 20 bp, synthetic construct
  source 1..20: mol_type = other DNA
caataatacttacaaatgct

SEQ ID NO: 22794 - DNA, 20 bp, synthetic construct
  source 1..20: mol_type = other DNA
caccaagagttcgcatctga

SEQ ID NO: 22795 - DNA, 20 bp, synthetic construct
  source 1..20: mol_type = other DNA
gcgtaatgcaggccgggccc

SEQ ID NO: 22796 - DNA, 20 bp, synthetic construct
  source 1..20: mol_type = other DNA
tcgcacagatggcactggaa

SEQ ID NO: 22797 - DNA, 20 bp, synthetic construct
  source 1..20: mol_type = other DNA
acagatggcactggaatggc

SEQ ID NO: 22798 - DNA, 20 bp, synthetic construct
  source 1..20: mol_type = other DNA
gtggagaaggacggcaggat

SEQ ID NO: 22799 - DNA, 20 bp, synthetic construct
  source 1..20: mol_type = other DNA
gccgcccggccgcctggtca

SEQ ID NO: 22800 - DNA, 20 bp, synthetic construct
  source 1..20: mol_type = other DNA
ggtgccgccggactcgggtt

SEQ ID NO: 22801 - DNA, 20 bp, synthetic construct
  source 1..20: mol_type = other DNA
ggcttctcacctgcagggag

SEQ ID NO: 22802 - DNA, 20 bp, synthetic construct
  source 1..20: mol_type = other DNA
gcccgggcgcgccgaaacca

SEQ ID NO: 22803 - DNA, 20 bp, synthetic construct
  source 1..20: mol_type = other DNA
ggaggtgagggcggcgggga

SEQ ID NO: 22804 - DNA, 20 bp, synthetic construct
  source 1..20: mol_type = other DNA
cgcagccgtcccagttgcag

SEQ ID NO: 22805 - DNA, 20 bp, synthetic construct
  source 1..20: mol_type = other DNA
tgtcgggcggcggcgggggg

SEQ ID NO: 22806 - DNA, 20 bp, synthetic construct
  source 1..20: mol_type = other DNA
cggcggcggcggctccgggg

SEQ ID NO: 22807 - DNA, 20 bp, synthetic construct
  source 1..20: mol_type = other DNA
gcgccactaccgaaagcaca

SEQ ID NO: 22808 - DNA, 20 bp, synthetic construct
  source 1..20: mol_type = other DNA
cctcctgcaggccgcgctcg

SEQ ID NO: 22809 - DNA, 20 bp, synthetic construct
  source 1..20: mol_type = other DNA
accgaaagcacacgggccac

SEQ ID NO: 22810 - DNA, 20 bp, synthetic construct
  source 1..20: mol_type = other DNA
cgggctggcgaaagtggaga

SEQ ID NO: 22811 - DNA, 20 bp, synthetic construct
  source 1..20: mol_type = other DNA
cactgcaactgggacggctg

SEQ ID NO: 22812 - DNA, 20 bp, synthetic construct
  source 1..20: mol_type = other DNA
gccgtcccagttgcagtggt

SEQ ID NO: 22813 - DNA, 20 bp, synthetic construct
  source 1..20: mol_type = other DNA
gccgcagcccgcgtagctgc

SEQ ID NO: 22814 - DNA, 20 bp, synthetic construct
  source 1..20: mol_type = other DNA
gctgcgggcgacagggcaat

SEQ ID NO: 22815 - DNA, 20 bp, synthetic construct
  source 1..20: mol_type = other DNA
ccgagctggatgcgccgctg

SEQ ID NO: 22816 - DNA, 20 bp, synthetic construct
  source 1..20: mol_type = other DNA
cgccttcagatgcgaactct

SEQ ID NO: 22817 - DNA, 20 bp, synthetic construct
  source 1..20: mol_type = other DNA
cagggggctcggccttgacc

SEQ ID NO: 22818 - DNA, 20 bp, synthetic construct
  source 1..20: mol_type = other DNA
cgcgtaatgcaggccgggcc

SEQ ID NO: 22819 - DNA, 20 bp, synthetic construct
  source 1..20: mol_type = other DNA
ctggcgaaagtggagaagga

SEQ ID NO: 22820 - DNA, 20 bp, synthetic construct
  source 1..20: mol_type = other DNA
caggtgatcggagcgcgaga

SEQ ID NO: 22821 - DNA, 20 bp, synthetic construct
  source 1..20: mol_type = other DNA
atgaaacggcacatgtagcc

SEQ ID NO: 22822 - DNA, 20 bp, synthetic construct
  source 1..20: mol_type = other DNA
actcacacctgcagctacgc

SEQ ID NO: 22823 - DNA, 20 bp, synthetic construct
  source 1..20: mol_type = other DNA
tggtagggcttctcacctgc

SEQ ID NO: 22824 - DNA, 20 bp, synthetic construct
  source 1..20: mol_type = other DNA
catgtgcagcgccaggtgat

SEQ ID NO: 22825 - DNA, 20 bp, synthetic construct
  source 1..20: mol_type = other DNA
ccgtcccagttgcagtggta

SEQ ID NO: 22826 - DNA, 20 bp, synthetic construct
  source 1..20: mol_type = other DNA
tgagtggcggtgcgtttgcg

SEQ ID NO: 22827 - DNA, 20 bp, synthetic construct
  source 1..20: mol_type = other DNA
agggcttctcacctgcaggg

SEQ ID NO: 22828 - DNA, 20 bp, synthetic construct
  source 1..20: mol_type = other DNA
ctcggccttgaccaggcggc

SEQ ID NO: 22829 - DNA, 20 bp, synthetic construct
  source 1..20: mol_type = other DNA
agctccagcggggacgcagg

SEQ ID NO: 22830 - DNA, 20 bp, synthetic construct
  source 1..20: mol_type = other DNA
ggtagggcttctcacctgca

SEQ ID NO: 22831 - DNA, 20 bp, synthetic construct
  source 1..20: mol_type = other DNA
tcagcgccatggccgggacc

SEQ ID NO: 22832 - DNA, 20 bp, synthetic construct
  source 1..20: mol_type = other DNA
ttcgtgcatgcgaggtcccg

SEQ ID NO: 22833 - DNA, 20 bp, synthetic construct
  source 1..20: mol_type = other DNA
cagcgccatggccgggaccc

SEQ ID NO: 22834 - DNA, 20 bp, synthetic construct
  source 1..20: mol_type = other DNA
catctgcgcacgcacacagg

SEQ ID NO: 22835 - DNA, 20 bp, synthetic construct
  source 1..20: mol_type = other DNA
gcccaggccatccagcccca

SEQ ID NO: 22836 - DNA, 20 bp, synthetic construct
  source 1..20: mol_type = other DNA
caagagcggcggccgcgctt

SEQ ID NO: 22837 - DNA, 20 bp, synthetic construct
  source 1..20: mol_type = other DNA
aggagaccgcgggcggcggg

SEQ ID NO: 22838 - DNA, 20 bp, synthetic construct
  source 1..20: mol_type = other DNA
ccctaccactgcaactggga

SEQ ID NO: 22839 - DNA, 20 bp, synthetic construct
  source 1..20: mol_type = other DNA
cgccaggcccagggctgccg

SEQ ID NO: 22840 - DNA, 20 bp, synthetic construct
  source 1..20: mol_type = other DNA
cacgatcgcacagatggcac

SEQ ID NO: 22841 - DNA, 20 bp, synthetic construct
  source 1..20: mol_type = other DNA
agaaggcacgatcgcacaga

SEQ ID NO: 22842 - DNA, 20 bp, synthetic construct
  source 1..20: mol_type = other DNA
atctgcgcacgcacacaggt

SEQ ID NO: 22843 - DNA, 20 bp, synthetic construct
  source 1..20: mol_type = other DNA
gatggcactggaatggccgg

SEQ ID NO: 22844 - DNA, 20 bp, synthetic construct
  source 1..20: mol_type = other DNA
gcgggggcgctgtagggcgg

SEQ ID NO: 22845 - DNA, 20 bp, synthetic construct
  source 1..20: mol_type = other DNA
tgaagtccagcacgctgttg

SEQ ID NO: 22846 - DNA, 20 bp, synthetic construct
  source 1..20: mol_type = other DNA
tcggggtaatagaacgcagg

SEQ ID NO: 22847 - DNA, 20 bp, synthetic construct
  source 1..20: mol_type = other DNA
ccccctgaagcggacggcgg

SEQ ID NO: 22848 - DNA, 20 bp, synthetic construct
  source 1..20: mol_type = other DNA
gggcttctcacctgcaggga

SEQ ID NO: 22849 - DNA, 20 bp, synthetic construct
  source 1..20: mol_type = other DNA
cggcctgcaggaggtgaggg

SEQ ID NO: 22850 - DNA, 20 bp, synthetic construct
  source 1..20: mol_type = other DNA
gtagctgcaggtgtgagtgg

SEQ ID NO: 22851 - DNA, 20 bp, synthetic construct
  source 1..20: mol_type = other DNA
gcgcggcctgcaggaggtga

SEQ ID NO: 22852 - DNA, 20 bp, synthetic construct
  source 1..20: mol_type = other DNA
cgcgtagctgcaggtgtgag

SEQ ID NO: 22853 - DNA, 20 bp, synthetic construct
  source 1..20: mol_type = other DNA
tgcaggaggtgagggcggcg

SEQ ID NO: 22854 - DNA, 20 bp, synthetic construct
  source 1..20: mol_type = other DNA
cgacgacctcaacagcgtgc

SEQ ID NO: 22855 - DNA, 20 bp, synthetic construct
  source 1..20: mol_type = other DNA
cgccactaccgaaagcacac

SEQ ID NO: 22856 - DNA, 20 bp, synthetic construct
  source 1..20: mol_type = other DNA
tgagctgctgcgacccgagc

SEQ ID NO: 22857 - DNA, 20 bp, synthetic construct
  source 1..20: mol_type = other DNA
tcgtgcatgcgaggtcccgg

SEQ ID NO: 22858 - DNA, 20 bp, synthetic construct
  source 1..20: mol_type = other DNA
ctgagcggcggtgtgtcggg

SEQ ID NO: 22859 - DNA, 20 bp, synthetic construct
  source 1..20: mol_type = other DNA
cagatgcgaactcttggtgt

SEQ ID NO: 22860 - DNA, 20 bp, synthetic construct
  source 1..20: mol_type = other DNA
ctgcaggaggtgagggcggc

SEQ ID NO: 22861 - DNA, 20 bp, synthetic construct
  source 1..20: mol_type = other DNA
gccgtccgcttcagggggct

SEQ ID NO: 22862 - DNA, 20 bp, synthetic construct
  source 1..20: mol_type = other DNA
ggccagcgctgcgggcgaca

SEQ ID NO: 22863 - DNA, 20 bp, synthetic construct
  source 1..20: mol_type = other DNA
acctggcgctgcacatgaaa

SEQ ID NO: 22864 - DNA, 20 bp, synthetic construct
  source 1..20: mol_type = other DNA
ccgcgcgccgaacccgagtc

SEQ ID NO: 22865 - DNA, 20 bp, synthetic construct
  source 1..20: mol_type = other DNA
tgcgcacgcacacaggtggg

SEQ ID NO: 22866 - DNA, 20 bp, synthetic construct
  source 1..20: mol_type = other DNA
gtgagtggcggtgcgtttgc

SEQ ID NO: 22867 - DNA, 20 bp, synthetic construct
  source 1..20: mol_type = other DNA
acccgagctggatgcgccgc

SEQ ID NO: 22868 - DNA, 20 bp, synthetic construct
  source 1..20: mol_type = other DNA
cgaaagtggagaaggacggc

SEQ ID NO: 22869 - DNA, 20 bp, synthetic construct
  source 1..20: mol_type = other DNA
tccttcccgccgcctttcgg

SEQ ID NO: 22870 - DNA, 20 bp, synthetic construct
  source 1..20: mol_type = other DNA
gaagccctaccactgcaact

SEQ ID NO: 22871 - DNA, 20 bp, synthetic construct
  source 1..20: mol_type = other DNA
agaagccctaccactgcaac

SEQ ID NO: 22872 - DNA, 20 bp, synthetic construct
  source 1..20: mol_type = other DNA
cacgctgttgaggtcgtcgt

SEQ ID NO: 22873 - DNA, 20 bp, synthetic construct
  source 1..20: mol_type = other DNA
ccgccgccctcacctcctgc

SEQ ID NO: 22874 - DNA, 20 bp, synthetic construct
  source 1..20: mol_type = other DNA
agcgccatggccgggacccg

SEQ ID NO: 22875 - DNA, 20 bp, synthetic construct
  source 1..20: mol_type = other DNA
cggccagcgctgcgggcgac

SEQ ID NO: 22876 - DNA, 20 bp, synthetic construct
  source 1..20: mol_type = other DNA
cttctcgcgctccgatcacc

SEQ ID NO: 22877 - DNA, 20 bp, synthetic construct
  source 1..20: mol_type = other DNA
tggacttcatcctgtccatg

SEQ ID NO: 22878 - DNA, 20 bp, synthetic construct
  source 1..20: mol_type = other DNA
gcgcatctgcgcacgcacac

SEQ ID NO: 22879 - DNA, 20 bp, synthetic construct
  source 1..20: mol_type = other DNA
gtttgcggggccaagagcgg

SEQ ID NO: 22880 - DNA, 20 bp, synthetic construct
  source 1..20: mol_type = other DNA
cgctgcgggcgacagggcaa

SEQ ID NO: 22881 - DNA, 20 bp, synthetic construct
  source 1..20: mol_type = other DNA
cctgcaggaggtgagggcgg

SEQ ID NO: 22882 - DNA, 20 bp, synthetic construct
  source 1..20: mol_type = other DNA
cacgccgcctgcgtccccgc

SEQ ID NO: 22883 - DNA, 20 bp, synthetic construct
  source 1..20: mol_type = other DNA
atcctgtccatggggctgga

SEQ ID NO: 22884 - DNA, 20 bp, synthetic construct
  source 1..20: mol_type = other DNA
ccagatggcggctgagctca

SEQ ID NO: 22885 - DNA, 20 bp, synthetic construct
  source 1..20: mol_type = other DNA
cgcttccacggggagcagca

SEQ ID NO: 22886 - DNA, 20 bp, synthetic construct
  source 1..20: mol_type = other DNA
agaccccctgctgctccccg

SEQ ID NO: 22887 - DNA, 20 bp, synthetic construct
  source 1..20: mol_type = other DNA
aactcttttaatttgttctc

SEQ ID NO: 22888 - DNA, 20 bp, synthetic construct
  source 1..20: mol_type = other DNA
ttcctgtaggaatcctgaga

SEQ ID NO: 22889 - DNA, 20 bp, synthetic construct
  source 1..20: mol_type = other DNA
ggactctgaagatgtaccta

SEQ ID NO: 22890 - DNA, 20 bp, synthetic construct
  source 1..20: mol_type = other DNA
aagaggagtacagtgcaatg

SEQ ID NO: 22891 - DNA, 20 bp, synthetic construct
  source 1..20: mol_type = other DNA
aacatcagcaaagacaagac

SEQ ID NO: 22892 - DNA, 20 bp, synthetic construct
  source 1..20: mol_type = other DNA
caatgagggaccagtacatg

SEQ ID NO: 22893 - DNA, 20 bp, synthetic construct
  source 1..20: mol_type = other DNA
gggaccagtacatgaggact

SEQ ID NO: 22894 - DNA, 20 bp, synthetic construct
  source 1..20: mol_type = other DNA
tcctgtaggaatcctgagaa

SEQ ID NO: 22895 - DNA, 20 bp, synthetic construct
  source 1..20: mol_type = other DNA
agaggagtacagtgcaatga

SEQ ID NO: 22896 - DNA, 20 bp, synthetic construct
  source 1..20: mol_type = other DNA
tctcgacacagcaggtcaag

SEQ ID NO: 22897 - DNA, 20 bp, synthetic construct
  source 1..20: mol_type = other DNA
tttgctgatgtttcaataaa

SEQ ID NO: 22898 - DNA, 20 bp, synthetic construct
  source 1..20: mol_type = other DNA
agggaccagtacatgaggac

SEQ ID NO: 22899 - DNA, 20 bp, synthetic construct
  source 1..20: mol_type = other DNA
cagtacatgaggactgggga

SEQ ID NO: 22900 - DNA, 20 bp, synthetic construct
  source 1..20: mol_type = other DNA
cgaatatgatccaacaatag

SEQ ID NO: 22901 - DNA, 20 bp, synthetic construct
  source 1..20: mol_type = other DNA
gaggagtccacttggcagtg

SEQ ID NO: 22902 - DNA, 20 bp, synthetic construct
  source 1..20: mol_type = other DNA
tctctgctccttttggtgac

SEQ ID NO: 22903 - DNA, 20 bp, synthetic construct
  source 1..20: mol_type = other DNA
tgggggaggccctgacctcc

SEQ ID NO: 22904 - DNA, 20 bp, synthetic construct
  source 1..20: mol_type = other DNA
cctccgtctgcgcctgggcc

SEQ ID NO: 22905 - DNA, 20 bp, synthetic construct
  source 1..20: mol_type = other DNA
caacgctctgggagagcccc

SEQ ID NO: 22906 - DNA, 20 bp, synthetic construct
  source 1..20: mol_type = other DNA
tgtggggctgcaggggagct

SEQ ID NO: 22907 - DNA, 20 bp, synthetic construct
  source 1..20: mol_type = other DNA
cttttggtgactggagcctt

SEQ ID NO: 22908 - DNA, 20 bp, synthetic construct
  source 1..20: mol_type = other DNA
gcggcagcgggcgggccact

SEQ ID NO: 22909 - DNA, 20 bp, synthetic construct
  source 1..20: mol_type = other DNA
gaggagggcgccgccgggtg

SEQ ID NO: 22910 - DNA, 20 bp, synthetic construct
  source 1..20: mol_type = other DNA
gggtggcgcagggggcgctg

SEQ ID NO: 22911 - DNA, 20 bp, synthetic construct
  source 1..20: mol_type = other DNA
ccgccatggcgcgaggcggc

SEQ ID NO: 22912 - DNA, 20 bp, synthetic construct
  source 1..20: mol_type = other DNA
aacagcagtagcagcagcag

SEQ ID NO: 22913 - DNA, 20 bp, synthetic construct
  source 1..20: mol_type = other DNA
cctcgcgccatggcggcccc

SEQ ID NO: 22914 - DNA, 20 bp, synthetic construct
  source 1..20: mol_type = other DNA
gcagctccagagtcaccagg

SEQ ID NO: 22915 - DNA, 20 bp, synthetic construct
  source 1..20: mol_type = other DNA
gccgcagctcccgctggccg

SEQ ID NO: 22916 - DNA, 20 bp, synthetic construct
  source 1..20: mol_type = other DNA
ggattccttgtaggaaaaac

SEQ ID NO: 22917 - DNA, 20 bp, synthetic construct
  source 1..20: mol_type = other DNA
cagctccagagtcaccaggt

SEQ ID NO: 22918 - DNA, 20 bp, synthetic construct
  source 1..20: mol_type = other DNA
gctgctcggtgagggggtcg

SEQ ID NO: 22919 - DNA, 20 bp, synthetic construct
  source 1..20: mol_type = other DNA
cgtgcccaagagcccctctg

SEQ ID NO: 22920 - DNA, 20 bp, synthetic construct
  source 1..20: mol_type = other DNA
cagcgctcgcagggagccgt

SEQ ID NO: 22921 - DNA, 20 bp, synthetic construct
  source 1..20: mol_type = other DNA
gggacacattcacatactcc

SEQ ID NO: 22922 - DNA, 20 bp, synthetic construct
  source 1..20: mol_type = other DNA
ggagcaggtctggctggctc

SEQ ID NO: 22923 - DNA, 20 bp, synthetic construct
  source 1..20: mol_type = other DNA
ctttaccagtttgtatccaa

SEQ ID NO: 22924 - DNA, 20 bp, synthetic construct
  source 1..20: mol_type = other DNA
tacgtgaacgttccggagag

SEQ ID NO: 22925 - DNA, 20 bp, synthetic construct
  source 1..20: mol_type = other DNA
ggagtatgtgaatgtgtccc

SEQ ID NO: 22926 - DNA, 20 bp, synthetic construct
  source 1..20: mol_type = other DNA
gatggcctcctccatctgca

SEQ ID NO: 22927 - DNA, 20 bp, synthetic construct
  source 1..20: mol_type = other DNA
ggggcggactcacctatctg

SEQ ID NO: 22928 - DNA, 20 bp, synthetic construct
  source 1..20: mol_type = other DNA
gtgcactgccacagactgcc

SEQ ID NO: 22929 - DNA, 20 bp, synthetic construct
  source 1..20: mol_type = other DNA
accctgaaaggaagtgaaaa

SEQ ID NO: 22930 - DNA, 20 bp, synthetic construct
  source 1..20: mol_type = other DNA
gtaggagcctgggaaagaga

SEQ ID NO: 22931 - DNA, 20 bp, synthetic construct
  source 1..20: mol_type = other DNA
acgacagcacatcctcagat

SEQ ID NO: 22932 - DNA, 20 bp, synthetic construct
  source 1..20: mol_type = other DNA
atactcccggctgccatctg

SEQ ID NO: 22933 - DNA, 20 bp, synthetic construct
  source 1..20: mol_type = other DNA
cgtttgaactggatgcccct

SEQ ID NO: 22934 - DNA, 20 bp, synthetic construct
  source 1..20: mol_type = other DNA
cagcaggagccccagcacgc

SEQ ID NO: 22935 - DNA, 20 bp, synthetic construct
  source 1..20: mol_type = other DNA
actcagggcggctgtaaggg

SEQ ID NO: 22936 - DNA, 20 bp, synthetic construct
  source 1..20: mol_type = other DNA
atcctcacaggctggttctg

SEQ ID NO: 22937 - DNA, 20 bp, synthetic construct
  source 1..20: mol_type = other DNA
tgctggccccccccaagacg

SEQ ID NO: 22938 - DNA, 20 bp, synthetic construct
  source 1..20: mol_type = other DNA
gctcctgctgctgcccatcc

SEQ ID NO: 22939 - DNA, 20 bp, synthetic construct
  source 1..20: mol_type = other DNA
gcagaggaagtggaggaaga

SEQ ID NO: 22940 - DNA, 20 bp, synthetic construct
  source 1..20: mol_type = other DNA
gccgggaagatggcgtccgg

SEQ ID NO: 22941 - DNA, 20 bp, synthetic construct
  source 1..20: mol_type = other DNA
gcatcctcacaggctggttc

SEQ ID NO: 22942 - DNA, 20 bp, synthetic construct
  source 1..20: mol_type = other DNA
gcccatcctggccatgttga

SEQ ID NO: 22943 - DNA, 20 bp, synthetic construct
  source 1..20: mol_type = other DNA
cggcctcgtgagtacaagga

SEQ ID NO: 22944 - DNA, 20 bp, synthetic construct
  source 1..20: mol_type = other DNA
atcatcaatggactccactg

SEQ ID NO: 22945 - DNA, 20 bp, synthetic construct
  source 1..20: mol_type = other DNA
tcccggcgggattctgatgg

SEQ ID NO: 22946 - DNA, 20 bp, synthetic construct
  source 1..20: mol_type = other DNA
tctgcgctctccccgctctc

SEQ ID NO: 22947 - DNA, 20 bp, synthetic construct
  source 1..20: mol_type = other DNA
gcaggagccccagcacgcag

SEQ ID NO: 22948 - DNA, 20 bp, synthetic construct
  source 1..20: mol_type = other DNA
cagaggaagtggaggaagag

SEQ ID NO: 22949 - DNA, 20 bp, synthetic construct
  source 1..20: mol_type = other DNA
tttaccagtttgtatccaag

SEQ ID NO: 22950 - DNA, 20 bp, synthetic construct
  source 1..20: mol_type = other DNA
tggccactcacaggtagcct

SEQ ID NO: 22951 - DNA, 20 bp, synthetic construct
  source 1..20: mol_type = other DNA
agcaggagccccagcacgca

SEQ ID NO: 22952 - DNA, 20 bp, synthetic construct
  source 1..20: mol_type = other DNA
caggctacctgtgagtggcc

SEQ ID NO: 22953 - DNA, 20 bp, synthetic construct
  source 1..20: mol_type = other DNA
ccaggaggcagaggaagtgg

SEQ ID NO: 22954 - DNA, 20 bp, synthetic construct
  source 1..20: mol_type = other DNA
ccacagactgccaggtgagt

SEQ ID NO: 22955 - DNA, 20 bp, synthetic construct
  source 1..20: mol_type = other DNA
tcagaatcccgccgggaaga

SEQ ID NO: 22956 - DNA, 20 bp, synthetic construct
  source 1..20: mol_type = other DNA
tgtggcgagctacgagaacg

SEQ ID NO: 22957 - DNA, 20 bp, synthetic construct
  source 1..20: mol_type = other DNA
caacccaggctacctgtgag

SEQ ID NO: 22958 - DNA, 20 bp, synthetic construct
  source 1..20: mol_type = other DNA
tacgagaacgagggtgcgtc

SEQ ID NO: 22959 - DNA, 20 bp, synthetic construct
  source 1..20: mol_type = other DNA
ccaggtgagtgggaaactgg

SEQ ID NO: 22960 - DNA, 20 bp, synthetic construct
  source 1..20: mol_type = other DNA
ccgggaagatggcgtccggt

SEQ ID NO: 22961 - DNA, 20 bp, synthetic construct
  source 1..20: mol_type = other DNA
agatccccgcagccccttgg

SEQ ID NO: 22962 - DNA, 20 bp, synthetic construct
  source 1..20: mol_type = other DNA
ccaggaactgcatcctggag

SEQ ID NO: 22963 - DNA, 20 bp, synthetic construct
  source 1..20: mol_type = other DNA
caggtgagtgggaaactggt

SEQ ID NO: 22964 - DNA, 20 bp, synthetic construct
  source 1..20: mol_type = other DNA
cccttggtgagtgcctgggg

SEQ ID NO: 22965 - DNA, 20 bp, synthetic construct
  source 1..20: mol_type = other DNA
cctccatctgcaggggagct

SEQ ID NO: 22966 - DNA, 20 bp, synthetic construct
  source 1..20: mol_type = other DNA
ggtgcttcctgacagcaccc

SEQ ID NO: 22967 - DNA, 20 bp, synthetic construct
  source 1..20: mol_type = other DNA
atctgaggatgtgctgtcgt

SEQ ID NO: 22968 - DNA, 20 bp, synthetic construct
  source 1..20: mol_type = other DNA
taccaccatcagaatcccgc

SEQ ID NO: 22969 - DNA, 20 bp, synthetic construct
  source 1..20: mol_type = other DNA
ggttctgggggtaacgacac

SEQ ID NO: 22970 - DNA, 20 bp, synthetic construct
  source 1..20: mol_type = other DNA
ctacctgtgagtggccaggt

SEQ ID NO: 22971 - DNA, 20 bp, synthetic construct
  source 1..20: mol_type = other DNA
gctacctgtgagtggccagg

SEQ ID NO: 22972 - DNA, 20 bp, synthetic construct
  source 1..20: mol_type = other DNA
caccctgaaaggaagtgaaa

SEQ ID NO: 22973 - DNA, 20 bp, synthetic construct
  source 1..20: mol_type = other DNA
ggatggcctcctccatctgc

SEQ ID NO: 22974 - DNA, 20 bp, synthetic construct
  source 1..20: mol_type = other DNA
acgtgaacgttccggagagc

SEQ ID NO: 22975 - DNA, 20 bp, synthetic construct
  source 1..20: mol_type = other DNA
tgatggggcagcagtgctag

SEQ ID NO: 22976 - DNA, 20 bp, synthetic construct
  source 1..20: mol_type = other DNA
ggagcggctaagactgagcc

SEQ ID NO: 22977 - DNA, 20 bp, synthetic construct
  source 1..20: mol_type = other DNA
acccccagaaccagcctgtg

SEQ ID NO: 22978 - DNA, 20 bp, synthetic construct
  source 1..20: mol_type = other DNA
ctgccaggtgagtgggaaac

SEQ ID NO: 22979 - DNA, 20 bp, synthetic construct
  source 1..20: mol_type = other DNA
cttctgggagtcaaaggtca

SEQ ID NO: 22980 - DNA, 20 bp, synthetic construct
  source 1..20: mol_type = other DNA
tcagggcggctgtaagggag

SEQ ID NO: 22981 - DNA, 20 bp, synthetic construct
  source 1..20: mol_type = other DNA
cccactcacctggcagtctg

SEQ ID NO: 22982 - DNA, 20 bp, synthetic construct
  source 1..20: mol_type = other DNA
gctcctgcactcagcacccc

SEQ ID NO: 22983 - DNA, 20 bp, synthetic construct
  source 1..20: mol_type = other DNA
cagcacgcaggggaccagga

SEQ ID NO: 22984 - DNA, 20 bp, synthetic construct
  source 1..20: mol_type = other DNA
gaagatccccgcagcccctt

SEQ ID NO: 22985 - DNA, 20 bp, synthetic construct
  source 1..20: mol_type = other DNA
gccatcaacatggccaggat

SEQ ID NO: 22986 - DNA, 20 bp, synthetic construct
  source 1..20: mol_type = other DNA
gtgtcccaggaactgcatcc

SEQ ID NO: 22987 - DNA, 20 bp, synthetic construct
  source 1..20: mol_type = other DNA
ggcttcaaagagagggtgag

SEQ ID NO: 22988 - DNA, 20 bp, synthetic construct
  source 1..20: mol_type = other DNA
actcacgaggccgtttgaac

SEQ ID NO: 22989 - DNA, 20 bp, synthetic construct
  source 1..20: mol_type = other DNA
agacccttggtgagtgcctg

SEQ ID NO: 22990 - DNA, 20 bp, synthetic construct
  source 1..20: mol_type = other DNA
cctctgcctcctgggaactc

SEQ ID NO: 22991 - DNA, 20 bp, synthetic construct
  source 1..20: mol_type = other DNA
ggggatcttctgggagtcaa

SEQ ID NO: 22992 - DNA, 20 bp, synthetic construct
  source 1..20: mol_type = other DNA
tcaggaagcaccaccctgaa

SEQ ID NO: 22993 - DNA, 20 bp, synthetic construct
  source 1..20: mol_type = other DNA
ttctgggagtcaaaggtcag

SEQ ID NO: 22994 - DNA, 20 bp, synthetic construct
  source 1..20: mol_type = other DNA
tactcccggctgccatctgt

SEQ ID NO: 22995 - DNA, 20 bp, synthetic construct
  source 1..20: mol_type = other DNA
agaagatccccgcagcccct

SEQ ID NO: 22996 - DNA, 20 bp, synthetic construct
  source 1..20: mol_type = other DNA
cactggagaaggcactgtct

SEQ ID NO: 22997 - DNA, 20 bp, synthetic construct
  source 1..20: mol_type = other DNA
aagatccccgcagccccttg

SEQ ID NO: 22998 - DNA, 20 bp, synthetic construct
  source 1..20: mol_type = other DNA
atggcctcctccatctgcag

SEQ ID NO: 22999 - DNA, 20 bp, synthetic construct
  source 1..20: mol_type = other DNA
tctgcaggggagctcggagc

SEQ ID NO: 23000 - DNA, 20 bp, synthetic construct
  source 1..20: mol_type = other DNA
ctctgcctcctgggaactca

SEQ ID NO: 23001 - DNA, 20 bp, synthetic construct
  source 1..20: mol_type = other DNA
tcttctgggagtcaaaggtc

SEQ ID NO: 23002 - DNA, 20 bp, synthetic construct
  source 1..20: mol_type = other DNA
actcccggctgccatctgtg

SEQ ID NO: 23003 - DNA, 20 bp, synthetic construct
  source 1..20: mol_type = other DNA
cgtaggagcctgggaaagag

SEQ ID NO: 23004 - DNA, 20 bp, synthetic construct
  source 1..20: mol_type = other DNA
ggtctggctggctcaggggt

SEQ ID NO: 23005 - DNA, 20 bp, synthetic construct
  source 1..20: mol_type = other DNA
ctactcacgggatggggagc

SEQ ID NO: 23006 - DNA, 20 bp, synthetic construct
  source 1..20: mol_type = other DNA
gctgagtgcaggagctgatg

SEQ ID NO: 23007 - DNA, 20 bp, synthetic construct
  source 1..20: mol_type = other DNA
aacgttcacgtaatcatcaa

SEQ ID NO: 23008 - DNA, 20 bp, synthetic construct
  source 1..20: mol_type = other DNA
acgagaacgagggtgcgtct

SEQ ID NO: 23009 - DNA, 20 bp, synthetic construct
  source 1..20: mol_type = other DNA
cacgggatggggagcaggtc

SEQ ID NO: 23010 - DNA, 20 bp, synthetic construct
  source 1..20: mol_type = other DNA
tgggtaggcaggtggccagg

SEQ ID NO: 23011 - DNA, 20 bp, synthetic construct
  source 1..20: mol_type = other DNA
tgccatcaacatggccagga

SEQ ID NO: 23012 - DNA, 20 bp, synthetic construct
  source 1..20: mol_type = other DNA
tcatccgcatcctcacaggc

SEQ ID NO: 23013 - DNA, 20 bp, synthetic construct
  source 1..20: mol_type = other DNA
gatgccccttggatacaaac

SEQ ID NO: 23014 - DNA, 20 bp, synthetic construct
  source 1..20: mol_type = other DNA
gaggacgactatcacaaccc

SEQ ID NO: 23015 - DNA, 20 bp, synthetic construct
  source 1..20: mol_type = other DNA
tggctggctcaggggtgggt

SEQ ID NO: 23016 - DNA, 20 bp, synthetic construct
  source 1..20: mol_type = other DNA
gtgggtaggcaggtggccag

SEQ ID NO: 23017 - DNA, 20 bp, synthetic construct
  source 1..20: mol_type = other DNA
cactgttggcttcaaagaga

SEQ ID NO: 23018 - DNA, 20 bp, synthetic construct
  source 1..20: mol_type = other DNA
gagcctgggaaagagagggc

SEQ ID NO: 23019 - DNA, 20 bp, synthetic construct
  source 1..20: mol_type = other DNA
atgccaggggtgctgagtgc

SEQ ID NO: 23020 - DNA, 20 bp, synthetic construct
  source 1..20: mol_type = other DNA
agcaggtctggctggctcag

SEQ ID NO: 23021 - DNA, 20 bp, synthetic construct
  source 1..20: mol_type = other DNA
acggcctcgtgagtacaagg

SEQ ID NO: 23022 - DNA, 20 bp, synthetic construct
  source 1..20: mol_type = other DNA
acactgttggcttcaaagag

SEQ ID NO: 23023 - DNA, 20 bp, synthetic construct
  source 1..20: mol_type = other DNA
gtaggaggtgacaggtgggt

SEQ ID NO: 23024 - DNA, 20 bp, synthetic construct
  source 1..20: mol_type = other DNA
ctcagggcggctgtaaggga

SEQ ID NO: 23025 - DNA, 20 bp, synthetic construct
  source 1..20: mol_type = other DNA
ccagggggcaaccgtgtctg

SEQ ID NO: 23026 - DNA, 20 bp, synthetic construct
  source 1..20: mol_type = other DNA
catcctggtcccctgcgtgc

SEQ ID NO: 23027 - DNA, 20 bp, synthetic construct
  source 1..20: mol_type = other DNA
gagcaggtctggctggctca

SEQ ID NO: 23028 - DNA, 20 bp, synthetic construct
  source 1..20: mol_type = other DNA
caaacggcctcgtgagtaca

SEQ ID NO: 23029 - DNA, 20 bp, synthetic construct
  source 1..20: mol_type = other DNA
cctcagacacggttgccccc

SEQ ID NO: 23030 - DNA, 20 bp, synthetic construct
  source 1..20: mol_type = other DNA
tccagattacgagaatctgc

SEQ ID NO: 23031 - DNA, 20 bp, synthetic construct
  source 1..20: mol_type = other DNA
aggtctggctggctcagggg

SEQ ID NO: 23032 - DNA, 20 bp, synthetic construct
  source 1..20: mol_type = other DNA
ggctcagtcttagccgctcc

SEQ ID NO: 23033 - DNA, 20 bp, synthetic construct
  source 1..20: mol_type = other DNA
ctggctcaggggtgggtagg

SEQ ID NO: 23034 - DNA, 20 bp, synthetic construct
  source 1..20: mol_type = other DNA
atctgtggggacagatcaga

SEQ ID NO: 23035 - DNA, 20 bp, synthetic construct
  source 1..20: mol_type = other DNA
gccccagcacgcaggggacc

SEQ ID NO: 23036 - DNA, 20 bp, synthetic construct
  source 1..20: mol_type = other DNA
ggcactgtctcggatgccag

SEQ ID NO: 23037 - DNA, 20 bp, synthetic construct
  source 1..20: mol_type = other DNA
ctggtaaaggagacacagct

SEQ ID NO: 23038 - DNA, 20 bp, synthetic construct
  source 1..20: mol_type = other DNA
cacacacagtgccatcaaca

SEQ ID NO: 23039 - DNA, 20 bp, synthetic construct
  source 1..20: mol_type = other DNA
ggatggggagcaggtctggc

SEQ ID NO: 23040 - DNA, 20 bp, synthetic construct
  source 1..20: mol_type = other DNA
tcctgcagattctcgtaatc

SEQ ID NO: 23041 - DNA, 20 bp, synthetic construct
  source 1..20: mol_type = other DNA
tgaactgagggcctggtgag

SEQ ID NO: 23042 - DNA, 20 bp, synthetic construct
  source 1..20: mol_type = other DNA
gccacagactgccaggtgag

SEQ ID NO: 23043 - DNA, 20 bp, synthetic construct
  source 1..20: mol_type = other DNA
tacagccgccctgagttccc

SEQ ID NO: 23044 - DNA, 20 bp, synthetic construct
  source 1..20: mol_type = other DNA
tggccaggatgggcagcagc

SEQ ID NO: 23045 - DNA, 20 bp, synthetic construct
  source 1..20: mol_type = other DNA
atcctcatccgcatcctcac

SEQ ID NO: 23046 - DNA, 20 bp, synthetic construct
  source 1..20: mol_type = other DNA
cgtgaacgttccggagagcg

SEQ ID NO: 23047 - DNA, 20 bp, synthetic construct
  source 1..20: mol_type = other DNA
ggtgggtaggaggtgacagg

SEQ ID NO: 23048 - DNA, 20 bp, synthetic construct
  source 1..20: mol_type = other DNA
gtggcgagctacgagaacga

SEQ ID NO: 23049 - DNA, 20 bp, synthetic construct
  source 1..20: mol_type = other DNA
caggggagctcggagcaggc

SEQ ID NO: 23050 - DNA, 20 bp, synthetic construct
  source 1..20: mol_type = other DNA
tcctggtcccctgcgtgctg

SEQ ID NO: 23051 - DNA, 20 bp, synthetic construct
  source 1..20: mol_type = other DNA
gcttcaaagagagggtgaga

SEQ ID NO: 23052 - DNA, 20 bp, synthetic construct
  source 1..20: mol_type = other DNA
ccttggatacaaactggtaa

SEQ ID NO: 23053 - DNA, 20 bp, synthetic construct
  source 1..20: mol_type = other DNA
acagtgccatcaacatggcc

SEQ ID NO: 23054 - DNA, 20 bp, synthetic construct
  source 1..20: mol_type = other DNA
ctcgtagctcgccacactgt

SEQ ID NO: 23055 - DNA, 20 bp, synthetic construct
  source 1..20: mol_type = other DNA
gcagatggaggaggccatcc

SEQ ID NO: 23056 - DNA, 20 bp, synthetic construct
  source 1..20: mol_type = other DNA
accaccatcagaatcccgcc

SEQ ID NO: 23057 - DNA, 20 bp, synthetic construct
  source 1..20: mol_type = other DNA
agacgaggaggacggggaac

SEQ ID NO: 23058 - DNA, 20 bp, synthetic construct
  source 1..20: mol_type = other DNA
cccaggtaagcgggggtctc

SEQ ID NO: 23059 - DNA, 20 bp, synthetic construct
  source 1..20: mol_type = other DNA
ttgtccttcctgcagggagg

SEQ ID NO: 23060 - DNA, 20 bp, synthetic construct
  source 1..20: mol_type = other DNA
aaaatccactagactccctg

SEQ ID NO: 23061 - DNA, 20 bp, synthetic construct
  source 1..20: mol_type = other DNA
accacggcttctggggcttc

SEQ ID NO: 23062 - DNA, 20 bp, synthetic construct
  source 1..20: mol_type = other DNA
gcgagagcaccgcgggtgag

SEQ ID NO: 23063 - DNA, 20 bp, synthetic construct
  source 1..20: mol_type = other DNA
gcacggtaagaggcgagaca

SEQ ID NO: 23064 - DNA, 20 bp, synthetic construct
  source 1..20: mol_type = other DNA
cgggagagcgagagcaccgc

SEQ ID NO: 23065 - DNA, 20 bp, synthetic construct
  source 1..20: mol_type = other DNA
gtgattcagaacctggagcg

SEQ ID NO: 23066 - DNA, 20 bp, synthetic construct
  source 1..20: mol_type = other DNA
cctgcagattgcagaaggca

SEQ ID NO: 23067 - DNA, 20 bp, synthetic construct
  source 1..20: mol_type = other DNA
gcaggtagtcaaaggtgggc

SEQ ID NO: 23068 - DNA, 20 bp, synthetic construct
  source 1..20: mol_type = other DNA
cgtagggatgaccaacccgg

SEQ ID NO: 23069 - DNA, 20 bp, synthetic construct
  source 1..20: mol_type = other DNA
cggatgagcagctgtggagt

SEQ ID NO: 23070 - DNA, 20 bp, synthetic construct
  source 1..20: mol_type = other DNA
agctgtgcagagcgataacc

SEQ ID NO: 23071 - DNA, 20 bp, synthetic construct
  source 1..20: mol_type = other DNA
ctgcttcatgaggttggcct

SEQ ID NO: 23072 - DNA, 20 bp, synthetic construct
  source 1..20: mol_type = other DNA
ggtcatccctacgggttgat

SEQ ID NO: 23073 - DNA, 20 bp, synthetic construct
  source 1..20: mol_type = other DNA
gaagaaccagctgtgcaggg

SEQ ID NO: 23074 - DNA, 20 bp, synthetic construct
  source 1..20: mol_type = other DNA
atgagttggtacagctcctc

SEQ ID NO: 23075 - DNA, 20 bp, synthetic construct
  source 1..20: mol_type = other DNA
aatggcggaccagttcatgc

SEQ ID NO: 23076 - DNA, 20 bp, synthetic construct
  source 1..20: mol_type = other DNA
aggctggtactggccctctg

SEQ ID NO: 23077 - DNA, 20 bp, synthetic construct
  source 1..20: mol_type = other DNA
ccaggttctgaatcacctcc

SEQ ID NO: 23078 - DNA, 20 bp, synthetic construct
  source 1..20: mol_type = other DNA
ccttggctctaacctgggta

SEQ ID NO: 23079 - DNA, 20 bp, synthetic construct
  source 1..20: mol_type = other DNA
cgtcgggctcactggtgtaa

SEQ ID NO: 23080 - DNA, 20 bp, synthetic construct
  source 1..20: mol_type = other DNA
ccgggagagcgagagcaccg

SEQ ID NO: 23081 - DNA, 20 bp, synthetic construct
  source 1..20: mol_type = other DNA
aaggcgcagtccctgaccac

SEQ ID NO: 23082 - DNA, 20 bp, synthetic construct
  source 1..20: mol_type = other DNA
gacccactggttacctacga

SEQ ID NO: 23083 - DNA, 20 bp, synthetic construct
  source 1..20: mol_type = other DNA
agcatctgcgaggacgaggg

SEQ ID NO: 23084 - DNA, 20 bp, synthetic construct
  source 1..20: mol_type = other DNA
gcccatctgaagcatctgcg

SEQ ID NO: 23085 - DNA, 20 bp, synthetic construct
  source 1..20: mol_type = other DNA
tccaggttctgaatcacctc

SEQ ID NO: 23086 - DNA, 20 bp, synthetic construct
  source 1..20: mol_type = other DNA
ctcaaggctgaggctggtac

SEQ ID NO: 23087 - DNA, 20 bp, synthetic construct
  source 1..20: mol_type = other DNA
gcgccctgacaactgtccag

SEQ ID NO: 23088 - DNA, 20 bp, synthetic construct
  source 1..20: mol_type = other DNA
ccctcagggaccatgggctg

SEQ ID NO: 23089 - DNA, 20 bp, synthetic construct
  source 1..20: mol_type = other DNA
cttcaagaacctgagccgca

SEQ ID NO: 23090 - DNA, 20 bp, synthetic construct
  source 1..20: mol_type = other DNA
tgagccgcaaggacgcggag

SEQ ID NO: 23091 - DNA, 20 bp, synthetic construct
  source 1..20: mol_type = other DNA
tcccctcgaatcacttttcc

SEQ ID NO: 23092 - DNA, 20 bp, synthetic construct
  source 1..20: mol_type = other DNA
gaaagtaggtgggggagagg

SEQ ID NO: 23093 - DNA, 20 bp, synthetic construct
  source 1..20: mol_type = other DNA
tcaccttgcagtggggaagc

SEQ ID NO: 23094 - DNA, 20 bp, synthetic construct
  source 1..20: mol_type = other DNA
cacggccgcatcccttaccc

SEQ ID NO: 23095 - DNA, 20 bp, synthetic construct
  source 1..20: mol_type = other DNA
tcctcccaccacggcttctg

SEQ ID NO: 23096 - DNA, 20 bp, synthetic construct
  source 1..20: mol_type = other DNA
ttacttgggctgccatgtcc

SEQ ID NO: 23097 - DNA, 20 bp, synthetic construct
  source 1..20: mol_type = other DNA
ccttgtctttacagacaacc

SEQ ID NO: 23098 - DNA, 20 bp, synthetic construct
  source 1..20: mol_type = other DNA
tgtactcgttgtcctcaatg

SEQ ID NO: 23099 - DNA, 20 bp, synthetic construct
  source 1..20: mol_type = other DNA
gcccagatctccgtcgtgag

SEQ ID NO: 23100 - DNA, 20 bp, synthetic construct
  source 1..20: mol_type = other DNA
gcctcggccaggaaggcgtc

SEQ ID NO: 23101 - DNA, 20 bp, synthetic construct
  source 1..20: mol_type = other DNA
agcggcagctcctggcgccc

SEQ ID NO: 23102 - DNA, 20 bp, synthetic construct
  source 1..20: mol_type = other DNA
ctgggtaagggatgcggccg

SEQ ID NO: 23103 - DNA, 20 bp, synthetic construct
  source 1..20: mol_type = other DNA
ccgggacttcgaccagaacc

SEQ ID NO: 23104 - DNA, 20 bp, synthetic construct
  source 1..20: mol_type = other DNA
ctgaagcatctgcgaggacg

SEQ ID NO: 23105 - DNA, 20 bp, synthetic construct
  source 1..20: mol_type = other DNA
ggcggtgaagagcctgaagc

SEQ ID NO: 23106 - DNA, 20 bp, synthetic construct
  source 1..20: mol_type = other DNA
aaatccactagactccctgt

SEQ ID NO: 23107 - DNA, 20 bp, synthetic construct
  source 1..20: mol_type = other DNA
accaactcatgaggctgtgc

SEQ ID NO: 23108 - DNA, 20 bp, synthetic construct
  source 1..20: mol_type = other DNA
ccacggcttctggggcttct

SEQ ID NO: 23109 - DNA, 20 bp, synthetic construct
  source 1..20: mol_type = other DNA
cagtggggaagccggcggat

SEQ ID NO: 23110 - DNA, 20 bp, synthetic construct
  source 1..20: mol_type = other DNA
cttcgaccagaaccagggag

SEQ ID NO: 23111 - DNA, 20 bp, synthetic construct
  source 1..20: mol_type = other DNA
catctgcgaggacgagggag

SEQ ID NO: 23112 - DNA, 20 bp, synthetic construct
  source 1..20: mol_type = other DNA
ctgaatacatggagaatggt

SEQ ID NO: 23113 - DNA, 20 bp, synthetic construct
  source 1..20: mol_type = other DNA
tccagcacagcctcatgagt

SEQ ID NO: 23114 - DNA, 20 bp, synthetic construct
  source 1..20: mol_type = other DNA
tggtcaacttgatgcctgaa

SEQ ID NO: 23115 - DNA, 20 bp, synthetic construct
  source 1..20: mol_type = other DNA
ttgcagctgcttcatgaggt

SEQ ID NO: 23116 - DNA, 20 bp, synthetic construct
  source 1..20: mol_type = other DNA
tggtcatccctacgggttga

SEQ ID NO: 23117 - DNA, 20 bp, synthetic construct
  source 1..20: mol_type = other DNA
gcatctgcgaggacgaggga

SEQ ID NO: 23118 - DNA, 20 bp, synthetic construct
  source 1..20: mol_type = other DNA
ccgtgcccttgccatccagt

SEQ ID NO: 23119 - DNA, 20 bp, synthetic construct
  source 1..20: mol_type = other DNA
ggctgggggctggacagttc

SEQ ID NO: 23120 - DNA, 20 bp, synthetic construct
  source 1..20: mol_type = other DNA
tgcctggggtcaccttgcag

SEQ ID NO: 23121 - DNA, 20 bp, synthetic construct
  source 1..20: mol_type = other DNA
tgagctgcagccacagccca

SEQ ID NO: 23122 - DNA, 20 bp, synthetic construct
  source 1..20: mol_type = other DNA
ccgctcctgcgccacggagg

SEQ ID NO: 23123 - DNA, 20 bp, synthetic construct
  source 1..20: mol_type = other DNA
caacgggcacacgaaggtgg

SEQ ID NO: 23124 - DNA, 20 bp, synthetic construct
  source 1..20: mol_type = other DNA
tcatgaggttggcctcggcc

SEQ ID NO: 23125 - DNA, 20 bp, synthetic construct
  source 1..20: mol_type = other DNA
gcagctgcaacaccagcggc

SEQ ID NO: 23126 - DNA, 20 bp, synthetic construct
  source 1..20: mol_type = other DNA
cactcgccgctcctgcgcca

SEQ ID NO: 23127 - DNA, 20 bp, synthetic construct
  source 1..20: mol_type = other DNA
agctgcaagattgcagactt

SEQ ID NO: 23128 - DNA, 20 bp, synthetic construct
  source 1..20: mol_type = other DNA
ccgaaatggctctgaggtgc

SEQ ID NO: 23129 - DNA, 20 bp, synthetic construct
  source 1..20: mol_type = other DNA
gacttcttcacggccacaga

SEQ ID NO: 23130 - DNA, 20 bp, synthetic construct
  source 1..20: mol_type = other DNA
cagcccaagtaaggagactg

SEQ ID NO: 23131 - DNA, 20 bp, synthetic construct
  source 1..20: mol_type = other DNA
tgaagcatctgcgaggacga

SEQ ID NO: 23132 - DNA, 20 bp, synthetic construct
  source 1..20: mol_type = other DNA
tgactacctgcgcagtgtgc

SEQ ID NO: 23133 - DNA, 20 bp, synthetic construct
  source 1..20: mol_type = other DNA
gcagcccaagtaaggagact

SEQ ID NO: 23134 - DNA, 20 bp, synthetic construct
  source 1..20: mol_type = other DNA
gcatggcattcattgaagag

SEQ ID NO: 23135 - DNA, 20 bp, synthetic construct
  source 1..20: mol_type = other DNA
cttgaagaaccagctgtgca

SEQ ID NO: 23136 - DNA, 20 bp, synthetic construct
  source 1..20: mol_type = other DNA
gctgccgctccgcgtccttg

SEQ ID NO: 23137 - DNA, 20 bp, synthetic construct
  source 1..20: mol_type = other DNA
atcctgaatgaatgaatgga

SEQ ID NO: 23138 - DNA, 20 bp, synthetic construct
  source 1..20: mol_type = other DNA
gcctgcggatccctggctgt

SEQ ID NO: 23139 - DNA, 20 bp, synthetic construct
  source 1..20: mol_type = other DNA
ctggcgcccgggaacactca

SEQ ID NO: 23140 - DNA, 20 bp, synthetic construct
  source 1..20: mol_type = other DNA
gatcgttttcactgtcggtc

SEQ ID NO: 23141 - DNA, 20 bp, synthetic construct
  source 1..20: mol_type = other DNA
tggacatggcagcccaagta

SEQ ID NO: 23142 - DNA, 20 bp, synthetic construct
  source 1..20: mol_type = other DNA
cacggtaagaggcgagacag

SEQ ID NO: 23143 - DNA, 20 bp, synthetic construct
  source 1..20: mol_type = other DNA
gaagccccagaagccgtggt

SEQ ID NO: 23144 - DNA, 20 bp, synthetic construct
  source 1..20: mol_type = other DNA
tgatgatgtagatgggctcc

SEQ ID NO: 23145 - DNA, 20 bp, synthetic construct
  source 1..20: mol_type = other DNA
gagccttcgtaggtaaccag

SEQ ID NO: 23146 - DNA, 20 bp, synthetic construct
  source 1..20: mol_type = other DNA
ccgtaagtggggacccgtcg

SEQ ID NO: 23147 - DNA, 20 bp, synthetic construct
  source 1..20: mol_type = other DNA
accgtgcccttgccatccag

SEQ ID NO: 23148 - DNA, 20 bp, synthetic construct
  source 1..20: mol_type = other DNA
cccagatctccgtcgtgaga

SEQ ID NO: 23149 - DNA, 20 bp, synthetic construct
  source 1..20: mol_type = other DNA
ggcacggtaagaggcgagac

SEQ ID NO: 23150 - DNA, 20 bp, synthetic construct
  source 1..20: mol_type = other DNA
aacgatcctgaatgaatgaa

SEQ ID NO: 23151 - DNA, 20 bp, synthetic construct
  source 1..20: mol_type = other DNA
cgggacttcgaccagaacca

SEQ ID NO: 23152 - DNA, 20 bp, synthetic construct
  source 1..20: mol_type = other DNA
cttcagatgggctgtgcaca

SEQ ID NO: 23153 - DNA, 20 bp, synthetic construct
  source 1..20: mol_type = other DNA
cccgttgtagtaccctgggt

SEQ ID NO: 23154 - DNA, 20 bp, synthetic construct
  source 1..20: mol_type = other DNA
ccattatcccatagtcccac

SEQ ID NO: 23155 - DNA, 20 bp, synthetic construct
  source 1..20: mol_type = other DNA
gatgagcagctgtggagtgg

SEQ ID NO: 23156 - DNA, 20 bp, synthetic construct
  source 1..20: mol_type = other DNA
cctggttctggtcgaagtcc

SEQ ID NO: 23157 - DNA, 20 bp, synthetic construct
  source 1..20: mol_type = other DNA
tcgccgctcctgcgccacgg

SEQ ID NO: 23158 - DNA, 20 bp, synthetic construct
  source 1..20: mol_type = other DNA
cctacgggttgatgggtgaa

SEQ ID NO: 23159 - DNA, 20 bp, synthetic construct
  source 1..20: mol_type = other DNA
gctccgcgtccttgcggctc

SEQ ID NO: 23160 - DNA, 20 bp, synthetic construct
  source 1..20: mol_type = other DNA
ccacagcccatggtccctga

SEQ ID NO: 23161 - DNA, 20 bp, synthetic construct
  source 1..20: mol_type = other DNA
gccccagaagccgtggtggg

SEQ ID NO: 23162 - DNA, 20 bp, synthetic construct
  source 1..20: mol_type = other DNA
accctgggtcggggaaggga

SEQ ID NO: 23163 - DNA, 20 bp, synthetic construct
  source 1..20: mol_type = other DNA
aaggagccgtgagtgttccc

SEQ ID NO: 23164 - DNA, 20 bp, synthetic construct
  source 1..20: mol_type = other DNA
tctaacctgggtaagggatg

SEQ ID NO: 23165 - DNA, 20 bp, synthetic construct
  source 1..20: mol_type = other DNA
agccaccgttgtccagatta

SEQ ID NO: 23166 - DNA, 20 bp, synthetic construct
  source 1..20: mol_type = other DNA
gggctccaggctgttcgctt

SEQ ID NO: 23167 - DNA, 20 bp, synthetic construct
  source 1..20: mol_type = other DNA
tgtaaagacaaggggcatca

SEQ ID NO: 23168 - DNA, 20 bp, synthetic construct
  source 1..20: mol_type = other DNA
aggacgagtgggaggttccc

SEQ ID NO: 23169 - DNA, 20 bp, synthetic construct
  source 1..20: mol_type = other DNA
gtctgcaatcttgcagctca

SEQ ID NO: 23170 - DNA, 20 bp, synthetic construct
  source 1..20: mol_type = other DNA
cggctgggggctggacagtt

SEQ ID NO: 23171 - DNA, 20 bp, synthetic construct
  source 1..20: mol_type = other DNA
ccttacccaggttagagcca

SEQ ID NO: 23172 - DNA, 20 bp, synthetic construct
  source 1..20: mol_type = other DNA
gctcctctggacagttgtca

SEQ ID NO: 23173 - DNA, 20 bp, synthetic construct
  source 1..20: mol_type = other DNA
gtagtaccctgggtcgggga

SEQ ID NO: 23174 - DNA, 20 bp, synthetic construct
  source 1..20: mol_type = other DNA
caggttgtctgtaaagacaa

SEQ ID NO: 23175 - DNA, 20 bp, synthetic construct
  source 1..20: mol_type = other DNA
ggggcttctgggtctggcag

SEQ ID NO: 23176 - DNA, 20 bp, synthetic construct
  source 1..20: mol_type = other DNA
ccatgccttctgcaatctgc

SEQ ID NO: 23177 - DNA, 20 bp, synthetic construct
  source 1..20: mol_type = other DNA
cctcggccaggaaggcgtcc

SEQ ID NO: 23178 - DNA, 20 bp, synthetic construct
  source 1..20: mol_type = other DNA
ccgacccagggtactacaac

SEQ ID NO: 23179 - DNA, 20 bp, synthetic construct
  source 1..20: mol_type = other DNA
ctacaacgggcacacgaagg

SEQ ID NO: 23180 - DNA, 20 bp, synthetic construct
  source 1..20: mol_type = other DNA
cctggagcgaggctaccgca

SEQ ID NO: 23181 - DNA, 20 bp, synthetic construct
  source 1..20: mol_type = other DNA
gagcggcagctcctggcgcc

SEQ ID NO: 23182 - DNA, 20 bp, synthetic construct
  source 1..20: mol_type = other DNA
gtcccgtagttaatggcttc

SEQ ID NO: 23183 - DNA, 20 bp, synthetic construct
  source 1..20: mol_type = other DNA
gtgctggaaggagcgcccag

SEQ ID NO: 23184 - DNA, 20 bp, synthetic construct
  source 1..20: mol_type = other DNA
gagcaccgcgggtgagcggg

SEQ ID NO: 23185 - DNA, 20 bp, synthetic construct
  source 1..20: mol_type = other DNA
ccccactgcaaggtgacccc

SEQ ID NO: 23186 - DNA, 20 bp, synthetic construct
  source 1..20: mol_type = other DNA
agctatgagccctctcacga

SEQ ID NO: 23187 - DNA, 20 bp, synthetic construct
  source 1..20: mol_type = other DNA
caaggtgaccccaggcagca

SEQ ID NO: 23188 - DNA, 20 bp, synthetic construct
  source 1..20: mol_type = other DNA
gtcctcccaccacggcttct

SEQ ID NO: 23189 - DNA, 20 bp, synthetic construct
  source 1..20: mol_type = other DNA
gctgaagctggtggagcggc

SEQ ID NO: 23190 - DNA, 20 bp, synthetic construct
  source 1..20: mol_type = other DNA
ccgttgtagtaccctgggtc

SEQ ID NO: 23191 - DNA, 20 bp, synthetic construct
  source 1..20: mol_type = other DNA
caaaggtgggccggtcctct

SEQ ID NO: 23192 - DNA, 20 bp, synthetic construct
  source 1..20: mol_type = other DNA
tcaaaggtgggccggtcctc

SEQ ID NO: 23193 - DNA, 20 bp, synthetic construct
  source 1..20: mol_type = other DNA
agaccacacatctgacttga

SEQ ID NO: 23194 - DNA, 20 bp, synthetic construct
  source 1..20: mol_type = other DNA
tgctctcgctctcccggatg

SEQ ID NO: 23195 - DNA, 20 bp, synthetic construct
  source 1..20: mol_type = other DNA
tccctgaccacgggccagga

SEQ ID NO: 23196 - DNA, 20 bp, synthetic construct
  source 1..20: mol_type = other DNA
ccacttacggttcgggctcc

SEQ ID NO: 23197 - DNA, 20 bp, synthetic construct
  source 1..20: mol_type = other DNA
ccaagtaaggagactgggga

SEQ ID NO: 23198 - DNA, 20 bp, synthetic construct
  source 1..20: mol_type = other DNA
ctgaagctggtggagcggct

SEQ ID NO: 23199 - DNA, 20 bp, synthetic construct
  source 1..20: mol_type = other DNA
ggccgggaaaagtgattcga

SEQ ID NO: 23200 - DNA, 20 bp, synthetic construct
  source 1..20: mol_type = other DNA
cccaagtaaggagactgggg

SEQ ID NO: 23201 - DNA, 20 bp, synthetic construct
  source 1..20: mol_type = other DNA
gccctctcacgacggagatc

SEQ ID NO: 23202 - DNA, 20 bp, synthetic construct
  source 1..20: mol_type = other DNA
ggtgtcagacaccagaatgt

SEQ ID NO: 23203 - DNA, 20 bp, synthetic construct
  source 1..20: mol_type = other DNA
ccgccggcttccccactgca

SEQ ID NO: 23204 - DNA, 20 bp, synthetic construct
  source 1..20: mol_type = other DNA
cgagagcaccgcgggtgagc

SEQ ID NO: 23205 - DNA, 20 bp, synthetic construct
  source 1..20: mol_type = other DNA
ccatgcggtagcctcgctcc

SEQ ID NO: 23206 - DNA, 20 bp, synthetic construct
  source 1..20: mol_type = other DNA
catagtcccactggatggca

SEQ ID NO: 23207 - DNA, 20 bp, synthetic construct
  source 1..20: mol_type = other DNA
ggcgcaggagcggcgagtgg

SEQ ID NO: 23208 - DNA, 20 bp, synthetic construct
  source 1..20: mol_type = other DNA
caggagcggcgagtggtgga

SEQ ID NO: 23209 - DNA, 20 bp, synthetic construct
  source 1..20: mol_type = other DNA
cggaccagttcatgcaggcc

SEQ ID NO: 23210 - DNA, 20 bp, synthetic construct
  source 1..20: mol_type = other DNA
gcagcagggcctgaaagaca

SEQ ID NO: 23211 - DNA, 20 bp, synthetic construct
  source 1..20: mol_type = other DNA
tcctcgcagatgcttcagat

SEQ ID NO: 23212 - DNA, 20 bp, synthetic construct
  source 1..20: mol_type = other DNA
ttcaggatcgttttcactgt

SEQ ID NO: 23213 - DNA, 20 bp, synthetic construct
  source 1..20: mol_type = other DNA
ccacagctgctcatccgaaa

SEQ ID NO: 23214 - DNA, 20 bp, synthetic construct
  source 1..20: mol_type = other DNA
gggccaagtttcccattaag

SEQ ID NO: 23215 - DNA, 20 bp, synthetic construct
  source 1..20: mol_type = other DNA
agttgtcagggcgcaccatg

SEQ ID NO: 23216 - DNA, 20 bp, synthetic construct
  source 1..20: mol_type = other DNA
aggagctgtaccaactcatg

SEQ ID NO: 23217 - DNA, 20 bp, synthetic construct
  source 1..20: mol_type = other DNA
gcaaggtgaccccaggcagc

SEQ ID NO: 23218 - DNA, 20 bp, synthetic construct
  source 1..20: mol_type = other DNA
gatggcaagggcacggtaag

SEQ ID NO: 23219 - DNA, 20 bp, synthetic construct
  source 1..20: mol_type = other DNA
cggagatctgggctttgaga

SEQ ID NO: 23220 - DNA, 20 bp, synthetic construct
  source 1..20: mol_type = other DNA
ctacatcatcactgaataca

SEQ ID NO: 23221 - DNA, 20 bp, synthetic construct
  source 1..20: mol_type = other DNA
ggacttcttcacggccacag

SEQ ID NO: 23222 - DNA, 20 bp, synthetic construct
  source 1..20: mol_type = other DNA
ttttccatccagtcatcttc

SEQ ID NO: 23223 - DNA, 20 bp, synthetic construct
  source 1..20: mol_type = other DNA
ccgcggtgctctcgctctcc

SEQ ID NO: 23224 - DNA, 20 bp, synthetic construct
  source 1..20: mol_type = other DNA
gcgccagaagccattaacta

SEQ ID NO: 23225 - DNA, 20 bp, synthetic construct
  source 1..20: mol_type = other DNA
tcacggctccttcctcatcc

SEQ ID NO: 23226 - DNA, 20 bp, synthetic construct
  source 1..20: mol_type = other DNA
gcccatggtccctgagggaa

SEQ ID NO: 23227 - DNA, 20 bp, synthetic construct
  source 1..20: mol_type = other DNA
ctcgctctcccggatgagga

SEQ ID NO: 23228 - DNA, 20 bp, synthetic construct
  source 1..20: mol_type = other DNA
ccctctcacgacggagatct

SEQ ID NO: 23229 - DNA, 20 bp, synthetic construct
  source 1..20: mol_type = other DNA
cgtaagtggggacccgtcgt

SEQ ID NO: 23230 - DNA, 20 bp, synthetic construct
  source 1..20: mol_type = other DNA
gatgaagccttcctggcccg

SEQ ID NO: 23231 - DNA, 20 bp, synthetic construct
  source 1..20: mol_type = other DNA
tcccactcgtcctcccacca

SEQ ID NO: 23232 - DNA, 20 bp, synthetic construct
  source 1..20: mol_type = other DNA
gtattcagtgatgatgtaga

SEQ ID NO: 23233 - DNA, 20 bp, synthetic construct
  source 1..20: mol_type = other DNA
cccggaggtgattcagaacc

SEQ ID NO: 23234 - DNA, 20 bp, synthetic construct
  source 1..20: mol_type = other DNA
actcatgaggctgtgctgga

SEQ ID NO: 23235 - DNA, 20 bp, synthetic construct
  source 1..20: mol_type = other DNA
gctggttcggctctacgctg

SEQ ID NO: 23236 - DNA, 20 bp, synthetic construct
  source 1..20: mol_type = other DNA
cggcggattggagccttcgt

SEQ ID NO: 23237 - DNA, 20 bp, synthetic construct
  source 1..20: mol_type = other DNA
acagttcggggaggtgtgga

SEQ ID NO: 23238 - DNA, 20 bp, synthetic construct
  source 1..20: mol_type = other DNA
caacgagtacacagccaggg

SEQ ID NO: 23239 - DNA, 20 bp, synthetic construct
  source 1..20: mol_type = other DNA
tcggatgagcagctgtggag

SEQ ID NO: 23240 - DNA, 20 bp, synthetic construct
  source 1..20: mol_type = other DNA
gggggaacagctccgcatcc

SEQ ID NO: 23241 - DNA, 20 bp, synthetic construct
  source 1..20: mol_type = other DNA
gccgtggtgggaggacgagt

SEQ ID NO: 23242 - DNA, 20 bp, synthetic construct
  source 1..20: mol_type = other DNA
gcggtgaagagcctgaagca

SEQ ID NO: 23243 - DNA, 20 bp, synthetic construct
  source 1..20: mol_type = other DNA
cgtagagccgaaccagccgc

SEQ ID NO: 23244 - DNA, 20 bp, synthetic construct
  source 1..20: mol_type = other DNA
gtgtgcccgttgtagtaccc

SEQ ID NO: 23245 - DNA, 20 bp, synthetic construct
  source 1..20: mol_type = other DNA
catgtccaggagtttgttga

SEQ ID NO: 23246 - DNA, 20 bp, synthetic construct
  source 1..20: mol_type = other DNA
gggacatgctgccctgcttc

SEQ ID NO: 23247 - DNA, 20 bp, synthetic construct
  source 1..20: mol_type = other DNA
caagtaaggagactggggag

SEQ ID NO: 23248 - DNA, 20 bp, synthetic construct
  source 1..20: mol_type = other DNA
ctacgaaggctccaatccgc

SEQ ID NO: 23249 - DNA, 20 bp, synthetic construct
  source 1..20: mol_type = other DNA
cctggggtcaccttgcagtg

SEQ ID NO: 23250 - DNA, 20 bp, synthetic construct
  source 1..20: mol_type = other DNA
cctaaggaggaggcagagtg

SEQ ID NO: 23251 - DNA, 20 bp, synthetic construct
  source 1..20: mol_type = other DNA
cgccagaagccattaactac

SEQ ID NO: 23252 - DNA, 20 bp, synthetic construct
  source 1..20: mol_type = other DNA
ctccgggttggtcatcccta

SEQ ID NO: 23253 - DNA, 20 bp, synthetic construct
  source 1..20: mol_type = other DNA
tggcctagcacgcctcattg

SEQ ID NO: 23254 - DNA, 20 bp, synthetic construct
  source 1..20: mol_type = other DNA
ccttgcagtggggaagccgg

SEQ ID NO: 23255 - DNA, 20 bp, synthetic construct
  source 1..20: mol_type = other DNA
gatgatgtagatgggctcct

SEQ ID NO: 23256 - DNA, 20 bp, synthetic construct
  source 1..20: mol_type = other DNA
atccgtaatctggacaacgg

SEQ ID NO: 23257 - DNA, 20 bp, synthetic construct
  source 1..20: mol_type = other DNA
ctcggccaggaaggcgtccg

SEQ ID NO: 23258 - DNA, 20 bp, synthetic construct
  source 1..20: mol_type = other DNA
tgaagcagctgcaacaccag

SEQ ID NO: 23259 - DNA, 20 bp, synthetic construct
  source 1..20: mol_type = other DNA
tcaccacctctccctggttc

SEQ ID NO: 23260 - DNA, 20 bp, synthetic construct
  source 1..20: mol_type = other DNA
ggcagcccaagtaaggagac

SEQ ID NO: 23261 - DNA, 20 bp, synthetic construct
  source 1..20: mol_type = other DNA
gtactacaacgggcacacga

SEQ ID NO: 23262 - DNA, 20 bp, synthetic construct
  source 1..20: mol_type = other DNA
gccacagcccatggtccctg

SEQ ID NO: 23263 - DNA, 20 bp, synthetic construct
  source 1..20: mol_type = other DNA
tgcaacaccagcggctggtt

SEQ ID NO: 23264 - DNA, 20 bp, synthetic construct
  source 1..20: mol_type = other DNA
actgaatacatggagaatgg

SEQ ID NO: 23265 - DNA, 20 bp, synthetic construct
  source 1..20: mol_type = other DNA
tgtccacttaatgggaaact

SEQ ID NO: 23266 - DNA, 20 bp, synthetic construct
  source 1..20: mol_type = other DNA
aggttgtctgtaaagacaag

SEQ ID NO: 23267 - DNA, 20 bp, synthetic construct
  source 1..20: mol_type = other DNA
gccgggaaaagtgattcgag

SEQ ID NO: 23268 - DNA, 20 bp, synthetic construct
  source 1..20: mol_type = other DNA
gcttctgggtctggcagggg

SEQ ID NO: 23269 - DNA, 20 bp, synthetic construct
  source 1..20: mol_type = other DNA
gccttcctggcccgtggtca

SEQ ID NO: 23270 - DNA, 20 bp, synthetic construct
  source 1..20: mol_type = other DNA
ctgtggctgcagctcacacc

SEQ ID NO: 23271 - DNA, 20 bp, synthetic construct
  source 1..20: mol_type = other DNA
tagtaccctgggtcggggaa

SEQ ID NO: 23272 - DNA, 20 bp, synthetic construct
  source 1..20: mol_type = other DNA
cattacaccagtgagcccga

SEQ ID NO: 23273 - DNA, 20 bp, synthetic construct
  source 1..20: mol_type = other DNA
gttctgaatcacctccgggt

SEQ ID NO: 23274 - DNA, 20 bp, synthetic construct
  source 1..20: mol_type = other DNA
agtctgcaatcttgcagctc

SEQ ID NO: 23275 - DNA, 20 bp, synthetic construct
  source 1..20: mol_type = other DNA
acacccggaagatgactgga

SEQ ID NO: 23276 - DNA, 20 bp, synthetic construct
  source 1..20: mol_type = other DNA
aaacttggcccctaaggagg

SEQ ID NO: 23277 - DNA, 20 bp, synthetic construct
  source 1..20: mol_type = other DNA
gggaaacttggcccctaagg

SEQ ID NO: 23278 - DNA, 20 bp, synthetic construct
  source 1..20: mol_type = other DNA
gaaggcgcagtccctgacca

SEQ ID NO: 23279 - DNA, 20 bp, synthetic construct
  source 1..20: mol_type = other DNA
ctgacggaaattgtcaccca

SEQ ID NO: 23280 - DNA, 20 bp, synthetic construct
  source 1..20: mol_type = other DNA
tgtgctggaggacttcttca

SEQ ID NO: 23281 - DNA, 20 bp, synthetic construct
  source 1..20: mol_type = other DNA
cgttgtagtaccctgggtcg

SEQ ID NO: 23282 - DNA, 20 bp, synthetic construct
  source 1..20: mol_type = other DNA
gaacctgagccgcaaggacg

SEQ ID NO: 23283 - DNA, 20 bp, synthetic construct
  source 1..20: mol_type = other DNA
ctggacagttcggggaggtg

SEQ ID NO: 23284 - DNA, 20 bp, synthetic construct
  source 1..20: mol_type = other DNA
cgtcctcccaccacggcttc

SEQ ID NO: 23285 - DNA, 20 bp, synthetic construct
  source 1..20: mol_type = other DNA
atcactgaatacatggagaa

SEQ ID NO: 23286 - DNA, 20 bp, synthetic construct
  source 1..20: mol_type = other DNA
aacgagtacacagccaggga

SEQ ID NO: 23287 - DNA, 20 bp, synthetic construct
  source 1..20: mol_type = other DNA
cttggctctaacctgggtaa

SEQ ID NO: 23288 - DNA, 20 bp, synthetic construct
  source 1..20: mol_type = other DNA
tgggtaagggatgcggccgt

SEQ ID NO: 23289 - DNA, 20 bp, synthetic construct
  source 1..20: mol_type = other DNA
cccggacgccttcctggccg

SEQ ID NO: 23290 - DNA, 20 bp, synthetic construct
  source 1..20: mol_type = other DNA
gaggttggcctcggccagga

SEQ ID NO: 23291 - DNA, 20 bp, synthetic construct
  source 1..20: mol_type = other DNA
agaagccccagaagccgtgg

SEQ ID NO: 23292 - DNA, 20 bp, synthetic construct
  source 1..20: mol_type = other DNA
tgaagctggtggagcggctg

SEQ ID NO: 23293 - DNA, 20 bp, synthetic construct
  source 1..20: mol_type = other DNA
cttacccaggttagagccaa

SEQ ID NO: 23294 - DNA, 20 bp, synthetic construct
  source 1..20: mol_type = other DNA
agctgtggagtgggggatga

SEQ ID NO: 23295 - DNA, 20 bp, synthetic construct
  source 1..20: mol_type = other DNA
gcggaccagttcatgcaggc

SEQ ID NO: 23296 - DNA, 20 bp, synthetic construct
  source 1..20: mol_type = other DNA
catcaacaaactcctggaca

SEQ ID NO: 23297 - DNA, 20 bp, synthetic construct
  source 1..20: mol_type = other DNA
acccgtagggatgaccaacc

SEQ ID NO: 23298 - DNA, 20 bp, synthetic construct
  source 1..20: mol_type = other DNA
ggatgagcagctgtggagtg

SEQ ID NO: 23299 - DNA, 20 bp, synthetic construct
  source 1..20: mol_type = other DNA
cccagaagccccagaagccg

SEQ ID NO: 23300 - DNA, 20 bp, synthetic construct
  source 1..20: mol_type = other DNA
tccgggttggtcatccctac

SEQ ID NO: 23301 - DNA, 20 bp, synthetic construct
  source 1..20: mol_type = other DNA
tttccatccagtcatcttcc

SEQ ID NO: 23302 - DNA, 20 bp, synthetic construct
  source 1..20: mol_type = other DNA
gctctacgctgtggtcaccc

SEQ ID NO: 23303 - DNA, 20 bp, synthetic construct
  source 1..20: mol_type = other DNA
acattacaagatccgtaatc

SEQ ID NO: 23304 - DNA, 20 bp, synthetic construct
  source 1..20: mol_type = other DNA
tcaccatcaagtcagatgtg

SEQ ID NO: 23305 - DNA, 20 bp, synthetic construct
  source 1..20: mol_type = other DNA
aatgtttcaccacctctccc

SEQ ID NO: 23306 - DNA, 20 bp, synthetic construct
  source 1..20: mol_type = other DNA
attacaccagtgagcccgac

SEQ ID NO: 23307 - DNA, 20 bp, synthetic construct
  source 1..20: mol_type = other DNA
actgcgcaggtagtcaaagg

SEQ ID NO: 23308 - DNA, 20 bp, synthetic construct
  source 1..20: mol_type = other DNA
gtaccagcctcagccttgag

SEQ ID NO: 23309 - DNA, 20 bp, synthetic construct
  source 1..20: mol_type = other DNA
gaagcagggcagcatgtccc

SEQ ID NO: 23310 - DNA, 20 bp, synthetic construct
  source 1..20: mol_type = other DNA
gggggctggacagttcgggg

SEQ ID NO: 23311 - DNA, 20 bp, synthetic construct
  source 1..20: mol_type = other DNA
tattcagtgatgatgtagat

SEQ ID NO: 23312 - DNA, 20 bp, synthetic construct
  source 1..20: mol_type = other DNA
tcttgaagaaccagctgtgc

SEQ ID NO: 23313 - DNA, 20 bp, synthetic construct
  source 1..20: mol_type = other DNA
tccgaaatggctctgaggtg

SEQ ID NO: 23314 - DNA, 20 bp, synthetic construct
  source 1..20: mol_type = other DNA
gttgaccatcaacaaactcc

SEQ ID NO: 23315 - DNA, 20 bp, synthetic construct
  source 1..20: mol_type = other DNA
gctcatccgaaatggctctg

SEQ ID NO: 23316 - DNA, 20 bp, synthetic construct
  source 1..20: mol_type = other DNA
ccaggttgtctgtaaagaca

SEQ ID NO: 23317 - DNA, 20 bp, synthetic construct
  source 1..20: mol_type = other DNA
ggtgttgcagctgcttcatg

SEQ ID NO: 23318 - DNA, 20 bp, synthetic construct
  source 1..20: mol_type = other DNA
ggtgaatgtcccgtagttaa

SEQ ID NO: 23319 - DNA, 20 bp, synthetic construct
  source 1..20: mol_type = other DNA
gctcacacccggaagatgac

SEQ ID NO: 23320 - DNA, 20 bp, synthetic construct
  source 1..20: mol_type = other DNA
gcctggggtcaccttgcagt

SEQ ID NO: 23321 - DNA, 20 bp, synthetic construct
  source 1..20: mol_type = other DNA
cagttcggggaggtgtggat

SEQ ID NO: 23322 - DNA, 20 bp, synthetic construct
  source 1..20: mol_type = other DNA
aagatccgtaatctggacaa

SEQ ID NO: 23323 - DNA, 20 bp, synthetic construct
  source 1..20: mol_type = other DNA
gtcttttgggatcctgctga

SEQ ID NO: 23324 - DNA, 20 bp, synthetic construct
  source 1..20: mol_type = other DNA
gctgggggctggacagttcg

SEQ ID NO: 23325 - DNA, 20 bp, synthetic construct
  source 1..20: mol_type = other DNA
ctgcgcaggtagtcaaaggt

SEQ ID NO: 23326 - DNA, 20 bp, synthetic construct
  source 1..20: mol_type = other DNA
cccactggatggcaagggca

SEQ ID NO: 23327 - DNA, 20 bp, synthetic construct
  source 1..20: mol_type = other DNA
agtcctccagcacactgcgc

SEQ ID NO: 23328 - DNA, 20 bp, synthetic construct
  source 1..20: mol_type = other DNA
ggtcaacttgatgcctgaag

SEQ ID NO: 23329 - DNA, 20 bp, synthetic construct
  source 1..20: mol_type = other DNA
cccaggttagagccaagggc

SEQ ID NO: 23330 - DNA, 20 bp, synthetic construct
  source 1..20: mol_type = other DNA
tggggcttctgggtctggca

SEQ ID NO: 23331 - DNA, 20 bp, synthetic construct
  source 1..20: mol_type = other DNA
agacaaggcctgcggatccc

SEQ ID NO: 23332 - DNA, 20 bp, synthetic construct
  source 1..20: mol_type = other DNA
ccagaatgttggcagcccga

SEQ ID NO: 23333 - DNA, 20 bp, synthetic construct
  source 1..20: mol_type = other DNA
ggactcactgctccaggatg

SEQ ID NO: 23334 - DNA, 20 bp, synthetic construct
  source 1..20: mol_type = other DNA
cgggctcactggtgtaatgg

SEQ ID NO: 23335 - DNA, 20 bp, synthetic construct
  source 1..20: mol_type = other DNA
atagtcccactggatggcaa

SEQ ID NO: 23336 - DNA, 20 bp, synthetic construct
  source 1..20: mol_type = other DNA
ctgtaaagacaaggggcatc

SEQ ID NO: 23337 - DNA, 20 bp, synthetic construct
  source 1..20: mol_type = other DNA
ggaaggagcgcccagaggac

SEQ ID NO: 23338 - DNA, 20 bp, synthetic construct
  source 1..20: mol_type = other DNA
cgctcctgcgccacggaggt

SEQ ID NO: 23339 - DNA, 20 bp, synthetic construct
  source 1..20: mol_type = other DNA
gaaggagccgtgagtgttcc

SEQ ID NO: 23340 - DNA, 20 bp, synthetic construct
  source 1..20: mol_type = other DNA
ggacgagtgggaggttccca

SEQ ID NO: 23341 - DNA, 20 bp, synthetic construct
  source 1..20: mol_type = other DNA
gggtgacaatttccgtcagc

SEQ ID NO: 23342 - DNA, 20 bp, synthetic construct
  source 1..20: mol_type = other DNA
acttcagagcagtctagcgt

SEQ ID NO: 23343 - DNA, 20 bp, synthetic construct
  source 1..20: mol_type = other DNA
attacagatactgatggcaa

SEQ ID NO: 23344 - DNA, 20 bp, synthetic construct
  source 1..20: mol_type = other DNA
gcctacctgaataggagtgt

SEQ ID NO: 23345 - DNA, 20 bp, synthetic construct
  source 1..20: mol_type = other DNA
cagccacagatgttgtccga

SEQ ID NO: 23346 - DNA, 20 bp, synthetic construct
  source 1..20: mol_type = other DNA
tgtggtcaacataggggctg

SEQ ID NO: 23347 - DNA, 20 bp, synthetic construct
  source 1..20: mol_type = other DNA
cccaacactcctattcaggt

SEQ ID NO: 23348 - DNA, 20 bp, synthetic construct
  source 1..20: mol_type = other DNA
agaagtcccaggaccagata

SEQ ID NO: 23349 - DNA, 20 bp, synthetic construct
  source 1..20: mol_type = other DNA
cagcccctatgttgaccaca

SEQ ID NO: 23350 - DNA, 20 bp, synthetic construct
  source 1..20: mol_type = other DNA
gagaaccaggacattgactg

SEQ ID NO: 23351 - DNA, 20 bp, synthetic construct
  source 1..20: mol_type = other DNA
ggggctgaggacctgaagga

SEQ ID NO: 23352 - DNA, 20 bp, synthetic construct
  source 1..20: mol_type = other DNA
gccaagttcagattttcctg

SEQ ID NO: 23353 - DNA, 20 bp, synthetic construct
  source 1..20: mol_type = other DNA
cagagaaccaggacattgac

SEQ ID NO: 23354 - DNA, 20 bp, synthetic construct
  source 1..20: mol_type = other DNA
tcaaggccagtgtgagagtg

SEQ ID NO: 23355 - DNA, 20 bp, synthetic construct
  source 1..20: mol_type = other DNA
taaaagccaagttcaacttg

SEQ ID NO: 23356 - DNA, 20 bp, synthetic construct
  source 1..20: mol_type = other DNA
gggtcctatgcagagacaca

SEQ ID NO: 23357 - DNA, 20 bp, synthetic construct
  source 1..20: mol_type = other DNA
ttttaccttgaaactagaga

SEQ ID NO: 23358 - DNA, 20 bp, synthetic construct
  source 1..20: mol_type = other DNA
ggagaaggatgacatccaga

SEQ ID NO: 23359 - DNA, 20 bp, synthetic construct
  source 1..20: mol_type = other DNA
caattgtgtctggcactgac

SEQ ID NO: 23360 - DNA, 20 bp, synthetic construct
  source 1..20: mol_type = other DNA
gttgaccacatggcacccga

SEQ ID NO: 23361 - DNA, 20 bp, synthetic construct
  source 1..20: mol_type = other DNA
atttctcgtactctataccc

SEQ ID NO: 23362 - DNA, 20 bp, synthetic construct
  source 1..20: mol_type = other DNA
aggggctgaggacctgaagg

SEQ ID NO: 23363 - DNA, 20 bp, synthetic construct
  source 1..20: mol_type = other DNA
cctatgcagagacacaggga

SEQ ID NO: 23364 - DNA, 20 bp, synthetic construct
  source 1..20: mol_type = other DNA
cctacctgaataggagtgtt

SEQ ID NO: 23365 - DNA, 20 bp, synthetic construct
  source 1..20: mol_type = other DNA
gaatcaagcgaagttctccc

SEQ ID NO: 23366 - DNA, 20 bp, synthetic construct
  source 1..20: mol_type = other DNA
ccctcaggaaaatctgaact

SEQ ID NO: 23367 - DNA, 20 bp, synthetic construct
  source 1..20: mol_type = other DNA
ctcacctagatgaatgaaga

SEQ ID NO: 23368 - DNA, 20 bp, synthetic construct
  source 1..20: mol_type = other DNA
catagagctggaagatgacc

SEQ ID NO: 23369 - DNA, 20 bp, synthetic construct
  source 1..20: mol_type = other DNA
atgatgacattattgtcaac

SEQ ID NO: 23370 - DNA, 20 bp, synthetic construct
  source 1..20: mol_type = other DNA
tgacttgccacagaagtccc

SEQ ID NO: 23371 - DNA, 20 bp, synthetic construct
  source 1..20: mol_type = other DNA
ttgtccaccgatgccaacca

SEQ ID NO: 23372 - DNA, 20 bp, synthetic construct
  source 1..20: mol_type = other DNA
ggggaagccttatctggtcc

SEQ ID NO: 23373 - DNA, 20 bp, synthetic construct
  source 1..20: mol_type = other DNA
cttacggcacccggagcttg

SEQ ID NO: 23374 - DNA, 20 bp, synthetic construct
  source 1..20: mol_type = other DNA
gccgccaccctccaatgacg

SEQ ID NO: 23375 - DNA, 20 bp, synthetic construct
  source 1..20: mol_type = other DNA
ccctttcgctcagaggtcct

SEQ ID NO: 23376 - DNA, 20 bp, synthetic construct
  source 1..20: mol_type = other DNA
gacaattactttggcacagg

SEQ ID NO: 23377 - DNA, 20 bp, synthetic construct
  source 1..20: mol_type = other DNA
ccttcccaggatgaagatga

SEQ ID NO: 23378 - DNA, 20 bp, synthetic construct
  source 1..20: mol_type = other DNA
acttacggcacccggagctt

SEQ ID NO: 23379 - DNA, 20 bp, synthetic construct
  source 1..20: mol_type = other DNA
tttgcagaccccaagtcccg

SEQ ID NO: 23380 - DNA, 20 bp, synthetic construct
  source 1..20: mol_type = other DNA
caactccatgtacatcggta

SEQ ID NO: 23381 - DNA, 20 bp, synthetic construct
  source 1..20: mol_type = other DNA
ttgagagaagtatggtggca

SEQ ID NO: 23382 - DNA, 20 bp, synthetic construct
  source 1..20: mol_type = other DNA
atcatacccacctagtgtga

SEQ ID NO: 23383 - DNA, 20 bp, synthetic construct
  source 1..20: mol_type = other DNA
cagagcttcctcgtcattgg

SEQ ID NO: 23384 - DNA, 20 bp, synthetic construct
  source 1..20: mol_type = other DNA
tcatacccacctagtgtgaa

SEQ ID NO: 23385 - DNA, 20 bp, synthetic construct
  source 1..20: mol_type = other DNA
ggtggcttcttccctggcag

SEQ ID NO: 23386 - DNA, 20 bp, synthetic construct
  source 1..20: mol_type = other DNA
agaagcgagccccatcgatg

SEQ ID NO: 23387 - DNA, 20 bp, synthetic construct
  source 1..20: mol_type = other DNA
tcaggaaaccgcgggacttg

SEQ ID NO: 23388 - DNA, 20 bp, synthetic construct
  source 1..20: mol_type = other DNA
agttgagctgcaaagagaag

SEQ ID NO: 23389 - DNA, 20 bp, synthetic construct
  source 1..20: mol_type = other DNA
aaatcaacaagaacgaagag

SEQ ID NO: 23390 - DNA, 20 bp, synthetic construct
  source 1..20: mol_type = other DNA
tccccatcctggtcatcatt

SEQ ID NO: 23391 - DNA, 20 bp, synthetic construct
  source 1..20: mol_type = other DNA
tcccgcccccaccagccggc

SEQ ID NO: 23392 - DNA, 20 bp, synthetic construct
  source 1..20: mol_type = other DNA
cttcgtggttggtctggggt

SEQ ID NO: 23393 - DNA, 20 bp, synthetic construct
  source 1..20: mol_type = other DNA
taatccgcgtcatcttccac

SEQ ID NO: 23394 - DNA, 20 bp, synthetic construct
  source 1..20: mol_type = other DNA
gagctgcaaagagaagggga

SEQ ID NO: 23395 - DNA, 20 bp, synthetic construct
  source 1..20: mol_type = other DNA
catcgatggggctcgcttct

SEQ ID NO: 23396 - DNA, 20 bp, synthetic construct
  source 1..20: mol_type = other DNA
atcatcttcatcctgggaag

SEQ ID NO: 23397 - DNA, 20 bp, synthetic construct
  source 1..20: mol_type = other DNA
ctcattgatgggaaaaaccg

SEQ ID NO: 23398 - DNA, 20 bp, synthetic construct
  source 1..20: mol_type = other DNA
gtgaagaagtaccacatcga

SEQ ID NO: 23399 - DNA, 20 bp, synthetic construct
  source 1..20: mol_type = other DNA
ctctcttacctcttcctccg

SEQ ID NO: 23400 - DNA, 20 bp, synthetic construct
  source 1..20: mol_type = other DNA
acggcaaagcgtgagtacaa

SEQ ID NO: 23401 - DNA, 20 bp, synthetic construct
  source 1..20: mol_type = other DNA
tcttacctcttcctccgcgg

SEQ ID NO: 23402 - DNA, 20 bp, synthetic construct
  source 1..20: mol_type = other DNA
tgcctcttcctcctcattgg

SEQ ID NO: 23403 - DNA, 20 bp, synthetic construct
  source 1..20: mol_type = other DNA
agtgccatggctgctctccc

SEQ ID NO: 23404 - DNA, 20 bp, synthetic construct
  source 1..20: mol_type = other DNA
tgaaagtcccaatgatgacc

SEQ ID NO: 23405 - DNA, 20 bp, synthetic construct
  source 1..20: mol_type = other DNA
ggagctaatgaacgatctag

SEQ ID NO: 23406 - DNA, 20 bp, synthetic construct
  source 1..20: mol_type = other DNA
aaccaatccatatgtcctca

SEQ ID NO: 23407 - DNA, 20 bp, synthetic construct
  source 1..20: mol_type = other DNA
cagcatgcgttaatgtgcac

SEQ ID NO: 23408 - DNA, 20 bp, synthetic construct
  source 1..20: mol_type = other DNA
cttctgtctattgaaggagc

SEQ ID NO: 23409 - DNA, 20 bp, synthetic construct
  source 1..20: mol_type = other DNA
ttcgtgcttctgtctattga

SEQ ID NO: 23410 - DNA, 20 bp, synthetic construct
  source 1..20: mol_type = other DNA
tccatgcctgaaatgaatta

SEQ ID NO: 23411 - DNA, 20 bp, synthetic construct
  source 1..20: mol_type = other DNA
gtcctcttcgtggctttctg

SEQ ID NO: 23412 - DNA, 20 bp, synthetic construct
  source 1..20: mol_type = other DNA
ttgcagccctcgattccagc

SEQ ID NO: 23413 - DNA, 20 bp, synthetic construct
  source 1..20: mol_type = other DNA
agccacgaagaggacaatgg

SEQ ID NO: 23414 - DNA, 20 bp, synthetic construct
  source 1..20: mol_type = other DNA
ttcctgcccacacagtgata

SEQ ID NO: 23415 - DNA, 20 bp, synthetic construct
  source 1..20: mol_type = other DNA
aggtggcttcttccctggca

SEQ ID NO: 23416 - DNA, 20 bp, synthetic construct
  source 1..20: mol_type = other DNA
cttgagagaagtatggtggc

SEQ ID NO: 23417 - DNA, 20 bp, synthetic construct
  source 1..20: mol_type = other DNA
caatgatgaccaggatgggg

SEQ ID NO: 23418 - DNA, 20 bp, synthetic construct
  source 1..20: mol_type = other DNA
ctggtcgtcctttgtgagta

SEQ ID NO: 23419 - DNA, 20 bp, synthetic construct
  source 1..20: mol_type = other DNA
gcgggacttggggtctgcaa

SEQ ID NO: 23420 - DNA, 20 bp, synthetic construct
  source 1..20: mol_type = other DNA
cttacattctctcttctgtc

SEQ ID NO: 23421 - DNA, 20 bp, synthetic construct
  source 1..20: mol_type = other DNA
agaccacctatcagagccga

SEQ ID NO: 23422 - DNA, 20 bp, synthetic construct
  source 1..20: mol_type = other DNA
gacctgtggagttcaggaaa

SEQ ID NO: 23423 - DNA, 20 bp, synthetic construct
  source 1..20: mol_type = other DNA
cgggcccttaccgatgtaca

SEQ ID NO: 23424 - DNA, 20 bp, synthetic construct
  source 1..20: mol_type = other DNA
tcttcacacgcaagtgagtg

SEQ ID NO: 23425 - DNA, 20 bp, synthetic construct
  source 1..20: mol_type = other DNA
ccatcatcttcatcctggga

SEQ ID NO: 23426 - DNA, 20 bp, synthetic construct
  source 1..20: mol_type = other DNA
aaatagtcagcaaggctgtc

SEQ ID NO: 23427 - DNA, 20 bp, synthetic construct
  source 1..20: mol_type = other DNA
tacttacggcacccggagct

SEQ ID NO: 23428 - DNA, 20 bp, synthetic construct
  source 1..20: mol_type = other DNA
tcgctcagaggtcctgggct

SEQ ID NO: 23429 - DNA, 20 bp, synthetic construct
  source 1..20: mol_type = other DNA
cagcttaccttgtcagaaaa

SEQ ID NO: 23430 - DNA, 20 bp, synthetic construct
  source 1..20: mol_type = other DNA
gaagaagtaccacatcgatg

SEQ ID NO: 23431 - DNA, 20 bp, synthetic construct
  source 1..20: mol_type = other DNA
acgaagaggacaatgggggc

SEQ ID NO: 23432 - DNA, 20 bp, synthetic construct
  source 1..20: mol_type = other DNA
agtgattccggccggctggt

SEQ ID NO: 23433 - DNA, 20 bp, synthetic construct
  source 1..20: mol_type = other DNA
gaaggagcagggactggaag

SEQ ID NO: 23434 - DNA, 20 bp, synthetic construct
  source 1..20: mol_type = other DNA
ttctgtctattgaaggagca

SEQ ID NO: 23435 - DNA, 20 bp, synthetic construct
  source 1..20: mol_type = other DNA
agactatgagtcccccaatg

SEQ ID NO: 23436 - DNA, 20 bp, synthetic construct
  source 1..20: mol_type = other DNA
gtgcctcttcctcctcattg

SEQ ID NO: 23437 - DNA, 20 bp, synthetic construct
  source 1..20: mol_type = other DNA
tgcacattaacgcatgctgc

SEQ ID NO: 23438 - DNA, 20 bp, synthetic construct
  source 1..20: mol_type = other DNA
cagtgccatggctgctctcc

SEQ ID NO: 23439 - DNA, 20 bp, synthetic construct
  source 1..20: mol_type = other DNA
aactccatgtacatcggtaa

SEQ ID NO: 23440 - DNA, 20 bp, synthetic construct
  source 1..20: mol_type = other DNA
gcctcctttaccaccgacca

SEQ ID NO: 23441 - DNA, 20 bp, synthetic construct
  source 1..20: mol_type = other DNA
catcatcttcatcctgggaa

SEQ ID NO: 23442 - DNA, 20 bp, synthetic construct
  source 1..20: mol_type = other DNA
atgccacttctgctcattga

SEQ ID NO: 23443 - DNA, 20 bp, synthetic construct
  source 1..20: mol_type = other DNA
gagcagcttctgcctctggt

SEQ ID NO: 23444 - DNA, 20 bp, synthetic construct
  source 1..20: mol_type = other DNA
agagaagtatggtggcaggg

SEQ ID NO: 23445 - DNA, 20 bp, synthetic construct
  source 1..20: mol_type = other DNA
gggtgcctcttcctcctcat

SEQ ID NO: 23446 - DNA, 20 bp, synthetic construct
  source 1..20: mol_type = other DNA
tgtacatggagttggagttg

SEQ ID NO: 23447 - DNA, 20 bp, synthetic construct
  source 1..20: mol_type = other DNA
ggagagcagccatggcactg

SEQ ID NO: 23448 - DNA, 20 bp, synthetic construct
  source 1..20: mol_type = other DNA
acataccatcatcttcatcc

SEQ ID NO: 23449 - DNA, 20 bp, synthetic construct
  source 1..20: mol_type = other DNA
agccctcgattccagcggga

SEQ ID NO: 23450 - DNA, 20 bp, synthetic construct
  source 1..20: mol_type = other DNA
gatgtacatggagttggagt

SEQ ID NO: 23451 - DNA, 20 bp, synthetic construct
  source 1..20: mol_type = other DNA
ggcatgtgagaggatgggag

SEQ ID NO: 23452 - DNA, 20 bp, synthetic construct
  source 1..20: mol_type = other DNA
aatagtcagcaaggctgtcg

SEQ ID NO: 23453 - DNA, 20 bp, synthetic construct
  source 1..20: mol_type = other DNA
accgagtgattccggccggc

SEQ ID NO: 23454 - DNA, 20 bp, synthetic construct
  source 1..20: mol_type = other DNA
tgaaggagcagggactggaa

SEQ ID NO: 23455 - DNA, 20 bp, synthetic construct
  source 1..20: mol_type = other DNA
gaatgtgccctttcgctcag

SEQ ID NO: 23456 - DNA, 20 bp, synthetic construct
  source 1..20: mol_type = other DNA
gtcctttgtgagtatggtgt

SEQ ID NO: 23457 - DNA, 20 bp, synthetic construct
  source 1..20: mol_type = other DNA
tcccaatgatgaccaggatg

SEQ ID NO: 23458 - DNA, 20 bp, synthetic construct
  source 1..20: mol_type = other DNA
ctcttacctcttcctccgcg

SEQ ID NO: 23459 - DNA, 20 bp, synthetic construct
  source 1..20: mol_type = other DNA
gtcctgaaagagtcaagata

SEQ ID NO: 23460 - DNA, 20 bp, synthetic construct
  source 1..20: mol_type = other DNA
ctatgagtcccccaatgagg

SEQ ID NO: 23461 - DNA, 20 bp, synthetic construct
  source 1..20: mol_type = other DNA
tacaaaccttgagagaagta

SEQ ID NO: 23462 - DNA, 20 bp, synthetic construct
  source 1..20: mol_type = other DNA
gactccgagggaaagaggta

SEQ ID NO: 23463 - DNA, 20 bp, synthetic construct
  source 1..20: mol_type = other DNA
tcaacaagaacgaagagagg

SEQ ID NO: 23464 - DNA, 20 bp, synthetic construct
  source 1..20: mol_type = other DNA
atcgagggctgcaagacagg

SEQ ID NO: 23465 - DNA, 20 bp, synthetic construct
  source 1..20: mol_type = other DNA
tctattgaaggagcagggac

SEQ ID NO: 23466 - DNA, 20 bp, synthetic construct
  source 1..20: mol_type = other DNA
cgtcctttgtgagtatggtg

SEQ ID NO: 23467 - DNA, 20 bp, synthetic construct
  source 1..20: mol_type = other DNA
aactggactccgagggaaag

SEQ ID NO: 23468 - DNA, 20 bp, synthetic construct
  source 1..20: mol_type = other DNA
agtcctgaaagagtcaagat

SEQ ID NO: 23469 - DNA, 20 bp, synthetic construct
  source 1..20: mol_type = other DNA
tctggatgtcattttctgtc

SEQ ID NO: 23470 - DNA, 20 bp, synthetic construct
  source 1..20: mol_type = other DNA
ctgccaccatacttctctca

SEQ ID NO: 23471 - DNA, 20 bp, synthetic construct
  source 1..20: mol_type = other DNA
cttaccttgtcagaaaatgg

SEQ ID NO: 23472 - DNA, 20 bp, synthetic construct
  source 1..20: mol_type = other DNA
aaaccttgagagaagtatgg

SEQ ID NO: 23473 - DNA, 20 bp, synthetic construct
  source 1..20: mol_type = other DNA
agcccccattgtcctcttcg

SEQ ID NO: 23474 - DNA, 20 bp, synthetic construct
  source 1..20: mol_type = other DNA
gcagggactggaaggggaaa

SEQ ID NO: 23475 - DNA, 20 bp, synthetic construct
  source 1..20: mol_type = other DNA
ggaatcgagggctgcaagac

SEQ ID NO: 23476 - DNA, 20 bp, synthetic construct
  source 1..20: mol_type = other DNA
cctcttcctccgcgggggat

SEQ ID NO: 23477 - DNA, 20 bp, synthetic construct
  source 1..20: mol_type = other DNA
ttctgaaatgaagacacata

SEQ ID NO: 23478 - DNA, 20 bp, synthetic construct
  source 1..20: mol_type = other DNA
ttcccatcaatgagcagaag

SEQ ID NO: 23479 - DNA, 20 bp, synthetic construct
  source 1..20: mol_type = other DNA
ggttcttcgtggttggtctg

SEQ ID NO: 23480 - DNA, 20 bp, synthetic construct
  source 1..20: mol_type = other DNA
tagttgagctgcaaagagaa

SEQ ID NO: 23481 - DNA, 20 bp, synthetic construct
  source 1..20: mol_type = other DNA
aactccaactccatgtacat

SEQ ID NO: 23482 - DNA, 20 bp, synthetic construct
  source 1..20: mol_type = other DNA
tgcactggtatctggaacct

SEQ ID NO: 23483 - DNA, 20 bp, synthetic construct
  source 1..20: mol_type = other DNA
gaccaggatggggaggatga

SEQ ID NO: 23484 - DNA, 20 bp, synthetic construct
  source 1..20: mol_type = other DNA
agagacaggtaaagctctca

SEQ ID NO: 23485 - DNA, 20 bp, synthetic construct
  source 1..20: mol_type = other DNA
aacggcaaagcgtgagtaca

SEQ ID NO: 23486 - DNA, 20 bp, synthetic construct
  source 1..20: mol_type = other DNA
acctcttcctccgcggggga

SEQ ID NO: 23487 - DNA, 20 bp, synthetic construct
  source 1..20: mol_type = other DNA
cttaccgatgtacatggagt

SEQ ID NO: 23488 - DNA, 20 bp, synthetic construct
  source 1..20: mol_type = other DNA
ttctctcaaggtttgtactc

SEQ ID NO: 23489 - DNA, 20 bp, synthetic construct
  source 1..20: mol_type = other DNA
ttccacagaaagccacgaag

SEQ ID NO: 23490 - DNA, 20 bp, synthetic construct
  source 1..20: mol_type = other DNA
gtcccaatgatgaccaggat

SEQ ID NO: 23491 - DNA, 20 bp, synthetic construct
  source 1..20: mol_type = other DNA
tgctcttagaaagataaacc

SEQ ID NO: 23492 - DNA, 20 bp, synthetic construct
  source 1..20: mol_type = other DNA
gattctcagtaagttaagtc

SEQ ID NO: 23493 - DNA, 20 bp, synthetic construct
  source 1..20: mol_type = other DNA
gcccaggacctctgagcgaa

SEQ ID NO: 23494 - DNA, 20 bp, synthetic construct
  source 1..20: mol_type = other DNA
ccagaagttccccaagctcc

SEQ ID NO: 23495 - DNA, 20 bp, synthetic construct
  source 1..20: mol_type = other DNA
gcctaccgagtgattccggc

SEQ ID NO: 23496 - DNA, 20 bp, synthetic construct
  source 1..20: mol_type = other DNA
tccagaagttccccaagctc

SEQ ID NO: 23497 - DNA, 20 bp, synthetic construct
  source 1..20: mol_type = other DNA
cttgcagccctcgattccag

SEQ ID NO: 23498 - DNA, 20 bp, synthetic construct
  source 1..20: mol_type = other DNA
ttcttatattacccgaccag

SEQ ID NO: 23499 - DNA, 20 bp, synthetic construct
  source 1..20: mol_type = other DNA
gatgaagatgatggtatgtt

SEQ ID NO: 23500 - DNA, 20 bp, synthetic construct
  source 1..20: mol_type = other DNA
cctgtctcttcaggaaaccg

SEQ ID NO: 23501 - DNA, 20 bp, synthetic construct
  source 1..20: mol_type = other DNA
ttcgctcagaggtcctgggc

SEQ ID NO: 23502 - DNA, 20 bp, synthetic construct
  source 1..20: mol_type = other DNA
aaatccttacctctttccct

SEQ ID NO: 23503 - DNA, 20 bp, synthetic construct
  source 1..20: mol_type = other DNA
gccctttcgctcagaggtcc

SEQ ID NO: 23504 - DNA, 20 bp, synthetic construct
  source 1..20: mol_type = other DNA
catccagatccgttatcaga

SEQ ID NO: 23505 - DNA, 20 bp, synthetic construct
  source 1..20: mol_type = other DNA
ctcttcctccgcgggggatg

SEQ ID NO: 23506 - DNA, 20 bp, synthetic construct
  source 1..20: mol_type = other DNA
tgcttctgctgggttcttcg

SEQ ID NO: 23507 - DNA, 20 bp, synthetic construct
  source 1..20: mol_type = other DNA
ccgagtgacctgtggagttc

SEQ ID NO: 23508 - DNA, 20 bp, synthetic construct
  source 1..20: mol_type = other DNA
caactataaggactgtgaga

SEQ ID NO: 23509 - DNA, 20 bp, synthetic construct
  source 1..20: mol_type = other DNA
cccaggacctctgagcgaaa

SEQ ID NO: 23510 - DNA, 20 bp, synthetic construct
  source 1..20: mol_type = other DNA
cccggagcttggggaacttc

SEQ ID NO: 23511 - DNA, 20 bp, synthetic construct
  source 1..20: mol_type = other DNA
cacacgcaagtgagtgcggc

SEQ ID NO: 23512 - DNA, 20 bp, synthetic construct
  source 1..20: mol_type = other DNA
tgtgcccccccagagaccga

SEQ ID NO: 23513 - DNA, 20 bp, synthetic construct
  source 1..20: mol_type = other DNA
agcagcttctgcctctggtc

SEQ ID NO: 23514 - DNA, 20 bp, synthetic construct
  source 1..20: mol_type = other DNA
tgttgggaactggactccga

SEQ ID NO: 23515 - DNA, 20 bp, synthetic construct
  source 1..20: mol_type = other DNA
ttaccttcccgctggaatcg

SEQ ID NO: 23516 - DNA, 20 bp, synthetic construct
  source 1..20: mol_type = other DNA
cataccatcatcttcatcct

SEQ ID NO: 23517 - DNA, 20 bp, synthetic construct
  source 1..20: mol_type = other DNA
cgttaatgtgcactggtatc

SEQ ID NO: 23518 - DNA, 20 bp, synthetic construct
  source 1..20: mol_type = other DNA
tcttcgtggctttctgtgga

SEQ ID NO: 23519 - DNA, 20 bp, synthetic construct
  source 1..20: mol_type = other DNA
tgaagaagtaccacatcgat

SEQ ID NO: 23520 - DNA, 20 bp, synthetic construct
  source 1..20: mol_type = other DNA
taccttcccgctggaatcga

SEQ ID NO: 23521 - DNA, 20 bp, synthetic construct
  source 1..20: mol_type = other DNA
tccgtggtcggtggtaaagg

SEQ ID NO: 23522 - DNA, 20 bp, synthetic construct
  source 1..20: mol_type = other DNA
aacctttctgagaatgctcc

SEQ ID NO: 23523 - DNA, 20 bp, synthetic construct
  source 1..20: mol_type = other DNA
agagctttacctgtctcttc

SEQ ID NO: 23524 - DNA, 20 bp, synthetic construct
  source 1..20: mol_type = other DNA
gggcacattcctcagtgcca

SEQ ID NO: 23525 - DNA, 20 bp, synthetic construct
  source 1..20: mol_type = other DNA
atgtacatggagttggagtt

SEQ ID NO: 23526 - DNA, 20 bp, synthetic construct
  source 1..20: mol_type = other DNA
agtcccaatgatgaccagga

SEQ ID NO: 23527 - DNA, 20 bp, synthetic construct
  source 1..20: mol_type = other DNA
actcacgctttgccgttttg

SEQ ID NO: 23528 - DNA, 20 bp, synthetic construct
  source 1..20: mol_type = other DNA
ctgtctcttcaggaaaccgc

SEQ ID NO: 23529 - DNA, 20 bp, synthetic construct
  source 1..20: mol_type = other DNA
ctccaggcatgtgagaggat

SEQ ID NO: 23530 - DNA, 20 bp, synthetic construct
  source 1..20: mol_type = other DNA
agaggatgggagagggttca

SEQ ID NO: 23531 - DNA, 20 bp, synthetic construct
  source 1..20: mol_type = other DNA
gtgaagggttctctatcaaa

SEQ ID NO: 23532 - DNA, 20 bp, synthetic construct
  source 1..20: mol_type = other DNA
atagttgagctgcaaagaga

SEQ ID NO: 23533 - DNA, 20 bp, synthetic construct
  source 1..20: mol_type = other DNA
gaatgctccaggcatgtgag

SEQ ID NO: 23534 - DNA, 20 bp, synthetic construct
  source 1..20: mol_type = other DNA
ggtgcctcttcctcctcatt

SEQ ID NO: 23535 - DNA, 20 bp, synthetic construct
  source 1..20: mol_type = other DNA
tccacagaccggcccccctc

SEQ ID NO: 23536 - DNA, 20 bp, synthetic construct
  source 1..20: mol_type = other DNA
ggcacccgtggaagatgacg

SEQ ID NO: 23537 - DNA, 20 bp, synthetic construct
  source 1..20: mol_type = other DNA
tacaacaccatgaggacata

SEQ ID NO: 23538 - DNA, 20 bp, synthetic construct
  source 1..20: mol_type = other DNA
agaattcattaaatgaagag

SEQ ID NO: 23539 - DNA, 20 bp, synthetic construct
  source 1..20: mol_type = other DNA
ccttcttgaaatagtcagca

SEQ ID NO: 23540 - DNA, 20 bp, synthetic construct
  source 1..20: mol_type = other DNA
ttgaaggagcagggactgga

SEQ ID NO: 23541 - DNA, 20 bp, synthetic construct
  source 1..20: mol_type = other DNA
cttcctgcccacacagtgat

SEQ ID NO: 23542 - DNA, 20 bp, synthetic construct
  source 1..20: mol_type = other DNA
gagtgattccggccggctgg

SEQ ID NO: 23543 - DNA, 20 bp, synthetic construct
  source 1..20: mol_type = other DNA
gctcgcttcttggtaagctc

SEQ ID NO: 23544 - DNA, 20 bp, synthetic construct
  source 1..20: mol_type = other DNA
ccttgctgactatttcaaga

SEQ ID NO: 23545 - DNA, 20 bp, synthetic construct
  source 1..20: mol_type = other DNA
ctccatcatcctccccatcc

SEQ ID NO: 23546 - DNA, 20 bp, synthetic construct
  source 1..20: mol_type = other DNA
ggccggtctgtggaaacaca

SEQ ID NO: 23547 - DNA, 20 bp, synthetic construct
  source 1..20: mol_type = other DNA
ataatccgcgtcatcttcca

SEQ ID NO: 23548 - DNA, 20 bp, synthetic construct
  source 1..20: mol_type = other DNA
tctgctgggttcttcgtggt

SEQ ID NO: 23549 - DNA, 20 bp, synthetic construct
  source 1..20: mol_type = other DNA
tgccacttctgctcattgat

SEQ ID NO: 23550 - DNA, 20 bp, synthetic construct
  source 1..20: mol_type = other DNA
agagcttcctcgtcattgga

SEQ ID NO: 23551 - DNA, 20 bp, synthetic construct
  source 1..20: mol_type = other DNA
gctccaggcatgtgagagga

SEQ ID NO: 23552 - DNA, 20 bp, synthetic construct
  source 1..20: mol_type = other DNA
ggaggcctaccgagtgattc

SEQ ID NO: 23553 - DNA, 20 bp, synthetic construct
  source 1..20: mol_type = other DNA
aagagacaggtaaagctctc

SEQ ID NO: 23554 - DNA, 20 bp, synthetic construct
  source 1..20: mol_type = other DNA
caccatgaggacatatggat

SEQ ID NO: 23555 - DNA, 20 bp, synthetic construct
  source 1..20: mol_type = other DNA
gaaatagtcagcaaggctgt

SEQ ID NO: 23556 - DNA, 20 bp, synthetic construct
  source 1..20: mol_type = other DNA
gttcttaccagccaagaggt

SEQ ID NO: 23557 - DNA, 20 bp, synthetic construct
  source 1..20: mol_type = other DNA
gcatgttacttactgttctc

SEQ ID NO: 23558 - DNA, 20 bp, synthetic construct
  source 1..20: mol_type = other DNA
tggatacttacacgtgcatt

SEQ ID NO: 23559 - DNA, 20 bp, synthetic construct
  source 1..20: mol_type = other DNA
cgtcactgtaagtgatgagg

SEQ ID NO: 23560 - DNA, 20 bp, synthetic construct
  source 1..20: mol_type = other DNA
cttactgttctcgggatggg

SEQ ID NO: 23561 - DNA, 20 bp, synthetic construct
  source 1..20: mol_type = other DNA
cgtggtgcagccatcccatg

SEQ ID NO: 23562 - DNA, 20 bp, synthetic construct
  source 1..20: mol_type = other DNA
ttcccaggaaagcatccaga

SEQ ID NO: 23563 - DNA, 20 bp, synthetic construct
  source 1..20: mol_type = other DNA
tccagggtaagaaaaagaag

SEQ ID NO: 23564 - DNA, 20 bp, synthetic construct
  source 1..20: mol_type = other DNA
tcaggagccctaccacgaca

SEQ ID NO: 23565 - DNA, 20 bp, synthetic construct
  source 1..20: mol_type = other DNA
ctacatatgcagctttatcc

SEQ ID NO: 23566 - DNA, 20 bp, synthetic construct
  source 1..20: mol_type = other DNA
gcatgaacagagaaaggagc

SEQ ID NO: 23567 - DNA, 20 bp, synthetic construct
  source 1..20: mol_type = other DNA
gttacttactgttctcggga

SEQ ID NO: 23568 - DNA, 20 bp, synthetic construct
  source 1..20: mol_type = other DNA
ggtgttctctggccttgtcg

SEQ ID NO: 23569 - DNA, 20 bp, synthetic construct
  source 1..20: mol_type = other DNA
tcagcctgtatatcccatca

SEQ ID NO: 23570 - DNA, 20 bp, synthetic construct
  source 1..20: mol_type = other DNA
tgggtgtcttaccgtcatcg

SEQ ID NO: 23571 - DNA, 20 bp, synthetic construct
  source 1..20: mol_type = other DNA
tccaacaccacccggagaca

SEQ ID NO: 23572 - DNA, 20 bp, synthetic construct
  source 1..20: mol_type = other DNA
tataacataaaagcattcag

SEQ ID NO: 23573 - DNA, 20 bp, synthetic construct
  source 1..20: mol_type = other DNA
aatatttagcctgctcttca

SEQ ID NO: 23574 - DNA, 20 bp, synthetic construct
  source 1..20: mol_type = other DNA
accgtcatcggggtgttctc

SEQ ID NO: 23575 - DNA, 20 bp, synthetic construct
  source 1..20: mol_type = other DNA
tgccactaaaacagagagga

SEQ ID NO: 23576 - DNA, 20 bp, synthetic construct
  source 1..20: mol_type = other DNA
ggttcttaccagccaagagg

SEQ ID NO: 23577 - DNA, 20 bp, synthetic construct
  source 1..20: mol_type = other DNA
ttacttactgttctcgggat

SEQ ID NO: 23578 - DNA, 20 bp, synthetic construct
  source 1..20: mol_type = other DNA
ggcttcctaaaaggtggtgg

SEQ ID NO: 23579 - DNA, 20 bp, synthetic construct
  source 1..20: mol_type = other DNA
gcagtcaaataaagtgcccg

SEQ ID NO: 23580 - DNA, 20 bp, synthetic construct
  source 1..20: mol_type = other DNA
tcaaaaccagcagtcttctg

SEQ ID NO: 23581 - DNA, 20 bp, synthetic construct
  source 1..20: mol_type = other DNA
tcttctaagattgaagaatt

SEQ ID NO: 23582 - DNA, 20 bp, synthetic construct
  source 1..20: mol_type = other DNA
cacttaccccagaagactgc

SEQ ID NO: 23583 - DNA, 20 bp, synthetic construct
  source 1..20: mol_type = other DNA
gaaatcatggtgcttccttc

SEQ ID NO: 23584 - DNA, 20 bp, synthetic construct
  source 1..20: mol_type = other DNA
cgaaatcatggtgcttcctt

SEQ ID NO: 23585 - DNA, 20 bp, synthetic construct
  source 1..20: mol_type = other DNA
ccacgagagcgtaagtcccg

SEQ ID NO: 23586 - DNA, 20 bp, synthetic construct
  source 1..20: mol_type = other DNA
ccgggaccgaaacctagccc

SEQ ID NO: 23587 - DNA, 20 bp, synthetic construct
  source 1..20: mol_type = other DNA
atcatggtgcttccttcggg

SEQ ID NO: 23588 - DNA, 20 bp, synthetic construct
  source 1..20: mol_type = other DNA
cagagagaagcttcctatgg

SEQ ID NO: 23589 - DNA, 20 bp, synthetic construct
  source 1..20: mol_type = other DNA
ccccgcttgccgcgggctgg

SEQ ID NO: 23590 - DNA, 20 bp, synthetic construct
  source 1..20: mol_type = other DNA
ataatgtcatagagctcatc

SEQ ID NO: 23591 - DNA, 20 bp, synthetic construct
  source 1..20: mol_type = other DNA
tactgttgttatagtaacct

SEQ ID NO: 23592 - DNA, 20 bp, synthetic construct
  source 1..20: mol_type = other DNA
ttactataacaacagtacca

SEQ ID NO: 23593 - DNA, 20 bp, synthetic construct
  source 1..20: mol_type = other DNA
ggctctacgctgtggtcacc

SEQ ID NO: 23594 - DNA, 20 bp, synthetic construct
  source 1..20: mol_type = other DNA
agtttggccacatagttgct

SEQ ID NO: 23595 - DNA, 20 bp, synthetic construct
  source 1..20: mol_type = other DNA
cccctatgatggcatccacc

SEQ ID NO: 23596 - DNA, 20 bp, synthetic construct
  source 1..20: mol_type = other DNA
ggtgtccgccgtgatcgccg

SEQ ID NO: 23597 - DNA, 20 bp, synthetic construct
  source 1..20: mol_type = other DNA
gggcatagccgcggtttttc

SEQ ID NO: 23598 - DNA, 20 bp, synthetic construct
  source 1..20: mol_type = other DNA
gcctggagatctcctgcttg

SEQ ID NO: 23599 - DNA, 20 bp, synthetic construct
  source 1..20: mol_type = other DNA
ctgcacccgcaccacgccgc

SEQ ID NO: 23600 - DNA, 20 bp, synthetic construct
  source 1..20: mol_type = other DNA
gccgcggccgccgcgcagag

SEQ ID NO: 23601 - DNA, 20 bp, synthetic construct
  source 1..20: mol_type = other DNA
ggcccggccagcgctggggg

SEQ ID NO: 23602 - DNA, 20 bp, synthetic construct
  source 1..20: mol_type = other DNA
gaagtcattaacatattcca

SEQ ID NO: 23603 - DNA, 20 bp, synthetic construct
  source 1..20: mol_type = other DNA
tcatccagtagtagtcttcc

SEQ ID NO: 23604 - DNA, 20 bp, synthetic construct
  source 1..20: mol_type = other DNA
gcagctgaaccccgaggcgc

SEQ ID NO: 23605 - DNA, 20 bp, synthetic construct
  source 1..20: mol_type = other DNA
acctcaagcaggagatctcc

SEQ ID NO: 23606 - DNA, 20 bp, synthetic construct
  source 1..20: mol_type = other DNA
ggcggcggcggaggcggcgg

SEQ ID NO: 23607 - DNA, 20 bp, synthetic construct
  source 1..20: mol_type = other DNA
gttcagctcgcgcacagaca

SEQ ID NO: 23608 - DNA, 20 bp, synthetic construct
  source 1..20: mol_type = other DNA
agcaacagccaccagctcca

SEQ ID NO: 23609 - DNA, 20 bp, synthetic construct
  source 1..20: mol_type = other DNA
gccgccgccgcccccagcgc

SEQ ID NO: 23610 - DNA, 20 bp, synthetic construct
  source 1..20: mol_type = other DNA
gagctgaaccggcagctgcg

SEQ ID NO: 23611 - DNA, 20 bp, synthetic construct
  source 1..20: mol_type = other DNA
gcagctgcgcggggtcagca

SEQ ID NO: 23612 - DNA, 20 bp, synthetic construct
  source 1..20: mol_type = other DNA
tggagatctcctgcttgagg

SEQ ID NO: 23613 - DNA, 20 bp, synthetic construct
  source 1..20: mol_type = other DNA
cagctccagggcggcttcga

SEQ ID NO: 23614 - DNA, 20 bp, synthetic construct
  source 1..20: mol_type = other DNA
cgccggccgtcgggtggtgg

SEQ ID NO: 23615 - DNA, 20 bp, synthetic construct
  source 1..20: mol_type = other DNA
gcagagacacgtcctggagt

SEQ ID NO: 23616 - DNA, 20 bp, synthetic construct
  source 1..20: mol_type = other DNA
ggcaggactgggcatagccg

SEQ ID NO: 23617 - DNA, 20 bp, synthetic construct
  source 1..20: mol_type = other DNA
cccagtcctgccgcttcaag

SEQ ID NO: 23618 - DNA, 20 bp, synthetic construct
  source 1..20: mol_type = other DNA
gctgggggcggcggcggcgg

SEQ ID NO: 23619 - DNA, 20 bp, synthetic construct
  source 1..20: mol_type = other DNA
ccagctgctcgtcggagaag

SEQ ID NO: 23620 - DNA, 20 bp, synthetic construct
  source 1..20: mol_type = other DNA
ggtgcagcagagacacgtcc

SEQ ID NO: 23621 - DNA, 20 bp, synthetic construct
  source 1..20: mol_type = other DNA
gcgcgagagggacgcgtaca

SEQ ID NO: 23622 - DNA, 20 bp, synthetic construct
  source 1..20: mol_type = other DNA
gcggcggccggggccggtgc

SEQ ID NO: 23623 - DNA, 20 bp, synthetic construct
  source 1..20: mol_type = other DNA
cagctgaaccccgaggcgct

SEQ ID NO: 23624 - DNA, 20 bp, synthetic construct
  source 1..20: mol_type = other DNA
caccaccaccacccgacggc

SEQ ID NO: 23625 - DNA, 20 bp, synthetic construct
  source 1..20: mol_type = other DNA
tgtctgtgcgcgagctgaac

SEQ ID NO: 23626 - DNA, 20 bp, synthetic construct
  source 1..20: mol_type = other DNA
tccgcctcttctgcttcagc

SEQ ID NO: 23627 - DNA, 20 bp, synthetic construct
  source 1..20: mol_type = other DNA
cccgcagcagctgaaccccg

SEQ ID NO: 23628 - DNA, 20 bp, synthetic construct
  source 1..20: mol_type = other DNA
cggggcgcagcagctggccg

SEQ ID NO: 23629 - DNA, 20 bp, synthetic construct
  source 1..20: mol_type = other DNA
ccagtcctgccgcttcaaga

SEQ ID NO: 23630 - DNA, 20 bp, synthetic construct
  source 1..20: mol_type = other DNA
agctgaaccggcagctgcgc

SEQ ID NO: 23631 - DNA, 20 bp, synthetic construct
  source 1..20: mol_type = other DNA
tccggctgaagcagaagagg

SEQ ID NO: 23632 - DNA, 20 bp, synthetic construct
  source 1..20: mol_type = other DNA
tctccaggctggtgcgcgag

SEQ ID NO: 23633 - DNA, 20 bp, synthetic construct
  source 1..20: mol_type = other DNA
cagcgagcagaaggcgcacc

SEQ ID NO: 23634 - DNA, 20 bp, synthetic construct
  source 1..20: mol_type = other DNA
ggcgcagcagctggccgcgg

SEQ ID NO: 23635 - DNA, 20 bp, synthetic construct
  source 1..20: mol_type = other DNA
gctgaaccggcagctgcgcg

SEQ ID NO: 23636 - DNA, 20 bp, synthetic construct
  source 1..20: mol_type = other DNA
tcacatgaaaaactcgggag

SEQ ID NO: 23637 - DNA, 20 bp, synthetic construct
  source 1..20: mol_type = other DNA
cggccaccaccaccacccga

SEQ ID NO: 23638 - DNA, 20 bp, synthetic construct
  source 1..20: mol_type = other DNA
gcaagtcgaccacctcaagc

SEQ ID NO: 23639 - DNA, 20 bp, synthetic construct
  source 1..20: mol_type = other DNA
cctcttgaagcggcaggact

SEQ ID NO: 23640 - DNA, 20 bp, synthetic construct
  source 1..20: mol_type = other DNA
caccaccaccaccacgccgc

SEQ ID NO: 23641 - DNA, 20 bp, synthetic construct
  source 1..20: mol_type = other DNA
ctccttgggcggcagcggcg

SEQ ID NO: 23642 - DNA, 20 bp, synthetic construct
  source 1..20: mol_type = other DNA
tgctgaccccgcgcagctgc

SEQ ID NO: 23643 - DNA, 20 bp, synthetic construct
  source 1..20: mol_type = other DNA
caagcaggagatctccaggc

SEQ ID NO: 23644 - DNA, 20 bp, synthetic construct
  source 1..20: mol_type = other DNA
catgagcacgccgtgcagct

SEQ ID NO: 23645 - DNA, 20 bp, synthetic construct
  source 1..20: mol_type = other DNA
tggccaggggactggtgggc

SEQ ID NO: 23646 - DNA, 20 bp, synthetic construct
  source 1..20: mol_type = other DNA
aggcggaccctgaaaaaccg

SEQ ID NO: 23647 - DNA, 20 bp, synthetic construct
  source 1..20: mol_type = other DNA
gccgctctgcgcggcggccg

SEQ ID NO: 23648 - DNA, 20 bp, synthetic construct
  source 1..20: mol_type = other DNA
agcgctgggggcggcggcgg

SEQ ID NO: 23649 - DNA, 20 bp, synthetic construct
  source 1..20: mol_type = other DNA
cgcacctggaagactactac

SEQ ID NO: 23650 - DNA, 20 bp, synthetic construct
  source 1..20: mol_type = other DNA
cacccgcaccacgccgccgg

SEQ ID NO: 23651 - DNA, 20 bp, synthetic construct
  source 1..20: mol_type = other DNA
gctgccgcccaaggaggcgc

SEQ ID NO: 23652 - DNA, 20 bp, synthetic construct
  source 1..20: mol_type = other DNA
ccctcttgaagcggcaggac

SEQ ID NO: 23653 - DNA, 20 bp, synthetic construct
  source 1..20: mol_type = other DNA
tctccgccgaggaggtgaca

SEQ ID NO: 23654 - DNA, 20 bp, synthetic construct
  source 1..20: mol_type = other DNA
tgtcggtgcgcgagctgaac

SEQ ID NO: 23655 - DNA, 20 bp, synthetic construct
  source 1..20: mol_type = other DNA
cacaggctggggcttccttc

SEQ ID NO: 23656 - DNA, 20 bp, synthetic construct
  source 1..20: mol_type = other DNA
gatcaggcgcccgagggccg

SEQ ID NO: 23657 - DNA, 20 bp, synthetic construct
  source 1..20: mol_type = other DNA
aaccactggtagtgaggaat

SEQ ID NO: 23658 - DNA, 20 bp, synthetic construct
  source 1..20: mol_type = other DNA
ccttaagagaacactgctcc

SEQ ID NO: 23659 - DNA, 20 bp, synthetic construct
  source 1..20: mol_type = other DNA
ccattaacttcagcagacac

SEQ ID NO: 23660 - DNA, 20 bp, synthetic construct
  source 1..20: mol_type = other DNA
tcgctgagcctccgcagcag

SEQ ID NO: 23661 - DNA, 20 bp, synthetic construct
  source 1..20: mol_type = other DNA
ctggtatagaggcaatgctt

SEQ ID NO: 23662 - DNA, 20 bp, synthetic construct
  source 1..20: mol_type = other DNA
gaaacaaggaagaacagatg

SEQ ID NO: 23663 - DNA, 20 bp, synthetic construct
  source 1..20: mol_type = other DNA
tactgtaaacccagagtcaa

SEQ ID NO: 23664 - DNA, 20 bp, synthetic construct
  source 1..20: mol_type = other DNA
gagcctgtttgcctttggta

SEQ ID NO: 23665 - DNA, 20 bp, synthetic construct
  source 1..20: mol_type = other DNA
tgctttcagttgcctagacc

SEQ ID NO: 23666 - DNA, 20 bp, synthetic construct
  source 1..20: mol_type = other DNA
ctttgagcttggggtgctcc

SEQ ID NO: 23667 - DNA, 20 bp, synthetic construct
  source 1..20: mol_type = other DNA
catttgccaatccagaatgc

SEQ ID NO: 23668 - DNA, 20 bp, synthetic construct
  source 1..20: mol_type = other DNA
gacaagcaggaagtgaatgt

SEQ ID NO: 23669 - DNA, 20 bp, synthetic construct
  source 1..20: mol_type = other DNA
gaggagactggcggagctgg

SEQ ID NO: 23670 - DNA, 20 bp, synthetic construct
  source 1..20: mol_type = other DNA
cttcaaagtggtttcactgt

SEQ ID NO: 23671 - DNA, 20 bp, synthetic construct
  source 1..20: mol_type = other DNA
gtggttcaaaatgaataaag

SEQ ID NO: 23672 - DNA, 20 bp, synthetic construct
  source 1..20: mol_type = other DNA
gctcctggatcaggcgcccg

SEQ ID NO: 23673 - DNA, 20 bp, synthetic construct
  source 1..20: mol_type = other DNA
aagactagatgttcctgaaa

SEQ ID NO: 23674 - DNA, 20 bp, synthetic construct
  source 1..20: mol_type = other DNA
cctccgcctcaggtgagctc

SEQ ID NO: 23675 - DNA, 20 bp, synthetic construct
  source 1..20: mol_type = other DNA
cgcgaccctcaaccgcctgc

SEQ ID NO: 23676 - DNA, 20 bp, synthetic construct
  source 1..20: mol_type = other DNA
gagtcaaaggcagtcttggc

SEQ ID NO: 23677 - DNA, 20 bp, synthetic construct
  source 1..20: mol_type = other DNA
aatataataaccctgaaaag

SEQ ID NO: 23678 - DNA, 20 bp, synthetic construct
  source 1..20: mol_type = other DNA
gctcagcgagctcctggatc

SEQ ID NO: 23679 - DNA, 20 bp, synthetic construct
  source 1..20: mol_type = other DNA
acttcagcagacacaggctg

SEQ ID NO: 23680 - DNA, 20 bp, synthetic construct
  source 1..20: mol_type = other DNA
ctcctccagccccggccctc

SEQ ID NO: 23681 - DNA, 20 bp, synthetic construct
  source 1..20: mol_type = other DNA
ggagactggcggagctggcg

SEQ ID NO: 23682 - DNA, 20 bp, synthetic construct
  source 1..20: mol_type = other DNA
tgaaatccagcattctggat

SEQ ID NO: 23683 - DNA, 20 bp, synthetic construct
  source 1..20: mol_type = other DNA
accactggtagtgaggaata

SEQ ID NO: 23684 - DNA, 20 bp, synthetic construct
  source 1..20: mol_type = other DNA
gttttacagtgtgttgctgt

SEQ ID NO: 23685 - DNA, 20 bp, synthetic construct
  source 1..20: mol_type = other DNA
cggttgagggtcgcgccggc

SEQ ID NO: 23686 - DNA, 20 bp, synthetic construct
  source 1..20: mol_type = other DNA
ctcctggatcaggcgcccga

SEQ ID NO: 23687 - DNA, 20 bp, synthetic construct
  source 1..20: mol_type = other DNA
aacagcgacatggccctcgc

SEQ ID NO: 23688 - DNA, 20 bp, synthetic construct
  source 1..20: mol_type = other DNA
tcacctttgaattcagccag

SEQ ID NO: 23689 - DNA, 20 bp, synthetic construct
  source 1..20: mol_type = other DNA
tcatttctatttaagggagg

SEQ ID NO: 23690 - DNA, 20 bp, synthetic construct
  source 1..20: mol_type = other DNA
aggattggaagatactgtag

SEQ ID NO: 23691 - DNA, 20 bp, synthetic construct
  source 1..20: mol_type = other DNA
tggaacaccaaggaacctac

SEQ ID NO: 23692 - DNA, 20 bp, synthetic construct
  source 1..20: mol_type = other DNA
tgtatagatgatcatgacat

SEQ ID NO: 23693 - DNA, 20 bp, synthetic construct
  source 1..20: mol_type = other DNA
gcgcgaccctcaaccgcctg

SEQ ID NO: 23694 - DNA, 20 bp, synthetic construct
  source 1..20: mol_type = other DNA
ccccaagctcaaagctcctt

SEQ ID NO: 23695 - DNA, 20 bp, synthetic construct
  source 1..20: mol_type = other DNA
cggagctggcggggagtcgc

SEQ ID NO: 23696 - DNA, 20 bp, synthetic construct
  source 1..20: mol_type = other DNA
ctccgcctcaggtgagctca

SEQ ID NO: 23697 - DNA, 20 bp, synthetic construct
  source 1..20: mol_type = other DNA
gcagcagcggctcccgcagg

SEQ ID NO: 23698 - DNA, 20 bp, synthetic construct
  source 1..20: mol_type = other DNA
ttgatgctccaaatccatat

SEQ ID NO: 23699 - DNA, 20 bp, synthetic construct
  source 1..20: mol_type = other DNA
atggatttggagcatcaacg

SEQ ID NO: 23700 - DNA, 20 bp, synthetic construct
  source 1..20: mol_type = other DNA
ggcatatccaaacacaatat

SEQ ID NO: 23701 - DNA, 20 bp, synthetic construct
  source 1..20: mol_type = other DNA
tcgctttgaaaaaaaaagaa

SEQ ID NO: 23702 - DNA, 20 bp, synthetic construct
  source 1..20: mol_type = other DNA
gctttgaaaaaaaaagaaag

SEQ ID NO: 23703 - DNA, 20 bp, synthetic construct
  source 1..20: mol_type = other DNA
gagggtcgcgccggccggag

SEQ ID NO: 23704 - DNA, 20 bp, synthetic construct
  source 1..20: mol_type = other DNA
tactaaaatgacatgaagca

SEQ ID NO: 23705 - DNA, 20 bp, synthetic construct
  source 1..20: mol_type = other DNA
gagggccatgtcgctgttgg

SEQ ID NO: 23706 - DNA, 20 bp, synthetic construct
  source 1..20: mol_type = other DNA
aattcgtacacatccaccaa

SEQ ID NO: 23707 - DNA, 20 bp, synthetic construct
  source 1..20: mol_type = other DNA
ggccctcgggcgcctgatcc

SEQ ID NO: 23708 - DNA, 20 bp, synthetic construct
  source 1..20: mol_type = other DNA
ccgccagtctcctccagccc

SEQ ID NO: 23709 - DNA, 20 bp, synthetic construct
  source 1..20: mol_type = other DNA
ccaagactgcctttgactct

SEQ ID NO: 23710 - DNA, 20 bp, synthetic construct
  source 1..20: mol_type = other DNA
tccgcagcagcggctcccgc

SEQ ID NO: 23711 - DNA, 20 bp, synthetic construct
  source 1..20: mol_type = other DNA
atcatatcagtactcaggat

SEQ ID NO: 23712 - DNA, 20 bp, synthetic construct
  source 1..20: mol_type = other DNA
ttattatattatgcaggaca

SEQ ID NO: 23713 - DNA, 20 bp, synthetic construct
  source 1..20: mol_type = other DNA
cgatgataccattccaatct

SEQ ID NO: 23714 - DNA, 20 bp, synthetic construct
  source 1..20: mol_type = other DNA
cctggagcagtgttctctta

SEQ ID NO: 23715 - DNA, 20 bp, synthetic construct
  source 1..20: mol_type = other DNA
tcattgcaagacccattcca

SEQ ID NO: 23716 - DNA, 20 bp, synthetic construct
  source 1..20: mol_type = other DNA
tacttactctggaagctctc

SEQ ID NO: 23717 - DNA, 20 bp, synthetic construct
  source 1..20: mol_type = other DNA
tgagggtcgcgccggccgga

SEQ ID NO: 23718 - DNA, 20 bp, synthetic construct
  source 1..20: mol_type = other DNA
catatactcccttgtctaaa

SEQ ID NO: 23719 - DNA, 20 bp, synthetic construct
  source 1..20: mol_type = other DNA
aagaaggtagaaatcatcat

SEQ ID NO: 23720 - DNA, 20 bp, synthetic construct
  source 1..20: mol_type = other DNA
atatgagatgcgtaatgctg

SEQ ID NO: 23721 - DNA, 20 bp, synthetic construct
  source 1..20: mol_type = other DNA
gtaacattacttggattacc

SEQ ID NO: 23722 - DNA, 20 bp, synthetic construct
  source 1..20: mol_type = other DNA
ccggccggaggggcgagcag

SEQ ID NO: 23723 - DNA, 20 bp, synthetic construct
  source 1..20: mol_type = other DNA
acttcccaaaagctgatgcc

SEQ ID NO: 23724 - DNA, 20 bp, synthetic construct
  source 1..20: mol_type = other DNA
gccctattcctcactaccag

SEQ ID NO: 23725 - DNA, 20 bp, synthetic construct
  source 1..20: mol_type = other DNA
gcggaggctcagcgagctcc

SEQ ID NO: 23726 - DNA, 20 bp, synthetic construct
  source 1..20: mol_type = other DNA
caccaaaggagctttgagct

SEQ ID NO: 23727 - DNA, 20 bp, synthetic construct
  source 1..20: mol_type = other DNA
gcagtgttctcttaaggtac

SEQ ID NO: 23728 - DNA, 20 bp, synthetic construct
  source 1..20: mol_type = other DNA
gcggaatctacagtgggcca

SEQ ID NO: 23729 - DNA, 20 bp, synthetic construct
  source 1..20: mol_type = other DNA
taacttcagcagacacaggc

SEQ ID NO: 23730 - DNA, 20 bp, synthetic construct
  source 1..20: mol_type = other DNA
ctacagtgggccaaggctca

SEQ ID NO: 23731 - DNA, 20 bp, synthetic construct
  source 1..20: mol_type = other DNA
gggggcggccgagggcggca

SEQ ID NO: 23732 - DNA, 20 bp, synthetic construct
  source 1..20: mol_type = other DNA
cctgagctcacctgaggcgg

SEQ ID NO: 23733 - DNA, 20 bp, synthetic construct
  source 1..20: mol_type = other DNA
gcacttactgatccaataca

SEQ ID NO: 23734 - DNA, 20 bp, synthetic construct
  source 1..20: mol_type = other DNA
attcagccagtggtcacagc

SEQ ID NO: 23735 - DNA, 20 bp, synthetic construct
  source 1..20: mol_type = other DNA
gtaattcatttttgaaccac

SEQ ID NO: 23736 - DNA, 20 bp, synthetic construct
  source 1..20: mol_type = other DNA
caggcggttgagggtcgcgc

SEQ ID NO: 23737 - DNA, 20 bp, synthetic construct
  source 1..20: mol_type = other DNA
ttgagggtcgcgccggccgg

SEQ ID NO: 23738 - DNA, 20 bp, synthetic construct
  source 1..20: mol_type = other DNA
tgcgggagccgctgctgcgg

SEQ ID NO: 23739 - DNA, 20 bp, synthetic construct
  source 1..20: mol_type = other DNA
ccggggctggaggagactgg

SEQ ID NO: 23740 - DNA, 20 bp, synthetic construct
  source 1..20: mol_type = other DNA
gccaagactgcctttgactc

SEQ ID NO: 23741 - DNA, 20 bp, synthetic construct
  source 1..20: mol_type = other DNA
cccagagtcaaaggcagtct

SEQ ID NO: 23742 - DNA, 20 bp, synthetic construct
  source 1..20: mol_type = other DNA
agcacttactgatccaatac

SEQ ID NO: 23743 - DNA, 20 bp, synthetic construct
  source 1..20: mol_type = other DNA
gtgggccaaggctcatggta

SEQ ID NO: 23744 - DNA, 20 bp, synthetic construct
  source 1..20: mol_type = other DNA
tcttgtgcggaatctacagt

SEQ ID NO: 23745 - DNA, 20 bp, synthetic construct
  source 1..20: mol_type = other DNA
gcctgcgggagccgctgctg

SEQ ID NO: 23746 - DNA, 20 bp, synthetic construct
  source 1..20: mol_type = other DNA
gcggagctggcggggagtcg

SEQ ID NO: 23747 - DNA, 20 bp, synthetic construct
  source 1..20: mol_type = other DNA
tcacacattattatctccgg

SEQ ID NO: 23748 - DNA, 20 bp, synthetic construct
  source 1..20: mol_type = other DNA
gcgagggccatgtcgctgtt

SEQ ID NO: 23749 - DNA, 20 bp, synthetic construct
  source 1..20: mol_type = other DNA
tgagaccaaaaagctataca

SEQ ID NO: 23750 - DNA, 20 bp, synthetic construct
  source 1..20: mol_type = other DNA
gactaacttactgagacagc

SEQ ID NO: 23751 - DNA, 20 bp, synthetic construct
  source 1..20: mol_type = other DNA
cttaaggtactggagcctga

SEQ ID NO: 23752 - DNA, 20 bp, synthetic construct
  source 1..20: mol_type = other DNA
tggtgttccaaatccacata

SEQ ID NO: 23753 - DNA, 20 bp, synthetic construct
  source 1..20: mol_type = other DNA
agacagtcaagatagcaaga

SEQ ID NO: 23754 - DNA, 20 bp, synthetic construct
  source 1..20: mol_type = other DNA
ctggaggagactggcggagc

SEQ ID NO: 23755 - DNA, 20 bp, synthetic construct
  source 1..20: mol_type = other DNA
atatccaaacacaatattgg

SEQ ID NO: 23756 - DNA, 20 bp, synthetic construct
  source 1..20: mol_type = other DNA
tggatcaggcgcccgagggc

SEQ ID NO: 23757 - DNA, 20 bp, synthetic construct
  source 1..20: mol_type = other DNA
atccttttgttcaatatcag

SEQ ID NO: 23758 - DNA, 20 bp, synthetic construct
  source 1..20: mol_type = other DNA
acttactctggaagctctct

SEQ ID NO: 23759 - DNA, 20 bp, synthetic construct
  source 1..20: mol_type = other DNA
aagtatagtttacaaaccac

SEQ ID NO: 23760 - DNA, 20 bp, synthetic construct
  source 1..20: mol_type = other DNA
accaaaggagctttgagctt

SEQ ID NO: 23761 - DNA, 20 bp, synthetic construct
  source 1..20: mol_type = other DNA
aacttcagcagacacaggct

SEQ ID NO: 23762 - DNA, 20 bp, synthetic construct
  source 1..20: mol_type = other DNA
gagacagctggacttcaaag

SEQ ID NO: 23763 - DNA, 20 bp, synthetic construct
  source 1..20: mol_type = other DNA
tgaccactggctgaattcaa

SEQ ID NO: 23764 - DNA, 20 bp, synthetic construct
  source 1..20: mol_type = other DNA
gtgaactgagtctggtatag

SEQ ID NO: 23765 - DNA, 20 bp, synthetic construct
  source 1..20: mol_type = other DNA
gctacaggccctgccgccct

SEQ ID NO: 23766 - DNA, 20 bp, synthetic construct
  source 1..20: mol_type = other DNA
ggatcaggcgcccgagggcc

SEQ ID NO: 23767 - DNA, 20 bp, synthetic construct
  source 1..20: mol_type = other DNA
ttagatgaattaaataatct

SEQ ID NO: 23768 - DNA, 20 bp, synthetic construct
  source 1..20: mol_type = other DNA
gagaacactgctccaggtct

SEQ ID NO: 23769 - DNA, 20 bp, synthetic construct
  source 1..20: mol_type = other DNA
tgtaaaaccaatgtgctgcc

SEQ ID NO: 23770 - DNA, 20 bp, synthetic construct
  source 1..20: mol_type = other DNA
catgacaccagtaggttcct

SEQ ID NO: 23771 - DNA, 20 bp, synthetic construct
  source 1..20: mol_type = other DNA
cttcagcttctcagcccccc

SEQ ID NO: 23772 - DNA, 20 bp, synthetic construct
  source 1..20: mol_type = other DNA
aaacatccagctgtgaccac

SEQ ID NO: 23773 - DNA, 20 bp, synthetic construct
  source 1..20: mol_type = other DNA
tagtcatttctatttaaggg

SEQ ID NO: 23774 - DNA, 20 bp, synthetic construct
  source 1..20: mol_type = other DNA
gcatcacacattattatctc

SEQ ID NO: 23775 - DNA, 20 bp, synthetic construct
  source 1..20: mol_type = other DNA
aagtggaaaatcagtaacgt

SEQ ID NO: 23776 - DNA, 20 bp, synthetic construct
  source 1..20: mol_type = other DNA
gcagtgcatgtaaaagatgc

SEQ ID NO: 23777 - DNA, 20 bp, synthetic construct
  source 1..20: mol_type = other DNA
cgagggccatgtcgctgttg

SEQ ID NO: 23778 - DNA, 20 bp, synthetic construct
  source 1..20: mol_type = other DNA
caagctcaaagctcctttgg

SEQ ID NO: 23779 - DNA, 20 bp, synthetic construct
  source 1..20: mol_type = other DNA
ttggagggcttgacatctgc

SEQ ID NO: 23780 - DNA, 20 bp, synthetic construct
  source 1..20: mol_type = other DNA
gcacagagtaatgagtcccc

SEQ ID NO: 23781 - DNA, 20 bp, synthetic construct
  source 1..20: mol_type = other DNA
gcccacgaaggagttggcca

SEQ ID NO: 23782 - DNA, 20 bp, synthetic construct
  source 1..20: mol_type = other DNA
tgcaactctccgtacatcgt

SEQ ID NO: 23783 - DNA, 20 bp, synthetic construct
  source 1..20: mol_type = other DNA
ccaggccaaggacccccggg

SEQ ID NO: 23784 - DNA, 20 bp, synthetic construct
  source 1..20: mol_type = other DNA
tggagggcttgacatctgca

SEQ ID NO: 23785 - DNA, 20 bp, synthetic construct
  source 1..20: mol_type = other DNA
gcagaaggtgggagaactga

SEQ ID NO: 23786 - DNA, 20 bp, synthetic construct
  source 1..20: mol_type = other DNA
ccttttattacctagaggaa

SEQ ID NO: 23787 - DNA, 20 bp, synthetic construct
  source 1..20: mol_type = other DNA
gctcccttatgatctggttc

SEQ ID NO: 23788 - DNA, 20 bp, synthetic construct
  source 1..20: mol_type = other DNA
atgcggctgagaccccaccc

SEQ ID NO: 23789 - DNA, 20 bp, synthetic construct
  source 1..20: mol_type = other DNA
caacaactcaaaaattgcca

SEQ ID NO: 23790 - DNA, 20 bp, synthetic construct
  source 1..20: mol_type = other DNA
cctgcagccagaaagactcc

SEQ ID NO: 23791 - DNA, 20 bp, synthetic construct
  source 1..20: mol_type = other DNA
actccactgggcagttttgg

SEQ ID NO: 23792 - DNA, 20 bp, synthetic construct
  source 1..20: mol_type = other DNA
tatgatctggttccggattg

SEQ ID NO: 23793 - DNA, 20 bp, synthetic construct
  source 1..20: mol_type = other DNA
tccatggccaactccttcgt

SEQ ID NO: 23794 - DNA, 20 bp, synthetic construct
  source 1..20: mol_type = other DNA
cagtcagacatctggagcat

SEQ ID NO: 23795 - DNA, 20 bp, synthetic construct
  source 1..20: mol_type = other DNA
cacagagcttgatctcccca

SEQ ID NO: 23796 - DNA, 20 bp, synthetic construct
  source 1..20: mol_type = other DNA
acagagcttgatctccccac

SEQ ID NO: 23797 - DNA, 20 bp, synthetic construct
  source 1..20: mol_type = other DNA
atgatctggttccggattgc

SEQ ID NO: 23798 - DNA, 20 bp, synthetic construct
  source 1..20: mol_type = other DNA
tctccccacgggagttgact

SEQ ID NO: 23799 - DNA, 20 bp, synthetic construct
  source 1..20: mol_type = other DNA
gtgcaactctccgtacatcg

SEQ ID NO: 23800 - DNA, 20 bp, synthetic construct
  source 1..20: mol_type = other DNA
cgggcagctcatcgactcca

SEQ ID NO: 23801 - DNA, 20 bp, synthetic construct
  source 1..20: mol_type = other DNA
gtaggaccttgtgcccacga

SEQ ID NO: 23802 - DNA, 20 bp, synthetic construct
  source 1..20: mol_type = other DNA
aactcaaaaattgccatggg

SEQ ID NO: 23803 - DNA, 20 bp, synthetic construct
  source 1..20: mol_type = other DNA
gaccaggccagaaggcttgt

SEQ ID NO: 23804 - DNA, 20 bp, synthetic construct
  source 1..20: mol_type = other DNA
tagacgccagcagcatgggt

SEQ ID NO: 23805 - DNA, 20 bp, synthetic construct
  source 1..20: mol_type = other DNA
gcagtcagacatctggagca

SEQ ID NO: 23806 - DNA, 20 bp, synthetic construct
  source 1..20: mol_type = other DNA
ggccttgcagaagaagctgg

SEQ ID NO: 23807 - DNA, 20 bp, synthetic construct
  source 1..20: mol_type = other DNA
tggcgagatcagtatctgca

SEQ ID NO: 23808 - DNA, 20 bp, synthetic construct
  source 1..20: mol_type = other DNA
gcagcagcgaaagcgccttg

SEQ ID NO: 23809 - DNA, 20 bp, synthetic construct
  source 1..20: mol_type = other DNA
tctgtgactttggggtcagc

SEQ ID NO: 23810 - DNA, 20 bp, synthetic construct
  source 1..20: mol_type = other DNA
ccatagaagcccacgatgta

SEQ ID NO: 23811 - DNA, 20 bp, synthetic construct
  source 1..20: mol_type = other DNA
tgcaactcgccgtacatcgt

SEQ ID NO: 23812 - DNA, 20 bp, synthetic construct
  source 1..20: mol_type = other DNA
ttggagggcttcacatctgg

SEQ ID NO: 23813 - DNA, 20 bp, synthetic construct
  source 1..20: mol_type = other DNA
cagtcggacatctggagcat

SEQ ID NO: 23814 - DNA, 20 bp, synthetic construct
  source 1..20: mol_type = other DNA
ggacctgcagaagaagctgg

SEQ ID NO: 23815 - DNA, 20 bp, synthetic construct
  source 1..20: mol_type = other DNA
ggcagcttaggaggtggctg

SEQ ID NO: 23816 - DNA, 20 bp, synthetic construct
  source 1..20: mol_type = other DNA
atgttggagggcttcacatc

SEQ ID NO: 23817 - DNA, 20 bp, synthetic construct
  source 1..20: mol_type = other DNA
ctcggcgatggtagggttga

SEQ ID NO: 23818 - DNA, 20 bp, synthetic construct
  source 1..20: mol_type = other DNA
gggcctgtccctggtggagc

SEQ ID NO: 23819 - DNA, 20 bp, synthetic construct
  source 1..20: mol_type = other DNA
gcagtcggacatctggagca

SEQ ID NO: 23820 - DNA, 20 bp, synthetic construct
  source 1..20: mol_type = other DNA
ccgtagaagcccacgatgta

SEQ ID NO: 23821 - DNA, 20 bp, synthetic construct
  source 1..20: mol_type = other DNA
caagcacccagcagcacctg

SEQ ID NO: 23822 - DNA, 20 bp, synthetic construct
  source 1..20: mol_type = other DNA
caagccccggagaacctgca

SEQ ID NO: 23823 - DNA, 20 bp, synthetic construct
  source 1..20: mol_type = other DNA
ggagaacctgcaggggagcg

SEQ ID NO: 23824 - DNA, 20 bp, synthetic construct
  source 1..20: mol_type = other DNA
ccagggcccgcacgatctgg

SEQ ID NO: 23825 - DNA, 20 bp, synthetic construct
  source 1..20: mol_type = other DNA
cgggagtccaggttccgggg

SEQ ID NO: 23826 - DNA, 20 bp, synthetic construct
  source 1..20: mol_type = other DNA
gcccggatccgctgcaggga

SEQ ID NO: 23827 - DNA, 20 bp, synthetic construct
  source 1..20: mol_type = other DNA
gtggatctgcatggagctca

SEQ ID NO: 23828 - DNA, 20 bp, synthetic construct
  source 1..20: mol_type = other DNA
tggcatcagtggctacttgg

SEQ ID NO: 23829 - DNA, 20 bp, synthetic construct
  source 1..20: mol_type = other DNA
cacgtggggttgggtgcggg

SEQ ID NO: 23830 - DNA, 20 bp, synthetic construct
  source 1..20: mol_type = other DNA
ccgtgcgcatgttgatgtcc

SEQ ID NO: 23831 - DNA, 20 bp, synthetic construct
  source 1..20: mol_type = other DNA
gggtcccccaggactcgtaa

SEQ ID NO: 23832 - DNA, 20 bp, synthetic construct
  source 1..20: mol_type = other DNA
gttccagcagctgaagcagg

SEQ ID NO: 23833 - DNA, 20 bp, synthetic construct
  source 1..20: mol_type = other DNA
atggccatctcaatctgcag

SEQ ID NO: 23834 - DNA, 20 bp, synthetic construct
  source 1..20: mol_type = other DNA
ctacactgtcaccttctacg

SEQ ID NO: 23835 - DNA, 20 bp, synthetic construct
  source 1..20: mol_type = other DNA
ataaataccgggtgtttatt

SEQ ID NO: 23836 - DNA, 20 bp, synthetic construct
  source 1..20: mol_type = other DNA
tacaaattgacatgcagtgg

SEQ ID NO: 23837 - DNA, 20 bp, synthetic construct
  source 1..20: mol_type = other DNA
cattgataattcccactcaa

SEQ ID NO: 23838 - DNA, 20 bp, synthetic construct
  source 1..20: mol_type = other DNA
ctacaaaggggacatattaa

SEQ ID NO: 23839 - DNA, 20 bp, synthetic construct
  source 1..20: mol_type = other DNA
attacaatctcttcattgaa

SEQ ID NO: 23840 - DNA, 20 bp, synthetic construct
  source 1..20: mol_type = other DNA
agagaaaatggcggcggcgg

SEQ ID NO: 23841 - DNA, 20 bp, synthetic construct
  source 1..20: mol_type = other DNA
ttccccgtcgccggagcccg

SEQ ID NO: 23842 - DNA, 20 bp, synthetic construct
  source 1..20: mol_type = other DNA
acatacaaattgacatgcag

SEQ ID NO: 23843 - DNA, 20 bp, synthetic construct
  source 1..20: mol_type = other DNA
aaaaactttaaagaattttg

SEQ ID NO: 23844 - DNA, 20 bp, synthetic construct
  source 1..20: mol_type = other DNA
aatgatcagggagaaactga

SEQ ID NO: 23845 - DNA, 20 bp, synthetic construct
  source 1..20: mol_type = other DNA
cccgctgcgtccgcgggctc

SEQ ID NO: 23846 - DNA, 20 bp, synthetic construct
  source 1..20: mol_type = other DNA
tgagtctccaggagaggtcc

SEQ ID NO: 23847 - DNA, 20 bp, synthetic construct
  source 1..20: mol_type = other DNA
tgtgggaactggaactttaa

SEQ ID NO: 23848 - DNA, 20 bp, synthetic construct
  source 1..20: mol_type = other DNA
aataaataccgggtgtttat

SEQ ID NO: 23849 - DNA, 20 bp, synthetic construct
  source 1..20: mol_type = other DNA
ggatttcattaataatatct

SEQ ID NO: 23850 - DNA, 20 bp, synthetic construct
  source 1..20: mol_type = other DNA
gcagctggtgagagagtgta

SEQ ID NO: 23851 - DNA, 20 bp, synthetic construct
  source 1..20: mol_type = other DNA
gtcaaggtttggcagattac

SEQ ID NO: 23852 - DNA, 20 bp, synthetic construct
  source 1..20: mol_type = other DNA
atgaggagaaagaatatcat

SEQ ID NO: 23853 - DNA, 20 bp, synthetic construct
  source 1..20: mol_type = other DNA
aggatttcattaataatatc

SEQ ID NO: 23854 - DNA, 20 bp, synthetic construct
  source 1..20: mol_type = other DNA
catgaaagaggtgagtcacc

SEQ ID NO: 23855 - DNA, 20 bp, synthetic construct
  source 1..20: mol_type = other DNA
taatgaccataagactatca

SEQ ID NO: 23856 - DNA, 20 bp, synthetic construct
  source 1..20: mol_type = other DNA
ttcatctgtgcaaacctgtg

SEQ ID NO: 23857 - DNA, 20 bp, synthetic construct
  source 1..20: mol_type = other DNA
taaaagattatccacctggg

SEQ ID NO: 23858 - DNA, 20 bp, synthetic construct
  source 1..20: mol_type = other DNA
tttaaactatgcgatgcttg

SEQ ID NO: 23859 - DNA, 20 bp, synthetic construct
  source 1..20: mol_type = other DNA
ggcttattgagatccacatc

SEQ ID NO: 23860 - DNA, 20 bp, synthetic construct
  source 1..20: mol_type = other DNA
caaacgaatggtcgaggagc

SEQ ID NO: 23861 - DNA, 20 bp, synthetic construct
  source 1..20: mol_type = other DNA
tgggattacctttaatgtca

SEQ ID NO: 23862 - DNA, 20 bp, synthetic construct
  source 1..20: mol_type = other DNA
aaaggagttggaaagtagta

SEQ ID NO: 23863 - DNA, 20 bp, synthetic construct
  source 1..20: mol_type = other DNA
cggtggcggcggctcctcca

SEQ ID NO: 23864 - DNA, 20 bp, synthetic construct
  source 1..20: mol_type = other DNA
ggtggtggcggcggcggcgg

SEQ ID NO: 23865 - DNA, 20 bp, synthetic construct
  source 1..20: mol_type = other DNA
tgcttatggtcagaagcagt

SEQ ID NO: 23866 - DNA, 20 bp, synthetic construct
  source 1..20: mol_type = other DNA
aaacatcagaggaataatgt

SEQ ID NO: 23867 - DNA, 20 bp, synthetic construct
  source 1..20: mol_type = other DNA
atgtgaacatgtggtccacg

SEQ ID NO: 23868 - DNA, 20 bp, synthetic construct
  source 1..20: mol_type = other DNA
agaaatgcagtgctgtgtcg

SEQ ID NO: 23869 - DNA, 20 bp, synthetic construct
  source 1..20: mol_type = other DNA
gtggtagaggtacaagaccc

SEQ ID NO: 23870 - DNA, 20 bp, synthetic construct
  source 1..20: mol_type = other DNA
gaaatcgaatctgtaaagtg

SEQ ID NO: 23871 - DNA, 20 bp, synthetic construct
  source 1..20: mol_type = other DNA
cccggtgtcgacgctgatgc

SEQ ID NO: 23872 - DNA, 20 bp, synthetic construct
  source 1..20: mol_type = other DNA
tcacttcaccaggcatggtc

SEQ ID NO: 23873 - DNA, 20 bp, synthetic construct
  source 1..20: mol_type = other DNA
gagccttgcaaaggggaagt

SEQ ID NO: 23874 - DNA, 20 bp, synthetic construct
  source 1..20: mol_type = other DNA
ccggctaggaaagagctgca

SEQ ID NO: 23875 - DNA, 20 bp, synthetic construct
  source 1..20: mol_type = other DNA
tccgtctgcttggctccccc

SEQ ID NO: 23876 - DNA, 20 bp, synthetic construct
  source 1..20: mol_type = other DNA
ccaatgcaccgcacaggaac

SEQ ID NO: 23877 - DNA, 20 bp, synthetic construct
  source 1..20: mol_type = other DNA
aggagcaggtgctggtctgg

SEQ ID NO: 23878 - DNA, 20 bp, synthetic construct
  source 1..20: mol_type = other DNA
cccaggagcaggtgctggtc

SEQ ID NO: 23879 - DNA, 20 bp, synthetic construct
  source 1..20: mol_type = other DNA
ggtgaagatggagcctggtg

SEQ ID NO: 23880 - DNA, 20 bp, synthetic construct
  source 1..20: mol_type = other DNA
tctttcctagccggactacg

SEQ ID NO: 23881 - DNA, 20 bp, synthetic construct
  source 1..20: mol_type = other DNA
gtggggctgaaacacaaaga

SEQ ID NO: 23882 - DNA, 20 bp, synthetic construct
  source 1..20: mol_type = other DNA
cgtgccactgcactccagcc

SEQ ID NO: 23883 - DNA, 20 bp, synthetic construct
  source 1..20: mol_type = other DNA
tcatcatctgtgaggagggc

SEQ ID NO: 23884 - DNA, 20 bp, synthetic construct
  source 1..20: mol_type = other DNA
gttcgatggccgtgatgccc

SEQ ID NO: 23885 - DNA, 20 bp, synthetic construct
  source 1..20: mol_type = other DNA
ctcacgccgatgcacacagc

SEQ ID NO: 23886 - DNA, 20 bp, synthetic construct
  source 1..20: mol_type = other DNA
ccaccaaacagcccccgtcc

SEQ ID NO: 23887 - DNA, 20 bp, synthetic construct
  source 1..20: mol_type = other DNA
tcatagcatccttggcctgc

SEQ ID NO: 23888 - DNA, 20 bp, synthetic construct
  source 1..20: mol_type = other DNA
caaagtcagctggaagcaga

SEQ ID NO: 23889 - DNA, 20 bp, synthetic construct
  source 1..20: mol_type = other DNA
atccgccgagggatagcagg

SEQ ID NO: 23890 - DNA, 20 bp, synthetic construct
  source 1..20: mol_type = other DNA
gctcccccaggtatgttgtg

SEQ ID NO: 23891 - DNA, 20 bp, synthetic construct
  source 1..20: mol_type = other DNA
ggtcccctgtgctctgtttg

SEQ ID NO: 23892 - DNA, 20 bp, synthetic construct
  source 1..20: mol_type = other DNA
cagaccagcacctgctcctg

SEQ ID NO: 23893 - DNA, 20 bp, synthetic construct
  source 1..20: mol_type = other DNA
gggctgctggtggatggggg

SEQ ID NO: 23894 - DNA, 20 bp, synthetic construct
  source 1..20: mol_type = other DNA
actcacagaagaagatacac

SEQ ID NO: 23895 - DNA, 20 bp, synthetic construct
  source 1..20: mol_type = other DNA
tctacctgggtcacctgcac

SEQ ID NO: 23896 - DNA, 20 bp, synthetic construct
  source 1..20: mol_type = other DNA
ccccaggtatgttgtggggt

SEQ ID NO: 23897 - DNA, 20 bp, synthetic construct
  source 1..20: mol_type = other DNA
ggagctggtaccttgccagt

SEQ ID NO: 23898 - DNA, 20 bp, synthetic construct
  source 1..20: mol_type = other DNA
ggctcgagacaaggtgtcag

SEQ ID NO: 23899 - DNA, 20 bp, synthetic construct
  source 1..20: mol_type = other DNA
gggaggaggaggttgcagtg

SEQ ID NO: 23900 - DNA, 20 bp, synthetic construct
  source 1..20: mol_type = other DNA
ctttcctagccggactacgt

SEQ ID NO: 23901 - DNA, 20 bp, synthetic construct
  source 1..20: mol_type = other DNA
taggaaagagctgcagggaa

SEQ ID NO: 23902 - DNA, 20 bp, synthetic construct
  source 1..20: mol_type = other DNA
ccccagagagctggagcggt

SEQ ID NO: 23903 - DNA, 20 bp, synthetic construct
  source 1..20: mol_type = other DNA
gtgctctgtttggggggagt

SEQ ID NO: 23904 - DNA, 20 bp, synthetic construct
  source 1..20: mol_type = other DNA
tccagctgactttggcatct

SEQ ID NO: 23905 - DNA, 20 bp, synthetic construct
  source 1..20: mol_type = other DNA
tccaatgcaccgcacaggaa

SEQ ID NO: 23906 - DNA, 20 bp, synthetic construct
  source 1..20: mol_type = other DNA
gctgggataccagttgatgc

SEQ ID NO: 23907 - DNA, 20 bp, synthetic construct
  source 1..20: mol_type = other DNA
aacatcctcatcaatgatgc

SEQ ID NO: 23908 - DNA, 20 bp, synthetic construct
  source 1..20: mol_type = other DNA
gcacctgctgcgggccgcac

SEQ ID NO: 23909 - DNA, 20 bp, synthetic construct
  source 1..20: mol_type = other DNA
ataccagttgatgctggcgg

SEQ ID NO: 23910 - DNA, 20 bp, synthetic construct
  source 1..20: mol_type = other DNA
ctgtagctcggccagttcga

SEQ ID NO: 23911 - DNA, 20 bp, synthetic construct
  source 1..20: mol_type = other DNA
ctgcccccaggagcaggtgc

SEQ ID NO: 23912 - DNA, 20 bp, synthetic construct
  source 1..20: mol_type = other DNA
gtgcaaataggccagtccct

SEQ ID NO: 23913 - DNA, 20 bp, synthetic construct
  source 1..20: mol_type = other DNA
ggtagaggaagatatggtga

SEQ ID NO: 23914 - DNA, 20 bp, synthetic construct
  source 1..20: mol_type = other DNA
ttagctccctgggaatgaga

SEQ ID NO: 23915 - DNA, 20 bp, synthetic construct
  source 1..20: mol_type = other DNA
gcccccaccgcctactggca

SEQ ID NO: 23916 - DNA, 20 bp, synthetic construct
  source 1..20: mol_type = other DNA
ctctacctgggtcacctgca

SEQ ID NO: 23917 - DNA, 20 bp, synthetic construct
  source 1..20: mol_type = other DNA
cactgcaacctcctcctccc

SEQ ID NO: 23918 - DNA, 20 bp, synthetic construct
  source 1..20: mol_type = other DNA
cagattgggtgagtaaggct

SEQ ID NO: 23919 - DNA, 20 bp, synthetic construct
  source 1..20: mol_type = other DNA
catctcacggtgttggctgg

SEQ ID NO: 23920 - DNA, 20 bp, synthetic construct
  source 1..20: mol_type = other DNA
aagatggtgaagatggagcc

SEQ ID NO: 23921 - DNA, 20 bp, synthetic construct
  source 1..20: mol_type = other DNA
gtaccttgccagtaggcggt

SEQ ID NO: 23922 - DNA, 20 bp, synthetic construct
  source 1..20: mol_type = other DNA
actggtgagtggcgcccagc

SEQ ID NO: 23923 - DNA, 20 bp, synthetic construct
  source 1..20: mol_type = other DNA
taccttgccagtaggcggtg

SEQ ID NO: 23924 - DNA, 20 bp, synthetic construct
  source 1..20: mol_type = other DNA
aggctcgagacaaggtgtca

SEQ ID NO: 23925 - DNA, 20 bp, synthetic construct
  source 1..20: mol_type = other DNA
acgacgtggacatgtaagtg

SEQ ID NO: 23926 - DNA, 20 bp, synthetic construct
  source 1..20: mol_type = other DNA
gccgagatgccaaagtcagc

SEQ ID NO: 23927 - DNA, 20 bp, synthetic construct
  source 1..20: mol_type = other DNA
gagggttacactgagcatct

SEQ ID NO: 23928 - DNA, 20 bp, synthetic construct
  source 1..20: mol_type = other DNA
cctccccagcatcattgatg

SEQ ID NO: 23929 - DNA, 20 bp, synthetic construct
  source 1..20: mol_type = other DNA
gggataccagttgatgctgg

SEQ ID NO: 23930 - DNA, 20 bp, synthetic construct
  source 1..20: mol_type = other DNA
agcgatggggtttcctgctc

SEQ ID NO: 23931 - DNA, 20 bp, synthetic construct
  source 1..20: mol_type = other DNA
acgagggtcctgggagcatg

SEQ ID NO: 23932 - DNA, 20 bp, synthetic construct
  source 1..20: mol_type = other DNA
cagggacatcaaggtggtct

SEQ ID NO: 23933 - DNA, 20 bp, synthetic construct
  source 1..20: mol_type = other DNA
ccccatgaccgaagcggtgg

SEQ ID NO: 23934 - DNA, 20 bp, synthetic construct
  source 1..20: mol_type = other DNA
atcaccagagataactccca

SEQ ID NO: 23935 - DNA, 20 bp, synthetic construct
  source 1..20: mol_type = other DNA
gagctgcccgctgtgtgcat

SEQ ID NO: 23936 - DNA, 20 bp, synthetic construct
  source 1..20: mol_type = other DNA
catccctgggggcctgagct

SEQ ID NO: 23937 - DNA, 20 bp, synthetic construct
  source 1..20: mol_type = other DNA
ggcactgaagatggtgaaga

SEQ ID NO: 23938 - DNA, 20 bp, synthetic construct
  source 1..20: mol_type = other DNA
cttccacaggcctgtagtgg

SEQ ID NO: 23939 - DNA, 20 bp, synthetic construct
  source 1..20: mol_type = other DNA
gtgggaacagcacctgctgc

SEQ ID NO: 23940 - DNA, 20 bp, synthetic construct
  source 1..20: mol_type = other DNA
tccagattagctatgtctgc

SEQ ID NO: 23941 - DNA, 20 bp, synthetic construct
  source 1..20: mol_type = other DNA
ggcctccaccgcttcggtca

SEQ ID NO: 23942 - DNA, 20 bp, synthetic construct
  source 1..20: mol_type = other DNA
gccaagcagacggaaagtga

SEQ ID NO: 23943 - DNA, 20 bp, synthetic construct
  source 1..20: mol_type = other DNA
ttgtggaaggcagccgacct

SEQ ID NO: 23944 - DNA, 20 bp, synthetic construct
  source 1..20: mol_type = other DNA
gtcccctgtgctctgtttgg

SEQ ID NO: 23945 - DNA, 20 bp, synthetic construct
  source 1..20: mol_type = other DNA
ccttgtctcgagccttgcaa

SEQ ID NO: 23946 - DNA, 20 bp, synthetic construct
  source 1..20: mol_type = other DNA
tcctcaatgtccccaatgga

SEQ ID NO: 23947 - DNA, 20 bp, synthetic construct
  source 1..20: mol_type = other DNA
acatcctcatcaatgatgct

SEQ ID NO: 23948 - DNA, 20 bp, synthetic construct
  source 1..20: mol_type = other DNA
cccggtcagcagcgcgaaca

SEQ ID NO: 23949 - DNA, 20 bp, synthetic construct
  source 1..20: mol_type = other DNA
cgtgcaggtgacccaggtag

SEQ ID NO: 23950 - DNA, 20 bp, synthetic construct
  source 1..20: mol_type = other DNA
aaggctcgagacaaggtgtc

SEQ ID NO: 23951 - DNA, 20 bp, synthetic construct
  source 1..20: mol_type = other DNA
tacagcctcctcgagacctc

SEQ ID NO: 23952 - DNA, 20 bp, synthetic construct
  source 1..20: mol_type = other DNA
tgatgtctccacccttcaga

SEQ ID NO: 23953 - DNA, 20 bp, synthetic construct
  source 1..20: mol_type = other DNA
ctcttcctcatgaccaagag

SEQ ID NO: 23954 - DNA, 20 bp, synthetic construct
  source 1..20: mol_type = other DNA
gccggcaagttttcaatatg

SEQ ID NO: 23955 - DNA, 20 bp, synthetic construct
  source 1..20: mol_type = other DNA
gaccttgggaagaagaagcc

SEQ ID NO: 23956 - DNA, 20 bp, synthetic construct
  source 1..20: mol_type = other DNA
atatgaggatttccttctga

SEQ ID NO: 23957 - DNA, 20 bp, synthetic construct
  source 1..20: mol_type = other DNA
tgatccgccgagggatagca

SEQ ID NO: 23958 - DNA, 20 bp, synthetic construct
  source 1..20: mol_type = other DNA
cccggcagcctttggtgtcc

SEQ ID NO: 23959 - DNA, 20 bp, synthetic construct
  source 1..20: mol_type = other DNA
ttgccggcacgccaacatcg

SEQ ID NO: 23960 - DNA, 20 bp, synthetic construct
  source 1..20: mol_type = other DNA
ccagagtgagggttctgaga

SEQ ID NO: 23961 - DNA, 20 bp, synthetic construct
  source 1..20: mol_type = other DNA
tccttacctggagcacttcc

SEQ ID NO: 23962 - DNA, 20 bp, synthetic construct
  source 1..20: mol_type = other DNA
gaacggaaagagaccagagc

SEQ ID NO: 23963 - DNA, 20 bp, synthetic construct
  source 1..20: mol_type = other DNA
caccgacttccccggccgcc

SEQ ID NO: 23964 - DNA, 20 bp, synthetic construct
  source 1..20: mol_type = other DNA
ccagtccctggggagaaggg

SEQ ID NO: 23965 - DNA, 20 bp, synthetic construct
  source 1..20: mol_type = other DNA
agcatctcacggtgttggct

SEQ ID NO: 23966 - DNA, 20 bp, synthetic construct
  source 1..20: mol_type = other DNA
cggctgggtggcggcacgta

SEQ ID NO: 23967 - DNA, 20 bp, synthetic construct
  source 1..20: mol_type = other DNA
gaggtcagattgggtgagta

SEQ ID NO: 23968 - DNA, 20 bp, synthetic construct
  source 1..20: mol_type = other DNA
tatgaggatttccttctgaa

SEQ ID NO: 23969 - DNA, 20 bp, synthetic construct
  source 1..20: mol_type = other DNA
agacaaggtgtcaggggacc

SEQ ID NO: 23970 - DNA, 20 bp, synthetic construct
  source 1..20: mol_type = other DNA
tccagaccagcacctgctcc

SEQ ID NO: 23971 - DNA, 20 bp, synthetic construct
  source 1..20: mol_type = other DNA
tacacccacgtagtccggct

SEQ ID NO: 23972 - DNA, 20 bp, synthetic construct
  source 1..20: mol_type = other DNA
ggaagcatggagtgcaggtg

SEQ ID NO: 23973 - DNA, 20 bp, synthetic construct
  source 1..20: mol_type = other DNA
tggcatctcggcccagattg

SEQ ID NO: 23974 - DNA, 20 bp, synthetic construct
  source 1..20: mol_type = other DNA
gctcacgccgatgcacacag

SEQ ID NO: 23975 - DNA, 20 bp, synthetic construct
  source 1..20: mol_type = other DNA
cctaccatgggagttatctc

SEQ ID NO: 23976 - DNA, 20 bp, synthetic construct
  source 1..20: mol_type = other DNA
gccgtgggtctgtgcaggga

SEQ ID NO: 23977 - DNA, 20 bp, synthetic construct
  source 1..20: mol_type = other DNA
caccatatcttcctctacct

SEQ ID NO: 23978 - DNA, 20 bp, synthetic construct
  source 1..20: mol_type = other DNA
cgtccgttgtcctgcttcag

SEQ ID NO: 23979 - DNA, 20 bp, synthetic construct
  source 1..20: mol_type = other DNA
gcaggtgtgggctctaggct

SEQ ID NO: 23980 - DNA, 20 bp, synthetic construct
  source 1..20: mol_type = other DNA
ggatccccagagagctggag

SEQ ID NO: 23981 - DNA, 20 bp, synthetic construct
  source 1..20: mol_type = other DNA
tacctgaatgggcggtgagg

SEQ ID NO: 23982 - DNA, 20 bp, synthetic construct
  source 1..20: mol_type = other DNA
ccaaagtcagctggaagcag

SEQ ID NO: 23983 - DNA, 20 bp, synthetic construct
  source 1..20: mol_type = other DNA
aggccagtccctggggagaa

SEQ ID NO: 23984 - DNA, 20 bp, synthetic construct
  source 1..20: mol_type = other DNA
gtaccactgaagcaggacaa

SEQ ID NO: 23985 - DNA, 20 bp, synthetic construct
  source 1..20: mol_type = other DNA
ccagaccagcacctgctcct

SEQ ID NO: 23986 - DNA, 20 bp, synthetic construct
  source 1..20: mol_type = other DNA
cagagtgagggttctgagag

SEQ ID NO: 23987 - DNA, 20 bp, synthetic construct
  source 1..20: mol_type = other DNA
taggccagtccctggggaga

SEQ ID NO: 23988 - DNA, 20 bp, synthetic construct
  source 1..20: mol_type = other DNA
ggttacactgagcatcttgg

SEQ ID NO: 23989 - DNA, 20 bp, synthetic construct
  source 1..20: mol_type = other DNA
tccatgtgccgccctagggt

SEQ ID NO: 23990 - DNA, 20 bp, synthetic construct
  source 1..20: mol_type = other DNA
cttaccttggggggaagtgg

SEQ ID NO: 23991 - DNA, 20 bp, synthetic construct
  source 1..20: mol_type = other DNA
cctccaccgcttcggtcatg

SEQ ID NO: 23992 - DNA, 20 bp, synthetic construct
  source 1..20: mol_type = other DNA
tttcagccccacccctgcag

SEQ ID NO: 23993 - DNA, 20 bp, synthetic construct
  source 1..20: mol_type = other DNA
taccccctgctatccctcgg

SEQ ID NO: 23994 - DNA, 20 bp, synthetic construct
  source 1..20: mol_type = other DNA
cttcaggccttctggaagca

SEQ ID NO: 23995 - DNA, 20 bp, synthetic construct
  source 1..20: mol_type = other DNA
acccacggcctccaccgctt

SEQ ID NO: 23996 - DNA, 20 bp, synthetic construct
  source 1..20: mol_type = other DNA
ggctgggtggcggcacgtat

SEQ ID NO: 23997 - DNA, 20 bp, synthetic construct
  source 1..20: mol_type = other DNA
ccctctcagaaccctcactc

SEQ ID NO: 23998 - DNA, 20 bp, synthetic construct
  source 1..20: mol_type = other DNA
cccccaggtatgttgtgggg

SEQ ID NO: 23999 - DNA, 20 bp, synthetic construct
  source 1..20: mol_type = other DNA
ggccgtgctgtggatccgga

SEQ ID NO: 24000 - DNA, 20 bp, synthetic construct
  source 1..20: mol_type = other DNA
ctcagctcctgtagcagcta

SEQ ID NO: 24001 - DNA, 20 bp, synthetic construct
  source 1..20: mol_type = other DNA
ctgtggggctggttctctcc

SEQ ID NO: 24002 - DNA, 20 bp, synthetic construct
  source 1..20: mol_type = other DNA
tcagattgggtgagtaaggc

SEQ ID NO: 24003 - DNA, 20 bp, synthetic construct
  source 1..20: mol_type = other DNA
acagggacatcaaggtggtc

SEQ ID NO: 24004 - DNA, 20 bp, synthetic construct
  source 1..20: mol_type = other DNA
ctatgacctgctacagcggc

SEQ ID NO: 24005 - DNA, 20 bp, synthetic construct
  source 1..20: mol_type = other DNA
ctgcactccatgcttccaga

SEQ ID NO: 24006 - DNA, 20 bp, synthetic construct
  source 1..20: mol_type = other DNA
cattacctgaatgggcggtg

SEQ ID NO: 24007 - DNA, 20 bp, synthetic construct
  source 1..20: mol_type = other DNA
tcaccatatcttcctctacc

SEQ ID NO: 24008 - DNA, 20 bp, synthetic construct
  source 1..20: mol_type = other DNA
cccagctactcgggaggctg

SEQ ID NO: 24009 - DNA, 20 bp, synthetic construct
  source 1..20: mol_type = other DNA
ggctgccgggcgtgctgtgt

SEQ ID NO: 24010 - DNA, 20 bp, synthetic construct
  source 1..20: mol_type = other DNA
cctctcaggtaggcaggcgt

SEQ ID NO: 24011 - DNA, 20 bp, synthetic construct
  source 1..20: mol_type = other DNA
agaccagcacctgctcctgg

SEQ ID NO: 24012 - DNA, 20 bp, synthetic construct
  source 1..20: mol_type = other DNA
cacgacagcagtctgcatct

SEQ ID NO: 24013 - DNA, 20 bp, synthetic construct
  source 1..20: mol_type = other DNA
gccgctgtagcaggtcatag

SEQ ID NO: 24014 - DNA, 20 bp, synthetic construct
  source 1..20: mol_type = other DNA
ctctcaggtaggcaggcgtg

SEQ ID NO: 24015 - DNA, 20 bp, synthetic construct
  source 1..20: mol_type = other DNA
gcaggaatttgttcatgggc

SEQ ID NO: 24016 - DNA, 20 bp, synthetic construct
  source 1..20: mol_type = other DNA
tcagtttgtcaagaagatcc

SEQ ID NO: 24017 - DNA, 20 bp, synthetic construct
  source 1..20: mol_type = other DNA
ctgagcatcttggtggcgct

SEQ ID NO: 24018 - DNA, 20 bp, synthetic construct
  source 1..20: mol_type = other DNA
agcctggtgaggagggaaca

SEQ ID NO: 24019 - DNA, 20 bp, synthetic construct
  source 1..20: mol_type = other DNA
gacaagcaggaatttgttca

SEQ ID NO: 24020 - DNA, 20 bp, synthetic construct
  source 1..20: mol_type = other DNA
gttagctccctgggaatgag

SEQ ID NO: 24021 - DNA, 20 bp, synthetic construct
  source 1..20: mol_type = other DNA
agggacatcaaggtggtctg

SEQ ID NO: 24022 - DNA, 20 bp, synthetic construct
  source 1..20: mol_type = other DNA
gggcatcacggccatcgaac

SEQ ID NO: 24023 - DNA, 20 bp, synthetic construct
  source 1..20: mol_type = other DNA
ctgtgtgacatctggtccct

SEQ ID NO: 24024 - DNA, 20 bp, synthetic construct
  source 1..20: mol_type = other DNA
ggtccacgacgtccatccct

SEQ ID NO: 24025 - DNA, 20 bp, synthetic construct
  source 1..20: mol_type = other DNA
caaggttagagaaaggacaa

SEQ ID NO: 24026 - DNA, 20 bp, synthetic construct
  source 1..20: mol_type = other DNA
cacatccctccaccaagggt

SEQ ID NO: 24027 - DNA, 20 bp, synthetic construct
  source 1..20: mol_type = other DNA
gctaatctggagctctgaca

SEQ ID NO: 24028 - DNA, 20 bp, synthetic construct
  source 1..20: mol_type = other DNA
tcccagcctgggctgaatcg

SEQ ID NO: 24029 - DNA, 20 bp, synthetic construct
  source 1..20: mol_type = other DNA
tcccccaggctggagtgcag

SEQ ID NO: 24030 - DNA, 20 bp, synthetic construct
  source 1..20: mol_type = other DNA
gtagcaggtcatagtggtcc

SEQ ID NO: 24031 - DNA, 20 bp, synthetic construct
  source 1..20: mol_type = other DNA
gtcaccagcttcacagagcc

SEQ ID NO: 24032 - DNA, 20 bp, synthetic construct
  source 1..20: mol_type = other DNA
tatgacctgctacagcggct

SEQ ID NO: 24033 - DNA, 20 bp, synthetic construct
  source 1..20: mol_type = other DNA
tctcacccacacagcacgcc

SEQ ID NO: 24034 - DNA, 20 bp, synthetic construct
  source 1..20: mol_type = other DNA
ccaacatcgtggcctaccat

SEQ ID NO: 24035 - DNA, 20 bp, synthetic construct
  source 1..20: mol_type = other DNA
tgagggttctgagaggggtt

SEQ ID NO: 24036 - DNA, 20 bp, synthetic construct
  source 1..20: mol_type = other DNA
taccagttgatgctggcgga

SEQ ID NO: 24037 - DNA, 20 bp, synthetic construct
  source 1..20: mol_type = other DNA
gatccgccgagggatagcag

SEQ ID NO: 24038 - DNA, 20 bp, synthetic construct
  source 1..20: mol_type = other DNA
cccaggtatgttgtggggtg

SEQ ID NO: 24039 - DNA, 20 bp, synthetic construct
  source 1..20: mol_type = other DNA
aggagcagcagccccaggtc

SEQ ID NO: 24040 - DNA, 20 bp, synthetic construct
  source 1..20: mol_type = other DNA
ccagagataactcccatggt

SEQ ID NO: 24041 - DNA, 20 bp, synthetic construct
  source 1..20: mol_type = other DNA
aagatggagcctggtgagga

SEQ ID NO: 24042 - DNA, 20 bp, synthetic construct
  source 1..20: mol_type = other DNA
agggtgtcccaatgaaagag

SEQ ID NO: 24043 - DNA, 20 bp, synthetic construct
  source 1..20: mol_type = other DNA
ttccgttctccatcagacga

SEQ ID NO: 24044 - DNA, 20 bp, synthetic construct
  source 1..20: mol_type = other DNA
gctggtaccttgccagtagg

SEQ ID NO: 24045 - DNA, 20 bp, synthetic construct
  source 1..20: mol_type = other DNA
acagcggagggtgcgagctc

SEQ ID NO: 24046 - DNA, 20 bp, synthetic construct
  source 1..20: mol_type = other DNA
ctcacagaagaagatacaca

SEQ ID NO: 24047 - DNA, 20 bp, synthetic construct
  source 1..20: mol_type = other DNA
ctgctacagcggctgggtgg

SEQ ID NO: 24048 - DNA, 20 bp, synthetic construct
  source 1..20: mol_type = other DNA
gaagagaactctagaatagt

SEQ ID NO: 24049 - DNA, 20 bp, synthetic construct
  source 1..20: mol_type = other DNA
gcatccttggcctgctggaa

SEQ ID NO: 24050 - DNA, 20 bp, synthetic construct
  source 1..20: mol_type = other DNA
aaagagcggtggctgtagct

SEQ ID NO: 24051 - DNA, 20 bp, synthetic construct
  source 1..20: mol_type = other DNA
ttcgatggccgtgatgccca

SEQ ID NO: 24052 - DNA, 20 bp, synthetic construct
  source 1..20: mol_type = other DNA
cctccccgactgaaggaaaa

SEQ ID NO: 24053 - DNA, 20 bp, synthetic construct
  source 1..20: mol_type = other DNA
acattttcaatagagacccc

SEQ ID NO: 24054 - DNA, 20 bp, synthetic construct
  source 1..20: mol_type = other DNA
atcaggcctcgattcagccc

SEQ ID NO: 24055 - DNA, 20 bp, synthetic construct
  source 1..20: mol_type = other DNA
ctggggagaagggtggacaa

SEQ ID NO: 24056 - DNA, 20 bp, synthetic construct
  source 1..20: mol_type = other DNA
tgcaaataggccagtccctg

SEQ ID NO: 24057 - DNA, 20 bp, synthetic construct
  source 1..20: mol_type = other DNA
catcctcatcaatgatgctg

SEQ ID NO: 24058 - DNA, 20 bp, synthetic construct
  source 1..20: mol_type = other DNA
ggctcccccaggtatgttgt

SEQ ID NO: 24059 - DNA, 20 bp, synthetic construct
  source 1..20: mol_type = other DNA
tggaggccgtgggtctgtgc

SEQ ID NO: 24060 - DNA, 20 bp, synthetic construct
  source 1..20: mol_type = other DNA
gggggctaatgtgagcgatg

SEQ ID NO: 24061 - DNA, 20 bp, synthetic construct
  source 1..20: mol_type = other DNA
tcctcatattgaaaacttgc

SEQ ID NO: 24062 - DNA, 20 bp, synthetic construct
  source 1..20: mol_type = other DNA
gcagacggaaagtgagggta

SEQ ID NO: 24063 - DNA, 20 bp, synthetic construct
  source 1..20: mol_type = other DNA
tgccacttccggagccatcc

SEQ ID NO: 24064 - DNA, 20 bp, synthetic construct
  source 1..20: mol_type = other DNA
tggggctgaaacacaaagat

SEQ ID NO: 24065 - DNA, 20 bp, synthetic construct
  source 1..20: mol_type = other DNA
ccagcttcacagagcctgga

SEQ ID NO: 24066 - DNA, 20 bp, synthetic construct
  source 1..20: mol_type = other DNA
tgctgcgggccgcacaggga

SEQ ID NO: 24067 - DNA, 20 bp, synthetic construct
  source 1..20: mol_type = other DNA
aggccacgatgttggcgtgc

SEQ ID NO: 24068 - DNA, 20 bp, synthetic construct
  source 1..20: mol_type = other DNA
tagcaggtcatagtggtccc

SEQ ID NO: 24069 - DNA, 20 bp, synthetic construct
  source 1..20: mol_type = other DNA
cacttccggagccatcctgg

SEQ ID NO: 24070 - DNA, 20 bp, synthetic construct
  source 1..20: mol_type = other DNA
gaactccatgtgccgcccta

SEQ ID NO: 24071 - DNA, 20 bp, synthetic construct
  source 1..20: mol_type = other DNA
ctaccagcctccccgactga

SEQ ID NO: 24072 - DNA, 20 bp, synthetic construct
  source 1..20: mol_type = other DNA
gctgcagggaatgggagaga

SEQ ID NO: 24073 - DNA, 20 bp, synthetic construct
  source 1..20: mol_type = other DNA
aacgttctcatgtctctctc

SEQ ID NO: 24074 - DNA, 20 bp, synthetic construct
  source 1..20: mol_type = other DNA
tgatgggcagctgagcccgg

SEQ ID NO: 24075 - DNA, 20 bp, synthetic construct
  source 1..20: mol_type = other DNA
ggaggccgtgggtctgtgca

SEQ ID NO: 24076 - DNA, 20 bp, synthetic construct
  source 1..20: mol_type = other DNA
gttcaggaagctccgaggaa

SEQ ID NO: 24077 - DNA, 20 bp, synthetic construct
  source 1..20: mol_type = other DNA
gatacacagggacatcaagg

SEQ ID NO: 24078 - DNA, 20 bp, synthetic construct
  source 1..20: mol_type = other DNA
gtgcaccctctcaggtaggc

SEQ ID NO: 24079 - DNA, 20 bp, synthetic construct
  source 1..20: mol_type = other DNA
ttccccccaaggtaaggccc

SEQ ID NO: 24080 - DNA, 20 bp, synthetic construct
  source 1..20: mol_type = other DNA
gttcctcaccatttccagcg

SEQ ID NO: 24081 - DNA, 20 bp, synthetic construct
  source 1..20: mol_type = other DNA
gctcattgtatcctcccttc

SEQ ID NO: 24082 - DNA, 20 bp, synthetic construct
  source 1..20: mol_type = other DNA
gggacatcaaggtggtctgg

SEQ ID NO: 24083 - DNA, 20 bp, synthetic construct
  source 1..20: mol_type = other DNA
ctcattgtatcctcccttca

SEQ ID NO: 24084 - DNA, 20 bp, synthetic construct
  source 1..20: mol_type = other DNA
tagctccctgggaatgagag

SEQ ID NO: 24085 - DNA, 20 bp, synthetic construct
  source 1..20: mol_type = other DNA
tctcaggtgtgcgaagtccc

SEQ ID NO: 24086 - DNA, 20 bp, synthetic construct
  source 1..20: mol_type = other DNA
ctccacttccccccaaggta

SEQ ID NO: 24087 - DNA, 20 bp, synthetic construct
  source 1..20: mol_type = other DNA
gcacctgctcctgggggcag

SEQ ID NO: 24088 - DNA, 20 bp, synthetic construct
  source 1..20: mol_type = other DNA
gttcttcctggagaataggt

SEQ ID NO: 24089 - DNA, 20 bp, synthetic construct
  source 1..20: mol_type = other DNA
ccctctcaggtaggcaggcg

SEQ ID NO: 24090 - DNA, 20 bp, synthetic construct
  source 1..20: mol_type = other DNA
cctccgctgtggcatgggca

SEQ ID NO: 24091 - DNA, 20 bp, synthetic construct
  source 1..20: mol_type = other DNA
agccaagcagacggaaagtg

SEQ ID NO: 24092 - DNA, 20 bp, synthetic construct
  source 1..20: mol_type = other DNA
tgatgtgcaccctctcaggt

SEQ ID NO: 24093 - DNA, 20 bp, synthetic construct
  source 1..20: mol_type = other DNA
gctgcgggccgcacagggag

SEQ ID NO: 24094 - DNA, 20 bp, synthetic construct
  source 1..20: mol_type = other DNA
gtgtccaggcggccgtgctg

SEQ ID NO: 24095 - DNA, 20 bp, synthetic construct
  source 1..20: mol_type = other DNA
ttcatcttttccttcttggg

SEQ ID NO: 24096 - DNA, 20 bp, synthetic construct
  source 1..20: mol_type = other DNA
ctggacacatccctccacca

SEQ ID NO: 24097 - DNA, 20 bp, synthetic construct
  source 1..20: mol_type = other DNA
tccccccaaggtaaggccct

SEQ ID NO: 24098 - DNA, 20 bp, synthetic construct
  source 1..20: mol_type = other DNA
tctttgatgtgcaccctctc

SEQ ID NO: 24099 - DNA, 20 bp, synthetic construct
  source 1..20: mol_type = other DNA
gccaacatcgtggcctacca

SEQ ID NO: 24100 - DNA, 20 bp, synthetic construct
  source 1..20: mol_type = other DNA
catccctgggcaggtcgccg

SEQ ID NO: 24101 - DNA, 20 bp, synthetic construct
  source 1..20: mol_type = other DNA
tggatctgcatggaattctg

SEQ ID NO: 24102 - DNA, 20 bp, synthetic construct
  source 1..20: mol_type = other DNA
tgaactccatgtgccgccct

SEQ ID NO: 24103 - DNA, 20 bp, synthetic construct
  source 1..20: mol_type = other DNA
ctccatgtgccgccctaggg

SEQ ID NO: 24104 - DNA, 20 bp, synthetic construct
  source 1..20: mol_type = other DNA
agggccacagctgccacttc

SEQ ID NO: 24105 - DNA, 20 bp, synthetic construct
  source 1..20: mol_type = other DNA
tgtggaaggcagccgacctt

SEQ ID NO: 24106 - DNA, 20 bp, synthetic construct
  source 1..20: mol_type = other DNA
tgggacaccctactggtgag

SEQ ID NO: 24107 - DNA, 20 bp, synthetic construct
  source 1..20: mol_type = other DNA
catggtttccaccaagatcc

SEQ ID NO: 24108 - DNA, 20 bp, synthetic construct
  source 1..20: mol_type = other DNA
ccaggacaccaaaggctgcc

SEQ ID NO: 24109 - DNA, 20 bp, synthetic construct
  source 1..20: mol_type = other DNA
atggggaagtctttaaggtg

SEQ ID NO: 24110 - DNA, 20 bp, synthetic construct
  source 1..20: mol_type = other DNA
caccactacaggcctgtgga

SEQ ID NO: 24111 - DNA, 20 bp, synthetic construct
  source 1..20: mol_type = other DNA
ccgacttccccggccgcccg

SEQ ID NO: 24112 - DNA, 20 bp, synthetic construct
  source 1..20: mol_type = other DNA
tccctgggcaggtcgccgcg

SEQ ID NO: 24113 - DNA, 20 bp, synthetic construct
  source 1..20: mol_type = other DNA
tcaccatcttcagtgccacc

SEQ ID NO: 24114 - DNA, 20 bp, synthetic construct
  source 1..20: mol_type = other DNA
cctgcagggtgtgtgtatgt

SEQ ID NO: 24115 - DNA, 20 bp, synthetic construct
  source 1..20: mol_type = other DNA
acacatccctccaccaaggg

SEQ ID NO: 24116 - DNA, 20 bp, synthetic construct
  source 1..20: mol_type = other DNA
gaatgcccacccttggtgga

SEQ ID NO: 24117 - DNA, 20 bp, synthetic construct
  source 1..20: mol_type = other DNA
ctggtctggaggcacagaca

SEQ ID NO: 24118 - DNA, 20 bp, synthetic construct
  source 1..20: mol_type = other DNA
gatccccatgaccgaagcgg

SEQ ID NO: 24119 - DNA, 20 bp, synthetic construct
  source 1..20: mol_type = other DNA
actgcaggttgcagaaactc

SEQ ID NO: 24120 - DNA, 20 bp, synthetic construct
  source 1..20: mol_type = other DNA
gaggatttccttctgaaggg

SEQ ID NO: 24121 - DNA, 20 bp, synthetic construct
  source 1..20: mol_type = other DNA
gggacccgtgcaggtgaccc

SEQ ID NO: 24122 - DNA, 20 bp, synthetic construct
  source 1..20: mol_type = other DNA
gctatgagaatacaggtggg

SEQ ID NO: 24123 - DNA, 20 bp, synthetic construct
  source 1..20: mol_type = other DNA
acctgggggagccaagcaga

SEQ ID NO: 24124 - DNA, 20 bp, synthetic construct
  source 1..20: mol_type = other DNA
gggtgcacatcaaagagcgg

SEQ ID NO: 24125 - DNA, 20 bp, synthetic construct
  source 1..20: mol_type = other DNA
gggtccacgacgtccatccc

SEQ ID NO: 24126 - DNA, 20 bp, synthetic construct
  source 1..20: mol_type = other DNA
gaagtgctccaggtaaggag

SEQ ID NO: 24127 - DNA, 20 bp, synthetic construct
  source 1..20: mol_type = other DNA
gcgaacacggacagaggcgt

SEQ ID NO: 24128 - DNA, 20 bp, synthetic construct
  source 1..20: mol_type = other DNA
ggtggagggatgtgtccagg

SEQ ID NO: 24129 - DNA, 20 bp, synthetic construct
  source 1..20: mol_type = other DNA
ccgtgttcgcgctgctgacc

SEQ ID NO: 24130 - DNA, 20 bp, synthetic construct
  source 1..20: mol_type = other DNA
tgtcactgcaaaggtcaccc

SEQ ID NO: 24131 - DNA, 20 bp, synthetic construct
  source 1..20: mol_type = other DNA
actgagcatcttggtggcgc

SEQ ID NO: 24132 - DNA, 20 bp, synthetic construct
  source 1..20: mol_type = other DNA
tactggtgagtggcgcccag

SEQ ID NO: 24133 - DNA, 20 bp, synthetic construct
  source 1..20: mol_type = other DNA
tcaaggtggtctgggggtgt

SEQ ID NO: 24134 - DNA, 20 bp, synthetic construct
  source 1..20: mol_type = other DNA
tggctcccccaggtatgttg

SEQ ID NO: 24135 - DNA, 20 bp, synthetic construct
  source 1..20: mol_type = other DNA
ccatccctgggggcctgagc

SEQ ID NO: 24136 - DNA, 20 bp, synthetic construct
  source 1..20: mol_type = other DNA
tctaaccttggtagatgtcc

SEQ ID NO: 24137 - DNA, 20 bp, synthetic construct
  source 1..20: mol_type = other DNA
catctaccaaggttagagaa

SEQ ID NO: 24138 - DNA, 20 bp, synthetic construct
  source 1..20: mol_type = other DNA
gaagatggagcctggtgagg

SEQ ID NO: 24139 - DNA, 20 bp, synthetic construct
  source 1..20: mol_type = other DNA
aactctagaatagtagggaa

SEQ ID NO: 24140 - DNA, 20 bp, synthetic construct
  source 1..20: mol_type = other DNA
gtccacgacgtccatccctg

SEQ ID NO: 24141 - DNA, 20 bp, synthetic construct
  source 1..20: mol_type = other DNA
gtctctctcaggtctggctg

SEQ ID NO: 24142 - DNA, 20 bp, synthetic construct
  source 1..20: mol_type = other DNA
cccaccgctccagctctctg

SEQ ID NO: 24143 - DNA, 20 bp, synthetic construct
  source 1..20: mol_type = other DNA
accactatgacctgctacag

SEQ ID NO: 24144 - DNA, 20 bp, synthetic construct
  source 1..20: mol_type = other DNA
cccaatgaaagagaggcgtc

SEQ ID NO: 24145 - DNA, 20 bp, synthetic construct
  source 1..20: mol_type = other DNA
gaatgaccaggaggccacgc

SEQ ID NO: 24146 - DNA, 20 bp, synthetic construct
  source 1..20: mol_type = other DNA
agagcctggaaggagataga

SEQ ID NO: 24147 - DNA, 20 bp, synthetic construct
  source 1..20: mol_type = other DNA
gcaggtcatagtggtcccgg

SEQ ID NO: 24148 - DNA, 20 bp, synthetic construct
  source 1..20: mol_type = other DNA
tgatgaggatgttagctccc

SEQ ID NO: 24149 - DNA, 20 bp, synthetic construct
  source 1..20: mol_type = other DNA
ggacctggtggcactgaaga

SEQ ID NO: 24150 - DNA, 20 bp, synthetic construct
  source 1..20: mol_type = other DNA
aggctgccgggcgtgctgtg

SEQ ID NO: 24151 - DNA, 20 bp, synthetic construct
  source 1..20: mol_type = other DNA
ccccaggatggctccggaag

SEQ ID NO: 24152 - DNA, 20 bp, synthetic construct
  source 1..20: mol_type = other DNA
cctttgcaaggctcgagaca

SEQ ID NO: 24153 - DNA, 20 bp, synthetic construct
  source 1..20: mol_type = other DNA
tccaggacaccaaaggctgc

SEQ ID NO: 24154 - DNA, 20 bp, synthetic construct
  source 1..20: mol_type = other DNA
cctcatcaatgatgctgggg

SEQ ID NO: 24155 - DNA, 20 bp, synthetic construct
  source 1..20: mol_type = other DNA
atcatcatctgtgaggaggg

SEQ ID NO: 24156 - DNA, 20 bp, synthetic construct
  source 1..20: mol_type = other DNA
gacctgctacagcggctggg

SEQ ID NO: 24157 - DNA, 20 bp, synthetic construct
  source 1..20: mol_type = other DNA
acaagcaggaatttgttcat

SEQ ID NO: 24158 - DNA, 20 bp, synthetic construct
  source 1..20: mol_type = other DNA
ggccttaccttggggggaag

SEQ ID NO: 24159 - DNA, 20 bp, synthetic construct
  source 1..20: mol_type = other DNA
agagtttctgcaacctgcag

SEQ ID NO: 24160 - DNA, 20 bp, synthetic construct
  source 1..20: mol_type = other DNA
acctgaatgggcggtgaggt

SEQ ID NO: 24161 - DNA, 20 bp, synthetic construct
  source 1..20: mol_type = other DNA
accttgccagtaggcggtgg

SEQ ID NO: 24162 - DNA, 20 bp, synthetic construct
  source 1..20: mol_type = other DNA
tcccgagtagctgggattac

SEQ ID NO: 24163 - DNA, 20 bp, synthetic construct
  source 1..20: mol_type = other DNA
agacatgagaacgttgttga

SEQ ID NO: 24164 - DNA, 20 bp, synthetic construct
  source 1..20: mol_type = other DNA
ctgtattctcatagcatcct

SEQ ID NO: 24165 - DNA, 20 bp, synthetic construct
  source 1..20: mol_type = other DNA
tccaggtaaggagaggcctg

SEQ ID NO: 24166 - DNA, 20 bp, synthetic construct
  source 1..20: mol_type = other DNA
gacccaggtagaggaagata

SEQ ID NO: 24167 - DNA, 20 bp, synthetic construct
  source 1..20: mol_type = other DNA
ctgaatgggcggtgaggtgg

SEQ ID NO: 24168 - DNA, 20 bp, synthetic construct
  source 1..20: mol_type = other DNA
gactttgatgaagttgtgga

SEQ ID NO: 24169 - DNA, 20 bp, synthetic construct
  source 1..20: mol_type = other DNA
ggtaccttgccagtaggcgg

SEQ ID NO: 24170 - DNA, 20 bp, synthetic construct
  source 1..20: mol_type = other DNA
gatgaggatgttagctccct

SEQ ID NO: 24171 - DNA, 20 bp, synthetic construct
  source 1..20: mol_type = other DNA
aggaaagagctgcagggaat

SEQ ID NO: 24172 - DNA, 20 bp, synthetic construct
  source 1..20: mol_type = other DNA
agtgcaaataggccagtccc

SEQ ID NO: 24173 - DNA, 20 bp, synthetic construct
  source 1..20: mol_type = other DNA
tcaggtaatgggacaggcta

SEQ ID NO: 24174 - DNA, 20 bp, synthetic construct
  source 1..20: mol_type = other DNA
tctctctcaggtctggctgt

SEQ ID NO: 24175 - DNA, 20 bp, synthetic construct
  source 1..20: mol_type = other DNA
aaatggtacgagagagtaac

SEQ ID NO: 24176 - DNA, 20 bp, synthetic construct
  source 1..20: mol_type = other DNA
tccccagagagctggagcgg

SEQ ID NO: 24177 - DNA, 20 bp, synthetic construct
  source 1..20: mol_type = other DNA
tgtctgccgggaagtgctcc

SEQ ID NO: 24178 - DNA, 20 bp, synthetic construct
  source 1..20: mol_type = other DNA
tctcagctcctgtagcagct

SEQ ID NO: 24179 - DNA, 20 bp, synthetic construct
  source 1..20: mol_type = other DNA
gccacttccggagccatcct

SEQ ID NO: 24180 - DNA, 20 bp, synthetic construct
  source 1..20: mol_type = other DNA
gccgggaagtgctccaggta

SEQ ID NO: 24181 - DNA, 20 bp, synthetic construct
  source 1..20: mol_type = other DNA
ttcaggtaatgggacaggct

SEQ ID NO: 24182 - DNA, 20 bp, synthetic construct
  source 1..20: mol_type = other DNA
actcctgtgggagggagatg

SEQ ID NO: 24183 - DNA, 20 bp, synthetic construct
  source 1..20: mol_type = other DNA
agaagttctagggggcagca

SEQ ID NO: 24184 - DNA, 20 bp, synthetic construct
  source 1..20: mol_type = other DNA
ctgttggggcctgaaggagg

SEQ ID NO: 24185 - DNA, 20 bp, synthetic construct
  source 1..20: mol_type = other DNA
caccatggtaaatctcctgc

SEQ ID NO: 24186 - DNA, 20 bp, synthetic construct
  source 1..20: mol_type = other DNA
attgaagaccttggagaagc

SEQ ID NO: 24187 - DNA, 20 bp, synthetic construct
  source 1..20: mol_type = other DNA
cataccactgcagcaggagc

SEQ ID NO: 24188 - DNA, 20 bp, synthetic construct
  source 1..20: mol_type = other DNA
gagcctctgtccagtccccc

SEQ ID NO: 24189 - DNA, 20 bp, synthetic construct
  source 1..20: mol_type = other DNA
tacatgcaccttgggagttg

SEQ ID NO: 24190 - DNA, 20 bp, synthetic construct
  source 1..20: mol_type = other DNA
tcccccagtgggaggaagag

SEQ ID NO: 24191 - DNA, 20 bp, synthetic construct
  source 1..20: mol_type = other DNA
tgtccagcagctgtgtgagg

SEQ ID NO: 24192 - DNA, 20 bp, synthetic construct
  source 1..20: mol_type = other DNA
tggggagtccagctcctggt

SEQ ID NO: 24193 - DNA, 20 bp, synthetic construct
  source 1..20: mol_type = other DNA
aaccttctcctcactctcca

SEQ ID NO: 24194 - DNA, 20 bp, synthetic construct
  source 1..20: mol_type = other DNA
tatctctcagtttgggcggc

SEQ ID NO: 24195 - DNA, 20 bp, synthetic construct
  source 1..20: mol_type = other DNA
ctgttactcggggtaggtgg

SEQ ID NO: 24196 - DNA, 20 bp, synthetic construct
  source 1..20: mol_type = other DNA
ctggtggtaggggccgagga

SEQ ID NO: 24197 - DNA, 20 bp, synthetic construct
  source 1..20: mol_type = other DNA
tcagtagaatgcatttcctg

SEQ ID NO: 24198 - DNA, 20 bp, synthetic construct
  source 1..20: mol_type = other DNA
acaaccatgtacaccttcga

SEQ ID NO: 24199 - DNA, 20 bp, synthetic construct
  source 1..20: mol_type = other DNA
tgttactcatgtaacccaac

SEQ ID NO: 24200 - DNA, 20 bp, synthetic construct
  source 1..20: mol_type = other DNA
tcttcatggtttacagaatc

SEQ ID NO: 24201 - DNA, 20 bp, synthetic construct
  source 1..20: mol_type = other DNA
cggcgaagagtagactcacc

SEQ ID NO: 24202 - DNA, 20 bp, synthetic construct
  source 1..20: mol_type = other DNA
tatggtcatgctgtagagac

SEQ ID NO: 24203 - DNA, 20 bp, synthetic construct
  source 1..20: mol_type = other DNA
cgtagcaacaaaggagagag

SEQ ID NO: 24204 - DNA, 20 bp, synthetic construct
  source 1..20: mol_type = other DNA
tcactgttgaggaaggccag

SEQ ID NO: 24205 - DNA, 20 bp, synthetic construct
  source 1..20: mol_type = other DNA
gggcactctaatcgtccgcc

SEQ ID NO: 24206 - DNA, 20 bp, synthetic construct
  source 1..20: mol_type = other DNA
tggaggaagtggaggaggaa

SEQ ID NO: 24207 - DNA, 20 bp, synthetic construct
  source 1..20: mol_type = other DNA
acaaccgtaggggatttgga

SEQ ID NO: 24208 - DNA, 20 bp, synthetic construct
  source 1..20: mol_type = other DNA
cgagtccacctcaggaccag

SEQ ID NO: 24209 - DNA, 20 bp, synthetic construct
  source 1..20: mol_type = other DNA
ggcgcaaagaagaagaggag

SEQ ID NO: 24210 - DNA, 20 bp, synthetic construct
  source 1..20: mol_type = other DNA
gctgcagtctcaggaaatct

SEQ ID NO: 24211 - DNA, 20 bp, synthetic construct
  source 1..20: mol_type = other DNA
ctacagatttctccatctag

SEQ ID NO: 24212 - DNA, 20 bp, synthetic construct
  source 1..20: mol_type = other DNA
cactcacccgcagggaggag

SEQ ID NO: 24213 - DNA, 20 bp, synthetic construct
  source 1..20: mol_type = other DNA
ggaggatggggaggaggagg

SEQ ID NO: 24214 - DNA, 20 bp, synthetic construct
  source 1..20: mol_type = other DNA
ttcttgtatttacgaatctc

SEQ ID NO: 24215 - DNA, 20 bp, synthetic construct
  source 1..20: mol_type = other DNA
aaggccataaatttgtgata

SEQ ID NO: 24216 - DNA, 20 bp, synthetic construct
  source 1..20: mol_type = other DNA
caggtttatttcatgacctt

SEQ ID NO: 24217 - DNA, 20 bp, synthetic construct
  source 1..20: mol_type = other DNA
tggacttggtgtagccctgc

SEQ ID NO: 24218 - DNA, 20 bp, synthetic construct
  source 1..20: mol_type = other DNA
cgccctcgccgatgtacgag

SEQ ID NO: 24219 - DNA, 20 bp, synthetic construct
  source 1..20: mol_type = other DNA
tcgtaatactgctccagata

SEQ ID NO: 24220 - DNA, 20 bp, synthetic construct
  source 1..20: mol_type = other DNA
ctactgccagagaaccctga

SEQ ID NO: 24221 - DNA, 20 bp, synthetic construct
  source 1..20: mol_type = other DNA
atgtggccacacgttggtac

SEQ ID NO: 24222 - DNA, 20 bp, synthetic construct
  source 1..20: mol_type = other DNA
gtccagagctataaagagaa

SEQ ID NO: 24223 - DNA, 20 bp, synthetic construct
  source 1..20: mol_type = other DNA
aatactgctccagatatggg

SEQ ID NO: 24224 - DNA, 20 bp, synthetic construct
  source 1..20: mol_type = other DNA
ggcagccaacatggcggcgg

SEQ ID NO: 24225 - DNA, 20 bp, synthetic construct
  source 1..20: mol_type = other DNA
cacacaaaaataaggtgcca

SEQ ID NO: 24226 - DNA, 20 bp, synthetic construct
  source 1..20: mol_type = other DNA
cggcgagggcgcctacggca

SEQ ID NO: 24227 - DNA, 20 bp, synthetic construct
  source 1..20: mol_type = other DNA
caattcaggtcttcttgtga

SEQ ID NO: 24228 - DNA, 20 bp, synthetic construct
  source 1..20: mol_type = other DNA
agaccaaatatcaatggact

SEQ ID NO: 24229 - DNA, 20 bp, synthetic construct
  source 1..20: mol_type = other DNA
gtgtggccacatattctgtc

SEQ ID NO: 24230 - DNA, 20 bp, synthetic construct
  source 1..20: mol_type = other DNA
cgcgggcaggtgttcgacgt

SEQ ID NO: 24231 - DNA, 20 bp, synthetic construct
  source 1..20: mol_type = other DNA
ggtgcagaacgttagctgaa

SEQ ID NO: 24232 - DNA, 20 bp, synthetic construct
  source 1..20: mol_type = other DNA
atactgctccagatatgggt

SEQ ID NO: 24233 - DNA, 20 bp, synthetic construct
  source 1..20: mol_type = other DNA
cagaatatgtggccacacgt

SEQ ID NO: 24234 - DNA, 20 bp, synthetic construct
  source 1..20: mol_type = other DNA
tttctctaccagatcctcag

SEQ ID NO: 24235 - DNA, 20 bp, synthetic construct
  source 1..20: mol_type = other DNA
gctgaccttgagatcacagg

SEQ ID NO: 24236 - DNA, 20 bp, synthetic construct
  source 1..20: mol_type = other DNA
gtgttgagcagcaggttgga

SEQ ID NO: 24237 - DNA, 20 bp, synthetic construct
  source 1..20: mol_type = other DNA
gtattacgacccgagtgacg

SEQ ID NO: 24238 - DNA, 20 bp, synthetic construct
  source 1..20: mol_type = other DNA
cactcaccacaccatgccgt

SEQ ID NO: 24239 - DNA, 20 bp, synthetic construct
  source 1..20: mol_type = other DNA
aaccctgtgtgatcatggtc

SEQ ID NO: 24240 - DNA, 20 bp, synthetic construct
  source 1..20: mol_type = other DNA
ccgcgggcaggtgttcgacg

SEQ ID NO: 24241 - DNA, 20 bp, synthetic construct
  source 1..20: mol_type = other DNA
cctcagggttctctggcagt

SEQ ID NO: 24242 - DNA, 20 bp, synthetic construct
  source 1..20: mol_type = other DNA
tacgagaggttggtgtagcg

SEQ ID NO: 24243 - DNA, 20 bp, synthetic construct
  source 1..20: mol_type = other DNA
ttcagacatgagaacatcat

SEQ ID NO: 24244 - DNA, 20 bp, synthetic construct
  source 1..20: mol_type = other DNA
attcaggtcttcttgtgatg

SEQ ID NO: 24245 - DNA, 20 bp, synthetic construct
  source 1..20: mol_type = other DNA
ccacgtcgaacacctgcccg

SEQ ID NO: 24246 - DNA, 20 bp, synthetic construct
  source 1..20: mol_type = other DNA
ttctctaccagatcctcaga

SEQ ID NO: 24247 - DNA, 20 bp, synthetic construct
  source 1..20: mol_type = other DNA
gcagcaggttggaaggcttg

SEQ ID NO: 24248 - DNA, 20 bp, synthetic construct
  source 1..20: mol_type = other DNA
gcgggcaggtgttcgacgtg

SEQ ID NO: 24249 - DNA, 20 bp, synthetic construct
  source 1..20: mol_type = other DNA
cgtaatactgctccagatat

SEQ ID NO: 24250 - DNA, 20 bp, synthetic construct
  source 1..20: mol_type = other DNA
tgtggccacacgttggtaca

SEQ ID NO: 24251 - DNA, 20 bp, synthetic construct
  source 1..20: mol_type = other DNA
caacctctcgtacatcggcg

SEQ ID NO: 24252 - DNA, 20 bp, synthetic construct
  source 1..20: mol_type = other DNA
ccgtaggcgccggagcccac

SEQ ID NO: 24253 - DNA, 20 bp, synthetic construct
  source 1..20: mol_type = other DNA
ctcggccgggatcatccacc

SEQ ID NO: 24254 - DNA, 20 bp, synthetic construct
  source 1..20: mol_type = other DNA
ccagacggagccgtaggcgc

SEQ ID NO: 24255 - DNA, 20 bp, synthetic construct
  source 1..20: mol_type = other DNA
atccagttgagcatgatctc

SEQ ID NO: 24256 - DNA, 20 bp, synthetic construct
  source 1..20: mol_type = other DNA
catccttccaaggaggtcta

SEQ ID NO: 24257 - DNA, 20 bp, synthetic construct
  source 1..20: mol_type = other DNA
acgtggccactaggtggtac

SEQ ID NO: 24258 - DNA, 20 bp, synthetic construct
  source 1..20: mol_type = other DNA
cgtggccactaggtggtaca

SEQ ID NO: 24259 - DNA, 20 bp, synthetic construct
  source 1..20: mol_type = other DNA
tgatcagtcctttgaaagca

SEQ ID NO: 24260 - DNA, 20 bp, synthetic construct
  source 1..20: mol_type = other DNA
ggttcttttcgcatgaatga

SEQ ID NO: 24261 - DNA, 20 bp, synthetic construct
  source 1..20: mol_type = other DNA
tacacctgcaaggtctctgg

SEQ ID NO: 24262 - DNA, 20 bp, synthetic construct
  source 1..20: mol_type = other DNA
aagtaaccgcagttctctgt

SEQ ID NO: 24263 - DNA, 20 bp, synthetic construct
  source 1..20: mol_type = other DNA
gagcaaagtaggcatgtgca

SEQ ID NO: 24264 - DNA, 20 bp, synthetic construct
  source 1..20: mol_type = other DNA
agtaggcatgtgcaagggct

SEQ ID NO: 24265 - DNA, 20 bp, synthetic construct
  source 1..20: mol_type = other DNA
cttacaggtgattggtctgt

SEQ ID NO: 24266 - DNA, 20 bp, synthetic construct
  source 1..20: mol_type = other DNA
accccttgaccaagaagaga

SEQ ID NO: 24267 - DNA, 20 bp, synthetic construct
  source 1..20: mol_type = other DNA
tccaaaatccagaatctaaa

SEQ ID NO: 24268 - DNA, 20 bp, synthetic construct
  source 1..20: mol_type = other DNA
tggatgcattacaaccagac

SEQ ID NO: 24269 - DNA, 20 bp, synthetic construct
  source 1..20: mol_type = other DNA
ggtcaacttacccaggggat

SEQ ID NO: 24270 - DNA, 20 bp, synthetic construct
  source 1..20: mol_type = other DNA
atccagttcagcatgatctc

SEQ ID NO: 24271 - DNA, 20 bp, synthetic construct
  source 1..20: mol_type = other DNA
ggtagataaggaactgaaca

SEQ ID NO: 24272 - DNA, 20 bp, synthetic construct
  source 1..20: mol_type = other DNA
tcttcttggtcaaggggtgg

SEQ ID NO: 24273 - DNA, 20 bp, synthetic construct
  source 1..20: mol_type = other DNA
cagacaggtattactcgcct

SEQ ID NO: 24274 - DNA, 20 bp, synthetic construct
  source 1..20: mol_type = other DNA
cagctatcagtaccatagac

SEQ ID NO: 24275 - DNA, 20 bp, synthetic construct
  source 1..20: mol_type = other DNA
cgatcctgatgatgaaccag

SEQ ID NO: 24276 - DNA, 20 bp, synthetic construct
  source 1..20: mol_type = other DNA
ctcctgagatcatgctgaac

SEQ ID NO: 24277 - DNA, 20 bp, synthetic construct
  source 1..20: mol_type = other DNA
aggtcctaggaagcaaatac

SEQ ID NO: 24278 - DNA, 20 bp, synthetic construct
  source 1..20: mol_type = other DNA
ctggcgcctatggctctgtg

SEQ ID NO: 24279 - DNA, 20 bp, synthetic construct
  source 1..20: mol_type = other DNA
ttagattctggattttggac

SEQ ID NO: 24280 - DNA, 20 bp, synthetic construct
  source 1..20: mol_type = other DNA
tctgtgtggtgagtgtcgct

SEQ ID NO: 24281 - DNA, 20 bp, synthetic construct
  source 1..20: mol_type = other DNA
tgttcttccagtcaacagct

SEQ ID NO: 24282 - DNA, 20 bp, synthetic construct
  source 1..20: mol_type = other DNA
gtcaggcctagaaattggga

SEQ ID NO: 24283 - DNA, 20 bp, synthetic construct
  source 1..20: mol_type = other DNA
attcagctgacataattcac

SEQ ID NO: 24284 - DNA, 20 bp, synthetic construct
  source 1..20: mol_type = other DNA
aggagccctgtaccacctag

SEQ ID NO: 24285 - DNA, 20 bp, synthetic construct
  source 1..20: mol_type = other DNA
cactcaccacacagagccat

SEQ ID NO: 24286 - DNA, 20 bp, synthetic construct
  source 1..20: mol_type = other DNA
aaaggactgatcataaggat

SEQ ID NO: 24287 - DNA, 20 bp, synthetic construct
  source 1..20: mol_type = other DNA
ttttccactcatctataagg

SEQ ID NO: 24288 - DNA, 20 bp, synthetic construct
  source 1..20: mol_type = other DNA
tcagatctgcccccatgaga

SEQ ID NO: 24289 - DNA, 20 bp, synthetic construct
  source 1..20: mol_type = other DNA
cagatctgcccccatgagat

SEQ ID NO: 24290 - DNA, 20 bp, synthetic construct
  source 1..20: mol_type = other DNA
tgacaggctacgtggccact

SEQ ID NO: 24291 - DNA, 20 bp, synthetic construct
  source 1..20: mol_type = other DNA
cataggtcaggcctagaaat

SEQ ID NO: 24292 - DNA, 20 bp, synthetic construct
  source 1..20: mol_type = other DNA
agcaaagtaggcatgtgcaa

SEQ ID NO: 24293 - DNA, 20 bp, synthetic construct
  source 1..20: mol_type = other DNA
ttcagctgacataattcaca

SEQ ID NO: 24294 - DNA, 20 bp, synthetic construct
  source 1..20: mol_type = other DNA
tctggtgacccatctcatgg

SEQ ID NO: 24295 - DNA, 20 bp, synthetic construct
  source 1..20: mol_type = other DNA
gtccaaaatccagaatctaa

SEQ ID NO: 24296 - DNA, 20 bp, synthetic construct
  source 1..20: mol_type = other DNA
gccagttgatatttggtcag

SEQ ID NO: 24297 - DNA, 20 bp, synthetic construct
  source 1..20: mol_type = other DNA
cagaatctaaagggcagaag

SEQ ID NO: 24298 - DNA, 20 bp, synthetic construct
  source 1..20: mol_type = other DNA
caggctacgtggccactagg

SEQ ID NO: 24299 - DNA, 20 bp, synthetic construct
  source 1..20: mol_type = other DNA
ccataggcgccagagcccac

SEQ ID NO: 24300 - DNA, 20 bp, synthetic construct
  source 1..20: mol_type = other DNA
taaaggatacggtctgtacc

SEQ ID NO: 24301 - DNA, 20 bp, synthetic construct
  source 1..20: mol_type = other DNA
gagtggaaaagtaagtccta

SEQ ID NO: 24302 - DNA, 20 bp, synthetic construct
  source 1..20: mol_type = other DNA
ggtcctaggaagcaaataca

SEQ ID NO: 24303 - DNA, 20 bp, synthetic construct
  source 1..20: mol_type = other DNA
cttatctaccaaattctccg

SEQ ID NO: 24304 - DNA, 20 bp, synthetic construct
  source 1..20: mol_type = other DNA
gtaggcatgtgcaagggctt

SEQ ID NO: 24305 - DNA, 20 bp, synthetic construct
  source 1..20: mol_type = other DNA
cctacccacagcacccagct

SEQ ID NO: 24306 - DNA, 20 bp, synthetic construct
  source 1..20: mol_type = other DNA
ttggccacagggaggaggcc

SEQ ID NO: 24307 - DNA, 20 bp, synthetic construct
  source 1..20: mol_type = other DNA
gcagcacccacgtggggcag

SEQ ID NO: 24308 - DNA, 20 bp, synthetic construct
  source 1..20: mol_type = other DNA
tcacctggggggctgtcgct

SEQ ID NO: 24309 - DNA, 20 bp, synthetic construct
  source 1..20: mol_type = other DNA
tctcataggatcccccggct

SEQ ID NO: 24310 - DNA, 20 bp, synthetic construct
  source 1..20: mol_type = other DNA
tacctgtcggttccgctcgt

SEQ ID NO: 24311 - DNA, 20 bp, synthetic construct
  source 1..20: mol_type = other DNA
gcagtgggcatggaagagaa

SEQ ID NO: 24312 - DNA, 20 bp, synthetic construct
  source 1..20: mol_type = other DNA
tcctccaggggccatgctgg

SEQ ID NO: 24313 - DNA, 20 bp, synthetic construct
  source 1..20: mol_type = other DNA
gctcagctgtgaagaggatg

SEQ ID NO: 24314 - DNA, 20 bp, synthetic construct
  source 1..20: mol_type = other DNA
gtcagtgctcgggcttcccc

SEQ ID NO: 24315 - DNA, 20 bp, synthetic construct
  source 1..20: mol_type = other DNA
cgtgagggatgatgtcacca

SEQ ID NO: 24316 - DNA, 20 bp, synthetic construct
  source 1..20: mol_type = other DNA
ctcaccaacagggctggggc

SEQ ID NO: 24317 - DNA, 20 bp, synthetic construct
  source 1..20: mol_type = other DNA
ttcctccaggggccatgctg

SEQ ID NO: 24318 - DNA, 20 bp, synthetic construct
  source 1..20: mol_type = other DNA
ggcgtactggaacagcttgt

SEQ ID NO: 24319 - DNA, 20 bp, synthetic construct
  source 1..20: mol_type = other DNA
actggaacagcttgttggag

SEQ ID NO: 24320 - DNA, 20 bp, synthetic construct
  source 1..20: mol_type = other DNA
ctcacctgtgttgtaggcag

SEQ ID NO: 24321 - DNA, 20 bp, synthetic construct
  source 1..20: mol_type = other DNA
tcaccagggaaggggtgacc

SEQ ID NO: 24322 - DNA, 20 bp, synthetic construct
  source 1..20: mol_type = other DNA
tgcaggtgactttcaccaag

SEQ ID NO: 24323 - DNA, 20 bp, synthetic construct
  source 1..20: mol_type = other DNA
ggagaaaggagagttcaggt

SEQ ID NO: 24324 - DNA, 20 bp, synthetic construct
  source 1..20: mol_type = other DNA
atcctcagggtcctgcccat

SEQ ID NO: 24325 - DNA, 20 bp, synthetic construct
  source 1..20: mol_type = other DNA
ccactgctccagctccagga

SEQ ID NO: 24326 - DNA, 20 bp, synthetic construct
  source 1..20: mol_type = other DNA
cctgcctgtaggtactgggc

SEQ ID NO: 24327 - DNA, 20 bp, synthetic construct
  source 1..20: mol_type = other DNA
aagttcagctattgggtaag

SEQ ID NO: 24328 - DNA, 20 bp, synthetic construct
  source 1..20: mol_type = other DNA
cataaacactaagggaatga

SEQ ID NO: 24329 - DNA, 20 bp, synthetic construct
  source 1..20: mol_type = other DNA
ggtatgagaaactgcacgag

SEQ ID NO: 24330 - DNA, 20 bp, synthetic construct
  source 1..20: mol_type = other DNA
ctgcaaaatgaaaaagaggg

SEQ ID NO: 24331 - DNA, 20 bp, synthetic construct
  source 1..20: mol_type = other DNA
ggaacggaagaagccctgga

SEQ ID NO: 24332 - DNA, 20 bp, synthetic construct
  source 1..20: mol_type = other DNA
cctccagctcggacagcatg

SEQ ID NO: 24333 - DNA, 20 bp, synthetic construct
  source 1..20: mol_type = other DNA
ttgacatgaccgctaaagaa

SEQ ID NO: 24334 - DNA, 20 bp, synthetic construct
  source 1..20: mol_type = other DNA
tcgccacccaggcatgccca

SEQ ID NO: 24335 - DNA, 20 bp, synthetic construct
  source 1..20: mol_type = other DNA
tagcggtcatgtcaatggtt

SEQ ID NO: 24336 - DNA, 20 bp, synthetic construct
  source 1..20: mol_type = other DNA
ggcaagaaaccatggcctga

SEQ ID NO: 24337 - DNA, 20 bp, synthetic construct
  source 1..20: mol_type = other DNA
agcttctcacagacattggt

SEQ ID NO: 24338 - DNA, 20 bp, synthetic construct
  source 1..20: mol_type = other DNA
gaaccagggtacacgcagag

SEQ ID NO: 24339 - DNA, 20 bp, synthetic construct
  source 1..20: mol_type = other DNA
ggacttgaagatgaaggtga

SEQ ID NO: 24340 - DNA, 20 bp, synthetic construct
  source 1..20: mol_type = other DNA
ttccgaccttctgccttcac

SEQ ID NO: 24341 - DNA, 20 bp, synthetic construct
  source 1..20: mol_type = other DNA
tttggtactaaaacaggagg

SEQ ID NO: 24342 - DNA, 20 bp, synthetic construct
  source 1..20: mol_type = other DNA
cagcatcggatgcttaggag

SEQ ID NO: 24343 - DNA, 20 bp, synthetic construct
  source 1..20: mol_type = other DNA
tgaactgaatgaagatcaac

SEQ ID NO: 24344 - DNA, 20 bp, synthetic construct
  source 1..20: mol_type = other DNA
gcaaattgtggtagctcttg

SEQ ID NO: 24345 - DNA, 20 bp, synthetic construct
  source 1..20: mol_type = other DNA
atgagcagctcaacttgcgt

SEQ ID NO: 24346 - DNA, 20 bp, synthetic construct
  source 1..20: mol_type = other DNA
ccaagccaagatggcccgga

SEQ ID NO: 24347 - DNA, 20 bp, synthetic construct
  source 1..20: mol_type = other DNA
gtctctcccaccagatctgg

SEQ ID NO: 24348 - DNA, 20 bp, synthetic construct
  source 1..20: mol_type = other DNA
cccctaaaagccctaacaca

SEQ ID NO: 24349 - DNA, 20 bp, synthetic construct
  source 1..20: mol_type = other DNA
gatgtgatgacttgcaaaga

SEQ ID NO: 24350 - DNA, 20 bp, synthetic construct
  source 1..20: mol_type = other DNA
aagtcatcacatccaagcag

SEQ ID NO: 24351 - DNA, 20 bp, synthetic construct
  source 1..20: mol_type = other DNA
gcagctccttgatatcctgc

SEQ ID NO: 24352 - DNA, 20 bp, synthetic construct
  source 1..20: mol_type = other DNA
gagtggccaaggggatgcat

SEQ ID NO: 24353 - DNA, 20 bp, synthetic construct
  source 1..20: mol_type = other DNA
cactcacagctgcatgtctc

SEQ ID NO: 24354 - DNA, 20 bp, synthetic construct
  source 1..20: mol_type = other DNA
gagctgtaaataattaccaa

SEQ ID NO: 24355 - DNA, 20 bp, synthetic construct
  source 1..20: mol_type = other DNA
ctagaagagaaacaaccctt

SEQ ID NO: 24356 - DNA, 20 bp, synthetic construct
  source 1..20: mol_type = other DNA
gtcattcagagccacaaaca

SEQ ID NO: 24357 - DNA, 20 bp, synthetic construct
  source 1..20: mol_type = other DNA
catccaggtaaccgaggtga

SEQ ID NO: 24358 - DNA, 20 bp, synthetic construct
  source 1..20: mol_type = other DNA
gcaggaactgcacaagctca

SEQ ID NO: 24359 - DNA, 20 bp, synthetic construct
  source 1..20: mol_type = other DNA
ggactggcagaaaatcctta

SEQ ID NO: 24360 - DNA, 20 bp, synthetic construct
  source 1..20: mol_type = other DNA
tccactcacctccatagcat

SEQ ID NO: 24361 - DNA, 20 bp, synthetic construct
  source 1..20: mol_type = other DNA
gtccacagagccacctggat

SEQ ID NO: 24362 - DNA, 20 bp, synthetic construct
  source 1..20: mol_type = other DNA
tgaattcagccaagtttaag

SEQ ID NO: 24363 - DNA, 20 bp, synthetic construct
  source 1..20: mol_type = other DNA
cacgcatgccaggcctggtt

SEQ ID NO: 24364 - DNA, 20 bp, synthetic construct
  source 1..20: mol_type = other DNA
gagaatcagacaggcacgaa

SEQ ID NO: 24365 - DNA, 20 bp, synthetic construct
  source 1..20: mol_type = other DNA
cactcagacggtccagcatc

SEQ ID NO: 24366 - DNA, 20 bp, synthetic construct
  source 1..20: mol_type = other DNA
accaatgctatggaggtgag

SEQ ID NO: 24367 - DNA, 20 bp, synthetic construct
  source 1..20: mol_type = other DNA
cctggatgagcatcttgcgc

SEQ ID NO: 24368 - DNA, 20 bp, synthetic construct
  source 1..20: mol_type = other DNA
tgaggaccagcagcataagc

SEQ ID NO: 24369 - DNA, 20 bp, synthetic construct
  source 1..20: mol_type = other DNA
cagacggtccagcatcaggt

SEQ ID NO: 24370 - DNA, 20 bp, synthetic construct
  source 1..20: mol_type = other DNA
cttcacttgtttttcagctg

SEQ ID NO: 24371 - DNA, 20 bp, synthetic construct
  source 1..20: mol_type = other DNA
ggtccgaatcagcagcatgg

SEQ ID NO: 24372 - DNA, 20 bp, synthetic construct
  source 1..20: mol_type = other DNA
acgacctggccaagctgctg

SEQ ID NO: 24373 - DNA, 20 bp, synthetic construct
  source 1..20: mol_type = other DNA
taaggaacgtgggcatgacc

SEQ ID NO: 24374 - DNA, 20 bp, synthetic construct
  source 1..20: mol_type = other DNA
tggaggcccaagagtggtgc

SEQ ID NO: 24375 - DNA, 20 bp, synthetic construct
  source 1..20: mol_type = other DNA
agagcagagtgcccgcatgc

SEQ ID NO: 24376 - DNA, 20 bp, synthetic construct
  source 1..20: mol_type = other DNA
ccagggtccacagagccacc

SEQ ID NO: 24377 - DNA, 20 bp, synthetic construct
  source 1..20: mol_type = other DNA
tggccaggtatagtgtgtca

SEQ ID NO: 24378 - DNA, 20 bp, synthetic construct
  source 1..20: mol_type = other DNA
tcacatccaagcagaggccc

SEQ ID NO: 24379 - DNA, 20 bp, synthetic construct
  source 1..20: mol_type = other DNA
cctgtaaggaacagtgggag

SEQ ID NO: 24380 - DNA, 20 bp, synthetic construct
  source 1..20: mol_type = other DNA
cagaaagtagccccagggct

SEQ ID NO: 24381 - DNA, 20 bp, synthetic construct
  source 1..20: mol_type = other DNA
ttagcggtcatgtcaatggt

SEQ ID NO: 24382 - DNA, 20 bp, synthetic construct
  source 1..20: mol_type = other DNA
gataatagaggtcccaggct

SEQ ID NO: 24383 - DNA, 20 bp, synthetic construct
  source 1..20: mol_type = other DNA
ccatcatggcctgctggacc

SEQ ID NO: 24384 - DNA, 20 bp, synthetic construct
  source 1..20: mol_type = other DNA
catcagcctccagttcagca

SEQ ID NO: 24385 - DNA, 20 bp, synthetic construct
  source 1..20: mol_type = other DNA
accattcccccaaggcctcg

SEQ ID NO: 24386 - DNA, 20 bp, synthetic construct
  source 1..20: mol_type = other DNA
acatcctttaatcaggtatg

SEQ ID NO: 24387 - DNA, 20 bp, synthetic construct
  source 1..20: mol_type = other DNA
gccagcgtatcgtagaggac

SEQ ID NO: 24388 - DNA, 20 bp, synthetic construct
  source 1..20: mol_type = other DNA
ggcccagcaggagcgcaggg

SEQ ID NO: 24389 - DNA, 20 bp, synthetic construct
  source 1..20: mol_type = other DNA
ccagccaatgaggcccgagt

SEQ ID NO: 24390 - DNA, 20 bp, synthetic construct
  source 1..20: mol_type = other DNA
gtgggtagatgagggcctga

SEQ ID NO: 24391 - DNA, 20 bp, synthetic construct
  source 1..20: mol_type = other DNA
ttatgggcgaagtcctttgg

SEQ ID NO: 24392 - DNA, 20 bp, synthetic construct
  source 1..20: mol_type = other DNA
aacatcctttaatcaggtat

SEQ ID NO: 24393 - DNA, 20 bp, synthetic construct
  source 1..20: mol_type = other DNA
actgaatgcgaatgattggc

SEQ ID NO: 24394 - DNA, 20 bp, synthetic construct
  source 1..20: mol_type = other DNA
ccttctgcatcagagtcaag

SEQ ID NO: 24395 - DNA, 20 bp, synthetic construct
  source 1..20: mol_type = other DNA
gcccagcaggagcgcaggga

SEQ ID NO: 24396 - DNA, 20 bp, synthetic construct
  source 1..20: mol_type = other DNA
aagcacctctcggagttcca

SEQ ID NO: 24397 - DNA, 20 bp, synthetic construct
  source 1..20: mol_type = other DNA
ctccttaccctgtaccactg

SEQ ID NO: 24398 - DNA, 20 bp, synthetic construct
  source 1..20: mol_type = other DNA
ctggcacacctgagagagga

SEQ ID NO: 24399 - DNA, 20 bp, synthetic construct
  source 1..20: mol_type = other DNA
agtggcctacctcggagctg

SEQ ID NO: 24400 - DNA, 20 bp, synthetic construct
  source 1..20: mol_type = other DNA
cagcaaggggtcatagacaa

SEQ ID NO: 24401 - DNA, 20 bp, synthetic construct
  source 1..20: mol_type = other DNA
tgtccagaccatgcagcaac

SEQ ID NO: 24402 - DNA, 20 bp, synthetic construct
  source 1..20: mol_type = other DNA
agatggaacggaagaagccc

SEQ ID NO: 24403 - DNA, 20 bp, synthetic construct
  source 1..20: mol_type = other DNA
atcagcctccagttcagcaa

SEQ ID NO: 24404 - DNA, 20 bp, synthetic construct
  source 1..20: mol_type = other DNA
gctcactttcgagatggcag

SEQ ID NO: 24405 - DNA, 20 bp, synthetic construct
  source 1..20: mol_type = other DNA
gtatgagaaactgcacgagt

SEQ ID NO: 24406 - DNA, 20 bp, synthetic construct
  source 1..20: mol_type = other DNA
acttctactcactctcatga

SEQ ID NO: 24407 - DNA, 20 bp, synthetic construct
  source 1..20: mol_type = other DNA
atgagcatcttgcgcaggaa

SEQ ID NO: 24408 - DNA, 20 bp, synthetic construct
  source 1..20: mol_type = other DNA
agacagcgtgtccatggctg

SEQ ID NO: 24409 - DNA, 20 bp, synthetic construct
  source 1..20: mol_type = other DNA
aatcacatgccacacagtga

SEQ ID NO: 24410 - DNA, 20 bp, synthetic construct
  source 1..20: mol_type = other DNA
ccactgtcagtgggtagatg

SEQ ID NO: 24411 - DNA, 20 bp, synthetic construct
  source 1..20: mol_type = other DNA
tagccagaccgcagtgcaag

SEQ ID NO: 24412 - DNA, 20 bp, synthetic construct
  source 1..20: mol_type = other DNA
caggaggcagaaggcaatgc

SEQ ID NO: 24413 - DNA, 20 bp, synthetic construct
  source 1..20: mol_type = other DNA
ggaggtgctcactttcgaga

SEQ ID NO: 24414 - DNA, 20 bp, synthetic construct
  source 1..20: mol_type = other DNA
ctacctctctgcgtgtaccc

SEQ ID NO: 24415 - DNA, 20 bp, synthetic construct
  source 1..20: mol_type = other DNA
tgatccgagtggccatcctc

SEQ ID NO: 24416 - DNA, 20 bp, synthetic construct
  source 1..20: mol_type = other DNA
ggtcggaatgcagccaagcg

SEQ ID NO: 24417 - DNA, 20 bp, synthetic construct
  source 1..20: mol_type = other DNA
ccccaaacaggccatccgtg

SEQ ID NO: 24418 - DNA, 20 bp, synthetic construct
  source 1..20: mol_type = other DNA
ccacatctcatgccagagga

SEQ ID NO: 24419 - DNA, 20 bp, synthetic construct
  source 1..20: mol_type = other DNA
caaccaggcctggcatgcgt

SEQ ID NO: 24420 - DNA, 20 bp, synthetic construct
  source 1..20: mol_type = other DNA
gtgctatattggctggtgag

SEQ ID NO: 24421 - DNA, 20 bp, synthetic construct
  source 1..20: mol_type = other DNA
ttaggtaaagcttccctcac

SEQ ID NO: 24422 - DNA, 20 bp, synthetic construct
  source 1..20: mol_type = other DNA
atagcgtctgagagaagaaa

SEQ ID NO: 24423 - DNA, 20 bp, synthetic construct
  source 1..20: mol_type = other DNA
gaattcagccaagtttaaga

SEQ ID NO: 24424 - DNA, 20 bp, synthetic construct
  source 1..20: mol_type = other DNA
cagggtacacgcagagaggt

SEQ ID NO: 24425 - DNA, 20 bp, synthetic construct
  source 1..20: mol_type = other DNA
tacactcaggtatcagagaa

SEQ ID NO: 24426 - DNA, 20 bp, synthetic construct
  source 1..20: mol_type = other DNA
ccagaccgcagtgcaagtgg

SEQ ID NO: 24427 - DNA, 20 bp, synthetic construct
  source 1..20: mol_type = other DNA
ctatggtcgagatttaatgg

SEQ ID NO: 24428 - DNA, 20 bp, synthetic construct
  source 1..20: mol_type = other DNA
ggcagaaaatccttatggtg

SEQ ID NO: 24429 - DNA, 20 bp, synthetic construct
  source 1..20: mol_type = other DNA
catgccacatctcatgccag

SEQ ID NO: 24430 - DNA, 20 bp, synthetic construct
  source 1..20: mol_type = other DNA
ctacccagctgtgtccatgg

SEQ ID NO: 24431 - DNA, 20 bp, synthetic construct
  source 1..20: mol_type = other DNA
ggtacaaggtgatcagaagc

SEQ ID NO: 24432 - DNA, 20 bp, synthetic construct
  source 1..20: mol_type = other DNA
ccagctgcggtcgtgctctg

SEQ ID NO: 24433 - DNA, 20 bp, synthetic construct
  source 1..20: mol_type = other DNA
aggaacgtgggcatgacctg

SEQ ID NO: 24434 - DNA, 20 bp, synthetic construct
  source 1..20: mol_type = other DNA
gaccaggtgccccagcatgc

SEQ ID NO: 24435 - DNA, 20 bp, synthetic construct
  source 1..20: mol_type = other DNA
cgcacagtggcgaacaaatt

SEQ ID NO: 24436 - DNA, 20 bp, synthetic construct
  source 1..20: mol_type = other DNA
ctcgtgcagtttctcatacc

SEQ ID NO: 24437 - DNA, 20 bp, synthetic construct
  source 1..20: mol_type = other DNA
ccccaggcctgtgatcccac

SEQ ID NO: 24438 - DNA, 20 bp, synthetic construct
  source 1..20: mol_type = other DNA
gctggggaagaaggtaagat

SEQ ID NO: 24439 - DNA, 20 bp, synthetic construct
  source 1..20: mol_type = other DNA
atggactgaatgcgaatgat

SEQ ID NO: 24440 - DNA, 20 bp, synthetic construct
  source 1..20: mol_type = other DNA
ctcgtgacaaggagatggaa

SEQ ID NO: 24441 - DNA, 20 bp, synthetic construct
  source 1..20: mol_type = other DNA
aaaccaattcaaaaatgtga

SEQ ID NO: 24442 - DNA, 20 bp, synthetic construct
  source 1..20: mol_type = other DNA
tctgatacctgagtgtatcc

SEQ ID NO: 24443 - DNA, 20 bp, synthetic construct
  source 1..20: mol_type = other DNA
tggccagaagggtgttaacc

SEQ ID NO: 24444 - DNA, 20 bp, synthetic construct
  source 1..20: mol_type = other DNA
cggtccagcatcaggttgga

SEQ ID NO: 24445 - DNA, 20 bp, synthetic construct
  source 1..20: mol_type = other DNA
gagaagtcccgacctagcac

SEQ ID NO: 24446 - DNA, 20 bp, synthetic construct
  source 1..20: mol_type = other DNA
gctgatgcaagtgaagactg

SEQ ID NO: 24447 - DNA, 20 bp, synthetic construct
  source 1..20: mol_type = other DNA
aacactccggccgctgcctc

SEQ ID NO: 24448 - DNA, 20 bp, synthetic construct
  source 1..20: mol_type = other DNA
gccagtcctctacgatacgc

SEQ ID NO: 24449 - DNA, 20 bp, synthetic construct
  source 1..20: mol_type = other DNA
gctatattggctggtgagtg

SEQ ID NO: 24450 - DNA, 20 bp, synthetic construct
  source 1..20: mol_type = other DNA
cacactgcacgccctcatcc

SEQ ID NO: 24451 - DNA, 20 bp, synthetic construct
  source 1..20: mol_type = other DNA
gccccagcagtcaaatgcct

SEQ ID NO: 24452 - DNA, 20 bp, synthetic construct
  source 1..20: mol_type = other DNA
ggtttttccgaagagatgtt

SEQ ID NO: 24453 - DNA, 20 bp, synthetic construct
  source 1..20: mol_type = other DNA
aaggaacgtgggcatgacct

SEQ ID NO: 24454 - DNA, 20 bp, synthetic construct
  source 1..20: mol_type = other DNA
tgatcaccttgtaccagctg

SEQ ID NO: 24455 - DNA, 20 bp, synthetic construct
  source 1..20: mol_type = other DNA
agccaatatagcactggcag

SEQ ID NO: 24456 - DNA, 20 bp, synthetic construct
  source 1..20: mol_type = other DNA
tgaccaggtgtttgagatcc

SEQ ID NO: 24457 - DNA, 20 bp, synthetic construct
  source 1..20: mol_type = other DNA
ctcaagtatgcaagcctgtg

SEQ ID NO: 24458 - DNA, 20 bp, synthetic construct
  source 1..20: mol_type = other DNA
ttctgcagcggcgatggggt

SEQ ID NO: 24459 - DNA, 20 bp, synthetic construct
  source 1..20: mol_type = other DNA
acacccatccaacctgatgc

SEQ ID NO: 24460 - DNA, 20 bp, synthetic construct
  source 1..20: mol_type = other DNA
ctcaccagccaatatagcac

SEQ ID NO: 24461 - DNA, 20 bp, synthetic construct
  source 1..20: mol_type = other DNA
cctgttgtgccaaggagaag

SEQ ID NO: 24462 - DNA, 20 bp, synthetic construct
  source 1..20: mol_type = other DNA
gcagaagcctcagtggtaca

SEQ ID NO: 24463 - DNA, 20 bp, synthetic construct
  source 1..20: mol_type = other DNA
aggagatgcagaagcctcag

SEQ ID NO: 24464 - DNA, 20 bp, synthetic construct
  source 1..20: mol_type = other DNA
tgcggcccagcatcagctct

SEQ ID NO: 24465 - DNA, 20 bp, synthetic construct
  source 1..20: mol_type = other DNA
gggctgccagcgtatcgtag

SEQ ID NO: 24466 - DNA, 20 bp, synthetic construct
  source 1..20: mol_type = other DNA
ccagcatgccatcgctactg

SEQ ID NO: 24467 - DNA, 20 bp, synthetic construct
  source 1..20: mol_type = other DNA
ggtccagcaggccatgatgg

SEQ ID NO: 24468 - DNA, 20 bp, synthetic construct
  source 1..20: mol_type = other DNA
tgagaatcagacaggcacga

SEQ ID NO: 24469 - DNA, 20 bp, synthetic construct
  source 1..20: mol_type = other DNA
ttgctgcctgtaaggaacag

SEQ ID NO: 24470 - DNA, 20 bp, synthetic construct
  source 1..20: mol_type = other DNA
gacccaccatcatggcctgc

SEQ ID NO: 24471 - DNA, 20 bp, synthetic construct
  source 1..20: mol_type = other DNA
gccttaaaaataagagaaac

SEQ ID NO: 24472 - DNA, 20 bp, synthetic construct
  source 1..20: mol_type = other DNA
aaattactcacctatctccc

SEQ ID NO: 24473 - DNA, 20 bp, synthetic construct
  source 1..20: mol_type = other DNA
tccaagtttcaggaagcatc

SEQ ID NO: 24474 - DNA, 20 bp, synthetic construct
  source 1..20: mol_type = other DNA
catctcttcggaaaaacctc

SEQ ID NO: 24475 - DNA, 20 bp, synthetic construct
  source 1..20: mol_type = other DNA
tcagattccacagctaaaga

SEQ ID NO: 24476 - DNA, 20 bp, synthetic construct
  source 1..20: mol_type = other DNA
tcagaataggctccatgtag

SEQ ID NO: 24477 - DNA, 20 bp, synthetic construct
  source 1..20: mol_type = other DNA
cccactggcacacctgagag

SEQ ID NO: 24478 - DNA, 20 bp, synthetic construct
  source 1..20: mol_type = other DNA
atcgatctgtaacaggacaa

SEQ ID NO: 24479 - DNA, 20 bp, synthetic construct
  source 1..20: mol_type = other DNA
atgaccaggtgtttgagatc

SEQ ID NO: 24480 - DNA, 20 bp, synthetic construct
  source 1..20: mol_type = other DNA
cctacagattttgacagagt

SEQ ID NO: 24481 - DNA, 20 bp, synthetic construct
  source 1..20: mol_type = other DNA
ggatggcctgcgtgggaaag

SEQ ID NO: 24482 - DNA, 20 bp, synthetic construct
  source 1..20: mol_type = other DNA
tcagcctccagttcagcaag

SEQ ID NO: 24483 - DNA, 20 bp, synthetic construct
  source 1..20: mol_type = other DNA
acgcatgccaggcctggttg

SEQ ID NO: 24484 - DNA, 20 bp, synthetic construct
  source 1..20: mol_type = other DNA
gagggagaggtgagaagcca

SEQ ID NO: 24485 - DNA, 20 bp, synthetic construct
  source 1..20: mol_type = other DNA
aggaaaggcatgacaaaggc

SEQ ID NO: 24486 - DNA, 20 bp, synthetic construct
  source 1..20: mol_type = other DNA
ggacagttggtggccagcac

SEQ ID NO: 24487 - DNA, 20 bp, synthetic construct
  source 1..20: mol_type = other DNA
ccaatttgttcgccactgtg

SEQ ID NO: 24488 - DNA, 20 bp, synthetic construct
  source 1..20: mol_type = other DNA
atacactcaggtatcagaga

SEQ ID NO: 24489 - DNA, 20 bp, synthetic construct
  source 1..20: mol_type = other DNA
agctgtgagtgtctacaggg

SEQ ID NO: 24490 - DNA, 20 bp, synthetic construct
  source 1..20: mol_type = other DNA
cggtgaggtccccactgacc

SEQ ID NO: 24491 - DNA, 20 bp, synthetic construct
  source 1..20: mol_type = other DNA
taatacagctggggacgacc

SEQ ID NO: 24492 - DNA, 20 bp, synthetic construct
  source 1..20: mol_type = other DNA
cagcggccttccaagccctg

SEQ ID NO: 24493 - DNA, 20 bp, synthetic construct
  source 1..20: mol_type = other DNA
tgcagaagcctcagtggtac

SEQ ID NO: 24494 - DNA, 20 bp, synthetic construct
  source 1..20: mol_type = other DNA
tgagagattctagaatggca

SEQ ID NO: 24495 - DNA, 20 bp, synthetic construct
  source 1..20: mol_type = other DNA
ggcccttgggcatgcctggg

SEQ ID NO: 24496 - DNA, 20 bp, synthetic construct
  source 1..20: mol_type = other DNA
ccaaccaggcctggcatgcg

SEQ ID NO: 24497 - DNA, 20 bp, synthetic construct
  source 1..20: mol_type = other DNA
atgaccccttgctgaactgg

SEQ ID NO: 24498 - DNA, 20 bp, synthetic construct
  source 1..20: mol_type = other DNA
catgtctccggccctcattg

SEQ ID NO: 24499 - DNA, 20 bp, synthetic construct
  source 1..20: mol_type = other DNA
agcattgaagagatccctga

SEQ ID NO: 24500 - DNA, 20 bp, synthetic construct
  source 1..20: mol_type = other DNA
gcacagccaattcaaggtcc

SEQ ID NO: 24501 - DNA, 20 bp, synthetic construct
  source 1..20: mol_type = other DNA
atgagtccttcagcagctcc

SEQ ID NO: 24502 - DNA, 20 bp, synthetic construct
  source 1..20: mol_type = other DNA
gcatcaggacctcttctcct

SEQ ID NO: 24503 - DNA, 20 bp, synthetic construct
  source 1..20: mol_type = other DNA
acctgagagaggaaggataa

SEQ ID NO: 24504 - DNA, 20 bp, synthetic construct
  source 1..20: mol_type = other DNA
gtgtgagcacagcaacaccc

SEQ ID NO: 24505 - DNA, 20 bp, synthetic construct
  source 1..20: mol_type = other DNA
tccacttttcacagcactgc

SEQ ID NO: 24506 - DNA, 20 bp, synthetic construct
  source 1..20: mol_type = other DNA
accagcagtgctgtgaaaag

SEQ ID NO: 24507 - DNA, 20 bp, synthetic construct
  source 1..20: mol_type = other DNA
gcaggatcttcccactcaga

SEQ ID NO: 24508 - DNA, 20 bp, synthetic construct
  source 1..20: mol_type = other DNA
ccacatgctgtccgagctgg

SEQ ID NO: 24509 - DNA, 20 bp, synthetic construct
  source 1..20: mol_type = other DNA
ccacgcatgccaggcctggt

SEQ ID NO: 24510 - DNA, 20 bp, synthetic construct
  source 1..20: mol_type = other DNA
gaacttgcaggccttgtttg

SEQ ID NO: 24511 - DNA, 20 bp, synthetic construct
  source 1..20: mol_type = other DNA
caccagcttctcacagacat

SEQ ID NO: 24512 - DNA, 20 bp, synthetic construct
  source 1..20: mol_type = other DNA
ttgatcaggtaagtggtgag

SEQ ID NO: 24513 - DNA, 20 bp, synthetic construct
  source 1..20: mol_type = other DNA
caaaaactgaaatggacaag

SEQ ID NO: 24514 - DNA, 20 bp, synthetic construct
  source 1..20: mol_type = other DNA
acaccaacattcccagctgc

SEQ ID NO: 24515 - DNA, 20 bp, synthetic construct
  source 1..20: mol_type = other DNA
aacttctactcactctcatg

SEQ ID NO: 24516 - DNA, 20 bp, synthetic construct
  source 1..20: mol_type = other DNA
agagtcaagtggtcatagtc

SEQ ID NO: 24517 - DNA, 20 bp, synthetic construct
  source 1..20: mol_type = other DNA
gtttgtgttaccttcagaat

SEQ ID NO: 24518 - DNA, 20 bp, synthetic construct
  source 1..20: mol_type = other DNA
agacgtcccaccaagggtct

SEQ ID NO: 24519 - DNA, 20 bp, synthetic construct
  source 1..20: mol_type = other DNA
caatgagctgaggtataacc

SEQ ID NO: 24520 - DNA, 20 bp, synthetic construct
  source 1..20: mol_type = other DNA
gtagtgctttggcatatgct

SEQ ID NO: 24521 - DNA, 20 bp, synthetic construct
  source 1..20: mol_type = other DNA
gtcacgaggcaacaacctcc

SEQ ID NO: 24522 - DNA, 20 bp, synthetic construct
  source 1..20: mol_type = other DNA
agcactggcagaggttttca

SEQ ID NO: 24523 - DNA, 20 bp, synthetic construct
  source 1..20: mol_type = other DNA
gctagctgcaaaagagagga

SEQ ID NO: 24524 - DNA, 20 bp, synthetic construct
  source 1..20: mol_type = other DNA
ccagggcccagcaggagcgc

SEQ ID NO: 24525 - DNA, 20 bp, synthetic construct
  source 1..20: mol_type = other DNA
agtgggtagatgagggcctg

SEQ ID NO: 24526 - DNA, 20 bp, synthetic construct
  source 1..20: mol_type = other DNA
tagagcactgcagtgagggc

SEQ ID NO: 24527 - DNA, 20 bp, synthetic construct
  source 1..20: mol_type = other DNA
cactgtcagtgggtagatga

SEQ ID NO: 24528 - DNA, 20 bp, synthetic construct
  source 1..20: mol_type = other DNA
tggccagctcacggagaacc

SEQ ID NO: 24529 - DNA, 20 bp, synthetic construct
  source 1..20: mol_type = other DNA
ctccctgtagtcccggatga

SEQ ID NO: 24530 - DNA, 20 bp, synthetic construct
  source 1..20: mol_type = other DNA
gcactggcagaggttttcat

SEQ ID NO: 24531 - DNA, 20 bp, synthetic construct
  source 1..20: mol_type = other DNA
aatcagacaggcacgaaggg

SEQ ID NO: 24532 - DNA, 20 bp, synthetic construct
  source 1..20: mol_type = other DNA
ttcatgagggctgaccacaa

SEQ ID NO: 24533 - DNA, 20 bp, synthetic construct
  source 1..20: mol_type = other DNA
caagcgatcccgaacgagga

SEQ ID NO: 24534 - DNA, 20 bp, synthetic construct
  source 1..20: mol_type = other DNA
gtccagcaggccatgatggt

SEQ ID NO: 24535 - DNA, 20 bp, synthetic construct
  source 1..20: mol_type = other DNA
cggatggcctgcgtgggaaa

SEQ ID NO: 24536 - DNA, 20 bp, synthetic construct
  source 1..20: mol_type = other DNA
gtcggaacacatgataatag

SEQ ID NO: 24537 - DNA, 20 bp, synthetic construct
  source 1..20: mol_type = other DNA
gattctagaatggcaggggt

SEQ ID NO: 24538 - DNA, 20 bp, synthetic construct
  source 1..20: mol_type = other DNA
tgaggctagctgcaaaagag

SEQ ID NO: 24539 - DNA, 20 bp, synthetic construct
  source 1..20: mol_type = other DNA
tcactggccagatgtcaatg

SEQ ID NO: 24540 - DNA, 20 bp, synthetic construct
  source 1..20: mol_type = other DNA
cacaacccagcgtgagccga

SEQ ID NO: 24541 - DNA, 20 bp, synthetic construct
  source 1..20: mol_type = other DNA
taacctgcaaaatgaaaaag

SEQ ID NO: 24542 - DNA, 20 bp, synthetic construct
  source 1..20: mol_type = other DNA
cccaaacaggccatccgtga

SEQ ID NO: 24543 - DNA, 20 bp, synthetic construct
  source 1..20: mol_type = other DNA
gctgcagaagaaggtcactg

SEQ ID NO: 24544 - DNA, 20 bp, synthetic construct
  source 1..20: mol_type = other DNA
tgaggtacttacttcccgga

SEQ ID NO: 24545 - DNA, 20 bp, synthetic construct
  source 1..20: mol_type = other DNA
tgacaaggccagggacctgc

SEQ ID NO: 24546 - DNA, 20 bp, synthetic construct
  source 1..20: mol_type = other DNA
tgctatattggctggtgagt

SEQ ID NO: 24547 - DNA, 20 bp, synthetic construct
  source 1..20: mol_type = other DNA
ggtctatttgcctcgcgtgc

SEQ ID NO: 24548 - DNA, 20 bp, synthetic construct
  source 1..20: mol_type = other DNA
aacctgcaaaatgaaaaaga

SEQ ID NO: 24549 - DNA, 20 bp, synthetic construct
  source 1..20: mol_type = other DNA
gctggcgcccacagaaaagc

SEQ ID NO: 24550 - DNA, 20 bp, synthetic construct
  source 1..20: mol_type = other DNA
agagcacaaggacagtgtca

SEQ ID NO: 24551 - DNA, 20 bp, synthetic construct
  source 1..20: mol_type = other DNA
gtcaggattcctgtaagttg

SEQ ID NO: 24552 - DNA, 20 bp, synthetic construct
  source 1..20: mol_type = other DNA
cagcagtcaaatgccttggt

SEQ ID NO: 24553 - DNA, 20 bp, synthetic construct
  source 1..20: mol_type = other DNA
gagtggcagctgaatctaca

SEQ ID NO: 24554 - DNA, 20 bp, synthetic construct
  source 1..20: mol_type = other DNA
gctccagcactatgtcacca

SEQ ID NO: 24555 - DNA, 20 bp, synthetic construct
  source 1..20: mol_type = other DNA
ggagagactgcaggtgagct

SEQ ID NO: 24556 - DNA, 20 bp, synthetic construct
  source 1..20: mol_type = other DNA
catccatataaggtctgatg

SEQ ID NO: 24557 - DNA, 20 bp, synthetic construct
  source 1..20: mol_type = other DNA
ctcaggtatcagagaaggga

SEQ ID NO: 24558 - DNA, 20 bp, synthetic construct
  source 1..20: mol_type = other DNA
ttctaggttacaggcctgga

SEQ ID NO: 24559 - DNA, 20 bp, synthetic construct
  source 1..20: mol_type = other DNA
agtccccaaagtcaatgtgc

SEQ ID NO: 24560 - DNA, 20 bp, synthetic construct
  source 1..20: mol_type = other DNA
catcatggcctgctggacca

SEQ ID NO: 24561 - DNA, 20 bp, synthetic construct
  source 1..20: mol_type = other DNA
gtctcggaagatccgcatca

SEQ ID NO: 24562 - DNA, 20 bp, synthetic construct
  source 1..20: mol_type = other DNA
actctctcatcatcacacca

SEQ ID NO: 24563 - DNA, 20 bp, synthetic construct
  source 1..20: mol_type = other DNA
accttctgccttcacaggtg

SEQ ID NO: 24564 - DNA, 20 bp, synthetic construct
  source 1..20: mol_type = other DNA
tcgagcatcgcatcatgttg

SEQ ID NO: 24565 - DNA, 20 bp, synthetic construct
  source 1..20: mol_type = other DNA
ctgcccacgcatgccaggcc

SEQ ID NO: 24566 - DNA, 20 bp, synthetic construct
  source 1..20: mol_type = other DNA
gcaacaccggctctccacca

SEQ ID NO: 24567 - DNA, 20 bp, synthetic construct
  source 1..20: mol_type = other DNA
tctccttcttgacacagctt

SEQ ID NO: 24568 - DNA, 20 bp, synthetic construct
  source 1..20: mol_type = other DNA
caggttctcatgtcttcatg

SEQ ID NO: 24569 - DNA, 20 bp, synthetic construct
  source 1..20: mol_type = other DNA
tgagaaactgcacgagtggg

SEQ ID NO: 24570 - DNA, 20 bp, synthetic construct
  source 1..20: mol_type = other DNA
ggtccagtgttcgaacaata

SEQ ID NO: 24571 - DNA, 20 bp, synthetic construct
  source 1..20: mol_type = other DNA
gatacctgagtgtatcctgg

SEQ ID NO: 24572 - DNA, 20 bp, synthetic construct
  source 1..20: mol_type = other DNA
agcagtcaaatgccttggtg

SEQ ID NO: 24573 - DNA, 20 bp, synthetic construct
  source 1..20: mol_type = other DNA
cccaggtatgtggagactct

SEQ ID NO: 24574 - DNA, 20 bp, synthetic construct
  source 1..20: mol_type = other DNA
ccaggtatagtgtgtcaggg

SEQ ID NO: 24575 - DNA, 20 bp, synthetic construct
  source 1..20: mol_type = other DNA
ggcacaggcctacaacccga

SEQ ID NO: 24576 - DNA, 20 bp, synthetic construct
  source 1..20: mol_type = other DNA
atccctttatcgaccaactc

SEQ ID NO: 24577 - DNA, 20 bp, synthetic construct
  source 1..20: mol_type = other DNA
tctgccagtgctatattggc

SEQ ID NO: 24578 - DNA, 20 bp, synthetic construct
  source 1..20: mol_type = other DNA
tagccaggtatcaatctgga

SEQ ID NO: 24579 - DNA, 20 bp, synthetic construct
  source 1..20: mol_type = other DNA
ccccaaaacttctgatgtgc

SEQ ID NO: 24580 - DNA, 20 bp, synthetic construct
  source 1..20: mol_type = other DNA
cagacgctatatatatgagg

SEQ ID NO: 24581 - DNA, 20 bp, synthetic construct
  source 1..20: mol_type = other DNA
gtcagggtctgcaagagcaa

SEQ ID NO: 24582 - DNA, 20 bp, synthetic construct
  source 1..20: mol_type = other DNA
tcaccctattgttcgaacac

SEQ ID NO: 24583 - DNA, 20 bp, synthetic construct
  source 1..20: mol_type = other DNA
actagaagagaaacaaccct

SEQ ID NO: 24584 - DNA, 20 bp, synthetic construct
  source 1..20: mol_type = other DNA
tgcagctgtgagtgtctaca

SEQ ID NO: 24585 - DNA, 20 bp, synthetic construct
  source 1..20: mol_type = other DNA
ccaggcctgtaacctagaaa

SEQ ID NO: 24586 - DNA, 20 bp, synthetic construct
  source 1..20: mol_type = other DNA
cacctgaagccaagagaaga

SEQ ID NO: 24587 - DNA, 20 bp, synthetic construct
  source 1..20: mol_type = other DNA
atgagagattctagaatggc

SEQ ID NO: 24588 - DNA, 20 bp, synthetic construct
  source 1..20: mol_type = other DNA
agattctagaatggcagggg

SEQ ID NO: 24589 - DNA, 20 bp, synthetic construct
  source 1..20: mol_type = other DNA
ccatcaagtctctgcaacac

SEQ ID NO: 24590 - DNA, 20 bp, synthetic construct
  source 1..20: mol_type = other DNA
cttcagaataggctccatgt

SEQ ID NO: 24591 - DNA, 20 bp, synthetic construct
  source 1..20: mol_type = other DNA
tgcagctagcctcataggag

SEQ ID NO: 24592 - DNA, 20 bp, synthetic construct
  source 1..20: mol_type = other DNA
cctgcgcaagatgctcatcc

SEQ ID NO: 24593 - DNA, 20 bp, synthetic construct
  source 1..20: mol_type = other DNA
ggcgtgcagtgtgtcacagt

SEQ ID NO: 24594 - DNA, 20 bp, synthetic construct
  source 1..20: mol_type = other DNA
gcgcaggaaaggcatgacaa

SEQ ID NO: 24595 - DNA, 20 bp, synthetic construct
  source 1..20: mol_type = other DNA
atttggtactaaaacaggag

SEQ ID NO: 24596 - DNA, 20 bp, synthetic construct
  source 1..20: mol_type = other DNA
aggcctcgaggcagcgcatg

SEQ ID NO: 24597 - DNA, 20 bp, synthetic construct
  source 1..20: mol_type = other DNA
ggtccagcatcaggttggat

SEQ ID NO: 24598 - DNA, 20 bp, synthetic construct
  source 1..20: mol_type = other DNA
tgcaacaccggctctccacc

SEQ ID NO: 24599 - DNA, 20 bp, synthetic construct
  source 1..20: mol_type = other DNA
tctttagctgtggaatctga

SEQ ID NO: 24600 - DNA, 20 bp, synthetic construct
  source 1..20: mol_type = other DNA
cagggcccagcaggagcgca

SEQ ID NO: 24601 - DNA, 20 bp, synthetic construct
  source 1..20: mol_type = other DNA
tgaaggtaacacaaaccgag

SEQ ID NO: 24602 - DNA, 20 bp, synthetic construct
  source 1..20: mol_type = other DNA
cctgatgagagattctagaa

SEQ ID NO: 24603 - DNA, 20 bp, synthetic construct
  source 1..20: mol_type = other DNA
agaccaggtgccccagcatg

SEQ ID NO: 24604 - DNA, 20 bp, synthetic construct
  source 1..20: mol_type = other DNA
cagctcgttaaggatcaaca

SEQ ID NO: 24605 - DNA, 20 bp, synthetic construct
  source 1..20: mol_type = other DNA
ccagcagtcaaatgccttgg

SEQ ID NO: 24606 - DNA, 20 bp, synthetic construct
  source 1..20: mol_type = other DNA
aagcgagccctggaatggct

SEQ ID NO: 24607 - DNA, 20 bp, synthetic construct
  source 1..20: mol_type = other DNA
cacctgtgaaggcagaaggt

SEQ ID NO: 24608 - DNA, 20 bp, synthetic construct
  source 1..20: mol_type = other DNA
taaaagccctaacacacgga

SEQ ID NO: 24609 - DNA, 20 bp, synthetic construct
  source 1..20: mol_type = other DNA
tcaccttgatagagacaatg

SEQ ID NO: 24610 - DNA, 20 bp, synthetic construct
  source 1..20: mol_type = other DNA
cccataagtgtcaatttccg

SEQ ID NO: 24611 - DNA, 20 bp, synthetic construct
  source 1..20: mol_type = other DNA
tccagatgcttcctgaaact

SEQ ID NO: 24612 - DNA, 20 bp, synthetic construct
  source 1..20: mol_type = other DNA
ttcacaggtgaggatgtcca

SEQ ID NO: 24613 - DNA, 20 bp, synthetic construct
  source 1..20: mol_type = other DNA
tgcagccagtaactgcaaaa

SEQ ID NO: 24614 - DNA, 20 bp, synthetic construct
  source 1..20: mol_type = other DNA
tcaaaccacacctagaacac

SEQ ID NO: 24615 - DNA, 20 bp, synthetic construct
  source 1..20: mol_type = other DNA
tgacatgaccgctaaagaac

SEQ ID NO: 24616 - DNA, 20 bp, synthetic construct
  source 1..20: mol_type = other DNA
agacacagtagcgaatgtca

SEQ ID NO: 24617 - DNA, 20 bp, synthetic construct
  source 1..20: mol_type = other DNA
ctgatgctggaccgtctgag

SEQ ID NO: 24618 - DNA, 20 bp, synthetic construct
  source 1..20: mol_type = other DNA
aagaatgttgaccaatgcta

SEQ ID NO: 24619 - DNA, 20 bp, synthetic construct
  source 1..20: mol_type = other DNA
agacccaagccaagatggcc

SEQ ID NO: 24620 - DNA, 20 bp, synthetic construct
  source 1..20: mol_type = other DNA
ggccgtggtggcggcagtgg

SEQ ID NO: 24621 - DNA, 20 bp, synthetic construct
  source 1..20: mol_type = other DNA
cgttccatctccttgtcacg

SEQ ID NO: 24622 - DNA, 20 bp, synthetic construct
  source 1..20: mol_type = other DNA
tataggtcagtgggacagca

SEQ ID NO: 24623 - DNA, 20 bp, synthetic construct
  source 1..20: mol_type = other DNA
agcaggccatgatggtgggt

SEQ ID NO: 24624 - DNA, 20 bp, synthetic construct
  source 1..20: mol_type = other DNA
gaggcagaaggcaatgcagg

SEQ ID NO: 24625 - DNA, 20 bp, synthetic construct
  source 1..20: mol_type = other DNA
tgctgcctgtaaggaacagt

SEQ ID NO: 24626 - DNA, 20 bp, synthetic construct
  source 1..20: mol_type = other DNA
tggggcgcggccacggcggg

SEQ ID NO: 24627 - DNA, 20 bp, synthetic construct
  source 1..20: mol_type = other DNA
ggctggggcgcggccacggc

SEQ ID NO: 24628 - DNA, 20 bp, synthetic construct
  source 1..20: mol_type = other DNA
tatgctgcagaaataagaat

SEQ ID NO: 24629 - DNA, 20 bp, synthetic construct
  source 1..20: mol_type = other DNA
aaggtgcatgatcgtccacc

SEQ ID NO: 24630 - DNA, 20 bp, synthetic construct
  source 1..20: mol_type = other DNA
gttcacgcagacctcgcctg

SEQ ID NO: 24631 - DNA, 20 bp, synthetic construct
  source 1..20: mol_type = other DNA
tcttcgggccatggcgcggc

SEQ ID NO: 24632 - DNA, 20 bp, synthetic construct
  source 1..20: mol_type = other DNA
tggttctgtgtctaaggaag

SEQ ID NO: 24633 - DNA, 20 bp, synthetic construct
  source 1..20: mol_type = other DNA
gtcttcgggccatggcgcgg

SEQ ID NO: 24634 - DNA, 20 bp, synthetic construct
  source 1..20: mol_type = other DNA
gttacctgtgccggggtctt

SEQ ID NO: 24635 - DNA, 20 bp, synthetic construct
  source 1..20: mol_type = other DNA
agaaatacggtccgaaacgt

SEQ ID NO: 24636 - DNA, 20 bp, synthetic construct
  source 1..20: mol_type = other DNA
gcgccatggcccgaagaccc

SEQ ID NO: 24637 - DNA, 20 bp, synthetic construct
  source 1..20: mol_type = other DNA
cttaccggtgcatctgccac

SEQ ID NO: 24638 - DNA, 20 bp, synthetic construct
  source 1..20: mol_type = other DNA
gtactttctgccatcggtgc

SEQ ID NO: 24639 - DNA, 20 bp, synthetic construct
  source 1..20: mol_type = other DNA
cattttgtgcttcagaaatg

SEQ ID NO: 24640 - DNA, 20 bp, synthetic construct
  source 1..20: mol_type = other DNA
cagaagaacagtcatttgat

SEQ ID NO: 24641 - DNA, 20 bp, synthetic construct
  source 1..20: mol_type = other DNA
tagcagtgacgaggatgatg

SEQ ID NO: 24642 - DNA, 20 bp, synthetic construct
  source 1..20: mol_type = other DNA
tcgcaaagctactgcctgga

SEQ ID NO: 24643 - DNA, 20 bp, synthetic construct
  source 1..20: mol_type = other DNA
tctgtcttcctcttctgtcc

SEQ ID NO: 24644 - DNA, 20 bp, synthetic construct
  source 1..20: mol_type = other DNA
cggcacaggtaacggggagc

SEQ ID NO: 24645 - DNA, 20 bp, synthetic construct
  source 1..20: mol_type = other DNA
ctcgcctgtggcagatgcac

SEQ ID NO: 24646 - DNA, 20 bp, synthetic construct
  source 1..20: mol_type = other DNA
cgaacaggaaggttatctgc

SEQ ID NO: 24647 - DNA, 20 bp, synthetic construct
  source 1..20: mol_type = other DNA
atccgctggcagagatggag

SEQ ID NO: 24648 - DNA, 20 bp, synthetic construct
  source 1..20: mol_type = other DNA
tgtctccatgaggtctggtg

SEQ ID NO: 24649 - DNA, 20 bp, synthetic construct
  source 1..20: mol_type = other DNA
ttctgctcacaccactggga

SEQ ID NO: 24650 - DNA, 20 bp, synthetic construct
  source 1..20: mol_type = other DNA
atagagcttgtacagaaata

SEQ ID NO: 24651 - DNA, 20 bp, synthetic construct
  source 1..20: mol_type = other DNA
aggtgcatgatcgtccacca

SEQ ID NO: 24652 - DNA, 20 bp, synthetic construct
  source 1..20: mol_type = other DNA
ttattgccaagcacttaaag

SEQ ID NO: 24653 - DNA, 20 bp, synthetic construct
  source 1..20: mol_type = other DNA
tggcccgaagaccccggcac

SEQ ID NO: 24654 - DNA, 20 bp, synthetic construct
  source 1..20: mol_type = other DNA
gaattctacaatgcgtcgga

SEQ ID NO: 24655 - DNA, 20 bp, synthetic construct
  source 1..20: mol_type = other DNA
gaacttactagcatcttcag

SEQ ID NO: 24656 - DNA, 20 bp, synthetic construct
  source 1..20: mol_type = other DNA
accaggcacacaagagactg

SEQ ID NO: 24657 - DNA, 20 bp, synthetic construct
  source 1..20: mol_type = other DNA
gggccatggcgcggcgggcg

SEQ ID NO: 24658 - DNA, 20 bp, synthetic construct
  source 1..20: mol_type = other DNA
gacgcattgtagaattccag

SEQ ID NO: 24659 - DNA, 20 bp, synthetic construct
  source 1..20: mol_type = other DNA
tcaaccgagaatgagctaaa

SEQ ID NO: 24660 - DNA, 20 bp, synthetic construct
  source 1..20: mol_type = other DNA
ctccactccatctctgccag

SEQ ID NO: 24661 - DNA, 20 bp, synthetic construct
  source 1..20: mol_type = other DNA
ggtttagtactttctgccat

SEQ ID NO: 24662 - DNA, 20 bp, synthetic construct
  source 1..20: mol_type = other DNA
actggaattctacaatgcgt

SEQ ID NO: 24663 - DNA, 20 bp, synthetic construct
  source 1..20: mol_type = other DNA
acaggtaacggggagccggg

SEQ ID NO: 24664 - DNA, 20 bp, synthetic construct
  source 1..20: mol_type = other DNA
aaaagccagccagccagcag

SEQ ID NO: 24665 - DNA, 20 bp, synthetic construct
  source 1..20: mol_type = other DNA
acctgaatggctgcggcagc

SEQ ID NO: 24666 - DNA, 20 bp, synthetic construct
  source 1..20: mol_type = other DNA
ctgaggctaaacggaagagt

SEQ ID NO: 24667 - DNA, 20 bp, synthetic construct
  source 1..20: mol_type = other DNA
tctgtaagtagaattgtgaa

SEQ ID NO: 24668 - DNA, 20 bp, synthetic construct
  source 1..20: mol_type = other DNA
ggggaaaacaaggtggaccc

SEQ ID NO: 24669 - DNA, 20 bp, synthetic construct
  source 1..20: mol_type = other DNA
gcaataacagaccaacgttt

SEQ ID NO: 24670 - DNA, 20 bp, synthetic construct
  source 1..20: mol_type = other DNA
atgattagttacctcttccc

SEQ ID NO: 24671 - DNA, 20 bp, synthetic construct
  source 1..20: mol_type = other DNA
ggttctgtgtctaaggaagg

SEQ ID NO: 24672 - DNA, 20 bp, synthetic construct
  source 1..20: mol_type = other DNA
caagagactggggaacagat

SEQ ID NO: 24673 - DNA, 20 bp, synthetic construct
  source 1..20: mol_type = other DNA
tctgaggctaaacggaagag

SEQ ID NO: 24674 - DNA, 20 bp, synthetic construct
  source 1..20: mol_type = other DNA
tccccagtctcttgtgtgcc

SEQ ID NO: 24675 - DNA, 20 bp, synthetic construct
  source 1..20: mol_type = other DNA
tctgctcacaccactgggaa

SEQ ID NO: 24676 - DNA, 20 bp, synthetic construct
  source 1..20: mol_type = other DNA
agagtaagttctttcttcat

SEQ ID NO: 24677 - DNA, 20 bp, synthetic construct
  source 1..20: mol_type = other DNA
ctgctcacaccactgggaag

SEQ ID NO: 24678 - DNA, 20 bp, synthetic construct
  source 1..20: mol_type = other DNA
gtctcacatgaccagcgtcc

SEQ ID NO: 24679 - DNA, 20 bp, synthetic construct
  source 1..20: mol_type = other DNA
gaaaacaatgtagggagagg

SEQ ID NO: 24680 - DNA, 20 bp, synthetic construct
  source 1..20: mol_type = other DNA
ggaagacagaattatttacc

SEQ ID NO: 24681 - DNA, 20 bp, synthetic construct
  source 1..20: mol_type = other DNA
cggtgcatctgccacaggcg

SEQ ID NO: 24682 - DNA, 20 bp, synthetic construct
  source 1..20: mol_type = other DNA
caaggacccttgatgagctc

SEQ ID NO: 24683 - DNA, 20 bp, synthetic construct
  source 1..20: mol_type = other DNA
cctgcgagggagagaagggt

SEQ ID NO: 24684 - DNA, 20 bp, synthetic construct
  source 1..20: mol_type = other DNA
tggacgatcatgcaccttgc

SEQ ID NO: 24685 - DNA, 20 bp, synthetic construct
  source 1..20: mol_type = other DNA
gctccccgttacctgtgccg

SEQ ID NO: 24686 - DNA, 20 bp, synthetic construct
  source 1..20: mol_type = other DNA
gaaaatactgtgtaagtctt

SEQ ID NO: 24687 - DNA, 20 bp, synthetic construct
  source 1..20: mol_type = other DNA
ggctccccgttacctgtgcc

SEQ ID NO: 24688 - DNA, 20 bp, synthetic construct
  source 1..20: mol_type = other DNA
gaaaacctcctggacagaag

SEQ ID NO: 24689 - DNA, 20 bp, synthetic construct
  source 1..20: mol_type = other DNA
tgtctcacatgaccagcgtc

SEQ ID NO: 24690 - DNA, 20 bp, synthetic construct
  source 1..20: mol_type = other DNA
gctcattctcggttgacatt

SEQ ID NO: 24691 - DNA, 20 bp, synthetic construct
  source 1..20: mol_type = other DNA
acagctcaactccctgccac

SEQ ID NO: 24692 - DNA, 20 bp, synthetic construct
  source 1..20: mol_type = other DNA
atggtggtgctgtgccaccc

SEQ ID NO: 24693 - DNA, 20 bp, synthetic construct
  source 1..20: mol_type = other DNA
gccatggcgcggcgggcgcg

SEQ ID NO: 24694 - DNA, 20 bp, synthetic construct
  source 1..20: mol_type = other DNA
gaagaccccggcacaggtaa

SEQ ID NO: 24695 - DNA, 20 bp, synthetic construct
  source 1..20: mol_type = other DNA
gatcatgcaccttgctggcg

SEQ ID NO: 24696 - DNA, 20 bp, synthetic construct
  source 1..20: mol_type = other DNA
ttacctgtgccggggtcttc

SEQ ID NO: 24697 - DNA, 20 bp, synthetic construct
  source 1..20: mol_type = other DNA
catttacagtacctaaaaac

SEQ ID NO: 24698 - DNA, 20 bp, synthetic construct
  source 1..20: mol_type = other DNA
ggatgaaaaactgaagaagc

SEQ ID NO: 24699 - DNA, 20 bp, synthetic construct
  source 1..20: mol_type = other DNA
aaggacccttgatgagctca

SEQ ID NO: 24700 - DNA, 20 bp, synthetic construct
  source 1..20: mol_type = other DNA
cgtcggaaggtcgaacagga

SEQ ID NO: 24701 - DNA, 20 bp, synthetic construct
  source 1..20: mol_type = other DNA
caggtaacggggagccgggc

SEQ ID NO: 24702 - DNA, 20 bp, synthetic construct
  source 1..20: mol_type = other DNA
tgtgtctaaggaagggggaa

SEQ ID NO: 24703 - DNA, 20 bp, synthetic construct
  source 1..20: mol_type = other DNA
aattctcccctttaagtgct

SEQ ID NO: 24704 - DNA, 20 bp, synthetic construct
  source 1..20: mol_type = other DNA
gagaattggaaaacaatgta

SEQ ID NO: 24705 - DNA, 20 bp, synthetic construct
  source 1..20: mol_type = other DNA
ggagaattggaaaacaatgt

SEQ ID NO: 24706 - DNA, 20 bp, synthetic construct
  source 1..20: mol_type = other DNA
gtctctgaaattacaaagta

SEQ ID NO: 24707 - DNA, 20 bp, synthetic construct
  source 1..20: mol_type = other DNA
ttattcgcttttccttctca

SEQ ID NO: 24708 - DNA, 20 bp, synthetic construct
  source 1..20: mol_type = other DNA
aacagaatggaacagatgac

SEQ ID NO: 24709 - DNA, 20 bp, synthetic construct
  source 1..20: mol_type = other DNA
taccaggcacacaagagact

SEQ ID NO: 24710 - DNA, 20 bp, synthetic construct
  source 1..20: mol_type = other DNA
ggggtcttcgggccatggcg

SEQ ID NO: 24711 - DNA, 20 bp, synthetic construct
  source 1..20: mol_type = other DNA
gtcttcctcttctgtccagg

SEQ ID NO: 24712 - DNA, 20 bp, synthetic construct
  source 1..20: mol_type = other DNA
gaatgagctaaaaggacagc

SEQ ID NO: 24713 - DNA, 20 bp, synthetic construct
  source 1..20: mol_type = other DNA
agaacttactagcatcttca

SEQ ID NO: 24714 - DNA, 20 bp, synthetic construct
  source 1..20: mol_type = other DNA
gctacaaggctgatggagaa

SEQ ID NO: 24715 - DNA, 20 bp, synthetic construct
  source 1..20: mol_type = other DNA
atgtgcagtgccagcaccga

SEQ ID NO: 24716 - DNA, 20 bp, synthetic construct
  source 1..20: mol_type = other DNA
ggtagggagccaggatccgc

SEQ ID NO: 24717 - DNA, 20 bp, synthetic construct
  source 1..20: mol_type = other DNA
tgatcttcttctttggtcca

SEQ ID NO: 24718 - DNA, 20 bp, synthetic construct
  source 1..20: mol_type = other DNA
caggaggttttcttaacttc

SEQ ID NO: 24719 - DNA, 20 bp, synthetic construct
  source 1..20: mol_type = other DNA
cagaagttaagaaaacctcc

SEQ ID NO: 24720 - DNA, 20 bp, synthetic construct
  source 1..20: mol_type = other DNA
gaaatcgcaaagctactgcc

SEQ ID NO: 24721 - DNA, 20 bp, synthetic construct
  source 1..20: mol_type = other DNA
cattatccagaatggtgccc

SEQ ID NO: 24722 - DNA, 20 bp, synthetic construct
  source 1..20: mol_type = other DNA
ggccatggcgcggcgggcgc

SEQ ID NO: 24723 - DNA, 20 bp, synthetic construct
  source 1..20: mol_type = other DNA
tcttaacttctggattcaag

SEQ ID NO: 24724 - DNA, 20 bp, synthetic construct
  source 1..20: mol_type = other DNA
tacttacagaatctataaat

SEQ ID NO: 24725 - DNA, 20 bp, synthetic construct
  source 1..20: mol_type = other DNA
tctctgaaattacaaagtaa

SEQ ID NO: 24726 - DNA, 20 bp, synthetic construct
  source 1..20: mol_type = other DNA
tgagaaggaaaagcgaataa

SEQ ID NO: 24727 - DNA, 20 bp, synthetic construct
  source 1..20: mol_type = other DNA
gaggcgaacacacaacgtct

SEQ ID NO: 24728 - DNA, 20 bp, synthetic construct
  source 1..20: mol_type = other DNA
gcatcgtcgcgggaggctgc

SEQ ID NO: 24729 - DNA, 20 bp, synthetic construct
  source 1..20: mol_type = other DNA
gcgtgaccagatcccggagt

SEQ ID NO: 24730 - DNA, 20 bp, synthetic construct
  source 1..20: mol_type = other DNA
gttttagctcgttcctcctc

SEQ ID NO: 24731 - DNA, 20 bp, synthetic construct
  source 1..20: mol_type = other DNA
acgttgaggggcatcgtcgc

SEQ ID NO: 24732 - DNA, 20 bp, synthetic construct
  source 1..20: mol_type = other DNA
cgcgggaggctgctggagcg

SEQ ID NO: 24733 - DNA, 20 bp, synthetic construct
  source 1..20: mol_type = other DNA
caggctgcgcgcaaagacag

SEQ ID NO: 24734 - DNA, 20 bp, synthetic construct
  source 1..20: mol_type = other DNA
cacggccgaccagctggaga

SEQ ID NO: 24735 - DNA, 20 bp, synthetic construct
  source 1..20: mol_type = other DNA
ttcttccagatatcctcgct

SEQ ID NO: 24736 - DNA, 20 bp, synthetic construct
  source 1..20: mol_type = other DNA
aacgttgaggggcatcgtcg

SEQ ID NO: 24737 - DNA, 20 bp, synthetic construct
  source 1..20: mol_type = other DNA
gacggacaggatgtatgctg

SEQ ID NO: 24738 - DNA, 20 bp, synthetic construct
  source 1..20: mol_type = other DNA
ccagagtttcatctgcgacc

SEQ ID NO: 24739 - DNA, 20 bp, synthetic construct
  source 1..20: mol_type = other DNA
cagatatcctcgctgggcgc

SEQ ID NO: 24740 - DNA, 20 bp, synthetic construct
  source 1..20: mol_type = other DNA
atccaggactgtatgtggag

SEQ ID NO: 24741 - DNA, 20 bp, synthetic construct
  source 1..20: mol_type = other DNA
tgcgtagttgtgctgatgtg

SEQ ID NO: 24742 - DNA, 20 bp, synthetic construct
  source 1..20: mol_type = other DNA
tcgacggagtcctccccgca

SEQ ID NO: 24743 - DNA, 20 bp, synthetic construct
  source 1..20: mol_type = other DNA
ttgaggggcatcgtcgcggg

SEQ ID NO: 24744 - DNA, 20 bp, synthetic construct
  source 1..20: mol_type = other DNA
tcctcgtcgcagtagaaata

SEQ ID NO: 24745 - DNA, 20 bp, synthetic construct
  source 1..20: mol_type = other DNA
tgccctgcgtgaccagatcc

SEQ ID NO: 24746 - DNA, 20 bp, synthetic construct
  source 1..20: mol_type = other DNA
ctgtatgtggagcggcttct

SEQ ID NO: 24747 - DNA, 20 bp, synthetic construct
  source 1..20: mol_type = other DNA
agccgctccacatacagtcc

SEQ ID NO: 24748 - DNA, 20 bp, synthetic construct
  source 1..20: mol_type = other DNA
cttaccagagtcgctgctgg

SEQ ID NO: 24749 - DNA, 20 bp, synthetic construct
  source 1..20: mol_type = other DNA
tttaaggataactaccttgg

SEQ ID NO: 24750 - DNA, 20 bp, synthetic construct
  source 1..20: mol_type = other DNA
cgttcaagaacagagacagg

SEQ ID NO: 24751 - DNA, 20 bp, synthetic construct
  source 1..20: mol_type = other DNA
gagagcagccaggggaaggg

SEQ ID NO: 24752 - DNA, 20 bp, synthetic construct
  source 1..20: mol_type = other DNA
tggggatcagtcgcttctga

SEQ ID NO: 24753 - DNA, 20 bp, synthetic construct
  source 1..20: mol_type = other DNA
aaagatggcagaagaagtgg

SEQ ID NO: 24754 - DNA, 20 bp, synthetic construct
  source 1..20: mol_type = other DNA
atgcaggaagatcaatggta

SEQ ID NO: 24755 - DNA, 20 bp, synthetic construct
  source 1..20: mol_type = other DNA
cagaataatccattaacttc

SEQ ID NO: 24756 - DNA, 20 bp, synthetic construct
  source 1..20: mol_type = other DNA
ggggacaaaggtgatcgtca

SEQ ID NO: 24757 - DNA, 20 bp, synthetic construct
  source 1..20: mol_type = other DNA
ttttggggacgaggcccacc

SEQ ID NO: 24758 - DNA, 20 bp, synthetic construct
  source 1..20: mol_type = other DNA
ccaccagctcgtccatggtg

SEQ ID NO: 24759 - DNA, 20 bp, synthetic construct
  source 1..20: mol_type = other DNA
taccgtccaactacgtggag

SEQ ID NO: 24760 - DNA, 20 bp, synthetic construct
  source 1..20: mol_type = other DNA
agtgatctgaaggaagaggt

SEQ ID NO: 24761 - DNA, 20 bp, synthetic construct
  source 1..20: mol_type = other DNA
tgcactttttttaaagctac

SEQ ID NO: 24762 - DNA, 20 bp, synthetic construct
  source 1..20: mol_type = other DNA
gcataatattttattacatt

SEQ ID NO: 24763 - DNA, 20 bp, synthetic construct
  source 1..20: mol_type = other DNA
aatgtgttcattacagccac

SEQ ID NO: 24764 - DNA, 20 bp, synthetic construct
  source 1..20: mol_type = other DNA
cagcaagcgtggttgagacc

SEQ ID NO: 24765 - DNA, 20 bp, synthetic construct
  source 1..20: mol_type = other DNA
tgcagtcactctttaaacca

SEQ ID NO: 24766 - DNA, 20 bp, synthetic construct
  source 1..20: mol_type = other DNA
gctggcccaggaggagcagg

SEQ ID NO: 24767 - DNA, 20 bp, synthetic construct
  source 1..20: mol_type = other DNA
ccaggccatgatgtccgtgc

SEQ ID NO: 24768 - DNA, 20 bp, synthetic construct
  source 1..20: mol_type = other DNA
caggaggatgattctggaga

SEQ ID NO: 24769 - DNA, 20 bp, synthetic construct
  source 1..20: mol_type = other DNA
ctcctgcctgaaaataccta

SEQ ID NO: 24770 - DNA, 20 bp, synthetic construct
  source 1..20: mol_type = other DNA
gcagtcactctttaaaccag

SEQ ID NO: 24771 - DNA, 20 bp, synthetic construct
  source 1..20: mol_type = other DNA
gagcaggtgagcagtgcccg

SEQ ID NO: 24772 - DNA, 20 bp, synthetic construct
  source 1..20: mol_type = other DNA
ctaggtattttcaggcagga

SEQ ID NO: 24773 - DNA, 20 bp, synthetic construct
  source 1..20: mol_type = other DNA
gcaggtgagcagtgcccgtg

SEQ ID NO: 24774 - DNA, 20 bp, synthetic construct
  source 1..20: mol_type = other DNA
ctgggccagcacggacatca

SEQ ID NO: 24775 - DNA, 20 bp, synthetic construct
  source 1..20: mol_type = other DNA
tgatctacaaacaggccaga

SEQ ID NO: 24776 - DNA, 20 bp, synthetic construct
  source 1..20: mol_type = other DNA
actacgggagcgcggccgag

SEQ ID NO: 24777 - DNA, 20 bp, synthetic construct
  source 1..20: mol_type = other DNA
cctagcttatttctgacgca

SEQ ID NO: 24778 - DNA, 20 bp, synthetic construct
  source 1..20: mol_type = other DNA
ttcagagtgttgaagatgga

SEQ ID NO: 24779 - DNA, 20 bp, synthetic construct
  source 1..20: mol_type = other DNA
ggcccagactgtgaacctgc

SEQ ID NO: 24780 - DNA, 20 bp, synthetic construct
  source 1..20: mol_type = other DNA
tcctagcttatttctgacgc

SEQ ID NO: 24781 - DNA, 20 bp, synthetic construct
  source 1..20: mol_type = other DNA
cctcatccagcaacgccagg

SEQ ID NO: 24782 - DNA, 20 bp, synthetic construct
  source 1..20: mol_type = other DNA
gcactcccagctggacgtga

SEQ ID NO: 24783 - DNA, 20 bp, synthetic construct
  source 1..20: mol_type = other DNA
acaggtacgtgtgctccccg

SEQ ID NO: 24784 - DNA, 20 bp, synthetic construct
  source 1..20: mol_type = other DNA
cgtggttgagacctggaaga

SEQ ID NO: 24785 - DNA, 20 bp, synthetic construct
  source 1..20: mol_type = other DNA
gacgtccagcacctgcgtgg

SEQ ID NO: 24786 - DNA, 20 bp, synthetic construct
  source 1..20: mol_type = other DNA
cttcagagtgttgaagatgg

SEQ ID NO: 24787 - DNA, 20 bp, synthetic construct
  source 1..20: mol_type = other DNA
ctgggcgatcctgcgcacag

SEQ ID NO: 24788 - DNA, 20 bp, synthetic construct
  source 1..20: mol_type = other DNA
tgtagttttcagataagagc

SEQ ID NO: 24789 - DNA, 20 bp, synthetic construct
  source 1..20: mol_type = other DNA
gaatgagccactcggccagc

SEQ ID NO: 24790 - DNA, 20 bp, synthetic construct
  source 1..20: mol_type = other DNA
gacggcggccaggtgaggcg

SEQ ID NO: 24791 - DNA, 20 bp, synthetic construct
  source 1..20: mol_type = other DNA
ccgaaagtgtctggagaagc

SEQ ID NO: 24792 - DNA, 20 bp, synthetic construct
  source 1..20: mol_type = other DNA
gctacagaagaagggggaca

SEQ ID NO: 24793 - DNA, 20 bp, synthetic construct
  source 1..20: mol_type = other DNA
cctaggtattttcaggcagg

SEQ ID NO: 24794 - DNA, 20 bp, synthetic construct
  source 1..20: mol_type = other DNA
aaagaacttacggcaaactc

SEQ ID NO: 24795 - DNA, 20 bp, synthetic construct
  source 1..20: mol_type = other DNA
agggttccatgatataatcc

SEQ ID NO: 24796 - DNA, 20 bp, synthetic construct
  source 1..20: mol_type = other DNA
tcctcgtccatgatggcgcc

SEQ ID NO: 24797 - DNA, 20 bp, synthetic construct
  source 1..20: mol_type = other DNA
ttccctaggtattttcaggc

SEQ ID NO: 24798 - DNA, 20 bp, synthetic construct
  source 1..20: mol_type = other DNA
ccagctggacgtgatggagc

SEQ ID NO: 24799 - DNA, 20 bp, synthetic construct
  source 1..20: mol_type = other DNA
ccaccagctcctgcaccccc

SEQ ID NO: 24800 - DNA, 20 bp, synthetic construct
  source 1..20: mol_type = other DNA
caacttacaagttcaaccgg

SEQ ID NO: 24801 - DNA, 20 bp, synthetic construct
  source 1..20: mol_type = other DNA
ataaaaaaggtcccgccacg

SEQ ID NO: 24802 - DNA, 20 bp, synthetic construct
  source 1..20: mol_type = other DNA
tgcagaagatggtgtgccac

SEQ ID NO: 24803 - DNA, 20 bp, synthetic construct
  source 1..20: mol_type = other DNA
ttccatgatataatcccggg

SEQ ID NO: 24804 - DNA, 20 bp, synthetic construct
  source 1..20: mol_type = other DNA
cttacaagttcaaccggagg

SEQ ID NO: 24805 - DNA, 20 bp, synthetic construct
  source 1..20: mol_type = other DNA
cctgctccatcacgtccagc

SEQ ID NO: 24806 - DNA, 20 bp, synthetic construct
  source 1..20: mol_type = other DNA
ttgcagaagatggtgtgcca

SEQ ID NO: 24807 - DNA, 20 bp, synthetic construct
  source 1..20: mol_type = other DNA
agtgcaggttcaggaaactg

SEQ ID NO: 24808 - DNA, 20 bp, synthetic construct
  source 1..20: mol_type = other DNA
ggccagcaggttcacagtct

SEQ ID NO: 24809 - DNA, 20 bp, synthetic construct
  source 1..20: mol_type = other DNA
ctgctccatcacgtccagct

SEQ ID NO: 24810 - DNA, 20 bp, synthetic construct
  source 1..20: mol_type = other DNA
ttacctcatccagcaacgcc

SEQ ID NO: 24811 - DNA, 20 bp, synthetic construct
  source 1..20: mol_type = other DNA
tgtgttggcagaccccagcg

SEQ ID NO: 24812 - DNA, 20 bp, synthetic construct
  source 1..20: mol_type = other DNA
cctcctgcctgaaaatacct

SEQ ID NO: 24813 - DNA, 20 bp, synthetic construct
  source 1..20: mol_type = other DNA
ggaagtgcagcgctttgccc

SEQ ID NO: 24814 - DNA, 20 bp, synthetic construct
  source 1..20: mol_type = other DNA
ctgaaaacacacacacaagc

SEQ ID NO: 24815 - DNA, 20 bp, synthetic construct
  source 1..20: mol_type = other DNA
gggttccatgatataatccc

SEQ ID NO: 24816 - DNA, 20 bp, synthetic construct
  source 1..20: mol_type = other DNA
cggccagcaggttcacagtc

SEQ ID NO: 24817 - DNA, 20 bp, synthetic construct
  source 1..20: mol_type = other DNA
aagaacttacggcaaactca

SEQ ID NO: 24818 - DNA, 20 bp, synthetic construct
  source 1..20: mol_type = other DNA
ccatcttcaacactctgaag

SEQ ID NO: 24819 - DNA, 20 bp, synthetic construct
  source 1..20: mol_type = other DNA
cctcttcagagtgttgaaga

SEQ ID NO: 24820 - DNA, 20 bp, synthetic construct
  source 1..20: mol_type = other DNA
ttcaggtgttgagccagtgc

SEQ ID NO: 24821 - DNA, 20 bp, synthetic construct
  source 1..20: mol_type = other DNA
acctgtctgaatgagccact

SEQ ID NO: 24822 - DNA, 20 bp, synthetic construct
  source 1..20: mol_type = other DNA
ctgatctacaaacaggccag

SEQ ID NO: 24823 - DNA, 20 bp, synthetic construct
  source 1..20: mol_type = other DNA
gcacacgtacctgtttgccc

SEQ ID NO: 24824 - DNA, 20 bp, synthetic construct
  source 1..20: mol_type = other DNA
ttacaagttcaaccggagga

SEQ ID NO: 24825 - DNA, 20 bp, synthetic construct
  source 1..20: mol_type = other DNA
cattcagacaggtgctttgt

SEQ ID NO: 24826 - DNA, 20 bp, synthetic construct
  source 1..20: mol_type = other DNA
cagcatcaaacagtctggat

SEQ ID NO: 24827 - DNA, 20 bp, synthetic construct
  source 1..20: mol_type = other DNA
acgaaatccaaagcagaggc

SEQ ID NO: 24828 - DNA, 20 bp, synthetic construct
  source 1..20: mol_type = other DNA
tatgcagcaatgaaaactac

SEQ ID NO: 24829 - DNA, 20 bp, synthetic construct
  source 1..20: mol_type = other DNA
gtacatctcaccaccacctg

SEQ ID NO: 24830 - DNA, 20 bp, synthetic construct
  source 1..20: mol_type = other DNA
catagacagattctgtgggg

SEQ ID NO: 24831 - DNA, 20 bp, synthetic construct
  source 1..20: mol_type = other DNA
aagtaccattgctgtgttac

SEQ ID NO: 24832 - DNA, 20 bp, synthetic construct
  source 1..20: mol_type = other DNA
aggcagcgggagaaaggtcg

SEQ ID NO: 24833 - DNA, 20 bp, synthetic construct
  source 1..20: mol_type = other DNA
tcgcccacgccgtccccgca

SEQ ID NO: 24834 - DNA, 20 bp, synthetic construct
  source 1..20: mol_type = other DNA
actcagcgtggccgtggagg

SEQ ID NO: 24835 - DNA, 20 bp, synthetic construct
  source 1..20: mol_type = other DNA
gggcagccggggggccgtga

SEQ ID NO: 24836 - DNA, 20 bp, synthetic construct
  source 1..20: mol_type = other DNA
cgggatgatgcccggtgtgg

SEQ ID NO: 24837 - DNA, 20 bp, synthetic construct
  source 1..20: mol_type = other DNA
gggctgcatcagaaggagag

SEQ ID NO: 24838 - DNA, 20 bp, synthetic construct
  source 1..20: mol_type = other DNA
ggtaggtgaaacgctggtac

SEQ ID NO: 24839 - DNA, 20 bp, synthetic construct
  source 1..20: mol_type = other DNA
gtggaggagaggggctgctg

SEQ ID NO: 24840 - DNA, 20 bp, synthetic construct
  source 1..20: mol_type = other DNA
attttcgtggagaaagcccc

SEQ ID NO: 24841 - DNA, 20 bp, synthetic construct
  source 1..20: mol_type = other DNA
cctccacatcgtggaaaaac

SEQ ID NO: 24842 - DNA, 20 bp, synthetic construct
  source 1..20: mol_type = other DNA
agcaggctcataatcatcag

SEQ ID NO: 24843 - DNA, 20 bp, synthetic construct
  source 1..20: mol_type = other DNA
ccccggtcagtcaaggtcag

SEQ ID NO: 24844 - DNA, 20 bp, synthetic construct
  source 1..20: mol_type = other DNA
gggtggtaggtaaagtgctg

SEQ ID NO: 24845 - DNA, 20 bp, synthetic construct
  source 1..20: mol_type = other DNA
cgggcccactatgagacaga

SEQ ID NO: 24846 - DNA, 20 bp, synthetic construct
  source 1..20: mol_type = other DNA
gggcggcagacaccggcgag

SEQ ID NO: 24847 - DNA, 20 bp, synthetic construct
  source 1..20: mol_type = other DNA
tcaaatactcatagtcgaag

SEQ ID NO: 24848 - DNA, 20 bp, synthetic construct
  source 1..20: mol_type = other DNA
tgcctgccattcccatctgc

SEQ ID NO: 24849 - DNA, 20 bp, synthetic construct
  source 1..20: mol_type = other DNA
tcatggcgcgcagggcggga

SEQ ID NO: 24850 - DNA, 20 bp, synthetic construct
  source 1..20: mol_type = other DNA
gccgcagaagtttctgagcg

SEQ ID NO: 24851 - DNA, 20 bp, synthetic construct
  source 1..20: mol_type = other DNA
gcgccatgaacgcccccgag

SEQ ID NO: 24852 - DNA, 20 bp, synthetic construct
  source 1..20: mol_type = other DNA
taagccgcacgccttctacc

SEQ ID NO: 24853 - DNA, 20 bp, synthetic construct
  source 1..20: mol_type = other DNA
gggggcgttcatggcgcgca

SEQ ID NO: 24854 - DNA, 20 bp, synthetic construct
  source 1..20: mol_type = other DNA
ggccagcaaatgatcctcac

SEQ ID NO: 24855 - DNA, 20 bp, synthetic construct
  source 1..20: mol_type = other DNA
ggctgccttctgtctcatag

SEQ ID NO: 24856 - DNA, 20 bp, synthetic construct
  source 1..20: mol_type = other DNA
ctggcagcatcgactgtgcg

SEQ ID NO: 24857 - DNA, 20 bp, synthetic construct
  source 1..20: mol_type = other DNA
tggacagcaaatttgggaga

SEQ ID NO: 24858 - DNA, 20 bp, synthetic construct
  source 1..20: mol_type = other DNA
ggcgttcatggcgcgcaggg

SEQ ID NO: 24859 - DNA, 20 bp, synthetic construct
  source 1..20: mol_type = other DNA
agcccagcaggctggggctc

SEQ ID NO: 24860 - DNA, 20 bp, synthetic construct
  source 1..20: mol_type = other DNA
cctggcagcatcgactgtgc

SEQ ID NO: 24861 - DNA, 20 bp, synthetic construct
  source 1..20: mol_type = other DNA
ggcagccccaacccgacggc

SEQ ID NO: 24862 - DNA, 20 bp, synthetic construct
  source 1..20: mol_type = other DNA
gtccgcaagggacagcgggg

SEQ ID NO: 24863 - DNA, 20 bp, synthetic construct
  source 1..20: mol_type = other DNA
cacctgcagatgggaatggc

SEQ ID NO: 24864 - DNA, 20 bp, synthetic construct
  source 1..20: mol_type = other DNA
ggctcttctggaaagagaag

SEQ ID NO: 24865 - DNA, 20 bp, synthetic construct
  source 1..20: mol_type = other DNA
ctacatggaaaacaagcctc

SEQ ID NO: 24866 - DNA, 20 bp, synthetic construct
  source 1..20: mol_type = other DNA
cggcagccccaacccgacgg

SEQ ID NO: 24867 - DNA, 20 bp, synthetic construct
  source 1..20: mol_type = other DNA
ccaaaaggaagtattacctg

SEQ ID NO: 24868 - DNA, 20 bp, synthetic construct
  source 1..20: mol_type = other DNA
taccaggtgcaccgaatcac

SEQ ID NO: 24869 - DNA, 20 bp, synthetic construct
  source 1..20: mol_type = other DNA
tcatagtgggcccggtgatg

SEQ ID NO: 24870 - DNA, 20 bp, synthetic construct
  source 1..20: mol_type = other DNA
accccaggaccacggctccc

SEQ ID NO: 24871 - DNA, 20 bp, synthetic construct
  source 1..20: mol_type = other DNA
ccaacttacagcactcgatg

SEQ ID NO: 24872 - DNA, 20 bp, synthetic construct
  source 1..20: mol_type = other DNA
aacgtaagggctgggagctg

SEQ ID NO: 24873 - DNA, 20 bp, synthetic construct
  source 1..20: mol_type = other DNA
tggagaagtcaagctcgtct

SEQ ID NO: 24874 - DNA, 20 bp, synthetic construct
  source 1..20: mol_type = other DNA
gctggttggtcggagagggg

SEQ ID NO: 24875 - DNA, 20 bp, synthetic construct
  source 1..20: mol_type = other DNA
gcccaacttacagcactcga

SEQ ID NO: 24876 - DNA, 20 bp, synthetic construct
  source 1..20: mol_type = other DNA
tcaactcaagcacaaagtac

SEQ ID NO: 24877 - DNA, 20 bp, synthetic construct
  source 1..20: mol_type = other DNA
aacagttgttctgtaaatgg

SEQ ID NO: 24878 - DNA, 20 bp, synthetic construct
  source 1..20: mol_type = other DNA
agcacaaagtacgggccagg

SEQ ID NO: 24879 - DNA, 20 bp, synthetic construct
  source 1..20: mol_type = other DNA
tatgatatggaggaacttca

SEQ ID NO: 24880 - DNA, 20 bp, synthetic construct
  source 1..20: mol_type = other DNA
ggtaaaggccagtctagtgg

SEQ ID NO: 24881 - DNA, 20 bp, synthetic construct
  source 1..20: mol_type = other DNA
agggagtttatcaccagccc

SEQ ID NO: 24882 - DNA, 20 bp, synthetic construct
  source 1..20: mol_type = other DNA
gtttgcagtagtcatcggcg

SEQ ID NO: 24883 - DNA, 20 bp, synthetic construct
  source 1..20: mol_type = other DNA
gttcactgaaaaacaagaaa

SEQ ID NO: 24884 - DNA, 20 bp, synthetic construct
  source 1..20: mol_type = other DNA
gggcagtaaaagcatctact

SEQ ID NO: 24885 - DNA, 20 bp, synthetic construct
  source 1..20: mol_type = other DNA
gcagtaaaagcatctactgg

SEQ ID NO: 24886 - DNA, 20 bp, synthetic construct
  source 1..20: mol_type = other DNA
tgtaaatggaggtcatgaaa

SEQ ID NO: 24887 - DNA, 20 bp, synthetic construct
  source 1..20: mol_type = other DNA
ccaattctcatcagtgacac

SEQ ID NO: 24888 - DNA, 20 bp, synthetic construct
  source 1..20: mol_type = other DNA
cgagcccattatgaaactga

SEQ ID NO: 24889 - DNA, 20 bp, synthetic construct
  source 1..20: mol_type = other DNA
gctcacttacagcactcaac

SEQ ID NO: 24890 - DNA, 20 bp, synthetic construct
  source 1..20: mol_type = other DNA
tggcatcaacagtatggact

SEQ ID NO: 24891 - DNA, 20 bp, synthetic construct
  source 1..20: mol_type = other DNA
cgggctcgcggcctgcaggt

SEQ ID NO: 24892 - DNA, 20 bp, synthetic construct
  source 1..20: mol_type = other DNA
ttacttatacaccaggtacg

SEQ ID NO: 24893 - DNA, 20 bp, synthetic construct
  source 1..20: mol_type = other DNA
caatagatggacgacctcag

SEQ ID NO: 24894 - DNA, 20 bp, synthetic construct
  source 1..20: mol_type = other DNA
agtagtcatcggcgtggccc

SEQ ID NO: 24895 - DNA, 20 bp, synthetic construct
  source 1..20: mol_type = other DNA
agtcacaccaacacctcctg

SEQ ID NO: 24896 - DNA, 20 bp, synthetic construct
  source 1..20: mol_type = other DNA
tcctcttgagccatcctacc

SEQ ID NO: 24897 - DNA, 20 bp, synthetic construct
  source 1..20: mol_type = other DNA
tatgcacagaatgaggtgta

SEQ ID NO: 24898 - DNA, 20 bp, synthetic construct
  source 1..20: mol_type = other DNA
ctggctcaagatctacgggg

SEQ ID NO: 24899 - DNA, 20 bp, synthetic construct
  source 1..20: mol_type = other DNA
ctagaagagatgctgctggc

SEQ ID NO: 24900 - DNA, 20 bp, synthetic construct
  source 1..20: mol_type = other DNA
caaagtcacaaaaactatga

SEQ ID NO: 24901 - DNA, 20 bp, synthetic construct
  source 1..20: mol_type = other DNA
gatgccaagtttcttctcca

SEQ ID NO: 24902 - DNA, 20 bp, synthetic construct
  source 1..20: mol_type = other DNA
cgaaaaggagaaactgatat

SEQ ID NO: 24903 - DNA, 20 bp, synthetic construct
  source 1..20: mol_type = other DNA
ggacaatgtgagcctaagga

SEQ ID NO: 24904 - DNA, 20 bp, synthetic construct
  source 1..20: mol_type = other DNA
ttgctccaggtaaagggtga

SEQ ID NO: 24905 - DNA, 20 bp, synthetic construct
  source 1..20: mol_type = other DNA
gtctctacacagtactgaaa

SEQ ID NO: 24906 - DNA, 20 bp, synthetic construct
  source 1..20: mol_type = other DNA
agtgatgtcctgcagaccaa

SEQ ID NO: 24907 - DNA, 20 bp, synthetic construct
  source 1..20: mol_type = other DNA
gaagttctatatctgaattg

SEQ ID NO: 24908 - DNA, 20 bp, synthetic construct
  source 1..20: mol_type = other DNA
ctcaagatctacggggagga

SEQ ID NO: 24909 - DNA, 20 bp, synthetic construct
  source 1..20: mol_type = other DNA
tatcccattgattgcagatg

SEQ ID NO: 24910 - DNA, 20 bp, synthetic construct
  source 1..20: mol_type = other DNA
cctgcaggccgcgagcccgg

SEQ ID NO: 24911 - DNA, 20 bp, synthetic construct
  source 1..20: mol_type = other DNA
gacctcagtgggaggtagaa

SEQ ID NO: 24912 - DNA, 20 bp, synthetic construct
  source 1..20: mol_type = other DNA
ttgtgaaggtatgagacttt

SEQ ID NO: 24913 - DNA, 20 bp, synthetic construct
  source 1..20: mol_type = other DNA
tgggggacatcctgttgtga

SEQ ID NO: 24914 - DNA, 20 bp, synthetic construct
  source 1..20: mol_type = other DNA
gatcaagctgccatactacc

SEQ ID NO: 24915 - DNA, 20 bp, synthetic construct
  source 1..20: mol_type = other DNA
ggctaccttcagtttcataa

SEQ ID NO: 24916 - DNA, 20 bp, synthetic construct
  source 1..20: mol_type = other DNA
ggcagtaaaagcatctactg

SEQ ID NO: 24917 - DNA, 20 bp, synthetic construct
  source 1..20: mol_type = other DNA
caaactaatgttgtgtacaa

SEQ ID NO: 24918 - DNA, 20 bp, synthetic construct
  source 1..20: mol_type = other DNA
cagttccttcaccctttacc

SEQ ID NO: 24919 - DNA, 20 bp, synthetic construct
  source 1..20: mol_type = other DNA
agagaaaggacttttccact

SEQ ID NO: 24920 - DNA, 20 bp, synthetic construct
  source 1..20: mol_type = other DNA
cagagaaaggacttttccac

SEQ ID NO: 24921 - DNA, 20 bp, synthetic construct
  source 1..20: mol_type = other DNA
catctggctcaagatctacg

SEQ ID NO: 24922 - DNA, 20 bp, synthetic construct
  source 1..20: mol_type = other DNA
ggggcagtaaaagcatctac

SEQ ID NO: 24923 - DNA, 20 bp, synthetic construct
  source 1..20: mol_type = other DNA
accaggtgcatcgaatcact

SEQ ID NO: 24924 - DNA, 20 bp, synthetic construct
  source 1..20: mol_type = other DNA
agcagttacagctgcagtgc

SEQ ID NO: 24925 - DNA, 20 bp, synthetic construct
  source 1..20: mol_type = other DNA
ccattgattgcagatgaggc

SEQ ID NO: 24926 - DNA, 20 bp, synthetic construct
  source 1..20: mol_type = other DNA
cgacctcagtgggaggtaga

SEQ ID NO: 24927 - DNA, 20 bp, synthetic construct
  source 1..20: mol_type = other DNA
atcatctggctcaagatcta

SEQ ID NO: 24928 - DNA, 20 bp, synthetic construct
  source 1..20: mol_type = other DNA
cacctgcaggccgcgagccc

SEQ ID NO: 24929 - DNA, 20 bp, synthetic construct
  source 1..20: mol_type = other DNA
cccacaaacatatgcatcca

SEQ ID NO: 24930 - DNA, 20 bp, synthetic construct
  source 1..20: mol_type = other DNA
acctgcaggccgcgagcccg

SEQ ID NO: 24931 - DNA, 20 bp, synthetic construct
  source 1..20: mol_type = other DNA
tagaggctatctgcagagaa

SEQ ID NO: 24932 - DNA, 20 bp, synthetic construct
  source 1..20: mol_type = other DNA
ggtagaagggaagataatca

SEQ ID NO: 24933 - DNA, 20 bp, synthetic construct
  source 1..20: mol_type = other DNA
agctcacttacagcactcaa

SEQ ID NO: 24934 - DNA, 20 bp, synthetic construct
  source 1..20: mol_type = other DNA
gcacaaagtacgggccaggg

SEQ ID NO: 24935 - DNA, 20 bp, synthetic construct
  source 1..20: mol_type = other DNA
ttcctcttgagccatcctac

SEQ ID NO: 24936 - DNA, 20 bp, synthetic construct
  source 1..20: mol_type = other DNA
taccaggtgcatcgaatcac

SEQ ID NO: 24937 - DNA, 20 bp, synthetic construct
  source 1..20: mol_type = other DNA
caggacatcactttagatga

SEQ ID NO: 24938 - DNA, 20 bp, synthetic construct
  source 1..20: mol_type = other DNA
cgccgccgcccccgggctcg

SEQ ID NO: 24939 - DNA, 20 bp, synthetic construct
  source 1..20: mol_type = other DNA
gtagtcatcggcgtggccca

SEQ ID NO: 24940 - DNA, 20 bp, synthetic construct
  source 1..20: mol_type = other DNA
ccgatgactactgcaaactg

SEQ ID NO: 24941 - DNA, 20 bp, synthetic construct
  source 1..20: mol_type = other DNA
tgaaactgaaggtagccgag

SEQ ID NO: 24942 - DNA, 20 bp, synthetic construct
  source 1..20: mol_type = other DNA
tgatgccaagtttcttctcc

SEQ ID NO: 24943 - DNA, 20 bp, synthetic construct
  source 1..20: mol_type = other DNA
acagcactcaacgggtatag

SEQ ID NO: 24944 - DNA, 20 bp, synthetic construct
  source 1..20: mol_type = other DNA
gctggtaaaggccagtctag

SEQ ID NO: 24945 - DNA, 20 bp, synthetic construct
  source 1..20: mol_type = other DNA
aatagatggacgacctcagt

SEQ ID NO: 24946 - DNA, 20 bp, synthetic construct
  source 1..20: mol_type = other DNA
ccaggtacgaggagtcatga

SEQ ID NO: 24947 - DNA, 20 bp, synthetic construct
  source 1..20: mol_type = other DNA
ctcaccgaaatataggggtg

SEQ ID NO: 24948 - DNA, 20 bp, synthetic construct
  source 1..20: mol_type = other DNA
ccttaccaatctcctagctc

SEQ ID NO: 24949 - DNA, 20 bp, synthetic construct
  source 1..20: mol_type = other DNA
ctctttagtattgattgtgc

SEQ ID NO: 24950 - DNA, 20 bp, synthetic construct
  source 1..20: mol_type = other DNA
taaatctacaaatgtttatt

SEQ ID NO: 24951 - DNA, 20 bp, synthetic construct
  source 1..20: mol_type = other DNA
gtacacatcccacagcccag

SEQ ID NO: 24952 - DNA, 20 bp, synthetic construct
  source 1..20: mol_type = other DNA
tacttgtctatgaacatctg

SEQ ID NO: 24953 - DNA, 20 bp, synthetic construct
  source 1..20: mol_type = other DNA
caggtagtccaccatgggat

SEQ ID NO: 24954 - DNA, 20 bp, synthetic construct
  source 1..20: mol_type = other DNA
acaggtaagattaaaggggt

SEQ ID NO: 24955 - DNA, 20 bp, synthetic construct
  source 1..20: mol_type = other DNA
ttttcggatagtttcggcgg

SEQ ID NO: 24956 - DNA, 20 bp, synthetic construct
  source 1..20: mol_type = other DNA
cgcaggagcagatcccctgg

SEQ ID NO: 24957 - DNA, 20 bp, synthetic construct
  source 1..20: mol_type = other DNA
aacaggtaagattaaagggg

SEQ ID NO: 24958 - DNA, 20 bp, synthetic construct
  source 1..20: mol_type = other DNA
ccaggtagtccaccatggga

SEQ ID NO: 24959 - DNA, 20 bp, synthetic construct
  source 1..20: mol_type = other DNA
ttgggggcttctgttcacag

SEQ ID NO: 24960 - DNA, 20 bp, synthetic construct
  source 1..20: mol_type = other DNA
cacaaacttactttgacctg

SEQ ID NO: 24961 - DNA, 20 bp, synthetic construct
  source 1..20: mol_type = other DNA
ccaggctgtgggcatgcagg

SEQ ID NO: 24962 - DNA, 20 bp, synthetic construct
  source 1..20: mol_type = other DNA
ctttgatttcaggatagtag

SEQ ID NO: 24963 - DNA, 20 bp, synthetic construct
  source 1..20: mol_type = other DNA
tgctgtgcaggatgagaatg

SEQ ID NO: 24964 - DNA, 20 bp, synthetic construct
  source 1..20: mol_type = other DNA
tacttcttgaccaccccaac

SEQ ID NO: 24965 - DNA, 20 bp, synthetic construct
  source 1..20: mol_type = other DNA
acttgtctatgaacatctgt

SEQ ID NO: 24966 - DNA, 20 bp, synthetic construct
  source 1..20: mol_type = other DNA
cttgtctatgaacatctgtg

SEQ ID NO: 24967 - DNA, 20 bp, synthetic construct
  source 1..20: mol_type = other DNA
ttcaggagacatgaaacagc

SEQ ID NO: 24968 - DNA, 20 bp, synthetic construct
  source 1..20: mol_type = other DNA
agcagctctgcagcagacca

SEQ ID NO: 24969 - DNA, 20 bp, synthetic construct
  source 1..20: mol_type = other DNA
gtggaggatttgctgagggc

SEQ ID NO: 24970 - DNA, 20 bp, synthetic construct
  source 1..20: mol_type = other DNA
tgtataaggggctataatcc

SEQ ID NO: 24971 - DNA, 20 bp, synthetic construct
  source 1..20: mol_type = other DNA
tttccagacgcccttgcact

SEQ ID NO: 24972 - DNA, 20 bp, synthetic construct
  source 1..20: mol_type = other DNA
agacctagagtccaagcaaa

SEQ ID NO: 24973 - DNA, 20 bp, synthetic construct
  source 1..20: mol_type = other DNA
ggcaccaggtagtccaccat

SEQ ID NO: 24974 - DNA, 20 bp, synthetic construct
  source 1..20: mol_type = other DNA
gcaagatcaggagcccagcg

SEQ ID NO: 24975 - DNA, 20 bp, synthetic construct
  source 1..20: mol_type = other DNA
tgcccttcacctccaggagc

SEQ ID NO: 24976 - DNA, 20 bp, synthetic construct
  source 1..20: mol_type = other DNA
cctgcatgcccacagcctgg

SEQ ID NO: 24977 - DNA, 20 bp, synthetic construct
  source 1..20: mol_type = other DNA
gcttcggaggaaatctgact

SEQ ID NO: 24978 - DNA, 20 bp, synthetic construct
  source 1..20: mol_type = other DNA
ggatagtagaggaaaggttt

SEQ ID NO: 24979 - DNA, 20 bp, synthetic construct
  source 1..20: mol_type = other DNA
ccttcattctcaacttgtga

SEQ ID NO: 24980 - DNA, 20 bp, synthetic construct
  source 1..20: mol_type = other DNA
gtactcactactgtcataga

SEQ ID NO: 24981 - DNA, 20 bp, synthetic construct
  source 1..20: mol_type = other DNA
tacccgaccaccatgtcctt

SEQ ID NO: 24982 - DNA, 20 bp, synthetic construct
  source 1..20: mol_type = other DNA
ctgcatgcccacagcctggt

SEQ ID NO: 24983 - DNA, 20 bp, synthetic construct
  source 1..20: mol_type = other DNA
cactaagcaggaagatgtgg

SEQ ID NO: 24984 - DNA, 20 bp, synthetic construct
  source 1..20: mol_type = other DNA
cctctgtgtttgtccagctt

SEQ ID NO: 24985 - DNA, 20 bp, synthetic construct
  source 1..20: mol_type = other DNA
tgtgaaggcccatcccatgg

SEQ ID NO: 24986 - DNA, 20 bp, synthetic construct
  source 1..20: mol_type = other DNA
ctagaaagaggttatctgta

SEQ ID NO: 24987 - DNA, 20 bp, synthetic construct
  source 1..20: mol_type = other DNA
ctctcccagctgctatatgc

SEQ ID NO: 24988 - DNA, 20 bp, synthetic construct
  source 1..20: mol_type = other DNA
ttctccagcttcgcaaacct

SEQ ID NO: 24989 - DNA, 20 bp, synthetic construct
  source 1..20: mol_type = other DNA
aggcaccaggtagtccacca

SEQ ID NO: 24990 - DNA, 20 bp, synthetic construct
  source 1..20: mol_type = other DNA
cctgttggcagtgccatctg

SEQ ID NO: 24991 - DNA, 20 bp, synthetic construct
  source 1..20: mol_type = other DNA
cctcacagtgttttcccacc

SEQ ID NO: 24992 - DNA, 20 bp, synthetic construct
  source 1..20: mol_type = other DNA
gcttttcttccggatagcac

SEQ ID NO: 24993 - DNA, 20 bp, synthetic construct
  source 1..20: mol_type = other DNA
ccgaagctggacaaacacag

SEQ ID NO: 24994 - DNA, 20 bp, synthetic construct
  source 1..20: mol_type = other DNA
tttgcaagcagaaggtggag

SEQ ID NO: 24995 - DNA, 20 bp, synthetic construct
  source 1..20: mol_type = other DNA
tgaaaattgtaagaatggac

SEQ ID NO: 24996 - DNA, 20 bp, synthetic construct
  source 1..20: mol_type = other DNA
tctgcagcagaccaaggaga

SEQ ID NO: 24997 - DNA, 20 bp, synthetic construct
  source 1..20: mol_type = other DNA
ggcactcacctgccagctgg

SEQ ID NO: 24998 - DNA, 20 bp, synthetic construct
  source 1..20: mol_type = other DNA
cttctcagatttaacaacct

SEQ ID NO: 24999 - DNA, 20 bp, synthetic construct
  source 1..20: mol_type = other DNA
ctatgatacaaaaacttcag

SEQ ID NO: 25000 - DNA, 20 bp, synthetic construct
  source 1..20: mol_type = other DNA
gcccccgcacctggtgcagg

SEQ ID NO: 25001 - DNA, 20 bp, synthetic construct
  source 1..20: mol_type = other DNA
tacaaaaacttcagaggcag

SEQ ID NO: 25002 - DNA, 20 bp, synthetic construct
  source 1..20: mol_type = other DNA
ccagtccggcgcgggcccca

SEQ ID NO: 25003 - DNA, 20 bp, synthetic construct
  source 1..20: mol_type = other DNA
ggagatgctgcagcgaggta

SEQ ID NO: 25004 - DNA, 20 bp, synthetic construct
  source 1..20: mol_type = other DNA
tcaatcttcatcttgtgata

SEQ ID NO: 25005 - DNA, 20 bp, synthetic construct
  source 1..20: mol_type = other DNA
ccagacgcccctgcacctgg

SEQ ID NO: 25006 - DNA, 20 bp, synthetic construct
  source 1..20: mol_type = other DNA
accttccaccagagggtaat

SEQ ID NO: 25007 - DNA, 20 bp, synthetic construct
  source 1..20: mol_type = other DNA
ctgggagagggaggccgtca

SEQ ID NO: 25008 - DNA, 20 bp, synthetic construct
  source 1..20: mol_type = other DNA
gaccccccagtgcgagccgc

SEQ ID NO: 25009 - DNA, 20 bp, synthetic construct
  source 1..20: mol_type = other DNA
agccatgcatctggcgctgc

SEQ ID NO: 25010 - DNA, 20 bp, synthetic construct
  source 1..20: mol_type = other DNA
cagccatgcatctggcgctg

SEQ ID NO: 25011 - DNA, 20 bp, synthetic construct
  source 1..20: mol_type = other DNA
cttgcatctagccacagaga

SEQ ID NO: 25012 - DNA, 20 bp, synthetic construct
  source 1..20: mol_type = other DNA
gggggctacggaggagctgg

SEQ ID NO: 25013 - DNA, 20 bp, synthetic construct
  source 1..20: mol_type = other DNA
gcccgagccctactcgacta

SEQ ID NO: 25014 - DNA, 20 bp, synthetic construct
  source 1..20: mol_type = other DNA
cctcaccaaccacctgcacc

SEQ ID NO: 25015 - DNA, 20 bp, synthetic construct
  source 1..20: mol_type = other DNA
taaacaggtacccagggcta

SEQ ID NO: 25016 - DNA, 20 bp, synthetic construct
  source 1..20: mol_type = other DNA
gatcacggggcagacgagtg

SEQ ID NO: 25017 - DNA, 20 bp, synthetic construct
  source 1..20: mol_type = other DNA
ccacgggcacccccagcctc

SEQ ID NO: 25018 - DNA, 20 bp, synthetic construct
  source 1..20: mol_type = other DNA
caatcttcatcttgtgatag

SEQ ID NO: 25019 - DNA, 20 bp, synthetic construct
  source 1..20: mol_type = other DNA
tccggaacacaatggcatac

SEQ ID NO: 25020 - DNA, 20 bp, synthetic construct
  source 1..20: mol_type = other DNA
acctattaccctctggtgga

SEQ ID NO: 25021 - DNA, 20 bp, synthetic construct
  source 1..20: mol_type = other DNA
ttcctccccggagtccctgc

SEQ ID NO: 25022 - DNA, 20 bp, synthetic construct
  source 1..20: mol_type = other DNA
accagcagatccaggcactc

SEQ ID NO: 25023 - DNA, 20 bp, synthetic construct
  source 1..20: mol_type = other DNA
ataaacaggtacccagggct

SEQ ID NO: 25024 - DNA, 20 bp, synthetic construct
  source 1..20: mol_type = other DNA
cagctccaccttccaccaga

SEQ ID NO: 25025 - DNA, 20 bp, synthetic construct
  source 1..20: mol_type = other DNA
gggagctcaccctcaaagtc

SEQ ID NO: 25026 - DNA, 20 bp, synthetic construct
  source 1..20: mol_type = other DNA
ccgccaggtgcaggggcgtc

SEQ ID NO: 25027 - DNA, 20 bp, synthetic construct
  source 1..20: mol_type = other DNA
aggctgccacctgtggatac

SEQ ID NO: 25028 - DNA, 20 bp, synthetic construct
  source 1..20: mol_type = other DNA
ggtgcagtggtctgggggtt

SEQ ID NO: 25029 - DNA, 20 bp, synthetic construct
  source 1..20: mol_type = other DNA
caggtgagtgagcaaaaggg

SEQ ID NO: 25030 - DNA, 20 bp, synthetic construct
  source 1..20: mol_type = other DNA
tgccacctgtggatacaggc

SEQ ID NO: 25031 - DNA, 20 bp, synthetic construct
  source 1..20: mol_type = other DNA
gctacgggccacagagggcg

SEQ ID NO: 25032 - DNA, 20 bp, synthetic construct
  source 1..20: mol_type = other DNA
tggctaggtgcagtggtctg

SEQ ID NO: 25033 - DNA, 20 bp, synthetic construct
  source 1..20: mol_type = other DNA
ccagggcagctgggcagagc

SEQ ID NO: 25034 - DNA, 20 bp, synthetic construct
  source 1..20: mol_type = other DNA
gcagcgggagctggagcaag

SEQ ID NO: 25035 - DNA, 20 bp, synthetic construct
  source 1..20: mol_type = other DNA
agaaggaggcgggtgagggt

SEQ ID NO: 25036 - DNA, 20 bp, synthetic construct
  source 1..20: mol_type = other DNA
gccaggtgcaggggcgtctg

SEQ ID NO: 25037 - DNA, 20 bp, synthetic construct
  source 1..20: mol_type = other DNA
caaggacatgactgcccagt

SEQ ID NO: 25038 - DNA, 20 bp, synthetic construct
  source 1..20: mol_type = other DNA
aggaggtgagggggtactga

SEQ ID NO: 25039 - DNA, 20 bp, synthetic construct
  source 1..20: mol_type = other DNA
ggcaagcaatgctcggagct

SEQ ID NO: 25040 - DNA, 20 bp, synthetic construct
  source 1..20: mol_type = other DNA
tccccagacgcccctgcacc

SEQ ID NO: 25041 - DNA, 20 bp, synthetic construct
  source 1..20: mol_type = other DNA
tgcacctggcggtgatcacg

SEQ ID NO: 25042 - DNA, 20 bp, synthetic construct
  source 1..20: mol_type = other DNA
aggtgcagtggtctgggggt

SEQ ID NO: 25043 - DNA, 20 bp, synthetic construct
  source 1..20: mol_type = other DNA
ctgaagtggaggccacagag

SEQ ID NO: 25044 - DNA, 20 bp, synthetic construct
  source 1..20: mol_type = other DNA
aactgaaacgcaagcgagga

SEQ ID NO: 25045 - DNA, 20 bp, synthetic construct
  source 1..20: mol_type = other DNA
cgggagccagtcagtggagc

SEQ ID NO: 25046 - DNA, 20 bp, synthetic construct
  source 1..20: mol_type = other DNA
actctccatgtctctgggct

SEQ ID NO: 25047 - DNA, 20 bp, synthetic construct
  source 1..20: mol_type = other DNA
tggccgccacggtgcccagc

SEQ ID NO: 25048 - DNA, 20 bp, synthetic construct
  source 1..20: mol_type = other DNA
cggagacacgtaggcaacag

SEQ ID NO: 25049 - DNA, 20 bp, synthetic construct
  source 1..20: mol_type = other DNA
cgtcctgcgccgtcagcagg

SEQ ID NO: 25050 - DNA, 20 bp, synthetic construct
  source 1..20: mol_type = other DNA
cccagctgatggcccctacc

SEQ ID NO: 25051 - DNA, 20 bp, synthetic construct
  source 1..20: mol_type = other DNA
acctgtttatgcacatctgt

SEQ ID NO: 25052 - DNA, 20 bp, synthetic construct
  source 1..20: mol_type = other DNA
gcagcgaggtatggactccg

SEQ ID NO: 25053 - DNA, 20 bp, synthetic construct
  source 1..20: mol_type = other DNA
cctggtgcaggtggttggtg

SEQ ID NO: 25054 - DNA, 20 bp, synthetic construct
  source 1..20: mol_type = other DNA
ggctggtcagtctcaccctc

SEQ ID NO: 25055 - DNA, 20 bp, synthetic construct
  source 1..20: mol_type = other DNA
acagcaggctctgtgcgggg

SEQ ID NO: 25056 - DNA, 20 bp, synthetic construct
  source 1..20: mol_type = other DNA
gttacagatctaggagaggc

SEQ ID NO: 25057 - DNA, 20 bp, synthetic construct
  source 1..20: mol_type = other DNA
ctgacggcgcaggacgagaa

SEQ ID NO: 25058 - DNA, 20 bp, synthetic construct
  source 1..20: mol_type = other DNA
ccagtccagctgccaggtgc

SEQ ID NO: 25059 - DNA, 20 bp, synthetic construct
  source 1..20: mol_type = other DNA
cagtccggcgcgggccccat

SEQ ID NO: 25060 - DNA, 20 bp, synthetic construct
  source 1..20: mol_type = other DNA
actgcccagaggccgagcag

SEQ ID NO: 25061 - DNA, 20 bp, synthetic construct
  source 1..20: mol_type = other DNA
ctgcaactgaaacgcaagcg

SEQ ID NO: 25062 - DNA, 20 bp, synthetic construct
  source 1..20: mol_type = other DNA
ccagtgcgagccgcaggccc

SEQ ID NO: 25063 - DNA, 20 bp, synthetic construct
  source 1..20: mol_type = other DNA
ggggggtgtccggaacacaa

SEQ ID NO: 25064 - DNA, 20 bp, synthetic construct
  source 1..20: mol_type = other DNA
tctgcccgtggatgatggct

SEQ ID NO: 25065 - DNA, 20 bp, synthetic construct
  source 1..20: mol_type = other DNA
atcttcatcttgtgataggg

SEQ ID NO: 25066 - DNA, 20 bp, synthetic construct
  source 1..20: mol_type = other DNA
ttctcacctgctgggctggg

SEQ ID NO: 25067 - DNA, 20 bp, synthetic construct
  source 1..20: mol_type = other DNA
tggaaggtggagctgggctg

SEQ ID NO: 25068 - DNA, 20 bp, synthetic construct
  source 1..20: mol_type = other DNA
agtccagctgccaggtgcag

SEQ ID NO: 25069 - DNA, 20 bp, synthetic construct
  source 1..20: mol_type = other DNA
ggccgccacggtgcccagca

SEQ ID NO: 25070 - DNA, 20 bp, synthetic construct
  source 1..20: mol_type = other DNA
cggggcgcagatggccgcca

SEQ ID NO: 25071 - DNA, 20 bp, synthetic construct
  source 1..20: mol_type = other DNA
ctgcacctagccatcatcca

SEQ ID NO: 25072 - DNA, 20 bp, synthetic construct
  source 1..20: mol_type = other DNA
tgcacctggcagctggactg

SEQ ID NO: 25073 - DNA, 20 bp, synthetic construct
  source 1..20: mol_type = other DNA
gccccagggccttacgggta

SEQ ID NO: 25074 - DNA, 20 bp, synthetic construct
  source 1..20: mol_type = other DNA
ctgcagcgaggtatggactc

SEQ ID NO: 25075 - DNA, 20 bp, synthetic construct
  source 1..20: mol_type = other DNA
caactgaaacgcaagcgagg

SEQ ID NO: 25076 - DNA, 20 bp, synthetic construct
  source 1..20: mol_type = other DNA
ccatgtctctgggctaggcc

SEQ ID NO: 25077 - DNA, 20 bp, synthetic construct
  source 1..20: mol_type = other DNA
aatcttcatcttgtgatagg

SEQ ID NO: 25078 - DNA, 20 bp, synthetic construct
  source 1..20: mol_type = other DNA
gagactgaccagccttcaga

SEQ ID NO: 25079 - DNA, 20 bp, synthetic construct
  source 1..20: mol_type = other DNA
tttacccccagcagaggtga

SEQ ID NO: 25080 - DNA, 20 bp, synthetic construct
  source 1..20: mol_type = other DNA
tgcagcgaggtatggactcc

SEQ ID NO: 25081 - DNA, 20 bp, synthetic construct
  source 1..20: mol_type = other DNA
caccttctcccagcccttcg

SEQ ID NO: 25082 - DNA, 20 bp, synthetic construct
  source 1..20: mol_type = other DNA
ctacgggccacagagggcgt

SEQ ID NO: 25083 - DNA, 20 bp, synthetic construct
  source 1..20: mol_type = other DNA
ccagctccaccttccaccag

SEQ ID NO: 25084 - DNA, 20 bp, synthetic construct
  source 1..20: mol_type = other DNA
gccacctgtggatacaggca

SEQ ID NO: 25085 - DNA, 20 bp, synthetic construct
  source 1..20: mol_type = other DNA
ctcgagctacgggccacaga

SEQ ID NO: 25086 - DNA, 20 bp, synthetic construct
  source 1..20: mol_type = other DNA
cttcagaaggaggcgggtga

SEQ ID NO: 25087 - DNA, 20 bp, synthetic construct
  source 1..20: mol_type = other DNA
tcgtcccccctgccgctctg

SEQ ID NO: 25088 - DNA, 20 bp, synthetic construct
  source 1..20: mol_type = other DNA
tcaccttggtgctgcaagtg

SEQ ID NO: 25089 - DNA, 20 bp, synthetic construct
  source 1..20: mol_type = other DNA
tgacagtcccggcccttagg

SEQ ID NO: 25090 - DNA, 20 bp, synthetic construct
  source 1..20: mol_type = other DNA
gggctgtaggccagggagga

SEQ ID NO: 25091 - DNA, 20 bp, synthetic construct
  source 1..20: mol_type = other DNA
gcaagcaatgctcggagctg

SEQ ID NO: 25092 - DNA, 20 bp, synthetic construct
  source 1..20: mol_type = other DNA
cccatacccgtaaggccctg

SEQ ID NO: 25093 - DNA, 20 bp, synthetic construct
  source 1..20: mol_type = other DNA
agcccctaccagtccggcgc

SEQ ID NO: 25094 - DNA, 20 bp, synthetic construct
  source 1..20: mol_type = other DNA
agttgcagaaacactgttac

SEQ ID NO: 25095 - DNA, 20 bp, synthetic construct
  source 1..20: mol_type = other DNA
cagcccctaccagtccggcg

SEQ ID NO: 25096 - DNA, 20 bp, synthetic construct
  source 1..20: mol_type = other DNA
acccgcctccttctgaaggc

SEQ ID NO: 25097 - DNA, 20 bp, synthetic construct
  source 1..20: mol_type = other DNA
gaccagccttcagaaggagg

SEQ ID NO: 25098 - DNA, 20 bp, synthetic construct
  source 1..20: mol_type = other DNA
ggagacacgtaggcaacaga

SEQ ID NO: 25099 - DNA, 20 bp, synthetic construct
  source 1..20: mol_type = other DNA
ccccagggccttacgggtat

SEQ ID NO: 25100 - DNA, 20 bp, synthetic construct
  source 1..20: mol_type = other DNA
gccttccttagagccagtga

SEQ ID NO: 25101 - DNA, 20 bp, synthetic construct
  source 1..20: mol_type = other DNA
gtgcagtggtctgggggttg

SEQ ID NO: 25102 - DNA, 20 bp, synthetic construct
  source 1..20: mol_type = other DNA
cgtagttacagatctaggag

SEQ ID NO: 25103 - DNA, 20 bp, synthetic construct
  source 1..20: mol_type = other DNA
aggcaccgggcagtcctcca

SEQ ID NO: 25104 - DNA, 20 bp, synthetic construct
  source 1..20: mol_type = other DNA
gatccaggcactcagggctt

SEQ ID NO: 25105 - DNA, 20 bp, synthetic construct
  source 1..20: mol_type = other DNA
ctcacctgctgggctgggcg

SEQ ID NO: 25106 - DNA, 20 bp, synthetic construct
  source 1..20: mol_type = other DNA
cctgcacctggcggtgatca

SEQ ID NO: 25107 - DNA, 20 bp, synthetic construct
  source 1..20: mol_type = other DNA
aggtcagtgcacctgaggct

SEQ ID NO: 25108 - DNA, 20 bp, synthetic construct
  source 1..20: mol_type = other DNA
cacgtaggcaacagagggcc

SEQ ID NO: 25109 - DNA, 20 bp, synthetic construct
  source 1..20: mol_type = other DNA
gggcgtctggggatgaaagc

SEQ ID NO: 25110 - DNA, 20 bp, synthetic construct
  source 1..20: mol_type = other DNA
tgctgacctgtttctggggc

SEQ ID NO: 25111 - DNA, 20 bp, synthetic construct
  source 1..20: mol_type = other DNA
cggaacacaatggcatactg

SEQ ID NO: 25112 - DNA, 20 bp, synthetic construct
  source 1..20: mol_type = other DNA
tgcacctagccatcatccac

SEQ ID NO: 25113 - DNA, 20 bp, synthetic construct
  source 1..20: mol_type = other DNA
agattctatggagtgggata

SEQ ID NO: 25114 - DNA, 20 bp, synthetic construct
  source 1..20: mol_type = other DNA
tattaccctctggtggaagg

SEQ ID NO: 25115 - DNA, 20 bp, synthetic construct
  source 1..20: mol_type = other DNA
gctggtcagtctcaccctca

SEQ ID NO: 25116 - DNA, 20 bp, synthetic construct
  source 1..20: mol_type = other DNA
ccgcacctggtgcaggtggt

SEQ ID NO: 25117 - DNA, 20 bp, synthetic construct
  source 1..20: mol_type = other DNA
gtgacagtcccggcccttag

SEQ ID NO: 25118 - DNA, 20 bp, synthetic construct
  source 1..20: mol_type = other DNA
cccagtatgccattgtgttc

SEQ ID NO: 25119 - DNA, 20 bp, synthetic construct
  source 1..20: mol_type = other DNA
cctgaggctgggggtgcccg

SEQ ID NO: 25120 - DNA, 20 bp, synthetic construct
  source 1..20: mol_type = other DNA
gatcgtggaacagcctaagc

SEQ ID NO: 25121 - DNA, 20 bp, synthetic construct
  source 1..20: mol_type = other DNA
tggatgatggctaggtgcag

SEQ ID NO: 25122 - DNA, 20 bp, synthetic construct
  source 1..20: mol_type = other DNA
aagtgaggtcaagaggcgtg

SEQ ID NO: 25123 - DNA, 20 bp, synthetic construct
  source 1..20: mol_type = other DNA
ctacaaggaaaacggaagct

SEQ ID NO: 25124 - DNA, 20 bp, synthetic construct
  source 1..20: mol_type = other DNA
tcccaccttggtgaccagat

SEQ ID NO: 25125 - DNA, 20 bp, synthetic construct
  source 1..20: mol_type = other DNA
gttcacctattaccctctgg

SEQ ID NO: 25126 - DNA, 20 bp, synthetic construct
  source 1..20: mol_type = other DNA
tcctagatctgtaactacga

SEQ ID NO: 25127 - DNA, 20 bp, synthetic construct
  source 1..20: mol_type = other DNA
ggctaggtgcagtggtctgg

SEQ ID NO: 25128 - DNA, 20 bp, synthetic construct
  source 1..20: mol_type = other DNA
actgaccagccttcagaagg

SEQ ID NO: 25129 - DNA, 20 bp, synthetic construct
  source 1..20: mol_type = other DNA
ggatacagtcctaaggatgc

SEQ ID NO: 25130 - DNA, 20 bp, synthetic construct
  source 1..20: mol_type = other DNA
agcagtgcacgcagcagctc

SEQ ID NO: 25131 - DNA, 20 bp, synthetic construct
  source 1..20: mol_type = other DNA
gggaggaggggaagaaaccg

SEQ ID NO: 25132 - DNA, 20 bp, synthetic construct
  source 1..20: mol_type = other DNA
ctcctagatctgtaactacg

SEQ ID NO: 25133 - DNA, 20 bp, synthetic construct
  source 1..20: mol_type = other DNA
ccagcagatccaggcactca

SEQ ID NO: 25134 - DNA, 20 bp, synthetic construct
  source 1..20: mol_type = other DNA
gcatctagccacagagatgg

SEQ ID NO: 25135 - DNA, 20 bp, synthetic construct
  source 1..20: mol_type = other DNA
tgttcttcttagtcacatgc

SEQ ID NO: 25136 - DNA, 20 bp, synthetic construct
  source 1..20: mol_type = other DNA
aagtgacagtcccggccctt

SEQ ID NO: 25137 - DNA, 20 bp, synthetic construct
  source 1..20: mol_type = other DNA
ttctatgaggatgatgagaa

SEQ ID NO: 25138 - DNA, 20 bp, synthetic construct
  source 1..20: mol_type = other DNA
ttgtagatgacattgaggtt

SEQ ID NO: 25139 - DNA, 20 bp, synthetic construct
  source 1..20: mol_type = other DNA
gtcccaccttggtgaccaga

SEQ ID NO: 25140 - DNA, 20 bp, synthetic construct
  source 1..20: mol_type = other DNA
atctgagaagagagaatcgg

SEQ ID NO: 25141 - DNA, 20 bp, synthetic construct
  source 1..20: mol_type = other DNA
actgaaacgcaagcgaggag

SEQ ID NO: 25142 - DNA, 20 bp, synthetic construct
  source 1..20: mol_type = other DNA
agagatggaggagctggggt

SEQ ID NO: 25143 - DNA, 20 bp, synthetic construct
  source 1..20: mol_type = other DNA
gatggctaggtgcagtggtc

SEQ ID NO: 25144 - DNA, 20 bp, synthetic construct
  source 1..20: mol_type = other DNA
acagttcacctattaccctc

SEQ ID NO: 25145 - DNA, 20 bp, synthetic construct
  source 1..20: mol_type = other DNA
ccttcagaaggaggcgggtg

SEQ ID NO: 25146 - DNA, 20 bp, synthetic construct
  source 1..20: mol_type = other DNA
cagtccagctgccaggtgca

SEQ ID NO: 25147 - DNA, 20 bp, synthetic construct
  source 1..20: mol_type = other DNA
ctcaatcttcatcttgtgat

SEQ ID NO: 25148 - DNA, 20 bp, synthetic construct
  source 1..20: mol_type = other DNA
caggggtgtgtttcccgcaa

SEQ ID NO: 25149 - DNA, 20 bp, synthetic construct
  source 1..20: mol_type = other DNA
taaatctgagaagagagaat

SEQ ID NO: 25150 - DNA, 20 bp, synthetic construct
  source 1..20: mol_type = other DNA
tggctccgcggcttcctccc

SEQ ID NO: 25151 - DNA, 20 bp, synthetic construct
  source 1..20: mol_type = other DNA
tgcccgcagcgccagatgca

SEQ ID NO: 25152 - DNA, 20 bp, synthetic construct
  source 1..20: mol_type = other DNA
cgccaggtgcaggggcgtct

SEQ ID NO: 25153 - DNA, 20 bp, synthetic construct
  source 1..20: mol_type = other DNA
gggacagcgccacctgctga

SEQ ID NO: 25154 - DNA, 20 bp, synthetic construct
  source 1..20: mol_type = other DNA
gctgagaagacagaggaatg

SEQ ID NO: 25155 - DNA, 20 bp, synthetic construct
  source 1..20: mol_type = other DNA
tacctgtttatgcacatctg

SEQ ID NO: 25156 - DNA, 20 bp, synthetic construct
  source 1..20: mol_type = other DNA
ggcgtctggggatgaaagca

SEQ ID NO: 25157 - DNA, 20 bp, synthetic construct
  source 1..20: mol_type = other DNA
agaggcagcggctccgctct

SEQ ID NO: 25158 - DNA, 20 bp, synthetic construct
  source 1..20: mol_type = other DNA
ttcgtagactccactccact

SEQ ID NO: 25159 - DNA, 20 bp, synthetic construct
  source 1..20: mol_type = other DNA
gcagcagctcaccgaggacg

SEQ ID NO: 25160 - DNA, 20 bp, synthetic construct
  source 1..20: mol_type = other DNA
tggagtccaggccgctgtcg

SEQ ID NO: 25161 - DNA, 20 bp, synthetic construct
  source 1..20: mol_type = other DNA
gactgcccttcacctcgcag

SEQ ID NO: 25162 - DNA, 20 bp, synthetic construct
  source 1..20: mol_type = other DNA
cctcgtctttcatggagtcc

SEQ ID NO: 25163 - DNA, 20 bp, synthetic construct
  source 1..20: mol_type = other DNA
ctgagtcaggactcccacgc

SEQ ID NO: 25164 - DNA, 20 bp, synthetic construct
  source 1..20: mol_type = other DNA
gcagatggtcaaggagctgc

SEQ ID NO: 25165 - DNA, 20 bp, synthetic construct
  source 1..20: mol_type = other DNA
gctgaagaaggagcggctac

SEQ ID NO: 25166 - DNA, 20 bp, synthetic construct
  source 1..20: mol_type = other DNA
gcacctgctgcaggttgttc

SEQ ID NO: 25167 - DNA, 20 bp, synthetic construct
  source 1..20: mol_type = other DNA
gccaagtgcaggaacctgtg

SEQ ID NO: 25168 - DNA, 20 bp, synthetic construct
  source 1..20: mol_type = other DNA
tggtttcaggagccctgtaa

SEQ ID NO: 25169 - DNA, 20 bp, synthetic construct
  source 1..20: mol_type = other DNA
gcgctcggccgcctggaaca

SEQ ID NO: 25170 - DNA, 20 bp, synthetic construct
  source 1..20: mol_type = other DNA
ctggaagcagcagctcaccg

SEQ ID NO: 25171 - DNA, 20 bp, synthetic construct
  source 1..20: mol_type = other DNA
agtccaggccgctgtcgtgg

SEQ ID NO: 25172 - DNA, 20 bp, synthetic construct
  source 1..20: mol_type = other DNA
attctccctaccagctcacc

SEQ ID NO: 25173 - DNA, 20 bp, synthetic construct
  source 1..20: mol_type = other DNA
ttccagggctccgagccgcg

SEQ ID NO: 25174 - DNA, 20 bp, synthetic construct
  source 1..20: mol_type = other DNA
ctgcgaggtgaagggcagtc

SEQ ID NO: 25175 - DNA, 20 bp, synthetic construct
  source 1..20: mol_type = other DNA
actcgtaagtggcggaggcc

SEQ ID NO: 25176 - DNA, 20 bp, synthetic construct
  source 1..20: mol_type = other DNA
cctccatggcccactcctgg

SEQ ID NO: 25177 - DNA, 20 bp, synthetic construct
  source 1..20: mol_type = other DNA
cccccaggagtgggccatgg

SEQ ID NO: 25178 - DNA, 20 bp, synthetic construct
  source 1..20: mol_type = other DNA
gctcacaggcaaggtgtagg

SEQ ID NO: 25179 - DNA, 20 bp, synthetic construct
  source 1..20: mol_type = other DNA
gcagggctgcctggccagcg

SEQ ID NO: 25180 - DNA, 20 bp, synthetic construct
  source 1..20: mol_type = other DNA
caaccagccagaaattgctg

SEQ ID NO: 25181 - DNA, 20 bp, synthetic construct
  source 1..20: mol_type = other DNA
ttctccctaccagctcacct

SEQ ID NO: 25182 - DNA, 20 bp, synthetic construct
  source 1..20: mol_type = other DNA
ctcacaggcaaggtgtaggg

SEQ ID NO: 25183 - DNA, 20 bp, synthetic construct
  source 1..20: mol_type = other DNA
gcaggaggtgccgcgcggct

SEQ ID NO: 25184 - DNA, 20 bp, synthetic construct
  source 1..20: mol_type = other DNA
ctacacttagcctctatcca

SEQ ID NO: 25185 - DNA, 20 bp, synthetic construct
  source 1..20: mol_type = other DNA
ggagtacgagcagatggtca

SEQ ID NO: 25186 - DNA, 20 bp, synthetic construct
  source 1..20: mol_type = other DNA
tccccacaggttcctgcact

SEQ ID NO: 25187 - DNA, 20 bp, synthetic construct
  source 1..20: mol_type = other DNA
acgctggcggggtgcaggtg

SEQ ID NO: 25188 - DNA, 20 bp, synthetic construct
  source 1..20: mol_type = other DNA
cctgcagaatggagacagtg

SEQ ID NO: 25189 - DNA, 20 bp, synthetic construct
  source 1..20: mol_type = other DNA
catggaggtgagatacagag

SEQ ID NO: 25190 - DNA, 20 bp, synthetic construct
  source 1..20: mol_type = other DNA
attctccaggttgcgcagtg

SEQ ID NO: 25191 - DNA, 20 bp, synthetic construct
  source 1..20: mol_type = other DNA
cagcagcagctgaaccagag

SEQ ID NO: 25192 - DNA, 20 bp, synthetic construct
  source 1..20: mol_type = other DNA
gcgctgggcggcatatgctg

SEQ ID NO: 25193 - DNA, 20 bp, synthetic construct
  source 1..20: mol_type = other DNA
ggacacaatccagcctgtct

SEQ ID NO: 25194 - DNA, 20 bp, synthetic construct
  source 1..20: mol_type = other DNA
gagaactcctgggagcccgt

SEQ ID NO: 25195 - DNA, 20 bp, synthetic construct
  source 1..20: mol_type = other DNA
ttctccaggttgcgcagtgt

SEQ ID NO: 25196 - DNA, 20 bp, synthetic construct
  source 1..20: mol_type = other DNA
ccgggccgcagcaggtgaac

SEQ ID NO: 25197 - DNA, 20 bp, synthetic construct
  source 1..20: mol_type = other DNA
ccaccaggagaggggtctgc

SEQ ID NO: 25198 - DNA, 20 bp, synthetic construct
  source 1..20: mol_type = other DNA
tgccaaccagcccctgattg

SEQ ID NO: 25199 - DNA, 20 bp, synthetic construct
  source 1..20: mol_type = other DNA
cagcagcagcccgacgctgg

SEQ ID NO: 25200 - DNA, 20 bp, synthetic construct
  source 1..20: mol_type = other DNA
taagggccaggatggccgtg

SEQ ID NO: 25201 - DNA, 20 bp, synthetic construct
  source 1..20: mol_type = other DNA
ttcacctgtttgcggctcgg

SEQ ID NO: 25202 - DNA, 20 bp, synthetic construct
  source 1..20: mol_type = other DNA
atggaggtgagatacagagt

SEQ ID NO: 25203 - DNA, 20 bp, synthetic construct
  source 1..20: mol_type = other DNA
agcagcagctgaaccagagt

SEQ ID NO: 25204 - DNA, 20 bp, synthetic construct
  source 1..20: mol_type = other DNA
aacagatcctccacaatcag

SEQ ID NO: 25205 - DNA, 20 bp, synthetic construct
  source 1..20: mol_type = other DNA
ggggcagggcagccgccatg

SEQ ID NO: 25206 - DNA, 20 bp, synthetic construct
  source 1..20: mol_type = other DNA
cctgcagacccctctcctgg

SEQ ID NO: 25207 - DNA, 20 bp, synthetic construct
  source 1..20: mol_type = other DNA
cgtgggcctggaaaagtaag

SEQ ID NO: 25208 - DNA, 20 bp, synthetic construct
  source 1..20: mol_type = other DNA
gtgagcataagggcaaggtg

SEQ ID NO: 25209 - DNA, 20 bp, synthetic construct
  source 1..20: mol_type = other DNA
tgaaggagcctgaggacagg

SEQ ID NO: 25210 - DNA, 20 bp, synthetic construct
  source 1..20: mol_type = other DNA
gctcacgaatgtcaagacgc

SEQ ID NO: 25211 - DNA, 20 bp, synthetic construct
  source 1..20: mol_type = other DNA
caaccagcccctgattgtgg

SEQ ID NO: 25212 - DNA, 20 bp, synthetic construct
  source 1..20: mol_type = other DNA
agctccggcagctgttgaag

SEQ ID NO: 25213 - DNA, 20 bp, synthetic construct
  source 1..20: mol_type = other DNA
ttgcacgtggccgctaccta

SEQ ID NO: 25214 - DNA, 20 bp, synthetic construct
  source 1..20: mol_type = other DNA
cccgagccgcaaacaggtga

SEQ ID NO: 25215 - DNA, 20 bp, synthetic construct
  source 1..20: mol_type = other DNA
ccctgctcactgtgcgggag

SEQ ID NO: 25216 - DNA, 20 bp, synthetic construct
  source 1..20: mol_type = other DNA
agttagctggctgaaccccg

SEQ ID NO: 25217 - DNA, 20 bp, synthetic construct
  source 1..20: mol_type = other DNA
tccacagagtgcctttcagg

SEQ ID NO: 25218 - DNA, 20 bp, synthetic construct
  source 1..20: mol_type = other DNA
tttctttcaaaggatgcaga

SEQ ID NO: 25219 - DNA, 20 bp, synthetic construct
  source 1..20: mol_type = other DNA
gcgggtacctggctggcgct

SEQ ID NO: 25220 - DNA, 20 bp, synthetic construct
  source 1..20: mol_type = other DNA
catggagatggctggggaca

SEQ ID NO: 25221 - DNA, 20 bp, synthetic construct
  source 1..20: mol_type = other DNA
cagggaccggcagagctcca

SEQ ID NO: 25222 - DNA, 20 bp, synthetic construct
  source 1..20: mol_type = other DNA
acccaggctcagggcacctg

SEQ ID NO: 25223 - DNA, 20 bp, synthetic construct
  source 1..20: mol_type = other DNA
tggctgagcaacagtggaac

SEQ ID NO: 25224 - DNA, 20 bp, synthetic construct
  source 1..20: mol_type = other DNA
aggtgaggaggagggaggtg

SEQ ID NO: 25225 - DNA, 20 bp, synthetic construct
  source 1..20: mol_type = other DNA
gaggaggagggaggtgtgga

SEQ ID NO: 25226 - DNA, 20 bp, synthetic construct
  source 1..20: mol_type = other DNA
ggtggtgcaggtgaggagga

SEQ ID NO: 25227 - DNA, 20 bp, synthetic construct
  source 1..20: mol_type = other DNA
agcgggggtggagaggcgag

SEQ ID NO: 25228 - DNA, 20 bp, synthetic construct
  source 1..20: mol_type = other DNA
tggccgaaggagccatccca

SEQ ID NO: 25229 - DNA, 20 bp, synthetic construct
  source 1..20: mol_type = other DNA
cagcggccttcacttccacc

SEQ ID NO: 25230 - DNA, 20 bp, synthetic construct
  source 1..20: mol_type = other DNA
cagcccctcacctggccccg

SEQ ID NO: 25231 - DNA, 20 bp, synthetic construct
  source 1..20: mol_type = other DNA
cctgctctccggttctctgg

SEQ ID NO: 25232 - DNA, 20 bp, synthetic construct
  source 1..20: mol_type = other DNA
actgccctgtggacaagagg

SEQ ID NO: 25233 - DNA, 20 bp, synthetic construct
  source 1..20: mol_type = other DNA
gaggatgaagagctccagga

SEQ ID NO: 25234 - DNA, 20 bp, synthetic construct
  source 1..20: mol_type = other DNA
atgggctgcaggagccgcgg

SEQ ID NO: 25235 - DNA, 20 bp, synthetic construct
  source 1..20: mol_type = other DNA
gatgaggccctgtcctccag

SEQ ID NO: 25236 - DNA, 20 bp, synthetic construct
  source 1..20: mol_type = other DNA
cgagcggagcccgcggggcc

SEQ ID NO: 25237 - DNA, 20 bp, synthetic construct
  source 1..20: mol_type = other DNA
gtccatgaaggtgctgaagc

SEQ ID NO: 25238 - DNA, 20 bp, synthetic construct
  source 1..20: mol_type = other DNA
ggatgtggaggaggccgagg

SEQ ID NO: 25239 - DNA, 20 bp, synthetic construct
  source 1..20: mol_type = other DNA
tctccacaccttgagggctc

SEQ ID NO: 25240 - DNA, 20 bp, synthetic construct
  source 1..20: mol_type = other DNA
gaagctgggcagggcagtgg

SEQ ID NO: 25241 - DNA, 20 bp, synthetic construct
  source 1..20: mol_type = other DNA
gctggtgggtggcctgtgag

SEQ ID NO: 25242 - DNA, 20 bp, synthetic construct
  source 1..20: mol_type = other DNA
cgcacctgtgagggctgcaa

SEQ ID NO: 25243 - DNA, 20 bp, synthetic construct
  source 1..20: mol_type = other DNA
gcccgccggcagccaccacg

SEQ ID NO: 25244 - DNA, 20 bp, synthetic construct
  source 1..20: mol_type = other DNA
tacaggtaataagggaggga

SEQ ID NO: 25245 - DNA, 20 bp, synthetic construct
  source 1..20: mol_type = other DNA
tctcctcagactgggggggc

SEQ ID NO: 25246 - DNA, 20 bp, synthetic construct
  source 1..20: mol_type = other DNA
cccatgaacccggagcccgc

SEQ ID NO: 25247 - DNA, 20 bp, synthetic construct
  source 1..20: mol_type = other DNA
aagagggagaggcgggagac

SEQ ID NO: 25248 - DNA, 20 bp, synthetic construct
  source 1..20: mol_type = other DNA
gcggcccttgatcaaagtgg

SEQ ID NO: 25249 - DNA, 20 bp, synthetic construct
  source 1..20: mol_type = other DNA
gaaggcactgaagtcgatgc

SEQ ID NO: 25250 - DNA, 20 bp, synthetic construct
  source 1..20: mol_type = other DNA
gtacagatagtctgaaaggg

SEQ ID NO: 25251 - DNA, 20 bp, synthetic construct
  source 1..20: mol_type = other DNA
gccactccccaaatccacga

SEQ ID NO: 25252 - DNA, 20 bp, synthetic construct
  source 1..20: mol_type = other DNA
tcccagcggcaggctgagcg

SEQ ID NO: 25253 - DNA, 20 bp, synthetic construct
  source 1..20: mol_type = other DNA
ttctgcagagggatagagaa

SEQ ID NO: 25254 - DNA, 20 bp, synthetic construct
  source 1..20: mol_type = other DNA
cctaccgcgtccagcctgct

SEQ ID NO: 25255 - DNA, 20 bp, synthetic construct
  source 1..20: mol_type = other DNA
cacgccgtagtgctggcagg

SEQ ID NO: 25256 - DNA, 20 bp, synthetic construct
  source 1..20: mol_type = other DNA
atacatcaatggaggctgtc

SEQ ID NO: 25257 - DNA, 20 bp, synthetic construct
  source 1..20: mol_type = other DNA
tccctttcagactatctgta

SEQ ID NO: 25258 - DNA, 20 bp, synthetic construct
  source 1..20: mol_type = other DNA
cataacgcccccgcctgcgg

SEQ ID NO: 25259 - DNA, 20 bp, synthetic construct
  source 1..20: mol_type = other DNA
gtaatgtctgatcttctttg

SEQ ID NO: 25260 - DNA, 20 bp, synthetic construct
  source 1..20: mol_type = other DNA
cctgcgtgtaccaaatgcag

SEQ ID NO: 25261 - DNA, 20 bp, synthetic construct
  source 1..20: mol_type = other DNA
ccattgatgtatccagaagc

SEQ ID NO: 25262 - DNA, 20 bp, synthetic construct
  source 1..20: mol_type = other DNA
aaagcccttgcagccctcgc

SEQ ID NO: 25263 - DNA, 20 bp, synthetic construct
  source 1..20: mol_type = other DNA
ctgacaggcaggctaaggct

SEQ ID NO: 25264 - DNA, 20 bp, synthetic construct
  source 1..20: mol_type = other DNA
tgatcaaagtggaggagggg

SEQ ID NO: 25265 - DNA, 20 bp, synthetic construct
  source 1..20: mol_type = other DNA
ccctcctccactttgatcaa

SEQ ID NO: 25266 - DNA, 20 bp, synthetic construct
  source 1..20: mol_type = other DNA
aggttcgcacgccgtagtgc

SEQ ID NO: 25267 - DNA, 20 bp, synthetic construct
  source 1..20: mol_type = other DNA
aacgccgcctgccagcacta

SEQ ID NO: 25268 - DNA, 20 bp, synthetic construct
  source 1..20: mol_type = other DNA
gaagtgtctcagtgttggaa

SEQ ID NO: 25269 - DNA, 20 bp, synthetic construct
  source 1..20: mol_type = other DNA
tttcagaagtgtctcagtgt

SEQ ID NO: 25270 - DNA, 20 bp, synthetic construct
  source 1..20: mol_type = other DNA
cattgatgtatccagaagct

SEQ ID NO: 25271 - DNA, 20 bp, synthetic construct
  source 1..20: mol_type = other DNA
ttggggagatcagtaaatcc

SEQ ID NO: 25272 - DNA, 20 bp, synthetic construct
  source 1..20: mol_type = other DNA
ctggaggctggaggaatgga

SEQ ID NO: 25273 - DNA, 20 bp, synthetic construct
  source 1..20: mol_type = other DNA
gaaatcgacagtactgacat

SEQ ID NO: 25274 - DNA, 20 bp, synthetic construct
  source 1..20: mol_type = other DNA
tggaatggtaaaagaaggta

SEQ ID NO: 25275 - DNA, 20 bp, synthetic construct
  source 1..20: mol_type = other DNA
cgaacctgcgagggctgcaa

SEQ ID NO: 25276 - DNA, 20 bp, synthetic construct
  source 1..20: mol_type = other DNA
tgaatatgatcccaccatag

SEQ ID NO: 25277 - DNA, 20 bp, synthetic construct
  source 1..20: mol_type = other DNA
cctcatgtattggtctctca

SEQ ID NO: 25278 - DNA, 20 bp, synthetic construct
  source 1..20: mol_type = other DNA
ttggctgaggtttcaatgaa

SEQ ID NO: 25279 - DNA, 20 bp, synthetic construct
  source 1..20: mol_type = other DNA
ggattcttacagaaaacaag

SEQ ID NO: 25280 - DNA, 20 bp, synthetic construct
  source 1..20: mol_type = other DNA
agagaccaatacatgaggac

SEQ ID NO: 25281 - DNA, 20 bp, synthetic construct
  source 1..20: mol_type = other DNA
cctccaccattgccacctgc

SEQ ID NO: 25282 - DNA, 20 bp, synthetic construct
  source 1..20: mol_type = other DNA
gagcagagccgaggtccggc

SEQ ID NO: 25283 - DNA, 20 bp, synthetic construct
  source 1..20: mol_type = other DNA
ctgaaggcgatgagcagccc

SEQ ID NO: 25284 - DNA, 20 bp, synthetic construct
  source 1..20: mol_type = other DNA
cggacctcggctctgctctc

SEQ ID NO: 25285 - DNA, 20 bp, synthetic construct
  source 1..20: mol_type = other DNA
cagtgagcggtagaagtgga

SEQ ID NO: 25286 - DNA, 20 bp, synthetic construct
  source 1..20: mol_type = other DNA
ccaccattgccacctgcggg

SEQ ID NO: 25287 - DNA, 20 bp, synthetic construct
  source 1..20: mol_type = other DNA
tccaccattgccacctgcgg

SEQ ID NO: 25288 - DNA, 20 bp, synthetic construct
  source 1..20: mol_type = other DNA
ctccaccattgccacctgcg

SEQ ID NO: 25289 - DNA, 20 bp, synthetic construct
  source 1..20: mol_type = other DNA
agagcagcaccacctcagct

SEQ ID NO: 25290 - DNA, 20 bp, synthetic construct
  source 1..20: mol_type = other DNA
cggagagcagagccgaggtc

SEQ ID NO: 25291 - DNA, 20 bp, synthetic construct
  source 1..20: mol_type = other DNA
gaagagcagcgtgccgatga

SEQ ID NO: 25292 - DNA, 20 bp, synthetic construct
  source 1..20: mol_type = other DNA
gcagccccggtgggtagtcg

SEQ ID NO: 25293 - DNA, 20 bp, synthetic construct
  source 1..20: mol_type = other DNA
cccgcaggtggcaatggtgg

SEQ ID NO: 25294 - DNA, 20 bp, synthetic construct
  source 1..20: mol_type = other DNA
taaagcctccagccggacct

SEQ ID NO: 25295 - DNA, 20 bp, synthetic construct
  source 1..20: mol_type = other DNA
tggaggctttaagcttggcg

SEQ ID NO: 25296 - DNA, 20 bp, synthetic construct
  source 1..20: mol_type = other DNA
cagagccgaggtccggctgg

SEQ ID NO: 25297 - DNA, 20 bp, synthetic construct
  source 1..20: mol_type = other DNA
cgtgccgatgacggtggaga

SEQ ID NO: 25298 - DNA, 20 bp, synthetic construct
  source 1..20: mol_type = other DNA
ccaagcttaaagcctccagc

SEQ ID NO: 25299 - DNA, 20 bp, synthetic construct
  source 1..20: mol_type = other DNA
gaagccggagagcagagccg

SEQ ID NO: 25300 - DNA, 20 bp, synthetic construct
  source 1..20: mol_type = other DNA
ccggctggaggctttaagct

SEQ ID NO: 25301 - DNA, 20 bp, synthetic construct
  source 1..20: mol_type = other DNA
cccaggccagctcgatgtgg

SEQ ID NO: 25302 - DNA, 20 bp, synthetic construct
  source 1..20: mol_type = other DNA
taaccagtgagcggtagaag

SEQ ID NO: 25303 - DNA, 20 bp, synthetic construct
  source 1..20: mol_type = other DNA
gttccaggagctcaacgagc

SEQ ID NO: 25304 - DNA, 20 bp, synthetic construct
  source 1..20: mol_type = other DNA
acggcggacggcggcggtgg

SEQ ID NO: 25305 - DNA, 20 bp, synthetic construct
  source 1..20: mol_type = other DNA
ggagctcaccatggcgaagc

SEQ ID NO: 25306 - DNA, 20 bp, synthetic construct
  source 1..20: mol_type = other DNA
acctccaccattgccacctg

SEQ ID NO: 25307 - DNA, 20 bp, synthetic construct
  source 1..20: mol_type = other DNA
aggcccaggccagctcgatg

SEQ ID NO: 25308 - DNA, 20 bp, synthetic construct
  source 1..20: mol_type = other DNA
aggagttgcagcggtgagaa

SEQ ID NO: 25309 - DNA, 20 bp, synthetic construct
  source 1..20: mol_type = other DNA
ctatcaacagaagatcaagg

SEQ ID NO: 25310 - DNA, 20 bp, synthetic construct
  source 1..20: mol_type = other DNA
gcagccgcaggtagaccaca

SEQ ID NO: 25311 - DNA, 20 bp, synthetic construct
  source 1..20: mol_type = other DNA
gttgcagcggtgagaagggt

SEQ ID NO: 25312 - DNA, 20 bp, synthetic construct
  source 1..20: mol_type = other DNA
tagaggatatcgtagtgtcc

SEQ ID NO: 25313 - DNA, 20 bp, synthetic construct
  source 1..20: mol_type = other DNA
gtccatgtactccacctgga

SEQ ID NO: 25314 - DNA, 20 bp, synthetic construct
  source 1..20: mol_type = other DNA
cgaattcagcaagaggtgag

SEQ ID NO: 25315 - DNA, 20 bp, synthetic construct
  source 1..20: mol_type = other DNA
ccagccgctctgacaccaga

SEQ ID NO: 25316 - DNA, 20 bp, synthetic construct
  source 1..20: mol_type = other DNA
acagccttgaacctgggggt

SEQ ID NO: 25317 - DNA, 20 bp, synthetic construct
  source 1..20: mol_type = other DNA
ccatgaactgcagccacgga

SEQ ID NO: 25318 - DNA, 20 bp, synthetic construct
  source 1..20: mol_type = other DNA
ccacctggatggacacgctg

SEQ ID NO: 25319 - DNA, 20 bp, synthetic construct
  source 1..20: mol_type = other DNA
ccggtagagaaggtagacct

SEQ ID NO: 25320 - DNA, 20 bp, synthetic construct
  source 1..20: mol_type = other DNA
caggtggagtacatggaccg

SEQ ID NO: 25321 - DNA, 20 bp, synthetic construct
  source 1..20: mol_type = other DNA
ccgaattcagcaagaggtga

SEQ ID NO: 25322 - DNA, 20 bp, synthetic construct
  source 1..20: mol_type = other DNA
ggatatcgtagtgtccaggc

SEQ ID NO: 25323 - DNA, 20 bp, synthetic construct
  source 1..20: mol_type = other DNA
atccgcaagaccaggcctga

SEQ ID NO: 25324 - DNA, 20 bp, synthetic construct
  source 1..20: mol_type = other DNA
gagcacctccgactaccttg

SEQ ID NO: 25325 - DNA, 20 bp, synthetic construct
  source 1..20: mol_type = other DNA
cctgggccagcgcaatgatg

SEQ ID NO: 25326 - DNA, 20 bp, synthetic construct
  source 1..20: mol_type = other DNA
ggcactgctggatgacagca

SEQ ID NO: 25327 - DNA, 20 bp, synthetic construct
  source 1..20: mol_type = other DNA
gaaacagttgccgtcaggcc

SEQ ID NO: 25328 - DNA, 20 bp, synthetic construct
  source 1..20: mol_type = other DNA
caagaggtgaggggctgcag

SEQ ID NO: 25329 - DNA, 20 bp, synthetic construct
  source 1..20: mol_type = other DNA
catccagcagtgcctccaag

SEQ ID NO: 25330 - DNA, 20 bp, synthetic construct
  source 1..20: mol_type = other DNA
ccacatccacatcattgcgc

SEQ ID NO: 25331 - DNA, 20 bp, synthetic construct
  source 1..20: mol_type = other DNA
gcagacacagccttgaacct

SEQ ID NO: 25332 - DNA, 20 bp, synthetic construct
  source 1..20: mol_type = other DNA
cacctggatggacacgctga

SEQ ID NO: 25333 - DNA, 20 bp, synthetic construct
  source 1..20: mol_type = other DNA
ccttgaacctgggggtggga

SEQ ID NO: 25334 - DNA, 20 bp, synthetic construct
  source 1..20: mol_type = other DNA
tatcaacagaagatcaaggt

SEQ ID NO: 25335 - DNA, 20 bp, synthetic construct
  source 1..20: mol_type = other DNA
acctcctgtggcacaggtgc

SEQ ID NO: 25336 - DNA, 20 bp, synthetic construct
  source 1..20: mol_type = other DNA
tccatgaactgcagccacgg

SEQ ID NO: 25337 - DNA, 20 bp, synthetic construct
  source 1..20: mol_type = other DNA
ccagcgcaatgatgtggatg

SEQ ID NO: 25338 - DNA, 20 bp, synthetic construct
  source 1..20: mol_type = other DNA
cggtagagaaggtagacctt

SEQ ID NO: 25339 - DNA, 20 bp, synthetic construct
  source 1..20: mol_type = other DNA
agcccgaggtgagcagccgc

SEQ ID NO: 25340 - DNA, 20 bp, synthetic construct
  source 1..20: mol_type = other DNA
caccaggtcttccttgctct

SEQ ID NO: 25341 - DNA, 20 bp, synthetic construct
  source 1..20: mol_type = other DNA
atccagcagtgcctccaagt

SEQ ID NO: 25342 - DNA, 20 bp, synthetic construct
  source 1..20: mol_type = other DNA
aagaggtgaggggctgcagt

SEQ ID NO: 25343 - DNA, 20 bp, synthetic construct
  source 1..20: mol_type = other DNA
tacctgcggctgctcacctc

SEQ ID NO: 25344 - DNA, 20 bp, synthetic construct
  source 1..20: mol_type = other DNA
catctatcaacagaagatca

SEQ ID NO: 25345 - DNA, 20 bp, synthetic construct
  source 1..20: mol_type = other DNA
gagaaggtagaccttgggct

SEQ ID NO: 25346 - DNA, 20 bp, synthetic construct
  source 1..20: mol_type = other DNA
gcggtgagaagggtgggcac

SEQ ID NO: 25347 - DNA, 20 bp, synthetic construct
  source 1..20: mol_type = other DNA
ggcagacacagccttgaacc

SEQ ID NO: 25348 - DNA, 20 bp, synthetic construct
  source 1..20: mol_type = other DNA
ccttcggagtcgctgcccag

SEQ ID NO: 25349 - DNA, 20 bp, synthetic construct
  source 1..20: mol_type = other DNA
accgaattcagcaagaggtg

SEQ ID NO: 25350 - DNA, 20 bp, synthetic construct
  source 1..20: mol_type = other DNA
ggctttcggattctcccact

SEQ ID NO: 25351 - DNA, 20 bp, synthetic construct
  source 1..20: mol_type = other DNA
attgaaggaggccagcaggt

SEQ ID NO: 25352 - DNA, 20 bp, synthetic construct
  source 1..20: mol_type = other DNA
caggtagaccacaaggtagt

SEQ ID NO: 25353 - DNA, 20 bp, synthetic construct
  source 1..20: mol_type = other DNA
atatcctctacaaatagggc

SEQ ID NO: 25354 - DNA, 20 bp, synthetic construct
  source 1..20: mol_type = other DNA
tccagccgctctgacaccag

SEQ ID NO: 25355 - DNA, 20 bp, synthetic construct
  source 1..20: mol_type = other DNA
ggccagcaggtcggcgacag

SEQ ID NO: 25356 - DNA, 20 bp, synthetic construct
  source 1..20: mol_type = other DNA
cagacacagccttgaacctg

SEQ ID NO: 25357 - DNA, 20 bp, synthetic construct
  source 1..20: mol_type = other DNA
ggctccacctcctgtggcac

SEQ ID NO: 25358 - DNA, 20 bp, synthetic construct
  source 1..20: mol_type = other DNA
ctccccttcaatcatttcga

SEQ ID NO: 25359 - DNA, 20 bp, synthetic construct
  source 1..20: mol_type = other DNA
tctctgggttctgaagttct

SEQ ID NO: 25360 - DNA, 20 bp, synthetic construct
  source 1..20: mol_type = other DNA
caagagtgacaatattctgt

SEQ ID NO: 25361 - DNA, 20 bp, synthetic construct
  source 1..20: mol_type = other DNA
cccatactggatggcaccag

SEQ ID NO: 25362 - DNA, 20 bp, synthetic construct
  source 1..20: mol_type = other DNA
agcactgaacagtaaggtgg

SEQ ID NO: 25363 - DNA, 20 bp, synthetic construct
  source 1..20: mol_type = other DNA
atggccatcgaaatgattga

SEQ ID NO: 25364 - DNA, 20 bp, synthetic construct
  source 1..20: mol_type = other DNA
atatttctgcttcactgtgt

SEQ ID NO: 25365 - DNA, 20 bp, synthetic construct
  source 1..20: mol_type = other DNA
ccagtatggcgttccgacca

SEQ ID NO: 25366 - DNA, 20 bp, synthetic construct
  source 1..20: mol_type = other DNA
tcttctggaacagagggcaa

SEQ ID NO: 25367 - DNA, 20 bp, synthetic construct
  source 1..20: mol_type = other DNA
gtgtgctcaaaatcagatgg

SEQ ID NO: 25368 - DNA, 20 bp, synthetic construct
  source 1..20: mol_type = other DNA
ctctagtttggtgatattgg

SEQ ID NO: 25369 - DNA, 20 bp, synthetic construct
  source 1..20: mol_type = other DNA
cttactgctggtgttccaga

SEQ ID NO: 25370 - DNA, 20 bp, synthetic construct
  source 1..20: mol_type = other DNA
caaacaattcatctcctacc

SEQ ID NO: 25371 - DNA, 20 bp, synthetic construct
  source 1..20: mol_type = other DNA
caaaagtgacaatgtacttt

SEQ ID NO: 25372 - DNA, 20 bp, synthetic construct
  source 1..20: mol_type = other DNA
tttgagcacaccatccatgt

SEQ ID NO: 25373 - DNA, 20 bp, synthetic construct
  source 1..20: mol_type = other DNA
gaagaatcctcaggctgtgc

SEQ ID NO: 25374 - DNA, 20 bp, synthetic construct
  source 1..20: mol_type = other DNA
ccctcaagggattttcattg

SEQ ID NO: 25375 - DNA, 20 bp, synthetic construct
  source 1..20: mol_type = other DNA
ttctgaatcatgtctgataa

SEQ ID NO: 25376 - DNA, 20 bp, synthetic construct
  source 1..20: mol_type = other DNA
tttctttctttttacttcct

SEQ ID NO: 25377 - DNA, 20 bp, synthetic construct
  source 1..20: mol_type = other DNA
taagaagatggaggaagtaa

SEQ ID NO: 25378 - DNA, 20 bp, synthetic construct
  source 1..20: mol_type = other DNA
tctctttctgaaggagacac

SEQ ID NO: 25379 - DNA, 20 bp, synthetic construct
  source 1..20: mol_type = other DNA
cattgtctatgatattgctc

SEQ ID NO: 25380 - DNA, 20 bp, synthetic construct
  source 1..20: mol_type = other DNA
aaccccaaaggtaaggggta

SEQ ID NO: 25381 - DNA, 20 bp, synthetic construct
  source 1..20: mol_type = other DNA
cctcctctgttcaaattgaa

SEQ ID NO: 25382 - DNA, 20 bp, synthetic construct
  source 1..20: mol_type = other DNA
tcttgacaaagcagcctgga

SEQ ID NO: 25383 - DNA, 20 bp, synthetic construct
  source 1..20: mol_type = other DNA
cggagctcctgggcaaggtg

SEQ ID NO: 25384 - DNA, 20 bp, synthetic construct
  source 1..20: mol_type = other DNA
gggccaggacccagctgagg

SEQ ID NO: 25385 - DNA, 20 bp, synthetic construct
  source 1..20: mol_type = other DNA
ggccaggacccagctgaggg

SEQ ID NO: 25386 - DNA, 20 bp, synthetic construct
  source 1..20: mol_type = other DNA
agcaggctgaggtgagaggc

SEQ ID NO: 25387 - DNA, 20 bp, synthetic construct
  source 1..20: mol_type = other DNA
gagtgatgtggcccaggctc

SEQ ID NO: 25388 - DNA, 20 bp, synthetic construct
  source 1..20: mol_type = other DNA
tgactcccatccgctctagc

SEQ ID NO: 25389 - DNA, 20 bp, synthetic construct
  source 1..20: mol_type = other DNA
cagactgagctgattgctgg

SEQ ID NO: 25390 - DNA, 20 bp, synthetic construct
  source 1..20: mol_type = other DNA
gcatctctggtcctcttcaa

SEQ ID NO: 25391 - DNA, 20 bp, synthetic construct
  source 1..20: mol_type = other DNA
atctgctcccgggccgcacg

SEQ ID NO: 25392 - DNA, 20 bp, synthetic construct
  source 1..20: mol_type = other DNA
caagctggccgccttccccg

SEQ ID NO: 25393 - DNA, 20 bp, synthetic construct
  source 1..20: mol_type = other DNA
atctctcagactccccagac

SEQ ID NO: 25394 - DNA, 20 bp, synthetic construct
  source 1..20: mol_type = other DNA
cagcggcacctacctctgtg

SEQ ID NO: 25395 - DNA, 20 bp, synthetic construct
  source 1..20: mol_type = other DNA
cacgaagctctccgatgtgt

SEQ ID NO: 25396 - DNA, 20 bp, synthetic construct
  source 1..20: mol_type = other DNA
cgggctggctgcggtcctcg

SEQ ID NO: 25397 - DNA, 20 bp, synthetic construct
  source 1..20: mol_type = other DNA
gcagggctggggagaaggtg

SEQ ID NO: 25398 - DNA, 20 bp, synthetic construct
  source 1..20: mol_type = other DNA
tgcagatcccacaggcgccc

SEQ ID NO: 25399 - DNA, 20 bp, synthetic construct
  source 1..20: mol_type = other DNA
atggggagctggatttccag

SEQ ID NO: 25400 - DNA, 20 bp, synthetic construct
  source 1..20: mol_type = other DNA
tctggttgctggggctcatg

SEQ ID NO: 25401 - DNA, 20 bp, synthetic construct
  source 1..20: mol_type = other DNA
acatgagcgtggtcagggcc

SEQ ID NO: 25402 - DNA, 20 bp, synthetic construct
  source 1..20: mol_type = other DNA
gtccacagagaacacaggca

SEQ ID NO: 25403 - DNA, 20 bp, synthetic construct
  source 1..20: mol_type = other DNA
ggagatggccccacagaggt

SEQ ID NO: 25404 - DNA, 20 bp, synthetic construct
  source 1..20: mol_type = other DNA
gctgcggtcctcggggaagg

SEQ ID NO: 25405 - DNA, 20 bp, synthetic construct
  source 1..20: mol_type = other DNA
gacgttacctcgtgcggccc

SEQ ID NO: 25406 - DNA, 20 bp, synthetic construct
  source 1..20: mol_type = other DNA
cagactccccagacaggccc

SEQ ID NO: 25407 - DNA, 20 bp, synthetic construct
  source 1..20: mol_type = other DNA
cccgggagcagatgacggcc

SEQ ID NO: 25408 - DNA, 20 bp, synthetic construct
  source 1..20: mol_type = other DNA
gggccctgaccacgctcatg

SEQ ID NO: 25409 - DNA, 20 bp, synthetic construct
  source 1..20: mol_type = other DNA
ccccttcggtcaccacgagc

SEQ ID NO: 25410 - DNA, 20 bp, synthetic construct
  source 1..20: mol_type = other DNA
cgcccacgacaccaaccacc

SEQ ID NO: 25411 - DNA, 20 bp, synthetic construct
  source 1..20: mol_type = other DNA
ggttcttaggtaggtggggt

SEQ ID NO: 25412 - DNA, 20 bp, synthetic construct
  source 1..20: mol_type = other DNA
cctgcagagaaacacacttg

SEQ ID NO: 25413 - DNA, 20 bp, synthetic construct
  source 1..20: mol_type = other DNA
cctggccgtcatctgctccc

SEQ ID NO: 25414 - DNA, 20 bp, synthetic construct
  source 1..20: mol_type = other DNA
gggggttccagggcctgtct

SEQ ID NO: 25415 - DNA, 20 bp, synthetic construct
  source 1..20: mol_type = other DNA
ttctctctggaagggcacaa

SEQ ID NO: 25416 - DNA, 20 bp, synthetic construct
  source 1..20: mol_type = other DNA
tcagtggctgggcactccga

SEQ ID NO: 25417 - DNA, 20 bp, synthetic construct
  source 1..20: mol_type = other DNA
gccctggccagtcgtctggg

SEQ ID NO: 25418 - DNA, 20 bp, synthetic construct
  source 1..20: mol_type = other DNA
tcctccttctttgaggagaa

SEQ ID NO: 25419 - DNA, 20 bp, synthetic construct
  source 1..20: mol_type = other DNA
ccggggtcttctctcgccac

SEQ ID NO: 25420 - DNA, 20 bp, synthetic construct
  source 1..20: mol_type = other DNA
ggatggttcttaggtaggtg

SEQ ID NO: 25421 - DNA, 20 bp, synthetic construct
  source 1..20: mol_type = other DNA
cgacaccaaccaccagggtt

SEQ ID NO: 25422 - DNA, 20 bp, synthetic construct
  source 1..20: mol_type = other DNA
tgcccagccactgaggcctg

SEQ ID NO: 25423 - DNA, 20 bp, synthetic construct
  source 1..20: mol_type = other DNA
aactgggctggcggccagga

SEQ ID NO: 25424 - DNA, 20 bp, synthetic construct
  source 1..20: mol_type = other DNA
aggcggccagcttgtccgtc

SEQ ID NO: 25425 - DNA, 20 bp, synthetic construct
  source 1..20: mol_type = other DNA
aaccctggtggttggtgtcg

SEQ ID NO: 25426 - DNA, 20 bp, synthetic construct
  source 1..20: mol_type = other DNA
agctgagcccctgcgggcgg

SEQ ID NO: 25427 - DNA, 20 bp, synthetic construct
  source 1..20: mol_type = other DNA
cttctgcccttctctctgga

SEQ ID NO: 25428 - DNA, 20 bp, synthetic construct
  source 1..20: mol_type = other DNA
ccagtggcgagagaagaccc

SEQ ID NO: 25429 - DNA, 20 bp, synthetic construct
  source 1..20: mol_type = other DNA
gcagatcaaagagagcctgc

SEQ ID NO: 25430 - DNA, 20 bp, synthetic construct
  source 1..20: mol_type = other DNA
cgggcagagctcagggtgac

SEQ ID NO: 25431 - DNA, 20 bp, synthetic construct
  source 1..20: mol_type = other DNA
acggaagcggcagtcctggc

SEQ ID NO: 25432 - DNA, 20 bp, synthetic construct
  source 1..20: mol_type = other DNA
tccctgcagagaaacacact

SEQ ID NO: 25433 - DNA, 20 bp, synthetic construct
  source 1..20: mol_type = other DNA
ctggctgcggtcctcgggga

SEQ ID NO: 25434 - DNA, 20 bp, synthetic construct
  source 1..20: mol_type = other DNA
gccaccattgtctttcctag

SEQ ID NO: 25435 - DNA, 20 bp, synthetic construct
  source 1..20: mol_type = other DNA
gccctgctcgtggtgaccga

SEQ ID NO: 25436 - DNA, 20 bp, synthetic construct
  source 1..20: mol_type = other DNA
ctgagagatggagagaggtg

SEQ ID NO: 25437 - DNA, 20 bp, synthetic construct
  source 1..20: mol_type = other DNA
catgagccccagcaaccaga

SEQ ID NO: 25438 - DNA, 20 bp, synthetic construct
  source 1..20: mol_type = other DNA
cggaagcggcagtcctggcc

SEQ ID NO: 25439 - DNA, 20 bp, synthetic construct
  source 1..20: mol_type = other DNA
ggccaggatggttcttaggt

SEQ ID NO: 25440 - DNA, 20 bp, synthetic construct
  source 1..20: mol_type = other DNA
gcctgtgggatctgcatgcc

SEQ ID NO: 25441 - DNA, 20 bp, synthetic construct
  source 1..20: mol_type = other DNA
tcttaggtaggtggggtcgg

SEQ ID NO: 25442 - DNA, 20 bp, synthetic construct
  source 1..20: mol_type = other DNA
agccggccagttccaaaccc

SEQ ID NO: 25443 - DNA, 20 bp, synthetic construct
  source 1..20: mol_type = other DNA
agagaacacaggcacggctg

SEQ ID NO: 25444 - DNA, 20 bp, synthetic construct
  source 1..20: mol_type = other DNA
gaaggtggcgttgtcccctt

SEQ ID NO: 25445 - DNA, 20 bp, synthetic construct
  source 1..20: mol_type = other DNA
agcccctcacccaggccagc

SEQ ID NO: 25446 - DNA, 20 bp, synthetic construct
  source 1..20: mol_type = other DNA
agggcccggcgcaatgacag

SEQ ID NO: 25447 - DNA, 20 bp, synthetic construct
  source 1..20: mol_type = other DNA
cggtgctacaactgggctgg

SEQ ID NO: 25448 - DNA, 20 bp, synthetic construct
  source 1..20: mol_type = other DNA
tgacacggaagcggcagtcc

SEQ ID NO: 25449 - DNA, 20 bp, synthetic construct
  source 1..20: mol_type = other DNA
aggcgccctggccagtcgtc

SEQ ID NO: 25450 - DNA, 20 bp, synthetic construct
  source 1..20: mol_type = other DNA
cggccagttccaaaccctgg

SEQ ID NO: 25451 - DNA, 20 bp, synthetic construct
  source 1..20: mol_type = other DNA
gctcagggacacagggcacg

SEQ ID NO: 25452 - DNA, 20 bp, synthetic construct
  source 1..20: mol_type = other DNA
cctgctcgtggtgaccgaag

SEQ ID NO: 25453 - DNA, 20 bp, synthetic construct
  source 1..20: mol_type = other DNA
tcggtcaccacgagcagggc

SEQ ID NO: 25454 - DNA, 20 bp, synthetic construct
  source 1..20: mol_type = other DNA
aggatggttcttaggtaggt

SEQ ID NO: 25455 - DNA, 20 bp, synthetic construct
  source 1..20: mol_type = other DNA
gcagttgtgtgacacggaag

SEQ ID NO: 25456 - DNA, 20 bp, synthetic construct
  source 1..20: mol_type = other DNA
tcagggacacagggcacggg

SEQ ID NO: 25457 - DNA, 20 bp, synthetic construct
  source 1..20: mol_type = other DNA
ccctgctcgtggtgaccgaa

SEQ ID NO: 25458 - DNA, 20 bp, synthetic construct
  source 1..20: mol_type = other DNA
ggggggttccagggcctgtc

SEQ ID NO: 25459 - DNA, 20 bp, synthetic construct
  source 1..20: mol_type = other DNA
tgatctgcgccttgggggcc

SEQ ID NO: 25460 - DNA, 20 bp, synthetic construct
  source 1..20: mol_type = other DNA
cagcttgtccgtctggttgc

SEQ ID NO: 25461 - DNA, 20 bp, synthetic construct
  source 1..20: mol_type = other DNA
cagttccaaaccctggtggt

SEQ ID NO: 25462 - DNA, 20 bp, synthetic construct
  source 1..20: mol_type = other DNA
acagcggcacctacctctgt

SEQ ID NO: 25463 - DNA, 20 bp, synthetic construct
  source 1..20: mol_type = other DNA
tgcggcccgggagcagatga

SEQ ID NO: 25464 - DNA, 20 bp, synthetic construct
  source 1..20: mol_type = other DNA
gagcagggctggggagaagg

SEQ ID NO: 25465 - DNA, 20 bp, synthetic construct
  source 1..20: mol_type = other DNA
gggctggggagaaggtgggg

SEQ ID NO: 25466 - DNA, 20 bp, synthetic construct
  source 1..20: mol_type = other DNA
gttggagaagctgcaggtga

SEQ ID NO: 25467 - DNA, 20 bp, synthetic construct
  source 1..20: mol_type = other DNA
gctctctttgatctgcgcct

SEQ ID NO: 25468 - DNA, 20 bp, synthetic construct
  source 1..20: mol_type = other DNA
ctggaagggcacaaaggtca

SEQ ID NO: 25469 - DNA, 20 bp, synthetic construct
  source 1..20: mol_type = other DNA
catgtggaagtcacgcccgt

SEQ ID NO: 25470 - DNA, 20 bp, synthetic construct
  source 1..20: mol_type = other DNA
ggagaaggtgggggggttcc

SEQ ID NO: 25471 - DNA, 20 bp, synthetic construct
  source 1..20: mol_type = other DNA
agggctggggagaaggtggg

SEQ ID NO: 25472 - DNA, 20 bp, synthetic construct
  source 1..20: mol_type = other DNA
gtgtcacacaactgcccaac

SEQ ID NO: 25473 - DNA, 20 bp, synthetic construct
  source 1..20: mol_type = other DNA
caccgcccagacgactggcc

SEQ ID NO: 25474 - DNA, 20 bp, synthetic construct
  source 1..20: mol_type = other DNA
ctctttgatctgcgccttgg

SEQ ID NO: 25475 - DNA, 20 bp, synthetic construct
  source 1..20: mol_type = other DNA
ggcgccctggccagtcgtct

SEQ ID NO: 25476 - DNA, 20 bp, synthetic construct
  source 1..20: mol_type = other DNA
cagcaaccagacggacaagc

SEQ ID NO: 25477 - DNA, 20 bp, synthetic construct
  source 1..20: mol_type = other DNA
gggcggtgctacaactgggc

SEQ ID NO: 25478 - DNA, 20 bp, synthetic construct
  source 1..20: mol_type = other DNA
acaataggagccaggcgcac

SEQ ID NO: 25479 - DNA, 20 bp, synthetic construct
  source 1..20: mol_type = other DNA
gcttgtccgtctggttgctg

SEQ ID NO: 25480 - DNA, 20 bp, synthetic construct
  source 1..20: mol_type = other DNA
tccaggcatgcagatcccac

SEQ ID NO: 25481 - DNA, 20 bp, synthetic construct
  source 1..20: mol_type = other DNA
aggtgccgctgtcattgcgc

SEQ ID NO: 25482 - DNA, 20 bp, synthetic construct
  source 1..20: mol_type = other DNA
caaccaccagggtttggaac

SEQ ID NO: 25483 - DNA, 20 bp, synthetic construct
  source 1..20: mol_type = other DNA
cttccacatgagcgtggtca

SEQ ID NO: 25484 - DNA, 20 bp, synthetic construct
  source 1..20: mol_type = other DNA
agagcctgcgggcagagctc

SEQ ID NO: 25485 - DNA, 20 bp, synthetic construct
  source 1..20: mol_type = other DNA
cccttcggtcaccacgagca

SEQ ID NO: 25486 - DNA, 20 bp, synthetic construct
  source 1..20: mol_type = other DNA
tgacgttacctcgtgcggcc

SEQ ID NO: 25487 - DNA, 20 bp, synthetic construct
  source 1..20: mol_type = other DNA
tcaccctgagctctgcccgc

SEQ ID NO: 25488 - DNA, 20 bp, synthetic construct
  source 1..20: mol_type = other DNA
agaacacaggcacggctgag

SEQ ID NO: 25489 - DNA, 20 bp, synthetic construct
  source 1..20: mol_type = other DNA
ctctgtggactatggggagc

SEQ ID NO: 25490 - DNA, 20 bp, synthetic construct
  source 1..20: mol_type = other DNA
tctggaagggcacaaaggtc

SEQ ID NO: 25491 - DNA, 20 bp, synthetic construct
  source 1..20: mol_type = other DNA
agccgtgcctgtgttctctg

SEQ ID NO: 25492 - DNA, 20 bp, synthetic construct
  source 1..20: mol_type = other DNA
cctccttctttgaggagaaa

SEQ ID NO: 25493 - DNA, 20 bp, synthetic construct
  source 1..20: mol_type = other DNA
cgcagatcaaagagagcctg

SEQ ID NO: 25494 - DNA, 20 bp, synthetic construct
  source 1..20: mol_type = other DNA
cacctacctaagaaccatcc

SEQ ID NO: 25495 - DNA, 20 bp, synthetic construct
  source 1..20: mol_type = other DNA
cctctgtggggccatctccc

SEQ ID NO: 25496 - DNA, 20 bp, synthetic construct
  source 1..20: mol_type = other DNA
tcctggccgtcatctgctcc

SEQ ID NO: 25497 - DNA, 20 bp, synthetic construct
  source 1..20: mol_type = other DNA
cacgagcagggctggggaga

SEQ ID NO: 25498 - DNA, 20 bp, synthetic construct
  source 1..20: mol_type = other DNA
atgtggaagtcacgcccgtt

SEQ ID NO: 25499 - DNA, 20 bp, synthetic construct
  source 1..20: mol_type = other DNA
ggagtctgagagatggagag

SEQ ID NO: 25500 - DNA, 20 bp, synthetic construct
  source 1..20: mol_type = other DNA
ggacccagactagcagcacc

SEQ ID NO: 25501 - DNA, 20 bp, synthetic construct
  source 1..20: mol_type = other DNA
cgtctgggcggtgctacaac

SEQ ID NO: 25502 - DNA, 20 bp, synthetic construct
  source 1..20: mol_type = other DNA
gcgtgacttccacatgagcg

SEQ ID NO: 25503 - DNA, 20 bp, synthetic construct
  source 1..20: mol_type = other DNA
gagcctgcgggcagagctca

SEQ ID NO: 25504 - DNA, 20 bp, synthetic construct
  source 1..20: mol_type = other DNA
accgcccagacgactggcca

SEQ ID NO: 25505 - DNA, 20 bp, synthetic construct
  source 1..20: mol_type = other DNA
acttccacatgagcgtggtc

SEQ ID NO: 25506 - DNA, 20 bp, synthetic construct
  source 1..20: mol_type = other DNA
ctgcagggacaataggagcc

SEQ ID NO: 25507 - DNA, 20 bp, synthetic construct
  source 1..20: mol_type = other DNA
agagctcagggtgacaggtg

SEQ ID NO: 25508 - DNA, 20 bp, synthetic construct
  source 1..20: mol_type = other DNA
caggatggttcttaggtagg

SEQ ID NO: 25509 - DNA, 20 bp, synthetic construct
  source 1..20: mol_type = other DNA
ccatagtccacagagaacac

SEQ ID NO: 25510 - DNA, 20 bp, synthetic construct
  source 1..20: mol_type = other DNA
ggaccgcagccagcccggcc

SEQ ID NO: 25511 - DNA, 20 bp, synthetic construct
  source 1..20: mol_type = other DNA
gatctgcgccttgggggcca

SEQ ID NO: 25512 - DNA, 20 bp, synthetic construct
  source 1..20: mol_type = other DNA
tgtagcaccgcccagacgac

SEQ ID NO: 25513 - DNA, 20 bp, synthetic construct
  source 1..20: mol_type = other DNA
tctctttgatctgcgccttg

SEQ ID NO: 25514 - DNA, 20 bp, synthetic construct
  source 1..20: mol_type = other DNA
agcagggctggggagaaggt

SEQ ID NO: 25515 - DNA, 20 bp, synthetic construct
  source 1..20: mol_type = other DNA
gtctgggcggtgctacaact

SEQ ID NO: 25516 - DNA, 20 bp, synthetic construct
  source 1..20: mol_type = other DNA
cttctccccagccctgctcg

SEQ ID NO: 25517 - DNA, 20 bp, synthetic construct
  source 1..20: mol_type = other DNA
caccagggtttggaactggc

SEQ ID NO: 25518 - DNA, 20 bp, synthetic construct
  source 1..20: mol_type = other DNA
cggtcaccacgagcagggct

SEQ ID NO: 25519 - DNA, 20 bp, synthetic construct
  source 1..20: mol_type = other DNA
gacagcggcacctacctctg

SEQ ID NO: 25520 - DNA, 20 bp, synthetic construct
  source 1..20: mol_type = other DNA
gagaacacaggcacggctga

SEQ ID NO: 25521 - DNA, 20 bp, synthetic construct
  source 1..20: mol_type = other DNA
ggtgccgctgtcattgcgcc

SEQ ID NO: 25522 - DNA, 20 bp, synthetic construct
  source 1..20: mol_type = other DNA
ctacaactgggctggcggcc

SEQ ID NO: 25523 - DNA, 20 bp, synthetic construct
  source 1..20: mol_type = other DNA
tccgtctgctcagggacaca

SEQ ID NO: 25524 - DNA, 20 bp, synthetic construct
  source 1..20: mol_type = other DNA
ttctgcccttctctctggaa

SEQ ID NO: 25525 - DNA, 20 bp, synthetic construct
  source 1..20: mol_type = other DNA
cccgaggaccgcagccagcc

SEQ ID NO: 25526 - DNA, 20 bp, synthetic construct
  source 1..20: mol_type = other DNA
ctggtggttggtgtcgtggg

SEQ ID NO: 25527 - DNA, 20 bp, synthetic construct
  source 1..20: mol_type = other DNA
cgttgggcagttgtgtgaca

SEQ ID NO: 25528 - DNA, 20 bp, synthetic construct
  source 1..20: mol_type = other DNA
cgtgtcacacaactgcccaa

SEQ ID NO: 25529 - DNA, 20 bp, synthetic construct
  source 1..20: mol_type = other DNA
ggtgacaggtgcggcctcgg

SEQ ID NO: 25530 - DNA, 20 bp, synthetic construct
  source 1..20: mol_type = other DNA
cgatgtgttggagaagctgc

SEQ ID NO: 25531 - DNA, 20 bp, synthetic construct
  source 1..20: mol_type = other DNA
acctcatcccccgcccgcag

SEQ ID NO: 25532 - DNA, 20 bp, synthetic construct
  source 1..20: mol_type = other DNA
ctgcagcttctccaacacat

SEQ ID NO: 25533 - DNA, 20 bp, synthetic construct
  source 1..20: mol_type = other DNA
gcccacgacaccaaccacca

SEQ ID NO: 25534 - DNA, 20 bp, synthetic construct
  source 1..20: mol_type = other DNA
tggcggccaggatggttctt

SEQ ID NO: 25535 - DNA, 20 bp, synthetic construct
  source 1..20: mol_type = other DNA
gagaaggtgggggggttcca

SEQ ID NO: 25536 - DNA, 20 bp, synthetic construct
  source 1..20: mol_type = other DNA
cagggctggggagaaggtgg

SEQ ID NO: 25537 - DNA, 20 bp, synthetic construct
  source 1..20: mol_type = other DNA
cggagagcttcgtgctaaac

SEQ ID NO: 25538 - DNA, 20 bp, synthetic construct
  source 1..20: mol_type = other DNA
agcttgtccgtctggttgct

SEQ ID NO: 25539 - DNA, 20 bp, synthetic construct
  source 1..20: mol_type = other DNA
ccagggagatggccccacag

SEQ ID NO: 25540 - DNA, 20 bp, synthetic construct
  source 1..20: mol_type = other DNA
ggtcaccacgagcagggctg

SEQ ID NO: 25541 - DNA, 20 bp, synthetic construct
  source 1..20: mol_type = other DNA
cgactggccagggcgcctgt

SEQ ID NO: 25542 - DNA, 20 bp, synthetic construct
  source 1..20: mol_type = other DNA
ctccgtctgctcagggacac

SEQ ID NO: 25543 - DNA, 20 bp, synthetic construct
  source 1..20: mol_type = other DNA
accctggtggttggtgtcgt

SEQ ID NO: 25544 - DNA, 20 bp, synthetic construct
  source 1..20: mol_type = other DNA
acgactggccagggcgcctg

SEQ ID NO: 25545 - DNA, 20 bp, synthetic construct
  source 1..20: mol_type = other DNA
tgtctggggagtctgagaga

SEQ ID NO: 25546 - DNA, 20 bp, synthetic construct
  source 1..20: mol_type = other DNA
ccctgcagagaaacacactt

SEQ ID NO: 25547 - DNA, 20 bp, synthetic construct
  source 1..20: mol_type = other DNA
ggagaagctgcaggtgaagg

SEQ ID NO: 25548 - DNA, 20 bp, synthetic construct
  source 1..20: mol_type = other DNA
gcacctcaccttgatgaaag

SEQ ID NO: 25549 - DNA, 20 bp, synthetic construct
  source 1..20: mol_type = other DNA
atatcaataccagaaccgca

SEQ ID NO: 25550 - DNA, 20 bp, synthetic construct
  source 1..20: mol_type = other DNA
agggggattatgtatccacg

SEQ ID NO: 25551 - DNA, 20 bp, synthetic construct
  source 1..20: mol_type = other DNA
ctctgtctttgagacagtgg

SEQ ID NO: 25552 - DNA, 20 bp, synthetic construct
  source 1..20: mol_type = other DNA
tgctattacaactgtaagcc

SEQ ID NO: 25553 - DNA, 20 bp, synthetic construct
  source 1..20: mol_type = other DNA
aaacgctggaggaattagac

SEQ ID NO: 25554 - DNA, 20 bp, synthetic construct
  source 1..20: mol_type = other DNA
ccgggcggcggcgggggcgg

SEQ ID NO: 25555 - DNA, 20 bp, synthetic construct
  source 1..20: mol_type = other DNA
ccagctgtaccgccagtgga

SEQ ID NO: 25556 - DNA, 20 bp, synthetic construct
  source 1..20: mol_type = other DNA
cgggcagccccgggcggcgg

SEQ ID NO: 25557 - DNA, 20 bp, synthetic construct
  source 1..20: mol_type = other DNA
taaagcccacagccaaatga

SEQ ID NO: 25558 - DNA, 20 bp, synthetic construct
  source 1..20: mol_type = other DNA
gggggcggcggcaggggggg

SEQ ID NO: 25559 - DNA, 20 bp, synthetic construct
  source 1..20: mol_type = other DNA
ttatccggtccgtccactgg

SEQ ID NO: 25560 - DNA, 20 bp, synthetic construct
  source 1..20: mol_type = other DNA
cggcgggggcggcggcaggg

SEQ ID NO: 25561 - DNA, 20 bp, synthetic construct
  source 1..20: mol_type = other DNA
ggcggcggcggcggctgtag

SEQ ID NO: 25562 - DNA, 20 bp, synthetic construct
  source 1..20: mol_type = other DNA
gtcttgagtacaaagagtct

SEQ ID NO: 25563 - DNA, 20 bp, synthetic construct
  source 1..20: mol_type = other DNA
gtcaaaacacatgaatctac

SEQ ID NO: 25564 - DNA, 20 bp, synthetic construct
  source 1..20: mol_type = other DNA
actggccagcgagaccctgg

SEQ ID NO: 25565 - DNA, 20 bp, synthetic construct
  source 1..20: mol_type = other DNA
caatgatgtcattcccacaa

SEQ ID NO: 25566 - DNA, 20 bp, synthetic construct
  source 1..20: mol_type = other DNA
caagaagctcctgaagactc

SEQ ID NO: 25567 - DNA, 20 bp, synthetic construct
  source 1..20: mol_type = other DNA
tgaatacaaggagagctttg

SEQ ID NO: 25568 - DNA, 20 bp, synthetic construct
  source 1..20: mol_type = other DNA
ctgtgatgtggcgatctaca

SEQ ID NO: 25569 - DNA, 20 bp, synthetic construct
  source 1..20: mol_type = other DNA
gggagatattcaccatctgt

SEQ ID NO: 25570 - DNA, 20 bp, synthetic construct
  source 1..20: mol_type = other DNA
cacagattcgcgcacaccgt

SEQ ID NO: 25571 - DNA, 20 bp, synthetic construct
  source 1..20: mol_type = other DNA
catctgtaggtctgagattg

SEQ ID NO: 25572 - DNA, 20 bp, synthetic construct
  source 1..20: mol_type = other DNA
acagggatacctgagggcag

SEQ ID NO: 25573 - DNA, 20 bp, synthetic construct
  source 1..20: mol_type = other DNA
tcttgctcagtgcttctcca

SEQ ID NO: 25574 - DNA, 20 bp, synthetic construct
  source 1..20: mol_type = other DNA
cggcccccagcaacagcttc

SEQ ID NO: 25575 - DNA, 20 bp, synthetic construct
  source 1..20: mol_type = other DNA
ctccaaggtgaggagggtta

SEQ ID NO: 25576 - DNA, 20 bp, synthetic construct
  source 1..20: mol_type = other DNA
cgccttccactgtggggaga

SEQ ID NO: 25577 - DNA, 20 bp, synthetic construct
  source 1..20: mol_type = other DNA
tcagctcccggcggatcaac

SEQ ID NO: 25578 - DNA, 20 bp, synthetic construct
  source 1..20: mol_type = other DNA
ggatcaacagggatacctga

SEQ ID NO: 25579 - DNA, 20 bp, synthetic construct
  source 1..20: mol_type = other DNA
accgatccgattgaagaaga

SEQ ID NO: 25580 - DNA, 20 bp, synthetic construct
  source 1..20: mol_type = other DNA
cctaggcgctggtacatgct

SEQ ID NO: 25581 - DNA, 20 bp, synthetic construct
  source 1..20: mol_type = other DNA
caaggacttcagcctcatcc

SEQ ID NO: 25582 - DNA, 20 bp, synthetic construct
  source 1..20: mol_type = other DNA
cgaggtgctcaagagtgtgg

SEQ ID NO: 25583 - DNA, 20 bp, synthetic construct
  source 1..20: mol_type = other DNA
caacagggatacctgagggc

SEQ ID NO: 25584 - DNA, 20 bp, synthetic construct
  source 1..20: mol_type = other DNA
cggccctgaagctgttgctg

SEQ ID NO: 25585 - DNA, 20 bp, synthetic construct
  source 1..20: mol_type = other DNA
ctacagcagctgtgtactct

SEQ ID NO: 25586 - DNA, 20 bp, synthetic construct
  source 1..20: mol_type = other DNA
cctacctttggagcctgtag

SEQ ID NO: 25587 - DNA, 20 bp, synthetic construct
  source 1..20: mol_type = other DNA
ccaagatgatatccttctgc

SEQ ID NO: 25588 - DNA, 20 bp, synthetic construct
  source 1..20: mol_type = other DNA
ggatatcatcttggcagcct

SEQ ID NO: 25589 - DNA, 20 bp, synthetic construct
  source 1..20: mol_type = other DNA
ctagcatgtaccagcgccta

SEQ ID NO: 25590 - DNA, 20 bp, synthetic construct
  source 1..20: mol_type = other DNA
gccttcacttcaggtaatgg

SEQ ID NO: 25591 - DNA, 20 bp, synthetic construct
  source 1..20: mol_type = other DNA
ctcacagctgatcacccagc

SEQ ID NO: 25592 - DNA, 20 bp, synthetic construct
  source 1..20: mol_type = other DNA
ttacctgaagtgaaggccct

SEQ ID NO: 25593 - DNA, 20 bp, synthetic construct
  source 1..20: mol_type = other DNA
ctgagggcaggggtgaagag

SEQ ID NO: 25594 - DNA, 20 bp, synthetic construct
  source 1..20: mol_type = other DNA
acagcggcagaaaattgtgc

SEQ ID NO: 25595 - DNA, 20 bp, synthetic construct
  source 1..20: mol_type = other DNA
ggcccagaacttgaaggact

SEQ ID NO: 25596 - DNA, 20 bp, synthetic construct
  source 1..20: mol_type = other DNA
cggatcaacagggatacctg

SEQ ID NO: 25597 - DNA, 20 bp, synthetic construct
  source 1..20: mol_type = other DNA
gctgtagaagccaaacaagt

SEQ ID NO: 25598 - DNA, 20 bp, synthetic construct
  source 1..20: mol_type = other DNA
ccagaacttgaaggacttgg

SEQ ID NO: 25599 - DNA, 20 bp, synthetic construct
  source 1..20: mol_type = other DNA
gccttccactgtggggagat

SEQ ID NO: 25600 - DNA, 20 bp, synthetic construct
  source 1..20: mol_type = other DNA
ctgtgatggccacatcatcc

SEQ ID NO: 25601 - DNA, 20 bp, synthetic construct
  source 1..20: mol_type = other DNA
gggtcgagacaacactcgca

SEQ ID NO: 25602 - DNA, 20 bp, synthetic construct
  source 1..20: mol_type = other DNA
ttccactgtggggagatggg

SEQ ID NO: 25603 - DNA, 20 bp, synthetic construct
  source 1..20: mol_type = other DNA
ggcccccagcaacagcttca

SEQ ID NO: 25604 - DNA, 20 bp, synthetic construct
  source 1..20: mol_type = other DNA
gacctacctttggagcctgt

SEQ ID NO: 25605 - DNA, 20 bp, synthetic construct
  source 1..20: mol_type = other DNA
cagctgtgaggcattgaact

SEQ ID NO: 25606 - DNA, 20 bp, synthetic construct
  source 1..20: mol_type = other DNA
caggatgaggctgaagtcct

SEQ ID NO: 25607 - DNA, 20 bp, synthetic construct
  source 1..20: mol_type = other DNA
agcccagaatatctccaaga

SEQ ID NO: 25608 - DNA, 20 bp, synthetic construct
  source 1..20: mol_type = other DNA
tctgtgatgtggcgatctac

SEQ ID NO: 25609 - DNA, 20 bp, synthetic construct
  source 1..20: mol_type = other DNA
gctaaagctcagctctgtga

SEQ ID NO: 25610 - DNA, 20 bp, synthetic construct
  source 1..20: mol_type = other DNA
cctagcatgtaccagcgcct

SEQ ID NO: 25611 - DNA, 20 bp, synthetic construct
  source 1..20: mol_type = other DNA
tctgagattgaggtcagcag

SEQ ID NO: 25612 - DNA, 20 bp, synthetic construct
  source 1..20: mol_type = other DNA
gcccgaatgtcatagataat

SEQ ID NO: 25613 - DNA, 20 bp, synthetic construct
  source 1..20: mol_type = other DNA
ggccctgaagctgttgctgg

SEQ ID NO: 25614 - DNA, 20 bp, synthetic construct
  source 1..20: mol_type = other DNA
ttataatgcaagccctttgc

SEQ ID NO: 25615 - DNA, 20 bp, synthetic construct
  source 1..20: mol_type = other DNA
ttacttttacgtgtgatggt

SEQ ID NO: 25616 - DNA, 20 bp, synthetic construct
  source 1..20: mol_type = other DNA
atggcatatgtcattaatgg

SEQ ID NO: 25617 - DNA, 20 bp, synthetic construct
  source 1..20: mol_type = other DNA
tgaacttgagaaactattgc

SEQ ID NO: 25618 - DNA, 20 bp, synthetic construct
  source 1..20: mol_type = other DNA
ttgttcgaatatttaaagac

SEQ ID NO: 25619 - DNA, 20 bp, synthetic construct
  source 1..20: mol_type = other DNA
tctttttaggttactgaaga

SEQ ID NO: 25620 - DNA, 20 bp, synthetic construct
  source 1..20: mol_type = other DNA
ttctctgcttattagaatca

SEQ ID NO: 25621 - DNA, 20 bp, synthetic construct
  source 1..20: mol_type = other DNA
atagtttctcaagttcagct

SEQ ID NO: 25622 - DNA, 20 bp, synthetic construct
  source 1..20: mol_type = other DNA
caacttaccttcgcaggtgg

SEQ ID NO: 25623 - DNA, 20 bp, synthetic construct
  source 1..20: mol_type = other DNA
attcagccaagcattgttga

SEQ ID NO: 25624 - DNA, 20 bp, synthetic construct
  source 1..20: mol_type = other DNA
tcagatgagccgtcttgcca

SEQ ID NO: 25625 - DNA, 20 bp, synthetic construct
  source 1..20: mol_type = other DNA
cggctttcctccacctgcga

SEQ ID NO: 25626 - DNA, 20 bp, synthetic construct
  source 1..20: mol_type = other DNA
ctttcagaggaagcttggaa

SEQ ID NO: 25627 - DNA, 20 bp, synthetic construct
  source 1..20: mol_type = other DNA
aaagagttataaagctgtcc

SEQ ID NO: 25628 - DNA, 20 bp, synthetic construct
  source 1..20: mol_type = other DNA
gttgcgacaggccgatgatg

SEQ ID NO: 25629 - DNA, 20 bp, synthetic construct
  source 1..20: mol_type = other DNA
agccagtgttgagtttttgc

SEQ ID NO: 25630 - DNA, 20 bp, synthetic construct
  source 1..20: mol_type = other DNA
gggttaccttcaacaatgct

SEQ ID NO: 25631 - DNA, 20 bp, synthetic construct
  source 1..20: mol_type = other DNA
tcagccattcattccagcta

SEQ ID NO: 25632 - DNA, 20 bp, synthetic construct
  source 1..20: mol_type = other DNA
ttgttagcaaaaggttatcc

SEQ ID NO: 25633 - DNA, 20 bp, synthetic construct
  source 1..20: mol_type = other DNA
cgaaggtaagttgatttgct

SEQ ID NO: 25634 - DNA, 20 bp, synthetic construct
  source 1..20: mol_type = other DNA
ccccatcgcaccgtctgcaa

SEQ ID NO: 25635 - DNA, 20 bp, synthetic construct
  source 1..20: mol_type = other DNA
gttctagaatgagagactac

SEQ ID NO: 25636 - DNA, 20 bp, synthetic construct
  source 1..20: mol_type = other DNA
acagattcacaagtttgccc

SEQ ID NO: 25637 - DNA, 20 bp, synthetic construct
  source 1..20: mol_type = other DNA
gtttatccagtcagttcctg

SEQ ID NO: 25638 - DNA, 20 bp, synthetic construct
  source 1..20: mol_type = other DNA
aaagaaatggtagaaggaat

SEQ ID NO: 25639 - DNA, 20 bp, synthetic construct
  source 1..20: mol_type = other DNA
taacttaccatagacatctg

SEQ ID NO: 25640 - DNA, 20 bp, synthetic construct
  source 1..20: mol_type = other DNA
gtacctattacaattggtcc

SEQ ID NO: 25641 - DNA, 20 bp, synthetic construct
  source 1..20: mol_type = other DNA
atagataggtatggatatcc

SEQ ID NO: 25642 - DNA, 20 bp, synthetic construct
  source 1..20: mol_type = other DNA
atcacctatatacttggagt

SEQ ID NO: 25643 - DNA, 20 bp, synthetic construct
  source 1..20: mol_type = other DNA
gctttcagaggaagcttgga

SEQ ID NO: 25644 - DNA, 20 bp, synthetic construct
  source 1..20: mol_type = other DNA
gacacttacgttaaaagctg

SEQ ID NO: 25645 - DNA, 20 bp, synthetic construct
  source 1..20: mol_type = other DNA
acatttcaagaattttgtca

SEQ ID NO: 25646 - DNA, 20 bp, synthetic construct
  source 1..20: mol_type = other DNA
tagataggtatggatatcca

SEQ ID NO: 25647 - DNA, 20 bp, synthetic construct
  source 1..20: mol_type = other DNA
gaaggtaacccttaaatgtg

SEQ ID NO: 25648 - DNA, 20 bp, synthetic construct
  source 1..20: mol_type = other DNA
ttccctagcatgtttcgcca

SEQ ID NO: 25649 - DNA, 20 bp, synthetic construct
  source 1..20: mol_type = other DNA
tccctagcatgtttcgccaa

SEQ ID NO: 25650 - DNA, 20 bp, synthetic construct
  source 1..20: mol_type = other DNA
aacttaccatagacatctgg

SEQ ID NO: 25651 - DNA, 20 bp, synthetic construct
  source 1..20: mol_type = other DNA
ataggtatggatatccaggg

SEQ ID NO: 25652 - DNA, 20 bp, synthetic construct
  source 1..20: mol_type = other DNA
tcttttgtttttgatgcagg

SEQ ID NO: 25653 - DNA, 20 bp, synthetic construct
  source 1..20: mol_type = other DNA
tctatgtggaagagtttgcc

SEQ ID NO: 25654 - DNA, 20 bp, synthetic construct
  source 1..20: mol_type = other DNA
atatccagttggaggtacct

SEQ ID NO: 25655 - DNA, 20 bp, synthetic construct
  source 1..20: mol_type = other DNA
attggagtccttataggaaa

SEQ ID NO: 25656 - DNA, 20 bp, synthetic construct
  source 1..20: mol_type = other DNA
aactggatataaatcccagt

SEQ ID NO: 25657 - DNA, 20 bp, synthetic construct
  source 1..20: mol_type = other DNA
tttgagtctaatttttcccc

SEQ ID NO: 25658 - DNA, 20 bp, synthetic construct
  source 1..20: mol_type = other DNA
cttagaagataaactttatg

SEQ ID NO: 25659 - DNA, 20 bp, synthetic construct
  source 1..20: mol_type = other DNA
caaaatgaagcctttgtggc

SEQ ID NO: 25660 - DNA, 20 bp, synthetic construct
  source 1..20: mol_type = other DNA
acatcatgatccgagagagt

SEQ ID NO: 25661 - DNA, 20 bp, synthetic construct
  source 1..20: mol_type = other DNA
agcacgagaaggacctggtg

SEQ ID NO: 25662 - DNA, 20 bp, synthetic construct
  source 1..20: mol_type = other DNA
gcatcagggcaaagaggtgg

SEQ ID NO: 25663 - DNA, 20 bp, synthetic construct
  source 1..20: mol_type = other DNA
gtgcaagacggtgtccagct

SEQ ID NO: 25664 - DNA, 20 bp, synthetic construct
  source 1..20: mol_type = other DNA
cacctgcatcaaccagacag

SEQ ID NO: 25665 - DNA, 20 bp, synthetic construct
  source 1..20: mol_type = other DNA
cttcatcttggagtccatga

SEQ ID NO: 25666 - DNA, 20 bp, synthetic construct
  source 1..20: mol_type = other DNA
cgcggtgccacagcagctgg

SEQ ID NO: 25667 - DNA, 20 bp, synthetic construct
  source 1..20: mol_type = other DNA
ccgcagctgcagctgctgag

SEQ ID NO: 25668 - DNA, 20 bp, synthetic construct
  source 1..20: mol_type = other DNA
ggcacgcggtttctggacct

SEQ ID NO: 25669 - DNA, 20 bp, synthetic construct
  source 1..20: mol_type = other DNA
gcaggtgggagagggcctct

SEQ ID NO: 25670 - DNA, 20 bp, synthetic construct
  source 1..20: mol_type = other DNA
aacatcatgatccgagagag

SEQ ID NO: 25671 - DNA, 20 bp, synthetic construct
  source 1..20: mol_type = other DNA
atcctcatgcttgttccact

SEQ ID NO: 25672 - DNA, 20 bp, synthetic construct
  source 1..20: mol_type = other DNA
ctatggctgcctccccaccg

SEQ ID NO: 25673 - DNA, 20 bp, synthetic construct
  source 1..20: mol_type = other DNA
ttgtccatgtgattcagcag

SEQ ID NO: 25674 - DNA, 20 bp, synthetic construct
  source 1..20: mol_type = other DNA
tcacagatcagcctcctcat

SEQ ID NO: 25675 - DNA, 20 bp, synthetic construct
  source 1..20: mol_type = other DNA
caccaagaagaagtccaaga

SEQ ID NO: 25676 - DNA, 20 bp, synthetic construct
  source 1..20: mol_type = other DNA
ggacggagggccacatgtag

SEQ ID NO: 25677 - DNA, 20 bp, synthetic construct
  source 1..20: mol_type = other DNA
gatgtgccaattctgcgagg

SEQ ID NO: 25678 - DNA, 20 bp, synthetic construct
  source 1..20: mol_type = other DNA
ctcgtggaggcctgcggggt

SEQ ID NO: 25679 - DNA, 20 bp, synthetic construct
  source 1..20: mol_type = other DNA
gaggaggaggtgagtggggt

SEQ ID NO: 25680 - DNA, 20 bp, synthetic construct
  source 1..20: mol_type = other DNA
caggtgaacacataggcctc

SEQ ID NO: 25681 - DNA, 20 bp, synthetic construct
  source 1..20: mol_type = other DNA
gtggggactgcaggtgggag

SEQ ID NO: 25682 - DNA, 20 bp, synthetic construct
  source 1..20: mol_type = other DNA
gtggaacaagcatgaggatg

SEQ ID NO: 25683 - DNA, 20 bp, synthetic construct
  source 1..20: mol_type = other DNA
tctggtcaacgttaagtttg

SEQ ID NO: 25684 - DNA, 20 bp, synthetic construct
  source 1..20: mol_type = other DNA
ctgccggaggtctgtgccac

SEQ ID NO: 25685 - DNA, 20 bp, synthetic construct
  source 1..20: mol_type = other DNA
gctcatctgcctgcccgagg

SEQ ID NO: 25686 - DNA, 20 bp, synthetic construct
  source 1..20: mol_type = other DNA
gtcgagtggggactgcaggt

SEQ ID NO: 25687 - DNA, 20 bp, synthetic construct
  source 1..20: mol_type = other DNA
caagacggtgtccagctcgg

SEQ ID NO: 25688 - DNA, 20 bp, synthetic construct
  source 1..20: mol_type = other DNA
ggtggaggaagagaagcccg

SEQ ID NO: 25689 - DNA, 20 bp, synthetic construct
  source 1..20: mol_type = other DNA
cgttgctgtacatgatccac

SEQ ID NO: 25690 - DNA, 20 bp, synthetic construct
  source 1..20: mol_type = other DNA
agagcggctcatactgggcg

SEQ ID NO: 25691 - DNA, 20 bp, synthetic construct
  source 1..20: mol_type = other DNA
ggctgggggccggggaagca

SEQ ID NO: 25692 - DNA, 20 bp, synthetic construct
  source 1..20: mol_type = other DNA
ccacatgctcagtggccccg

SEQ ID NO: 25693 - DNA, 20 bp, synthetic construct
  source 1..20: mol_type = other DNA
tagggggtcatcctaggcaa

SEQ ID NO: 25694 - DNA, 20 bp, synthetic construct
  source 1..20: mol_type = other DNA
ctccagccgctgcttccaca

SEQ ID NO: 25695 - DNA, 20 bp, synthetic construct
  source 1..20: mol_type = other DNA
gatccacaggggcttcatct

SEQ ID NO: 25696 - DNA, 20 bp, synthetic construct
  source 1..20: mol_type = other DNA
aatcaatgtggaacagctga

SEQ ID NO: 25697 - DNA, 20 bp, synthetic construct
  source 1..20: mol_type = other DNA
ggcccccaggtttgagccga

SEQ ID NO: 25698 - DNA, 20 bp, synthetic construct
  source 1..20: mol_type = other DNA
tcacctggaactggcagagc

SEQ ID NO: 25699 - DNA, 20 bp, synthetic construct
  source 1..20: mol_type = other DNA
tttgcaggactccctggcac

SEQ ID NO: 25700 - DNA, 20 bp, synthetic construct
  source 1..20: mol_type = other DNA
gttcacttctgggtcgcaca

SEQ ID NO: 25701 - DNA, 20 bp, synthetic construct
  source 1..20: mol_type = other DNA
acctgcagcgtgtagtcttc

SEQ ID NO: 25702 - DNA, 20 bp, synthetic construct
  source 1..20: mol_type = other DNA
acttggtgaccagcagcagc

SEQ ID NO: 25703 - DNA, 20 bp, synthetic construct
  source 1..20: mol_type = other DNA
gttgatgcaggtgaacacat

SEQ ID NO: 25704 - DNA, 20 bp, synthetic construct
  source 1..20: mol_type = other DNA
ggctgaagtccaagaacccg

SEQ ID NO: 25705 - DNA, 20 bp, synthetic construct
  source 1..20: mol_type = other DNA
cggagctggaaggtgaaggg

SEQ ID NO: 25706 - DNA, 20 bp, synthetic construct
  source 1..20: mol_type = other DNA
acagcaggtagagcatctgg

SEQ ID NO: 25707 - DNA, 20 bp, synthetic construct
  source 1..20: mol_type = other DNA
tgcaggactccctggcactg

SEQ ID NO: 25708 - DNA, 20 bp, synthetic construct
  source 1..20: mol_type = other DNA
ggtgctgaggttggcattgc

SEQ ID NO: 25709 - DNA, 20 bp, synthetic construct
  source 1..20: mol_type = other DNA
caccttccaggtgtccacca

SEQ ID NO: 25710 - DNA, 20 bp, synthetic construct
  source 1..20: mol_type = other DNA
atctcggagctggaaggtga

SEQ ID NO: 25711 - DNA, 20 bp, synthetic construct
  source 1..20: mol_type = other DNA
tcccgcagctgcagctgctg

SEQ ID NO: 25712 - DNA, 20 bp, synthetic construct
  source 1..20: mol_type = other DNA
gccctggccaaccgcaagat

SEQ ID NO: 25713 - DNA, 20 bp, synthetic construct
  source 1..20: mol_type = other DNA
caaaggtagctctgccgagt

SEQ ID NO: 25714 - DNA, 20 bp, synthetic construct
  source 1..20: mol_type = other DNA
ttgcctaggatgacccccta

SEQ ID NO: 25715 - DNA, 20 bp, synthetic construct
  source 1..20: mol_type = other DNA
gcacagcaggtagagcatct

SEQ ID NO: 25716 - DNA, 20 bp, synthetic construct
  source 1..20: mol_type = other DNA
agttccaggtgaggccgctg

SEQ ID NO: 25717 - DNA, 20 bp, synthetic construct
  source 1..20: mol_type = other DNA
cgagagagtgggcaggtaca

SEQ ID NO: 25718 - DNA, 20 bp, synthetic construct
  source 1..20: mol_type = other DNA
ctcgttgccgtggaaaagcc

SEQ ID NO: 25719 - DNA, 20 bp, synthetic construct
  source 1..20: mol_type = other DNA
ccggcagcagctgggctggg

SEQ ID NO: 25720 - DNA, 20 bp, synthetic construct
  source 1..20: mol_type = other DNA
tgcatcagctccttggtctg

SEQ ID NO: 25721 - DNA, 20 bp, synthetic construct
  source 1..20: mol_type = other DNA
agccccggaacctgcaggta

SEQ ID NO: 25722 - DNA, 20 bp, synthetic construct
  source 1..20: mol_type = other DNA
atagggggtcatcctaggca

SEQ ID NO: 25723 - DNA, 20 bp, synthetic construct
  source 1..20: mol_type = other DNA
tggatgagctcgatgcggaa

SEQ ID NO: 25724 - DNA, 20 bp, synthetic construct
  source 1..20: mol_type = other DNA
ttgttgcagatcttggagct

SEQ ID NO: 25725 - DNA, 20 bp, synthetic construct
  source 1..20: mol_type = other DNA
ccgcagcgacttgatggcga

SEQ ID NO: 25726 - DNA, 20 bp, synthetic construct
  source 1..20: mol_type = other DNA
agagaagcccgtggcgccgc

SEQ ID NO: 25727 - DNA, 20 bp, synthetic construct
  source 1..20: mol_type = other DNA
tgcagtaggcctccaggatg

SEQ ID NO: 25728 - DNA, 20 bp, synthetic construct
  source 1..20: mol_type = other DNA
catgccgcagcttccacacc

SEQ ID NO: 25729 - DNA, 20 bp, synthetic construct
  source 1..20: mol_type = other DNA
gctcatcgtccctgcaggga

SEQ ID NO: 25730 - DNA, 20 bp, synthetic construct
  source 1..20: mol_type = other DNA
cggtggggaggcagccatag

SEQ ID NO: 25731 - DNA, 20 bp, synthetic construct
  source 1..20: mol_type = other DNA
gctcttgctgctccgctgtc

SEQ ID NO: 25732 - DNA, 20 bp, synthetic construct
  source 1..20: mol_type = other DNA
aagcccgtggcgccgcagga

SEQ ID NO: 25733 - DNA, 20 bp, synthetic construct
  source 1..20: mol_type = other DNA
aacagctcatcgtccctgca

SEQ ID NO: 25734 - DNA, 20 bp, synthetic construct
  source 1..20: mol_type = other DNA
ggccacacaatagccagcac

SEQ ID NO: 25735 - DNA, 20 bp, synthetic construct
  source 1..20: mol_type = other DNA
ccaccaggcgcaggacgggc

SEQ ID NO: 25736 - DNA, 20 bp, synthetic construct
  source 1..20: mol_type = other DNA
cccgccggcagcagctgggc

SEQ ID NO: 25737 - DNA, 20 bp, synthetic construct
  source 1..20: mol_type = other DNA
ccttcgccatcaagtcgctg

SEQ ID NO: 25738 - DNA, 20 bp, synthetic construct
  source 1..20: mol_type = other DNA
cgggccaccaggcgcaggac

SEQ ID NO: 25739 - DNA, 20 bp, synthetic construct
  source 1..20: mol_type = other DNA
tgctcagtgcttccccctgg

SEQ ID NO: 25740 - DNA, 20 bp, synthetic construct
  source 1..20: mol_type = other DNA
accttcttcgcaggaatggg

SEQ ID NO: 25741 - DNA, 20 bp, synthetic construct
  source 1..20: mol_type = other DNA
tgaccagaagggcccggttc

SEQ ID NO: 25742 - DNA, 20 bp, synthetic construct
  source 1..20: mol_type = other DNA
catgagctggatcatctgca

SEQ ID NO: 25743 - DNA, 20 bp, synthetic construct
  source 1..20: mol_type = other DNA
gccaatgcccagcacatatg

SEQ ID NO: 25744 - DNA, 20 bp, synthetic construct
  source 1..20: mol_type = other DNA
gtcctgcagaaggacagggc

SEQ ID NO: 25745 - DNA, 20 bp, synthetic construct
  source 1..20: mol_type = other DNA
caggtcggcccaggcccagg

SEQ ID NO: 25746 - DNA, 20 bp, synthetic construct
  source 1..20: mol_type = other DNA
agctacctttgccgatgagg

SEQ ID NO: 25747 - DNA, 20 bp, synthetic construct
  source 1..20: mol_type = other DNA
ccgaagcgcagggccaccga

SEQ ID NO: 25748 - DNA, 20 bp, synthetic construct
  source 1..20: mol_type = other DNA
aacggagtaccacctcaatg

SEQ ID NO: 25749 - DNA, 20 bp, synthetic construct
  source 1..20: mol_type = other DNA
cgctctgccagttccaggtg

SEQ ID NO: 25750 - DNA, 20 bp, synthetic construct
  source 1..20: mol_type = other DNA
ctctgtgtccctgtggtccc

SEQ ID NO: 25751 - DNA, 20 bp, synthetic construct
  source 1..20: mol_type = other DNA
agcggagcagcaagagctgg

SEQ ID NO: 25752 - DNA, 20 bp, synthetic construct
  source 1..20: mol_type = other DNA
tgccctggatgagctcgatg

SEQ ID NO: 25753 - DNA, 20 bp, synthetic construct
  source 1..20: mol_type = other DNA
acacgctgcaggtgaacggc

SEQ ID NO: 25754 - DNA, 20 bp, synthetic construct
  source 1..20: mol_type = other DNA
ccgtcggtggccctgcgctt

SEQ ID NO: 25755 - DNA, 20 bp, synthetic construct
  source 1..20: mol_type = other DNA
tgcacagcatctcgttgccg

SEQ ID NO: 25756 - DNA, 20 bp, synthetic construct
  source 1..20: mol_type = other DNA
ggagagggtgaactcctcaa

SEQ ID NO: 25757 - DNA, 20 bp, synthetic construct
  source 1..20: mol_type = other DNA
agctgaagtctagcagctcc

SEQ ID NO: 25758 - DNA, 20 bp, synthetic construct
  source 1..20: mol_type = other DNA
ctcctgtgctggctattgtg

SEQ ID NO: 25759 - DNA, 20 bp, synthetic construct
  source 1..20: mol_type = other DNA
tgttggcgatggtgtctgaa

SEQ ID NO: 25760 - DNA, 20 bp, synthetic construct
  source 1..20: mol_type = other DNA
gggggtcatcctaggcaagg

SEQ ID NO: 25761 - DNA, 20 bp, synthetic construct
  source 1..20: mol_type = other DNA
ggaggtgccagaaaaggaag

SEQ ID NO: 25762 - DNA, 20 bp, synthetic construct
  source 1..20: mol_type = other DNA
ggtgaagctctcctgtgggg

SEQ ID NO: 25763 - DNA, 20 bp, synthetic construct
  source 1..20: mol_type = other DNA
agcttccccgattgccacgt

SEQ ID NO: 25764 - DNA, 20 bp, synthetic construct
  source 1..20: mol_type = other DNA
cagctgcagatgtactgaga

SEQ ID NO: 25765 - DNA, 20 bp, synthetic construct
  source 1..20: mol_type = other DNA
cagcaggtagagcatctggg

SEQ ID NO: 25766 - DNA, 20 bp, synthetic construct
  source 1..20: mol_type = other DNA
acaacgtgtccaaagacaac

SEQ ID NO: 25767 - DNA, 20 bp, synthetic construct
  source 1..20: mol_type = other DNA
gggcagtcctgcagaaggac

SEQ ID NO: 25768 - DNA, 20 bp, synthetic construct
  source 1..20: mol_type = other DNA
tccacaggacgtccatgagc

SEQ ID NO: 25769 - DNA, 20 bp, synthetic construct
  source 1..20: mol_type = other DNA
cactgaccttctccagggcg

SEQ ID NO: 25770 - DNA, 20 bp, synthetic construct
  source 1..20: mol_type = other DNA
ggagctggaaggtgaaggga

SEQ ID NO: 25771 - DNA, 20 bp, synthetic construct
  source 1..20: mol_type = other DNA
ccagcccctcctgcttccac

SEQ ID NO: 25772 - DNA, 20 bp, synthetic construct
  source 1..20: mol_type = other DNA
gaaggtgaagctctcctgtg

SEQ ID NO: 25773 - DNA, 20 bp, synthetic construct
  source 1..20: mol_type = other DNA
ggtcgccctcacgggccacc

SEQ ID NO: 25774 - DNA, 20 bp, synthetic construct
  source 1..20: mol_type = other DNA
cgtacagcgcaaagcagaga

SEQ ID NO: 25775 - DNA, 20 bp, synthetic construct
  source 1..20: mol_type = other DNA
gcccgtgtggaagcagcggc

SEQ ID NO: 25776 - DNA, 20 bp, synthetic construct
  source 1..20: mol_type = other DNA
gcagccgggctagcgcctcc

SEQ ID NO: 25777 - DNA, 20 bp, synthetic construct
  source 1..20: mol_type = other DNA
cacagcaggtagagcatctg

SEQ ID NO: 25778 - DNA, 20 bp, synthetic construct
  source 1..20: mol_type = other DNA
tggtgctgaggttggcattg

SEQ ID NO: 25779 - DNA, 20 bp, synthetic construct
  source 1..20: mol_type = other DNA
ccactgaccttctccagggc

SEQ ID NO: 25780 - DNA, 20 bp, synthetic construct
  source 1..20: mol_type = other DNA
cagggcatccttgttgaagg

SEQ ID NO: 25781 - DNA, 20 bp, synthetic construct
  source 1..20: mol_type = other DNA
gatcatgtacagcaacgagg

SEQ ID NO: 25782 - DNA, 20 bp, synthetic construct
  source 1..20: mol_type = other DNA
ctccgagatgcacgtgccgt

SEQ ID NO: 25783 - DNA, 20 bp, synthetic construct
  source 1..20: mol_type = other DNA
aggtctgtgccaccggccgg

SEQ ID NO: 25784 - DNA, 20 bp, synthetic construct
  source 1..20: mol_type = other DNA
gttgacccctcacctgacca

SEQ ID NO: 25785 - DNA, 20 bp, synthetic construct
  source 1..20: mol_type = other DNA
atcctggaggcctactgcag

SEQ ID NO: 25786 - DNA, 20 bp, synthetic construct
  source 1..20: mol_type = other DNA
cggagcccgtgtggaagcag

SEQ ID NO: 25787 - DNA, 20 bp, synthetic construct
  source 1..20: mol_type = other DNA
atgtggaacagctgagggga

SEQ ID NO: 25788 - DNA, 20 bp, synthetic construct
  source 1..20: mol_type = other DNA
tccacctctttgccctgatg

SEQ ID NO: 25789 - DNA, 20 bp, synthetic construct
  source 1..20: mol_type = other DNA
aggtgaacacataggcctcg

SEQ ID NO: 25790 - DNA, 20 bp, synthetic construct
  source 1..20: mol_type = other DNA
ccaactcaacaagagcaaca

SEQ ID NO: 25791 - DNA, 20 bp, synthetic construct
  source 1..20: mol_type = other DNA
cctcccagcccagctgctgc

SEQ ID NO: 25792 - DNA, 20 bp, synthetic construct
  source 1..20: mol_type = other DNA
gccacatatgtgctgggcat

SEQ ID NO: 25793 - DNA, 20 bp, synthetic construct
  source 1..20: mol_type = other DNA
gagcagggcatccttgttga

SEQ ID NO: 25794 - DNA, 20 bp, synthetic construct
  source 1..20: mol_type = other DNA
ggtctgtgccaccggccggt

SEQ ID NO: 25795 - DNA, 20 bp, synthetic construct
  source 1..20: mol_type = other DNA
atcatctttaagaacgggga

SEQ ID NO: 25796 - DNA, 20 bp, synthetic construct
  source 1..20: mol_type = other DNA
cggaggtctgtgccaccggc

SEQ ID NO: 25797 - DNA, 20 bp, synthetic construct
  source 1..20: mol_type = other DNA
agtcgtaggtgaggatgaat

SEQ ID NO: 25798 - DNA, 20 bp, synthetic construct
  source 1..20: mol_type = other DNA
cagcttgacgaagtcattca

SEQ ID NO: 25799 - DNA, 20 bp, synthetic construct
  source 1..20: mol_type = other DNA
gaagtccaagaacccggggt

SEQ ID NO: 25800 - DNA, 20 bp, synthetic construct
  source 1..20: mol_type = other DNA
aatgtggaacagctgagggg

SEQ ID NO: 25801 - DNA, 20 bp, synthetic construct
  source 1..20: mol_type = other DNA
tggctgaagtccaagaaccc

SEQ ID NO: 25802 - DNA, 20 bp, synthetic construct
  source 1..20: mol_type = other DNA
atggaccatggtcaggtgag

SEQ ID NO: 25803 - DNA, 20 bp, synthetic construct
  source 1..20: mol_type = other DNA
gatccagggcctccctgggt

SEQ ID NO: 25804 - DNA, 20 bp, synthetic construct
  source 1..20: mol_type = other DNA
gttgagttggatgttggcga

SEQ ID NO: 25805 - DNA, 20 bp, synthetic construct
  source 1..20: mol_type = other DNA
gcaccagctgcagcaggtac

SEQ ID NO: 25806 - DNA, 20 bp, synthetic construct
  source 1..20: mol_type = other DNA
acaatagccagcacaggaga

SEQ ID NO: 25807 - DNA, 20 bp, synthetic construct
  source 1..20: mol_type = other DNA
ccaggatgaggccgaagcgc

SEQ ID NO: 25808 - DNA, 20 bp, synthetic construct
  source 1..20: mol_type = other DNA
gtacctgctgcagctggtgc

SEQ ID NO: 25809 - DNA, 20 bp, synthetic construct
  source 1..20: mol_type = other DNA
ccagcccagctgctgccggc

SEQ ID NO: 25810 - DNA, 20 bp, synthetic construct
  source 1..20: mol_type = other DNA
caggcgcaggacgggcagga

SEQ ID NO: 25811 - DNA, 20 bp, synthetic construct
  source 1..20: mol_type = other DNA
gctgcccgtcctgagcgccc

SEQ ID NO: 25812 - DNA, 20 bp, synthetic construct
  source 1..20: mol_type = other DNA
ggaggagaatcagagcgttg

SEQ ID NO: 25813 - DNA, 20 bp, synthetic construct
  source 1..20: mol_type = other DNA
gtatgagcacgagaaggacc

SEQ ID NO: 25814 - DNA, 20 bp, synthetic construct
  source 1..20: mol_type = other DNA
acgtgcatctcggagctgga

SEQ ID NO: 25815 - DNA, 20 bp, synthetic construct
  source 1..20: mol_type = other DNA
agctgcgggaaatcctggag

SEQ ID NO: 25816 - DNA, 20 bp, synthetic construct
  source 1..20: mol_type = other DNA
gtttgctcagtgcttccccc

SEQ ID NO: 25817 - DNA, 20 bp, synthetic construct
  source 1..20: mol_type = other DNA
gtggcgccgcaggatggtgt

SEQ ID NO: 25818 - DNA, 20 bp, synthetic construct
  source 1..20: mol_type = other DNA
gcaggtgaacacataggcct

SEQ ID NO: 25819 - DNA, 20 bp, synthetic construct
  source 1..20: mol_type = other DNA
agctccagggcgctcaggac

SEQ ID NO: 25820 - DNA, 20 bp, synthetic construct
  source 1..20: mol_type = other DNA
aggagcctacgtggcaatcg

SEQ ID NO: 25821 - DNA, 20 bp, synthetic construct
  source 1..20: mol_type = other DNA
ggcccggtccagcaggaatt

SEQ ID NO: 25822 - DNA, 20 bp, synthetic construct
  source 1..20: mol_type = other DNA
caaagacatccagtatctca

SEQ ID NO: 25823 - DNA, 20 bp, synthetic construct
  source 1..20: mol_type = other DNA
aggcgcaggacgggcaggaa

SEQ ID NO: 25824 - DNA, 20 bp, synthetic construct
  source 1..20: mol_type = other DNA
aagcaggtatggcctccatc

SEQ ID NO: 25825 - DNA, 20 bp, synthetic construct
  source 1..20: mol_type = other DNA
gcggtgccacagcagctgga

SEQ ID NO: 25826 - DNA, 20 bp, synthetic construct
  source 1..20: mol_type = other DNA
acaaggagtcaaactcgtgg

SEQ ID NO: 25827 - DNA, 20 bp, synthetic construct
  source 1..20: mol_type = other DNA
tccagctcatggacgtcctg

SEQ ID NO: 25828 - DNA, 20 bp, synthetic construct
  source 1..20: mol_type = other DNA
ctgcagggaaggaaggcgct

SEQ ID NO: 25829 - DNA, 20 bp, synthetic construct
  source 1..20: mol_type = other DNA
agtatctcaaggtatgtgcc

SEQ ID NO: 25830 - DNA, 20 bp, synthetic construct
  source 1..20: mol_type = other DNA
tggagcagctgagctcaggc

SEQ ID NO: 25831 - DNA, 20 bp, synthetic construct
  source 1..20: mol_type = other DNA
ataatagtgagaaatttgaa

SEQ ID NO: 25832 - DNA, 20 bp, synthetic construct
  source 1..20: mol_type = other DNA
catcctggaggcctactgca

SEQ ID NO: 25833 - DNA, 20 bp, synthetic construct
  source 1..20: mol_type = other DNA
gccgacgagcggatgaaggt

SEQ ID NO: 25834 - DNA, 20 bp, synthetic construct
  source 1..20: mol_type = other DNA
ctgcttgatggtgctgaggt

SEQ ID NO: 25835 - DNA, 20 bp, synthetic construct
  source 1..20: mol_type = other DNA
tcagcggcctcacctggaac

SEQ ID NO: 25836 - DNA, 20 bp, synthetic construct
  source 1..20: mol_type = other DNA
agccacagccgccttcaaca

SEQ ID NO: 25837 - DNA, 20 bp, synthetic construct
  source 1..20: mol_type = other DNA
atcaatgtggaacagctgag

SEQ ID NO: 25838 - DNA, 20 bp, synthetic construct
  source 1..20: mol_type = other DNA
aggccctttcacagtagccc

SEQ ID NO: 25839 - DNA, 20 bp, synthetic construct
  source 1..20: mol_type = other DNA
cagtatctcaaggtatgtgc

SEQ ID NO: 25840 - DNA, 20 bp, synthetic construct
  source 1..20: mol_type = other DNA
ggtcgagtggggactgcagg

SEQ ID NO: 25841 - DNA, 20 bp, synthetic construct
  source 1..20: mol_type = other DNA
tcatcagcaccttcatgtgg

SEQ ID NO: 25842 - DNA, 20 bp, synthetic construct
  source 1..20: mol_type = other DNA
gcacgcggtttctggacctg

SEQ ID NO: 25843 - DNA, 20 bp, synthetic construct
  source 1..20: mol_type = other DNA
ggccctggatcgagccattg

SEQ ID NO: 25844 - DNA, 20 bp, synthetic construct
  source 1..20: mol_type = other DNA
ttcttcgcaggaatgggagg

SEQ ID NO: 25845 - DNA, 20 bp, synthetic construct
  source 1..20: mol_type = other DNA
gaacagctcatcgtccctgc

SEQ ID NO: 25846 - DNA, 20 bp, synthetic construct
  source 1..20: mol_type = other DNA
gagttcaccctctcctgtgc

SEQ ID NO: 25847 - DNA, 20 bp, synthetic construct
  source 1..20: mol_type = other DNA
gccccggaacctgcaggtag

SEQ ID NO: 25848 - DNA, 20 bp, synthetic construct
  source 1..20: mol_type = other DNA
cctgcagatgatccagctca

SEQ ID NO: 25849 - DNA, 20 bp, synthetic construct
  source 1..20: mol_type = other DNA
gcaaaggtagctctgccgag

SEQ ID NO: 25850 - DNA, 20 bp, synthetic construct
  source 1..20: mol_type = other DNA
ctcctccatcctcgccatgc

SEQ ID NO: 25851 - DNA, 20 bp, synthetic construct
  source 1..20: mol_type = other DNA
cctccgtcccaggtcggccc

SEQ ID NO: 25852 - DNA, 20 bp, synthetic construct
  source 1..20: mol_type = other DNA
caggatgaggccgaagcgca

SEQ ID NO: 25853 - DNA, 20 bp, synthetic construct
  source 1..20: mol_type = other DNA
ggtcagctcgcagtccaggt

SEQ ID NO: 25854 - DNA, 20 bp, synthetic construct
  source 1..20: mol_type = other DNA
gaagaagtccaagaaggcgg

SEQ ID NO: 25855 - DNA, 20 bp, synthetic construct
  source 1..20: mol_type = other DNA
ggtggggaggcagccatagg

SEQ ID NO: 25856 - DNA, 20 bp, synthetic construct
  source 1..20: mol_type = other DNA
caagaaggcggtgggtccca

SEQ ID NO: 25857 - DNA, 20 bp, synthetic construct
  source 1..20: mol_type = other DNA
gttccagtacctgctgcagc

SEQ ID NO: 25858 - DNA, 20 bp, synthetic construct
  source 1..20: mol_type = other DNA
gttgctgtacatgatccaca

SEQ ID NO: 25859 - DNA, 20 bp, synthetic construct
  source 1..20: mol_type = other DNA
ccgccctggagaaggtcagt

SEQ ID NO: 25860 - DNA, 20 bp, synthetic construct
  source 1..20: mol_type = other DNA
gtgccaattctgcgaggagg

SEQ ID NO: 25861 - DNA, 20 bp, synthetic construct
  source 1..20: mol_type = other DNA
ggaagaaggccacagtgttc

SEQ ID NO: 25862 - DNA, 20 bp, synthetic construct
  source 1..20: mol_type = other DNA
gaacgccgacgagcggatga

SEQ ID NO: 25863 - DNA, 20 bp, synthetic construct
  source 1..20: mol_type = other DNA
aaatcaatgtggaacagctg

SEQ ID NO: 25864 - DNA, 20 bp, synthetic construct
  source 1..20: mol_type = other DNA
actcgaccccagcaccctgc

SEQ ID NO: 25865 - DNA, 20 bp, synthetic construct
  source 1..20: mol_type = other DNA
cagctccagggcgctcagga

SEQ ID NO: 25866 - DNA, 20 bp, synthetic construct
  source 1..20: mol_type = other DNA
gggaatttcaagaccaagtt

SEQ ID NO: 25867 - DNA, 20 bp, synthetic construct
  source 1..20: mol_type = other DNA
cagggaccacagggacacag

SEQ ID NO: 25868 - DNA, 20 bp, synthetic construct
  source 1..20: mol_type = other DNA
caagaagaagtccaagaagg

SEQ ID NO: 25869 - DNA, 20 bp, synthetic construct
  source 1..20: mol_type = other DNA
catgtagaggcagcgttccc

SEQ ID NO: 25870 - DNA, 20 bp, synthetic construct
  source 1..20: mol_type = other DNA
cgccgacgagcggatgaagg

SEQ ID NO: 25871 - DNA, 20 bp, synthetic construct
  source 1..20: mol_type = other DNA
tacatgtggccctccgtccc

SEQ ID NO: 25872 - DNA, 20 bp, synthetic construct
  source 1..20: mol_type = other DNA
caaggaccagcttaagaccg

SEQ ID NO: 25873 - DNA, 20 bp, synthetic construct
  source 1..20: mol_type = other DNA
ctcgcggttgattccaaact

SEQ ID NO: 25874 - DNA, 20 bp, synthetic construct
  source 1..20: mol_type = other DNA
gagccctcggctcaaacctg

SEQ ID NO: 25875 - DNA, 20 bp, synthetic construct
  source 1..20: mol_type = other DNA
ctcaccttcttcgcaggaat

SEQ ID NO: 25876 - DNA, 20 bp, synthetic construct
  source 1..20: mol_type = other DNA
ccaaagacaacaggcagtag

SEQ ID NO: 25877 - DNA, 20 bp, synthetic construct
  source 1..20: mol_type = other DNA
ctagcagctccagggcgctc

SEQ ID NO: 25878 - DNA, 20 bp, synthetic construct
  source 1..20: mol_type = other DNA
aagttcaggtagacccctgt

SEQ ID NO: 25879 - DNA, 20 bp, synthetic construct
  source 1..20: mol_type = other DNA
gctggaaaaccaaagtgaac

SEQ ID NO: 25880 - DNA, 20 bp, synthetic construct
  source 1..20: mol_type = other DNA
cggcgttcactttgctgccc

SEQ ID NO: 25881 - DNA, 20 bp, synthetic construct
  source 1..20: mol_type = other DNA
ccatgagctggatcatctgc

SEQ ID NO: 25882 - DNA, 20 bp, synthetic construct
  source 1..20: mol_type = other DNA
actccaagatgaagcccctg

SEQ ID NO: 25883 - DNA, 20 bp, synthetic construct
  source 1..20: mol_type = other DNA
cctgcgcctggtggcccgtg

SEQ ID NO: 25884 - DNA, 20 bp, synthetic construct
  source 1..20: mol_type = other DNA
tagccccggaacctgcaggt

SEQ ID NO: 25885 - DNA, 20 bp, synthetic construct
  source 1..20: mol_type = other DNA
ggcaggcagcggcggcagcg

SEQ ID NO: 25886 - DNA, 20 bp, synthetic construct
  source 1..20: mol_type = other DNA
ttgattttggccactttctg

SEQ ID NO: 25887 - DNA, 20 bp, synthetic construct
  source 1..20: mol_type = other DNA
gacccccaagccccagacca

SEQ ID NO: 25888 - DNA, 20 bp, synthetic construct
  source 1..20: mol_type = other DNA
ctttaagaacggggatggtg

SEQ ID NO: 25889 - DNA, 20 bp, synthetic construct
  source 1..20: mol_type = other DNA
gcagggtcagcatgtcctgc

SEQ ID NO: 25890 - DNA, 20 bp, synthetic construct
  source 1..20: mol_type = other DNA
ctcgggcaggcagatgagca

SEQ ID NO: 25891 - DNA, 20 bp, synthetic construct
  source 1..20: mol_type = other DNA
ccacctctttgccctgatgc

SEQ ID NO: 25892 - DNA, 20 bp, synthetic construct
  source 1..20: mol_type = other DNA
cactgtggccttcttccgca

SEQ ID NO: 25893 - DNA, 20 bp, synthetic construct
  source 1..20: mol_type = other DNA
agtgttccggcagccgctgg

SEQ ID NO: 25894 - DNA, 20 bp, synthetic construct
  source 1..20: mol_type = other DNA
atctgcagctgcctgcacag

SEQ ID NO: 25895 - DNA, 20 bp, synthetic construct
  source 1..20: mol_type = other DNA
acagtagccccggaacctgc

SEQ ID NO: 25896 - DNA, 20 bp, synthetic construct
  source 1..20: mol_type = other DNA
ctcgcagaattggcacatct

SEQ ID NO: 25897 - DNA, 20 bp, synthetic construct
  source 1..20: mol_type = other DNA
gatggaggaggaatggacca

SEQ ID NO: 25898 - DNA, 20 bp, synthetic construct
  source 1..20: mol_type = other DNA
cccggtggggaggcagccat

SEQ ID NO: 25899 - DNA, 20 bp, synthetic construct
  source 1..20: mol_type = other DNA
tgtggccctccgtcccaggt

SEQ ID NO: 25900 - DNA, 20 bp, synthetic construct
  source 1..20: mol_type = other DNA
gcacacgctcacctccgagc

SEQ ID NO: 25901 - DNA, 20 bp, synthetic construct
  source 1..20: mol_type = other DNA
gggcatcatctttaagaacg

SEQ ID NO: 25902 - DNA, 20 bp, synthetic construct
  source 1..20: mol_type = other DNA
gctccaagatctgcaacaaa

SEQ ID NO: 25903 - DNA, 20 bp, synthetic construct
  source 1..20: mol_type = other DNA
gcggcaggaggcctacctag

SEQ ID NO: 25904 - DNA, 20 bp, synthetic construct
  source 1..20: mol_type = other DNA
gcaggtacaggggctggtgc

SEQ ID NO: 25905 - DNA, 20 bp, synthetic construct
  source 1..20: mol_type = other DNA
tcccaggtcggcccaggccc

SEQ ID NO: 25906 - DNA, 20 bp, synthetic construct
  source 1..20: mol_type = other DNA
ctacccgctctgccagttcc

SEQ ID NO: 25907 - DNA, 20 bp, synthetic construct
  source 1..20: mol_type = other DNA
ccgccggcagcagctgggct

SEQ ID NO: 25908 - DNA, 20 bp, synthetic construct
  source 1..20: mol_type = other DNA
gatgcacttgtgcatgcggc

SEQ ID NO: 25909 - DNA, 20 bp, synthetic construct
  source 1..20: mol_type = other DNA
gaccacagggacacagagga

SEQ ID NO: 25910 - DNA, 20 bp, synthetic construct
  source 1..20: mol_type = other DNA
aacgaggaggcaggcagcgg

SEQ ID NO: 25911 - DNA, 20 bp, synthetic construct
  source 1..20: mol_type = other DNA
caggcagatgagcagggcag

SEQ ID NO: 25912 - DNA, 20 bp, synthetic construct
  source 1..20: mol_type = other DNA
tcaccagacttcagccagca

SEQ ID NO: 25913 - DNA, 20 bp, synthetic construct
  source 1..20: mol_type = other DNA
cacaatagccagcacaggag

SEQ ID NO: 25914 - DNA, 20 bp, synthetic construct
  source 1..20: mol_type = other DNA
gctcttgttgagttggatgt

SEQ ID NO: 25915 - DNA, 20 bp, synthetic construct
  source 1..20: mol_type = other DNA
tgaagtccaagaacccgggg

SEQ ID NO: 25916 - DNA, 20 bp, synthetic construct
  source 1..20: mol_type = other DNA
gcaggtgaggcccaaggccc

SEQ ID NO: 25917 - DNA, 20 bp, synthetic construct
  source 1..20: mol_type = other DNA
ttgaccagaagggcccggtt

SEQ ID NO: 25918 - DNA, 20 bp, synthetic construct
  source 1..20: mol_type = other DNA
tgtgtggccacatatgtgct

SEQ ID NO: 25919 - DNA, 20 bp, synthetic construct
  source 1..20: mol_type = other DNA
cctcacgggccaccaggcgc

SEQ ID NO: 25920 - DNA, 20 bp, synthetic construct
  source 1..20: mol_type = other DNA
gtgcatcagctccttggtct

SEQ ID NO: 25921 - DNA, 20 bp, synthetic construct
  source 1..20: mol_type = other DNA
caccccactcacctcctcct

SEQ ID NO: 25922 - DNA, 20 bp, synthetic construct
  source 1..20: mol_type = other DNA
gggtcagcatgtcctgccgg

SEQ ID NO: 25923 - DNA, 20 bp, synthetic construct
  source 1..20: mol_type = other DNA
tcttgaaattccccagaaag

SEQ ID NO: 25924 - DNA, 20 bp, synthetic construct
  source 1..20: mol_type = other DNA
gtggaagagcggctcatact

SEQ ID NO: 25925 - DNA, 20 bp, synthetic construct
  source 1..20: mol_type = other DNA
tggcgaggatggaggaggaa

SEQ ID NO: 25926 - DNA, 20 bp, synthetic construct
  source 1..20: mol_type = other DNA
cctcctccatcctcgccatg

SEQ ID NO: 25927 - DNA, 20 bp, synthetic construct
  source 1..20: mol_type = other DNA
acagggacacagaggaaggc

SEQ ID NO: 25928 - DNA, 20 bp, synthetic construct
  source 1..20: mol_type = other DNA
aatggaccatggtcaggtga

SEQ ID NO: 25929 - DNA, 20 bp, synthetic construct
  source 1..20: mol_type = other DNA
tgttgcagatcttggagctg

SEQ ID NO: 25930 - DNA, 20 bp, synthetic construct
  source 1..20: mol_type = other DNA
gtactaccccgccctggaga

SEQ ID NO: 25931 - DNA, 20 bp, synthetic construct
  source 1..20: mol_type = other DNA
gctcagtgcttccccctggt

SEQ ID NO: 25932 - DNA, 20 bp, synthetic construct
  source 1..20: mol_type = other DNA
caacgagatgctgtgcaaga

SEQ ID NO: 25933 - DNA, 20 bp, synthetic construct
  source 1..20: mol_type = other DNA
cggctgctccagggaccaca

SEQ ID NO: 25934 - DNA, 20 bp, synthetic construct
  source 1..20: mol_type = other DNA
aagagctggaggacgagcaa

SEQ ID NO: 25935 - DNA, 20 bp, synthetic construct
  source 1..20: mol_type = other DNA
gcacaggccatcagcgccag

SEQ ID NO: 25936 - DNA, 20 bp, synthetic construct
  source 1..20: mol_type = other DNA
acgaagccctccgtgagagc

SEQ ID NO: 25937 - DNA, 20 bp, synthetic construct
  source 1..20: mol_type = other DNA
gtgggagagggcctctaggt

SEQ ID NO: 25938 - DNA, 20 bp, synthetic construct
  source 1..20: mol_type = other DNA
ccttggtccagaattccatg

SEQ ID NO: 25939 - DNA, 20 bp, synthetic construct
  source 1..20: mol_type = other DNA
gcttcatcagcaccttcatg

SEQ ID NO: 25940 - DNA, 20 bp, synthetic construct
  source 1..20: mol_type = other DNA
catcagcaccttcatgtggt

SEQ ID NO: 25941 - DNA, 20 bp, synthetic construct
  source 1..20: mol_type = other DNA
ctcacctggaactggcagag

SEQ ID NO: 25942 - DNA, 20 bp, synthetic construct
  source 1..20: mol_type = other DNA
gtcctgcaaacaaatcacag

SEQ ID NO: 25943 - DNA, 20 bp, synthetic construct
  source 1..20: mol_type = other DNA
gagagagtgggcaggtacag

SEQ ID NO: 25944 - DNA, 20 bp, synthetic construct
  source 1..20: mol_type = other DNA
caccaagtggaacaagcatg

SEQ ID NO: 25945 - DNA, 20 bp, synthetic construct
  source 1..20: mol_type = other DNA
cccgcatcagggcaaagagg

SEQ ID NO: 25946 - DNA, 20 bp, synthetic construct
  source 1..20: mol_type = other DNA
gcatgaggatgtggcccagg

SEQ ID NO: 25947 - DNA, 20 bp, synthetic construct
  source 1..20: mol_type = other DNA
agtccaggagcacttcccgg

SEQ ID NO: 25948 - DNA, 20 bp, synthetic construct
  source 1..20: mol_type = other DNA
tccagccgctgcttccacac

SEQ ID NO: 25949 - DNA, 20 bp, synthetic construct
  source 1..20: mol_type = other DNA
caatggggcagtcctgcaga

SEQ ID NO: 25950 - DNA, 20 bp, synthetic construct
  source 1..20: mol_type = other DNA
gacagcggagcagcaagagc

SEQ ID NO: 25951 - DNA, 20 bp, synthetic construct
  source 1..20: mol_type = other DNA
atgaggttggcccaggcaat

SEQ ID NO: 25952 - DNA, 20 bp, synthetic construct
  source 1..20: mol_type = other DNA
gcaggcagcggcggcagcgt

SEQ ID NO: 25953 - DNA, 20 bp, synthetic construct
  source 1..20: mol_type = other DNA
gcacctgcaccagctgcagc

SEQ ID NO: 25954 - DNA, 20 bp, synthetic construct
  source 1..20: mol_type = other DNA
aggaggaatggaccatggtc

SEQ ID NO: 25955 - DNA, 20 bp, synthetic construct
  source 1..20: mol_type = other DNA
ggcctgtgcggtccccggtg

SEQ ID NO: 25956 - DNA, 20 bp, synthetic construct
  source 1..20: mol_type = other DNA
gaaagtggccaaaatcaatg

SEQ ID NO: 25957 - DNA, 20 bp, synthetic construct
  source 1..20: mol_type = other DNA
ctacagctggtggtgcaggc

SEQ ID NO: 25958 - DNA, 20 bp, synthetic construct
  source 1..20: mol_type = other DNA
caagatgtgccaattctgcg

SEQ ID NO: 25959 - DNA, 20 bp, synthetic construct
  source 1..20: mol_type = other DNA
cccactgaccttctccaggg

SEQ ID NO: 25960 - DNA, 20 bp, synthetic construct
  source 1..20: mol_type = other DNA
catggacaaagtcgtaggtg

SEQ ID NO: 25961 - DNA, 20 bp, synthetic construct
  source 1..20: mol_type = other DNA
tggggactgcaggtgggaga

SEQ ID NO: 25962 - DNA, 20 bp, synthetic construct
  source 1..20: mol_type = other DNA
tctgcagctgcctgcacagt

SEQ ID NO: 25963 - DNA, 20 bp, synthetic construct
  source 1..20: mol_type = other DNA
cctgcaccaccagctgtaga

SEQ ID NO: 25964 - DNA, 20 bp, synthetic construct
  source 1..20: mol_type = other DNA
atacctgcttgatggtgctg

SEQ ID NO: 25965 - DNA, 20 bp, synthetic construct
  source 1..20: mol_type = other DNA
gtcaaactcgtggaggcctg

SEQ ID NO: 25966 - DNA, 20 bp, synthetic construct
  source 1..20: mol_type = other DNA
cctgcagggaaggaaggcgc

SEQ ID NO: 25967 - DNA, 20 bp, synthetic construct
  source 1..20: mol_type = other DNA
catgatccgagagagtgggc

SEQ ID NO: 25968 - DNA, 20 bp, synthetic construct
  source 1..20: mol_type = other DNA
gcgcctccgggaagtgctcc

SEQ ID NO: 25969 - DNA, 20 bp, synthetic construct
  source 1..20: mol_type = other DNA
ggggtagtacacggggtgcg

SEQ ID NO: 25970 - DNA, 20 bp, synthetic construct
  source 1..20: mol_type = other DNA
ggaccgcacaggcctcattg

SEQ ID NO: 25971 - DNA, 20 bp, synthetic construct
  source 1..20: mol_type = other DNA
aatcacatggacaaagtcgt

SEQ ID NO: 25972 - DNA, 20 bp, synthetic construct
  source 1..20: mol_type = other DNA
atccttgttgaaggcggctg

SEQ ID NO: 25973 - DNA, 20 bp, synthetic construct
  source 1..20: mol_type = other DNA
cgatccagggcctccctggg

SEQ ID NO: 25974 - DNA, 20 bp, synthetic construct
  source 1..20: mol_type = other DNA
ggggaaactgtactgcagcc

SEQ ID NO: 25975 - DNA, 20 bp, synthetic construct
  source 1..20: mol_type = other DNA
gcagccgctggtggagcagc

SEQ ID NO: 25976 - DNA, 20 bp, synthetic construct
  source 1..20: mol_type = other DNA
gaggcctgtgcggtccccgg

SEQ ID NO: 25977 - DNA, 20 bp, synthetic construct
  source 1..20: mol_type = other DNA
gcccagctgctgccggcggg

SEQ ID NO: 25978 - DNA, 20 bp, synthetic construct
  source 1..20: mol_type = other DNA
ggaaggtgaagctctcctgt

SEQ ID NO: 25979 - DNA, 20 bp, synthetic construct
  source 1..20: mol_type = other DNA
gggcttcgttaaacttcact

SEQ ID NO: 25980 - DNA, 20 bp, synthetic construct
  source 1..20: mol_type = other DNA
gaagttcaggtagacccctg

SEQ ID NO: 25981 - DNA, 20 bp, synthetic construct
  source 1..20: mol_type = other DNA
cccagcccagctgctgccgg

SEQ ID NO: 25982 - DNA, 20 bp, synthetic construct
  source 1..20: mol_type = other DNA
aatgaggcctgtgcggtccc

SEQ ID NO: 25983 - DNA, 20 bp, synthetic construct
  source 1..20: mol_type = other DNA
ctcctcaatggctcgatcca

SEQ ID NO: 25984 - DNA, 20 bp, synthetic construct
  source 1..20: mol_type = other DNA
gtagtcaaacagcatgaggt

SEQ ID NO: 25985 - DNA, 20 bp, synthetic construct
  source 1..20: mol_type = other DNA
agcacagcaggtagagcatc

SEQ ID NO: 25986 - DNA, 20 bp, synthetic construct
  source 1..20: mol_type = other DNA
tcttcccctgctgaatcaca

SEQ ID NO: 25987 - DNA, 20 bp, synthetic construct
  source 1..20: mol_type = other DNA
gtgcaggccgggcttttcca

SEQ ID NO: 25988 - DNA, 20 bp, synthetic construct
  source 1..20: mol_type = other DNA
cagccatagggggtcatcct

SEQ ID NO: 25989 - DNA, 20 bp, synthetic construct
  source 1..20: mol_type = other DNA
gctaccggaggtgccagaaa

SEQ ID NO: 25990 - DNA, 20 bp, synthetic construct
  source 1..20: mol_type = other DNA
ctgggccgacctgggacgga

SEQ ID NO: 25991 - DNA, 20 bp, synthetic construct
  source 1..20: mol_type = other DNA
gaatggaccatggtcaggtg

SEQ ID NO: 25992 - DNA, 20 bp, synthetic construct
  source 1..20: mol_type = other DNA
ccccaccttcatccgctcgt

SEQ ID NO: 25993 - DNA, 20 bp, synthetic construct
  source 1..20: mol_type = other DNA
cccgcagctgcagctgctga

SEQ ID NO: 25994 - DNA, 20 bp, synthetic construct
  source 1..20: mol_type = other DNA
ccctatggctgcctccccac

SEQ ID NO: 25995 - DNA, 20 bp, synthetic construct
  source 1..20: mol_type = other DNA
tgtggaacagctgaggggag

SEQ ID NO: 25996 - DNA, 20 bp, synthetic construct
  source 1..20: mol_type = other DNA
gaaggtggggctcctgggat

SEQ ID NO: 25997 - DNA, 20 bp, synthetic construct
  source 1..20: mol_type = other DNA
aaacagcatgaggttggccc

SEQ ID NO: 25998 - DNA, 20 bp, synthetic construct
  source 1..20: mol_type = other DNA
cctatggctgcctccccacc

SEQ ID NO: 25999 - DNA, 20 bp, synthetic construct
  source 1..20: mol_type = other DNA
caaactcgtggaggcctgcg

SEQ ID NO: 26000 - DNA, 20 bp, synthetic construct
  source 1..20: mol_type = other DNA
ggcaggcatgagtacctgta

SEQ ID NO: 26001 - DNA, 20 bp, synthetic construct
  source 1..20: mol_type = other DNA
gctccggccaggagcacagc

SEQ ID NO: 26002 - DNA, 20 bp, synthetic construct
  source 1..20: mol_type = other DNA
aggacctggtgtggaagctg

SEQ ID NO: 26003 - DNA, 20 bp, synthetic construct
  source 1..20: mol_type = other DNA
cagagctacctttgccgatg

SEQ ID NO: 26004 - DNA, 20 bp, synthetic construct
  source 1..20: mol_type = other DNA
ccagggcggggtagtacacg

SEQ ID NO: 26005 - DNA, 20 bp, synthetic construct
  source 1..20: mol_type = other DNA
gtacagtttccccctgcagc

SEQ ID NO: 26006 - DNA, 20 bp, synthetic construct
  source 1..20: mol_type = other DNA
atgtacagcaacgaggaggc

SEQ ID NO: 26007 - DNA, 20 bp, synthetic construct
  source 1..20: mol_type = other DNA
ggttttccagctctcacgga

SEQ ID NO: 26008 - DNA, 20 bp, synthetic construct
  source 1..20: mol_type = other DNA
actcctcaatggctcgatcc

SEQ ID NO: 26009 - DNA, 20 bp, synthetic construct
  source 1..20: mol_type = other DNA
cttggtgaccagcagcagcc

SEQ ID NO: 26010 - DNA, 20 bp, synthetic construct
  source 1..20: mol_type = other DNA
aacagctgaggggaggggag

SEQ ID NO: 26011 - DNA, 20 bp, synthetic construct
  source 1..20: mol_type = other DNA
tttgtccatgtgattcagca

SEQ ID NO: 26012 - DNA, 20 bp, synthetic construct
  source 1..20: mol_type = other DNA
ccaccagctgtagaaggtgc

SEQ ID NO: 26013 - DNA, 20 bp, synthetic construct
  source 1..20: mol_type = other DNA
cagcgaggtgagcccatgcg

SEQ ID NO: 26014 - DNA, 20 bp, synthetic construct
  source 1..20: mol_type = other DNA
ctcaccagacttcagccagc

SEQ ID NO: 26015 - DNA, 20 bp, synthetic construct
  source 1..20: mol_type = other DNA
ggagctgtatgagcacgaga

SEQ ID NO: 26016 - DNA, 20 bp, synthetic construct
  source 1..20: mol_type = other DNA
ccgcccgcatcagggcaaag

SEQ ID NO: 26017 - DNA, 20 bp, synthetic construct
  source 1..20: mol_type = other DNA
ttgcaggactccctggcact

SEQ ID NO: 26018 - DNA, 20 bp, synthetic construct
  source 1..20: mol_type = other DNA
agggggtcatcctaggcaag

SEQ ID NO: 26019 - DNA, 20 bp, synthetic construct
  source 1..20: mol_type = other DNA
acaaggaccagcttaagacc

SEQ ID NO: 26020 - DNA, 20 bp, synthetic construct
  source 1..20: mol_type = other DNA
caccagctgtagaaggtgcc

SEQ ID NO: 26021 - DNA, 20 bp, synthetic construct
  source 1..20: mol_type = other DNA
cctctttgccctgatgcggg

SEQ ID NO: 26022 - DNA, 20 bp, synthetic construct
  source 1..20: mol_type = other DNA
tggaaggtgaagctctcctg

SEQ ID NO: 26023 - DNA, 20 bp, synthetic construct
  source 1..20: mol_type = other DNA
gtgggccagccagttcactt

SEQ ID NO: 26024 - DNA, 20 bp, synthetic construct
  source 1..20: mol_type = other DNA
ggatgaatgggacacgctcg

SEQ ID NO: 26025 - DNA, 20 bp, synthetic construct
  source 1..20: mol_type = other DNA
tacaaggaccagcttaagac

SEQ ID NO: 26026 - DNA, 20 bp, synthetic construct
  source 1..20: mol_type = other DNA
agtgcatcagctccttggtc

SEQ ID NO: 26027 - DNA, 20 bp, synthetic construct
  source 1..20: mol_type = other DNA
ggcagtcctgcagaaggaca

SEQ ID NO: 26028 - DNA, 20 bp, synthetic construct
  source 1..20: mol_type = other DNA
ccactactgcctgttgtctt

SEQ ID NO: 26029 - DNA, 20 bp, synthetic construct
  source 1..20: mol_type = other DNA
ctcatcccgcatggcgagga

SEQ ID NO: 26030 - DNA, 20 bp, synthetic construct
  source 1..20: mol_type = other DNA
gccggaagactacacgctgc

SEQ ID NO: 26031 - DNA, 20 bp, synthetic construct
  source 1..20: mol_type = other DNA
cctgtacctgcccactctct

SEQ ID NO: 26032 - DNA, 20 bp, synthetic construct
  source 1..20: mol_type = other DNA
catgaggttggcccaggcaa

SEQ ID NO: 26033 - DNA, 20 bp, synthetic construct
  source 1..20: mol_type = other DNA
tctttggagcagctgagctc

SEQ ID NO: 26034 - DNA, 20 bp, synthetic construct
  source 1..20: mol_type = other DNA
tgaggttggcccaggcaatg

SEQ ID NO: 26035 - DNA, 20 bp, synthetic construct
  source 1..20: mol_type = other DNA
aaaggaagtggccgatcttg

SEQ ID NO: 26036 - DNA, 20 bp, synthetic construct
  source 1..20: mol_type = other DNA
gttgacttcctgctgcccac

SEQ ID NO: 26037 - DNA, 20 bp, synthetic construct
  source 1..20: mol_type = other DNA
ccccctgcagctggagccct

SEQ ID NO: 26038 - DNA, 20 bp, synthetic construct
  source 1..20: mol_type = other DNA
tggttttccagctctcacgg

SEQ ID NO: 26039 - DNA, 20 bp, synthetic construct
  source 1..20: mol_type = other DNA
cgagatgcacgtgccgtcgg

SEQ ID NO: 26040 - DNA, 20 bp, synthetic construct
  source 1..20: mol_type = other DNA
ctggtcaacgttaagtttga

SEQ ID NO: 26041 - DNA, 20 bp, synthetic construct
  source 1..20: mol_type = other DNA
tgcaggactgccccattgcc

SEQ ID NO: 26042 - DNA, 20 bp, synthetic construct
  source 1..20: mol_type = other DNA
ggacttcagccagttgagca

SEQ ID NO: 26043 - DNA, 20 bp, synthetic construct
  source 1..20: mol_type = other DNA
ccgacgagcggatgaaggtg

SEQ ID NO: 26044 - DNA, 20 bp, synthetic construct
  source 1..20: mol_type = other DNA
cctcgggcaggcagatgagc

SEQ ID NO: 26045 - DNA, 20 bp, synthetic construct
  source 1..20: mol_type = other DNA
gatgcggaacggctgctcca

SEQ ID NO: 26046 - DNA, 20 bp, synthetic construct
  source 1..20: mol_type = other DNA
aaagggcctacaccatcctg

SEQ ID NO: 26047 - DNA, 20 bp, synthetic construct
  source 1..20: mol_type = other DNA
ccgagagagtgggcaggtac

SEQ ID NO: 26048 - DNA, 20 bp, synthetic construct
  source 1..20: mol_type = other DNA
tggacttcagccagttgagc

SEQ ID NO: 26049 - DNA, 20 bp, synthetic construct
  source 1..20: mol_type = other DNA
acactgtggccttcttccgc

SEQ ID NO: 26050 - DNA, 20 bp, synthetic construct
  source 1..20: mol_type = other DNA
tgatggcgaaggagcctacg

SEQ ID NO: 26051 - DNA, 20 bp, synthetic construct
  source 1..20: mol_type = other DNA
acgctgccaggccagagagc

SEQ ID NO: 26052 - DNA, 20 bp, synthetic construct
  source 1..20: mol_type = other DNA
gcagctggagggacagtcac

SEQ ID NO: 26053 - DNA, 20 bp, synthetic construct
  source 1..20: mol_type = other DNA
ccaagaaggcggtgggtccc

SEQ ID NO: 26054 - DNA, 20 bp, synthetic construct
  source 1..20: mol_type = other DNA
gtctgcaactaacccagaca

SEQ ID NO: 26055 - DNA, 20 bp, synthetic construct
  source 1..20: mol_type = other DNA
tgtgccacagcccctcagat

SEQ ID NO: 26056 - DNA, 20 bp, synthetic construct
  source 1..20: mol_type = other DNA
gtcgcctattccaagaacaa

SEQ ID NO: 26057 - DNA, 20 bp, synthetic construct
  source 1..20: mol_type = other DNA
ctttaccgcagtagatctgg

SEQ ID NO: 26058 - DNA, 20 bp, synthetic construct
  source 1..20: mol_type = other DNA
ggcaacaagtcctttgccaa

SEQ ID NO: 26059 - DNA, 20 bp, synthetic construct
  source 1..20: mol_type = other DNA
ctccagtttctgaactgcaa

SEQ ID NO: 26060 - DNA, 20 bp, synthetic construct
  source 1..20: mol_type = other DNA
tcagaaactggagagcttgg

SEQ ID NO: 26061 - DNA, 20 bp, synthetic construct
  source 1..20: mol_type = other DNA
gctctgcaggatggcgccgg

SEQ ID NO: 26062 - DNA, 20 bp, synthetic construct
  source 1..20: mol_type = other DNA
gaacctctgctgatagtgtc

SEQ ID NO: 26063 - DNA, 20 bp, synthetic construct
  source 1..20: mol_type = other DNA
cacctcctctgtgaagggtt

SEQ ID NO: 26064 - DNA, 20 bp, synthetic construct
  source 1..20: mol_type = other DNA
ctggaaggcttgggactcct

SEQ ID NO: 26065 - DNA, 20 bp, synthetic construct
  source 1..20: mol_type = other DNA
tcatctgctccacgttgccg

SEQ ID NO: 26066 - DNA, 20 bp, synthetic construct
  source 1..20: mol_type = other DNA
agcctaaaggaagaacacat

SEQ ID NO: 26067 - DNA, 20 bp, synthetic construct
  source 1..20: mol_type = other DNA
tgagctgccgctggaaggct

SEQ ID NO: 26068 - DNA, 20 bp, synthetic construct
  source 1..20: mol_type = other DNA
gctcaccttttcttcagtag

SEQ ID NO: 26069 - DNA, 20 bp, synthetic construct
  source 1..20: mol_type = other DNA
cacggcgcaggaggaaacgg

SEQ ID NO: 26070 - DNA, 20 bp, synthetic construct
  source 1..20: mol_type = other DNA
catgagcagcttaccatcca

SEQ ID NO: 26071 - DNA, 20 bp, synthetic construct
  source 1..20: mol_type = other DNA
cctgtaaaataagcatgtct

SEQ ID NO: 26072 - DNA, 20 bp, synthetic construct
  source 1..20: mol_type = other DNA
cgcccaccaggtactcatcc

SEQ ID NO: 26073 - DNA, 20 bp, synthetic construct
  source 1..20: mol_type = other DNA
tgtggaggacgtattctcca

SEQ ID NO: 26074 - DNA, 20 bp, synthetic construct
  source 1..20: mol_type = other DNA
gttcaaatttcacagcctaa

SEQ ID NO: 26075 - DNA, 20 bp, synthetic construct
  source 1..20: mol_type = other DNA
tggagaacaggatgatcagt

SEQ ID NO: 26076 - DNA, 20 bp, synthetic construct
  source 1..20: mol_type = other DNA
tctacaattggtccaggtag

SEQ ID NO: 26077 - DNA, 20 bp, synthetic construct
  source 1..20: mol_type = other DNA
gccagatttctgctgaagcg

SEQ ID NO: 26078 - DNA, 20 bp, synthetic construct
  source 1..20: mol_type = other DNA
gaacggagaagagattcacg

SEQ ID NO: 26079 - DNA, 20 bp, synthetic construct
  source 1..20: mol_type = other DNA
gaagcctatctgaggggctg

SEQ ID NO: 26080 - DNA, 20 bp, synthetic construct
  source 1..20: mol_type = other DNA
tggccgggatgagtacctgg

SEQ ID NO: 26081 - DNA, 20 bp, synthetic construct
  source 1..20: mol_type = other DNA
ttggtccaggtaggggatgt

SEQ ID NO: 26082 - DNA, 20 bp, synthetic construct
  source 1..20: mol_type = other DNA
tgtcagcattgaagcttcct

SEQ ID NO: 26083 - DNA, 20 bp, synthetic construct
  source 1..20: mol_type = other DNA
aataggtatgtagttacctc

SEQ ID NO: 26084 - DNA, 20 bp, synthetic construct
  source 1..20: mol_type = other DNA
cggcaacgtggagcagatga

SEQ ID NO: 26085 - DNA, 20 bp, synthetic construct
  source 1..20: mol_type = other DNA
ccagcttcgcaagcaattgg

SEQ ID NO: 26086 - DNA, 20 bp, synthetic construct
  source 1..20: mol_type = other DNA
aatcaaagacttgcccaaag

SEQ ID NO: 26087 - DNA, 20 bp, synthetic construct
  source 1..20: mol_type = other DNA
cagaggacaaagaattgctc

SEQ ID NO: 26088 - DNA, 20 bp, synthetic construct
  source 1..20: mol_type = other DNA
gtgattatactcttacacta

SEQ ID NO: 26089 - DNA, 20 bp, synthetic construct
  source 1..20: mol_type = other DNA
tccaccagtgaatattggct

SEQ ID NO: 26090 - DNA, 20 bp, synthetic construct
  source 1..20: mol_type = other DNA
ctagcatacctcatcagtat

SEQ ID NO: 26091 - DNA, 20 bp, synthetic construct
  source 1..20: mol_type = other DNA
gtacagctctctgaaagaac

SEQ ID NO: 26092 - DNA, 20 bp, synthetic construct
  source 1..20: mol_type = other DNA
gggagtcgttgtgctgcaca

SEQ ID NO: 26093 - DNA, 20 bp, synthetic construct
  source 1..20: mol_type = other DNA
ggtctctcgtctttctcagc

SEQ ID NO: 26094 - DNA, 20 bp, synthetic construct
  source 1..20: mol_type = other DNA
acaagatgctgaatggtact

SEQ ID NO: 26095 - DNA, 20 bp, synthetic construct
  source 1..20: mol_type = other DNA
ccatgtcttctcatcatgat

SEQ ID NO: 26096 - DNA, 20 bp, synthetic construct
  source 1..20: mol_type = other DNA
gtaccattcagcatcttgta

SEQ ID NO: 26097 - DNA, 20 bp, synthetic construct
  source 1..20: mol_type = other DNA
ctcttacactaaggtaagcc

SEQ ID NO: 26098 - DNA, 20 bp, synthetic construct
  source 1..20: mol_type = other DNA
aaaactcacctgggatgtgc

SEQ ID NO: 26099 - DNA, 20 bp, synthetic construct
  source 1..20: mol_type = other DNA
aacacagagctccagcaacc

SEQ ID NO: 26100 - DNA, 20 bp, synthetic construct
  source 1..20: mol_type = other DNA
gcctagccaatattcactgg

SEQ ID NO: 26101 - DNA, 20 bp, synthetic construct
  source 1..20: mol_type = other DNA
ggtactggggagatatctcg

SEQ ID NO: 26102 - DNA, 20 bp, synthetic construct
  source 1..20: mol_type = other DNA
aaacttcgagatacagcaga

SEQ ID NO: 26103 - DNA, 20 bp, synthetic construct
  source 1..20: mol_type = other DNA
ttacgacagcttcttgattg

SEQ ID NO: 26104 - DNA, 20 bp, synthetic construct
  source 1..20: mol_type = other DNA
gcaacaggaagaggccgagg

SEQ ID NO: 26105 - DNA, 20 bp, synthetic construct
  source 1..20: mol_type = other DNA
tttctcagctggataaggtc

SEQ ID NO: 26106 - DNA, 20 bp, synthetic construct
  source 1..20: mol_type = other DNA
caagatgctgaatggtactg

SEQ ID NO: 26107 - DNA, 20 bp, synthetic construct
  source 1..20: mol_type = other DNA
catgtcttctcatcatgatg

SEQ ID NO: 26108 - DNA, 20 bp, synthetic construct
  source 1..20: mol_type = other DNA
aacttcgagatacagcagac

SEQ ID NO: 26109 - DNA, 20 bp, synthetic construct
  source 1..20: mol_type = other DNA
gaaaactcacctgggatgtg

SEQ ID NO: 26110 - DNA, 20 bp, synthetic construct
  source 1..20: mol_type = other DNA
aaagggtccttagtagctct

SEQ ID NO: 26111 - DNA, 20 bp, synthetic construct
  source 1..20: mol_type = other DNA
aatgaacgacagcctgcacc

SEQ ID NO: 26112 - DNA, 20 bp, synthetic construct
  source 1..20: mol_type = other DNA
gatgcgtctactaaaatgca

SEQ ID NO: 26113 - DNA, 20 bp, synthetic construct
  source 1..20: mol_type = other DNA
tcgtctttctcagctggata

SEQ ID NO: 26114 - DNA, 20 bp, synthetic construct
  source 1..20: mol_type = other DNA
ctagagattcattccggtag

SEQ ID NO: 26115 - DNA, 20 bp, synthetic construct
  source 1..20: mol_type = other DNA
tcttacactaaggtaagcca

SEQ ID NO: 26116 - DNA, 20 bp, synthetic construct
  source 1..20: mol_type = other DNA
gctgtacaagttatagggct

SEQ ID NO: 26117 - DNA, 20 bp, synthetic construct
  source 1..20: mol_type = other DNA
gtcgttgtgctgcacaaggg

SEQ ID NO: 26118 - DNA, 20 bp, synthetic construct
  source 1..20: mol_type = other DNA
aaagaagttgaacgagtggt

SEQ ID NO: 26119 - DNA, 20 bp, synthetic construct
  source 1..20: mol_type = other DNA
gtccgggagagcagtaaaca

SEQ ID NO: 26120 - DNA, 20 bp, synthetic construct
  source 1..20: mol_type = other DNA
cttcgccgtccaccctagag

SEQ ID NO: 26121 - DNA, 20 bp, synthetic construct
  source 1..20: mol_type = other DNA
tacaagatgctgaatggtac

SEQ ID NO: 26122 - DNA, 20 bp, synthetic construct
  source 1..20: mol_type = other DNA
tccatgtcttctcatcatga

SEQ ID NO: 26123 - DNA, 20 bp, synthetic construct
  source 1..20: mol_type = other DNA
acccagtatatgcacagcag

SEQ ID NO: 26124 - DNA, 20 bp, synthetic construct
  source 1..20: mol_type = other DNA
caatactgatgaggtatgct

SEQ ID NO: 26125 - DNA, 20 bp, synthetic construct
  source 1..20: mol_type = other DNA
ggagtcgttgtgctgcacaa

SEQ ID NO: 26126 - DNA, 20 bp, synthetic construct
  source 1..20: mol_type = other DNA
ccactcagcatcctgcaggg

SEQ ID NO: 26127 - DNA, 20 bp, synthetic construct
  source 1..20: mol_type = other DNA
caggatgctgagtggtactg

SEQ ID NO: 26128 - DNA, 20 bp, synthetic construct
  source 1..20: mol_type = other DNA
ggcggcgcgcgcagcagcag

SEQ ID NO: 26129 - DNA, 20 bp, synthetic construct
  source 1..20: mol_type = other DNA
aggggccccatcacggggcc

SEQ ID NO: 26130 - DNA, 20 bp, synthetic construct
  source 1..20: mol_type = other DNA
cctggcggcggcgaggacgg

SEQ ID NO: 26131 - DNA, 20 bp, synthetic construct
  source 1..20: mol_type = other DNA
aggatcctgtgggaggggtg

SEQ ID NO: 26132 - DNA, 20 bp, synthetic construct
  source 1..20: mol_type = other DNA
ggcggcgaggacggcggcgg

SEQ ID NO: 26133 - DNA, 20 bp, synthetic construct
  source 1..20: mol_type = other DNA
catctgcagctcctggagga

SEQ ID NO: 26134 - DNA, 20 bp, synthetic construct
  source 1..20: mol_type = other DNA
cggcattaagagcttcctgc

SEQ ID NO: 26135 - DNA, 20 bp, synthetic construct
  source 1..20: mol_type = other DNA
tctcgttcacctcctccctg

SEQ ID NO: 26136 - DNA, 20 bp, synthetic construct
  source 1..20: mol_type = other DNA
agtacacgctgaccctcagg

SEQ ID NO: 26137 - DNA, 20 bp, synthetic construct
  source 1..20: mol_type = other DNA
tccattggccaggactgtgg

SEQ ID NO: 26138 - DNA, 20 bp, synthetic construct
  source 1..20: mol_type = other DNA
ggcctggtgggggaaacagg

SEQ ID NO: 26139 - DNA, 20 bp, synthetic construct
  source 1..20: mol_type = other DNA
gctgctctcgcggatgagga

SEQ ID NO: 26140 - DNA, 20 bp, synthetic construct
  source 1..20: mol_type = other DNA
tctctctgttgtccgaggcc

SEQ ID NO: 26141 - DNA, 20 bp, synthetic construct
  source 1..20: mol_type = other DNA
gcaggatgctgagtggtact

SEQ ID NO: 26142 - DNA, 20 bp, synthetic construct
  source 1..20: mol_type = other DNA
caggatgcagaatggtactg

SEQ ID NO: 26143 - DNA, 20 bp, synthetic construct
  source 1..20: mol_type = other DNA
tatgccagatgggaccttct

SEQ ID NO: 26144 - DNA, 20 bp, synthetic construct
  source 1..20: mol_type = other DNA
tgtaggaaatacagatgaag

SEQ ID NO: 26145 - DNA, 20 bp, synthetic construct
  source 1..20: mol_type = other DNA
actgatattttatattgaaa

SEQ ID NO: 26146 - DNA, 20 bp, synthetic construct
  source 1..20: mol_type = other DNA
cacccaaccgcgccgggagg

SEQ ID NO: 26147 - DNA, 20 bp, synthetic construct
  source 1..20: mol_type = other DNA
caatgttattcaagaatgga

SEQ ID NO: 26148 - DNA, 20 bp, synthetic construct
  source 1..20: mol_type = other DNA
ctttgaatatgataaaagcc

SEQ ID NO: 26149 - DNA, 20 bp, synthetic construct
  source 1..20: mol_type = other DNA
atcaggaggtgattcagact

SEQ ID NO: 26150 - DNA, 20 bp, synthetic construct
  source 1..20: mol_type = other DNA
caaacctgtaattcagaaag

SEQ ID NO: 26151 - DNA, 20 bp, synthetic construct
  source 1..20: mol_type = other DNA
acctgtaattcagaaagtgg

SEQ ID NO: 26152 - DNA, 20 bp, synthetic construct
  source 1..20: mol_type = other DNA
gaaggaggacggttgtgttg

SEQ ID NO: 26153 - DNA, 20 bp, synthetic construct
  source 1..20: mol_type = other DNA
aaccagagagccattcacag

SEQ ID NO: 26154 - DNA, 20 bp, synthetic construct
  source 1..20: mol_type = other DNA
caagaaccagatgacaaacg

SEQ ID NO: 26155 - DNA, 20 bp, synthetic construct
  source 1..20: mol_type = other DNA
taactggcacatacaagtaa

SEQ ID NO: 26156 - DNA, 20 bp, synthetic construct
  source 1..20: mol_type = other DNA
agtcccaaaacctaggaaag

SEQ ID NO: 26157 - DNA, 20 bp, synthetic construct
  source 1..20: mol_type = other DNA
gctccaagccttacatgaaa

SEQ ID NO: 26158 - DNA, 20 bp, synthetic construct
  source 1..20: mol_type = other DNA
tgtatacctgtattattggt

SEQ ID NO: 26159 - DNA, 20 bp, synthetic construct
  source 1..20: mol_type = other DNA
acaaggtcttagtgatgctg

SEQ ID NO: 26160 - DNA, 20 bp, synthetic construct
  source 1..20: mol_type = other DNA
tgaacagctaaaggaaacaa

SEQ ID NO: 26161 - DNA, 20 bp, synthetic construct
  source 1..20: mol_type = other DNA
gctcgagccaagcaccgaga

SEQ ID NO: 26162 - DNA, 20 bp, synthetic construct
  source 1..20: mol_type = other DNA
taaatattgatatcattacg

SEQ ID NO: 26163 - DNA, 20 bp, synthetic construct
  source 1..20: mol_type = other DNA
caccaatgctggctctgcat

SEQ ID NO: 26164 - DNA, 20 bp, synthetic construct
  source 1..20: mol_type = other DNA
attctagatcagaaggagga

SEQ ID NO: 26165 - DNA, 20 bp, synthetic construct
  source 1..20: mol_type = other DNA
gatacctgctttgtagagga

SEQ ID NO: 26166 - DNA, 20 bp, synthetic construct
  source 1..20: mol_type = other DNA
ataagatacctgctttgtag

SEQ ID NO: 26167 - DNA, 20 bp, synthetic construct
  source 1..20: mol_type = other DNA
tcacccaggactgatacaga

SEQ ID NO: 26168 - DNA, 20 bp, synthetic construct
  source 1..20: mol_type = other DNA
taagccaagtcccaaaacct

SEQ ID NO: 26169 - DNA, 20 bp, synthetic construct
  source 1..20: mol_type = other DNA
cctcatgtcccaacaagcca

SEQ ID NO: 26170 - DNA, 20 bp, synthetic construct
  source 1..20: mol_type = other DNA
gcaactcatccagcaaaagc

SEQ ID NO: 26171 - DNA, 20 bp, synthetic construct
  source 1..20: mol_type = other DNA
ggaacagtcaaaagatggag

SEQ ID NO: 26172 - DNA, 20 bp, synthetic construct
  source 1..20: mol_type = other DNA
gtatacctgtattattggtt

SEQ ID NO: 26173 - DNA, 20 bp, synthetic construct
  source 1..20: mol_type = other DNA
taccaatgcagagccagcat

SEQ ID NO: 26174 - DNA, 20 bp, synthetic construct
  source 1..20: mol_type = other DNA
cataatggcaagcacctctg

SEQ ID NO: 26175 - DNA, 20 bp, synthetic construct
  source 1..20: mol_type = other DNA
agcaactcatccagcaaaag

SEQ ID NO: 26176 - DNA, 20 bp, synthetic construct
  source 1..20: mol_type = other DNA
catcaagactgagaatgtga

SEQ ID NO: 26177 - DNA, 20 bp, synthetic construct
  source 1..20: mol_type = other DNA
tttccagatcctgacagctg

SEQ ID NO: 26178 - DNA, 20 bp, synthetic construct
  source 1..20: mol_type = other DNA
aggcttaaaagaaatagatg

SEQ ID NO: 26179 - DNA, 20 bp, synthetic construct
  source 1..20: mol_type = other DNA
tagcgtcagggcctccatgc

SEQ ID NO: 26180 - DNA, 20 bp, synthetic construct
  source 1..20: mol_type = other DNA
ctcctaccagagactggtga

SEQ ID NO: 26181 - DNA, 20 bp, synthetic construct
  source 1..20: mol_type = other DNA
ggaggaggtggaggaggact

SEQ ID NO: 26182 - DNA, 20 bp, synthetic construct
  source 1..20: mol_type = other DNA
agtagcatgtcagccaggat

SEQ ID NO: 26183 - DNA, 20 bp, synthetic construct
  source 1..20: mol_type = other DNA
gcagaagacccgagaggtga

SEQ ID NO: 26184 - DNA, 20 bp, synthetic construct
  source 1..20: mol_type = other DNA
gtcacagtgggccccaaagg

SEQ ID NO: 26185 - DNA, 20 bp, synthetic construct
  source 1..20: mol_type = other DNA
agccctcaccagtctctggt

SEQ ID NO: 26186 - DNA, 20 bp, synthetic construct
  source 1..20: mol_type = other DNA
aactcggcctgcacttccac

SEQ ID NO: 26187 - DNA, 20 bp, synthetic construct
  source 1..20: mol_type = other DNA
gggaagtgtggtgtctagga

SEQ ID NO: 26188 - DNA, 20 bp, synthetic construct
  source 1..20: mol_type = other DNA
gtacattgcgctcataccag

SEQ ID NO: 26189 - DNA, 20 bp, synthetic construct
  source 1..20: mol_type = other DNA
acagctttggtaaggagccg

SEQ ID NO: 26190 - DNA, 20 bp, synthetic construct
  source 1..20: mol_type = other DNA
gatcctgcagaagacccgag

SEQ ID NO: 26191 - DNA, 20 bp, synthetic construct
  source 1..20: mol_type = other DNA
caggaaggggcggcggcgct

SEQ ID NO: 26192 - DNA, 20 bp, synthetic construct
  source 1..20: mol_type = other DNA
gttccagggcatgctggatg

SEQ ID NO: 26193 - DNA, 20 bp, synthetic construct
  source 1..20: mol_type = other DNA
gcacaggtcctggcagcaag

SEQ ID NO: 26194 - DNA, 20 bp, synthetic construct
  source 1..20: mol_type = other DNA
agaggaggaagaggaggagg

SEQ ID NO: 26195 - DNA, 20 bp, synthetic construct
  source 1..20: mol_type = other DNA
tacctccgtgaacctcaaca

SEQ ID NO: 26196 - DNA, 20 bp, synthetic construct
  source 1..20: mol_type = other DNA
caagggacaaggtggagtca

SEQ ID NO: 26197 - DNA, 20 bp, synthetic construct
  source 1..20: mol_type = other DNA
acctggcacaggacttcagg

SEQ ID NO: 26198 - DNA, 20 bp, synthetic construct
  source 1..20: mol_type = other DNA
ctctccacaggtccaggaga

SEQ ID NO: 26199 - DNA, 20 bp, synthetic construct
  source 1..20: mol_type = other DNA
caggcccgggacgtcacagt

SEQ ID NO: 26200 - DNA, 20 bp, synthetic construct
  source 1..20: mol_type = other DNA
cggaggtacagaccttctcc

SEQ ID NO: 26201 - DNA, 20 bp, synthetic construct
  source 1..20: mol_type = other DNA
gagtagcatgtcagccagga

SEQ ID NO: 26202 - DNA, 20 bp, synthetic construct
  source 1..20: mol_type = other DNA
actccagggctggcgtgcct

SEQ ID NO: 26203 - DNA, 20 bp, synthetic construct
  source 1..20: mol_type = other DNA
ccaggtgctacacctacagc

SEQ ID NO: 26204 - DNA, 20 bp, synthetic construct
  source 1..20: mol_type = other DNA
tggacttacacaaagaacag

SEQ ID NO: 26205 - DNA, 20 bp, synthetic construct
  source 1..20: mol_type = other DNA
tgaagaggaggaagaggagg

SEQ ID NO: 26206 - DNA, 20 bp, synthetic construct
  source 1..20: mol_type = other DNA
gcaccagccagctggtactg

SEQ ID NO: 26207 - DNA, 20 bp, synthetic construct
  source 1..20: mol_type = other DNA
gggatgctgcagaggcccgg

SEQ ID NO: 26208 - DNA, 20 bp, synthetic construct
  source 1..20: mol_type = other DNA
ctgcccatcatgactttcag

SEQ ID NO: 26209 - DNA, 20 bp, synthetic construct
  source 1..20: mol_type = other DNA
gaggcacaggagctggcatc

SEQ ID NO: 26210 - DNA, 20 bp, synthetic construct
  source 1..20: mol_type = other DNA
ccagctgaccttcatcactg

SEQ ID NO: 26211 - DNA, 20 bp, synthetic construct
  source 1..20: mol_type = other DNA
tcggggatgctgcagaggcc

SEQ ID NO: 26212 - DNA, 20 bp, synthetic construct
  source 1..20: mol_type = other DNA
cagccagctggtactgcgga

SEQ ID NO: 26213 - DNA, 20 bp, synthetic construct
  source 1..20: mol_type = other DNA
catgatgggcaggcagagaa

SEQ ID NO: 26214 - DNA, 20 bp, synthetic construct
  source 1..20: mol_type = other DNA
gcaggcccgggacgtcacag

SEQ ID NO: 26215 - DNA, 20 bp, synthetic construct
  source 1..20: mol_type = other DNA
cccctcagattccagcatgg

SEQ ID NO: 26216 - DNA, 20 bp, synthetic construct
  source 1..20: mol_type = other DNA
tggtccaggcacacagcaaa

SEQ ID NO: 26217 - DNA, 20 bp, synthetic construct
  source 1..20: mol_type = other DNA
accaggggtccagcatgccg

SEQ ID NO: 26218 - DNA, 20 bp, synthetic construct
  source 1..20: mol_type = other DNA
gtggacaaggtgcagatcat

SEQ ID NO: 26219 - DNA, 20 bp, synthetic construct
  source 1..20: mol_type = other DNA
tcagcagcagcacggtgctg

SEQ ID NO: 26220 - DNA, 20 bp, synthetic construct
  source 1..20: mol_type = other DNA
tcttctgcaggatctgctca

SEQ ID NO: 26221 - DNA, 20 bp, synthetic construct
  source 1..20: mol_type = other DNA
cccgcggcggggcgctgcgg

SEQ ID NO: 26222 - DNA, 20 bp, synthetic construct
  source 1..20: mol_type = other DNA
ccagctccacatctgggcag

SEQ ID NO: 26223 - DNA, 20 bp, synthetic construct
  source 1..20: mol_type = other DNA
aataccagagaatgtgttga

SEQ ID NO: 26224 - DNA, 20 bp, synthetic construct
  source 1..20: mol_type = other DNA
agacagtgaccaacaccttc

SEQ ID NO: 26225 - DNA, 20 bp, synthetic construct
  source 1..20: mol_type = other DNA
ctgcagaaaggagcaggctg

SEQ ID NO: 26226 - DNA, 20 bp, synthetic construct
  source 1..20: mol_type = other DNA
tcggagatgacaggatgctg

SEQ ID NO: 26227 - DNA, 20 bp, synthetic construct
  source 1..20: mol_type = other DNA
tcctgggccgcgtagacccg

SEQ ID NO: 26228 - DNA, 20 bp, synthetic construct
  source 1..20: mol_type = other DNA
cttcctcatcacagtcccca

SEQ ID NO: 26229 - DNA, 20 bp, synthetic construct
  source 1..20: mol_type = other DNA
tgaggaaaatgtcctcagta

SEQ ID NO: 26230 - DNA, 20 bp, synthetic construct
  source 1..20: mol_type = other DNA
cttcttctggcaggtgctgg

SEQ ID NO: 26231 - DNA, 20 bp, synthetic construct
  source 1..20: mol_type = other DNA
ccacctggtactgcgactcc

SEQ ID NO: 26232 - DNA, 20 bp, synthetic construct
  source 1..20: mol_type = other DNA
agactgccgccgacctgcca

SEQ ID NO: 26233 - DNA, 20 bp, synthetic construct
  source 1..20: mol_type = other DNA
acctggtactgcgactccag

SEQ ID NO: 26234 - DNA, 20 bp, synthetic construct
  source 1..20: mol_type = other DNA
caagctcatcgacttcgggt

SEQ ID NO: 26235 - DNA, 20 bp, synthetic construct
  source 1..20: mol_type = other DNA
ctgagtctgactgggggcac

SEQ ID NO: 26236 - DNA, 20 bp, synthetic construct
  source 1..20: mol_type = other DNA
attagggcacagcagtctgt

SEQ ID NO: 26237 - DNA, 20 bp, synthetic construct
  source 1..20: mol_type = other DNA
gatatagtcaaagagatcct

SEQ ID NO: 26238 - DNA, 20 bp, synthetic construct
  source 1..20: mol_type = other DNA
ctccacgggaatggcagtgc

SEQ ID NO: 26239 - DNA, 20 bp, synthetic construct
  source 1..20: mol_type = other DNA
cggcttgggccttcacccag

SEQ ID NO: 26240 - DNA, 20 bp, synthetic construct
  source 1..20: mol_type = other DNA
acgggaatggcagtgctgga

SEQ ID NO: 26241 - DNA, 20 bp, synthetic construct
  source 1..20: mol_type = other DNA
actccggggggctgtacact

SEQ ID NO: 26242 - DNA, 20 bp, synthetic construct
  source 1..20: mol_type = other DNA
tggtgctggccacgtcatca

SEQ ID NO: 26243 - DNA, 20 bp, synthetic construct
  source 1..20: mol_type = other DNA
gtgaggagctgcacctgact

SEQ ID NO: 26244 - DNA, 20 bp, synthetic construct
  source 1..20: mol_type = other DNA
gccgcaggtcacagctctcc

SEQ ID NO: 26245 - DNA, 20 bp, synthetic construct
  source 1..20: mol_type = other DNA
ctcccggtgagtcggaccgc

SEQ ID NO: 26246 - DNA, 20 bp, synthetic construct
  source 1..20: mol_type = other DNA
ttctctacgatatggtgtgt

SEQ ID NO: 26247 - DNA, 20 bp, synthetic construct
  source 1..20: mol_type = other DNA
ggcagagcaggaggagatgg

SEQ ID NO: 26248 - DNA, 20 bp, synthetic construct
  source 1..20: mol_type = other DNA
acctccttcttgggggaacc

SEQ ID NO: 26249 - DNA, 20 bp, synthetic construct
  source 1..20: mol_type = other DNA
atggactacagcctgctggt

SEQ ID NO: 26250 - DNA, 20 bp, synthetic construct
  source 1..20: mol_type = other DNA
cggtacatgcccaggaactg

SEQ ID NO: 26251 - DNA, 20 bp, synthetic construct
  source 1..20: mol_type = other DNA
cggctgggcaggttctccct

SEQ ID NO: 26252 - DNA, 20 bp, synthetic construct
  source 1..20: mol_type = other DNA
cagcaccacggcggtggcgg

SEQ ID NO: 26253 - DNA, 20 bp, synthetic construct
  source 1..20: mol_type = other DNA
cctcagcgtcctgatgtggg

SEQ ID NO: 26254 - DNA, 20 bp, synthetic construct
  source 1..20: mol_type = other DNA
tctcgctccaatgtcgacac

SEQ ID NO: 26255 - DNA, 20 bp, synthetic construct
  source 1..20: mol_type = other DNA
ctattgtaatactgcatagg

SEQ ID NO: 26256 - DNA, 20 bp, synthetic construct
  source 1..20: mol_type = other DNA
aggggttggtccgttgggat

SEQ ID NO: 26257 - DNA, 20 bp, synthetic construct
  source 1..20: mol_type = other DNA
tagttcccaggcctcggggc

SEQ ID NO: 26258 - DNA, 20 bp, synthetic construct
  source 1..20: mol_type = other DNA
caacatgccagggaaggcct

SEQ ID NO: 26259 - DNA, 20 bp, synthetic construct
  source 1..20: mol_type = other DNA
tttgcatcttgaatccaggg

SEQ ID NO: 26260 - DNA, 20 bp, synthetic construct
  source 1..20: mol_type = other DNA
gccggtcgcagtggtcacag

SEQ ID NO: 26261 - DNA, 20 bp, synthetic construct
  source 1..20: mol_type = other DNA
agtggaggtggatagttttc

SEQ ID NO: 26262 - DNA, 20 bp, synthetic construct
  source 1..20: mol_type = other DNA
gttcagcggatgagagagac

SEQ ID NO: 26263 - DNA, 20 bp, synthetic construct
  source 1..20: mol_type = other DNA
ttacacgggggcaggttgag

SEQ ID NO: 26264 - DNA, 20 bp, synthetic construct
  source 1..20: mol_type = other DNA
ctgtggagctgcagctgagt

SEQ ID NO: 26265 - DNA, 20 bp, synthetic construct
  source 1..20: mol_type = other DNA
ctatataggggagaaaggga

SEQ ID NO: 26266 - DNA, 20 bp, synthetic construct
  source 1..20: mol_type = other DNA
atgagccgcatttaccccaa

SEQ ID NO: 26267 - DNA, 20 bp, synthetic construct
  source 1..20: mol_type = other DNA
agaaggtgggggccagggca

SEQ ID NO: 26268 - DNA, 20 bp, synthetic construct
  source 1..20: mol_type = other DNA
ggagctgctgcggcagggcg

SEQ ID NO: 26269 - DNA, 20 bp, synthetic construct
  source 1..20: mol_type = other DNA
gtctccacagttccagaagg

SEQ ID NO: 26270 - DNA, 20 bp, synthetic construct
  source 1..20: mol_type = other DNA
tgagctggaggaggaggagg

SEQ ID NO: 26271 - DNA, 20 bp, synthetic construct
  source 1..20: mol_type = other DNA
ggaggaggtggaagaggaag

SEQ ID NO: 26272 - DNA, 20 bp, synthetic construct
  source 1..20: mol_type = other DNA
ggaggtggaagaggaagagg

SEQ ID NO: 26273 - DNA, 20 bp, synthetic construct
  source 1..20: mol_type = other DNA
tacatacctggtgcttgggc

SEQ ID NO: 26274 - DNA, 20 bp, synthetic construct
  source 1..20: mol_type = other DNA
gcagcaaatctccaaaatga

SEQ ID NO: 26275 - DNA, 20 bp, synthetic construct
  source 1..20: mol_type = other DNA
aatctccaaaatgatggagc

SEQ ID NO: 26276 - DNA, 20 bp, synthetic construct
  source 1..20: mol_type = other DNA
tgccctaaggagaagagggg

SEQ ID NO: 26277 - DNA, 20 bp, synthetic construct
  source 1..20: mol_type = other DNA
catagcctcttccctggccc

SEQ ID NO: 26278 - DNA, 20 bp, synthetic construct
  source 1..20: mol_type = other DNA
caggatgatgggataggggg

SEQ ID NO: 26279 - DNA, 20 bp, synthetic construct
  source 1..20: mol_type = other DNA
tgaaggggaagaagctcggg

SEQ ID NO: 26280 - DNA, 20 bp, synthetic construct
  source 1..20: mol_type = other DNA
ttctccagggataggatgac

SEQ ID NO: 26281 - DNA, 20 bp, synthetic construct
  source 1..20: mol_type = other DNA
gcggtcgatctccacccgct

SEQ ID NO: 26282 - DNA, 20 bp, synthetic construct
  source 1..20: mol_type = other DNA
ggcgcagcggcagatgacca

SEQ ID NO: 26283 - DNA, 20 bp, synthetic construct
  source 1..20: mol_type = other DNA
ccttcagttgctaggtgggg

SEQ ID NO: 26284 - DNA, 20 bp, synthetic construct
  source 1..20: mol_type = other DNA
ctgcgagagggggatggtgg

SEQ ID NO: 26285 - DNA, 20 bp, synthetic construct
  source 1..20: mol_type = other DNA
atggagaagcagcggtcctc

SEQ ID NO: 26286 - DNA, 20 bp, synthetic construct
  source 1..20: mol_type = other DNA
tgccctcatccgcttcttgg

SEQ ID NO: 26287 - DNA, 20 bp, synthetic construct
  source 1..20: mol_type = other DNA
tgctgtcccaggtcaactac

SEQ ID NO: 26288 - DNA, 20 bp, synthetic construct
  source 1..20: mol_type = other DNA
tccgcccagggaagacctca

SEQ ID NO: 26289 - DNA, 20 bp, synthetic construct
  source 1..20: mol_type = other DNA
aggccctcttcatgacgggc

SEQ ID NO: 26290 - DNA, 20 bp, synthetic construct
  source 1..20: mol_type = other DNA
tgccatctctttccggtgag

SEQ ID NO: 26291 - DNA, 20 bp, synthetic construct
  source 1..20: mol_type = other DNA
gtttccaggagcctgactac

SEQ ID NO: 26292 - DNA, 20 bp, synthetic construct
  source 1..20: mol_type = other DNA
caagcctatgcagatgaacc

SEQ ID NO: 26293 - DNA, 20 bp, synthetic construct
  source 1..20: mol_type = other DNA
cgccagatcacgtggagccg

SEQ ID NO: 26294 - DNA, 20 bp, synthetic construct
  source 1..20: mol_type = other DNA
caggacctggagcagcgcag

SEQ ID NO: 26295 - DNA, 20 bp, synthetic construct
  source 1..20: mol_type = other DNA
agtggactgctgggacggcc

SEQ ID NO: 26296 - DNA, 20 bp, synthetic construct
  source 1..20: mol_type = other DNA
tgaccagggcaacgaggatg

SEQ ID NO: 26297 - DNA, 20 bp, synthetic construct
  source 1..20: mol_type = other DNA
gactgctgggacggcccgga

SEQ ID NO: 26298 - DNA, 20 bp, synthetic construct
  source 1..20: mol_type = other DNA
tggtggtaagggtgtgccca

SEQ ID NO: 26299 - DNA, 20 bp, synthetic construct
  source 1..20: mol_type = other DNA
aatgtggagaagcaagaggg

SEQ ID NO: 26300 - DNA, 20 bp, synthetic construct
  source 1..20: mol_type = other DNA
ttacctccctctccggctcc

SEQ ID NO: 26301 - DNA, 20 bp, synthetic construct
  source 1..20: mol_type = other DNA
ggcccagacagcagacgcca

SEQ ID NO: 26302 - DNA, 20 bp, synthetic construct
  source 1..20: mol_type = other DNA
agaggacccagctttccggc

SEQ ID NO: 26303 - DNA, 20 bp, synthetic construct
  source 1..20: mol_type = other DNA
cttcctccgagagcggctga

SEQ ID NO: 26304 - DNA, 20 bp, synthetic construct
  source 1..20: mol_type = other DNA
agcaggatgaggaggatgac

SEQ ID NO: 26305 - DNA, 20 bp, synthetic construct
  source 1..20: mol_type = other DNA
gcattgccgtgtccagcaag

SEQ ID NO: 26306 - DNA, 20 bp, synthetic construct
  source 1..20: mol_type = other DNA
actacgatcctttgcccatg

SEQ ID NO: 26307 - DNA, 20 bp, synthetic construct
  source 1..20: mol_type = other DNA
cctctcaatctgcaggggtg

SEQ ID NO: 26308 - DNA, 20 bp, synthetic construct
  source 1..20: mol_type = other DNA
cgccccggctccacgtgatc

SEQ ID NO: 26309 - DNA, 20 bp, synthetic construct
  source 1..20: mol_type = other DNA
ctgaagggaagataatggaa

SEQ ID NO: 26310 - DNA, 20 bp, synthetic construct
  source 1..20: mol_type = other DNA
cacttaccgtcagccgctct

SEQ ID NO: 26311 - DNA, 20 bp, synthetic construct
  source 1..20: mol_type = other DNA
gctgtaggggcaaccagaac

SEQ ID NO: 26312 - DNA, 20 bp, synthetic construct
  source 1..20: mol_type = other DNA
gcacagctgtgagggggctg

SEQ ID NO: 26313 - DNA, 20 bp, synthetic construct
  source 1..20: mol_type = other DNA
caatacttcaagaaggtgct

SEQ ID NO: 26314 - DNA, 20 bp, synthetic construct
  source 1..20: mol_type = other DNA
ctgcagggctggggagcggc

SEQ ID NO: 26315 - DNA, 20 bp, synthetic construct
  source 1..20: mol_type = other DNA
cgtagtcccctcgccacctg

SEQ ID NO: 26316 - DNA, 20 bp, synthetic construct
  source 1..20: mol_type = other DNA
aaatacgtgaacaaggccaa

SEQ ID NO: 26317 - DNA, 20 bp, synthetic construct
  source 1..20: mol_type = other DNA
tttccaggagcctgactacg

SEQ ID NO: 26318 - DNA, 20 bp, synthetic construct
  source 1..20: mol_type = other DNA
gttctctttggagaacagga

SEQ ID NO: 26319 - DNA, 20 bp, synthetic construct
  source 1..20: mol_type = other DNA
gccgtcccagcagtccactg

SEQ ID NO: 26320 - DNA, 20 bp, synthetic construct
  source 1..20: mol_type = other DNA
gtacctggataggcaaggag

SEQ ID NO: 26321 - DNA, 20 bp, synthetic construct
  source 1..20: mol_type = other DNA
cgctgcattgagtgtgcgtg

SEQ ID NO: 26322 - DNA, 20 bp, synthetic construct
  source 1..20: mol_type = other DNA
cccacgagagcaaagagtga

SEQ ID NO: 26323 - DNA, 20 bp, synthetic construct
  source 1..20: mol_type = other DNA
agcctgcaaggtgggagtta

SEQ ID NO: 26324 - DNA, 20 bp, synthetic construct
  source 1..20: mol_type = other DNA
ggtcctgcatggtatagagc

SEQ ID NO: 26325 - DNA, 20 bp, synthetic construct
  source 1..20: mol_type = other DNA
ctgtatgagggacgcaaccc

SEQ ID NO: 26326 - DNA, 20 bp, synthetic construct
  source 1..20: mol_type = other DNA
caaaccaaacctcagagtac

SEQ ID NO: 26327 - DNA, 20 bp, synthetic construct
  source 1..20: mol_type = other DNA
cgatctctcgtaaggggtct

SEQ ID NO: 26328 - DNA, 20 bp, synthetic construct
  source 1..20: mol_type = other DNA
attccgcttccgcaccagga

SEQ ID NO: 26329 - DNA, 20 bp, synthetic construct
  source 1..20: mol_type = other DNA
acgaaggtgaggaagatgga

SEQ ID NO: 26330 - DNA, 20 bp, synthetic construct
  source 1..20: mol_type = other DNA
ccggaagcagttttactcag

SEQ ID NO: 26331 - DNA, 20 bp, synthetic construct
  source 1..20: mol_type = other DNA
cttctccacattctggatga

SEQ ID NO: 26332 - DNA, 20 bp, synthetic construct
  source 1..20: mol_type = other DNA
cacaaactctgtcttctgct

SEQ ID NO: 26333 - DNA, 20 bp, synthetic construct
  source 1..20: mol_type = other DNA
aggctggtaagccagtggtg

SEQ ID NO: 26334 - DNA, 20 bp, synthetic construct
  source 1..20: mol_type = other DNA
gtagtcccctcgccacctgt

SEQ ID NO: 26335 - DNA, 20 bp, synthetic construct
  source 1..20: mol_type = other DNA
ggccaccgacgccatgctga

SEQ ID NO: 26336 - DNA, 20 bp, synthetic construct
  source 1..20: mol_type = other DNA
tctgaggtttggtttggagt

SEQ ID NO: 26337 - DNA, 20 bp, synthetic construct
  source 1..20: mol_type = other DNA
gctgatatactgagaaaaca

SEQ ID NO: 26338 - DNA, 20 bp, synthetic construct
  source 1..20: mol_type = other DNA
cctgctggtagtgcgtgatg

SEQ ID NO: 26339 - DNA, 20 bp, synthetic construct
  source 1..20: mol_type = other DNA
ggggcgccgacaagatcgag

SEQ ID NO: 26340 - DNA, 20 bp, synthetic construct
  source 1..20: mol_type = other DNA
gtagtcaggctcctggaaac

SEQ ID NO: 26341 - DNA, 20 bp, synthetic construct
  source 1..20: mol_type = other DNA
gaatccagtcgctggccctt

SEQ ID NO: 26342 - DNA, 20 bp, synthetic construct
  source 1..20: mol_type = other DNA
gtggcctcagagtgagtcgg

SEQ ID NO: 26343 - DNA, 20 bp, synthetic construct
  source 1..20: mol_type = other DNA
agatccagtagtgggaaaga

SEQ ID NO: 26344 - DNA, 20 bp, synthetic construct
  source 1..20: mol_type = other DNA
tgactaccagggggtatggc

SEQ ID NO: 26345 - DNA, 20 bp, synthetic construct
  source 1..20: mol_type = other DNA
gctcactgaagggaagataa

SEQ ID NO: 26346 - DNA, 20 bp, synthetic construct
  source 1..20: mol_type = other DNA
cctcaatggacaggatgact

SEQ ID NO: 26347 - DNA, 20 bp, synthetic construct
  source 1..20: mol_type = other DNA
accaggggtctggaagttga

SEQ ID NO: 26348 - DNA, 20 bp, synthetic construct
  source 1..20: mol_type = other DNA
gagtactggcttccaagaag

SEQ ID NO: 26349 - DNA, 20 bp, synthetic construct
  source 1..20: mol_type = other DNA
ctccatcagcatggcgtcgg

SEQ ID NO: 26350 - DNA, 20 bp, synthetic construct
  source 1..20: mol_type = other DNA
gagaacgaaggtgaggaaga

SEQ ID NO: 26351 - DNA, 20 bp, synthetic construct
  source 1..20: mol_type = other DNA
tcaaactcattacagcgcag

SEQ ID NO: 26352 - DNA, 20 bp, synthetic construct
  source 1..20: mol_type = other DNA
ccaatacttcaagaaggtgc

SEQ ID NO: 26353 - DNA, 20 bp, synthetic construct
  source 1..20: mol_type = other DNA
tcccatcaacgaggaggcac

SEQ ID NO: 26354 - DNA, 20 bp, synthetic construct
  source 1..20: mol_type = other DNA
acaatggactcaaccctgta

SEQ ID NO: 26355 - DNA, 20 bp, synthetic construct
  source 1..20: mol_type = other DNA
ttgggccatgtttctctgct

SEQ ID NO: 26356 - DNA, 20 bp, synthetic construct
  source 1..20: mol_type = other DNA
cctcatcacgcactaccagc

SEQ ID NO: 26357 - DNA, 20 bp, synthetic construct
  source 1..20: mol_type = other DNA
tcctcatcaaggtggggtgg

SEQ ID NO: 26358 - DNA, 20 bp, synthetic construct
  source 1..20: mol_type = other DNA
acaggatgactgggtacctg

SEQ ID NO: 26359 - DNA, 20 bp, synthetic construct
  source 1..20: mol_type = other DNA
catctgccaaagaatggccg

SEQ ID NO: 26360 - DNA, 20 bp, synthetic construct
  source 1..20: mol_type = other DNA
tgtctgtcaagaagaacttg

SEQ ID NO: 26361 - DNA, 20 bp, synthetic construct
  source 1..20: mol_type = other DNA
ctcccagccatccgtcctga

SEQ ID NO: 26362 - DNA, 20 bp, synthetic construct
  source 1..20: mol_type = other DNA
ccagggccccaagaaggact

SEQ ID NO: 26363 - DNA, 20 bp, synthetic construct
  source 1..20: mol_type = other DNA
agaagattggcacagctgtg

SEQ ID NO: 26364 - DNA, 20 bp, synthetic construct
  source 1..20: mol_type = other DNA
tgactgggtacctgcgggat

SEQ ID NO: 26365 - DNA, 20 bp, synthetic construct
  source 1..20: mol_type = other DNA
ccacacccctgcagattgag

SEQ ID NO: 26366 - DNA, 20 bp, synthetic construct
  source 1..20: mol_type = other DNA
ctgtccagaaacatgtggaa

SEQ ID NO: 26367 - DNA, 20 bp, synthetic construct
  source 1..20: mol_type = other DNA
tgccaaggtatctgcagcag

SEQ ID NO: 26368 - DNA, 20 bp, synthetic construct
  source 1..20: mol_type = other DNA
ctcactggagaactggtccc

SEQ ID NO: 26369 - DNA, 20 bp, synthetic construct
  source 1..20: mol_type = other DNA
ctgaaggaacttcttgcctt

SEQ ID NO: 26370 - DNA, 20 bp, synthetic construct
  source 1..20: mol_type = other DNA
ccgggaaggatgacatgtcc

SEQ ID NO: 26371 - DNA, 20 bp, synthetic construct
  source 1..20: mol_type = other DNA
agttccttcttgactaccag

SEQ ID NO: 26372 - DNA, 20 bp, synthetic construct
  source 1..20: mol_type = other DNA
gagcgccatcatccagaatg

SEQ ID NO: 26373 - DNA, 20 bp, synthetic construct
  source 1..20: mol_type = other DNA
ttgagtgtgcgtggggtcca

SEQ ID NO: 26374 - DNA, 20 bp, synthetic construct
  source 1..20: mol_type = other DNA
tcctggaaacaggacacaat

SEQ ID NO: 26375 - DNA, 20 bp, synthetic construct
  source 1..20: mol_type = other DNA
cagtactctgaggtttggtt

SEQ ID NO: 26376 - DNA, 20 bp, synthetic construct
  source 1..20: mol_type = other DNA
gtgtgcccatggtaaataac

SEQ ID NO: 26377 - DNA, 20 bp, synthetic construct
  source 1..20: mol_type = other DNA
cattgcccagcagagaaaca

SEQ ID NO: 26378 - DNA, 20 bp, synthetic construct
  source 1..20: mol_type = other DNA
gcacctctgccgcagcctcg

SEQ ID NO: 26379 - DNA, 20 bp, synthetic construct
  source 1..20: mol_type = other DNA
gggcgccgacaagatcgagg

SEQ ID NO: 26380 - DNA, 20 bp, synthetic construct
  source 1..20: mol_type = other DNA
gaagccagtactctgaggtt

SEQ ID NO: 26381 - DNA, 20 bp, synthetic construct
  source 1..20: mol_type = other DNA
gcatgaactcctgcacctgg

SEQ ID NO: 26382 - DNA, 20 bp, synthetic construct
  source 1..20: mol_type = other DNA
tggatcggaatcgtgaggat

SEQ ID NO: 26383 - DNA, 20 bp, synthetic construct
  source 1..20: mol_type = other DNA
gtgcagcacctcggcgtccg

SEQ ID NO: 26384 - DNA, 20 bp, synthetic construct
  source 1..20: mol_type = other DNA
caacagcccacagctcctga

SEQ ID NO: 26385 - DNA, 20 bp, synthetic construct
  source 1..20: mol_type = other DNA
gcgaggaggagatccagtag

SEQ ID NO: 26386 - DNA, 20 bp, synthetic construct
  source 1..20: mol_type = other DNA
gaatggcatcctctacctgg

SEQ ID NO: 26387 - DNA, 20 bp, synthetic construct
  source 1..20: mol_type = other DNA
gggccccgtagtcaggctcc

SEQ ID NO: 26388 - DNA, 20 bp, synthetic construct
  source 1..20: mol_type = other DNA
catgggcaaaggatcgtagt

SEQ ID NO: 26389 - DNA, 20 bp, synthetic construct
  source 1..20: mol_type = other DNA
agtagtggggataccattcc

SEQ ID NO: 26390 - DNA, 20 bp, synthetic construct
  source 1..20: mol_type = other DNA
ggacctggagcagcgcagcg

SEQ ID NO: 26391 - DNA, 20 bp, synthetic construct
  source 1..20: mol_type = other DNA
tgactacggggccctgtatg

SEQ ID NO: 26392 - DNA, 20 bp, synthetic construct
  source 1..20: mol_type = other DNA
gctgcagtcgattgtactga

SEQ ID NO: 26393 - DNA, 20 bp, synthetic construct
  source 1..20: mol_type = other DNA
cgtggttcacagggtcctcc

SEQ ID NO: 26394 - DNA, 20 bp, synthetic construct
  source 1..20: mol_type = other DNA
tggacgagaacagcccccta

SEQ ID NO: 26395 - DNA, 20 bp, synthetic construct
  source 1..20: mol_type = other DNA
tgagtcggcagcaacatcca

SEQ ID NO: 26396 - DNA, 20 bp, synthetic construct
  source 1..20: mol_type = other DNA
aatccagtcgctggcccttg

SEQ ID NO: 26397 - DNA, 20 bp, synthetic construct
  source 1..20: mol_type = other DNA
tgcagtggtcctcaatggac

SEQ ID NO: 26398 - DNA, 20 bp, synthetic construct
  source 1..20: mol_type = other DNA
aatacttcaagaaggtgctg

SEQ ID NO: 26399 - DNA, 20 bp, synthetic construct
  source 1..20: mol_type = other DNA
tccctcactctttgctctcg

SEQ ID NO: 26400 - DNA, 20 bp, synthetic construct
  source 1..20: mol_type = other DNA
ggatgaggaggagcccaagg

SEQ ID NO: 26401 - DNA, 20 bp, synthetic construct
  source 1..20: mol_type = other DNA
cttctccatcagcatggcgt

SEQ ID NO: 26402 - DNA, 20 bp, synthetic construct
  source 1..20: mol_type = other DNA
acctcaatagagatggcaca

SEQ ID NO: 26403 - DNA, 20 bp, synthetic construct
  source 1..20: mol_type = other DNA
aggaggagcccaaggaggtg

SEQ ID NO: 26404 - DNA, 20 bp, synthetic construct
  source 1..20: mol_type = other DNA
cgaaggtgaggaagatggag

SEQ ID NO: 26405 - DNA, 20 bp, synthetic construct
  source 1..20: mol_type = other DNA
cggggcgccgacaagatcga

SEQ ID NO: 26406 - DNA, 20 bp, synthetic construct
  source 1..20: mol_type = other DNA
gagtccattgtccactgtga

SEQ ID NO: 26407 - DNA, 20 bp, synthetic construct
  source 1..20: mol_type = other DNA
acgccagggtgagattctgc

SEQ ID NO: 26408 - DNA, 20 bp, synthetic construct
  source 1..20: mol_type = other DNA
gctgatggaggatacattgc

SEQ ID NO: 26409 - DNA, 20 bp, synthetic construct
  source 1..20: mol_type = other DNA
aagcgcagaaaggcaaattc

SEQ ID NO: 26410 - DNA, 20 bp, synthetic construct
  source 1..20: mol_type = other DNA
cagaatgtggagaagcaaga

SEQ ID NO: 26411 - DNA, 20 bp, synthetic construct
  source 1..20: mol_type = other DNA
gactaccagggggtatggct

SEQ ID NO: 26412 - DNA, 20 bp, synthetic construct
  source 1..20: mol_type = other DNA
tccactcccggcaagatgct

SEQ ID NO: 26413 - DNA, 20 bp, synthetic construct
  source 1..20: mol_type = other DNA
gttcacttcatcctcagatg

SEQ ID NO: 26414 - DNA, 20 bp, synthetic construct
  source 1..20: mol_type = other DNA
ccctcactctttgctctcgt

SEQ ID NO: 26415 - DNA, 20 bp, synthetic construct
  source 1..20: mol_type = other DNA
cgcgccgggcccgcagccgt

SEQ ID NO: 26416 - DNA, 20 bp, synthetic construct
  source 1..20: mol_type = other DNA
cctcccagccatccgtcctg

SEQ ID NO: 26417 - DNA, 20 bp, synthetic construct
  source 1..20: mol_type = other DNA
tcctcaatggacaggatgac

SEQ ID NO: 26418 - DNA, 20 bp, synthetic construct
  source 1..20: mol_type = other DNA
aagattggcacagctgtgag

SEQ ID NO: 26419 - DNA, 20 bp, synthetic construct
  source 1..20: mol_type = other DNA
tgcagcacctcggcgtccga

SEQ ID NO: 26420 - DNA, 20 bp, synthetic construct
  source 1..20: mol_type = other DNA
catctgcaggaaacagaacc

SEQ ID NO: 26421 - DNA, 20 bp, synthetic construct
  source 1..20: mol_type = other DNA
gctggcccttggggtagatg

SEQ ID NO: 26422 - DNA, 20 bp, synthetic construct
  source 1..20: mol_type = other DNA
ccggggcgccgacaagatcg

SEQ ID NO: 26423 - DNA, 20 bp, synthetic construct
  source 1..20: mol_type = other DNA
gacagtcgagaacgaaggtg

SEQ ID NO: 26424 - DNA, 20 bp, synthetic construct
  source 1..20: mol_type = other DNA
gagagtaagggccagggccc

SEQ ID NO: 26425 - DNA, 20 bp, synthetic construct
  source 1..20: mol_type = other DNA
cggcgcgccctcggacgccg

SEQ ID NO: 26426 - DNA, 20 bp, synthetic construct
  source 1..20: mol_type = other DNA
agatctccacgggcttggtg

SEQ ID NO: 26427 - DNA, 20 bp, synthetic construct
  source 1..20: mol_type = other DNA
caacttccagacccctggtg

SEQ ID NO: 26428 - DNA, 20 bp, synthetic construct
  source 1..20: mol_type = other DNA
ggtggcgaggggactacgga

SEQ ID NO: 26429 - DNA, 20 bp, synthetic construct
  source 1..20: mol_type = other DNA
ctgaggatgaagtgaacatg

SEQ ID NO: 26430 - DNA, 20 bp, synthetic construct
  source 1..20: mol_type = other DNA
gcagcgagcataggcttcca

SEQ ID NO: 26431 - DNA, 20 bp, synthetic construct
  source 1..20: mol_type = other DNA
gccaagcaccatgcgggatg

SEQ ID NO: 26432 - DNA, 20 bp, synthetic construct
  source 1..20: mol_type = other DNA
taaataactggcatcccatc

SEQ ID NO: 26433 - DNA, 20 bp, synthetic construct
  source 1..20: mol_type = other DNA
gtgagctggtgacacacaca

SEQ ID NO: 26434 - DNA, 20 bp, synthetic construct
  source 1..20: mol_type = other DNA
cgactcacaggaggagctgc

SEQ ID NO: 26435 - DNA, 20 bp, synthetic construct
  source 1..20: mol_type = other DNA
tgactgccacagatccacat

SEQ ID NO: 26436 - DNA, 20 bp, synthetic construct
  source 1..20: mol_type = other DNA
tatgccatctctttccggtg

SEQ ID NO: 26437 - DNA, 20 bp, synthetic construct
  source 1..20: mol_type = other DNA
cacctggagagagaagcctg

SEQ ID NO: 26438 - DNA, 20 bp, synthetic construct
  source 1..20: mol_type = other DNA
tgtaccttgaaagttggcat

SEQ ID NO: 26439 - DNA, 20 bp, synthetic construct
  source 1..20: mol_type = other DNA
cccgccatggctccgacgct

SEQ ID NO: 26440 - DNA, 20 bp, synthetic construct
  source 1..20: mol_type = other DNA
gagggccagacagtgatgct

SEQ ID NO: 26441 - DNA, 20 bp, synthetic construct
  source 1..20: mol_type = other DNA
aaagagatggcatatgagtt

SEQ ID NO: 26442 - DNA, 20 bp, synthetic construct
  source 1..20: mol_type = other DNA
tgcagcgacagcccatccgc

SEQ ID NO: 26443 - DNA, 20 bp, synthetic construct
  source 1..20: mol_type = other DNA
gaaccaggccctcttcatga

SEQ ID NO: 26444 - DNA, 20 bp, synthetic construct
  source 1..20: mol_type = other DNA
gactcactctgaggccacaa

SEQ ID NO: 26445 - DNA, 20 bp, synthetic construct
  source 1..20: mol_type = other DNA
agctcaccaatctgacaagc

SEQ ID NO: 26446 - DNA, 20 bp, synthetic construct
  source 1..20: mol_type = other DNA
agttggaggaatccagtcgc

SEQ ID NO: 26447 - DNA, 20 bp, synthetic construct
  source 1..20: mol_type = other DNA
gtcgggcccccagcacctgt

SEQ ID NO: 26448 - DNA, 20 bp, synthetic construct
  source 1..20: mol_type = other DNA
gacctggaaggtcttccgct

SEQ ID NO: 26449 - DNA, 20 bp, synthetic construct
  source 1..20: mol_type = other DNA
acaaactgtccagaaacatg

SEQ ID NO: 26450 - DNA, 20 bp, synthetic construct
  source 1..20: mol_type = other DNA
cctcgcacaacacgtgagtg

SEQ ID NO: 26451 - DNA, 20 bp, synthetic construct
  source 1..20: mol_type = other DNA
gtggttcccatcaaactacg

SEQ ID NO: 26452 - DNA, 20 bp, synthetic construct
  source 1..20: mol_type = other DNA
tccccagtggactgctggga

SEQ ID NO: 26453 - DNA, 20 bp, synthetic construct
  source 1..20: mol_type = other DNA
cagttccttcttgactacca

SEQ ID NO: 26454 - DNA, 20 bp, synthetic construct
  source 1..20: mol_type = other DNA
gggcaaaggatcgtagttgg

SEQ ID NO: 26455 - DNA, 20 bp, synthetic construct
  source 1..20: mol_type = other DNA
ggctgagggcagtgcctacg

SEQ ID NO: 26456 - DNA, 20 bp, synthetic construct
  source 1..20: mol_type = other DNA
agatgtcctgcacaccatca

SEQ ID NO: 26457 - DNA, 20 bp, synthetic construct
  source 1..20: mol_type = other DNA
gtcgttctcagagtacatca

SEQ ID NO: 26458 - DNA, 20 bp, synthetic construct
  source 1..20: mol_type = other DNA
cccgtggagatctctgccga

SEQ ID NO: 26459 - DNA, 20 bp, synthetic construct
  source 1..20: mol_type = other DNA
actggggagcaacatcacca

SEQ ID NO: 26460 - DNA, 20 bp, synthetic construct
  source 1..20: mol_type = other DNA
cctcctcatcctcgttgccc

SEQ ID NO: 26461 - DNA, 20 bp, synthetic construct
  source 1..20: mol_type = other DNA
cccttactctcttcatcaaa

SEQ ID NO: 26462 - DNA, 20 bp, synthetic construct
  source 1..20: mol_type = other DNA
atcaaactacgtggaagaga

SEQ ID NO: 26463 - DNA, 20 bp, synthetic construct
  source 1..20: mol_type = other DNA
ttttctcagtatatcagcca

SEQ ID NO: 26464 - DNA, 20 bp, synthetic construct
  source 1..20: mol_type = other DNA
gggatgccagttatttacca

SEQ ID NO: 26465 - DNA, 20 bp, synthetic construct
  source 1..20: mol_type = other DNA
gcagcggggacatcacctac

SEQ ID NO: 26466 - DNA, 20 bp, synthetic construct
  source 1..20: mol_type = other DNA
cagcatgttcttcaggtcct

SEQ ID NO: 26467 - DNA, 20 bp, synthetic construct
  source 1..20: mol_type = other DNA
gaactgctggaactcaggaa

SEQ ID NO: 26468 - DNA, 20 bp, synthetic construct
  source 1..20: mol_type = other DNA
ctggataggcaaggagaggc

SEQ ID NO: 26469 - DNA, 20 bp, synthetic construct
  source 1..20: mol_type = other DNA
gaggaagatcctcatcaagg

SEQ ID NO: 26470 - DNA, 20 bp, synthetic construct
  source 1..20: mol_type = other DNA
tcgctgcattgagtgtgcgt

SEQ ID NO: 26471 - DNA, 20 bp, synthetic construct
  source 1..20: mol_type = other DNA
ggtcagctcgtcctccctct

SEQ ID NO: 26472 - DNA, 20 bp, synthetic construct
  source 1..20: mol_type = other DNA
aagcctatgctcgctgcctg

SEQ ID NO: 26473 - DNA, 20 bp, synthetic construct
  source 1..20: mol_type = other DNA
cgaggaggagatccagtagt

SEQ ID NO: 26474 - DNA, 20 bp, synthetic construct
  source 1..20: mol_type = other DNA
aacgaaggtgaggaagatgg

SEQ ID NO: 26475 - DNA, 20 bp, synthetic construct
  source 1..20: mol_type = other DNA
attgagtgtgcgtggggtcc

SEQ ID NO: 26476 - DNA, 20 bp, synthetic construct
  source 1..20: mol_type = other DNA
gcccctacagcacaagaagc

SEQ ID NO: 26477 - DNA, 20 bp, synthetic construct
  source 1..20: mol_type = other DNA
cctatccaggtacctgaccg

SEQ ID NO: 26478 - DNA, 20 bp, synthetic construct
  source 1..20: mol_type = other DNA
ctaatgcgcgtccctcgtga

SEQ ID NO: 26479 - DNA, 20 bp, synthetic construct
  source 1..20: mol_type = other DNA
aaaccctatgccaactttca

SEQ ID NO: 26480 - DNA, 20 bp, synthetic construct
  source 1..20: mol_type = other DNA
cgcagcggggacatcaccta

SEQ ID NO: 26481 - DNA, 20 bp, synthetic construct
  source 1..20: mol_type = other DNA
catgctccttgatggtgtgc

SEQ ID NO: 26482 - DNA, 20 bp, synthetic construct
  source 1..20: mol_type = other DNA
ggggacccggtagttgacct

SEQ ID NO: 26483 - DNA, 20 bp, synthetic construct
  source 1..20: mol_type = other DNA
ctcagccttggtttccggga

SEQ ID NO: 26484 - DNA, 20 bp, synthetic construct
  source 1..20: mol_type = other DNA
gggcttaacttggctgatgg

SEQ ID NO: 26485 - DNA, 20 bp, synthetic construct
  source 1..20: mol_type = other DNA
ccaagaaggactcgggtcaa

SEQ ID NO: 26486 - DNA, 20 bp, synthetic construct
  source 1..20: mol_type = other DNA
caggctactttcccagtaaa

SEQ ID NO: 26487 - DNA, 20 bp, synthetic construct
  source 1..20: mol_type = other DNA
caccaggggtctggaagttg

SEQ ID NO: 26488 - DNA, 20 bp, synthetic construct
  source 1..20: mol_type = other DNA
taatttcacgaatgtcaact

SEQ ID NO: 26489 - DNA, 20 bp, synthetic construct
  source 1..20: mol_type = other DNA
tcatgacggtgcccacctcg

SEQ ID NO: 26490 - DNA, 20 bp, synthetic construct
  source 1..20: mol_type = other DNA
gctctcccgcatctacccca

SEQ ID NO: 26491 - DNA, 20 bp, synthetic construct
  source 1..20: mol_type = other DNA
acaaagcaatgtgactggtc

SEQ ID NO: 26492 - DNA, 20 bp, synthetic construct
  source 1..20: mol_type = other DNA
gtgctctggtcaggctcgcg

SEQ ID NO: 26493 - DNA, 20 bp, synthetic construct
  source 1..20: mol_type = other DNA
actgggtacctgcgggatgg

SEQ ID NO: 26494 - DNA, 20 bp, synthetic construct
  source 1..20: mol_type = other DNA
atacttcaagaaggtgctgg

SEQ ID NO: 26495 - DNA, 20 bp, synthetic construct
  source 1..20: mol_type = other DNA
attgggccatgtttctctgc

SEQ ID NO: 26496 - DNA, 20 bp, synthetic construct
  source 1..20: mol_type = other DNA
ctcagtggatcggaatcgtg

SEQ ID NO: 26497 - DNA, 20 bp, synthetic construct
  source 1..20: mol_type = other DNA
gcacgaggaaggagccgtca

SEQ ID NO: 26498 - DNA, 20 bp, synthetic construct
  source 1..20: mol_type = other DNA
agcacccacctcaatagaga

SEQ ID NO: 26499 - DNA, 20 bp, synthetic construct
  source 1..20: mol_type = other DNA
aatgctgcagtggtcctcaa

SEQ ID NO: 26500 - DNA, 20 bp, synthetic construct
  source 1..20: mol_type = other DNA
cacaaaggcatgctccttga

SEQ ID NO: 26501 - DNA, 20 bp, synthetic construct
  source 1..20: mol_type = other DNA
ttaccgtcagccgctctcgg

SEQ ID NO: 26502 - DNA, 20 bp, synthetic construct
  source 1..20: mol_type = other DNA
atgccatctctttccggtga

SEQ ID NO: 26503 - DNA, 20 bp, synthetic construct
  source 1..20: mol_type = other DNA
gcccttactctcttcatcaa

SEQ ID NO: 26504 - DNA, 20 bp, synthetic construct
  source 1..20: mol_type = other DNA
tgatggagaagacgaagagc

SEQ ID NO: 26505 - DNA, 20 bp, synthetic construct
  source 1..20: mol_type = other DNA
tcttacctctcaatctgcag

SEQ ID NO: 26506 - DNA, 20 bp, synthetic construct
  source 1..20: mol_type = other DNA
tcgccacctgtgggagccac

SEQ ID NO: 26507 - DNA, 20 bp, synthetic construct
  source 1..20: mol_type = other DNA
agtgcctgcccgtcatgaag

SEQ ID NO: 26508 - DNA, 20 bp, synthetic construct
  source 1..20: mol_type = other DNA
cgcgccagatcacgtggagc

SEQ ID NO: 26509 - DNA, 20 bp, synthetic construct
  source 1..20: mol_type = other DNA
acccgagcggaagaccttcc

SEQ ID NO: 26510 - DNA, 20 bp, synthetic construct
  source 1..20: mol_type = other DNA
gctgcagccaagcaccatgc

SEQ ID NO: 26511 - DNA, 20 bp, synthetic construct
  source 1..20: mol_type = other DNA
catggcccaatacttcaaga

SEQ ID NO: 26512 - DNA, 20 bp, synthetic construct
  source 1..20: mol_type = other DNA
tacctccctctccggctcca

SEQ ID NO: 26513 - DNA, 20 bp, synthetic construct
  source 1..20: mol_type = other DNA
agagtactggcttccaagaa

SEQ ID NO: 26514 - DNA, 20 bp, synthetic construct
  source 1..20: mol_type = other DNA
tgaggagaccagcagtgacc

SEQ ID NO: 26515 - DNA, 20 bp, synthetic construct
  source 1..20: mol_type = other DNA
tcactgtagttgttcttcaa

SEQ ID NO: 26516 - DNA, 20 bp, synthetic construct
  source 1..20: mol_type = other DNA
gaagaccttccaggtcaagc

SEQ ID NO: 26517 - DNA, 20 bp, synthetic construct
  source 1..20: mol_type = other DNA
cccagtcatcctgtccattg

SEQ ID NO: 26518 - DNA, 20 bp, synthetic construct
  source 1..20: mol_type = other DNA
ctatgctcgctgcctgcgga

SEQ ID NO: 26519 - DNA, 20 bp, synthetic construct
  source 1..20: mol_type = other DNA
atttctcagccttggtttcc

SEQ ID NO: 26520 - DNA, 20 bp, synthetic construct
  source 1..20: mol_type = other DNA
gggagtggatacggcagtgc

SEQ ID NO: 26521 - DNA, 20 bp, synthetic construct
  source 1..20: mol_type = other DNA
tgtttccaggagcctgacta

SEQ ID NO: 26522 - DNA, 20 bp, synthetic construct
  source 1..20: mol_type = other DNA
cagcagtgaccagggcaacg

SEQ ID NO: 26523 - DNA, 20 bp, synthetic construct
  source 1..20: mol_type = other DNA
gctggtcagaacaaagtagt

SEQ ID NO: 26524 - DNA, 20 bp, synthetic construct
  source 1..20: mol_type = other DNA
accaggaaggccccatcacg

SEQ ID NO: 26525 - DNA, 20 bp, synthetic construct
  source 1..20: mol_type = other DNA
acggaggaagaagattgccc

SEQ ID NO: 26526 - DNA, 20 bp, synthetic construct
  source 1..20: mol_type = other DNA
ctcaaactcattacagcgca

SEQ ID NO: 26527 - DNA, 20 bp, synthetic construct
  source 1..20: mol_type = other DNA
tgctggtcagaacaaagtag

SEQ ID NO: 26528 - DNA, 20 bp, synthetic construct
  source 1..20: mol_type = other DNA
ttgcctctacatagaagcca

SEQ ID NO: 26529 - DNA, 20 bp, synthetic construct
  source 1..20: mol_type = other DNA
ccccccgcagcaagtcccct

SEQ ID NO: 26530 - DNA, 20 bp, synthetic construct
  source 1..20: mol_type = other DNA
attcctggaacagaccaaag

SEQ ID NO: 26531 - DNA, 20 bp, synthetic construct
  source 1..20: mol_type = other DNA
tacagcgcaggggcacctgc

SEQ ID NO: 26532 - DNA, 20 bp, synthetic construct
  source 1..20: mol_type = other DNA
catccgcaggcagcgagcat

SEQ ID NO: 26533 - DNA, 20 bp, synthetic construct
  source 1..20: mol_type = other DNA
tgatgaagagagtaagggcc

SEQ ID NO: 26534 - DNA, 20 bp, synthetic construct
  source 1..20: mol_type = other DNA
tatttctcagccttggtttc

SEQ ID NO: 26535 - DNA, 20 bp, synthetic construct
  source 1..20: mol_type = other DNA
cttcgtcttctccatcagca

SEQ ID NO: 26536 - DNA, 20 bp, synthetic construct
  source 1..20: mol_type = other DNA
caagaatggcatcctctacc

SEQ ID NO: 26537 - DNA, 20 bp, synthetic construct
  source 1..20: mol_type = other DNA
ctcctggaaacaggacacaa

SEQ ID NO: 26538 - DNA, 20 bp, synthetic construct
  source 1..20: mol_type = other DNA
gccagcttcttgtgctgtag

SEQ ID NO: 26539 - DNA, 20 bp, synthetic construct
  source 1..20: mol_type = other DNA
ccgccatggctccgacgctg

SEQ ID NO: 26540 - DNA, 20 bp, synthetic construct
  source 1..20: mol_type = other DNA
agcagttttactcagtggat

SEQ ID NO: 26541 - DNA, 20 bp, synthetic construct
  source 1..20: mol_type = other DNA
cgagagagtgagaccttcgt

SEQ ID NO: 26542 - DNA, 20 bp, synthetic construct
  source 1..20: mol_type = other DNA
cgccacctgtgggagccaca

SEQ ID NO: 26543 - DNA, 20 bp, synthetic construct
  source 1..20: mol_type = other DNA
ttcacgaatgtcaactagga

SEQ ID NO: 26544 - DNA, 20 bp, synthetic construct
  source 1..20: mol_type = other DNA
ggagtagaacaaagtcatga

SEQ ID NO: 26545 - DNA, 20 bp, synthetic construct
  source 1..20: mol_type = other DNA
cattgccgtgtccagcaaga

SEQ ID NO: 26546 - DNA, 20 bp, synthetic construct
  source 1..20: mol_type = other DNA
cggtgcccacctcgaggctg

SEQ ID NO: 26547 - DNA, 20 bp, synthetic construct
  source 1..20: mol_type = other DNA
gatagcgcagcttcatcttg

SEQ ID NO: 26548 - DNA, 20 bp, synthetic construct
  source 1..20: mol_type = other DNA
gctcctcgatctctcgtaag

SEQ ID NO: 26549 - DNA, 20 bp, synthetic construct
  source 1..20: mol_type = other DNA
cctcaggacggatggctggg

SEQ ID NO: 26550 - DNA, 20 bp, synthetic construct
  source 1..20: mol_type = other DNA
tatgctcgctgcctgcggat

SEQ ID NO: 26551 - DNA, 20 bp, synthetic construct
  source 1..20: mol_type = other DNA
ctctcccgcatctaccccaa

SEQ ID NO: 26552 - DNA, 20 bp, synthetic construct
  source 1..20: mol_type = other DNA
gcttcatcttgcggtatagc

SEQ ID NO: 26553 - DNA, 20 bp, synthetic construct
  source 1..20: mol_type = other DNA
gttccttcttgactaccagg

SEQ ID NO: 26554 - DNA, 20 bp, synthetic construct
  source 1..20: mol_type = other DNA
aaccaggccctcttcatgac

SEQ ID NO: 26555 - DNA, 20 bp, synthetic construct
  source 1..20: mol_type = other DNA
ctctgccgcagcctcgaggt

SEQ ID NO: 26556 - DNA, 20 bp, synthetic construct
  source 1..20: mol_type = other DNA
ggaagcgcatgttggggacc

SEQ ID NO: 26557 - DNA, 20 bp, synthetic construct
  source 1..20: mol_type = other DNA
ccacagatccacatgggcaa

SEQ ID NO: 26558 - DNA, 20 bp, synthetic construct
  source 1..20: mol_type = other DNA
tgttctcgtccaagtgctgt

SEQ ID NO: 26559 - DNA, 20 bp, synthetic construct
  source 1..20: mol_type = other DNA
cagtcctcacgtggttcaca

SEQ ID NO: 26560 - DNA, 20 bp, synthetic construct
  source 1..20: mol_type = other DNA
ttcttacctctcaatctgca

SEQ ID NO: 26561 - DNA, 20 bp, synthetic construct
  source 1..20: mol_type = other DNA
gcagctggatgcagtatgcc

SEQ ID NO: 26562 - DNA, 20 bp, synthetic construct
  source 1..20: mol_type = other DNA
cccacagctcctgatggggt

SEQ ID NO: 26563 - DNA, 20 bp, synthetic construct
  source 1..20: mol_type = other DNA
tgctgcagccaagcaccatg

SEQ ID NO: 26564 - DNA, 20 bp, synthetic construct
  source 1..20: mol_type = other DNA
caaaaggacacacaatgcct

SEQ ID NO: 26565 - DNA, 20 bp, synthetic construct
  source 1..20: mol_type = other DNA
cccatggaaccacttctcat

SEQ ID NO: 26566 - DNA, 20 bp, synthetic construct
  source 1..20: mol_type = other DNA
tcttggaagccagtactctg

SEQ ID NO: 26567 - DNA, 20 bp, synthetic construct
  source 1..20: mol_type = other DNA
tccttttgtggagattgagg

SEQ ID NO: 26568 - DNA, 20 bp, synthetic construct
  source 1..20: mol_type = other DNA
aggtggcgaggggactacgg

SEQ ID NO: 26569 - DNA, 20 bp, synthetic construct
  source 1..20: mol_type = other DNA
caagcagaagacagagtttg

SEQ ID NO: 26570 - DNA, 20 bp, synthetic construct
  source 1..20: mol_type = other DNA
cacactcctcaccaagcccg

SEQ ID NO: 26571 - DNA, 20 bp, synthetic construct
  source 1..20: mol_type = other DNA
gtaccttgaaagttggcata

SEQ ID NO: 26572 - DNA, 20 bp, synthetic construct
  source 1..20: mol_type = other DNA
gcctcatcccgcatggtgct

SEQ ID NO: 26573 - DNA, 20 bp, synthetic construct
  source 1..20: mol_type = other DNA
agagtagtagatcttgctgc

SEQ ID NO: 26574 - DNA, 20 bp, synthetic construct
  source 1..20: mol_type = other DNA
gaggaggcactggagaagat

SEQ ID NO: 26575 - DNA, 20 bp, synthetic construct
  source 1..20: mol_type = other DNA
gtcaggtacctggataggca

SEQ ID NO: 26576 - DNA, 20 bp, synthetic construct
  source 1..20: mol_type = other DNA
catgtgctcagcctgtgctc

SEQ ID NO: 26577 - DNA, 20 bp, synthetic construct
  source 1..20: mol_type = other DNA
ccccggtcaggtacctggat

SEQ ID NO: 26578 - DNA, 20 bp, synthetic construct
  source 1..20: mol_type = other DNA
gttcttacctctcaatctgc

SEQ ID NO: 26579 - DNA, 20 bp, synthetic construct
  source 1..20: mol_type = other DNA
gactgggtacctgcgggatg

SEQ ID NO: 26580 - DNA, 20 bp, synthetic construct
  source 1..20: mol_type = other DNA
agccagcttcttgtgctgta

SEQ ID NO: 26581 - DNA, 20 bp, synthetic construct
  source 1..20: mol_type = other DNA
gcccgccatggctccgacgc

SEQ ID NO: 26582 - DNA, 20 bp, synthetic construct
  source 1..20: mol_type = other DNA
ccggtgaggggtgtggcact

SEQ ID NO: 26583 - DNA, 20 bp, synthetic construct
  source 1..20: mol_type = other DNA
cacccctcaccggaaagaga

SEQ ID NO: 26584 - DNA, 20 bp, synthetic construct
  source 1..20: mol_type = other DNA
ctctgaggtttggtttggag

SEQ ID NO: 26585 - DNA, 20 bp, synthetic construct
  source 1..20: mol_type = other DNA
tctgggccttgtagtcaaag

SEQ ID NO: 26586 - DNA, 20 bp, synthetic construct
  source 1..20: mol_type = other DNA
gccctcaacttccagacccc

SEQ ID NO: 26587 - DNA, 20 bp, synthetic construct
  source 1..20: mol_type = other DNA
ctcagatgtggctgtgagca

SEQ ID NO: 26588 - DNA, 20 bp, synthetic construct
  source 1..20: mol_type = other DNA
gctgtcccaggtcaactacc

SEQ ID NO: 26589 - DNA, 20 bp, synthetic construct
  source 1..20: mol_type = other DNA
actggccccctcgatcttgt

SEQ ID NO: 26590 - DNA, 20 bp, synthetic construct
  source 1..20: mol_type = other DNA
tgactacaaggcccagaggg

SEQ ID NO: 26591 - DNA, 20 bp, synthetic construct
  source 1..20: mol_type = other DNA
caaccctggcttctatgtag

SEQ ID NO: 26592 - DNA, 20 bp, synthetic construct
  source 1..20: mol_type = other DNA
ccccgcagcaagtcccctag

SEQ ID NO: 26593 - DNA, 20 bp, synthetic construct
  source 1..20: mol_type = other DNA
cctgaagaacatgctgtccc

SEQ ID NO: 26594 - DNA, 20 bp, synthetic construct
  source 1..20: mol_type = other DNA
cagccagcttcttgtgctgt

SEQ ID NO: 26595 - DNA, 20 bp, synthetic construct
  source 1..20: mol_type = other DNA
gatgaagagagtaagggcca

SEQ ID NO: 26596 - DNA, 20 bp, synthetic construct
  source 1..20: mol_type = other DNA
ctgcaaggtgggagttaagg

SEQ ID NO: 26597 - DNA, 20 bp, synthetic construct
  source 1..20: mol_type = other DNA
ccactgagtaaaactgcttc

SEQ ID NO: 26598 - DNA, 20 bp, synthetic construct
  source 1..20: mol_type = other DNA
cctcacccaaccagcttaag

SEQ ID NO: 26599 - DNA, 20 bp, synthetic construct
  source 1..20: mol_type = other DNA
ggctgatatactgagaaaac

SEQ ID NO: 26600 - DNA, 20 bp, synthetic construct
  source 1..20: mol_type = other DNA
acagcacaagaagctggctg

SEQ ID NO: 26601 - DNA, 20 bp, synthetic construct
  source 1..20: mol_type = other DNA
tgcataggcttgtctggaag

SEQ ID NO: 26602 - DNA, 20 bp, synthetic construct
  source 1..20: mol_type = other DNA
ccacctcgaggctgcggcag

SEQ ID NO: 26603 - DNA, 20 bp, synthetic construct
  source 1..20: mol_type = other DNA
tcacagggtcctccaggtag

SEQ ID NO: 26604 - DNA, 20 bp, synthetic construct
  source 1..20: mol_type = other DNA
tgagggcagtgcctacgagg

SEQ ID NO: 26605 - DNA, 20 bp, synthetic construct
  source 1..20: mol_type = other DNA
ggaagatcctcatcaaggtg

SEQ ID NO: 26606 - DNA, 20 bp, synthetic construct
  source 1..20: mol_type = other DNA
ctgaacttgtcgtctactgc

SEQ ID NO: 26607 - DNA, 20 bp, synthetic construct
  source 1..20: mol_type = other DNA
cccgcagcaagtcccctagg

SEQ ID NO: 26608 - DNA, 20 bp, synthetic construct
  source 1..20: mol_type = other DNA
gcgagcataggcttccaagg

SEQ ID NO: 26609 - DNA, 20 bp, synthetic construct
  source 1..20: mol_type = other DNA
actgtccagaaacatgtgga

SEQ ID NO: 26610 - DNA, 20 bp, synthetic construct
  source 1..20: mol_type = other DNA
acatgcgcttcctccgagag

SEQ ID NO: 26611 - DNA, 20 bp, synthetic construct
  source 1..20: mol_type = other DNA
tggagaagcaagagggaggc

SEQ ID NO: 26612 - DNA, 20 bp, synthetic construct
  source 1..20: mol_type = other DNA
gctgctgacctgtcagggga

SEQ ID NO: 26613 - DNA, 20 bp, synthetic construct
  source 1..20: mol_type = other DNA
ggcttccaaggaggactcac

SEQ ID NO: 26614 - DNA, 20 bp, synthetic construct
  source 1..20: mol_type = other DNA
ctgctctgtatcctaggagg

SEQ ID NO: 26615 - DNA, 20 bp, synthetic construct
  source 1..20: mol_type = other DNA
ctggtccccggtcaggtacc

SEQ ID NO: 26616 - DNA, 20 bp, synthetic construct
  source 1..20: mol_type = other DNA
gttctccagtgagtcctcct

SEQ ID NO: 26617 - DNA, 20 bp, synthetic construct
  source 1..20: mol_type = other DNA
tcagcagggaggccaactcc

SEQ ID NO: 26618 - DNA, 20 bp, synthetic construct
  source 1..20: mol_type = other DNA
ctgggccttgtagtcaaaga

SEQ ID NO: 26619 - DNA, 20 bp, synthetic construct
  source 1..20: mol_type = other DNA
ctaccccaagggccagcgac

SEQ ID NO: 26620 - DNA, 20 bp, synthetic construct
  source 1..20: mol_type = other DNA
ctctcaatctgcaggggtgt

SEQ ID NO: 26621 - DNA, 20 bp, synthetic construct
  source 1..20: mol_type = other DNA
acctggaaggtcttccgctc

SEQ ID NO: 26622 - DNA, 20 bp, synthetic construct
  source 1..20: mol_type = other DNA
cacaggtggcgaggggacta

SEQ ID NO: 26623 - DNA, 20 bp, synthetic construct
  source 1..20: mol_type = other DNA
atcaagaggacccagctttc

SEQ ID NO: 26624 - DNA, 20 bp, synthetic construct
  source 1..20: mol_type = other DNA
agaaggggaggtccatctgc

SEQ ID NO: 26625 - DNA, 20 bp, synthetic construct
  source 1..20: mol_type = other DNA
tctgcgcttcgtggtgtatg

SEQ ID NO: 26626 - DNA, 20 bp, synthetic construct
  source 1..20: mol_type = other DNA
ctgaggtttggtttggagtg

SEQ ID NO: 26627 - DNA, 20 bp, synthetic construct
  source 1..20: mol_type = other DNA
aagggaagataatggaacgg

SEQ ID NO: 26628 - DNA, 20 bp, synthetic construct
  source 1..20: mol_type = other DNA
ggccgtcccagcagtccact

SEQ ID NO: 26629 - DNA, 20 bp, synthetic construct
  source 1..20: mol_type = other DNA
ataccccctggtagtcaaga

SEQ ID NO: 26630 - DNA, 20 bp, synthetic construct
  source 1..20: mol_type = other DNA
aggacctggagcagcgcagc

SEQ ID NO: 26631 - DNA, 20 bp, synthetic construct
  source 1..20: mol_type = other DNA
tcttaagctggttgggtgag

SEQ ID NO: 26632 - DNA, 20 bp, synthetic construct
  source 1..20: mol_type = other DNA
gccacctcaatctccacaaa

SEQ ID NO: 26633 - DNA, 20 bp, synthetic construct
  source 1..20: mol_type = other DNA
gactacggggccctgtatga

SEQ ID NO: 26634 - DNA, 20 bp, synthetic construct
  source 1..20: mol_type = other DNA
ccagggcaacgaggatgagg

SEQ ID NO: 26635 - DNA, 20 bp, synthetic construct
  source 1..20: mol_type = other DNA
cacaggaggagctgcaggac

SEQ ID NO: 26636 - DNA, 20 bp, synthetic construct
  source 1..20: mol_type = other DNA
tccggtgaggggtgtggcac

SEQ ID NO: 26637 - DNA, 20 bp, synthetic construct
  source 1..20: mol_type = other DNA
ctcactctctcgcacgagga

SEQ ID NO: 26638 - DNA, 20 bp, synthetic construct
  source 1..20: mol_type = other DNA
tcatacagggccccgtagtc

SEQ ID NO: 26639 - DNA, 20 bp, synthetic construct
  source 1..20: mol_type = other DNA
ggtgaaaaagatccgtgaag

SEQ ID NO: 26640 - DNA, 20 bp, synthetic construct
  source 1..20: mol_type = other DNA
ttcttggggccctggacaga

SEQ ID NO: 26641 - DNA, 20 bp, synthetic construct
  source 1..20: mol_type = other DNA
cgacaagttcagagagctcc

SEQ ID NO: 26642 - DNA, 20 bp, synthetic construct
  source 1..20: mol_type = other DNA
gtctgtcaagaagaacttgg

SEQ ID NO: 26643 - DNA, 20 bp, synthetic construct
  source 1..20: mol_type = other DNA
ccctttgatgaagagagtaa

SEQ ID NO: 26644 - DNA, 20 bp, synthetic construct
  source 1..20: mol_type = other DNA
gcgccagatcacgtggagcc

SEQ ID NO: 26645 - DNA, 20 bp, synthetic construct
  source 1..20: mol_type = other DNA
ctcttaagctggttgggtga

SEQ ID NO: 26646 - DNA, 20 bp, synthetic construct
  source 1..20: mol_type = other DNA
aacagcccacagctcctgat

SEQ ID NO: 26647 - DNA, 20 bp, synthetic construct
  source 1..20: mol_type = other DNA
cacgaggaaggagccgtcag

SEQ ID NO: 26648 - DNA, 20 bp, synthetic construct
  source 1..20: mol_type = other DNA
gaagattggcacagctgtga

SEQ ID NO: 26649 - DNA, 20 bp, synthetic construct
  source 1..20: mol_type = other DNA
ctgcagctcctcctgtgagt

SEQ ID NO: 26650 - DNA, 20 bp, synthetic construct
  source 1..20: mol_type = other DNA
cctgtggaagacacagagtg

SEQ ID NO: 26651 - DNA, 20 bp, synthetic construct
  source 1..20: mol_type = other DNA
cccgccaccccaccttgatg

SEQ ID NO: 26652 - DNA, 20 bp, synthetic construct
  source 1..20: mol_type = other DNA
ttcctggaacagaccaaaga

SEQ ID NO: 26653 - DNA, 20 bp, synthetic construct
  source 1..20: mol_type = other DNA
ctccagtgcctcctcgttga

SEQ ID NO: 26654 - DNA, 20 bp, synthetic construct
  source 1..20: mol_type = other DNA
cctgcaaggtgggagttaag

SEQ ID NO: 26655 - DNA, 20 bp, synthetic construct
  source 1..20: mol_type = other DNA
catggctccgacgctggggg

SEQ ID NO: 26656 - DNA, 20 bp, synthetic construct
  source 1..20: mol_type = other DNA
cgaggatgaggaggagccca

SEQ ID NO: 26657 - DNA, 20 bp, synthetic construct
  source 1..20: mol_type = other DNA
tggagaactggtccccggtc

SEQ ID NO: 26658 - DNA, 20 bp, synthetic construct
  source 1..20: mol_type = other DNA
taagaggaagatcctcatca

SEQ ID NO: 26659 - DNA, 20 bp, synthetic construct
  source 1..20: mol_type = other DNA
gcggcagaggtgcagcacct

SEQ ID NO: 26660 - DNA, 20 bp, synthetic construct
  source 1..20: mol_type = other DNA
ccacactcacgtgttgtgcg

SEQ ID NO: 26661 - DNA, 20 bp, synthetic construct
  source 1..20: mol_type = other DNA
gcgctatcccatcaacgagg

SEQ ID NO: 26662 - DNA, 20 bp, synthetic construct
  source 1..20: mol_type = other DNA
agattggcacagctgtgagg

SEQ ID NO: 26663 - DNA, 20 bp, synthetic construct
  source 1..20: mol_type = other DNA
tgttgctgccgactcacagg

SEQ ID NO: 26664 - DNA, 20 bp, synthetic construct
  source 1..20: mol_type = other DNA
ctctcggaggaagcgcatgt

SEQ ID NO: 26665 - DNA, 20 bp, synthetic construct
  source 1..20: mol_type = other DNA
gcgagagagtgagaccttcg

SEQ ID NO: 26666 - DNA, 20 bp, synthetic construct
  source 1..20: mol_type = other DNA
tcctaggaggaggaaaagcc

SEQ ID NO: 26667 - DNA, 20 bp, synthetic construct
  source 1..20: mol_type = other DNA
agaacttgatcttggtggta

SEQ ID NO: 26668 - DNA, 20 bp, synthetic construct
  source 1..20: mol_type = other DNA
gttcattccgcttccgcacc

SEQ ID NO: 26669 - DNA, 20 bp, synthetic construct
  source 1..20: mol_type = other DNA
ttcttgactaccagggggta

SEQ ID NO: 26670 - DNA, 20 bp, synthetic construct
  source 1..20: mol_type = other DNA
agcactgccgtatccactcc

SEQ ID NO: 26671 - DNA, 20 bp, synthetic construct
  source 1..20: mol_type = other DNA
tgagcatgaactcctgcacc

SEQ ID NO: 26672 - DNA, 20 bp, synthetic construct
  source 1..20: mol_type = other DNA
tccctttgatgaagagagta

SEQ ID NO: 26673 - DNA, 20 bp, synthetic construct
  source 1..20: mol_type = other DNA
aggtcagctcgtcctccctc

SEQ ID NO: 26674 - DNA, 20 bp, synthetic construct
  source 1..20: mol_type = other DNA
ccagaatgtggagaagcaag

SEQ ID NO: 26675 - DNA, 20 bp, synthetic construct
  source 1..20: mol_type = other DNA
tctctcgtaaggggtctcgg

SEQ ID NO: 26676 - DNA, 20 bp, synthetic construct
  source 1..20: mol_type = other DNA
cctttgcccatgtggatctg

SEQ ID NO: 26677 - DNA, 20 bp, synthetic construct
  source 1..20: mol_type = other DNA
gggccgtcccagcagtccac

SEQ ID NO: 26678 - DNA, 20 bp, synthetic construct
  source 1..20: mol_type = other DNA
ctgttctcgtccaagtgctg

SEQ ID NO: 26679 - DNA, 20 bp, synthetic construct
  source 1..20: mol_type = other DNA
ctcggcgtccgagggcgcgc

SEQ ID NO: 26680 - DNA, 20 bp, synthetic construct
  source 1..20: mol_type = other DNA
ctccctgcagggctggggag

SEQ ID NO: 26681 - DNA, 20 bp, synthetic construct
  source 1..20: mol_type = other DNA
ggaactcaggaagggacact

SEQ ID NO: 26682 - DNA, 20 bp, synthetic construct
  source 1..20: mol_type = other DNA
agaagtcgcagcgacccgag

SEQ ID NO: 26683 - DNA, 20 bp, synthetic construct
  source 1..20: mol_type = other DNA
gaggagaccagcagtgacca

SEQ ID NO: 26684 - DNA, 20 bp, synthetic construct
  source 1..20: mol_type = other DNA
acagcccacagctcctgatg

SEQ ID NO: 26685 - DNA, 20 bp, synthetic construct
  source 1..20: mol_type = other DNA
cagctgagcaaactgcccgt

SEQ ID NO: 26686 - DNA, 20 bp, synthetic construct
  source 1..20: mol_type = other DNA
caactaggaaggtagcaaag

SEQ ID NO: 26687 - DNA, 20 bp, synthetic construct
  source 1..20: mol_type = other DNA
cgaggagccatacttcttcc

SEQ ID NO: 26688 - DNA, 20 bp, synthetic construct
  source 1..20: mol_type = other DNA
cagcacaagaagctggctga

SEQ ID NO: 26689 - DNA, 20 bp, synthetic construct
  source 1..20: mol_type = other DNA
acctgtaggcagacaaagaa

SEQ ID NO: 26690 - DNA, 20 bp, synthetic construct
  source 1..20: mol_type = other DNA
acaatgcctcggccattctt

SEQ ID NO: 26691 - DNA, 20 bp, synthetic construct
  source 1..20: mol_type = other DNA
ctacagtgaggacctggagt

SEQ ID NO: 26692 - DNA, 20 bp, synthetic construct
  source 1..20: mol_type = other DNA
cctcttaagctggttgggtg

SEQ ID NO: 26693 - DNA, 20 bp, synthetic construct
  source 1..20: mol_type = other DNA
cttcatcaaagggaacaggc

SEQ ID NO: 26694 - DNA, 20 bp, synthetic construct
  source 1..20: mol_type = other DNA
ccaggaaggccccatcacga

SEQ ID NO: 26695 - DNA, 20 bp, synthetic construct
  source 1..20: mol_type = other DNA
tctcctgcttcaacgaagcc

SEQ ID NO: 26696 - DNA, 20 bp, synthetic construct
  source 1..20: mol_type = other DNA
ctgtggaagacacagagtga

SEQ ID NO: 26697 - DNA, 20 bp, synthetic construct
  source 1..20: mol_type = other DNA
cactcacgtgttgtgcgagg

SEQ ID NO: 26698 - DNA, 20 bp, synthetic construct
  source 1..20: mol_type = other DNA
caggatgactgggtacctgc

SEQ ID NO: 26699 - DNA, 20 bp, synthetic construct
  source 1..20: mol_type = other DNA
ctggtcagaacaaagtagtg

SEQ ID NO: 26700 - DNA, 20 bp, synthetic construct
  source 1..20: mol_type = other DNA
acaggaggagctgcaggact

SEQ ID NO: 26701 - DNA, 20 bp, synthetic construct
  source 1..20: mol_type = other DNA
aaactgcttccggagccacc

SEQ ID NO: 26702 - DNA, 20 bp, synthetic construct
  source 1..20: mol_type = other DNA
tctttgactacaaggcccag

SEQ ID NO: 26703 - DNA, 20 bp, synthetic construct
  source 1..20: mol_type = other DNA
gatcggtaagtactgagctg

SEQ ID NO: 26704 - DNA, 20 bp, synthetic construct
  source 1..20: mol_type = other DNA
ccacagctcctgatggggta

SEQ ID NO: 26705 - DNA, 20 bp, synthetic construct
  source 1..20: mol_type = other DNA
aggaggactcactggagaac

SEQ ID NO: 26706 - DNA, 20 bp, synthetic construct
  source 1..20: mol_type = other DNA
tttgtggcctcagagtgagt

SEQ ID NO: 26707 - DNA, 20 bp, synthetic construct
  source 1..20: mol_type = other DNA
agggccagacagtgatgcta

SEQ ID NO: 26708 - DNA, 20 bp, synthetic construct
  source 1..20: mol_type = other DNA
tggggacccggtagttgacc

SEQ ID NO: 26709 - DNA, 20 bp, synthetic construct
  source 1..20: mol_type = other DNA
agaaggaactgctggaactc

SEQ ID NO: 26710 - DNA, 20 bp, synthetic construct
  source 1..20: mol_type = other DNA
agaccccttacgagagatcg

SEQ ID NO: 26711 - DNA, 20 bp, synthetic construct
  source 1..20: mol_type = other DNA
ccctaggggacttgctgcgg

SEQ ID NO: 26712 - DNA, 20 bp, synthetic construct
  source 1..20: mol_type = other DNA
aagcagaagacagagtttgt

SEQ ID NO: 26713 - DNA, 20 bp, synthetic construct
  source 1..20: mol_type = other DNA
tggctcctcgatctctcgta

SEQ ID NO: 26714 - DNA, 20 bp, synthetic construct
  source 1..20: mol_type = other DNA
actgtgaaggcaacgacaaa

SEQ ID NO: 26715 - DNA, 20 bp, synthetic construct
  source 1..20: mol_type = other DNA
gaacttgatcttggtggtaa

SEQ ID NO: 26716 - DNA, 20 bp, synthetic construct
  source 1..20: mol_type = other DNA
gagggaggctggtaagccag

SEQ ID NO: 26717 - DNA, 20 bp, synthetic construct
  source 1..20: mol_type = other DNA
ggctcctcgatctctcgtaa

SEQ ID NO: 26718 - DNA, 20 bp, synthetic construct
  source 1..20: mol_type = other DNA
gcactgctctgtatcctagg

SEQ ID NO: 26719 - DNA, 20 bp, synthetic construct
  source 1..20: mol_type = other DNA
cgcacgaggaaggagccgtc

SEQ ID NO: 26720 - DNA, 20 bp, synthetic construct
  source 1..20: mol_type = other DNA
tgaccagaatttcctggctc

SEQ ID NO: 26721 - DNA, 20 bp, synthetic construct
  source 1..20: mol_type = other DNA
cacctgtaggcagacaaaga

SEQ ID NO: 26722 - DNA, 20 bp, synthetic construct
  source 1..20: mol_type = other DNA
tccagtgcctcctcgttgat

SEQ ID NO: 26723 - DNA, 20 bp, synthetic construct
  source 1..20: mol_type = other DNA
ctgactgccacagatccaca

SEQ ID NO: 26724 - DNA, 20 bp, synthetic construct
  source 1..20: mol_type = other DNA
gagatccagtagtgggaaag

SEQ ID NO: 26725 - DNA, 20 bp, synthetic construct
  source 1..20: mol_type = other DNA
ggccattctttggcagatgt

SEQ ID NO: 26726 - DNA, 20 bp, synthetic construct
  source 1..20: mol_type = other DNA
cctctgccgcagcctcgagg

SEQ ID NO: 26727 - DNA, 20 bp, synthetic construct
  source 1..20: mol_type = other DNA
gcgtggtaccacctgagaac

SEQ ID NO: 26728 - DNA, 20 bp, synthetic construct
  source 1..20: mol_type = other DNA
ggaactgctggaactcagga

SEQ ID NO: 26729 - DNA, 20 bp, synthetic construct
  source 1..20: mol_type = other DNA
tcttctgggcgctgtacatg

SEQ ID NO: 26730 - DNA, 20 bp, synthetic construct
  source 1..20: mol_type = other DNA
atacaccacgaagcgcagaa

SEQ ID NO: 26731 - DNA, 20 bp, synthetic construct
  source 1..20: mol_type = other DNA
caaggtacagctcaggcctc

SEQ ID NO: 26732 - DNA, 20 bp, synthetic construct
  source 1..20: mol_type = other DNA
ctgagctgtaccttgaaagt

SEQ ID NO: 26733 - DNA, 20 bp, synthetic construct
  source 1..20: mol_type = other DNA
ggctgagaaatacgtgaaca

SEQ ID NO: 26734 - DNA, 20 bp, synthetic construct
  source 1..20: mol_type = other DNA
gcttcgttgaagcaggagaa

SEQ ID NO: 26735 - DNA, 20 bp, synthetic construct
  source 1..20: mol_type = other DNA
ggactttcccgttccgcctg

SEQ ID NO: 26736 - DNA, 20 bp, synthetic construct
  source 1..20: mol_type = other DNA
agctcctgatggggtaggga

SEQ ID NO: 26737 - DNA, 20 bp, synthetic construct
  source 1..20: mol_type = other DNA
gtgtccttttgtggagattg

SEQ ID NO: 26738 - DNA, 20 bp, synthetic construct
  source 1..20: mol_type = other DNA
cgccatggctccgacgctgg

SEQ ID NO: 26739 - DNA, 20 bp, synthetic construct
  source 1..20: mol_type = other DNA
atgactgggtacctgcggga

SEQ ID NO: 26740 - DNA, 20 bp, synthetic construct
  source 1..20: mol_type = other DNA
gccatacttcttcctggatg

SEQ ID NO: 26741 - DNA, 20 bp, synthetic construct
  source 1..20: mol_type = other DNA
gtcgctgcattgagtgtgcg

SEQ ID NO: 26742 - DNA, 20 bp, synthetic construct
  source 1..20: mol_type = other DNA
ggatgccagttatttaccat

SEQ ID NO: 26743 - DNA, 20 bp, synthetic construct
  source 1..20: mol_type = other DNA
agcgcagaaaggcaaattca

SEQ ID NO: 26744 - DNA, 20 bp, synthetic construct
  source 1..20: mol_type = other DNA
ccgcccagggaagacctcac

SEQ ID NO: 26745 - DNA, 20 bp, synthetic construct
  source 1..20: mol_type = other DNA
agatcctcatcaaggtgggg

SEQ ID NO: 26746 - DNA, 20 bp, synthetic construct
  source 1..20: mol_type = other DNA
cccccgcagcaagtccccta

SEQ ID NO: 26747 - DNA, 20 bp, synthetic construct
  source 1..20: mol_type = other DNA
ctcggaggaagcgcatgttg

SEQ ID NO: 26748 - DNA, 20 bp, synthetic construct
  source 1..20: mol_type = other DNA
gcccacgagagcaaagagtg

SEQ ID NO: 26749 - DNA, 20 bp, synthetic construct
  source 1..20: mol_type = other DNA
gtcatccttcccggaaacca

SEQ ID NO: 26750 - DNA, 20 bp, synthetic construct
  source 1..20: mol_type = other DNA
agggcctggttcatctgcat

SEQ ID NO: 26751 - DNA, 20 bp, synthetic construct
  source 1..20: mol_type = other DNA
tggcccagacagcagacgcc

SEQ ID NO: 26752 - DNA, 20 bp, synthetic construct
  source 1..20: mol_type = other DNA
gccaatctctgggccaaaca

SEQ ID NO: 26753 - DNA, 20 bp, synthetic construct
  source 1..20: mol_type = other DNA
gacaagttcagagagctcca

SEQ ID NO: 26754 - DNA, 20 bp, synthetic construct
  source 1..20: mol_type = other DNA
gtgagtcggcagcaacatcc

SEQ ID NO: 26755 - DNA, 20 bp, synthetic construct
  source 1..20: mol_type = other DNA
ccgggacatgtcatccttcc

SEQ ID NO: 26756 - DNA, 20 bp, synthetic construct
  source 1..20: mol_type = other DNA
cagggttgcgtccctcatac

SEQ ID NO: 26757 - DNA, 20 bp, synthetic construct
  source 1..20: mol_type = other DNA
gcagttccttcttgactacc

SEQ ID NO: 26758 - DNA, 20 bp, synthetic construct
  source 1..20: mol_type = other DNA
tgaagtgaacatgtggatca

SEQ ID NO: 26759 - DNA, 20 bp, synthetic construct
  source 1..20: mol_type = other DNA
tgtctggaagaggcagatta

SEQ ID NO: 26760 - DNA, 20 bp, synthetic construct
  source 1..20: mol_type = other DNA
aggaccctgtgaaccacgtg

SEQ ID NO: 26761 - DNA, 20 bp, synthetic construct
  source 1..20: mol_type = other DNA
gctttgactgcacactgcag

SEQ ID NO: 26762 - DNA, 20 bp, synthetic construct
  source 1..20: mol_type = other DNA
ggaatccagtcgctggccct

SEQ ID NO: 26763 - DNA, 20 bp, synthetic construct
  source 1..20: mol_type = other DNA
gcccgacatctgccaaagaa

SEQ ID NO: 26764 - DNA, 20 bp, synthetic construct
  source 1..20: mol_type = other DNA
gctcagcctgtgctctggtc

SEQ ID NO: 26765 - DNA, 20 bp, synthetic construct
  source 1..20: mol_type = other DNA
gtcgaaggcctcatcccgca

SEQ ID NO: 26766 - DNA, 20 bp, synthetic construct
  source 1..20: mol_type = other DNA
ctgtaggggcaaccagaaca

SEQ ID NO: 26767 - DNA, 20 bp, synthetic construct
  source 1..20: mol_type = other DNA
cttgccctcagcccttcaca

SEQ ID NO: 26768 - DNA, 20 bp, synthetic construct
  source 1..20: mol_type = other DNA
acctcatccaggaagaagta

SEQ ID NO: 26769 - DNA, 20 bp, synthetic construct
  source 1..20: mol_type = other DNA
gttccacacactgttctctt

SEQ ID NO: 26770 - DNA, 20 bp, synthetic construct
  source 1..20: mol_type = other DNA
agcttcatcttgcggtatag

SEQ ID NO: 26771 - DNA, 20 bp, synthetic construct
  source 1..20: mol_type = other DNA
gaaagagatggcatatgagt

SEQ ID NO: 26772 - DNA, 20 bp, synthetic construct
  source 1..20: mol_type = other DNA
ctctcttcatcaaagggaac

SEQ ID NO: 26773 - DNA, 20 bp, synthetic construct
  source 1..20: mol_type = other DNA
gggagtttatatctctttcc

SEQ ID NO: 26774 - DNA, 20 bp, synthetic construct
  source 1..20: mol_type = other DNA
agttggatgggaagtactgc

SEQ ID NO: 26775 - DNA, 20 bp, synthetic construct
  source 1..20: mol_type = other DNA
cactcagccttaccagcccc

SEQ ID NO: 26776 - DNA, 20 bp, synthetic construct
  source 1..20: mol_type = other DNA
tctggtaatgcccccgaccc

SEQ ID NO: 26777 - DNA, 20 bp, synthetic construct
  source 1..20: mol_type = other DNA
tccacaagaaggtggagaag

SEQ ID NO: 26778 - DNA, 20 bp, synthetic construct
  source 1..20: mol_type = other DNA
ccccgagcggagaaccgtcc

SEQ ID NO: 26779 - DNA, 20 bp, synthetic construct
  source 1..20: mol_type = other DNA
tcgctctcctggaggatgca

SEQ ID NO: 26780 - DNA, 20 bp, synthetic construct
  source 1..20: mol_type = other DNA
tgcagcgacagcccatgcgc

SEQ ID NO: 26781 - DNA, 20 bp, synthetic construct
  source 1..20: mol_type = other DNA
aagccgtacgtgtctgaggg

SEQ ID NO: 26782 - DNA, 20 bp, synthetic construct
  source 1..20: mol_type = other DNA
aaacttatctttaaggaact

SEQ ID NO: 26783 - DNA, 20 bp, synthetic construct
  source 1..20: mol_type = other DNA
caggtgggtgcgagggtggg

SEQ ID NO: 26784 - DNA, 20 bp, synthetic construct
  source 1..20: mol_type = other DNA
gggctggtaaggctgagtgg

SEQ ID NO: 26785 - DNA, 20 bp, synthetic construct
  source 1..20: mol_type = other DNA
agccctaccaggggaccccg

SEQ ID NO: 26786 - DNA, 20 bp, synthetic construct
  source 1..20: mol_type = other DNA
atcttgaggattcatgttac

SEQ ID NO: 26787 - DNA, 20 bp, synthetic construct
  source 1..20: mol_type = other DNA
ttgatgatgctgctccggcg

SEQ ID NO: 26788 - DNA, 20 bp, synthetic construct
  source 1..20: mol_type = other DNA
tacacagagttatatgtcca

SEQ ID NO: 26789 - DNA, 20 bp, synthetic construct
  source 1..20: mol_type = other DNA
atatgctaagaatgagacat

SEQ ID NO: 26790 - DNA, 20 bp, synthetic construct
  source 1..20: mol_type = other DNA
cctatgataaattctagagt

SEQ ID NO: 26791 - DNA, 20 bp, synthetic construct
  source 1..20: mol_type = other DNA
tcagggcgcccttggcgccg

SEQ ID NO: 26792 - DNA, 20 bp, synthetic construct
  source 1..20: mol_type = other DNA
gtgggggaaggcggtggcgg

SEQ ID NO: 26793 - DNA, 20 bp, synthetic construct
  source 1..20: mol_type = other DNA
gctagcccgggcttcgtccc

SEQ ID NO: 26794 - DNA, 20 bp, synthetic construct
  source 1..20: mol_type = other DNA
aagcagtggagagctttacc

SEQ ID NO: 26795 - DNA, 20 bp, synthetic construct
  source 1..20: mol_type = other DNA
agaatttcaggtgtcgtttc

SEQ ID NO: 26796 - DNA, 20 bp, synthetic construct
  source 1..20: mol_type = other DNA
cgtgggccagcagcatccgg

SEQ ID NO: 26797 - DNA, 20 bp, synthetic construct
  source 1..20: mol_type = other DNA
cagcgcatccctgtgtcgag

SEQ ID NO: 26798 - DNA, 20 bp, synthetic construct
  source 1..20: mol_type = other DNA
gcgtacagggatgatcatgg

SEQ ID NO: 26799 - DNA, 20 bp, synthetic construct
  source 1..20: mol_type = other DNA
ccacaagtgaagcagcgtac

SEQ ID NO: 26800 - DNA, 20 bp, synthetic construct
  source 1..20: mol_type = other DNA
gcagtagcgcttcaggccca

SEQ ID NO: 26801 - DNA, 20 bp, synthetic construct
  source 1..20: mol_type = other DNA
ggaggaggaggaagtagagg

SEQ ID NO: 26802 - DNA, 20 bp, synthetic construct
  source 1..20: mol_type = other DNA
ttctgcaagaggcaaagcag

SEQ ID NO: 26803 - DNA, 20 bp, synthetic construct
  source 1..20: mol_type = other DNA
ggagggggtgggggcggggg

SEQ ID NO: 26804 - DNA, 20 bp, synthetic construct
  source 1..20: mol_type = other DNA
catcagagcacacaggtggg

SEQ ID NO: 26805 - DNA, 20 bp, synthetic construct
  source 1..20: mol_type = other DNA
cggcggccaggagctgggcc

SEQ ID NO: 26806 - DNA, 20 bp, synthetic construct
  source 1..20: mol_type = other DNA
tcctcaggtcacaccccaag

SEQ ID NO: 26807 - DNA, 20 bp, synthetic construct
  source 1..20: mol_type = other DNA
gagaagtggctcaacgatgc

SEQ ID NO: 26808 - DNA, 20 bp, synthetic construct
  source 1..20: mol_type = other DNA
acctgaggagagaagaaagg

SEQ ID NO: 26809 - DNA, 20 bp, synthetic construct
  source 1..20: mol_type = other DNA
agaggaggaggcggaggcgg

SEQ ID NO: 26810 - DNA, 20 bp, synthetic construct
  source 1..20: mol_type = other DNA
gaccaggcccacaccaggcg

SEQ ID NO: 26811 - DNA, 20 bp, synthetic construct
  source 1..20: mol_type = other DNA
gggcgggtcacggcctggtg

SEQ ID NO: 26812 - DNA, 20 bp, synthetic construct
  source 1..20: mol_type = other DNA
ccttgatctgggggggagag

SEQ ID NO: 26813 - DNA, 20 bp, synthetic construct
  source 1..20: mol_type = other DNA
gctgccatcaaggctggtaa

SEQ ID NO: 26814 - DNA, 20 bp, synthetic construct
  source 1..20: mol_type = other DNA
ctccagaatggagtcgcagg

SEQ ID NO: 26815 - DNA, 20 bp, synthetic construct
  source 1..20: mol_type = other DNA
gaagctttcaaaaagtcttc

SEQ ID NO: 26816 - DNA, 20 bp, synthetic construct
  source 1..20: mol_type = other DNA
ttgcaagtctgacatttgaa

SEQ ID NO: 26817 - DNA, 20 bp, synthetic construct
  source 1..20: mol_type = other DNA
gaaacactacctggtacaca

SEQ ID NO: 26818 - DNA, 20 bp, synthetic construct
  source 1..20: mol_type = other DNA
gccccggctctcaagagcac

SEQ ID NO: 26819 - DNA, 20 bp, synthetic construct
  source 1..20: mol_type = other DNA
tccctttcaggtgaaccttg

SEQ ID NO: 26820 - DNA, 20 bp, synthetic construct
  source 1..20: mol_type = other DNA
ccacctgcagaaacactacc

SEQ ID NO: 26821 - DNA, 20 bp, synthetic construct
  source 1..20: mol_type = other DNA
caggtagtgtttctgcaggt

SEQ ID NO: 26822 - DNA, 20 bp, synthetic construct
  source 1..20: mol_type = other DNA
gaaccttgaggctacagaga

SEQ ID NO: 26823 - DNA, 20 bp, synthetic construct
  source 1..20: mol_type = other DNA
gaggcttacctcttcactgt

SEQ ID NO: 26824 - DNA, 20 bp, synthetic construct
  source 1..20: mol_type = other DNA
ctgcgcacctggcattcatg

SEQ ID NO: 26825 - DNA, 20 bp, synthetic construct
  source 1..20: mol_type = other DNA
attcgggtcagatcttccaa

SEQ ID NO: 26826 - DNA, 20 bp, synthetic construct
  source 1..20: mol_type = other DNA
ccacacaagaagttcctggt

SEQ ID NO: 26827 - DNA, 20 bp, synthetic construct
  source 1..20: mol_type = other DNA
gggcacaccttgcattggta

SEQ ID NO: 26828 - DNA, 20 bp, synthetic construct
  source 1..20: mol_type = other DNA
tgtgatctctgtagtggaga

SEQ ID NO: 26829 - DNA, 20 bp, synthetic construct
  source 1..20: mol_type = other DNA
ctaccttcagattggagagc

SEQ ID NO: 26830 - DNA, 20 bp, synthetic construct
  source 1..20: mol_type = other DNA
ggagagctggccgaaagtct

SEQ ID NO: 26831 - DNA, 20 bp, synthetic construct
  source 1..20: mol_type = other DNA
gtctacagcaatctcctcgg

SEQ ID NO: 26832 - DNA, 20 bp, synthetic construct
  source 1..20: mol_type = other DNA
gcagccaggttttgctcccg

SEQ ID NO: 26833 - DNA, 20 bp, synthetic construct
  source 1..20: mol_type = other DNA
gcagtttcaggtgcacaaac

SEQ ID NO: 26834 - DNA, 20 bp, synthetic construct
  source 1..20: mol_type = other DNA
gtgctgaaataaagaaaaag

SEQ ID NO: 26835 - DNA, 20 bp, synthetic construct
  source 1..20: mol_type = other DNA
ttctggcagaggggcccgga

SEQ ID NO: 26836 - DNA, 20 bp, synthetic construct
  source 1..20: mol_type = other DNA
caaatgtcagacttgcaaca

SEQ ID NO: 26837 - DNA, 20 bp, synthetic construct
  source 1..20: mol_type = other DNA
gcttttctcccgtgtgtacc

SEQ ID NO: 26838 - DNA, 20 bp, synthetic construct
  source 1..20: mol_type = other DNA
agaaaagccacatgaatgcc

SEQ ID NO: 26839 - DNA, 20 bp, synthetic construct
  source 1..20: mol_type = other DNA
acaagaagttcctggttggc

SEQ ID NO: 26840 - DNA, 20 bp, synthetic construct
  source 1..20: mol_type = other DNA
ccccggctctcaagagcacc

SEQ ID NO: 26841 - DNA, 20 bp, synthetic construct
  source 1..20: mol_type = other DNA
aaacactacctggtacacac

SEQ ID NO: 26842 - DNA, 20 bp, synthetic construct
  source 1..20: mol_type = other DNA
ttgcaaagaaacatggggaa

SEQ ID NO: 26843 - DNA, 20 bp, synthetic construct
  source 1..20: mol_type = other DNA
ggaatggactcctctcctca

SEQ ID NO: 26844 - DNA, 20 bp, synthetic construct
  source 1..20: mol_type = other DNA
agcacttgtggggccgctcc

SEQ ID NO: 26845 - DNA, 20 bp, synthetic construct
  source 1..20: mol_type = other DNA
cggccagctctccaatctga

SEQ ID NO: 26846 - DNA, 20 bp, synthetic construct
  source 1..20: mol_type = other DNA
ggtccaaaacgtgtgccctt

SEQ ID NO: 26847 - DNA, 20 bp, synthetic construct
  source 1..20: mol_type = other DNA
gcttacctcttcactgttgg

SEQ ID NO: 26848 - DNA, 20 bp, synthetic construct
  source 1..20: mol_type = other DNA
cctccaaaaatatttcctgt

SEQ ID NO: 26849 - DNA, 20 bp, synthetic construct
  source 1..20: mol_type = other DNA
gtccacctgagagtgcacag

SEQ ID NO: 26850 - DNA, 20 bp, synthetic construct
  source 1..20: mol_type = other DNA
tccagaatggagtcgcaggt

SEQ ID NO: 26851 - DNA, 20 bp, synthetic construct
  source 1..20: mol_type = other DNA
tgtgcactctcaggtggacc

SEQ ID NO: 26852 - DNA, 20 bp, synthetic construct
  source 1..20: mol_type = other DNA
ccaaccaggaacttcttgtg

SEQ ID NO: 26853 - DNA, 20 bp, synthetic construct
  source 1..20: mol_type = other DNA
ttgtgctgaaataaagaaaa

SEQ ID NO: 26854 - DNA, 20 bp, synthetic construct
  source 1..20: mol_type = other DNA
ccaggtagtgtttctgcagg

SEQ ID NO: 26855 - DNA, 20 bp, synthetic construct
  source 1..20: mol_type = other DNA
gctccagccggagcatccca

SEQ ID NO: 26856 - DNA, 20 bp, synthetic construct
  source 1..20: mol_type = other DNA
gttctccactgtgcactctc

SEQ ID NO: 26857 - DNA, 20 bp, synthetic construct
  source 1..20: mol_type = other DNA
tggacagatctattccagag

SEQ ID NO: 26858 - DNA, 20 bp, synthetic construct
  source 1..20: mol_type = other DNA
tgagagtgcacagtggagaa

SEQ ID NO: 26859 - DNA, 20 bp, synthetic construct
  source 1..20: mol_type = other DNA
tgaatccagcacactctccc

SEQ ID NO: 26860 - DNA, 20 bp, synthetic construct
  source 1..20: mol_type = other DNA
tgtggcagacctacagtgta

SEQ ID NO: 26861 - DNA, 20 bp, synthetic construct
  source 1..20: mol_type = other DNA
tttggacagatctattccag

SEQ ID NO: 26862 - DNA, 20 bp, synthetic construct
  source 1..20: mol_type = other DNA
caggtgggtcttgagattgc

SEQ ID NO: 26863 - DNA, 20 bp, synthetic construct
  source 1..20: mol_type = other DNA
gcgagctcgggagagaagtg

SEQ ID NO: 26864 - DNA, 20 bp, synthetic construct
  source 1..20: mol_type = other DNA
gatgtagttcttgtggcact

SEQ ID NO: 26865 - DNA, 20 bp, synthetic construct
  source 1..20: mol_type = other DNA
gaaaagcagattccttggta

SEQ ID NO: 26866 - DNA, 20 bp, synthetic construct
  source 1..20: mol_type = other DNA
aataccacacaagaagttcc

SEQ ID NO: 26867 - DNA, 20 bp, synthetic construct
  source 1..20: mol_type = other DNA
cagtttcaggtgcacaaact

SEQ ID NO: 26868 - DNA, 20 bp, synthetic construct
  source 1..20: mol_type = other DNA
aaatgtcagacttgcaacaa

SEQ ID NO: 26869 - DNA, 20 bp, synthetic construct
  source 1..20: mol_type = other DNA
agagaaaccataccaatgca

SEQ ID NO: 26870 - DNA, 20 bp, synthetic construct
  source 1..20: mol_type = other DNA
gcacaagcgtctgcacaccc

SEQ ID NO: 26871 - DNA, 20 bp, synthetic construct
  source 1..20: mol_type = other DNA
ctccactgtgcactctcagg

SEQ ID NO: 26872 - DNA, 20 bp, synthetic construct
  source 1..20: mol_type = other DNA
ttggacagatctattccaga

SEQ ID NO: 26873 - DNA, 20 bp, synthetic construct
  source 1..20: mol_type = other DNA
tgcacaagcgtctgcacacc

SEQ ID NO: 26874 - DNA, 20 bp, synthetic construct
  source 1..20: mol_type = other DNA
gtgcactctcaggtggacct

SEQ ID NO: 26875 - DNA, 20 bp, synthetic construct
  source 1..20: mol_type = other DNA
ttgtggcagacctacagtgt

SEQ ID NO: 26876 - DNA, 20 bp, synthetic construct
  source 1..20: mol_type = other DNA
aggcggaggcatccttacca

SEQ ID NO: 26877 - DNA, 20 bp, synthetic construct
  source 1..20: mol_type = other DNA
ggtatggtttctctccagaa

SEQ ID NO: 26878 - DNA, 20 bp, synthetic construct
  source 1..20: mol_type = other DNA
cagctctccaatctgaaggt

SEQ ID NO: 26879 - DNA, 20 bp, synthetic construct
  source 1..20: mol_type = other DNA
acttcttgtgtggtattgtc

SEQ ID NO: 26880 - DNA, 20 bp, synthetic construct
  source 1..20: mol_type = other DNA
atctgtccaaaagagaagac

SEQ ID NO: 26881 - DNA, 20 bp, synthetic construct
  source 1..20: mol_type = other DNA
tgtgctgaaataaagaaaaa

SEQ ID NO: 26882 - DNA, 20 bp, synthetic construct
  source 1..20: mol_type = other DNA
tggtgctgctaaatctcttg

SEQ ID NO: 26883 - DNA, 20 bp, synthetic construct
  source 1..20: mol_type = other DNA
gtaccaggtagtgtttctgc

SEQ ID NO: 26884 - DNA, 20 bp, synthetic construct
  source 1..20: mol_type = other DNA
caagaagttcctggttggca

SEQ ID NO: 26885 - DNA, 20 bp, synthetic construct
  source 1..20: mol_type = other DNA
acccacctgcgactccattc

SEQ ID NO: 26886 - DNA, 20 bp, synthetic construct
  source 1..20: mol_type = other DNA
gtggcagacctacagtgtag

SEQ ID NO: 26887 - DNA, 20 bp, synthetic construct
  source 1..20: mol_type = other DNA
aagttcctggttggcaggga

SEQ ID NO: 26888 - DNA, 20 bp, synthetic construct
  source 1..20: mol_type = other DNA
tggcagggcacaccttgcat

SEQ ID NO: 26889 - DNA, 20 bp, synthetic construct
  source 1..20: mol_type = other DNA
agcgagctcgggagagaagt

SEQ ID NO: 26890 - DNA, 20 bp, synthetic construct
  source 1..20: mol_type = other DNA
acctaaacaggaaaaaacac

SEQ ID NO: 26891 - DNA, 20 bp, synthetic construct
  source 1..20: mol_type = other DNA
acctggctgcgtgtcagaac

SEQ ID NO: 26892 - DNA, 20 bp, synthetic construct
  source 1..20: mol_type = other DNA
tgtggctcccaggcaggggc

SEQ ID NO: 26893 - DNA, 20 bp, synthetic construct
  source 1..20: mol_type = other DNA
agaggaggaggaagatgaag

SEQ ID NO: 26894 - DNA, 20 bp, synthetic construct
  source 1..20: mol_type = other DNA
aggaggtggagaaggagaag

SEQ ID NO: 26895 - DNA, 20 bp, synthetic construct
  source 1..20: mol_type = other DNA
ttacggtgatggtactgaaa

SEQ ID NO: 26896 - DNA, 20 bp, synthetic construct
  source 1..20: mol_type = other DNA
tacctcagccagggtctcgg

SEQ ID NO: 26897 - DNA, 20 bp, synthetic construct
  source 1..20: mol_type = other DNA
cttctgtcgtagaagagaat

SEQ ID NO: 26898 - DNA, 20 bp, synthetic construct
  source 1..20: mol_type = other DNA
ctagggatttacaaggactt

SEQ ID NO: 26899 - DNA, 20 bp, synthetic construct
  source 1..20: mol_type = other DNA
ctggaagagggggctggaag

SEQ ID NO: 26900 - DNA, 20 bp, synthetic construct
  source 1..20: mol_type = other DNA
acaccgctggataaatccag

SEQ ID NO: 26901 - DNA, 20 bp, synthetic construct
  source 1..20: mol_type = other DNA
agaagaatttattgtgtctt

SEQ ID NO: 26902 - DNA, 20 bp, synthetic construct
  source 1..20: mol_type = other DNA
ttctgttacagggacctgtg

SEQ ID NO: 26903 - DNA, 20 bp, synthetic construct
  source 1..20: mol_type = other DNA
tcaccagcatggagtttgtc

SEQ ID NO: 26904 - DNA, 20 bp, synthetic construct
  source 1..20: mol_type = other DNA
gatttaattcatcaagggta

SEQ ID NO: 26905 - DNA, 20 bp, synthetic construct
  source 1..20: mol_type = other DNA
tttcagaaatctgatgtacc

SEQ ID NO: 26906 - DNA, 20 bp, synthetic construct
  source 1..20: mol_type = other DNA
atcatggttgaactatatga

SEQ ID NO: 26907 - DNA, 20 bp, synthetic construct
  source 1..20: mol_type = other DNA
agatggtaggcaactgccaa

SEQ ID NO: 26908 - DNA, 20 bp, synthetic construct
  source 1..20: mol_type = other DNA
atggtcatcatcaaatggaa

SEQ ID NO: 26909 - DNA, 20 bp, synthetic construct
  source 1..20: mol_type = other DNA
tcactttctggctctctcac

SEQ ID NO: 26910 - DNA, 20 bp, synthetic construct
  source 1..20: mol_type = other DNA
ttatctaatatgatgtcaga

SEQ ID NO: 26911 - DNA, 20 bp, synthetic construct
  source 1..20: mol_type = other DNA
ctgcttctaggcaccagaga

SEQ ID NO: 26912 - DNA, 20 bp, synthetic construct
  source 1..20: mol_type = other DNA
cttgggcctgtccccgtcct

SEQ ID NO: 26913 - DNA, 20 bp, synthetic construct
  source 1..20: mol_type = other DNA
tgtgttcataccagacacat

SEQ ID NO: 26914 - DNA, 20 bp, synthetic construct
  source 1..20: mol_type = other DNA
tctccccccacatctcctcc

SEQ ID NO: 26915 - DNA, 20 bp, synthetic construct
  source 1..20: mol_type = other DNA
cctgggaagggaaggagggg

SEQ ID NO: 26916 - DNA, 20 bp, synthetic construct
  source 1..20: mol_type = other DNA
ttcagtttcaccacctggga

SEQ ID NO: 26917 - DNA, 20 bp, synthetic construct
  source 1..20: mol_type = other DNA
cggcacgggctccttcgggc

SEQ ID NO: 26918 - DNA, 20 bp, synthetic construct
  source 1..20: mol_type = other DNA
ctgtttcagtttcaccacct

SEQ ID NO: 26919 - DNA, 20 bp, synthetic construct
  source 1..20: mol_type = other DNA
gtatgaagggagcttccacc

SEQ ID NO: 26920 - DNA, 20 bp, synthetic construct
  source 1..20: mol_type = other DNA
gccgtggactggtgggccct

SEQ ID NO: 26921 - DNA, 20 bp, synthetic construct
  source 1..20: mol_type = other DNA
tttcatagataagaaccccc

SEQ ID NO: 26922 - DNA, 20 bp, synthetic construct
  source 1..20: mol_type = other DNA
aaggctataaatacctcggc

SEQ ID NO: 26923 - DNA, 20 bp, synthetic construct
  source 1..20: mol_type = other DNA
tcagtttcaccacctgggaa

SEQ ID NO: 26924 - DNA, 20 bp, synthetic construct
  source 1..20: mol_type = other DNA
ggccgcgtagaaacgggcat

SEQ ID NO: 26925 - DNA, 20 bp, synthetic construct
  source 1..20: mol_type = other DNA
actatgaggaagaagaaatc

SEQ ID NO: 26926 - DNA, 20 bp, synthetic construct
  source 1..20: mol_type = other DNA
cttgaggttcccaaagcgct

SEQ ID NO: 26927 - DNA, 20 bp, synthetic construct
  source 1..20: mol_type = other DNA
ccacggccttgttgtagccc

SEQ ID NO: 26928 - DNA, 20 bp, synthetic construct
  source 1..20: mol_type = other DNA
gggagatgttctcacaccta

SEQ ID NO: 26929 - DNA, 20 bp, synthetic construct
  source 1..20: mol_type = other DNA
tggtgagatctacctgcagg

SEQ ID NO: 26930 - DNA, 20 bp, synthetic construct
  source 1..20: mol_type = other DNA
acgatatcaagaaccacaag

SEQ ID NO: 26931 - DNA, 20 bp, synthetic construct
  source 1..20: mol_type = other DNA
tcctcgacaaacagaaggtg

SEQ ID NO: 26932 - DNA, 20 bp, synthetic construct
  source 1..20: mol_type = other DNA
gtactcaggggtgccgcaca

SEQ ID NO: 26933 - DNA, 20 bp, synthetic construct
  source 1..20: mol_type = other DNA
ggataattctaatttataca

SEQ ID NO: 26934 - DNA, 20 bp, synthetic construct
  source 1..20: mol_type = other DNA
gtgatataaaaactcacaag

SEQ ID NO: 26935 - DNA, 20 bp, synthetic construct
  source 1..20: mol_type = other DNA
aatagcaatccaatctgtcg

SEQ ID NO: 26936 - DNA, 20 bp, synthetic construct
  source 1..20: mol_type = other DNA
cacctggagaaagcaaagat

SEQ ID NO: 26937 - DNA, 20 bp, synthetic construct
  source 1..20: mol_type = other DNA
acgaggtgctatcagcgctg

SEQ ID NO: 26938 - DNA, 20 bp, synthetic construct
  source 1..20: mol_type = other DNA
tatcagcgctgaggtctaca

SEQ ID NO: 26939 - DNA, 20 bp, synthetic construct
  source 1..20: mol_type = other DNA
ccaagaacacgttcaaatct

SEQ ID NO: 26940 - DNA, 20 bp, synthetic construct
  source 1..20: mol_type = other DNA
ccagcttaacgcacttcaag

SEQ ID NO: 26941 - DNA, 20 bp, synthetic construct
  source 1..20: mol_type = other DNA
taatgagagaaggtaggaac

SEQ ID NO: 26942 - DNA, 20 bp, synthetic construct
  source 1..20: mol_type = other DNA
cgcctcctacctttaaccac

SEQ ID NO: 26943 - DNA, 20 bp, synthetic construct
  source 1..20: mol_type = other DNA
tcgcagagaaccatggagtc

SEQ ID NO: 26944 - DNA, 20 bp, synthetic construct
  source 1..20: mol_type = other DNA
cagcgctgaggtctacacgg

SEQ ID NO: 26945 - DNA, 20 bp, synthetic construct
  source 1..20: mol_type = other DNA
ttcagcaaggtaagggcctc

SEQ ID NO: 26946 - DNA, 20 bp, synthetic construct
  source 1..20: mol_type = other DNA
ccccttcatcacctaaaaga

SEQ ID NO: 26947 - DNA, 20 bp, synthetic construct
  source 1..20: mol_type = other DNA
gggcagaagattgtggtgca

SEQ ID NO: 26948 - DNA, 20 bp, synthetic construct
  source 1..20: mol_type = other DNA
tgctcgacctgagagaccca

SEQ ID NO: 26949 - DNA, 20 bp, synthetic construct
  source 1..20: mol_type = other DNA
cgtttgaggatgtctgagca

SEQ ID NO: 26950 - DNA, 20 bp, synthetic construct
  source 1..20: mol_type = other DNA
tgtggtgcagggagaaccag

SEQ ID NO: 26951 - DNA, 20 bp, synthetic construct
  source 1..20: mol_type = other DNA
agaaggtaaaaataaatgtg

SEQ ID NO: 26952 - DNA, 20 bp, synthetic construct
  source 1..20: mol_type = other DNA
gtccagcttaacgcacttca

SEQ ID NO: 26953 - DNA, 20 bp, synthetic construct
  source 1..20: mol_type = other DNA
cagctatagaagaatcctca

SEQ ID NO: 26954 - DNA, 20 bp, synthetic construct
  source 1..20: mol_type = other DNA
gagaaggtaaaaataaatgt

SEQ ID NO: 26955 - DNA, 20 bp, synthetic construct
  source 1..20: mol_type = other DNA
tgggcaaccagtgttgggga

SEQ ID NO: 26956 - DNA, 20 bp, synthetic construct
  source 1..20: mol_type = other DNA
atatcactgcaaaagagaga

SEQ ID NO: 26957 - DNA, 20 bp, synthetic construct
  source 1..20: mol_type = other DNA
tgggcagaagattgtggtgc

SEQ ID NO: 26958 - DNA, 20 bp, synthetic construct
  source 1..20: mol_type = other DNA
aaccagtgcagtttgaagat

SEQ ID NO: 26959 - DNA, 20 bp, synthetic construct
  source 1..20: mol_type = other DNA
gaacacgttcaaatctaggt

SEQ ID NO: 26960 - DNA, 20 bp, synthetic construct
  source 1..20: mol_type = other DNA
tacataccaaaataatcaga

SEQ ID NO: 26961 - DNA, 20 bp, synthetic construct
  source 1..20: mol_type = other DNA
tcacctggagaaagcaaaga

SEQ ID NO: 26962 - DNA, 20 bp, synthetic construct
  source 1..20: mol_type = other DNA
ggagaaggtaaaaataaatg

SEQ ID NO: 26963 - DNA, 20 bp, synthetic construct
  source 1..20: mol_type = other DNA
tccagcttaacgcacttcaa

SEQ ID NO: 26964 - DNA, 20 bp, synthetic construct
  source 1..20: mol_type = other DNA
tccccttcatcacctaaaag

SEQ ID NO: 26965 - DNA, 20 bp, synthetic construct
  source 1..20: mol_type = other DNA
ataacctagaaaagaactga

SEQ ID NO: 26966 - DNA, 20 bp, synthetic construct
  source 1..20: mol_type = other DNA
caaccagtgttggggaagga

SEQ ID NO: 26967 - DNA, 20 bp, synthetic construct
  source 1..20: mol_type = other DNA
ttaaatcactagaggtaaag

SEQ ID NO: 26968 - DNA, 20 bp, synthetic construct
  source 1..20: mol_type = other DNA
ggacttggaaggtaggctgt

SEQ ID NO: 26969 - DNA, 20 bp, synthetic construct
  source 1..20: mol_type = other DNA
ataatcactcaggtgagtga

SEQ ID NO: 26970 - DNA, 20 bp, synthetic construct
  source 1..20: mol_type = other DNA
tgtttgatttagtctacagc

SEQ ID NO: 26971 - DNA, 20 bp, synthetic construct
  source 1..20: mol_type = other DNA
ccttaccactgtctggaagc

SEQ ID NO: 26972 - DNA, 20 bp, synthetic construct
  source 1..20: mol_type = other DNA
cggatttagtgtggagcgga

SEQ ID NO: 26973 - DNA, 20 bp, synthetic construct
  source 1..20: mol_type = other DNA
tctaacttcagatccctgca

SEQ ID NO: 26974 - DNA, 20 bp, synthetic construct
  source 1..20: mol_type = other DNA
ccacagtgatcgcagaaggt

SEQ ID NO: 26975 - DNA, 20 bp, synthetic construct
  source 1..20: mol_type = other DNA
tagaatctgcaaaagaaaac

SEQ ID NO: 26976 - DNA, 20 bp, synthetic construct
  source 1..20: mol_type = other DNA
aggctgtgagggcagagaga

SEQ ID NO: 26977 - DNA, 20 bp, synthetic construct
  source 1..20: mol_type = other DNA
agaagcgggcggtgaatttg

SEQ ID NO: 26978 - DNA, 20 bp, synthetic construct
  source 1..20: mol_type = other DNA
agggattccagtgccaaggt

SEQ ID NO: 26979 - DNA, 20 bp, synthetic construct
  source 1..20: mol_type = other DNA
cttaaacctgaagggagaca

SEQ ID NO: 26980 - DNA, 20 bp, synthetic construct
  source 1..20: mol_type = other DNA
acatccaggcccacatcgac

SEQ ID NO: 26981 - DNA, 20 bp, synthetic construct
  source 1..20: mol_type = other DNA
tgctgtgaagatcctgaaga

SEQ ID NO: 26982 - DNA, 20 bp, synthetic construct
  source 1..20: mol_type = other DNA
tctgttcttcttacagagta

SEQ ID NO: 26983 - DNA, 20 bp, synthetic construct
  source 1..20: mol_type = other DNA
tcccatgaagtcattcctgc

SEQ ID NO: 26984 - DNA, 20 bp, synthetic construct
  source 1..20: mol_type = other DNA
agactacagtaactttgacc

SEQ ID NO: 26985 - DNA, 20 bp, synthetic construct
  source 1..20: mol_type = other DNA
ccatggtggggcctgcagtg

SEQ ID NO: 26986 - DNA, 20 bp, synthetic construct
  source 1..20: mol_type = other DNA
atctcagcggcataaaacct

SEQ ID NO: 26987 - DNA, 20 bp, synthetic construct
  source 1..20: mol_type = other DNA
taaaacctgggcaagagaga

SEQ ID NO: 26988 - DNA, 20 bp, synthetic construct
  source 1..20: mol_type = other DNA
ccagtgtctgaggtgaccgt

SEQ ID NO: 26989 - DNA, 20 bp, synthetic construct
  source 1..20: mol_type = other DNA
tctggaaggtgcagatgagg

SEQ ID NO: 26990 - DNA, 20 bp, synthetic construct
  source 1..20: mol_type = other DNA
gtggattttggcctgtttga

SEQ ID NO: 26991 - DNA, 20 bp, synthetic construct
  source 1..20: mol_type = other DNA
tgtgtgcacagccccactgc

SEQ ID NO: 26992 - DNA, 20 bp, synthetic construct
  source 1..20: mol_type = other DNA
tatcccaacaggctctgagg

SEQ ID NO: 26993 - DNA, 20 bp, synthetic construct
  source 1..20: mol_type = other DNA
tgccaagaccctggcaggga

SEQ ID NO: 26994 - DNA, 20 bp, synthetic construct
  source 1..20: mol_type = other DNA
ggctccatgaagatgccaca

SEQ ID NO: 26995 - DNA, 20 bp, synthetic construct
  source 1..20: mol_type = other DNA
atgataaaggaatcatctat

SEQ ID NO: 26996 - DNA, 20 bp, synthetic construct
  source 1..20: mol_type = other DNA
cttcagtgaaactcccggta

SEQ ID NO: 26997 - DNA, 20 bp, synthetic construct
  source 1..20: mol_type = other DNA
ctcatgttcctccatgataa

SEQ ID NO: 26998 - DNA, 20 bp, synthetic construct
  source 1..20: mol_type = other DNA
cgtggaagacggccaactcg

SEQ ID NO: 26999 - DNA, 20 bp, synthetic construct
  source 1..20: mol_type = other DNA
cattcagtatggcctcaaag

SEQ ID NO: 27000 - DNA, 20 bp, synthetic construct
  source 1..20: mol_type = other DNA
ctcgaaggtgtccgaggcgc

SEQ ID NO: 27001 - DNA, 20 bp, synthetic construct
  source 1..20: mol_type = other DNA
ggctgcccaagcgcatggtg

SEQ ID NO: 27002 - DNA, 20 bp, synthetic construct
  source 1..20: mol_type = other DNA
cctgcagtgagagcagtagg

SEQ ID NO: 27003 - DNA, 20 bp, synthetic construct
  source 1..20: mol_type = other DNA
ccagtttacagtgaccctcg

SEQ ID NO: 27004 - DNA, 20 bp, synthetic construct
  source 1..20: mol_type = other DNA
catagccctttggcgcttcc

SEQ ID NO: 27005 - DNA, 20 bp, synthetic construct
  source 1..20: mol_type = other DNA
ctccctgcagtgagagcagt

SEQ ID NO: 27006 - DNA, 20 bp, synthetic construct
  source 1..20: mol_type = other DNA
tgctgtgaaggtgctgaaga

SEQ ID NO: 27007 - DNA, 20 bp, synthetic construct
  source 1..20: mol_type = other DNA
aatattgttttggcaagtac

SEQ ID NO: 27008 - DNA, 20 bp, synthetic construct
  source 1..20: mol_type = other DNA
ctcctttccctgtcgtctta

SEQ ID NO: 27009 - DNA, 20 bp, synthetic construct
  source 1..20: mol_type = other DNA
cctggaggatctgtgcaaag

SEQ ID NO: 27010 - DNA, 20 bp, synthetic construct
  source 1..20: mol_type = other DNA
tctcctggacaaggcatccc

SEQ ID NO: 27011 - DNA, 20 bp, synthetic construct
  source 1..20: mol_type = other DNA
tagactttatgagctaaaca

SEQ ID NO: 27012 - DNA, 20 bp, synthetic construct
  source 1..20: mol_type = other DNA
aaagtgctggttgtatctcc

SEQ ID NO: 27013 - DNA, 20 bp, synthetic construct
  source 1..20: mol_type = other DNA
taaccctgaccagaacacag

SEQ ID NO: 27014 - DNA, 20 bp, synthetic construct
  source 1..20: mol_type = other DNA
caatcaacatttcggaagaa

SEQ ID NO: 27015 - DNA, 20 bp, synthetic construct
  source 1..20: mol_type = other DNA
agaaggtggcagtgaactcg

SEQ ID NO: 27016 - DNA, 20 bp, synthetic construct
  source 1..20: mol_type = other DNA
cagtgccgacgtaagtaaga

SEQ ID NO: 27017 - DNA, 20 bp, synthetic construct
  source 1..20: mol_type = other DNA
acactgtgggaccctgctgt

SEQ ID NO: 27018 - DNA, 20 bp, synthetic construct
  source 1..20: mol_type = other DNA
acagagcaaaatgtgggctg

SEQ ID NO: 27019 - DNA, 20 bp, synthetic construct
  source 1..20: mol_type = other DNA
aaaagttcctgaacatattc

SEQ ID NO: 27020 - DNA, 20 bp, synthetic construct
  source 1..20: mol_type = other DNA
cacagtgttcacagaaggtc

SEQ ID NO: 27021 - DNA, 20 bp, synthetic construct
  source 1..20: mol_type = other DNA
actgaacagatcttcagaga

SEQ ID NO: 27022 - DNA, 20 bp, synthetic construct
  source 1..20: mol_type = other DNA
cgcttcttaccttcaccaga

SEQ ID NO: 27023 - DNA, 20 bp, synthetic construct
  source 1..20: mol_type = other DNA
cagttgatctcccgaaacaa

SEQ ID NO: 27024 - DNA, 20 bp, synthetic construct
  source 1..20: mol_type = other DNA
ccagtgccgacgtaagtaag

SEQ ID NO: 27025 - DNA, 20 bp, synthetic construct
  source 1..20: mol_type = other DNA
gagctgaaagggagcagagc

SEQ ID NO: 27026 - DNA, 20 bp, synthetic construct
  source 1..20: mol_type = other DNA
gtgatggagtacctcaacgg

SEQ ID NO: 27027 - DNA, 20 bp, synthetic construct
  source 1..20: mol_type = other DNA
gaggctctgaaaatgcaagc

SEQ ID NO: 27028 - DNA, 20 bp, synthetic construct
  source 1..20: mol_type = other DNA
gatttcagcagcataaaacc

SEQ ID NO: 27029 - DNA, 20 bp, synthetic construct
  source 1..20: mol_type = other DNA
gcttctggtttatgccacaa

SEQ ID NO: 27030 - DNA, 20 bp, synthetic construct
  source 1..20: mol_type = other DNA
cgaccttctgtgaacactgt

SEQ ID NO: 27031 - DNA, 20 bp, synthetic construct
  source 1..20: mol_type = other DNA
ttcataaaggagaaccccga

SEQ ID NO: 27032 - DNA, 20 bp, synthetic construct
  source 1..20: mol_type = other DNA
gactacatcgccccagaggt

SEQ ID NO: 27033 - DNA, 20 bp, synthetic construct
  source 1..20: mol_type = other DNA
ccaggaagacctagaaggag

SEQ ID NO: 27034 - DNA, 20 bp, synthetic construct
  source 1..20: mol_type = other DNA
tgaactcgtggcacttgacg

SEQ ID NO: 27035 - DNA, 20 bp, synthetic construct
  source 1..20: mol_type = other DNA
tgtggactggtggtccttcg

SEQ ID NO: 27036 - DNA, 20 bp, synthetic construct
  source 1..20: mol_type = other DNA
ttcagcagcataaaacctgg

SEQ ID NO: 27037 - DNA, 20 bp, synthetic construct
  source 1..20: mol_type = other DNA
tgacgagcacagcacagtaa

SEQ ID NO: 27038 - DNA, 20 bp, synthetic construct
  source 1..20: mol_type = other DNA
gagtccttaccactttcggc

SEQ ID NO: 27039 - DNA, 20 bp, synthetic construct
  source 1..20: mol_type = other DNA
cactgtgggaccctgctgtg

SEQ ID NO: 27040 - DNA, 20 bp, synthetic construct
  source 1..20: mol_type = other DNA
agccagcgagtagagctcca

SEQ ID NO: 27041 - DNA, 20 bp, synthetic construct
  source 1..20: mol_type = other DNA
aggaccaccagtccacagag

SEQ ID NO: 27042 - DNA, 20 bp, synthetic construct
  source 1..20: mol_type = other DNA
tcagtcgcctttccacgggc

SEQ ID NO: 27043 - DNA, 20 bp, synthetic construct
  source 1..20: mol_type = other DNA
gttttgtacattccagacca

SEQ ID NO: 27044 - DNA, 20 bp, synthetic construct
  source 1..20: mol_type = other DNA
cactgacttgctgaggggag

SEQ ID NO: 27045 - DNA, 20 bp, synthetic construct
  source 1..20: mol_type = other DNA
aggtttcagctctaactggt

SEQ ID NO: 27046 - DNA, 20 bp, synthetic construct
  source 1..20: mol_type = other DNA
ccacagtgttcacagaaggt

SEQ ID NO: 27047 - DNA, 20 bp, synthetic construct
  source 1..20: mol_type = other DNA
actcgctggctgagaggtgc

SEQ ID NO: 27048 - DNA, 20 bp, synthetic construct
  source 1..20: mol_type = other DNA
cgtcagaaacggatgctccc

SEQ ID NO: 27049 - DNA, 20 bp, synthetic construct
  source 1..20: mol_type = other DNA
caggaagacctagaaggaga

SEQ ID NO: 27050 - DNA, 20 bp, synthetic construct
  source 1..20: mol_type = other DNA
ggaactgaaagaaaggcaga

SEQ ID NO: 27051 - DNA, 20 bp, synthetic construct
  source 1..20: mol_type = other DNA
acattaagtcccctccgttg

SEQ ID NO: 27052 - DNA, 20 bp, synthetic construct
  source 1..20: mol_type = other DNA
tgcacattcatgccacatgc

SEQ ID NO: 27053 - DNA, 20 bp, synthetic construct
  source 1..20: mol_type = other DNA
tcccagggtgggtacatggt

SEQ ID NO: 27054 - DNA, 20 bp, synthetic construct
  source 1..20: mol_type = other DNA
tggcagacagagcaaaatgt

SEQ ID NO: 27055 - DNA, 20 bp, synthetic construct
  source 1..20: mol_type = other DNA
agctctaactggttgggaga

SEQ ID NO: 27056 - DNA, 20 bp, synthetic construct
  source 1..20: mol_type = other DNA
cccacagaaggtattcgtct

SEQ ID NO: 27057 - DNA, 20 bp, synthetic construct
  source 1..20: mol_type = other DNA
ccactttcggccggaacggt

SEQ ID NO: 27058 - DNA, 20 bp, synthetic construct
  source 1..20: mol_type = other DNA
ttacctgtagactattcctt

SEQ ID NO: 27059 - DNA, 20 bp, synthetic construct
  source 1..20: mol_type = other DNA
tggcaaggtaagctaatgca

SEQ ID NO: 27060 - DNA, 20 bp, synthetic construct
  source 1..20: mol_type = other DNA
tcgtgcgagaacctgagaag

SEQ ID NO: 27061 - DNA, 20 bp, synthetic construct
  source 1..20: mol_type = other DNA
attgagagcactcaacaggt

SEQ ID NO: 27062 - DNA, 20 bp, synthetic construct
  source 1..20: mol_type = other DNA
cggcaaggactcaagtgtga

SEQ ID NO: 27063 - DNA, 20 bp, synthetic construct
  source 1..20: mol_type = other DNA
ggtttcagctctaactggtt

SEQ ID NO: 27064 - DNA, 20 bp, synthetic construct
  source 1..20: mol_type = other DNA
ggtcccacagtgttcacaga

SEQ ID NO: 27065 - DNA, 20 bp, synthetic construct
  source 1..20: mol_type = other DNA
cccaccgttccggccgaaag

SEQ ID NO: 27066 - DNA, 20 bp, synthetic construct
  source 1..20: mol_type = other DNA
tcatagatgccagacaaagg

SEQ ID NO: 27067 - DNA, 20 bp, synthetic construct
  source 1..20: mol_type = other DNA
gagaagaggctgggcgtgag

SEQ ID NO: 27068 - DNA, 20 bp, synthetic construct
  source 1..20: mol_type = other DNA
tacaggggcctgaacaaaca

SEQ ID NO: 27069 - DNA, 20 bp, synthetic construct
  source 1..20: mol_type = other DNA
gcgagaacctgagaagaggc

SEQ ID NO: 27070 - DNA, 20 bp, synthetic construct
  source 1..20: mol_type = other DNA
accactttcggccggaacgg

SEQ ID NO: 27071 - DNA, 20 bp, synthetic construct
  source 1..20: mol_type = other DNA
tgggaccctgctgtggggac

SEQ ID NO: 27072 - DNA, 20 bp, synthetic construct
  source 1..20: mol_type = other DNA
caaaagtgctgtcccagggt

SEQ ID NO: 27073 - DNA, 20 bp, synthetic construct
  source 1..20: mol_type = other DNA
acaggtaggagcatgtgccg

SEQ ID NO: 27074 - DNA, 20 bp, synthetic construct
  source 1..20: mol_type = other DNA
ttctgccaggaagacctaga

SEQ ID NO: 27075 - DNA, 20 bp, synthetic construct
  source 1..20: mol_type = other DNA
aacttttccttcatgaaccc

SEQ ID NO: 27076 - DNA, 20 bp, synthetic construct
  source 1..20: mol_type = other DNA
gctcttccactccatccgca

SEQ ID NO: 27077 - DNA, 20 bp, synthetic construct
  source 1..20: mol_type = other DNA
aaagaaagatgtggtcttga

SEQ ID NO: 27078 - DNA, 20 bp, synthetic construct
  source 1..20: mol_type = other DNA
tatcaatagccgagaaacca

SEQ ID NO: 27079 - DNA, 20 bp, synthetic construct
  source 1..20: mol_type = other DNA
gcagcataaaacctggggga

SEQ ID NO: 27080 - DNA, 20 bp, synthetic construct
  source 1..20: mol_type = other DNA
gatggagtacctcaacggag

SEQ ID NO: 27081 - DNA, 20 bp, synthetic construct
  source 1..20: mol_type = other DNA
cttccttctccagccaccgt

SEQ ID NO: 27082 - DNA, 20 bp, synthetic construct
  source 1..20: mol_type = other DNA
ttgtgtctacaggaagagag

SEQ ID NO: 27083 - DNA, 20 bp, synthetic construct
  source 1..20: mol_type = other DNA
gcaagatctgcacaaccaaa

SEQ ID NO: 27084 - DNA, 20 bp, synthetic construct
  source 1..20: mol_type = other DNA
gcgccggggtgccatcaagc

SEQ ID NO: 27085 - DNA, 20 bp, synthetic construct
  source 1..20: mol_type = other DNA
cttaccactttcggccggaa

SEQ ID NO: 27086 - DNA, 20 bp, synthetic construct
  source 1..20: mol_type = other DNA
agatactttctggaaatgag

SEQ ID NO: 27087 - DNA, 20 bp, synthetic construct
  source 1..20: mol_type = other DNA
tactgtaccagacaaactcg

SEQ ID NO: 27088 - DNA, 20 bp, synthetic construct
  source 1..20: mol_type = other DNA
aaatgtgggctgtgggaaga

SEQ ID NO: 27089 - DNA, 20 bp, synthetic construct
  source 1..20: mol_type = other DNA
ggtaaaagggattgtccatg

SEQ ID NO: 27090 - DNA, 20 bp, synthetic construct
  source 1..20: mol_type = other DNA
cagagcaaaatgtgggctgt

SEQ ID NO: 27091 - DNA, 20 bp, synthetic construct
  source 1..20: mol_type = other DNA
ttacaggggcctgaacaaac

SEQ ID NO: 27092 - DNA, 20 bp, synthetic construct
  source 1..20: mol_type = other DNA
gaccaatcagcatttcataa

SEQ ID NO: 27093 - DNA, 20 bp, synthetic construct
  source 1..20: mol_type = other DNA
cttgaggtttcagctctaac

SEQ ID NO: 27094 - DNA, 20 bp, synthetic construct
  source 1..20: mol_type = other DNA
ctgcagttccttcattccaa

SEQ ID NO: 27095 - DNA, 20 bp, synthetic construct
  source 1..20: mol_type = other DNA
gctgttgatcagtgctctgt

SEQ ID NO: 27096 - DNA, 20 bp, synthetic construct
  source 1..20: mol_type = other DNA
gcatcatagatgccagacaa

SEQ ID NO: 27097 - DNA, 20 bp, synthetic construct
  source 1..20: mol_type = other DNA
acttttccttcatgaacccc

SEQ ID NO: 27098 - DNA, 20 bp, synthetic construct
  source 1..20: mol_type = other DNA
gacaagccaatccgaagaaa

SEQ ID NO: 27099 - DNA, 20 bp, synthetic construct
  source 1..20: mol_type = other DNA
ccgtgccagtccccacagca

SEQ ID NO: 27100 - DNA, 20 bp, synthetic construct
  source 1..20: mol_type = other DNA
cgttccggccgaaagtggta

SEQ ID NO: 27101 - DNA, 20 bp, synthetic construct
  source 1..20: mol_type = other DNA
atttcagcagcataaaacct

SEQ ID NO: 27102 - DNA, 20 bp, synthetic construct
  source 1..20: mol_type = other DNA
gctctgaaaatgcaagctgg

SEQ ID NO: 27103 - DNA, 20 bp, synthetic construct
  source 1..20: mol_type = other DNA
tgagaagaggctgggcgtga

SEQ ID NO: 27104 - DNA, 20 bp, synthetic construct
  source 1..20: mol_type = other DNA
attggtcagtcgcctttcca

SEQ ID NO: 27105 - DNA, 20 bp, synthetic construct
  source 1..20: mol_type = other DNA
gtggcagacagagcaaaatg

SEQ ID NO: 27106 - DNA, 20 bp, synthetic construct
  source 1..20: mol_type = other DNA
acaggatgttatctagcttc

SEQ ID NO: 27107 - DNA, 20 bp, synthetic construct
  source 1..20: mol_type = other DNA
gactcccaggaaatgccctg

SEQ ID NO: 27108 - DNA, 20 bp, synthetic construct
  source 1..20: mol_type = other DNA
agctctactcgctggctgag

SEQ ID NO: 27109 - DNA, 20 bp, synthetic construct
  source 1..20: mol_type = other DNA
ttcattagcattcggccttg

SEQ ID NO: 27110 - DNA, 20 bp, synthetic construct
  source 1..20: mol_type = other DNA
aacactgtgggaccctgctg

SEQ ID NO: 27111 - DNA, 20 bp, synthetic construct
  source 1..20: mol_type = other DNA
cattcatgccacatgctgga

SEQ ID NO: 27112 - DNA, 20 bp, synthetic construct
  source 1..20: mol_type = other DNA
aatacaaccactctgtggac

SEQ ID NO: 27113 - DNA, 20 bp, synthetic construct
  source 1..20: mol_type = other DNA
agaggtaggaatgcagtgac

SEQ ID NO: 27114 - DNA, 20 bp, synthetic construct
  source 1..20: mol_type = other DNA
ttgacgagcacagcacagta

SEQ ID NO: 27115 - DNA, 20 bp, synthetic construct
  source 1..20: mol_type = other DNA
gccgtgccagtccccacagc

SEQ ID NO: 27116 - DNA, 20 bp, synthetic construct
  source 1..20: mol_type = other DNA
ctctggaaaggtcgaacttg

SEQ ID NO: 27117 - DNA, 20 bp, synthetic construct
  source 1..20: mol_type = other DNA
ccacggtggtttcagagatg

SEQ ID NO: 27118 - DNA, 20 bp, synthetic construct
  source 1..20: mol_type = other DNA
cagcgagtagagctccacgg

SEQ ID NO: 27119 - DNA, 20 bp, synthetic construct
  source 1..20: mol_type = other DNA
tcagaaatacaaccactctg

SEQ ID NO: 27120 - DNA, 20 bp, synthetic construct
  source 1..20: mol_type = other DNA
tcctcatcctgcccgtggaa

SEQ ID NO: 27121 - DNA, 20 bp, synthetic construct
  source 1..20: mol_type = other DNA
ttacccacggtggctggaga

SEQ ID NO: 27122 - DNA, 20 bp, synthetic construct
  source 1..20: mol_type = other DNA
caccgtggagctctactcgc

SEQ ID NO: 27123 - DNA, 20 bp, synthetic construct
  source 1..20: mol_type = other DNA
ctggtttatgccacaaaggt

SEQ ID NO: 27124 - DNA, 20 bp, synthetic construct
  source 1..20: mol_type = other DNA
cctcttacgtcgctctggaa

SEQ ID NO: 27125 - DNA, 20 bp, synthetic construct
  source 1..20: mol_type = other DNA
acagatcttcagagaaggtc

SEQ ID NO: 27126 - DNA, 20 bp, synthetic construct
  source 1..20: mol_type = other DNA
cctttccagagcgacgtaag

SEQ ID NO: 27127 - DNA, 20 bp, synthetic construct
  source 1..20: mol_type = other DNA
gctgtcccagggtgggtaca

SEQ ID NO: 27128 - DNA, 20 bp, synthetic construct
  source 1..20: mol_type = other DNA
agcaaaggaccttctggtga

SEQ ID NO: 27129 - DNA, 20 bp, synthetic construct
  source 1..20: mol_type = other DNA
ggtcgaacttgtggcagctt

SEQ ID NO: 27130 - DNA, 20 bp, synthetic construct
  source 1..20: mol_type = other DNA
tttcagcagcataaaacctg

SEQ ID NO: 27131 - DNA, 20 bp, synthetic construct
  source 1..20: mol_type = other DNA
ctacctctttttcccggtgt

SEQ ID NO: 27132 - DNA, 20 bp, synthetic construct
  source 1..20: mol_type = other DNA
cagttagagctgaaacctca

SEQ ID NO: 27133 - DNA, 20 bp, synthetic construct
  source 1..20: mol_type = other DNA
atcttgcattcattagcatt

SEQ ID NO: 27134 - DNA, 20 bp, synthetic construct
  source 1..20: mol_type = other DNA
gagaggtgcaggaagaacaa

SEQ ID NO: 27135 - DNA, 20 bp, synthetic construct
  source 1..20: mol_type = other DNA
ctgagaagaggctgggcgtg

SEQ ID NO: 27136 - DNA, 20 bp, synthetic construct
  source 1..20: mol_type = other DNA
ggcaaggtaagctaatgcac

SEQ ID NO: 27137 - DNA, 20 bp, synthetic construct
  source 1..20: mol_type = other DNA
gtacattccagaccaaggta

SEQ ID NO: 27138 - DNA, 20 bp, synthetic construct
  source 1..20: mol_type = other DNA
cctcttacttacgtcggcac

SEQ ID NO: 27139 - DNA, 20 bp, synthetic construct
  source 1..20: mol_type = other DNA
ccgaccttctgtgaacactg

SEQ ID NO: 27140 - DNA, 20 bp, synthetic construct
  source 1..20: mol_type = other DNA
gccacatgctggaaggaaga

SEQ ID NO: 27141 - DNA, 20 bp, synthetic construct
  source 1..20: mol_type = other DNA
ctgttgagtgctctcaatca

SEQ ID NO: 27142 - DNA, 20 bp, synthetic construct
  source 1..20: mol_type = other DNA
gtagtcaggtgtcccacaga

SEQ ID NO: 27143 - DNA, 20 bp, synthetic construct
  source 1..20: mol_type = other DNA
cccgaaacaaagggtgctgg

SEQ ID NO: 27144 - DNA, 20 bp, synthetic construct
  source 1..20: mol_type = other DNA
gcttccttctccagccaccg

SEQ ID NO: 27145 - DNA, 20 bp, synthetic construct
  source 1..20: mol_type = other DNA
agacaggagagagcaggggc

SEQ ID NO: 27146 - DNA, 20 bp, synthetic construct
  source 1..20: mol_type = other DNA
tctggttggggagcaggctc

SEQ ID NO: 27147 - DNA, 20 bp, synthetic construct
  source 1..20: mol_type = other DNA
acaatattgatgatgtagta

SEQ ID NO: 27148 - DNA, 20 bp, synthetic construct
  source 1..20: mol_type = other DNA
tttgtgaagatcttgaccaa

SEQ ID NO: 27149 - DNA, 20 bp, synthetic construct
  source 1..20: mol_type = other DNA
gtaaatacattcttcatacc

SEQ ID NO: 27150 - DNA, 20 bp, synthetic construct
  source 1..20: mol_type = other DNA
aatcccatagcaataatgtt

SEQ ID NO: 27151 - DNA, 20 bp, synthetic construct
  source 1..20: mol_type = other DNA
tcatcaaaaggttcattctc

SEQ ID NO: 27152 - DNA, 20 bp, synthetic construct
  source 1..20: mol_type = other DNA
atatctgagtactttagtta

SEQ ID NO: 27153 - DNA, 20 bp, synthetic construct
  source 1..20: mol_type = other DNA
aaaaggatattgtgcaactg

SEQ ID NO: 27154 - DNA, 20 bp, synthetic construct
  source 1..20: mol_type = other DNA
caagttccgccactgaacat

SEQ ID NO: 27155 - DNA, 20 bp, synthetic construct
  source 1..20: mol_type = other DNA
aatccagatgattctttaac

SEQ ID NO: 27156 - DNA, 20 bp, synthetic construct
  source 1..20: mol_type = other DNA
tcatctggattatagaccag

SEQ ID NO: 27157 - DNA, 20 bp, synthetic construct
  source 1..20: mol_type = other DNA
ccacaaactgaggatctgca

SEQ ID NO: 27158 - DNA, 20 bp, synthetic construct
  source 1..20: mol_type = other DNA
ttgatgatggctgtcatgtc

SEQ ID NO: 27159 - DNA, 20 bp, synthetic construct
  source 1..20: mol_type = other DNA
actattccaatgttcagtgg

SEQ ID NO: 27160 - DNA, 20 bp, synthetic construct
  source 1..20: mol_type = other DNA
ccaaatttaattgcagaggt

SEQ ID NO: 27161 - DNA, 20 bp, synthetic construct
  source 1..20: mol_type = other DNA
agcagccagaggcctggcag

SEQ ID NO: 27162 - DNA, 20 bp, synthetic construct
  source 1..20: mol_type = other DNA
ttgataagttctagctgtgg

SEQ ID NO: 27163 - DNA, 20 bp, synthetic construct
  source 1..20: mol_type = other DNA
tgggaatagttactccctgg

SEQ ID NO: 27164 - DNA, 20 bp, synthetic construct
  source 1..20: mol_type = other DNA
ccaattcaggacccacacga

SEQ ID NO: 27165 - DNA, 20 bp, synthetic construct
  source 1..20: mol_type = other DNA
tgtcatcttcacttagccat

SEQ ID NO: 27166 - DNA, 20 bp, synthetic construct
  source 1..20: mol_type = other DNA
aagaaaaaggaggagagaga

SEQ ID NO: 27167 - DNA, 20 bp, synthetic construct
  source 1..20: mol_type = other DNA
ccgtcgtgtgggtcctgaat

SEQ ID NO: 27168 - DNA, 20 bp, synthetic construct
  source 1..20: mol_type = other DNA
agaggccctagatttctatg

SEQ ID NO: 27169 - DNA, 20 bp, synthetic construct
  source 1..20: mol_type = other DNA
agatcgttagcagaaacaaa

SEQ ID NO: 27170 - DNA, 20 bp, synthetic construct
  source 1..20: mol_type = other DNA
gagtaactattcccagtcag

SEQ ID NO: 27171 - DNA, 20 bp, synthetic construct
  source 1..20: mol_type = other DNA
gaaactattccaatgttcag

SEQ ID NO: 27172 - DNA, 20 bp, synthetic construct
  source 1..20: mol_type = other DNA
tagatttctatggggaagta

SEQ ID NO: 27173 - DNA, 20 bp, synthetic construct
  source 1..20: mol_type = other DNA
tgatgatggctgtcatgtct

SEQ ID NO: 27174 - DNA, 20 bp, synthetic construct
  source 1..20: mol_type = other DNA
tttcctgcagaaagacttga

SEQ ID NO: 27175 - DNA, 20 bp, synthetic construct
  source 1..20: mol_type = other DNA
ccatgcagatcctcagtttg

SEQ ID NO: 27176 - DNA, 20 bp, synthetic construct
  source 1..20: mol_type = other DNA
ttagcatcttgttctgtttg

SEQ ID NO: 27177 - DNA, 20 bp, synthetic construct
  source 1..20: mol_type = other DNA
ttgtgaaacaacagtgccac

SEQ ID NO: 27178 - DNA, 20 bp, synthetic construct
  source 1..20: mol_type = other DNA
aaagctggaaagggacgaac

SEQ ID NO: 27179 - DNA, 20 bp, synthetic construct
  source 1..20: mol_type = other DNA
gcagcaattcactgtaaagc

SEQ ID NO: 27180 - DNA, 20 bp, synthetic construct
  source 1..20: mol_type = other DNA
tggtcaagatcttcacaaaa

SEQ ID NO: 27181 - DNA, 20 bp, synthetic construct
  source 1..20: mol_type = other DNA
tgtgcatatttattacatcg

SEQ ID NO: 27182 - DNA, 20 bp, synthetic construct
  source 1..20: mol_type = other DNA
tacttccccatagaaatcta

SEQ ID NO: 27183 - DNA, 20 bp, synthetic construct
  source 1..20: mol_type = other DNA
agtaaggaccagagacaaaa

SEQ ID NO: 27184 - DNA, 20 bp, synthetic construct
  source 1..20: mol_type = other DNA
cctacctctgcaattaaatt

SEQ ID NO: 27185 - DNA, 20 bp, synthetic construct
  source 1..20: mol_type = other DNA
gttctagctgtggtgggtta

SEQ ID NO: 27186 - DNA, 20 bp, synthetic construct
  source 1..20: mol_type = other DNA
gaacttgtcttcccgtcgtg

SEQ ID NO: 27187 - DNA, 20 bp, synthetic construct
  source 1..20: mol_type = other DNA
cacacacaggtaacggctga

SEQ ID NO: 27188 - DNA, 20 bp, synthetic construct
  source 1..20: mol_type = other DNA
gtacttcacaaaaacagtag

SEQ ID NO: 27189 - DNA, 20 bp, synthetic construct
  source 1..20: mol_type = other DNA
accgccaaatttaattgcag

SEQ ID NO: 27190 - DNA, 20 bp, synthetic construct
  source 1..20: mol_type = other DNA
actttgatatcaccacacac

SEQ ID NO: 27191 - DNA, 20 bp, synthetic construct
  source 1..20: mol_type = other DNA
agaggagccgtcaaatccag

SEQ ID NO: 27192 - DNA, 20 bp, synthetic construct
  source 1..20: mol_type = other DNA
tacacatagcgcctctgact

SEQ ID NO: 27193 - DNA, 20 bp, synthetic construct
  source 1..20: mol_type = other DNA
ttacttccccatagaaatct

SEQ ID NO: 27194 - DNA, 20 bp, synthetic construct
  source 1..20: mol_type = other DNA
tgataagttctagctgtggt

SEQ ID NO: 27195 - DNA, 20 bp, synthetic construct
  source 1..20: mol_type = other DNA
aatatatcttcacctttagc

SEQ ID NO: 27196 - DNA, 20 bp, synthetic construct
  source 1..20: mol_type = other DNA
ccacacacaggtaacggctg

SEQ ID NO: 27197 - DNA, 20 bp, synthetic construct
  source 1..20: mol_type = other DNA
ctgtcatgtctgggagcctg

SEQ ID NO: 27198 - DNA, 20 bp, synthetic construct
  source 1..20: mol_type = other DNA
atacacatagcgcctctgac

SEQ ID NO: 27199 - DNA, 20 bp, synthetic construct
  source 1..20: mol_type = other DNA
caattcaggacccacacgac

SEQ ID NO: 27200 - DNA, 20 bp, synthetic construct
  source 1..20: mol_type = other DNA
aaaaggagatatcaagagga

SEQ ID NO: 27201 - DNA, 20 bp, synthetic construct
  source 1..20: mol_type = other DNA
aaacaaaaggagatatcaag

SEQ ID NO: 27202 - DNA, 20 bp, synthetic construct
  source 1..20: mol_type = other DNA
gctaacgatctctttgatga

SEQ ID NO: 27203 - DNA, 20 bp, synthetic construct
  source 1..20: mol_type = other DNA
tcgtgtgggtcctgaattgg

SEQ ID NO: 27204 - DNA, 20 bp, synthetic construct
  source 1..20: mol_type = other DNA
atatcaccacacacaggtaa

SEQ ID NO: 27205 - DNA, 20 bp, synthetic construct
  source 1..20: mol_type = other DNA
acagaacaagatgctaaaaa

SEQ ID NO: 27206 - DNA, 20 bp, synthetic construct
  source 1..20: mol_type = other DNA
acgccttcaagtctttctgc

SEQ ID NO: 27207 - DNA, 20 bp, synthetic construct
  source 1..20: mol_type = other DNA
aattcactgtaaagctggaa

SEQ ID NO: 27208 - DNA, 20 bp, synthetic construct
  source 1..20: mol_type = other DNA
attcactgtaaagctggaaa

SEQ ID NO: 27209 - DNA, 20 bp, synthetic construct
  source 1..20: mol_type = other DNA
ggtttgataagttctagctg

SEQ ID NO: 27210 - DNA, 20 bp, synthetic construct
  source 1..20: mol_type = other DNA
gactgggaatagttactccc

SEQ ID NO: 27211 - DNA, 20 bp, synthetic construct
  source 1..20: mol_type = other DNA
ttgacctgtatccatttctg

SEQ ID NO: 27212 - DNA, 20 bp, synthetic construct
  source 1..20: mol_type = other DNA
acagattgtatatcttgtaa

SEQ ID NO: 27213 - DNA, 20 bp, synthetic construct
  source 1..20: mol_type = other DNA
acctctgcaattaaatttgg

SEQ ID NO: 27214 - DNA, 20 bp, synthetic construct
  source 1..20: mol_type = other DNA
agccagaggcctggcagcgg

SEQ ID NO: 27215 - DNA, 20 bp, synthetic construct
  source 1..20: mol_type = other DNA
cctcagccgttacctgtgtg

SEQ ID NO: 27216 - DNA, 20 bp, synthetic construct
  source 1..20: mol_type = other DNA
ttggtcaagatcttcacaaa

SEQ ID NO: 27217 - DNA, 20 bp, synthetic construct
  source 1..20: mol_type = other DNA
gtttgtggtctgccagctaa

SEQ ID NO: 27218 - DNA, 20 bp, synthetic construct
  source 1..20: mol_type = other DNA
gtgcattgtgttgcaggatt

SEQ ID NO: 27219 - DNA, 20 bp, synthetic construct
  source 1..20: mol_type = other DNA
taggagatctccacaggggc

SEQ ID NO: 27220 - DNA, 20 bp, synthetic construct
  source 1..20: mol_type = other DNA
agtgcattgtgttgcaggat

SEQ ID NO: 27221 - DNA, 20 bp, synthetic construct
  source 1..20: mol_type = other DNA
agatctccacaggggctgga

SEQ ID NO: 27222 - DNA, 20 bp, synthetic construct
  source 1..20: mol_type = other DNA
gcactgcagtgcaccacaac

SEQ ID NO: 27223 - DNA, 20 bp, synthetic construct
  source 1..20: mol_type = other DNA
gtcacttttgggagatggtg

SEQ ID NO: 27224 - DNA, 20 bp, synthetic construct
  source 1..20: mol_type = other DNA
cgtcatgctcaacagagtga

SEQ ID NO: 27225 - DNA, 20 bp, synthetic construct
  source 1..20: mol_type = other DNA
caggtctggaaccttctgtc

SEQ ID NO: 27226 - DNA, 20 bp, synthetic construct
  source 1..20: mol_type = other DNA
gtaaatggccgcccagctcc

SEQ ID NO: 27227 - DNA, 20 bp, synthetic construct
  source 1..20: mol_type = other DNA
tattacctttcgatgccgta

SEQ ID NO: 27228 - DNA, 20 bp, synthetic construct
  source 1..20: mol_type = other DNA
gttagaagtcgggtcgtggg

SEQ ID NO: 27229 - DNA, 20 bp, synthetic construct
  source 1..20: mol_type = other DNA
gctggtaaggaggccctcgc

SEQ ID NO: 27230 - DNA, 20 bp, synthetic construct
  source 1..20: mol_type = other DNA
aggtgccaaattcatcatgg

SEQ ID NO: 27231 - DNA, 20 bp, synthetic construct
  source 1..20: mol_type = other DNA
gatgtagtttaatccgacta

SEQ ID NO: 27232 - DNA, 20 bp, synthetic construct
  source 1..20: mol_type = other DNA
gtgtgggagcagaaaagcag

SEQ ID NO: 27233 - DNA, 20 bp, synthetic construct
  source 1..20: mol_type = other DNA
tgtccatctgaaagccagag

SEQ ID NO: 27234 - DNA, 20 bp, synthetic construct
  source 1..20: mol_type = other DNA
aagttagaagtcgggtcgtg

SEQ ID NO: 27235 - DNA, 20 bp, synthetic construct
  source 1..20: mol_type = other DNA
gaagttagaagtcgggtcgt

SEQ ID NO: 27236 - DNA, 20 bp, synthetic construct
  source 1..20: mol_type = other DNA
agaaatgaggaagtttcgga

SEQ ID NO: 27237 - DNA, 20 bp, synthetic construct
  source 1..20: mol_type = other DNA
agtccctgtaagtatccacg

SEQ ID NO: 27238 - DNA, 20 bp, synthetic construct
  source 1..20: mol_type = other DNA
tacatttccactataccaca

SEQ ID NO: 27239 - DNA, 20 bp, synthetic construct
  source 1..20: mol_type = other DNA
gcaggtatcagccagacaga

SEQ ID NO: 27240 - DNA, 20 bp, synthetic construct
  source 1..20: mol_type = other DNA
gactccaaagtcaggccatg

SEQ ID NO: 27241 - DNA, 20 bp, synthetic construct
  source 1..20: mol_type = other DNA
ccgcaccctacggcatcgaa

SEQ ID NO: 27242 - DNA, 20 bp, synthetic construct
  source 1..20: mol_type = other DNA
tgaagttagaagtcgggtcg

SEQ ID NO: 27243 - DNA, 20 bp, synthetic construct
  source 1..20: mol_type = other DNA
gtgcactgcagtgcaggcat

SEQ ID NO: 27244 - DNA, 20 bp, synthetic construct
  source 1..20: mol_type = other DNA
actgcagtgcaggcatcggc

SEQ ID NO: 27245 - DNA, 20 bp, synthetic construct
  source 1..20: mol_type = other DNA
agaatgaggctggtgattca

SEQ ID NO: 27246 - DNA, 20 bp, synthetic construct
  source 1..20: mol_type = other DNA
gtaggagaagcgcagctggt

SEQ ID NO: 27247 - DNA, 20 bp, synthetic construct
  source 1..20: mol_type = other DNA
tcgagcagatcgacaagtcc

SEQ ID NO: 27248 - DNA, 20 bp, synthetic construct
  source 1..20: mol_type = other DNA
atattacctttcgatgccgt

SEQ ID NO: 27249 - DNA, 20 bp, synthetic construct
  source 1..20: mol_type = other DNA
gcttccagtaactcagtgca

SEQ ID NO: 27250 - DNA, 20 bp, synthetic construct
  source 1..20: mol_type = other DNA
ccaggtaggagaagcgcagc

SEQ ID NO: 27251 - DNA, 20 bp, synthetic construct
  source 1..20: mol_type = other DNA
agttagaagtcgggtcgtgg

SEQ ID NO: 27252 - DNA, 20 bp, synthetic construct
  source 1..20: mol_type = other DNA
ggccctttgcctaacacatg

SEQ ID NO: 27253 - DNA, 20 bp, synthetic construct
  source 1..20: mol_type = other DNA
acttctctacagccgaaaag

SEQ ID NO: 27254 - DNA, 20 bp, synthetic construct
  source 1..20: mol_type = other DNA
ctggaccaactcagccaaag

SEQ ID NO: 27255 - DNA, 20 bp, synthetic construct
  source 1..20: mol_type = other DNA
ttaactgaaaaaggaaaaca

SEQ ID NO: 27256 - DNA, 20 bp, synthetic construct
  source 1..20: mol_type = other DNA
agtatttgacacatttactc

SEQ ID NO: 27257 - DNA, 20 bp, synthetic construct
  source 1..20: mol_type = other DNA
cgttcccaaaaccatccaga

SEQ ID NO: 27258 - DNA, 20 bp, synthetic construct
  source 1..20: mol_type = other DNA
agtgctggaattggccggac

SEQ ID NO: 27259 - DNA, 20 bp, synthetic construct
  source 1..20: mol_type = other DNA
cgtgatgttccatgtaatac

SEQ ID NO: 27260 - DNA, 20 bp, synthetic construct
  source 1..20: mol_type = other DNA
tttcttctaaaatagtccat

SEQ ID NO: 27261 - DNA, 20 bp, synthetic construct
  source 1..20: mol_type = other DNA
gtaccgatttatctatatgg

SEQ ID NO: 27262 - DNA, 20 bp, synthetic construct
  source 1..20: mol_type = other DNA
aaatgttactgacctttcag

SEQ ID NO: 27263 - DNA, 20 bp, synthetic construct
  source 1..20: mol_type = other DNA
aacatgacatcgcggaggtg

SEQ ID NO: 27264 - DNA, 20 bp, synthetic construct
  source 1..20: mol_type = other DNA
ggaggaacatgacatcgcgg

SEQ ID NO: 27265 - DNA, 20 bp, synthetic construct
  source 1..20: mol_type = other DNA
gagacttcacactttccgtt

SEQ ID NO: 27266 - DNA, 20 bp, synthetic construct
  source 1..20: mol_type = other DNA
cacatcaagattcagaacac

SEQ ID NO: 27267 - DNA, 20 bp, synthetic construct
  source 1..20: mol_type = other DNA
aggtgcagcagatgaaacag

SEQ ID NO: 27268 - DNA, 20 bp, synthetic construct
  source 1..20: mol_type = other DNA
atgaaagtgagatattgttc

SEQ ID NO: 27269 - DNA, 20 bp, synthetic construct
  source 1..20: mol_type = other DNA
tgagaatctcagttgatctg

SEQ ID NO: 27270 - DNA, 20 bp, synthetic construct
  source 1..20: mol_type = other DNA
aggttaaatgtgcacagtac

SEQ ID NO: 27271 - DNA, 20 bp, synthetic construct
  source 1..20: mol_type = other DNA
aaggagttacatcttaacac

SEQ ID NO: 27272 - DNA, 20 bp, synthetic construct
  source 1..20: mol_type = other DNA
tcaactgagattctcataca

SEQ ID NO: 27273 - DNA, 20 bp, synthetic construct
  source 1..20: mol_type = other DNA
gccaaaccataagccagaaa

SEQ ID NO: 27274 - DNA, 20 bp, synthetic construct
  source 1..20: mol_type = other DNA
agtggatcaccgcaggccca

SEQ ID NO: 27275 - DNA, 20 bp, synthetic construct
  source 1..20: mol_type = other DNA
aagcccatgtaagtacttgt

SEQ ID NO: 27276 - DNA, 20 bp, synthetic construct
  source 1..20: mol_type = other DNA
ccgcgactcaccaagtacag

SEQ ID NO: 27277 - DNA, 20 bp, synthetic construct
  source 1..20: mol_type = other DNA
taagcccatgtaagtacttg

SEQ ID NO: 27278 - DNA, 20 bp, synthetic construct
  source 1..20: mol_type = other DNA
atccactgtagtgcaggcat

SEQ ID NO: 27279 - DNA, 20 bp, synthetic construct
  source 1..20: mol_type = other DNA
gcatggctgcgggagcgagc

SEQ ID NO: 27280 - DNA, 20 bp, synthetic construct
  source 1..20: mol_type = other DNA
aacatgagaaaataccgaat

SEQ ID NO: 27281 - DNA, 20 bp, synthetic construct
  source 1..20: mol_type = other DNA
gttcagcatgacaactgctt

SEQ ID NO: 27282 - DNA, 20 bp, synthetic construct
  source 1..20: mol_type = other DNA
tctttccatcgtttctaggt

SEQ ID NO: 27283 - DNA, 20 bp, synthetic construct
  source 1..20: mol_type = other DNA
ctcttcgaactcccgctcga

SEQ ID NO: 27284 - DNA, 20 bp, synthetic construct
  source 1..20: mol_type = other DNA
tgtcatgctgaaccgcattg

SEQ ID NO: 27285 - DNA, 20 bp, synthetic construct
  source 1..20: mol_type = other DNA
gaacatgagaaaataccgaa

SEQ ID NO: 27286 - DNA, 20 bp, synthetic construct
  source 1..20: mol_type = other DNA
ccgattctttctccacaatg

SEQ ID NO: 27287 - DNA, 20 bp, synthetic construct
  source 1..20: mol_type = other DNA
ggaaacttggccactctatg

SEQ ID NO: 27288 - DNA, 20 bp, synthetic construct
  source 1..20: mol_type = other DNA
gcactacagtggatcaccgc

SEQ ID NO: 27289 - DNA, 20 bp, synthetic construct
  source 1..20: mol_type = other DNA
gccatttctggcttatggtt

SEQ ID NO: 27290 - DNA, 20 bp, synthetic construct
  source 1..20: mol_type = other DNA
ccatgcccaccaccatcgag

SEQ ID NO: 27291 - DNA, 20 bp, synthetic construct
  source 1..20: mol_type = other DNA
actctaaaaagtgaaaatca

SEQ ID NO: 27292 - DNA, 20 bp, synthetic construct
  source 1..20: mol_type = other DNA
ccatgactatcctcatagag

SEQ ID NO: 27293 - DNA, 20 bp, synthetic construct
  source 1..20: mol_type = other DNA
gacacctgaatcatttattg

SEQ ID NO: 27294 - DNA, 20 bp, synthetic construct
  source 1..20: mol_type = other DNA
tcttgctttgggcctcatcc

SEQ ID NO: 27295 - DNA, 20 bp, synthetic construct
  source 1..20: mol_type = other DNA
gtagctggaatcctcatcag

SEQ ID NO: 27296 - DNA, 20 bp, synthetic construct
  source 1..20: mol_type = other DNA
acagcagagagaaaccaagg

SEQ ID NO: 27297 - DNA, 20 bp, synthetic construct
  source 1..20: mol_type = other DNA
ggaaatctgattatataatc

SEQ ID NO: 27298 - DNA, 20 bp, synthetic construct
  source 1..20: mol_type = other DNA
agtgctggctgtggaaggac

SEQ ID NO: 27299 - DNA, 20 bp, synthetic construct
  source 1..20: mol_type = other DNA
cttacacaggatacagagaa

SEQ ID NO: 27300 - DNA, 20 bp, synthetic construct
  source 1..20: mol_type = other DNA
atacctgcagtgaatgcata

SEQ ID NO: 27301 - DNA, 20 bp, synthetic construct
  source 1..20: mol_type = other DNA
actctaaaagaaaaaaagaa

SEQ ID NO: 27302 - DNA, 20 bp, synthetic construct
  source 1..20: mol_type = other DNA
aaacatgaaaaagagtaagt

SEQ ID NO: 27303 - DNA, 20 bp, synthetic construct
  source 1..20: mol_type = other DNA
tgtagataaaggaccctggg

SEQ ID NO: 27304 - DNA, 20 bp, synthetic construct
  source 1..20: mol_type = other DNA
agaatatgtttctatagatt

SEQ ID NO: 27305 - DNA, 20 bp, synthetic construct
  source 1..20: mol_type = other DNA
acctgcgtttgaactaatga

SEQ ID NO: 27306 - DNA, 20 bp, synthetic construct
  source 1..20: mol_type = other DNA
tcatcctccagaagtccagg

SEQ ID NO: 27307 - DNA, 20 bp, synthetic construct
  source 1..20: mol_type = other DNA
tttcaaaacccaaaggacca

SEQ ID NO: 27308 - DNA, 20 bp, synthetic construct
  source 1..20: mol_type = other DNA
caaaactgtgcacaggtatg

SEQ ID NO: 27309 - DNA, 20 bp, synthetic construct
  source 1..20: mol_type = other DNA
atttccctgcaataataccc

SEQ ID NO: 27310 - DNA, 20 bp, synthetic construct
  source 1..20: mol_type = other DNA
atgagcagcacaggtgaggg

SEQ ID NO: 27311 - DNA, 20 bp, synthetic construct
  source 1..20: mol_type = other DNA
tacctctcctcctgatcacc

SEQ ID NO: 27312 - DNA, 20 bp, synthetic construct
  source 1..20: mol_type = other DNA
atttccatctggtaagaaat

SEQ ID NO: 27313 - DNA, 20 bp, synthetic construct
  source 1..20: mol_type = other DNA
cgacctgaaaaaccagatgc

SEQ ID NO: 27314 - DNA, 20 bp, synthetic construct
  source 1..20: mol_type = other DNA
aacctgccaaaactgtgcac

SEQ ID NO: 27315 - DNA, 20 bp, synthetic construct
  source 1..20: mol_type = other DNA
cgagtttcttactcttggtg

SEQ ID NO: 27316 - DNA, 20 bp, synthetic construct
  source 1..20: mol_type = other DNA
acaagctaatagcattgttc

SEQ ID NO: 27317 - DNA, 20 bp, synthetic construct
  source 1..20: mol_type = other DNA
ccaaacctcccattttcatc

SEQ ID NO: 27318 - DNA, 20 bp, synthetic construct
  source 1..20: mol_type = other DNA
aacagtcaaagaaaaacagt

SEQ ID NO: 27319 - DNA, 20 bp, synthetic construct
  source 1..20: mol_type = other DNA
tacatagcctggcctgacca

SEQ ID NO: 27320 - DNA, 20 bp, synthetic construct
  source 1..20: mol_type = other DNA
tatttaaccaagaggtaaga

SEQ ID NO: 27321 - DNA, 20 bp, synthetic construct
  source 1..20: mol_type = other DNA
caaaaatctgtacaagtgtg

SEQ ID NO: 27322 - DNA, 20 bp, synthetic construct
  source 1..20: mol_type = other DNA
tctagatcacaagagacccc

SEQ ID NO: 27323 - DNA, 20 bp, synthetic construct
  source 1..20: mol_type = other DNA
ttcttacctcttggttaaat

SEQ ID NO: 27324 - DNA, 20 bp, synthetic construct
  source 1..20: mol_type = other DNA
ttgggaacaaggctcctcta

SEQ ID NO: 27325 - DNA, 20 bp, synthetic construct
  source 1..20: mol_type = other DNA
cctgtaatataatatagata

SEQ ID NO: 27326 - DNA, 20 bp, synthetic construct
  source 1..20: mol_type = other DNA
ttttacagaaacatgatcag

SEQ ID NO: 27327 - DNA, 20 bp, synthetic construct
  source 1..20: mol_type = other DNA
gctactcgagacacaatcac

SEQ ID NO: 27328 - DNA, 20 bp, synthetic construct
  source 1..20: mol_type = other DNA
ggtcaacattacaaccatag

SEQ ID NO: 27329 - DNA, 20 bp, synthetic construct
  source 1..20: mol_type = other DNA
aatgtactgatttataatgc

SEQ ID NO: 27330 - DNA, 20 bp, synthetic construct
  source 1..20: mol_type = other DNA
ataaagacagggtatttgca

SEQ ID NO: 27331 - DNA, 20 bp, synthetic construct
  source 1..20: mol_type = other DNA
aaattcttttgaggtggaag

SEQ ID NO: 27332 - DNA, 20 bp, synthetic construct
  source 1..20: mol_type = other DNA
acttactgattaggagttcc

SEQ ID NO: 27333 - DNA, 20 bp, synthetic construct
  source 1..20: mol_type = other DNA
tattcaacttagaaaagaat

SEQ ID NO: 27334 - DNA, 20 bp, synthetic construct
  source 1..20: mol_type = other DNA
tcaaaatcttgaggttgatt

SEQ ID NO: 27335 - DNA, 20 bp, synthetic construct
  source 1..20: mol_type = other DNA
atgtactggatctgagtgag

SEQ ID NO: 27336 - DNA, 20 bp, synthetic construct
  source 1..20: mol_type = other DNA
ctcagatccagtacatagcc

SEQ ID NO: 27337 - DNA, 20 bp, synthetic construct
  source 1..20: mol_type = other DNA
tctcacaggtgacgcagcca

SEQ ID NO: 27338 - DNA, 20 bp, synthetic construct
  source 1..20: mol_type = other DNA
tgtgcggccgatgccggcgc

SEQ ID NO: 27339 - DNA, 20 bp, synthetic construct
  source 1..20: mol_type = other DNA
caagaagacggggattgagg

SEQ ID NO: 27340 - DNA, 20 bp, synthetic construct
  source 1..20: mol_type = other DNA
tcttcttgaaatgctccacc

SEQ ID NO: 27341 - DNA, 20 bp, synthetic construct
  source 1..20: mol_type = other DNA
cactcacttggacgaggtgc

SEQ ID NO: 27342 - DNA, 20 bp, synthetic construct
  source 1..20: mol_type = other DNA
cctgcaggatcactcggctg

SEQ ID NO: 27343 - DNA, 20 bp, synthetic construct
  source 1..20: mol_type = other DNA
gaacaagaagcaggagtccg

SEQ ID NO: 27344 - DNA, 20 bp, synthetic construct
  source 1..20: mol_type = other DNA
gtctgcagccgggtgcaggg

SEQ ID NO: 27345 - DNA, 20 bp, synthetic construct
  source 1..20: mol_type = other DNA
gtgacttctcgctctccgtc

SEQ ID NO: 27346 - DNA, 20 bp, synthetic construct
  source 1..20: mol_type = other DNA
ccactcacttggacgaggtg

SEQ ID NO: 27347 - DNA, 20 bp, synthetic construct
  source 1..20: mol_type = other DNA
catagaaatcccctgagttc

SEQ ID NO: 27348 - DNA, 20 bp, synthetic construct
  source 1..20: mol_type = other DNA
ccgagaggtggagaaaggcc

SEQ ID NO: 27349 - DNA, 20 bp, synthetic construct
  source 1..20: mol_type = other DNA
tgcggccgatgccggcgctg

SEQ ID NO: 27350 - DNA, 20 bp, synthetic construct
  source 1..20: mol_type = other DNA
agccaaggctggcttctggg

SEQ ID NO: 27351 - DNA, 20 bp, synthetic construct
  source 1..20: mol_type = other DNA
ccacagccgagtgatcctgc

SEQ ID NO: 27352 - DNA, 20 bp, synthetic construct
  source 1..20: mol_type = other DNA
ggtgcctgtgcggccgatgc

SEQ ID NO: 27353 - DNA, 20 bp, synthetic construct
  source 1..20: mol_type = other DNA
caaacttctcccctccatac

SEQ ID NO: 27354 - DNA, 20 bp, synthetic construct
  source 1..20: mol_type = other DNA
tccccgctggacaatgtgag

SEQ ID NO: 27355 - DNA, 20 bp, synthetic construct
  source 1..20: mol_type = other DNA
gatttctatgacctgtatgg

SEQ ID NO: 27356 - DNA, 20 bp, synthetic construct
  source 1..20: mol_type = other DNA
tcggcccagtcgcaagaacc

SEQ ID NO: 27357 - DNA, 20 bp, synthetic construct
  source 1..20: mol_type = other DNA
ggggatttctatgacctgta

SEQ ID NO: 27358 - DNA, 20 bp, synthetic construct
  source 1..20: mol_type = other DNA
ggcagttccacttccatggc

SEQ ID NO: 27359 - DNA, 20 bp, synthetic construct
  source 1..20: mol_type = other DNA
gcccagtactggccatctga

SEQ ID NO: 27360 - DNA, 20 bp, synthetic construct
  source 1..20: mol_type = other DNA
tgctttcacacgctccagga

SEQ ID NO: 27361 - DNA, 20 bp, synthetic construct
  source 1..20: mol_type = other DNA
cagaagcagcagcagcagtc

SEQ ID NO: 27362 - DNA, 20 bp, synthetic construct
  source 1..20: mol_type = other DNA
acctgcagtgcacggtgatg

SEQ ID NO: 27363 - DNA, 20 bp, synthetic construct
  source 1..20: mol_type = other DNA
cgatcactagcagagaggac

SEQ ID NO: 27364 - DNA, 20 bp, synthetic construct
  source 1..20: mol_type = other DNA
atacctgcagtgcacggtga

SEQ ID NO: 27365 - DNA, 20 bp, synthetic construct
  source 1..20: mol_type = other DNA
agacacccgaatattcccat

SEQ ID NO: 27366 - DNA, 20 bp, synthetic construct
  source 1..20: mol_type = other DNA
ctcagttccactttaccagc

SEQ ID NO: 27367 - DNA, 20 bp, synthetic construct
  source 1..20: mol_type = other DNA
gatgcatacagaacggaagg

SEQ ID NO: 27368 - DNA, 20 bp, synthetic construct
  source 1..20: mol_type = other DNA
cagcaggagcttgttgaaag

SEQ ID NO: 27369 - DNA, 20 bp, synthetic construct
  source 1..20: mol_type = other DNA
ctcattcactgcaggtgcgt

SEQ ID NO: 27370 - DNA, 20 bp, synthetic construct
  source 1..20: mol_type = other DNA
ctgatggatcaagatgtact

SEQ ID NO: 27371 - DNA, 20 bp, synthetic construct
  source 1..20: mol_type = other DNA
ccagtacatcttgatccatc

SEQ ID NO: 27372 - DNA, 20 bp, synthetic construct
  source 1..20: mol_type = other DNA
aggaaatacattgctgcaca

SEQ ID NO: 27373 - DNA, 20 bp, synthetic construct
  source 1..20: mol_type = other DNA
tttcatccctgggacctagg

SEQ ID NO: 27374 - DNA, 20 bp, synthetic construct
  source 1..20: mol_type = other DNA
gggcgcacaggaacctatat

SEQ ID NO: 27375 - DNA, 20 bp, synthetic construct
  source 1..20: mol_type = other DNA
agtgctggtgttgggcgcac

SEQ ID NO: 27376 - DNA, 20 bp, synthetic construct
  source 1..20: mol_type = other DNA
ctcgatgtgaagaaggaaac

SEQ ID NO: 27377 - DNA, 20 bp, synthetic construct
  source 1..20: mol_type = other DNA
ttccttcatataggagctgg

SEQ ID NO: 27378 - DNA, 20 bp, synthetic construct
  source 1..20: mol_type = other DNA
tcaggtttttatccagattg

SEQ ID NO: 27379 - DNA, 20 bp, synthetic construct
  source 1..20: mol_type = other DNA
cactgcaggtgcgtgggatt

SEQ ID NO: 27380 - DNA, 20 bp, synthetic construct
  source 1..20: mol_type = other DNA
aaaatatgcaaacatcactg

SEQ ID NO: 27381 - DNA, 20 bp, synthetic construct
  source 1..20: mol_type = other DNA
tgtggattacttatataaca

SEQ ID NO: 27382 - DNA, 20 bp, synthetic construct
  source 1..20: mol_type = other DNA
tgtgcgcccaacaccagcac

SEQ ID NO: 27383 - DNA, 20 bp, synthetic construct
  source 1..20: mol_type = other DNA
cttgatccatcaggctttgg

SEQ ID NO: 27384 - DNA, 20 bp, synthetic construct
  source 1..20: mol_type = other DNA
gccagaccacggggtgcctg

SEQ ID NO: 27385 - DNA, 20 bp, synthetic construct
  source 1..20: mol_type = other DNA
gtctcagttcaaagacacga

SEQ ID NO: 27386 - DNA, 20 bp, synthetic construct
  source 1..20: mol_type = other DNA
agacagtcatgttccagacc

SEQ ID NO: 27387 - DNA, 20 bp, synthetic construct
  source 1..20: mol_type = other DNA
tcgatgtgaagaaggaaaca

SEQ ID NO: 27388 - DNA, 20 bp, synthetic construct
  source 1..20: mol_type = other DNA
attcaggcctattttcacaa

SEQ ID NO: 27389 - DNA, 20 bp, synthetic construct
  source 1..20: mol_type = other DNA
agtgaccatgacaataactg

SEQ ID NO: 27390 - DNA, 20 bp, synthetic construct
  source 1..20: mol_type = other DNA
acttgctcctcaaactgaga

SEQ ID NO: 27391 - DNA, 20 bp, synthetic construct
  source 1..20: mol_type = other DNA
tctgcgtgcgtgggaaggtg

SEQ ID NO: 27392 - DNA, 20 bp, synthetic construct
  source 1..20: mol_type = other DNA
gtcctccagctcctatatga

SEQ ID NO: 27393 - DNA, 20 bp, synthetic construct
  source 1..20: mol_type = other DNA
attgcaaaagtgcaacgtaa

SEQ ID NO: 27394 - DNA, 20 bp, synthetic construct
  source 1..20: mol_type = other DNA
cagcaatttagatgaacagc

SEQ ID NO: 27395 - DNA, 20 bp, synthetic construct
  source 1..20: mol_type = other DNA
tcctagtaaaggaattaagt

SEQ ID NO: 27396 - DNA, 20 bp, synthetic construct
  source 1..20: mol_type = other DNA
tccaaatggtaacgttcatg

SEQ ID NO: 27397 - DNA, 20 bp, synthetic construct
  source 1..20: mol_type = other DNA
atacctctacttgaaccatc

SEQ ID NO: 27398 - DNA, 20 bp, synthetic construct
  source 1..20: mol_type = other DNA
ggcttccaggccttctagca

SEQ ID NO: 27399 - DNA, 20 bp, synthetic construct
  source 1..20: mol_type = other DNA
gtcccattgtggtgcactgc

SEQ ID NO: 27400 - DNA, 20 bp, synthetic construct
  source 1..20: mol_type = other DNA
cacctgcagtgaatgagtag

SEQ ID NO: 27401 - DNA, 20 bp, synthetic construct
  source 1..20: mol_type = other DNA
tgtaaaataaagggttctcc

SEQ ID NO: 27402 - DNA, 20 bp, synthetic construct
  source 1..20: mol_type = other DNA
gcttccagaagggctcagag

SEQ ID NO: 27403 - DNA, 20 bp, synthetic construct
  source 1..20: mol_type = other DNA
gtcacacttatactcatgtt

SEQ ID NO: 27404 - DNA, 20 bp, synthetic construct
  source 1..20: mol_type = other DNA
ctcacattcagttcaccagc

SEQ ID NO: 27405 - DNA, 20 bp, synthetic construct
  source 1..20: mol_type = other DNA
tgtgctcagtactggggaga

SEQ ID NO: 27406 - DNA, 20 bp, synthetic construct
  source 1..20: mol_type = other DNA
tgcagaatactggccgtcaa

SEQ ID NO: 27407 - DNA, 20 bp, synthetic construct
  source 1..20: mol_type = other DNA
agaacaagtgtgcagaatac

SEQ ID NO: 27408 - DNA, 20 bp, synthetic construct
  source 1..20: mol_type = other DNA
taaataaacttaccacatgt

SEQ ID NO: 27409 - DNA, 20 bp, synthetic construct
  source 1..20: mol_type = other DNA
tccagtttgtatattggtac

SEQ ID NO: 27410 - DNA, 20 bp, synthetic construct
  source 1..20: mol_type = other DNA
agtacatgaattatgagata

SEQ ID NO: 27411 - DNA, 20 bp, synthetic construct
  source 1..20: mol_type = other DNA
attacctacagatttcagtg

SEQ ID NO: 27412 - DNA, 20 bp, synthetic construct
  source 1..20: mol_type = other DNA
ttccaaatggtaacgttcat

SEQ ID NO: 27413 - DNA, 20 bp, synthetic construct
  source 1..20: mol_type = other DNA
gaggatcctcaggcaccccg

SEQ ID NO: 27414 - DNA, 20 bp, synthetic construct
  source 1..20: mol_type = other DNA
acctggaattcagcctctag

SEQ ID NO: 27415 - DNA, 20 bp, synthetic construct
  source 1..20: mol_type = other DNA
tgatagctccaagccaggtc

SEQ ID NO: 27416 - DNA, 20 bp, synthetic construct
  source 1..20: mol_type = other DNA
aggcctcccagggaccgtaa

SEQ ID NO: 27417 - DNA, 20 bp, synthetic construct
  source 1..20: mol_type = other DNA
tcagcctgttcctttgcttc

SEQ ID NO: 27418 - DNA, 20 bp, synthetic construct
  source 1..20: mol_type = other DNA
cttctacaaaaaataatctg

SEQ ID NO: 27419 - DNA, 20 bp, synthetic construct
  source 1..20: mol_type = other DNA
tgctgctcagggaccactga

SEQ ID NO: 27420 - DNA, 20 bp, synthetic construct
  source 1..20: mol_type = other DNA
tttcacaatggagactatcc

SEQ ID NO: 27421 - DNA, 20 bp, synthetic construct
  source 1..20: mol_type = other DNA
gcagcttcctgcagaaccca

SEQ ID NO: 27422 - DNA, 20 bp, synthetic construct
  source 1..20: mol_type = other DNA
gacacagaagtatttgtgac

SEQ ID NO: 27423 - DNA, 20 bp, synthetic construct
  source 1..20: mol_type = other DNA
ttaccacatgttggcttaga

SEQ ID NO: 27424 - DNA, 20 bp, synthetic construct
  source 1..20: mol_type = other DNA
catactattatctgatgtca

SEQ ID NO: 27425 - DNA, 20 bp, synthetic construct
  source 1..20: mol_type = other DNA
gtcatgttccagacctggct

SEQ ID NO: 27426 - DNA, 20 bp, synthetic construct
  source 1..20: mol_type = other DNA
tttcttcagtggtcccattg

SEQ ID NO: 27427 - DNA, 20 bp, synthetic construct
  source 1..20: mol_type = other DNA
gttgaatgatgtaaaataaa

SEQ ID NO: 27428 - DNA, 20 bp, synthetic construct
  source 1..20: mol_type = other DNA
acatcttgtaagttatcact

SEQ ID NO: 27429 - DNA, 20 bp, synthetic construct
  source 1..20: mol_type = other DNA
ggagaaggaaagcaaacata

SEQ ID NO: 27430 - DNA, 20 bp, synthetic construct
  source 1..20: mol_type = other DNA
aagaggaagattgctgatga

SEQ ID NO: 27431 - DNA, 20 bp, synthetic construct
  source 1..20: mol_type = other DNA
ttttgtagagaacaacaagc

SEQ ID NO: 27432 - DNA, 20 bp, synthetic construct
  source 1..20: mol_type = other DNA
ccccagaagaattcctctga

SEQ ID NO: 27433 - DNA, 20 bp, synthetic construct
  source 1..20: mol_type = other DNA
atttccagctcatgtttaag

SEQ ID NO: 27434 - DNA, 20 bp, synthetic construct
  source 1..20: mol_type = other DNA
gctgtggtgtgcaaggctga

SEQ ID NO: 27435 - DNA, 20 bp, synthetic construct
  source 1..20: mol_type = other DNA
gataaaacatatttcgtata

SEQ ID NO: 27436 - DNA, 20 bp, synthetic construct
  source 1..20: mol_type = other DNA
aaactgttgatgatttctgg

SEQ ID NO: 27437 - DNA, 20 bp, synthetic construct
  source 1..20: mol_type = other DNA
ccaaatggtaacgttcatgg

SEQ ID NO: 27438 - DNA, 20 bp, synthetic construct
  source 1..20: mol_type = other DNA
catctgccaaaagtcaccaa

SEQ ID NO: 27439 - DNA, 20 bp, synthetic construct
  source 1..20: mol_type = other DNA
cagtggtgtgagtaggtaag

SEQ ID NO: 27440 - DNA, 20 bp, synthetic construct
  source 1..20: mol_type = other DNA
gaagtcattttctctttcaa

SEQ ID NO: 27441 - DNA, 20 bp, synthetic construct
  source 1..20: mol_type = other DNA
aggagcaagtgaggatcctc

SEQ ID NO: 27442 - DNA, 20 bp, synthetic construct
  source 1..20: mol_type = other DNA
ctacctgcagtgcaccacaa

SEQ ID NO: 27443 - DNA, 20 bp, synthetic construct
  source 1..20: mol_type = other DNA
acgaatgtggaaaccatgcc

SEQ ID NO: 27444 - DNA, 20 bp, synthetic construct
  source 1..20: mol_type = other DNA
accagtaccaatatacaaac

SEQ ID NO: 27445 - DNA, 20 bp, synthetic construct
  source 1..20: mol_type = other DNA
ttcaccagctggccagacca

SEQ ID NO: 27446 - DNA, 20 bp, synthetic construct
  source 1..20: mol_type = other DNA
tactggccgtcaatggaaga

SEQ ID NO: 27447 - DNA, 20 bp, synthetic construct
  source 1..20: mol_type = other DNA
tctaatattaatgtcttatc

SEQ ID NO: 27448 - DNA, 20 bp, synthetic construct
  source 1..20: mol_type = other DNA
tacctgcagtgcaccacaat

SEQ ID NO: 27449 - DNA, 20 bp, synthetic construct
  source 1..20: mol_type = other DNA
atactggccgtcaatggaag

SEQ ID NO: 27450 - DNA, 20 bp, synthetic construct
  source 1..20: mol_type = other DNA
gactcgcagacgccctctgc

SEQ ID NO: 27451 - DNA, 20 bp, synthetic construct
  source 1..20: mol_type = other DNA
aatagggtttcaaagaaccc

SEQ ID NO: 27452 - DNA, 20 bp, synthetic construct
  source 1..20: mol_type = other DNA
ccaatatacaaactggagtg

SEQ ID NO: 27453 - DNA, 20 bp, synthetic construct
  source 1..20: mol_type = other DNA
actcattcactgcaggtgcg

SEQ ID NO: 27454 - DNA, 20 bp, synthetic construct
  source 1..20: mol_type = other DNA
tcacacttatactcatgttc

SEQ ID NO: 27455 - DNA, 20 bp, synthetic construct
  source 1..20: mol_type = other DNA
gagtttaagccacaaataca

SEQ ID NO: 27456 - DNA, 20 bp, synthetic construct
  source 1..20: mol_type = other DNA
atgcctgatggttcaagtag

SEQ ID NO: 27457 - DNA, 20 bp, synthetic construct
  source 1..20: mol_type = other DNA
cccagaagaattcctctgaa

SEQ ID NO: 27458 - DNA, 20 bp, synthetic construct
  source 1..20: mol_type = other DNA
ctcagtttgaggagcaagtg

SEQ ID NO: 27459 - DNA, 20 bp, synthetic construct
  source 1..20: mol_type = other DNA
tctcagttcaaagacacgaa

SEQ ID NO: 27460 - DNA, 20 bp, synthetic construct
  source 1..20: mol_type = other DNA
agaccctgcggataggtgat

SEQ ID NO: 27461 - DNA, 20 bp, synthetic construct
  source 1..20: mol_type = other DNA
gcccgcctcccgtgaagaag

SEQ ID NO: 27462 - DNA, 20 bp, synthetic construct
  source 1..20: mol_type = other DNA
gataccactagatgtgaaga

SEQ ID NO: 27463 - DNA, 20 bp, synthetic construct
  source 1..20: mol_type = other DNA
tagaccctgcggataggtga

SEQ ID NO: 27464 - DNA, 20 bp, synthetic construct
  source 1..20: mol_type = other DNA
actcccatcacctatccgca

SEQ ID NO: 27465 - DNA, 20 bp, synthetic construct
  source 1..20: mol_type = other DNA
gaaaatgtccgtgcaaaggt

SEQ ID NO: 27466 - DNA, 20 bp, synthetic construct
  source 1..20: mol_type = other DNA
tatcctatccgcaaacagta

SEQ ID NO: 27467 - DNA, 20 bp, synthetic construct
  source 1..20: mol_type = other DNA
catggctaaggagattggta

SEQ ID NO: 27468 - DNA, 20 bp, synthetic construct
  source 1..20: mol_type = other DNA
ggtgtagctgatgagaaggc

SEQ ID NO: 27469 - DNA, 20 bp, synthetic construct
  source 1..20: mol_type = other DNA
gccgctctcctatccacaga

SEQ ID NO: 27470 - DNA, 20 bp, synthetic construct
  source 1..20: mol_type = other DNA
ggtatttcaccgagtctggt

SEQ ID NO: 27471 - DNA, 20 bp, synthetic construct
  source 1..20: mol_type = other DNA
tgaatagttgtcaaacctgt

SEQ ID NO: 27472 - DNA, 20 bp, synthetic construct
  source 1..20: mol_type = other DNA
cacggtggggatgtactctc

SEQ ID NO: 27473 - DNA, 20 bp, synthetic construct
  source 1..20: mol_type = other DNA
tctgtggataggagagcggc

SEQ ID NO: 27474 - DNA, 20 bp, synthetic construct
  source 1..20: mol_type = other DNA
caccaggatgatgggtgtgc

SEQ ID NO: 27475 - DNA, 20 bp, synthetic construct
  source 1..20: mol_type = other DNA
caggccctgcgggtaggtga

SEQ ID NO: 27476 - DNA, 20 bp, synthetic construct
  source 1..20: mol_type = other DNA
ctgaatagttgtcaaacctg

SEQ ID NO: 27477 - DNA, 20 bp, synthetic construct
  source 1..20: mol_type = other DNA
gggcaccaagctggacctgc

SEQ ID NO: 27478 - DNA, 20 bp, synthetic construct
  source 1..20: mol_type = other DNA
gccatcaagtgtgtggtggt

SEQ ID NO: 27479 - DNA, 20 bp, synthetic construct
  source 1..20: mol_type = other DNA
gctggacctgcgggacgaca

SEQ ID NO: 27480 - DNA, 20 bp, synthetic construct
  source 1..20: mol_type = other DNA
ttggccagtgccaggccctg

SEQ ID NO: 27481 - DNA, 20 bp, synthetic construct
  source 1..20: mol_type = other DNA
cacggttttcaggcctctct

SEQ ID NO: 27482 - DNA, 20 bp, synthetic construct
  source 1..20: mol_type = other DNA
ataagaggctgggctgacga

SEQ ID NO: 27483 - DNA, 20 bp, synthetic construct
  source 1..20: mol_type = other DNA
tgggcaccaagctggacctg

SEQ ID NO: 27484 - DNA, 20 bp, synthetic construct
  source 1..20: mol_type = other DNA
ttgatggcctgcatcgtgtc

SEQ ID NO: 27485 - DNA, 20 bp, synthetic construct
  source 1..20: mol_type = other DNA
gcagggcctggcactggcca

SEQ ID NO: 27486 - DNA, 20 bp, synthetic construct
  source 1..20: mol_type = other DNA
cccagtggttcccagaagtg

SEQ ID NO: 27487 - DNA, 20 bp, synthetic construct
  source 1..20: mol_type = other DNA
accgtctgtggataggagag

SEQ ID NO: 27488 - DNA, 20 bp, synthetic construct
  source 1..20: mol_type = other DNA
ccaaggtgagctggacaggg

SEQ ID NO: 27489 - DNA, 20 bp, synthetic construct
  source 1..20: mol_type = other DNA
caaggtgagctggacagggt

SEQ ID NO: 27490 - DNA, 20 bp, synthetic construct
  source 1..20: mol_type = other DNA
aaccactgggcaggtgggtg

SEQ ID NO: 27491 - DNA, 20 bp, synthetic construct
  source 1..20: mol_type = other DNA
agcagatgaggaagacgtcc

SEQ ID NO: 27492 - DNA, 20 bp, synthetic construct
  source 1..20: mol_type = other DNA
gggtgagagctgagcactcc

SEQ ID NO: 27493 - DNA, 20 bp, synthetic construct
  source 1..20: mol_type = other DNA
actggccaaggagattggta

SEQ ID NO: 27494 - DNA, 20 bp, synthetic construct
  source 1..20: mol_type = other DNA
ggcgcgcttctgctgccgcg

SEQ ID NO: 27495 - DNA, 20 bp, synthetic construct
  source 1..20: mol_type = other DNA
accagactcggtgaaatacc

SEQ ID NO: 27496 - DNA, 20 bp, synthetic construct
  source 1..20: mol_type = other DNA
acagcaagccagtgaacctg

SEQ ID NO: 27497 - DNA, 20 bp, synthetic construct
  source 1..20: mol_type = other DNA
tggtggtgtagctgatgaga

SEQ ID NO: 27498 - DNA, 20 bp, synthetic construct
  source 1..20: mol_type = other DNA
caactattcagccaatgtga

SEQ ID NO: 27499 - DNA, 20 bp, synthetic construct
  source 1..20: mol_type = other DNA
ttgtcaaacctgtggggagc

SEQ ID NO: 27500 - DNA, 20 bp, synthetic construct
  source 1..20: mol_type = other DNA
gtgggacactgctgggcagg

SEQ ID NO: 27501 - DNA, 20 bp, synthetic construct
  source 1..20: mol_type = other DNA
cctgcatcgtgtccggagcc

SEQ ID NO: 27502 - DNA, 20 bp, synthetic construct
  source 1..20: mol_type = other DNA
gataggagagcggccggaga

SEQ ID NO: 27503 - DNA, 20 bp, synthetic construct
  source 1..20: mol_type = other DNA
agcacacccatcatcctggt

SEQ ID NO: 27504 - DNA, 20 bp, synthetic construct
  source 1..20: mol_type = other DNA
tccccaccgtgtgagttcct

SEQ ID NO: 27505 - DNA, 20 bp, synthetic construct
  source 1..20: mol_type = other DNA
cttggtgcccaccaggatga

SEQ ID NO: 27506 - DNA, 20 bp, synthetic construct
  source 1..20: mol_type = other DNA
gcagatgaggaagacgtcct

SEQ ID NO: 27507 - DNA, 20 bp, synthetic construct
  source 1..20: mol_type = other DNA
ggtccagcttggtgcccacc

SEQ ID NO: 27508 - DNA, 20 bp, synthetic construct
  source 1..20: mol_type = other DNA
tctgggaaccactgggcagg

SEQ ID NO: 27509 - DNA, 20 bp, synthetic construct
  source 1..20: mol_type = other DNA
ggggatgtactctccgggaa

SEQ ID NO: 27510 - DNA, 20 bp, synthetic construct
  source 1..20: mol_type = other DNA
aggagattggtatgggcctc

SEQ ID NO: 27511 - DNA, 20 bp, synthetic construct
  source 1..20: mol_type = other DNA
accactgggcaggtgggtgg

SEQ ID NO: 27512 - DNA, 20 bp, synthetic construct
  source 1..20: mol_type = other DNA
ctgggaaccactgggcaggt

SEQ ID NO: 27513 - DNA, 20 bp, synthetic construct
  source 1..20: mol_type = other DNA
ggctcccatcacctacccgc

SEQ ID NO: 27514 - DNA, 20 bp, synthetic construct
  source 1..20: mol_type = other DNA
gcaggccatcaagtgtgtgg

SEQ ID NO: 27515 - DNA, 20 bp, synthetic construct
  source 1..20: mol_type = other DNA
cttctccttcagtttctcga

SEQ ID NO: 27516 - DNA, 20 bp, synthetic construct
  source 1..20: mol_type = other DNA
cggacgttctcataagaggc

SEQ ID NO: 27517 - DNA, 20 bp, synthetic construct
  source 1..20: mol_type = other DNA
tcctggggacagagcaagcg

SEQ ID NO: 27518 - DNA, 20 bp, synthetic construct
  source 1..20: mol_type = other DNA
ccccagcacacccatcatcc

SEQ ID NO: 27519 - DNA, 20 bp, synthetic construct
  source 1..20: mol_type = other DNA
aggccctgcgggtaggtgat

SEQ ID NO: 27520 - DNA, 20 bp, synthetic construct
  source 1..20: mol_type = other DNA
gtcgtcccgcaggtccagct

SEQ ID NO: 27521 - DNA, 20 bp, synthetic construct
  source 1..20: mol_type = other DNA
tacaccaccaacgcctttcc

SEQ ID NO: 27522 - DNA, 20 bp, synthetic construct
  source 1..20: mol_type = other DNA
gctgagggcacagcacggcc

SEQ ID NO: 27523 - DNA, 20 bp, synthetic construct
  source 1..20: mol_type = other DNA
gaggcccataccaatctcct

SEQ ID NO: 27524 - DNA, 20 bp, synthetic construct
  source 1..20: mol_type = other DNA
gccgcacttctgggaaccac

SEQ ID NO: 27525 - DNA, 20 bp, synthetic construct
  source 1..20: mol_type = other DNA
catcacctacccgcagggcc

SEQ ID NO: 27526 - DNA, 20 bp, synthetic construct
  source 1..20: mol_type = other DNA
gaaccactgggcaggtgggt

SEQ ID NO: 27527 - DNA, 20 bp, synthetic construct
  source 1..20: mol_type = other DNA
gtctggttggggagatggac

SEQ ID NO: 27528 - DNA, 20 bp, synthetic construct
  source 1..20: mol_type = other DNA
tgacgagggagaagcagatg

SEQ ID NO: 27529 - DNA, 20 bp, synthetic construct
  source 1..20: mol_type = other DNA
acacggttttcaggcctctc

SEQ ID NO: 27530 - DNA, 20 bp, synthetic construct
  source 1..20: mol_type = other DNA
gtgggagatgggtaggtacc

SEQ ID NO: 27531 - DNA, 20 bp, synthetic construct
  source 1..20: mol_type = other DNA
ttatgagaacgtccgcgcca

SEQ ID NO: 27532 - DNA, 20 bp, synthetic construct
  source 1..20: mol_type = other DNA
gggactcttacccctagagg

SEQ ID NO: 27533 - DNA, 20 bp, synthetic construct
  source 1..20: mol_type = other DNA
ccactgggcaggtgggtggg

SEQ ID NO: 27534 - DNA, 20 bp, synthetic construct
  source 1..20: mol_type = other DNA
acggtggggatgtactctcc

SEQ ID NO: 27535 - DNA, 20 bp, synthetic construct
  source 1..20: mol_type = other DNA
gtactctccgggaaaggcgt

SEQ ID NO: 27536 - DNA, 20 bp, synthetic construct
  source 1..20: mol_type = other DNA
cctgtggggagcaggcaagg

SEQ ID NO: 27537 - DNA, 20 bp, synthetic construct
  source 1..20: mol_type = other DNA
ccaggatgatgggtgtgctg

SEQ ID NO: 27538 - DNA, 20 bp, synthetic construct
  source 1..20: mol_type = other DNA
tgcccacggccctgaaagac

SEQ ID NO: 27539 - DNA, 20 bp, synthetic construct
  source 1..20: mol_type = other DNA
ttacccctagaggaggctgc

SEQ ID NO: 27540 - DNA, 20 bp, synthetic construct
  source 1..20: mol_type = other DNA
ccccaccgtgtgagttcctg

SEQ ID NO: 27541 - DNA, 20 bp, synthetic construct
  source 1..20: mol_type = other DNA
gacagcaagccagtgaacct

SEQ ID NO: 27542 - DNA, 20 bp, synthetic construct
  source 1..20: mol_type = other DNA
ggaaccactgggcaggtggg

SEQ ID NO: 27543 - DNA, 20 bp, synthetic construct
  source 1..20: mol_type = other DNA
accgagtctggttggggaga

SEQ ID NO: 27544 - DNA, 20 bp, synthetic construct
  source 1..20: mol_type = other DNA
ctggccaaggagattggtat

SEQ ID NO: 27545 - DNA, 20 bp, synthetic construct
  source 1..20: mol_type = other DNA
gaatagttgtcaaacctgtg

SEQ ID NO: 27546 - DNA, 20 bp, synthetic construct
  source 1..20: mol_type = other DNA
ggccatcaagtgtgtggtgg

SEQ ID NO: 27547 - DNA, 20 bp, synthetic construct
  source 1..20: mol_type = other DNA
ggcgcggacgttctcataag

SEQ ID NO: 27548 - DNA, 20 bp, synthetic construct
  source 1..20: mol_type = other DNA
ctattcagccaatgtgatgg

SEQ ID NO: 27549 - DNA, 20 bp, synthetic construct
  source 1..20: mol_type = other DNA
tgctgtgccctcagcccacg

SEQ ID NO: 27550 - DNA, 20 bp, synthetic construct
  source 1..20: mol_type = other DNA
ggacagcaagccagtgaacc

SEQ ID NO: 27551 - DNA, 20 bp, synthetic construct
  source 1..20: mol_type = other DNA
gggcagtggtgccgcacttc

SEQ ID NO: 27552 - DNA, 20 bp, synthetic construct
  source 1..20: mol_type = other DNA
acttctgggaaccactgggc

SEQ ID NO: 27553 - DNA, 20 bp, synthetic construct
  source 1..20: mol_type = other DNA
cagtgccaggccctgcgggt

SEQ ID NO: 27554 - DNA, 20 bp, synthetic construct
  source 1..20: mol_type = other DNA
agggcacagcacggcccgga

SEQ ID NO: 27555 - DNA, 20 bp, synthetic construct
  source 1..20: mol_type = other DNA
aaacctgtggggagcaggca

SEQ ID NO: 27556 - DNA, 20 bp, synthetic construct
  source 1..20: mol_type = other DNA
gtatttcaccgagtctggtt

SEQ ID NO: 27557 - DNA, 20 bp, synthetic construct
  source 1..20: mol_type = other DNA
gctgtgggacactgctgggc

SEQ ID NO: 27558 - DNA, 20 bp, synthetic construct
  source 1..20: mol_type = other DNA
gatgcaggccatcaagtgtg

SEQ ID NO: 27559 - DNA, 20 bp, synthetic construct
  source 1..20: mol_type = other DNA
tcccaccaccacacacttga

SEQ ID NO: 27560 - DNA, 20 bp, synthetic construct
  source 1..20: mol_type = other DNA
gcgccaaggtgagctggaca

SEQ ID NO: 27561 - DNA, 20 bp, synthetic construct
  source 1..20: mol_type = other DNA
tcccacagccccaggttcac

SEQ ID NO: 27562 - DNA, 20 bp, synthetic construct
  source 1..20: mol_type = other DNA
atccccaccgtgtgagttcc

SEQ ID NO: 27563 - DNA, 20 bp, synthetic construct
  source 1..20: mol_type = other DNA
gagaaggcaggtcttgccca

SEQ ID NO: 27564 - DNA, 20 bp, synthetic construct
  source 1..20: mol_type = other DNA
tggccagtgccaggccctgc

SEQ ID NO: 27565 - DNA, 20 bp, synthetic construct
  source 1..20: mol_type = other DNA
ggcagtggtgccgcacttct

SEQ ID NO: 27566 - DNA, 20 bp, synthetic construct
  source 1..20: mol_type = other DNA
gccagtgaacctggggctgt

SEQ ID NO: 27567 - DNA, 20 bp, synthetic construct
  source 1..20: mol_type = other DNA
ctctccgggaaaggcgttgg

SEQ ID NO: 27568 - DNA, 20 bp, synthetic construct
  source 1..20: mol_type = other DNA
ttggtgcccaccaggatgat

SEQ ID NO: 27569 - DNA, 20 bp, synthetic construct
  source 1..20: mol_type = other DNA
tatttcaccgagtctggttg

SEQ ID NO: 27570 - DNA, 20 bp, synthetic construct
  source 1..20: mol_type = other DNA
cgcgccaaggtgagctggac

SEQ ID NO: 27571 - DNA, 20 bp, synthetic construct
  source 1..20: mol_type = other DNA
cagcagtgtcccacagcccc

SEQ ID NO: 27572 - DNA, 20 bp, synthetic construct
  source 1..20: mol_type = other DNA
gcagcacaccgtctgtggat

SEQ ID NO: 27573 - DNA, 20 bp, synthetic construct
  source 1..20: mol_type = other DNA
cataagaggctgggctgacg

SEQ ID NO: 27574 - DNA, 20 bp, synthetic construct
  source 1..20: mol_type = other DNA
cagcacacccatcatcctgg

SEQ ID NO: 27575 - DNA, 20 bp, synthetic construct
  source 1..20: mol_type = other DNA
ctggcactggccaaggagat

SEQ ID NO: 27576 - DNA, 20 bp, synthetic construct
  source 1..20: mol_type = other DNA
accaggatgatgggtgtgct

SEQ ID NO: 27577 - DNA, 20 bp, synthetic construct
  source 1..20: mol_type = other DNA
tccaggtatttcaccgagtc

SEQ ID NO: 27578 - DNA, 20 bp, synthetic construct
  source 1..20: mol_type = other DNA
cagatgaggaagacgtcctg

SEQ ID NO: 27579 - DNA, 20 bp, synthetic construct
  source 1..20: mol_type = other DNA
tgctcagctctcacccagag

SEQ ID NO: 27580 - DNA, 20 bp, synthetic construct
  source 1..20: mol_type = other DNA
gtggctggaactctgggtgg

SEQ ID NO: 27581 - DNA, 20 bp, synthetic construct
  source 1..20: mol_type = other DNA
aattagaagatggatggatg

SEQ ID NO: 27582 - DNA, 20 bp, synthetic construct
  source 1..20: mol_type = other DNA
cggagctggaggaggcggcg

SEQ ID NO: 27583 - DNA, 20 bp, synthetic construct
  source 1..20: mol_type = other DNA
catgtttttagatgaacttg

SEQ ID NO: 27584 - DNA, 20 bp, synthetic construct
  source 1..20: mol_type = other DNA
gaggccggcagtgaggaggg

SEQ ID NO: 27585 - DNA, 20 bp, synthetic construct
  source 1..20: mol_type = other DNA
gctttggggtcagagttcct

SEQ ID NO: 27586 - DNA, 20 bp, synthetic construct
  source 1..20: mol_type = other DNA
ctagagaaactgttgcataa

SEQ ID NO: 27587 - DNA, 20 bp, synthetic construct
  source 1..20: mol_type = other DNA
atttacctgaacctctgaat

SEQ ID NO: 27588 - DNA, 20 bp, synthetic construct
  source 1..20: mol_type = other DNA
tttagcagcaaagttttcaa

SEQ ID NO: 27589 - DNA, 20 bp, synthetic construct
  source 1..20: mol_type = other DNA
actaagaaaaaacaaacaca

SEQ ID NO: 27590 - DNA, 20 bp, synthetic construct
  source 1..20: mol_type = other DNA
catggcatgccttgatgcta

SEQ ID NO: 27591 - DNA, 20 bp, synthetic construct
  source 1..20: mol_type = other DNA
cctctcatcaagcctggtaa

SEQ ID NO: 27592 - DNA, 20 bp, synthetic construct
  source 1..20: mol_type = other DNA
actacctggctgtttgtggt

SEQ ID NO: 27593 - DNA, 20 bp, synthetic construct
  source 1..20: mol_type = other DNA
tatctatttggatgtctgca

SEQ ID NO: 27594 - DNA, 20 bp, synthetic construct
  source 1..20: mol_type = other DNA
gcctgttgactccaattcag

SEQ ID NO: 27595 - DNA, 20 bp, synthetic construct
  source 1..20: mol_type = other DNA
agcctgtgcacctgaaagaa

SEQ ID NO: 27596 - DNA, 20 bp, synthetic construct
  source 1..20: mol_type = other DNA
agataatgtagaaaataata

SEQ ID NO: 27597 - DNA, 20 bp, synthetic construct
  source 1..20: mol_type = other DNA
agaccccaggtcatcagttt

SEQ ID NO: 27598 - DNA, 20 bp, synthetic construct
  source 1..20: mol_type = other DNA
ttgcataagggtcacagctt

SEQ ID NO: 27599 - DNA, 20 bp, synthetic construct
  source 1..20: mol_type = other DNA
ttccctggctacccgatgtc

SEQ ID NO: 27600 - DNA, 20 bp, synthetic construct
  source 1..20: mol_type = other DNA
cacaactacctggctgtttg

SEQ ID NO: 27601 - DNA, 20 bp, synthetic construct
  source 1..20: mol_type = other DNA
caagaactaaatggggaaat

SEQ ID NO: 27602 - DNA, 20 bp, synthetic construct
  source 1..20: mol_type = other DNA
tgaacacttactggatgatg

SEQ ID NO: 27603 - DNA, 20 bp, synthetic construct
  source 1..20: mol_type = other DNA
caccagaaagtcccagttcc

SEQ ID NO: 27604 - DNA, 20 bp, synthetic construct
  source 1..20: mol_type = other DNA
gactaagaaaaaacaaacac

SEQ ID NO: 27605 - DNA, 20 bp, synthetic construct
  source 1..20: mol_type = other DNA
actagagaaactgttgcata

SEQ ID NO: 27606 - DNA, 20 bp, synthetic construct
  source 1..20: mol_type = other DNA
cgatcctgaaaattgaaaac

SEQ ID NO: 27607 - DNA, 20 bp, synthetic construct
  source 1..20: mol_type = other DNA
ctcacctaccacaaacagcc

SEQ ID NO: 27608 - DNA, 20 bp, synthetic construct
  source 1..20: mol_type = other DNA
agtagcgcagattctcctgc

SEQ ID NO: 27609 - DNA, 20 bp, synthetic construct
  source 1..20: mol_type = other DNA
catcttagagtttaacagat

SEQ ID NO: 27610 - DNA, 20 bp, synthetic construct
  source 1..20: mol_type = other DNA
tgcagcagcagtcgtacaag

SEQ ID NO: 27611 - DNA, 20 bp, synthetic construct
  source 1..20: mol_type = other DNA
gagcctgtgcacctgaaaga

SEQ ID NO: 27612 - DNA, 20 bp, synthetic construct
  source 1..20: mol_type = other DNA
agatgatgaaaatagtggga

SEQ ID NO: 27613 - DNA, 20 bp, synthetic construct
  source 1..20: mol_type = other DNA
ttctgtacctcatcaagaat

SEQ ID NO: 27614 - DNA, 20 bp, synthetic construct
  source 1..20: mol_type = other DNA
catccaaaactgatgacctg

SEQ ID NO: 27615 - DNA, 20 bp, synthetic construct
  source 1..20: mol_type = other DNA
ccaagaactaaatggggaaa

SEQ ID NO: 27616 - DNA, 20 bp, synthetic construct
  source 1..20: mol_type = other DNA
acaaagttagaataatcatc

SEQ ID NO: 27617 - DNA, 20 bp, synthetic construct
  source 1..20: mol_type = other DNA
acctctgaattggagtcaac

SEQ ID NO: 27618 - DNA, 20 bp, synthetic construct
  source 1..20: mol_type = other DNA
tcatcatctcatccagacat

SEQ ID NO: 27619 - DNA, 20 bp, synthetic construct
  source 1..20: mol_type = other DNA
ttacaaagagatctccgtat

SEQ ID NO: 27620 - DNA, 20 bp, synthetic construct
  source 1..20: mol_type = other DNA
cttagcatcaaggcatgcca

SEQ ID NO: 27621 - DNA, 20 bp, synthetic construct
  source 1..20: mol_type = other DNA
gagatgatgaaaatagtggg

SEQ ID NO: 27622 - DNA, 20 bp, synthetic construct
  source 1..20: mol_type = other DNA
ctgattcctctcatcaagcc

SEQ ID NO: 27623 - DNA, 20 bp, synthetic construct
  source 1..20: mol_type = other DNA
tgagccgatgcaatcaaaac

SEQ ID NO: 27624 - DNA, 20 bp, synthetic construct
  source 1..20: mol_type = other DNA
ttgctacagccaagagacaa

SEQ ID NO: 27625 - DNA, 20 bp, synthetic construct
  source 1..20: mol_type = other DNA
attacttggaacatcttcat

SEQ ID NO: 27626 - DNA, 20 bp, synthetic construct
  source 1..20: mol_type = other DNA
gtgcttccttcagagtacta

SEQ ID NO: 27627 - DNA, 20 bp, synthetic construct
  source 1..20: mol_type = other DNA
ctaggaaaacatcttggact

SEQ ID NO: 27628 - DNA, 20 bp, synthetic construct
  source 1..20: mol_type = other DNA
gctcaaggaagaactcggat

SEQ ID NO: 27629 - DNA, 20 bp, synthetic construct
  source 1..20: mol_type = other DNA
ccagttccaggtagaagagg

SEQ ID NO: 27630 - DNA, 20 bp, synthetic construct
  source 1..20: mol_type = other DNA
cccttaccaggcttgatgag

SEQ ID NO: 27631 - DNA, 20 bp, synthetic construct
  source 1..20: mol_type = other DNA
tgactccaattcagaggttc

SEQ ID NO: 27632 - DNA, 20 bp, synthetic construct
  source 1..20: mol_type = other DNA
gtgcagcagcagtcgtacaa

SEQ ID NO: 27633 - DNA, 20 bp, synthetic construct
  source 1..20: mol_type = other DNA
gatattggctaaatacagaa

SEQ ID NO: 27634 - DNA, 20 bp, synthetic construct
  source 1..20: mol_type = other DNA
tatttaatcgaagagacccc

SEQ ID NO: 27635 - DNA, 20 bp, synthetic construct
  source 1..20: mol_type = other DNA
ctagtccaagatgttttcct

SEQ ID NO: 27636 - DNA, 20 bp, synthetic construct
  source 1..20: mol_type = other DNA
ctgcagaatactgaacatga

SEQ ID NO: 27637 - DNA, 20 bp, synthetic construct
  source 1..20: mol_type = other DNA
tttcatccaagaactaaatg

SEQ ID NO: 27638 - DNA, 20 bp, synthetic construct
  source 1..20: mol_type = other DNA
aatgaactgataacggagaa

SEQ ID NO: 27639 - DNA, 20 bp, synthetic construct
  source 1..20: mol_type = other DNA
atccagacatcgggtagcca

SEQ ID NO: 27640 - DNA, 20 bp, synthetic construct
  source 1..20: mol_type = other DNA
gtctaattcagccacagcag

SEQ ID NO: 27641 - DNA, 20 bp, synthetic construct
  source 1..20: mol_type = other DNA
gtttctccgtatgtattact

SEQ ID NO: 27642 - DNA, 20 bp, synthetic construct
  source 1..20: mol_type = other DNA
catcatctcatccagacatc

SEQ ID NO: 27643 - DNA, 20 bp, synthetic construct
  source 1..20: mol_type = other DNA
aaaaatgggctagaaagaaa

SEQ ID NO: 27644 - DNA, 20 bp, synthetic construct
  source 1..20: mol_type = other DNA
caggaaccttaatctcacct

SEQ ID NO: 27645 - DNA, 20 bp, synthetic construct
  source 1..20: mol_type = other DNA
cttctacacagttatttgcc

SEQ ID NO: 27646 - DNA, 20 bp, synthetic construct
  source 1..20: mol_type = other DNA
gacaaatactggaaagttct

SEQ ID NO: 27647 - DNA, 20 bp, synthetic construct
  source 1..20: mol_type = other DNA
tctgcagcttaagtaaactg

SEQ ID NO: 27648 - DNA, 20 bp, synthetic construct
  source 1..20: mol_type = other DNA
cagctttggccatttatgag

SEQ ID NO: 27649 - DNA, 20 bp, synthetic construct
  source 1..20: mol_type = other DNA
tctcacctaggaaaacatct

SEQ ID NO: 27650 - DNA, 20 bp, synthetic construct
  source 1..20: mol_type = other DNA
atttcatccaagaactaaat

SEQ ID NO: 27651 - DNA, 20 bp, synthetic construct
  source 1..20: mol_type = other DNA
cacaggctcactcgtaccac

SEQ ID NO: 27652 - DNA, 20 bp, synthetic construct
  source 1..20: mol_type = other DNA
ctagggaaaatccaattgtt

SEQ ID NO: 27653 - DNA, 20 bp, synthetic construct
  source 1..20: mol_type = other DNA
aaagaaacttacgcagtaca

SEQ ID NO: 27654 - DNA, 20 bp, synthetic construct
  source 1..20: mol_type = other DNA
tatacaaactttgggaagct

SEQ ID NO: 27655 - DNA, 20 bp, synthetic construct
  source 1..20: mol_type = other DNA
ggtcgcaaatgaaaagtatg

SEQ ID NO: 27656 - DNA, 20 bp, synthetic construct
  source 1..20: mol_type = other DNA
actgcagaatactgaacatg

SEQ ID NO: 27657 - DNA, 20 bp, synthetic construct
  source 1..20: mol_type = other DNA
gagatgtataaaagagctca

SEQ ID NO: 27658 - DNA, 20 bp, synthetic construct
  source 1..20: mol_type = other DNA
tagcagttaaaaaggtatga

SEQ ID NO: 27659 - DNA, 20 bp, synthetic construct
  source 1..20: mol_type = other DNA
agaggttcaggtaaatatta

SEQ ID NO: 27660 - DNA, 20 bp, synthetic construct
  source 1..20: mol_type = other DNA
ggactttctggtgtaactac

SEQ ID NO: 27661 - DNA, 20 bp, synthetic construct
  source 1..20: mol_type = other DNA
tatgcaacagtttctctagt

SEQ ID NO: 27662 - DNA, 20 bp, synthetic construct
  source 1..20: mol_type = other DNA
attaaaacctattcttgatg

SEQ ID NO: 27663 - DNA, 20 bp, synthetic construct
  source 1..20: mol_type = other DNA
tcctctcatcaagcctggta

SEQ ID NO: 27664 - DNA, 20 bp, synthetic construct
  source 1..20: mol_type = other DNA
tacaaactttgggaagctgg

SEQ ID NO: 27665 - DNA, 20 bp, synthetic construct
  source 1..20: mol_type = other DNA
actgaaactaaagagtccag

SEQ ID NO: 27666 - DNA, 20 bp, synthetic construct
  source 1..20: mol_type = other DNA
ggtgcagcagcagtcgtaca

SEQ ID NO: 27667 - DNA, 20 bp, synthetic construct
  source 1..20: mol_type = other DNA
aaagagctcaaggaagaact

SEQ ID NO: 27668 - DNA, 20 bp, synthetic construct
  source 1..20: mol_type = other DNA
cttactgtacaacaagctgc

SEQ ID NO: 27669 - DNA, 20 bp, synthetic construct
  source 1..20: mol_type = other DNA
tcagccacagcagtggcaaa

SEQ ID NO: 27670 - DNA, 20 bp, synthetic construct
  source 1..20: mol_type = other DNA
actcaaaatgtaagcagctg

SEQ ID NO: 27671 - DNA, 20 bp, synthetic construct
  source 1..20: mol_type = other DNA
atacaaactttgggaagctg

SEQ ID NO: 27672 - DNA, 20 bp, synthetic construct
  source 1..20: mol_type = other DNA
tggtcattcctgttccaatg

SEQ ID NO: 27673 - DNA, 20 bp, synthetic construct
  source 1..20: mol_type = other DNA
gtcccagttccaggtagaag

SEQ ID NO: 27674 - DNA, 20 bp, synthetic construct
  source 1..20: mol_type = other DNA
ctgcagcttaagtaaactga

SEQ ID NO: 27675 - DNA, 20 bp, synthetic construct
  source 1..20: mol_type = other DNA
catccctctgtgtatctgaa

SEQ ID NO: 27676 - DNA, 20 bp, synthetic construct
  source 1..20: mol_type = other DNA
tcttaacatacttgaacatc

SEQ ID NO: 27677 - DNA, 20 bp, synthetic construct
  source 1..20: mol_type = other DNA
cacaagcctctacaaagagc

SEQ ID NO: 27678 - DNA, 20 bp, synthetic construct
  source 1..20: mol_type = other DNA
tctagggaaaatccaattgt

SEQ ID NO: 27679 - DNA, 20 bp, synthetic construct
  source 1..20: mol_type = other DNA
tacccttctttcaggtgcac

SEQ ID NO: 27680 - DNA, 20 bp, synthetic construct
  source 1..20: mol_type = other DNA
ctgtaccataaatttggacc

SEQ ID NO: 27681 - DNA, 20 bp, synthetic construct
  source 1..20: mol_type = other DNA
gagactggtgaaaacactct

SEQ ID NO: 27682 - DNA, 20 bp, synthetic construct
  source 1..20: mol_type = other DNA
ctgacgtccgggtcatctgc

SEQ ID NO: 27683 - DNA, 20 bp, synthetic construct
  source 1..20: mol_type = other DNA
cagccagtggccgctcaggt

SEQ ID NO: 27684 - DNA, 20 bp, synthetic construct
  source 1..20: mol_type = other DNA
catccaggccaacaactgcg

SEQ ID NO: 27685 - DNA, 20 bp, synthetic construct
  source 1..20: mol_type = other DNA
gggtccctgggaaatggcga

SEQ ID NO: 27686 - DNA, 20 bp, synthetic construct
  source 1..20: mol_type = other DNA
cttaccgtgtggcgagcttg

SEQ ID NO: 27687 - DNA, 20 bp, synthetic construct
  source 1..20: mol_type = other DNA
cgagcagcccggagccgagt

SEQ ID NO: 27688 - DNA, 20 bp, synthetic construct
  source 1..20: mol_type = other DNA
ctgcaagtcctccttctgga

SEQ ID NO: 27689 - DNA, 20 bp, synthetic construct
  source 1..20: mol_type = other DNA
tgtaggaagagccgcaccag

SEQ ID NO: 27690 - DNA, 20 bp, synthetic construct
  source 1..20: mol_type = other DNA
cagcccggagccgagtcgga

SEQ ID NO: 27691 - DNA, 20 bp, synthetic construct
  source 1..20: mol_type = other DNA
gcgtgagctggaagaggttg

SEQ ID NO: 27692 - DNA, 20 bp, synthetic construct
  source 1..20: mol_type = other DNA
agcatggcggtggaggacga

SEQ ID NO: 27693 - DNA, 20 bp, synthetic construct
  source 1..20: mol_type = other DNA
tacctatgatggaatccctc

SEQ ID NO: 27694 - DNA, 20 bp, synthetic construct
  source 1..20: mol_type = other DNA
gccgtaggttctcctgcaac

SEQ ID NO: 27695 - DNA, 20 bp, synthetic construct
  source 1..20: mol_type = other DNA
ccagctcacgccgcaccaca

SEQ ID NO: 27696 - DNA, 20 bp, synthetic construct
  source 1..20: mol_type = other DNA
ccagcgtcacggtggcgtag

SEQ ID NO: 27697 - DNA, 20 bp, synthetic construct
  source 1..20: mol_type = other DNA
cggacgggtggtagacggtg

SEQ ID NO: 27698 - DNA, 20 bp, synthetic construct
  source 1..20: mol_type = other DNA
gcggctgaacgtggtataca

SEQ ID NO: 27699 - DNA, 20 bp, synthetic construct
  source 1..20: mol_type = other DNA
gaagagccgcaccagcggga

SEQ ID NO: 27700 - DNA, 20 bp, synthetic construct
  source 1..20: mol_type = other DNA
actgccgcaggactttcaac

SEQ ID NO: 27701 - DNA, 20 bp, synthetic construct
  source 1..20: mol_type = other DNA
gtaggcggacgggtggtaga

SEQ ID NO: 27702 - DNA, 20 bp, synthetic construct
  source 1..20: mol_type = other DNA
gcatggcggtggaggacgag

SEQ ID NO: 27703 - DNA, 20 bp, synthetic construct
  source 1..20: mol_type = other DNA
ggaggaagtacctgggtggg

SEQ ID NO: 27704 - DNA, 20 bp, synthetic construct
  source 1..20: mol_type = other DNA
cccctacgccaccgtgacgc

SEQ ID NO: 27705 - DNA, 20 bp, synthetic construct
  source 1..20: mol_type = other DNA
cttgcagggcaaagtgcacc

SEQ ID NO: 27706 - DNA, 20 bp, synthetic construct
  source 1..20: mol_type = other DNA
gccagcgtcacggtggcgta

SEQ ID NO: 27707 - DNA, 20 bp, synthetic construct
  source 1..20: mol_type = other DNA
catctgcgggagagagaagc

SEQ ID NO: 27708 - DNA, 20 bp, synthetic construct
  source 1..20: mol_type = other DNA
ttaccacgcctcgtaggagc

SEQ ID NO: 27709 - DNA, 20 bp, synthetic construct
  source 1..20: mol_type = other DNA
caggctgccgagggtctgaa

SEQ ID NO: 27710 - DNA, 20 bp, synthetic construct
  source 1..20: mol_type = other DNA
tgactattacagccctctgc

SEQ ID NO: 27711 - DNA, 20 bp, synthetic construct
  source 1..20: mol_type = other DNA
tgtataccacgttcagccgc

SEQ ID NO: 27712 - DNA, 20 bp, synthetic construct
  source 1..20: mol_type = other DNA
ggctcttgctaccattgtcc

SEQ ID NO: 27713 - DNA, 20 bp, synthetic construct
  source 1..20: mol_type = other DNA
gcagcacgtggacgctgact

SEQ ID NO: 27714 - DNA, 20 bp, synthetic construct
  source 1..20: mol_type = other DNA
acgagaccatgaagctggcg

SEQ ID NO: 27715 - DNA, 20 bp, synthetic construct
  source 1..20: mol_type = other DNA
ccaggtacttcctccagccc

SEQ ID NO: 27716 - DNA, 20 bp, synthetic construct
  source 1..20: mol_type = other DNA
gaagaagatgtcacacatga

SEQ ID NO: 27717 - DNA, 20 bp, synthetic construct
  source 1..20: mol_type = other DNA
cgctcaggtaggcggacggg

SEQ ID NO: 27718 - DNA, 20 bp, synthetic construct
  source 1..20: mol_type = other DNA
gccctgcaaggcacaaggat

SEQ ID NO: 27719 - DNA, 20 bp, synthetic construct
  source 1..20: mol_type = other DNA
gcccaaggacggaagcgctt

SEQ ID NO: 27720 - DNA, 20 bp, synthetic construct
  source 1..20: mol_type = other DNA
cattcccatcgagaacatcc

SEQ ID NO: 27721 - DNA, 20 bp, synthetic construct
  source 1..20: mol_type = other DNA
gcaaacctcgcccaggatgt

SEQ ID NO: 27722 - DNA, 20 bp, synthetic construct
  source 1..20: mol_type = other DNA
ggaaccaggtgtccctgttg

SEQ ID NO: 27723 - DNA, 20 bp, synthetic construct
  source 1..20: mol_type = other DNA
cgttcagccgcagggagccc

SEQ ID NO: 27724 - DNA, 20 bp, synthetic construct
  source 1..20: mol_type = other DNA
cagcccatcgtgcttaaaga

SEQ ID NO: 27725 - DNA, 20 bp, synthetic construct
  source 1..20: mol_type = other DNA
gcaggaggcggccgtcccgc

SEQ ID NO: 27726 - DNA, 20 bp, synthetic construct
  source 1..20: mol_type = other DNA
ctgcagtgtacctgacgtcc

SEQ ID NO: 27727 - DNA, 20 bp, synthetic construct
  source 1..20: mol_type = other DNA
cattgatggggaccgtgaga

SEQ ID NO: 27728 - DNA, 20 bp, synthetic construct
  source 1..20: mol_type = other DNA
caggtacttcctccagcccc

SEQ ID NO: 27729 - DNA, 20 bp, synthetic construct
  source 1..20: mol_type = other DNA
cacccgtccgcctacctgag

SEQ ID NO: 27730 - DNA, 20 bp, synthetic construct
  source 1..20: mol_type = other DNA
acacaggttcatgatcaaga

SEQ ID NO: 27731 - DNA, 20 bp, synthetic construct
  source 1..20: mol_type = other DNA
actttgccctgcaaggcaca

SEQ ID NO: 27732 - DNA, 20 bp, synthetic construct
  source 1..20: mol_type = other DNA
tggacgccagtgagtttcct

SEQ ID NO: 27733 - DNA, 20 bp, synthetic construct
  source 1..20: mol_type = other DNA
cgcagggagcccaggtcgtc

SEQ ID NO: 27734 - DNA, 20 bp, synthetic construct
  source 1..20: mol_type = other DNA
ggttttcaggaccaaaattg

SEQ ID NO: 27735 - DNA, 20 bp, synthetic construct
  source 1..20: mol_type = other DNA
agcacagccagtggccgctc

SEQ ID NO: 27736 - DNA, 20 bp, synthetic construct
  source 1..20: mol_type = other DNA
tgagcagcttcatcttcctg

SEQ ID NO: 27737 - DNA, 20 bp, synthetic construct
  source 1..20: mol_type = other DNA
cctggaacatctgaggacac

SEQ ID NO: 27738 - DNA, 20 bp, synthetic construct
  source 1..20: mol_type = other DNA
cccaggacccccagacgtcc

SEQ ID NO: 27739 - DNA, 20 bp, synthetic construct
  source 1..20: mol_type = other DNA
ggcctctgtggagggcggag

SEQ ID NO: 27740 - DNA, 20 bp, synthetic construct
  source 1..20: mol_type = other DNA
tcacagatttggacttggac

SEQ ID NO: 27741 - DNA, 20 bp, synthetic construct
  source 1..20: mol_type = other DNA
gacaggtgacgaaagctccg

SEQ ID NO: 27742 - DNA, 20 bp, synthetic construct
  source 1..20: mol_type = other DNA
cttcacctccgcgctggcga

SEQ ID NO: 27743 - DNA, 20 bp, synthetic construct
  source 1..20: mol_type = other DNA
tgtcagcgtcctggacgtct

SEQ ID NO: 27744 - DNA, 20 bp, synthetic construct
  source 1..20: mol_type = other DNA
catcgagaacatcctggcag

SEQ ID NO: 27745 - DNA, 20 bp, synthetic construct
  source 1..20: mol_type = other DNA
ttcctcggaagatggtgttg

SEQ ID NO: 27746 - DNA, 20 bp, synthetic construct
  source 1..20: mol_type = other DNA
gtcacattgcccattcacga

SEQ ID NO: 27747 - DNA, 20 bp, synthetic construct
  source 1..20: mol_type = other DNA
ccccagactcagtgatggcg

SEQ ID NO: 27748 - DNA, 20 bp, synthetic construct
  source 1..20: mol_type = other DNA
cctccagcttctccactgcc

SEQ ID NO: 27749 - DNA, 20 bp, synthetic construct
  source 1..20: mol_type = other DNA
gtctctatcgaaaatgtaga

SEQ ID NO: 27750 - DNA, 20 bp, synthetic construct
  source 1..20: mol_type = other DNA
tggtcctgaaaacctcctcc

SEQ ID NO: 27751 - DNA, 20 bp, synthetic construct
  source 1..20: mol_type = other DNA
gggactcacagatttggact

SEQ ID NO: 27752 - DNA, 20 bp, synthetic construct
  source 1..20: mol_type = other DNA
tgccgtaggttctcctgcaa

SEQ ID NO: 27753 - DNA, 20 bp, synthetic construct
  source 1..20: mol_type = other DNA
cgtgctcacctcctcgatgg

SEQ ID NO: 27754 - DNA, 20 bp, synthetic construct
  source 1..20: mol_type = other DNA
tggatgtacagcgcacgctc

SEQ ID NO: 27755 - DNA, 20 bp, synthetic construct
  source 1..20: mol_type = other DNA
agcgaggtcatcacagacac

SEQ ID NO: 27756 - DNA, 20 bp, synthetic construct
  source 1..20: mol_type = other DNA
ttacccttctttaagcacga

SEQ ID NO: 27757 - DNA, 20 bp, synthetic construct
  source 1..20: mol_type = other DNA
ttcaacagcaggtcccgcag

SEQ ID NO: 27758 - DNA, 20 bp, synthetic construct
  source 1..20: mol_type = other DNA
agggaaggtggccatccaga

SEQ ID NO: 27759 - DNA, 20 bp, synthetic construct
  source 1..20: mol_type = other DNA
acctgtgtgaagagcacaca

SEQ ID NO: 27760 - DNA, 20 bp, synthetic construct
  source 1..20: mol_type = other DNA
gtggtaggtaaattcatggt

SEQ ID NO: 27761 - DNA, 20 bp, synthetic construct
  source 1..20: mol_type = other DNA
gaccccaacaccatcttccg

SEQ ID NO: 27762 - DNA, 20 bp, synthetic construct
  source 1..20: mol_type = other DNA
gtccctgggaaatggcgatg

SEQ ID NO: 27763 - DNA, 20 bp, synthetic construct
  source 1..20: mol_type = other DNA
cacattgcccattcacgatg

SEQ ID NO: 27764 - DNA, 20 bp, synthetic construct
  source 1..20: mol_type = other DNA
aaagaagggtaaggagggta

SEQ ID NO: 27765 - DNA, 20 bp, synthetic construct
  source 1..20: mol_type = other DNA
gatctgttatcaagtgagaa

SEQ ID NO: 27766 - DNA, 20 bp, synthetic construct
  source 1..20: mol_type = other DNA
catcctggcagtggagaagc

SEQ ID NO: 27767 - DNA, 20 bp, synthetic construct
  source 1..20: mol_type = other DNA
tgaggcgcttctggttgcac

SEQ ID NO: 27768 - DNA, 20 bp, synthetic construct
  source 1..20: mol_type = other DNA
gtcagcgtcctggacgtctg

SEQ ID NO: 27769 - DNA, 20 bp, synthetic construct
  source 1..20: mol_type = other DNA
cggtcactcaccgtgtggtg

SEQ ID NO: 27770 - DNA, 20 bp, synthetic construct
  source 1..20: mol_type = other DNA
gcactcaccctggaagcgct

SEQ ID NO: 27771 - DNA, 20 bp, synthetic construct
  source 1..20: mol_type = other DNA
gctggaggaagtacctgggt

SEQ ID NO: 27772 - DNA, 20 bp, synthetic construct
  source 1..20: mol_type = other DNA
cggcgtgagctggaagaggt

SEQ ID NO: 27773 - DNA, 20 bp, synthetic construct
  source 1..20: mol_type = other DNA
gaaggtggccatccagaagg

SEQ ID NO: 27774 - DNA, 20 bp, synthetic construct
  source 1..20: mol_type = other DNA
cactgccaggatgttctcga

SEQ ID NO: 27775 - DNA, 20 bp, synthetic construct
  source 1..20: mol_type = other DNA
ctgcacggtgaacctggacc

SEQ ID NO: 27776 - DNA, 20 bp, synthetic construct
  source 1..20: mol_type = other DNA
ggcagtggagaagctggagg

SEQ ID NO: 27777 - DNA, 20 bp, synthetic construct
  source 1..20: mol_type = other DNA
ggtagacggtgaggcgcttc

SEQ ID NO: 27778 - DNA, 20 bp, synthetic construct
  source 1..20: mol_type = other DNA
tggccgctcaggtaggcgga

SEQ ID NO: 27779 - DNA, 20 bp, synthetic construct
  source 1..20: mol_type = other DNA
cgggcttcagggtgacatgc

SEQ ID NO: 27780 - DNA, 20 bp, synthetic construct
  source 1..20: mol_type = other DNA
ggtttgccgggagaagcagg

SEQ ID NO: 27781 - DNA, 20 bp, synthetic construct
  source 1..20: mol_type = other DNA
ccgtgtggtgcggcgtgagc

SEQ ID NO: 27782 - DNA, 20 bp, synthetic construct
  source 1..20: mol_type = other DNA
tccaagaccgttcagaccct

SEQ ID NO: 27783 - DNA, 20 bp, synthetic construct
  source 1..20: mol_type = other DNA
actttaaatggaatgagtgg

SEQ ID NO: 27784 - DNA, 20 bp, synthetic construct
  source 1..20: mol_type = other DNA
tttcacagggtttgtggctc

SEQ ID NO: 27785 - DNA, 20 bp, synthetic construct
  source 1..20: mol_type = other DNA
ggtccgcttcacctccgcgc

SEQ ID NO: 27786 - DNA, 20 bp, synthetic construct
  source 1..20: mol_type = other DNA
gctaaagcaagtcatcgctg

SEQ ID NO: 27787 - DNA, 20 bp, synthetic construct
  source 1..20: mol_type = other DNA
tcaacagcaggtcccgcaga

SEQ ID NO: 27788 - DNA, 20 bp, synthetic construct
  source 1..20: mol_type = other DNA
tgaaaacctcctcctggtcc

SEQ ID NO: 27789 - DNA, 20 bp, synthetic construct
  source 1..20: mol_type = other DNA
tctcccggcaaacctcgccc

SEQ ID NO: 27790 - DNA, 20 bp, synthetic construct
  source 1..20: mol_type = other DNA
gcaaagtgcacctggagctg

SEQ ID NO: 27791 - DNA, 20 bp, synthetic construct
  source 1..20: mol_type = other DNA
tgggaatgctgtagagaggc

SEQ ID NO: 27792 - DNA, 20 bp, synthetic construct
  source 1..20: mol_type = other DNA
ccagtggccgctcaggtagg

SEQ ID NO: 27793 - DNA, 20 bp, synthetic construct
  source 1..20: mol_type = other DNA
gagttttaaggagtcctaca

SEQ ID NO: 27794 - DNA, 20 bp, synthetic construct
  source 1..20: mol_type = other DNA
tgtgtatgacggcccggagc

SEQ ID NO: 27795 - DNA, 20 bp, synthetic construct
  source 1..20: mol_type = other DNA
tagcaatccctcatcttgct

SEQ ID NO: 27796 - DNA, 20 bp, synthetic construct
  source 1..20: mol_type = other DNA
acgctaaagcaagtcatcgc

SEQ ID NO: 27797 - DNA, 20 bp, synthetic construct
  source 1..20: mol_type = other DNA
gcagcccgtgtcagcgtctg

SEQ ID NO: 27798 - DNA, 20 bp, synthetic construct
  source 1..20: mol_type = other DNA
cctggcactcgacgatgctg

SEQ ID NO: 27799 - DNA, 20 bp, synthetic construct
  source 1..20: mol_type = other DNA
caagatcggtgagtgtccgc

SEQ ID NO: 27800 - DNA, 20 bp, synthetic construct
  source 1..20: mol_type = other DNA
gaagggtaaggagggtaagg

SEQ ID NO: 27801 - DNA, 20 bp, synthetic construct
  source 1..20: mol_type = other DNA
cattcacgatggggaggccc

SEQ ID NO: 27802 - DNA, 20 bp, synthetic construct
  source 1..20: mol_type = other DNA
tcacattgcccattcacgat

SEQ ID NO: 27803 - DNA, 20 bp, synthetic construct
  source 1..20: mol_type = other DNA
gtaggaagagccgcaccagc

SEQ ID NO: 27804 - DNA, 20 bp, synthetic construct
  source 1..20: mol_type = other DNA
gaagggtcctgccagcgtca

SEQ ID NO: 27805 - DNA, 20 bp, synthetic construct
  source 1..20: mol_type = other DNA
ggctggaggaagtacctggg

SEQ ID NO: 27806 - DNA, 20 bp, synthetic construct
  source 1..20: mol_type = other DNA
ccaggccaacaactgcgtgg

SEQ ID NO: 27807 - DNA, 20 bp, synthetic construct
  source 1..20: mol_type = other DNA
gcggagctggcgcgctgtgg

SEQ ID NO: 27808 - DNA, 20 bp, synthetic construct
  source 1..20: mol_type = other DNA
ccgcacctgcgcccggccgg

SEQ ID NO: 27809 - DNA, 20 bp, synthetic construct
  source 1..20: mol_type = other DNA
tctgcaggacaacgtggagc

SEQ ID NO: 27810 - DNA, 20 bp, synthetic construct
  source 1..20: mol_type = other DNA
tgagagagaccgctggatcg

SEQ ID NO: 27811 - DNA, 20 bp, synthetic construct
  source 1..20: mol_type = other DNA
tggatccctgaagttcccca

SEQ ID NO: 27812 - DNA, 20 bp, synthetic construct
  source 1..20: mol_type = other DNA
cgccagctccttgtagcgct

SEQ ID NO: 27813 - DNA, 20 bp, synthetic construct
  source 1..20: mol_type = other DNA
aaccgtgccccgtaggtgct

SEQ ID NO: 27814 - DNA, 20 bp, synthetic construct
  source 1..20: mol_type = other DNA
tcccaacaggtaacctggac

SEQ ID NO: 27815 - DNA, 20 bp, synthetic construct
  source 1..20: mol_type = other DNA
cagctccgcagggaaccagc

SEQ ID NO: 27816 - DNA, 20 bp, synthetic construct
  source 1..20: mol_type = other DNA
catacacccttacccatccc

SEQ ID NO: 27817 - DNA, 20 bp, synthetic construct
  source 1..20: mol_type = other DNA
cgagcgctacaaggagctgg

SEQ ID NO: 27818 - DNA, 20 bp, synthetic construct
  source 1..20: mol_type = other DNA
gttgtcctgcagatgggagt

SEQ ID NO: 27819 - DNA, 20 bp, synthetic construct
  source 1..20: mol_type = other DNA
ttctactgaggactgtgaag

SEQ ID NO: 27820 - DNA, 20 bp, synthetic construct
  source 1..20: mol_type = other DNA
aacagggtcctcgaaggccc

SEQ ID NO: 27821 - DNA, 20 bp, synthetic construct
  source 1..20: mol_type = other DNA
tccaggaagcattgcatggc

SEQ ID NO: 27822 - DNA, 20 bp, synthetic construct
  source 1..20: mol_type = other DNA
ccagacaggcacgttgggtg

SEQ ID NO: 27823 - DNA, 20 bp, synthetic construct
  source 1..20: mol_type = other DNA
ccgagcgacaagagaagcag

SEQ ID NO: 27824 - DNA, 20 bp, synthetic construct
  source 1..20: mol_type = other DNA
atatcgagcgaggggctggc

SEQ ID NO: 27825 - DNA, 20 bp, synthetic construct
  source 1..20: mol_type = other DNA
cagcacctacggggcacggt

SEQ ID NO: 27826 - DNA, 20 bp, synthetic construct
  source 1..20: mol_type = other DNA
tgtgcgcctccctcttcctg

SEQ ID NO: 27827 - DNA, 20 bp, synthetic construct
  source 1..20: mol_type = other DNA
atacacccttacccatcccg

SEQ ID NO: 27828 - DNA, 20 bp, synthetic construct
  source 1..20: mol_type = other DNA
ggaggagaggaggaggtgag

SEQ ID NO: 27829 - DNA, 20 bp, synthetic construct
  source 1..20: mol_type = other DNA
cctcagtgtagtaaagatcc

SEQ ID NO: 27830 - DNA, 20 bp, synthetic construct
  source 1..20: mol_type = other DNA
cgccagcttgacagacacta

SEQ ID NO: 27831 - DNA, 20 bp, synthetic construct
  source 1..20: mol_type = other DNA
ttgagatgcacacccagaat

SEQ ID NO: 27832 - DNA, 20 bp, synthetic construct
  source 1..20: mol_type = other DNA
tgtgcaacggcatctcccag

SEQ ID NO: 27833 - DNA, 20 bp, synthetic construct
  source 1..20: mol_type = other DNA
tattgaagttctgtagttgg

SEQ ID NO: 27834 - DNA, 20 bp, synthetic construct
  source 1..20: mol_type = other DNA
ctccatagtgtctgtcaagc

SEQ ID NO: 27835 - DNA, 20 bp, synthetic construct
  source 1..20: mol_type = other DNA
gaagcccagtccactactac

SEQ ID NO: 27836 - DNA, 20 bp, synthetic construct
  source 1..20: mol_type = other DNA
tatccaatacctacaaggag

SEQ ID NO: 27837 - DNA, 20 bp, synthetic construct
  source 1..20: mol_type = other DNA
gcagggaaggcctcatcagc

SEQ ID NO: 27838 - DNA, 20 bp, synthetic construct
  source 1..20: mol_type = other DNA
acactgatggctgtgatagg

SEQ ID NO: 27839 - DNA, 20 bp, synthetic construct
  source 1..20: mol_type = other DNA
tttttggagcagttctgcag

SEQ ID NO: 27840 - DNA, 20 bp, synthetic construct
  source 1..20: mol_type = other DNA
ttctgctcggagctgcggcg

SEQ ID NO: 27841 - DNA, 20 bp, synthetic construct
  source 1..20: mol_type = other DNA
gtttcctggggaaagagaga

SEQ ID NO: 27842 - DNA, 20 bp, synthetic construct
  source 1..20: mol_type = other DNA
cattctgggtgtgcatctca

SEQ ID NO: 27843 - DNA, 20 bp, synthetic construct
  source 1..20: mol_type = other DNA
ttcaaagccaccagtagtag

SEQ ID NO: 27844 - DNA, 20 bp, synthetic construct
  source 1..20: mol_type = other DNA
ggaagttgtgaggaaagccc

SEQ ID NO: 27845 - DNA, 20 bp, synthetic construct
  source 1..20: mol_type = other DNA
agttattcacctgagccacc

SEQ ID NO: 27846 - DNA, 20 bp, synthetic construct
  source 1..20: mol_type = other DNA
agccatgcctgactatctgg

SEQ ID NO: 27847 - DNA, 20 bp, synthetic construct
  source 1..20: mol_type = other DNA
tctgataatcagagaactgc

SEQ ID NO: 27848 - DNA, 20 bp, synthetic construct
  source 1..20: mol_type = other DNA
tacttacatccaccatcctc

SEQ ID NO: 27849 - DNA, 20 bp, synthetic construct
  source 1..20: mol_type = other DNA
atgcctgactatctggagga

SEQ ID NO: 27850 - DNA, 20 bp, synthetic construct
  source 1..20: mol_type = other DNA
ttacaaaataacagatcttc

SEQ ID NO: 27851 - DNA, 20 bp, synthetic construct
  source 1..20: mol_type = other DNA
atagctcttctggttccaga

SEQ ID NO: 27852 - DNA, 20 bp, synthetic construct
  source 1..20: mol_type = other DNA
ctgaccttattgatttcatg

SEQ ID NO: 27853 - DNA, 20 bp, synthetic construct
  source 1..20: mol_type = other DNA
ccttgttagcctccaagggt

SEQ ID NO: 27854 - DNA, 20 bp, synthetic construct
  source 1..20: mol_type = other DNA
attgtcgtagtttctggagg

SEQ ID NO: 27855 - DNA, 20 bp, synthetic construct
  source 1..20: mol_type = other DNA
atccaatacctacaaggagg

SEQ ID NO: 27856 - DNA, 20 bp, synthetic construct
  source 1..20: mol_type = other DNA
tggcttcatacagggagatg

SEQ ID NO: 27857 - DNA, 20 bp, synthetic construct
  source 1..20: mol_type = other DNA
actgcctacctaccaagaac

SEQ ID NO: 27858 - DNA, 20 bp, synthetic construct
  source 1..20: mol_type = other DNA
tataggtagggctgtggtta

SEQ ID NO: 27859 - DNA, 20 bp, synthetic construct
  source 1..20: mol_type = other DNA
gaaccatcagttgtacccac

SEQ ID NO: 27860 - DNA, 20 bp, synthetic construct
  source 1..20: mol_type = other DNA
ctcaaggtaggtgaggtgct

SEQ ID NO: 27861 - DNA, 20 bp, synthetic construct
  source 1..20: mol_type = other DNA
caatagatcgctccatggtg

SEQ ID NO: 27862 - DNA, 20 bp, synthetic construct
  source 1..20: mol_type = other DNA
cagatcttcaggcaaagtcc

SEQ ID NO: 27863 - DNA, 20 bp, synthetic construct
  source 1..20: mol_type = other DNA
cgatctattgctctgtgcaa

SEQ ID NO: 27864 - DNA, 20 bp, synthetic construct
  source 1..20: mol_type = other DNA
gtgtattgaagttctgtagt

SEQ ID NO: 27865 - DNA, 20 bp, synthetic construct
  source 1..20: mol_type = other DNA
acagaacttcaatacactga

SEQ ID NO: 27866 - DNA, 20 bp, synthetic construct
  source 1..20: mol_type = other DNA
gaaagacttgaactcaaggt

SEQ ID NO: 27867 - DNA, 20 bp, synthetic construct
  source 1..20: mol_type = other DNA
ttccccaaggaagacagccc

SEQ ID NO: 27868 - DNA, 20 bp, synthetic construct
  source 1..20: mol_type = other DNA
caggaactggtgaaagctaa

SEQ ID NO: 27869 - DNA, 20 bp, synthetic construct
  source 1..20: mol_type = other DNA
caagtccttgttagcctcca

SEQ ID NO: 27870 - DNA, 20 bp, synthetic construct
  source 1..20: mol_type = other DNA
tgagatgcacacccagaatg

SEQ ID NO: 27871 - DNA, 20 bp, synthetic construct
  source 1..20: mol_type = other DNA
tacctaccaagaactggaac

SEQ ID NO: 27872 - DNA, 20 bp, synthetic construct
  source 1..20: mol_type = other DNA
gttatccaatacctacaagg

SEQ ID NO: 27873 - DNA, 20 bp, synthetic construct
  source 1..20: mol_type = other DNA
cctaaagggaaaggagaatg

SEQ ID NO: 27874 - DNA, 20 bp, synthetic construct
  source 1..20: mol_type = other DNA
tcaggaactggtgaaagcta

SEQ ID NO: 27875 - DNA, 20 bp, synthetic construct
  source 1..20: mol_type = other DNA
gtcaggcatggcttcataca

SEQ ID NO: 27876 - DNA, 20 bp, synthetic construct
  source 1..20: mol_type = other DNA
caagaactatgatcacgacc

SEQ ID NO: 27877 - DNA, 20 bp, synthetic construct
  source 1..20: mol_type = other DNA
ttccagatggtcaaagagca

SEQ ID NO: 27878 - DNA, 20 bp, synthetic construct
  source 1..20: mol_type = other DNA
tgcctgactatctggaggac

SEQ ID NO: 27879 - DNA, 20 bp, synthetic construct
  source 1..20: mol_type = other DNA
gagacaccatcattcggaac

SEQ ID NO: 27880 - DNA, 20 bp, synthetic construct
  source 1..20: mol_type = other DNA
ataggtagggctgtggttaa

SEQ ID NO: 27881 - DNA, 20 bp, synthetic construct
  source 1..20: mol_type = other DNA
tgtcccacatgaaatcaata

SEQ ID NO: 27882 - DNA, 20 bp, synthetic construct
  source 1..20: mol_type = other DNA
cctggatctttactacactg

SEQ ID NO: 27883 - DNA, 20 bp, synthetic construct
  source 1..20: mol_type = other DNA
acatttgagttgtgtcaatc

SEQ ID NO: 27884 - DNA, 20 bp, synthetic construct
  source 1..20: mol_type = other DNA
cagctcaatctattccaagc

SEQ ID NO: 27885 - DNA, 20 bp, synthetic construct
  source 1..20: mol_type = other DNA
ctgcagatcaaagcagaaca

SEQ ID NO: 27886 - DNA, 20 bp, synthetic construct
  source 1..20: mol_type = other DNA
acagccttggattggcagtg

SEQ ID NO: 27887 - DNA, 20 bp, synthetic construct
  source 1..20: mol_type = other DNA
ctcagtgtagtaaagatcca

SEQ ID NO: 27888 - DNA, 20 bp, synthetic construct
  source 1..20: mol_type = other DNA
aagtccttgttagcctccaa

SEQ ID NO: 27889 - DNA, 20 bp, synthetic construct
  source 1..20: mol_type = other DNA
ccaaggctgtgattcagtct

SEQ ID NO: 27890 - DNA, 20 bp, synthetic construct
  source 1..20: mol_type = other DNA
gtgcaacggcatctcccagt

SEQ ID NO: 27891 - DNA, 20 bp, synthetic construct
  source 1..20: mol_type = other DNA
tccaaggctgtgattcagtc

SEQ ID NO: 27892 - DNA, 20 bp, synthetic construct
  source 1..20: mol_type = other DNA
tctgttatccaatacctaca

SEQ ID NO: 27893 - DNA, 20 bp, synthetic construct
  source 1..20: mol_type = other DNA
cttcatcaagttcatccagg

SEQ ID NO: 27894 - DNA, 20 bp, synthetic construct
  source 1..20: mol_type = other DNA
tgtgaaggaaaaccccacca

SEQ ID NO: 27895 - DNA, 20 bp, synthetic construct
  source 1..20: mol_type = other DNA
cagccttggattggcagtga

SEQ ID NO: 27896 - DNA, 20 bp, synthetic construct
  source 1..20: mol_type = other DNA
aaaaactcactggagctctg

SEQ ID NO: 27897 - DNA, 20 bp, synthetic construct
  source 1..20: mol_type = other DNA
tccggaaagacttgaactca

SEQ ID NO: 27898 - DNA, 20 bp, synthetic construct
  source 1..20: mol_type = other DNA
gtaattgtcgtagtttctgg

SEQ ID NO: 27899 - DNA, 20 bp, synthetic construct
  source 1..20: mol_type = other DNA
acagttcatcccgcagtctg

SEQ ID NO: 27900 - DNA, 20 bp, synthetic construct
  source 1..20: mol_type = other DNA
ccctacctataaggatgctt

SEQ ID NO: 27901 - DNA, 20 bp, synthetic construct
  source 1..20: mol_type = other DNA
aaccatcagttgtacccact

SEQ ID NO: 27902 - DNA, 20 bp, synthetic construct
  source 1..20: mol_type = other DNA
tcacaaacaatgcaaagatc

SEQ ID NO: 27903 - DNA, 20 bp, synthetic construct
  source 1..20: mol_type = other DNA
cagcttgacagacactatgg

SEQ ID NO: 27904 - DNA, 20 bp, synthetic construct
  source 1..20: mol_type = other DNA
cttgttagcctccaagggtg

SEQ ID NO: 27905 - DNA, 20 bp, synthetic construct
  source 1..20: mol_type = other DNA
ccattagcaaacacgtccag

SEQ ID NO: 27906 - DNA, 20 bp, synthetic construct
  source 1..20: mol_type = other DNA
gtcctccagatagtcaggca

SEQ ID NO: 27907 - DNA, 20 bp, synthetic construct
  source 1..20: mol_type = other DNA
ctgctcggagctgcggcgtg

SEQ ID NO: 27908 - DNA, 20 bp, synthetic construct
  source 1..20: mol_type = other DNA
gttccagatggtcaaagagc

SEQ ID NO: 27909 - DNA, 20 bp, synthetic construct
  source 1..20: mol_type = other DNA
actactactggtggctttga

SEQ ID NO: 27910 - DNA, 20 bp, synthetic construct
  source 1..20: mol_type = other DNA
aaggtacctgttccagttct

SEQ ID NO: 27911 - DNA, 20 bp, synthetic construct
  source 1..20: mol_type = other DNA
gacaattaccggcgagccta

SEQ ID NO: 27912 - DNA, 20 bp, synthetic construct
  source 1..20: mol_type = other DNA
tgaccttattgatttcatgt

SEQ ID NO: 27913 - DNA, 20 bp, synthetic construct
  source 1..20: mol_type = other DNA
ctccctcataaaatcaaagg

SEQ ID NO: 27914 - DNA, 20 bp, synthetic construct
  source 1..20: mol_type = other DNA
gacttcaagatccccattct

SEQ ID NO: 27915 - DNA, 20 bp, synthetic construct
  source 1..20: mol_type = other DNA
gcccagtccactactactgg

SEQ ID NO: 27916 - DNA, 20 bp, synthetic construct
  source 1..20: mol_type = other DNA
tccctgccggcagatgacca

SEQ ID NO: 27917 - DNA, 20 bp, synthetic construct
  source 1..20: mol_type = other DNA
cttgagatgcacacccagaa

SEQ ID NO: 27918 - DNA, 20 bp, synthetic construct
  source 1..20: mol_type = other DNA
cccagactgaatcacagcct

SEQ ID NO: 27919 - DNA, 20 bp, synthetic construct
  source 1..20: mol_type = other DNA
ggaggctgtggaacatggtg

SEQ ID NO: 27920 - DNA, 20 bp, synthetic construct
  source 1..20: mol_type = other DNA
acttgaactcaaggtaggtg

SEQ ID NO: 27921 - DNA, 20 bp, synthetic construct
  source 1..20: mol_type = other DNA
tgtgtcacagctcaatctcg

SEQ ID NO: 27922 - DNA, 20 bp, synthetic construct
  source 1..20: mol_type = other DNA
cttaccatggagcagatctt

SEQ ID NO: 27923 - DNA, 20 bp, synthetic construct
  source 1..20: mol_type = other DNA
caactcaaatgtgagtgtca

SEQ ID NO: 27924 - DNA, 20 bp, synthetic construct
  source 1..20: mol_type = other DNA
cactgatggctgtgataggt

SEQ ID NO: 27925 - DNA, 20 bp, synthetic construct
  source 1..20: mol_type = other DNA
cagaatggggatcttgaagt

SEQ ID NO: 27926 - DNA, 20 bp, synthetic construct
  source 1..20: mol_type = other DNA
acaaaaagtgggcttcaggt

SEQ ID NO: 27927 - DNA, 20 bp, synthetic construct
  source 1..20: mol_type = other DNA
actgcagatcaaagcagaac

SEQ ID NO: 27928 - DNA, 20 bp, synthetic construct
  source 1..20: mol_type = other DNA
ctcggagctgcggcgtgggg

SEQ ID NO: 27929 - DNA, 20 bp, synthetic construct
  source 1..20: mol_type = other DNA
gtctgtggacaagacatcct

SEQ ID NO: 27930 - DNA, 20 bp, synthetic construct
  source 1..20: mol_type = other DNA
tctatgagctttcctatgcc

SEQ ID NO: 27931 - DNA, 20 bp, synthetic construct
  source 1..20: mol_type = other DNA
ttatccaatacctacaagga

SEQ ID NO: 27932 - DNA, 20 bp, synthetic construct
  source 1..20: mol_type = other DNA
aatacactgatggctgtgat

SEQ ID NO: 27933 - DNA, 20 bp, synthetic construct
  source 1..20: mol_type = other DNA
tgaattggtccagctgcaag

SEQ ID NO: 27934 - DNA, 20 bp, synthetic construct
  source 1..20: mol_type = other DNA
cagctcaatctcgaggctca

SEQ ID NO: 27935 - DNA, 20 bp, synthetic construct
  source 1..20: mol_type = other DNA
gacggtgaggctcacactgg

SEQ ID NO: 27936 - DNA, 20 bp, synthetic construct
  source 1..20: mol_type = other DNA
ttgagttcaagtctttccgg

SEQ ID NO: 27937 - DNA, 20 bp, synthetic construct
  source 1..20: mol_type = other DNA
tggtacacttgctgacggtg

SEQ ID NO: 27938 - DNA, 20 bp, synthetic construct
  source 1..20: mol_type = other DNA
tccttgttagcctccaaggg

SEQ ID NO: 27939 - DNA, 20 bp, synthetic construct
  source 1..20: mol_type = other DNA
gtcaatgagatcgtccaggc

SEQ ID NO: 27940 - DNA, 20 bp, synthetic construct
  source 1..20: mol_type = other DNA
accaagactgggctaggaca

SEQ ID NO: 27941 - DNA, 20 bp, synthetic construct
  source 1..20: mol_type = other DNA
aagacttctgctcggagctg

SEQ ID NO: 27942 - DNA, 20 bp, synthetic construct
  source 1..20: mol_type = other DNA
cgacttcaagatccccattc

SEQ ID NO: 27943 - DNA, 20 bp, synthetic construct
  source 1..20: mol_type = other DNA
agcacagttgtcacaaaaag

SEQ ID NO: 27944 - DNA, 20 bp, synthetic construct
  source 1..20: mol_type = other DNA
gccaccagtagtagtggact

SEQ ID NO: 27945 - DNA, 20 bp, synthetic construct
  source 1..20: mol_type = other DNA
ctcccagtgggtacaactga

SEQ ID NO: 27946 - DNA, 20 bp, synthetic construct
  source 1..20: mol_type = other DNA
gcacagttgtcacaaaaagt

SEQ ID NO: 27947 - DNA, 20 bp, synthetic construct
  source 1..20: mol_type = other DNA
tttcctatgcccgggaacca

SEQ ID NO: 27948 - DNA, 20 bp, synthetic construct
  source 1..20: mol_type = other DNA
agtctgtggacaagacatcc

SEQ ID NO: 27949 - DNA, 20 bp, synthetic construct
  source 1..20: mol_type = other DNA
tacctgttccagttcttggt

SEQ ID NO: 27950 - DNA, 20 bp, synthetic construct
  source 1..20: mol_type = other DNA
tgtatagggccagtagctta

SEQ ID NO: 27951 - DNA, 20 bp, synthetic construct
  source 1..20: mol_type = other DNA
tttctgaccaagactgggct

SEQ ID NO: 27952 - DNA, 20 bp, synthetic construct
  source 1..20: mol_type = other DNA
gcaatagatcgctccatggt

SEQ ID NO: 27953 - DNA, 20 bp, synthetic construct
  source 1..20: mol_type = other DNA
tctgctcggagctgcggcgt

SEQ ID NO: 27954 - DNA, 20 bp, synthetic construct
  source 1..20: mol_type = other DNA
acaaaagcaatgcccgtgac

SEQ ID NO: 27955 - DNA, 20 bp, synthetic construct
  source 1..20: mol_type = other DNA
acggaactagtgacggcgac

SEQ ID NO: 27956 - DNA, 20 bp, synthetic construct
  source 1..20: mol_type = other DNA
gtttgacttgaacccggagt

SEQ ID NO: 27957 - DNA, 20 bp, synthetic construct
  source 1..20: mol_type = other DNA
ctgtgcatgggtgagggtga

SEQ ID NO: 27958 - DNA, 20 bp, synthetic construct
  source 1..20: mol_type = other DNA
tctctctgccccgccctggc

SEQ ID NO: 27959 - DNA, 20 bp, synthetic construct
  source 1..20: mol_type = other DNA
atagacagcgtgtgcgtggg

SEQ ID NO: 27960 - DNA, 20 bp, synthetic construct
  source 1..20: mol_type = other DNA
ggggcgggcacgccccctgc

SEQ ID NO: 27961 - DNA, 20 bp, synthetic construct
  source 1..20: mol_type = other DNA
gtcaggagccggggataggg

SEQ ID NO: 27962 - DNA, 20 bp, synthetic construct
  source 1..20: mol_type = other DNA
tctcgatgtgctccaccacg

SEQ ID NO: 27963 - DNA, 20 bp, synthetic construct
  source 1..20: mol_type = other DNA
cagggggcctgccctagggg

SEQ ID NO: 27964 - DNA, 20 bp, synthetic construct
  source 1..20: mol_type = other DNA
ccagaaccagtgaggagggc

SEQ ID NO: 27965 - DNA, 20 bp, synthetic construct
  source 1..20: mol_type = other DNA
ggggagagggcgcgaggaga

SEQ ID NO: 27966 - DNA, 20 bp, synthetic construct
  source 1..20: mol_type = other DNA
cacggtgaggagcagggggc

SEQ ID NO: 27967 - DNA, 20 bp, synthetic construct
  source 1..20: mol_type = other DNA
tatcagaatgtggagagtaa

SEQ ID NO: 27968 - DNA, 20 bp, synthetic construct
  source 1..20: mol_type = other DNA
cagcatactctgaggtacga

SEQ ID NO: 27969 - DNA, 20 bp, synthetic construct
  source 1..20: mol_type = other DNA
atctagactaggatgaggct

SEQ ID NO: 27970 - DNA, 20 bp, synthetic construct
  source 1..20: mol_type = other DNA
ttagaggcttgaggaaaccg

SEQ ID NO: 27971 - DNA, 20 bp, synthetic construct
  source 1..20: mol_type = other DNA
caaatgggcaagccttgcgg

SEQ ID NO: 27972 - DNA, 20 bp, synthetic construct
  source 1..20: mol_type = other DNA
acatagatattctctccctt

SEQ ID NO: 27973 - DNA, 20 bp, synthetic construct
  source 1..20: mol_type = other DNA
cgaccaacagtgtctcggtt

SEQ ID NO: 27974 - DNA, 20 bp, synthetic construct
  source 1..20: mol_type = other DNA
cacatgaccagggagagtat

SEQ ID NO: 27975 - DNA, 20 bp, synthetic construct
  source 1..20: mol_type = other DNA
ttattatcccctcctccctc

SEQ ID NO: 27976 - DNA, 20 bp, synthetic construct
  source 1..20: mol_type = other DNA
ccttgcggtggagtttattc

SEQ ID NO: 27977 - DNA, 20 bp, synthetic construct
  source 1..20: mol_type = other DNA
ggatgaggctggggaggagg

SEQ ID NO: 27978 - DNA, 20 bp, synthetic construct
  source 1..20: mol_type = other DNA
tatgcagtccattattgaca

SEQ ID NO: 27979 - DNA, 20 bp, synthetic construct
  source 1..20: mol_type = other DNA
cagcctattactttgtgtag

SEQ ID NO: 27980 - DNA, 20 bp, synthetic construct
  source 1..20: mol_type = other DNA
gcagcaatgctgagttcaca

SEQ ID NO: 27981 - DNA, 20 bp, synthetic construct
  source 1..20: mol_type = other DNA
atgcaggctatggcacctca

SEQ ID NO: 27982 - DNA, 20 bp, synthetic construct
  source 1..20: mol_type = other DNA
caagcctctaaaactagcat

SEQ ID NO: 27983 - DNA, 20 bp, synthetic construct
  source 1..20: mol_type = other DNA
cgatgtagttcatctagact

SEQ ID NO: 27984 - DNA, 20 bp, synthetic construct
  source 1..20: mol_type = other DNA
tgtcgagatatgaagcagag

SEQ ID NO: 27985 - DNA, 20 bp, synthetic construct
  source 1..20: mol_type = other DNA
ttaccctgctgataaggtgc

SEQ ID NO: 27986 - DNA, 20 bp, synthetic construct
  source 1..20: mol_type = other DNA
ccagatagtgcagattgcta

SEQ ID NO: 27987 - DNA, 20 bp, synthetic construct
  source 1..20: mol_type = other DNA
tgggatgaggtcatcatcac

SEQ ID NO: 27988 - DNA, 20 bp, synthetic construct
  source 1..20: mol_type = other DNA
atgtacctggtccaaggaac

SEQ ID NO: 27989 - DNA, 20 bp, synthetic construct
  source 1..20: mol_type = other DNA
caggtgggagccaccacgcc

SEQ ID NO: 27990 - DNA, 20 bp, synthetic construct
  source 1..20: mol_type = other DNA
cctggatagaagggtatgtt

SEQ ID NO: 27991 - DNA, 20 bp, synthetic construct
  source 1..20: mol_type = other DNA
gttttagatacaaatgtgaa

SEQ ID NO: 27992 - DNA, 20 bp, synthetic construct
  source 1..20: mol_type = other DNA
aattgaacaacccaggcaga

SEQ ID NO: 27993 - DNA, 20 bp, synthetic construct
  source 1..20: mol_type = other DNA
ccgaacatacccttctatcc

SEQ ID NO: 27994 - DNA, 20 bp, synthetic construct
  source 1..20: mol_type = other DNA
tatacttgaaaaaattcata

SEQ ID NO: 27995 - DNA, 20 bp, synthetic construct
  source 1..20: mol_type = other DNA
ccaactaaatcatgaggatg

SEQ ID NO: 27996 - DNA, 20 bp, synthetic construct
  source 1..20: mol_type = other DNA
acttacggttgtcataaatt

SEQ ID NO: 27997 - DNA, 20 bp, synthetic construct
  source 1..20: mol_type = other DNA
tcactgagctcccggtcgga

SEQ ID NO: 27998 - DNA, 20 bp, synthetic construct
  source 1..20: mol_type = other DNA
cctttcctacaagctcgtgg

SEQ ID NO: 27999 - DNA, 20 bp, synthetic construct
  source 1..20: mol_type = other DNA
ttccagtacctgccagatac

SEQ ID NO: 28000 - DNA, 20 bp, synthetic construct
  source 1..20: mol_type = other DNA
accttggaaggggttgttgt

SEQ ID NO: 28001 - DNA, 20 bp, synthetic construct
  source 1..20: mol_type = other DNA
cgacctcaccgtccatggcc

SEQ ID NO: 28002 - DNA, 20 bp, synthetic construct
  source 1..20: mol_type = other DNA
ggtgcagaaaggtatacatc

SEQ ID NO: 28003 - DNA, 20 bp, synthetic construct
  source 1..20: mol_type = other DNA
gcagaaaggtatacatcagg

SEQ ID NO: 28004 - DNA, 20 bp, synthetic construct
  source 1..20: mol_type = other DNA
aggcggaggggcctgcctga

SEQ ID NO: 28005 - DNA, 20 bp, synthetic construct
  source 1..20: mol_type = other DNA
aacaaccccttccaaggtga

SEQ ID NO: 28006 - DNA, 20 bp, synthetic construct
  source 1..20: mol_type = other DNA
gtcctctgcaggagatgcgg

SEQ ID NO: 28007 - DNA, 20 bp, synthetic construct
  source 1..20: mol_type = other DNA
ctacaggacccaccgacccc

SEQ ID NO: 28008 - DNA, 20 bp, synthetic construct
  source 1..20: mol_type = other DNA
gtgcacatcagcttgcgaaa

SEQ ID NO: 28009 - DNA, 20 bp, synthetic construct
  source 1..20: mol_type = other DNA
ggacagatcaatggctacac

SEQ ID NO: 28010 - DNA, 20 bp, synthetic construct
  source 1..20: mol_type = other DNA
aagatgggatgagaaaggac

SEQ ID NO: 28011 - DNA, 20 bp, synthetic construct
  source 1..20: mol_type = other DNA
gctgtgtacctgtatctggc

SEQ ID NO: 28012 - DNA, 20 bp, synthetic construct
  source 1..20: mol_type = other DNA
ctgcttccaggtgacagtgc

SEQ ID NO: 28013 - DNA, 20 bp, synthetic construct
  source 1..20: mol_type = other DNA
tgtcaaagatgggatgagaa

SEQ ID NO: 28014 - DNA, 20 bp, synthetic construct
  source 1..20: mol_type = other DNA
ggaagatctcatccccaccg

SEQ ID NO: 28015 - DNA, 20 bp, synthetic construct
  source 1..20: mol_type = other DNA
cgtccatggccggggtcccg

SEQ ID NO: 28016 - DNA, 20 bp, synthetic construct
  source 1..20: mol_type = other DNA
agcttgcgaaaaggagcctc

SEQ ID NO: 28017 - DNA, 20 bp, synthetic construct
  source 1..20: mol_type = other DNA
atcaaggtcagcactgcgcc

SEQ ID NO: 28018 - DNA, 20 bp, synthetic construct
  source 1..20: mol_type = other DNA
tgctcaatgatctccacata

SEQ ID NO: 28019 - DNA, 20 bp, synthetic construct
  source 1..20: mol_type = other DNA
gcttccgctacaagtgcgag

SEQ ID NO: 28020 - DNA, 20 bp, synthetic construct
  source 1..20: mol_type = other DNA
cagtttgatgatgaagacct

SEQ ID NO: 28021 - DNA, 20 bp, synthetic construct
  source 1..20: mol_type = other DNA
tacacctcaatgtcctctgc

SEQ ID NO: 28022 - DNA, 20 bp, synthetic construct
  source 1..20: mol_type = other DNA
cacctgtggatgcagcggtc

SEQ ID NO: 28023 - DNA, 20 bp, synthetic construct
  source 1..20: mol_type = other DNA
gatgagaaaggacaggcggc

SEQ ID NO: 28024 - DNA, 20 bp, synthetic construct
  source 1..20: mol_type = other DNA
gctgaccttgatggtggggt

SEQ ID NO: 28025 - DNA, 20 bp, synthetic construct
  source 1..20: mol_type = other DNA
gtgtgtgaagaagcgggacc

SEQ ID NO: 28026 - DNA, 20 bp, synthetic construct
  source 1..20: mol_type = other DNA
agggagatgcgcactgtccc

SEQ ID NO: 28027 - DNA, 20 bp, synthetic construct
  source 1..20: mol_type = other DNA
tcaaggtcagcactgcgcca

SEQ ID NO: 28028 - DNA, 20 bp, synthetic construct
  source 1..20: mol_type = other DNA
attgagcagcccaagcagcg

SEQ ID NO: 28029 - DNA, 20 bp, synthetic construct
  source 1..20: mol_type = other DNA
gacgatcgtctgggaaagta

SEQ ID NO: 28030 - DNA, 20 bp, synthetic construct
  source 1..20: mol_type = other DNA
agctgatgtgcaccgacaag

SEQ ID NO: 28031 - DNA, 20 bp, synthetic construct
  source 1..20: mol_type = other DNA
ctcgcctgggatgctgcccg

SEQ ID NO: 28032 - DNA, 20 bp, synthetic construct
  source 1..20: mol_type = other DNA
cccccacgagcttgtaggaa

SEQ ID NO: 28033 - DNA, 20 bp, synthetic construct
  source 1..20: mol_type = other DNA
tcagcatgggctcagttgtg

SEQ ID NO: 28034 - DNA, 20 bp, synthetic construct
  source 1..20: mol_type = other DNA
ctctggcagctgcctcggtg

SEQ ID NO: 28035 - DNA, 20 bp, synthetic construct
  source 1..20: mol_type = other DNA
atgggatgagaaaggacagg

SEQ ID NO: 28036 - DNA, 20 bp, synthetic construct
  source 1..20: mol_type = other DNA
gtttgatgatgaagacctgg

SEQ ID NO: 28037 - DNA, 20 bp, synthetic construct
  source 1..20: mol_type = other DNA
tcattgagcagcccaagcag

SEQ ID NO: 28038 - DNA, 20 bp, synthetic construct
  source 1..20: mol_type = other DNA
atacaggtacacagctgggg

SEQ ID NO: 28039 - DNA, 20 bp, synthetic construct
  source 1..20: mol_type = other DNA
ggcaggtactggaattccat

SEQ ID NO: 28040 - DNA, 20 bp, synthetic construct
  source 1..20: mol_type = other DNA
agcgcccctcgcacttgtag

SEQ ID NO: 28041 - DNA, 20 bp, synthetic construct
  source 1..20: mol_type = other DNA
ctactcacgattgtcaaaga

SEQ ID NO: 28042 - DNA, 20 bp, synthetic construct
  source 1..20: mol_type = other DNA
gcagtttgatgatgaagacc

SEQ ID NO: 28043 - DNA, 20 bp, synthetic construct
  source 1..20: mol_type = other DNA
cctcacccccacgagcttgt

SEQ ID NO: 28044 - DNA, 20 bp, synthetic construct
  source 1..20: mol_type = other DNA
cagcctcatagaagccatcc

SEQ ID NO: 28045 - DNA, 20 bp, synthetic construct
  source 1..20: mol_type = other DNA
tgagaagtccatgtccgcaa

SEQ ID NO: 28046 - DNA, 20 bp, synthetic construct
  source 1..20: mol_type = other DNA
gctcaatgatctccacatag

SEQ ID NO: 28047 - DNA, 20 bp, synthetic construct
  source 1..20: mol_type = other DNA
ggcgctcagtttccagaacc

SEQ ID NO: 28048 - DNA, 20 bp, synthetic construct
  source 1..20: mol_type = other DNA
gtcctttcctacaagctcgt

SEQ ID NO: 28049 - DNA, 20 bp, synthetic construct
  source 1..20: mol_type = other DNA
cacctgaggcagtgaaaaca

SEQ ID NO: 28050 - DNA, 20 bp, synthetic construct
  source 1..20: mol_type = other DNA
acgatcgtctgggaaagtaa

SEQ ID NO: 28051 - DNA, 20 bp, synthetic construct
  source 1..20: mol_type = other DNA
tcaccaaggaccctcctcac

SEQ ID NO: 28052 - DNA, 20 bp, synthetic construct
  source 1..20: mol_type = other DNA
ggaacacaatggccacttgt

SEQ ID NO: 28053 - DNA, 20 bp, synthetic construct
  source 1..20: mol_type = other DNA
cgttccttccccagcctggg

SEQ ID NO: 28054 - DNA, 20 bp, synthetic construct
  source 1..20: mol_type = other DNA
tccacaggtgaggtccctgc

SEQ ID NO: 28055 - DNA, 20 bp, synthetic construct
  source 1..20: mol_type = other DNA
cacactggattcccaggttc

SEQ ID NO: 28056 - DNA, 20 bp, synthetic construct
  source 1..20: mol_type = other DNA
gatcttcctactgtgtgaca

SEQ ID NO: 28057 - DNA, 20 bp, synthetic construct
  source 1..20: mol_type = other DNA
ttgatctgtccaaagtacag

SEQ ID NO: 28058 - DNA, 20 bp, synthetic construct
  source 1..20: mol_type = other DNA
cgggcagcatcccaggcgag

SEQ ID NO: 28059 - DNA, 20 bp, synthetic construct
  source 1..20: mol_type = other DNA
ctgctcaatgatctccacat

SEQ ID NO: 28060 - DNA, 20 bp, synthetic construct
  source 1..20: mol_type = other DNA
tctgcaccttgtcacacagt

SEQ ID NO: 28061 - DNA, 20 bp, synthetic construct
  source 1..20: mol_type = other DNA
ctaggcgagttatagcctca

SEQ ID NO: 28062 - DNA, 20 bp, synthetic construct
  source 1..20: mol_type = other DNA
gagaaaggacaggcggcagg

SEQ ID NO: 28063 - DNA, 20 bp, synthetic construct
  source 1..20: mol_type = other DNA
gacctcacctgtggatgcag

SEQ ID NO: 28064 - DNA, 20 bp, synthetic construct
  source 1..20: mol_type = other DNA
gcagtgctgaccttgatggt

SEQ ID NO: 28065 - DNA, 20 bp, synthetic construct
  source 1..20: mol_type = other DNA
agtcctttcctacaagctcg

SEQ ID NO: 28066 - DNA, 20 bp, synthetic construct
  source 1..20: mol_type = other DNA
tactcacgattgtcaaagat

SEQ ID NO: 28067 - DNA, 20 bp, synthetic construct
  source 1..20: mol_type = other DNA
gacaagtggccattgtgttc

SEQ ID NO: 28068 - DNA, 20 bp, synthetic construct
  source 1..20: mol_type = other DNA
gtgtctccatgcagctgcgg

SEQ ID NO: 28069 - DNA, 20 bp, synthetic construct
  source 1..20: mol_type = other DNA
agtcttcatctcctgaaagg

SEQ ID NO: 28070 - DNA, 20 bp, synthetic construct
  source 1..20: mol_type = other DNA
tgccagagtttcggttcact

SEQ ID NO: 28071 - DNA, 20 bp, synthetic construct
  source 1..20: mol_type = other DNA
caggtaagtggcccccgcgg

SEQ ID NO: 28072 - DNA, 20 bp, synthetic construct
  source 1..20: mol_type = other DNA
cggtgggtcctgtagggcaa

SEQ ID NO: 28073 - DNA, 20 bp, synthetic construct
  source 1..20: mol_type = other DNA
tgccgagtgaaccgaaactc

SEQ ID NO: 28074 - DNA, 20 bp, synthetic construct
  source 1..20: mol_type = other DNA
agacgatcgtcaccggattg

SEQ ID NO: 28075 - DNA, 20 bp, synthetic construct
  source 1..20: mol_type = other DNA
acttacctgccgggaagatg

SEQ ID NO: 28076 - DNA, 20 bp, synthetic construct
  source 1..20: mol_type = other DNA
agctgcatggagacacgcac

SEQ ID NO: 28077 - DNA, 20 bp, synthetic construct
  source 1..20: mol_type = other DNA
ctttcccagacgatcgtcac

SEQ ID NO: 28078 - DNA, 20 bp, synthetic construct
  source 1..20: mol_type = other DNA
caagacccaccccaccatca

SEQ ID NO: 28079 - DNA, 20 bp, synthetic construct
  source 1..20: mol_type = other DNA
cagtgctgaccttgatggtg

SEQ ID NO: 28080 - DNA, 20 bp, synthetic construct
  source 1..20: mol_type = other DNA
aatccagtgtgtgaagaagc

SEQ ID NO: 28081 - DNA, 20 bp, synthetic construct
  source 1..20: mol_type = other DNA
ggtttgccctcaccttggaa

SEQ ID NO: 28082 - DNA, 20 bp, synthetic construct
  source 1..20: mol_type = other DNA
cctacaagctcgtgggggtg

SEQ ID NO: 28083 - DNA, 20 bp, synthetic construct
  source 1..20: mol_type = other DNA
tacctgccgggaagatgagg

SEQ ID NO: 28084 - DNA, 20 bp, synthetic construct
  source 1..20: mol_type = other DNA
gatcgtctgggaaagtaagg

SEQ ID NO: 28085 - DNA, 20 bp, synthetic construct
  source 1..20: mol_type = other DNA
gacattgaggtgtatttcac

SEQ ID NO: 28086 - DNA, 20 bp, synthetic construct
  source 1..20: mol_type = other DNA
agcagagccgcacagcattc

SEQ ID NO: 28087 - DNA, 20 bp, synthetic construct
  source 1..20: mol_type = other DNA
acctgaggcagtgaaaacaa

SEQ ID NO: 28088 - DNA, 20 bp, synthetic construct
  source 1..20: mol_type = other DNA
cgaggcagctgccagagttt

SEQ ID NO: 28089 - DNA, 20 bp, synthetic construct
  source 1..20: mol_type = other DNA
cgcagtgctgaccttgatgg

SEQ ID NO: 28090 - DNA, 20 bp, synthetic construct
  source 1..20: mol_type = other DNA
acctgtggatgcagcggtcc

SEQ ID NO: 28091 - DNA, 20 bp, synthetic construct
  source 1..20: mol_type = other DNA
gaccccggccatggacggtg

SEQ ID NO: 28092 - DNA, 20 bp, synthetic construct
  source 1..20: mol_type = other DNA
cattgagcagcccaagcagc

SEQ ID NO: 28093 - DNA, 20 bp, synthetic construct
  source 1..20: mol_type = other DNA
agcatgggctcagttgtgtg

SEQ ID NO: 28094 - DNA, 20 bp, synthetic construct
  source 1..20: mol_type = other DNA
aagtgcgaggggcgctccgc

SEQ ID NO: 28095 - DNA, 20 bp, synthetic construct
  source 1..20: mol_type = other DNA
ctgaaactcggagttgtcga

SEQ ID NO: 28096 - DNA, 20 bp, synthetic construct
  source 1..20: mol_type = other DNA
caagtgcgaggggcgctccg

SEQ ID NO: 28097 - DNA, 20 bp, synthetic construct
  source 1..20: mol_type = other DNA
cactcggcagatcttgagct

SEQ ID NO: 28098 - DNA, 20 bp, synthetic construct
  source 1..20: mol_type = other DNA
gaatccagtgtgtgaagaag

SEQ ID NO: 28099 - DNA, 20 bp, synthetic construct
  source 1..20: mol_type = other DNA
cgatcgtctgggaaagtaag

SEQ ID NO: 28100 - DNA, 20 bp, synthetic construct
  source 1..20: mol_type = other DNA
tctgcttccaggtgacagtg

SEQ ID NO: 28101 - DNA, 20 bp, synthetic construct
  source 1..20: mol_type = other DNA
gcgacctcaccgtccatggc

SEQ ID NO: 28102 - DNA, 20 bp, synthetic construct
  source 1..20: mol_type = other DNA
gaagaagcgggacctggagc

SEQ ID NO: 28103 - DNA, 20 bp, synthetic construct
  source 1..20: mol_type = other DNA
caagctcgtgggggtgaggc

SEQ ID NO: 28104 - DNA, 20 bp, synthetic construct
  source 1..20: mol_type = other DNA
tggcaggtactggaattcca

SEQ ID NO: 28105 - DNA, 20 bp, synthetic construct
  source 1..20: mol_type = other DNA
ccagatacaggtacacagct

SEQ ID NO: 28106 - DNA, 20 bp, synthetic construct
  source 1..20: mol_type = other DNA
gcgctcagtttccagaacct

SEQ ID NO: 28107 - DNA, 20 bp, synthetic construct
  source 1..20: mol_type = other DNA
ttgacaatcgtgagtagcga

SEQ ID NO: 28108 - DNA, 20 bp, synthetic construct
  source 1..20: mol_type = other DNA
tcttgagctcggcagtgttg

SEQ ID NO: 28109 - DNA, 20 bp, synthetic construct
  source 1..20: mol_type = other DNA
tttgacaatcgtgagtagcg

SEQ ID NO: 28110 - DNA, 20 bp, synthetic construct
  source 1..20: mol_type = other DNA
tgaagacttctcctccattg

SEQ ID NO: 28111 - DNA, 20 bp, synthetic construct
  source 1..20: mol_type = other DNA
cttgagctcggcagtgttgg

SEQ ID NO: 28112 - DNA, 20 bp, synthetic construct
  source 1..20: mol_type = other DNA
tgctgaccttgatggtgggg

SEQ ID NO: 28113 - DNA, 20 bp, synthetic construct
  source 1..20: mol_type = other DNA
gctgcggcggccttccgacc

SEQ ID NO: 28114 - DNA, 20 bp, synthetic construct
  source 1..20: mol_type = other DNA
ctatgaggctgagctctgcc

SEQ ID NO: 28115 - DNA, 20 bp, synthetic construct
  source 1..20: mol_type = other DNA
tcagggtactccatcagcat

SEQ ID NO: 28116 - DNA, 20 bp, synthetic construct
  source 1..20: mol_type = other DNA
caacaaccccttccaaggtg

SEQ ID NO: 28117 - DNA, 20 bp, synthetic construct
  source 1..20: mol_type = other DNA
gtccatggccggggtcccgg

SEQ ID NO: 28118 - DNA, 20 bp, synthetic construct
  source 1..20: mol_type = other DNA
agtttgatgatgaagacctg

SEQ ID NO: 28119 - DNA, 20 bp, synthetic construct
  source 1..20: mol_type = other DNA
aatgtcctctgcaggagatg

SEQ ID NO: 28120 - DNA, 20 bp, synthetic construct
  source 1..20: mol_type = other DNA
ggtcccgcttcttcacacac

SEQ ID NO: 28121 - DNA, 20 bp, synthetic construct
  source 1..20: mol_type = other DNA
cagatacaggtacacagctg

SEQ ID NO: 28122 - DNA, 20 bp, synthetic construct
  source 1..20: mol_type = other DNA
cttacctgccgggaagatga

SEQ ID NO: 28123 - DNA, 20 bp, synthetic construct
  source 1..20: mol_type = other DNA
gtttgccctcaccttggaag

SEQ ID NO: 28124 - DNA, 20 bp, synthetic construct
  source 1..20: mol_type = other DNA
tcttcacacactggattccc

SEQ ID NO: 28125 - DNA, 20 bp, synthetic construct
  source 1..20: mol_type = other DNA
aaaggtatacatcaggaggc

SEQ ID NO: 28126 - DNA, 20 bp, synthetic construct
  source 1..20: mol_type = other DNA
ggacattgaggtgtatttca

SEQ ID NO: 28127 - DNA, 20 bp, synthetic construct
  source 1..20: mol_type = other DNA
gacctcaccgtccatggccg

SEQ ID NO: 28128 - DNA, 20 bp, synthetic construct
  source 1..20: mol_type = other DNA
ggcagcccctcgcccgggcc

SEQ ID NO: 28129 - DNA, 20 bp, synthetic construct
  source 1..20: mol_type = other DNA
acggagcagcccaagcagcg

SEQ ID NO: 28130 - DNA, 20 bp, synthetic construct
  source 1..20: mol_type = other DNA
actgacactggactcgtacc

SEQ ID NO: 28131 - DNA, 20 bp, synthetic construct
  source 1..20: mol_type = other DNA
gcccggccagtggggacgga

SEQ ID NO: 28132 - DNA, 20 bp, synthetic construct
  source 1..20: mol_type = other DNA
gccttaggtaagcggggctg

SEQ ID NO: 28133 - DNA, 20 bp, synthetic construct
  source 1..20: mol_type = other DNA
cctgcctggtgtggaaggac

SEQ ID NO: 28134 - DNA, 20 bp, synthetic construct
  source 1..20: mol_type = other DNA
cggcgagcgagagtgaggag

SEQ ID NO: 28135 - DNA, 20 bp, synthetic construct
  source 1..20: mol_type = other DNA
agggggctccaggccgggca

SEQ ID NO: 28136 - DNA, 20 bp, synthetic construct
  source 1..20: mol_type = other DNA
caaggagaacggcttcggcc

SEQ ID NO: 28137 - DNA, 20 bp, synthetic construct
  source 1..20: mol_type = other DNA
actgtgggcacatacacctc

SEQ ID NO: 28138 - DNA, 20 bp, synthetic construct
  source 1..20: mol_type = other DNA
acaggtagagttggctttgt

SEQ ID NO: 28139 - DNA, 20 bp, synthetic construct
  source 1..20: mol_type = other DNA
gcacatacacctctgggaac

SEQ ID NO: 28140 - DNA, 20 bp, synthetic construct
  source 1..20: mol_type = other DNA
aaagccaactctacctgtaa

SEQ ID NO: 28141 - DNA, 20 bp, synthetic construct
  source 1..20: mol_type = other DNA
gccctgatagtttaggtgag

SEQ ID NO: 28142 - DNA, 20 bp, synthetic construct
  source 1..20: mol_type = other DNA
aaccaggatgatgggcacgt

SEQ ID NO: 28143 - DNA, 20 bp, synthetic construct
  source 1..20: mol_type = other DNA
tggctttgtgggacacagct

SEQ ID NO: 28144 - DNA, 20 bp, synthetic construct
  source 1..20: mol_type = other DNA
tacaggtagagttggctttg

SEQ ID NO: 28145 - DNA, 20 bp, synthetic construct
  source 1..20: mol_type = other DNA
gagcaagcatgtctttccac

SEQ ID NO: 28146 - DNA, 20 bp, synthetic construct
  source 1..20: mol_type = other DNA
gacagaaatgcttgacttct

SEQ ID NO: 28147 - DNA, 20 bp, synthetic construct
  source 1..20: mol_type = other DNA
gatccttcttattcccaacc

SEQ ID NO: 28148 - DNA, 20 bp, synthetic construct
  source 1..20: mol_type = other DNA
aggaagattatgatcgcctg

SEQ ID NO: 28149 - DNA, 20 bp, synthetic construct
  source 1..20: mol_type = other DNA
tataacatcggtatctgggt

SEQ ID NO: 28150 - DNA, 20 bp, synthetic construct
  source 1..20: mol_type = other DNA
atcggtatctgggtaggaga

SEQ ID NO: 28151 - DNA, 20 bp, synthetic construct
  source 1..20: mol_type = other DNA
tttgtgggacacagctgggc

SEQ ID NO: 28152 - DNA, 20 bp, synthetic construct
  source 1..20: mol_type = other DNA
aaaacacatcagtataacat

SEQ ID NO: 28153 - DNA, 20 bp, synthetic construct
  source 1..20: mol_type = other DNA
cagaaaacatcccagaaaag

SEQ ID NO: 28154 - DNA, 20 bp, synthetic construct
  source 1..20: mol_type = other DNA
ggacagaaatgcttgacttc

SEQ ID NO: 28155 - DNA, 20 bp, synthetic construct
  source 1..20: mol_type = other DNA
tgttcagcaaagaccaaaga

SEQ ID NO: 28156 - DNA, 20 bp, synthetic construct
  source 1..20: mol_type = other DNA
acagaaatgcttgacttctg

SEQ ID NO: 28157 - DNA, 20 bp, synthetic construct
  source 1..20: mol_type = other DNA
gaccaaagatggagtgagag

SEQ ID NO: 28158 - DNA, 20 bp, synthetic construct
  source 1..20: mol_type = other DNA
tcggtatctgggtaggagag

SEQ ID NO: 28159 - DNA, 20 bp, synthetic construct
  source 1..20: mol_type = other DNA
cggaagaaactggtgattgt

SEQ ID NO: 28160 - DNA, 20 bp, synthetic construct
  source 1..20: mol_type = other DNA
cagcaaggaccagttcccag

SEQ ID NO: 28161 - DNA, 20 bp, synthetic construct
  source 1..20: mol_type = other DNA
aacctctctcactccatctt

SEQ ID NO: 28162 - DNA, 20 bp, synthetic construct
  source 1..20: mol_type = other DNA
cacagtgtttgagaactatg

SEQ ID NO: 28163 - DNA, 20 bp, synthetic construct
  source 1..20: mol_type = other DNA
catcggtatctgggtaggag

SEQ ID NO: 28164 - DNA, 20 bp, synthetic construct
  source 1..20: mol_type = other DNA
aacgtgcccatcatcctggt

SEQ ID NO: 28165 - DNA, 20 bp, synthetic construct
  source 1..20: mol_type = other DNA
tcccaatgtgcccatcatcc

SEQ ID NO: 28166 - DNA, 20 bp, synthetic construct
  source 1..20: mol_type = other DNA
ccgcaagaagctggtggtgg

SEQ ID NO: 28167 - DNA, 20 bp, synthetic construct
  source 1..20: mol_type = other DNA
ccccgagaagtgggtccccg

SEQ ID NO: 28168 - DNA, 20 bp, synthetic construct
  source 1..20: mol_type = other DNA
gtgggacacggcgggccagg

SEQ ID NO: 28169 - DNA, 20 bp, synthetic construct
  source 1..20: mol_type = other DNA
ccttgacaccatcctgttgc

SEQ ID NO: 28170 - DNA, 20 bp, synthetic construct
  source 1..20: mol_type = other DNA
gagcatcaagtgcgtggtgg

SEQ ID NO: 28171 - DNA, 20 bp, synthetic construct
  source 1..20: mol_type = other DNA
cgccgtcctatgagaacgtg

SEQ ID NO: 28172 - DNA, 20 bp, synthetic construct
  source 1..20: mol_type = other DNA
gaccctggcacttggcttgg

SEQ ID NO: 28173 - DNA, 20 bp, synthetic construct
  source 1..20: mol_type = other DNA
ggtaggagagtgtacggagg

SEQ ID NO: 28174 - DNA, 20 bp, synthetic construct
  source 1..20: mol_type = other DNA
gatgcagagcatcaagtgcg

SEQ ID NO: 28175 - DNA, 20 bp, synthetic construct
  source 1..20: mol_type = other DNA
aaccccacgccgatcaagcg

SEQ ID NO: 28176 - DNA, 20 bp, synthetic construct
  source 1..20: mol_type = other DNA
ccgcagtgtcccacaggttc

SEQ ID NO: 28177 - DNA, 20 bp, synthetic construct
  source 1..20: mol_type = other DNA
gccagtgcctggccctgctg

SEQ ID NO: 28178 - DNA, 20 bp, synthetic construct
  source 1..20: mol_type = other DNA
gagggtaggagagtgtacgg

SEQ ID NO: 28179 - DNA, 20 bp, synthetic construct
  source 1..20: mol_type = other DNA
tgtgaccctggcacttggct

SEQ ID NO: 28180 - DNA, 20 bp, synthetic construct
  source 1..20: mol_type = other DNA
cgaatgctcagccctgcaac

SEQ ID NO: 28181 - DNA, 20 bp, synthetic construct
  source 1..20: mol_type = other DNA
catcacaccgcagcagggcc

SEQ ID NO: 28182 - DNA, 20 bp, synthetic construct
  source 1..20: mol_type = other DNA
gcacttgatgctctgcatcg

SEQ ID NO: 28183 - DNA, 20 bp, synthetic construct
  source 1..20: mol_type = other DNA
tgatgtgcccatcctgctgg

SEQ ID NO: 28184 - DNA, 20 bp, synthetic construct
  source 1..20: mol_type = other DNA
attcgaggtagcgcacagcg

SEQ ID NO: 28185 - DNA, 20 bp, synthetic construct
  source 1..20: mol_type = other DNA
ctggccctgctgcggtgtga

SEQ ID NO: 28186 - DNA, 20 bp, synthetic construct
  source 1..20: mol_type = other DNA
gggcagtggtggcacacctc

SEQ ID NO: 28187 - DNA, 20 bp, synthetic construct
  source 1..20: mol_type = other DNA
tgacgaaaacgttggtctga

SEQ ID NO: 28188 - DNA, 20 bp, synthetic construct
  source 1..20: mol_type = other DNA
gaaacagatgacgaaaacgt

SEQ ID NO: 28189 - DNA, 20 bp, synthetic construct
  source 1..20: mol_type = other DNA
accagcaggatgggcacatc

SEQ ID NO: 28190 - DNA, 20 bp, synthetic construct
  source 1..20: mol_type = other DNA
atgagaacgtgcggcacaag

SEQ ID NO: 28191 - DNA, 20 bp, synthetic construct
  source 1..20: mol_type = other DNA
ccagggtcacaagaggatgc

SEQ ID NO: 28192 - DNA, 20 bp, synthetic construct
  source 1..20: mol_type = other DNA
agcatcaagtgcgtggtggt

SEQ ID NO: 28193 - DNA, 20 bp, synthetic construct
  source 1..20: mol_type = other DNA
gagcccagcctgacacccta

SEQ ID NO: 28194 - DNA, 20 bp, synthetic construct
  source 1..20: mol_type = other DNA
cctgcatcctcttgtgaccc

SEQ ID NO: 28195 - DNA, 20 bp, synthetic construct
  source 1..20: mol_type = other DNA
tgtaattgtcgaacacggtg

SEQ ID NO: 28196 - DNA, 20 bp, synthetic construct
  source 1..20: mol_type = other DNA
gcagagcatcaagtgcgtgg

SEQ ID NO: 28197 - DNA, 20 bp, synthetic construct
  source 1..20: mol_type = other DNA
atgacgaaaacgttggtctg

SEQ ID NO: 28198 - DNA, 20 bp, synthetic construct
  source 1..20: mol_type = other DNA
ctacggcgcctcaaggagca

SEQ ID NO: 28199 - DNA, 20 bp, synthetic construct
  source 1..20: mol_type = other DNA
ttggtgcccaccagcaggat

SEQ ID NO: 28200 - DNA, 20 bp, synthetic construct
  source 1..20: mol_type = other DNA
cctgcaacaggatggtgtca

SEQ ID NO: 28201 - DNA, 20 bp, synthetic construct
  source 1..20: mol_type = other DNA
tgctcagccctgcaacagga

SEQ ID NO: 28202 - DNA, 20 bp, synthetic construct
  source 1..20: mol_type = other DNA
ccctgatgtgcccatcctgc

SEQ ID NO: 28203 - DNA, 20 bp, synthetic construct
  source 1..20: mol_type = other DNA
cttgacaccatcctgttgca

SEQ ID NO: 28204 - DNA, 20 bp, synthetic construct
  source 1..20: mol_type = other DNA
ccagcaggatgggcacatca

SEQ ID NO: 28205 - DNA, 20 bp, synthetic construct
  source 1..20: mol_type = other DNA
cctggcccgcagtgtcccac

SEQ ID NO: 28206 - DNA, 20 bp, synthetic construct
  source 1..20: mol_type = other DNA
tgtcaaggaagtgttcgccg

SEQ ID NO: 28207 - DNA, 20 bp, synthetic construct
  source 1..20: mol_type = other DNA
gtgggacactgcgggccagg

SEQ ID NO: 28208 - DNA, 20 bp, synthetic construct
  source 1..20: mol_type = other DNA
gttgcagggctgagcattcg

SEQ ID NO: 28209 - DNA, 20 bp, synthetic construct
  source 1..20: mol_type = other DNA
ataggacggcggactggcaa

SEQ ID NO: 28210 - DNA, 20 bp, synthetic construct
  source 1..20: mol_type = other DNA
accccacgccgatcaagcgt

SEQ ID NO: 28211 - DNA, 20 bp, synthetic construct
  source 1..20: mol_type = other DNA
tgggtggccaccaccagcac

SEQ ID NO: 28212 - DNA, 20 bp, synthetic construct
  source 1..20: mol_type = other DNA
gtgctcagcccttagcaatc

SEQ ID NO: 28213 - DNA, 20 bp, synthetic construct
  source 1..20: mol_type = other DNA
ttccatggcattgacgcagg

SEQ ID NO: 28214 - DNA, 20 bp, synthetic construct
  source 1..20: mol_type = other DNA
caggggccggatgcttctga

SEQ ID NO: 28215 - DNA, 20 bp, synthetic construct
  source 1..20: mol_type = other DNA
ccctgtgttctcgtacactg

SEQ ID NO: 28216 - DNA, 20 bp, synthetic construct
  source 1..20: mol_type = other DNA
tgtggggaaaacctctctgt

SEQ ID NO: 28217 - DNA, 20 bp, synthetic construct
  source 1..20: mol_type = other DNA
caccacgtctgcctgctggt

SEQ ID NO: 28218 - DNA, 20 bp, synthetic construct
  source 1..20: mol_type = other DNA
cacagtgtacgagaacacag

SEQ ID NO: 28219 - DNA, 20 bp, synthetic construct
  source 1..20: mol_type = other DNA
cccttccatggcattgacgc

SEQ ID NO: 28220 - DNA, 20 bp, synthetic construct
  source 1..20: mol_type = other DNA
gctgtactccccgattgcta

SEQ ID NO: 28221 - DNA, 20 bp, synthetic construct
  source 1..20: mol_type = other DNA
tcagcaccacgtctgcctgc

SEQ ID NO: 28222 - DNA, 20 bp, synthetic construct
  source 1..20: mol_type = other DNA
tggccacccagactgaccag

SEQ ID NO: 28223 - DNA, 20 bp, synthetic construct
  source 1..20: mol_type = other DNA
ggccacccagactgaccagc

SEQ ID NO: 28224 - DNA, 20 bp, synthetic construct
  source 1..20: mol_type = other DNA
cggctgtgtcccagaggccc

SEQ ID NO: 28225 - DNA, 20 bp, synthetic construct
  source 1..20: mol_type = other DNA
cagactgaccagcgggagat

SEQ ID NO: 28226 - DNA, 20 bp, synthetic construct
  source 1..20: mol_type = other DNA
gcgggagatggggccccaca

SEQ ID NO: 28227 - DNA, 20 bp, synthetic construct
  source 1..20: mol_type = other DNA
tgagcactccaggtagccct

SEQ ID NO: 28228 - DNA, 20 bp, synthetic construct
  source 1..20: mol_type = other DNA
cccagaggcccaggctgatc

SEQ ID NO: 28229 - DNA, 20 bp, synthetic construct
  source 1..20: mol_type = other DNA
ccacagtgtacgagaacaca

SEQ ID NO: 28230 - DNA, 20 bp, synthetic construct
  source 1..20: mol_type = other DNA
ctgtacccctgtgctggtgg

SEQ ID NO: 28231 - DNA, 20 bp, synthetic construct
  source 1..20: mol_type = other DNA
catctcccgctggtcagtct

SEQ ID NO: 28232 - DNA, 20 bp, synthetic construct
  source 1..20: mol_type = other DNA
gcccaggatgtcagagccaa

SEQ ID NO: 28233 - DNA, 20 bp, synthetic construct
  source 1..20: mol_type = other DNA
ttccatcaagtgcgtgttgg

SEQ ID NO: 28234 - DNA, 20 bp, synthetic construct
  source 1..20: mol_type = other DNA
cctgctggtaggacaggggc

SEQ ID NO: 28235 - DNA, 20 bp, synthetic construct
  source 1..20: mol_type = other DNA
gtcctaccagcaggcagacg

SEQ ID NO: 28236 - DNA, 20 bp, synthetic construct
  source 1..20: mol_type = other DNA
accaccagcacaggggtaca

SEQ ID NO: 28237 - DNA, 20 bp, synthetic construct
  source 1..20: mol_type = other DNA
ggtgaagcgcaccaacagag

SEQ ID NO: 28238 - DNA, 20 bp, synthetic construct
  source 1..20: mol_type = other DNA
cgtctgcctgctggtaggac

SEQ ID NO: 28239 - DNA, 20 bp, synthetic construct
  source 1..20: mol_type = other DNA
ggaagggaagaaactggccc

SEQ ID NO: 28240 - DNA, 20 bp, synthetic construct
  source 1..20: mol_type = other DNA
gggtggccaccaccagcaca

SEQ ID NO: 28241 - DNA, 20 bp, synthetic construct
  source 1..20: mol_type = other DNA
agactgaccagcgggagatg

SEQ ID NO: 28242 - DNA, 20 bp, synthetic construct
  source 1..20: mol_type = other DNA
ttgacgcaggaggccctgtg

SEQ ID NO: 28243 - DNA, 20 bp, synthetic construct
  source 1..20: mol_type = other DNA
ctcccgctggtcagtctggg

SEQ ID NO: 28244 - DNA, 20 bp, synthetic construct
  source 1..20: mol_type = other DNA
gccctgtacccctgtgctgg

SEQ ID NO: 28245 - DNA, 20 bp, synthetic construct
  source 1..20: mol_type = other DNA
cttgccctgtacccctgtgc

SEQ ID NO: 28246 - DNA, 20 bp, synthetic construct
  source 1..20: mol_type = other DNA
ggcccaggatgtcagagcca

SEQ ID NO: 28247 - DNA, 20 bp, synthetic construct
  source 1..20: mol_type = other DNA
ctcgtacactgtgggcttgt

SEQ ID NO: 28248 - DNA, 20 bp, synthetic construct
  source 1..20: mol_type = other DNA
caccaccagcacaggggtac

SEQ ID NO: 28249 - DNA, 20 bp, synthetic construct
  source 1..20: mol_type = other DNA
gtctgcctgctggtaggaca

SEQ ID NO: 28250 - DNA, 20 bp, synthetic construct
  source 1..20: mol_type = other DNA
tgctcagcccttagcaatcg

SEQ ID NO: 28251 - DNA, 20 bp, synthetic construct
  source 1..20: mol_type = other DNA
tcctgaacttgaagaacaag

SEQ ID NO: 28252 - DNA, 20 bp, synthetic construct
  source 1..20: mol_type = other DNA
tagcaatcggggagtacagc

SEQ ID NO: 28253 - DNA, 20 bp, synthetic construct
  source 1..20: mol_type = other DNA
gcccaccaacacgcacttga

SEQ ID NO: 28254 - DNA, 20 bp, synthetic construct
  source 1..20: mol_type = other DNA
gaagatcttgcactcattga

SEQ ID NO: 28255 - DNA, 20 bp, synthetic construct
  source 1..20: mol_type = other DNA
ggcctcctgcgtcaatgcca

SEQ ID NO: 28256 - DNA, 20 bp, synthetic construct
  source 1..20: mol_type = other DNA
cattgccggctgtgtcccag

SEQ ID NO: 28257 - DNA, 20 bp, synthetic construct
  source 1..20: mol_type = other DNA
tccacttgttcttcaagttc

SEQ ID NO: 28258 - DNA, 20 bp, synthetic construct
  source 1..20: mol_type = other DNA
cttcacctccgagaccttcc

SEQ ID NO: 28259 - DNA, 20 bp, synthetic construct
  source 1..20: mol_type = other DNA
gcccttggctctgacatcct

SEQ ID NO: 28260 - DNA, 20 bp, synthetic construct
  source 1..20: mol_type = other DNA
ctgggcctctgggacacagc

SEQ ID NO: 28261 - DNA, 20 bp, synthetic construct
  source 1..20: mol_type = other DNA
ccagactgaccagcgggaga

SEQ ID NO: 28262 - DNA, 20 bp, synthetic construct
  source 1..20: mol_type = other DNA
ccggcccctgtcctaccagc

SEQ ID NO: 28263 - DNA, 20 bp, synthetic construct
  source 1..20: mol_type = other DNA
cccacagtgtacgagaacac

SEQ ID NO: 28264 - DNA, 20 bp, synthetic construct
  source 1..20: mol_type = other DNA
ccagatcagcctgggcctct

SEQ ID NO: 28265 - DNA, 20 bp, synthetic construct
  source 1..20: mol_type = other DNA
gcttctgaaggcgtcattgc

SEQ ID NO: 28266 - DNA, 20 bp, synthetic construct
  source 1..20: mol_type = other DNA
tcaagttcaggaatgagtta

SEQ ID NO: 28267 - DNA, 20 bp, synthetic construct
  source 1..20: mol_type = other DNA
ggtggccaccaccagcacag

SEQ ID NO: 28268 - DNA, 20 bp, synthetic construct
  source 1..20: mol_type = other DNA
agcgggagatggggccccac

SEQ ID NO: 28269 - DNA, 20 bp, synthetic construct
  source 1..20: mol_type = other DNA
agcccttggctctgacatcc

SEQ ID NO: 28270 - DNA, 20 bp, synthetic construct
  source 1..20: mol_type = other DNA
tgctaagggctgagcactcc

SEQ ID NO: 28271 - DNA, 20 bp, synthetic construct
  source 1..20: mol_type = other DNA
tctgcctgctggtaggacag

SEQ ID NO: 28272 - DNA, 20 bp, synthetic construct
  source 1..20: mol_type = other DNA
ggccagtttcttcccttcca

SEQ ID NO: 28273 - DNA, 20 bp, synthetic construct
  source 1..20: mol_type = other DNA
cgtccgaactgccgtcaacc

SEQ ID NO: 28274 - DNA, 20 bp, synthetic construct
  source 1..20: mol_type = other DNA
ctgtactccccgattgctaa

SEQ ID NO: 28275 - DNA, 20 bp, synthetic construct
  source 1..20: mol_type = other DNA
tgtggggccccatctcccgc

SEQ ID NO: 28276 - DNA, 20 bp, synthetic construct
  source 1..20: mol_type = other DNA
cacctccgagaccttcccgg

SEQ ID NO: 28277 - DNA, 20 bp, synthetic construct
  source 1..20: mol_type = other DNA
cattgacgcaggaggccctg

SEQ ID NO: 28278 - DNA, 20 bp, synthetic construct
  source 1..20: mol_type = other DNA
attgacgcaggaggccctgt

SEQ ID NO: 28279 - DNA, 20 bp, synthetic construct
  source 1..20: mol_type = other DNA
agtgctcagcccttagcaat

SEQ ID NO: 28280 - DNA, 20 bp, synthetic construct
  source 1..20: mol_type = other DNA
agtgtacgagaacacagggg

SEQ ID NO: 28281 - DNA, 20 bp, synthetic construct
  source 1..20: mol_type = other DNA
gttcaggaatgagttatggt

SEQ ID NO: 28282 - DNA, 20 bp, synthetic construct
  source 1..20: mol_type = other DNA
tccatcaagtgcgtgttggt

SEQ ID NO: 28283 - DNA, 20 bp, synthetic construct
  source 1..20: mol_type = other DNA
ggcctccgggaaggtctcgg

SEQ ID NO: 28284 - DNA, 20 bp, synthetic construct
  source 1..20: mol_type = other DNA
cgcgctgatgctcaagtgcg

SEQ ID NO: 28285 - DNA, 20 bp, synthetic construct
  source 1..20: mol_type = other DNA
tgagccatgctgctgccggc

SEQ ID NO: 28286 - DNA, 20 bp, synthetic construct
  source 1..20: mol_type = other DNA
gggggcaagcagtacctcct

SEQ ID NO: 28287 - DNA, 20 bp, synthetic construct
  source 1..20: mol_type = other DNA
ccatttacctgttggtggca

SEQ ID NO: 28288 - DNA, 20 bp, synthetic construct
  source 1..20: mol_type = other DNA
ctgggccagcttccccaccg

SEQ ID NO: 28289 - DNA, 20 bp, synthetic construct
  source 1..20: mol_type = other DNA
gaccatgactatgagcgaga

SEQ ID NO: 28290 - DNA, 20 bp, synthetic construct
  source 1..20: mol_type = other DNA
tgagactgataatttctctt

SEQ ID NO: 28291 - DNA, 20 bp, synthetic construct
  source 1..20: mol_type = other DNA
ggaacactggtggagcgcct

SEQ ID NO: 28292 - DNA, 20 bp, synthetic construct
  source 1..20: mol_type = other DNA
gtgatggagtacatggagaa

SEQ ID NO: 28293 - DNA, 20 bp, synthetic construct
  source 1..20: mol_type = other DNA
gatgatggtttaccttaatg

SEQ ID NO: 28294 - DNA, 20 bp, synthetic construct
  source 1..20: mol_type = other DNA
gtccatctcgctcatagtca

SEQ ID NO: 28295 - DNA, 20 bp, synthetic construct
  source 1..20: mol_type = other DNA
tttaccagatgctccaaaag

SEQ ID NO: 28296 - DNA, 20 bp, synthetic construct
  source 1..20: mol_type = other DNA
gcgagatggactgaaagaaa

SEQ ID NO: 28297 - DNA, 20 bp, synthetic construct
  source 1..20: mol_type = other DNA
tcacccacttttggagcatc

SEQ ID NO: 28298 - DNA, 20 bp, synthetic construct
  source 1..20: mol_type = other DNA
aactaaccctggatgggcta

SEQ ID NO: 28299 - DNA, 20 bp, synthetic construct
  source 1..20: mol_type = other DNA
taaggtaaaccatcatcggt

SEQ ID NO: 28300 - DNA, 20 bp, synthetic construct
  source 1..20: mol_type = other DNA
aagacccatttacctgttgg

SEQ ID NO: 28301 - DNA, 20 bp, synthetic construct
  source 1..20: mol_type = other DNA
cagccgggtggtgaagctcc

SEQ ID NO: 28302 - DNA, 20 bp, synthetic construct
  source 1..20: mol_type = other DNA
gtaatttacctgaatttgac

SEQ ID NO: 28303 - DNA, 20 bp, synthetic construct
  source 1..20: mol_type = other DNA
gctgctcagaaggtcgatcc

SEQ ID NO: 28304 - DNA, 20 bp, synthetic construct
  source 1..20: mol_type = other DNA
gaaggtcgatcctggaacac

SEQ ID NO: 28305 - DNA, 20 bp, synthetic construct
  source 1..20: mol_type = other DNA
caagtactgtatcagaacaa

SEQ ID NO: 28306 - DNA, 20 bp, synthetic construct
  source 1..20: mol_type = other DNA
gcaaaccaggactcctccac

SEQ ID NO: 28307 - DNA, 20 bp, synthetic construct
  source 1..20: mol_type = other DNA
tggaacactggtggagcgcc

SEQ ID NO: 28308 - DNA, 20 bp, synthetic construct
  source 1..20: mol_type = other DNA
atagcttggtacttagcagc

SEQ ID NO: 28309 - DNA, 20 bp, synthetic construct
  source 1..20: mol_type = other DNA
gttgtgcctgtgggcaggaa

SEQ ID NO: 28310 - DNA, 20 bp, synthetic construct
  source 1..20: mol_type = other DNA
atgcagtgcaccagccctca

SEQ ID NO: 28311 - DNA, 20 bp, synthetic construct
  source 1..20: mol_type = other DNA
gctccaaaagtgggtgatga

SEQ ID NO: 28312 - DNA, 20 bp, synthetic construct
  source 1..20: mol_type = other DNA
ggtgatgagggaaggcataa

SEQ ID NO: 28313 - DNA, 20 bp, synthetic construct
  source 1..20: mol_type = other DNA
gtatcttaccaaagatagct

SEQ ID NO: 28314 - DNA, 20 bp, synthetic construct
  source 1..20: mol_type = other DNA
tgctccaaaagtgggtgatg

SEQ ID NO: 28315 - DNA, 20 bp, synthetic construct
  source 1..20: mol_type = other DNA
acagcagcccagacagaatg

SEQ ID NO: 28316 - DNA, 20 bp, synthetic construct
  source 1..20: mol_type = other DNA
aggcataaagggagccacgg

SEQ ID NO: 28317 - DNA, 20 bp, synthetic construct
  source 1..20: mol_type = other DNA
acattaaggtaaaccatcat

SEQ ID NO: 28318 - DNA, 20 bp, synthetic construct
  source 1..20: mol_type = other DNA
tccacatcttaaaggaggca

SEQ ID NO: 28319 - DNA, 20 bp, synthetic construct
  source 1..20: mol_type = other DNA
gcaccgggttctggtcgtgc

SEQ ID NO: 28320 - DNA, 20 bp, synthetic construct
  source 1..20: mol_type = other DNA
ggcaccgctgggcctgagag

SEQ ID NO: 28321 - DNA, 20 bp, synthetic construct
  source 1..20: mol_type = other DNA
acgcacgacatcaggctgga

SEQ ID NO: 28322 - DNA, 20 bp, synthetic construct
  source 1..20: mol_type = other DNA
tgctgctcctgagctgagac

SEQ ID NO: 28323 - DNA, 20 bp, synthetic construct
  source 1..20: mol_type = other DNA
gtctcagctgcaggaacgtg

SEQ ID NO: 28324 - DNA, 20 bp, synthetic construct
  source 1..20: mol_type = other DNA
tcccagacacgcctgcgtag

SEQ ID NO: 28325 - DNA, 20 bp, synthetic construct
  source 1..20: mol_type = other DNA
aatctgggacacggctcggc

SEQ ID NO: 28326 - DNA, 20 bp, synthetic construct
  source 1..20: mol_type = other DNA
agaacgagaacgagaaagga

SEQ ID NO: 28327 - DNA, 20 bp, synthetic construct
  source 1..20: mol_type = other DNA
gaaggtaaaatcagtgactc

SEQ ID NO: 28328 - DNA, 20 bp, synthetic construct
  source 1..20: mol_type = other DNA
gcagtcccagtctagtactg

SEQ ID NO: 28329 - DNA, 20 bp, synthetic construct
  source 1..20: mol_type = other DNA
ggagtgcttcttcttcctaa

SEQ ID NO: 28330 - DNA, 20 bp, synthetic construct
  source 1..20: mol_type = other DNA
cccagataatctgatagtgg

SEQ ID NO: 28331 - DNA, 20 bp, synthetic construct
  source 1..20: mol_type = other DNA
agagaggcaagtgttcgtga

SEQ ID NO: 28332 - DNA, 20 bp, synthetic construct
  source 1..20: mol_type = other DNA
tacggatgttttcatcaaac

SEQ ID NO: 28333 - DNA, 20 bp, synthetic construct
  source 1..20: mol_type = other DNA
tcctgattgctatcagagtc

SEQ ID NO: 28334 - DNA, 20 bp, synthetic construct
  source 1..20: mol_type = other DNA
agcccagtctgacctgaaca

SEQ ID NO: 28335 - DNA, 20 bp, synthetic construct
  source 1..20: mol_type = other DNA
tagctacctgactccagtat

SEQ ID NO: 28336 - DNA, 20 bp, synthetic construct
  source 1..20: mol_type = other DNA
tacagagcaacattggcaca

SEQ ID NO: 28337 - DNA, 20 bp, synthetic construct
  source 1..20: mol_type = other DNA
acagagcaacattggcacag

SEQ ID NO: 28338 - DNA, 20 bp, synthetic construct
  source 1..20: mol_type = other DNA
cattatacctgcttgttcat

SEQ ID NO: 28339 - DNA, 20 bp, synthetic construct
  source 1..20: mol_type = other DNA
tacacttgggacatttgcgc

SEQ ID NO: 28340 - DNA, 20 bp, synthetic construct
  source 1..20: mol_type = other DNA
ttccccagataatctgatag

SEQ ID NO: 28341 - DNA, 20 bp, synthetic construct
  source 1..20: mol_type = other DNA
agatctaaggcaaagactca

SEQ ID NO: 28342 - DNA, 20 bp, synthetic construct
  source 1..20: mol_type = other DNA
gttaagtacctcctgagaca

SEQ ID NO: 28343 - DNA, 20 bp, synthetic construct
  source 1..20: mol_type = other DNA
acaggagaatatgaggctac

SEQ ID NO: 28344 - DNA, 20 bp, synthetic construct
  source 1..20: mol_type = other DNA
ccaggcctttgaagacatgc

SEQ ID NO: 28345 - DNA, 20 bp, synthetic construct
  source 1..20: mol_type = other DNA
taagctcaacctggtgctgg

SEQ ID NO: 28346 - DNA, 20 bp, synthetic construct
  source 1..20: mol_type = other DNA
ctctctgaaatggatgtcac

SEQ ID NO: 28347 - DNA, 20 bp, synthetic construct
  source 1..20: mol_type = other DNA
tcttatagttggaagatcta

SEQ ID NO: 28348 - DNA, 20 bp, synthetic construct
  source 1..20: mol_type = other DNA
gagtcttcagagtcaacacc

SEQ ID NO: 28349 - DNA, 20 bp, synthetic construct
  source 1..20: mol_type = other DNA
gcaccaggttgagcttattg

SEQ ID NO: 28350 - DNA, 20 bp, synthetic construct
  source 1..20: mol_type = other DNA
tgagtccacctgcttggcca

SEQ ID NO: 28351 - DNA, 20 bp, synthetic construct
  source 1..20: mol_type = other DNA
tgaatacttcatatataaat

SEQ ID NO: 28352 - DNA, 20 bp, synthetic construct
  source 1..20: mol_type = other DNA
ggcactggctacagaagaca

SEQ ID NO: 28353 - DNA, 20 bp, synthetic construct
  source 1..20: mol_type = other DNA
ggagctcctcaggcttccag

SEQ ID NO: 28354 - DNA, 20 bp, synthetic construct
  source 1..20: mol_type = other DNA
ggaaaagcagaggaaggtgg

SEQ ID NO: 28355 - DNA, 20 bp, synthetic construct
  source 1..20: mol_type = other DNA
ttcttgcgggtgttacagca

SEQ ID NO: 28356 - DNA, 20 bp, synthetic construct
  source 1..20: mol_type = other DNA
ccgatgccatgagagccagg

SEQ ID NO: 28357 - DNA, 20 bp, synthetic construct
  source 1..20: mol_type = other DNA
gctccaggataaagtgacat

SEQ ID NO: 28358 - DNA, 20 bp, synthetic construct
  source 1..20: mol_type = other DNA
ggcgggtatgtggtgaggat

SEQ ID NO: 28359 - DNA, 20 bp, synthetic construct
  source 1..20: mol_type = other DNA
agtgggacatcgagaagctg

SEQ ID NO: 28360 - DNA, 20 bp, synthetic construct
  source 1..20: mol_type = other DNA
tgagaagttggagaagcggc

SEQ ID NO: 28361 - DNA, 20 bp, synthetic construct
  source 1..20: mol_type = other DNA
tgtactccttgatctcctcc

SEQ ID NO: 28362 - DNA, 20 bp, synthetic construct
  source 1..20: mol_type = other DNA
catgggccgcacctgcttgg

SEQ ID NO: 28363 - DNA, 20 bp, synthetic construct
  source 1..20: mol_type = other DNA
gccctgcctggcagagagcc

SEQ ID NO: 28364 - DNA, 20 bp, synthetic construct
  source 1..20: mol_type = other DNA
accgcgcctgggccaggcaa

SEQ ID NO: 28365 - DNA, 20 bp, synthetic construct
  source 1..20: mol_type = other DNA
acccagctagacgaggctcg

SEQ ID NO: 28366 - DNA, 20 bp, synthetic construct
  source 1..20: mol_type = other DNA
atccacctaaggaccagagg

SEQ ID NO: 28367 - DNA, 20 bp, synthetic construct
  source 1..20: mol_type = other DNA
gttctcggccccgggaggaa

SEQ ID NO: 28368 - DNA, 20 bp, synthetic construct
  source 1..20: mol_type = other DNA
tgccccaggaggacatctca

SEQ ID NO: 28369 - DNA, 20 bp, synthetic construct
  source 1..20: mol_type = other DNA
gaaggatgagttgggcgagc

SEQ ID NO: 28370 - DNA, 20 bp, synthetic construct
  source 1..20: mol_type = other DNA
gtaggaggagatggacctga

SEQ ID NO: 28371 - DNA, 20 bp, synthetic construct
  source 1..20: mol_type = other DNA
tgtcactttatcctggagct

SEQ ID NO: 28372 - DNA, 20 bp, synthetic construct
  source 1..20: mol_type = other DNA
actccttgatctcctcctgg

SEQ ID NO: 28373 - DNA, 20 bp, synthetic construct
  source 1..20: mol_type = other DNA
cgcactcgaagcagaaaacg

SEQ ID NO: 28374 - DNA, 20 bp, synthetic construct
  source 1..20: mol_type = other DNA
gcgattgacgatgaggagtg

SEQ ID NO: 28375 - DNA, 20 bp, synthetic construct
  source 1..20: mol_type = other DNA
gcagaagaagctacgcacag

SEQ ID NO: 28376 - DNA, 20 bp, synthetic construct
  source 1..20: mol_type = other DNA
accagattcacaagctgctg

SEQ ID NO: 28377 - DNA, 20 bp, synthetic construct
  source 1..20: mol_type = other DNA
ggcccagggcccttcctccc

SEQ ID NO: 28378 - DNA, 20 bp, synthetic construct
  source 1..20: mol_type = other DNA
gcgggataaggtgcagctca

SEQ ID NO: 28379 - DNA, 20 bp, synthetic construct
  source 1..20: mol_type = other DNA
acccacagagcgacgagctg

SEQ ID NO: 28380 - DNA, 20 bp, synthetic construct
  source 1..20: mol_type = other DNA
agccttgcagggcagcctcg

SEQ ID NO: 28381 - DNA, 20 bp, synthetic construct
  source 1..20: mol_type = other DNA
gcggccatacctgggacttg

SEQ ID NO: 28382 - DNA, 20 bp, synthetic construct
  source 1..20: mol_type = other DNA
agaattgggcctgcagcatg

SEQ ID NO: 28383 - DNA, 20 bp, synthetic construct
  source 1..20: mol_type = other DNA
acatgcaggaacagaacggg

SEQ ID NO: 28384 - DNA, 20 bp, synthetic construct
  source 1..20: mol_type = other DNA
ctgagtagggtggaacagga

SEQ ID NO: 28385 - DNA, 20 bp, synthetic construct
  source 1..20: mol_type = other DNA
tcaggcacacacccgagagc

SEQ ID NO: 28386 - DNA, 20 bp, synthetic construct
  source 1..20: mol_type = other DNA
ggcctcaggttctcggcccc

SEQ ID NO: 28387 - DNA, 20 bp, synthetic construct
  source 1..20: mol_type = other DNA
aggagtacaaggtggggctg

SEQ ID NO: 28388 - DNA, 20 bp, synthetic construct
  source 1..20: mol_type = other DNA
ggcatctcttccacggttcg

SEQ ID NO: 28389 - DNA, 20 bp, synthetic construct
  source 1..20: mol_type = other DNA
cttccagctggatgaaactg

SEQ ID NO: 28390 - DNA, 20 bp, synthetic construct
  source 1..20: mol_type = other DNA
tcctcacctccaatgagatg

SEQ ID NO: 28391 - DNA, 20 bp, synthetic construct
  source 1..20: mol_type = other DNA
gcgacacatcgagcacatgg

SEQ ID NO: 28392 - DNA, 20 bp, synthetic construct
  source 1..20: mol_type = other DNA
tctctttctcacgagcagcc

SEQ ID NO: 28393 - DNA, 20 bp, synthetic construct
  source 1..20: mol_type = other DNA
tgcacttggggcacttcctc

SEQ ID NO: 28394 - DNA, 20 bp, synthetic construct
  source 1..20: mol_type = other DNA
gctgtggagagaaaacagac

SEQ ID NO: 28395 - DNA, 20 bp, synthetic construct
  source 1..20: mol_type = other DNA
ctctgacattagcttaaagt

SEQ ID NO: 28396 - DNA, 20 bp, synthetic construct
  source 1..20: mol_type = other DNA
cctgcagtcgccggttctca

SEQ ID NO: 28397 - DNA, 20 bp, synthetic construct
  source 1..20: mol_type = other DNA
aggtcaaccgcgcctgggcc

SEQ ID NO: 28398 - DNA, 20 bp, synthetic construct
  source 1..20: mol_type = other DNA
tcgcggatgaggatgccctg

SEQ ID NO: 28399 - DNA, 20 bp, synthetic construct
  source 1..20: mol_type = other DNA
agcgagtgtacagccgaggt

SEQ ID NO: 28400 - DNA, 20 bp, synthetic construct
  source 1..20: mol_type = other DNA
ggagatcaaggagtacaagg

SEQ ID NO: 28401 - DNA, 20 bp, synthetic construct
  source 1..20: mol_type = other DNA
ccacatacccgcctgctcgt

SEQ ID NO: 28402 - DNA, 20 bp, synthetic construct
  source 1..20: mol_type = other DNA
gcgggtatgtggtgaggata

SEQ ID NO: 28403 - DNA, 20 bp, synthetic construct
  source 1..20: mol_type = other DNA
caggcacacacccgagagct

SEQ ID NO: 28404 - DNA, 20 bp, synthetic construct
  source 1..20: mol_type = other DNA
acttggggcacttcctctgg

SEQ ID NO: 28405 - DNA, 20 bp, synthetic construct
  source 1..20: mol_type = other DNA
tggaggtatggccctggaac

SEQ ID NO: 28406 - DNA, 20 bp, synthetic construct
  source 1..20: mol_type = other DNA
cagcgagtgtacagccgagg

SEQ ID NO: 28407 - DNA, 20 bp, synthetic construct
  source 1..20: mol_type = other DNA
ggaggagatcaaggagtaca

SEQ ID NO: 28408 - DNA, 20 bp, synthetic construct
  source 1..20: mol_type = other DNA
gcagaaaacgtggaagcact

SEQ ID NO: 28409 - DNA, 20 bp, synthetic construct
  source 1..20: mol_type = other DNA
atgagctgcggagccgcatc

SEQ ID NO: 28410 - DNA, 20 bp, synthetic construct
  source 1..20: mol_type = other DNA
aactgcaggccgaacttcag

SEQ ID NO: 28411 - DNA, 20 bp, synthetic construct
  source 1..20: mol_type = other DNA
gcgtcagtgccccagcccca

SEQ ID NO: 28412 - DNA, 20 bp, synthetic construct
  source 1..20: mol_type = other DNA
ccacaaccaccagctaaaag

SEQ ID NO: 28413 - DNA, 20 bp, synthetic construct
  source 1..20: mol_type = other DNA
cttggggcacttcctctggc

SEQ ID NO: 28414 - DNA, 20 bp, synthetic construct
  source 1..20: mol_type = other DNA
agcacgtgcagactcggctg

SEQ ID NO: 28415 - DNA, 20 bp, synthetic construct
  source 1..20: mol_type = other DNA
ggggcaggtcaaccgcgcct

SEQ ID NO: 28416 - DNA, 20 bp, synthetic construct
  source 1..20: mol_type = other DNA
ctggcggccaacgagcaggc

SEQ ID NO: 28417 - DNA, 20 bp, synthetic construct
  source 1..20: mol_type = other DNA
tcttggaggcatctcttcca

SEQ ID NO: 28418 - DNA, 20 bp, synthetic construct
  source 1..20: mol_type = other DNA
gctcaataagcacctggcag

SEQ ID NO: 28419 - DNA, 20 bp, synthetic construct
  source 1..20: mol_type = other DNA
agcctcacttgagctctgct

SEQ ID NO: 28420 - DNA, 20 bp, synthetic construct
  source 1..20: mol_type = other DNA
tcctggcaagaaggtacagg

SEQ ID NO: 28421 - DNA, 20 bp, synthetic construct
  source 1..20: mol_type = other DNA
aggccgaatggagttctcca

SEQ ID NO: 28422 - DNA, 20 bp, synthetic construct
  source 1..20: mol_type = other DNA
acagtgacagtaggggtggc

SEQ ID NO: 28423 - DNA, 20 bp, synthetic construct
  source 1..20: mol_type = other DNA
ggtcaactagtcctgtggct

SEQ ID NO: 28424 - DNA, 20 bp, synthetic construct
  source 1..20: mol_type = other DNA
tctcaagacaggcaggccca

SEQ ID NO: 28425 - DNA, 20 bp, synthetic construct
  source 1..20: mol_type = other DNA
cgaagcggctcgtcttgcgg

SEQ ID NO: 28426 - DNA, 20 bp, synthetic construct
  source 1..20: mol_type = other DNA
ttgcgaagcggctcgtcttg

SEQ ID NO: 28427 - DNA, 20 bp, synthetic construct
  source 1..20: mol_type = other DNA
gcggcggtgagacagccacg

SEQ ID NO: 28428 - DNA, 20 bp, synthetic construct
  source 1..20: mol_type = other DNA
ggtgaggcccgggacgagga

SEQ ID NO: 28429 - DNA, 20 bp, synthetic construct
  source 1..20: mol_type = other DNA
tgcaggtgaggcccgggacg

SEQ ID NO: 28430 - DNA, 20 bp, synthetic construct
  source 1..20: mol_type = other DNA
tgaggaagcgttggctgcgc

SEQ ID NO: 28431 - DNA, 20 bp, synthetic construct
  source 1..20: mol_type = other DNA
agtaaaacctcgccagcgcc

SEQ ID NO: 28432 - DNA, 20 bp, synthetic construct
  source 1..20: mol_type = other DNA
caagacgagccgcttcgcaa

SEQ ID NO: 28433 - DNA, 20 bp, synthetic construct
  source 1..20: mol_type = other DNA
gccaagcaggtgagaggtga

SEQ ID NO: 28434 - DNA, 20 bp, synthetic construct
  source 1..20: mol_type = other DNA
acagagagtcctcttcaccg

SEQ ID NO: 28435 - DNA, 20 bp, synthetic construct
  source 1..20: mol_type = other DNA
gtgaagaggactctctgtcg

SEQ ID NO: 28436 - DNA, 20 bp, synthetic construct
  source 1..20: mol_type = other DNA
cgtgagtgctccaacggagg

SEQ ID NO: 28437 - DNA, 20 bp, synthetic construct
  source 1..20: mol_type = other DNA
ggtacaggaagttgagcctc

SEQ ID NO: 28438 - DNA, 20 bp, synthetic construct
  source 1..20: mol_type = other DNA
ctgggcaaggacacaatggg

SEQ ID NO: 28439 - DNA, 20 bp, synthetic construct
  source 1..20: mol_type = other DNA
cagagagtcctcttcaccga

SEQ ID NO: 28440 - DNA, 20 bp, synthetic construct
  source 1..20: mol_type = other DNA
caggaagttgagcctctgga

SEQ ID NO: 28441 - DNA, 20 bp, synthetic construct
  source 1..20: mol_type = other DNA
tgttcagctaaggattaaaa

SEQ ID NO: 28442 - DNA, 20 bp, synthetic construct
  source 1..20: mol_type = other DNA
atgttcagctaaggattaaa

SEQ ID NO: 28443 - DNA, 20 bp, synthetic construct
  source 1..20: mol_type = other DNA
ttcaagatgaaggtaggtga

SEQ ID NO: 28444 - DNA, 20 bp, synthetic construct
  source 1..20: mol_type = other DNA
aagcagggtgtcttgaccca

SEQ ID NO: 28445 - DNA, 20 bp, synthetic construct
  source 1..20: mol_type = other DNA
gttcagctaaggattaaaag

SEQ ID NO: 28446 - DNA, 20 bp, synthetic construct
  source 1..20: mol_type = other DNA
tagagagattgaaaagtttg

SEQ ID NO: 28447 - DNA, 20 bp, synthetic construct
  source 1..20: mol_type = other DNA
caaaaaatcttatttctgac

SEQ ID NO: 28448 - DNA, 20 bp, synthetic construct
  source 1..20: mol_type = other DNA
tactcagtagcaggcggaca

SEQ ID NO: 28449 - DNA, 20 bp, synthetic construct
  source 1..20: mol_type = other DNA
ctgccagaaactcattgaag

SEQ ID NO: 28450 - DNA, 20 bp, synthetic construct
  source 1..20: mol_type = other DNA
aagatgaaggtaggtgatgg

SEQ ID NO: 28451 - DNA, 20 bp, synthetic construct
  source 1..20: mol_type = other DNA
acaaggtttccccatgaagc

SEQ ID NO: 28452 - DNA, 20 bp, synthetic construct
  source 1..20: mol_type = other DNA
catagacctggaccagccag

SEQ ID NO: 28453 - DNA, 20 bp, synthetic construct
  source 1..20: mol_type = other DNA
acttaccagaaagacctgat

SEQ ID NO: 28454 - DNA, 20 bp, synthetic construct
  source 1..20: mol_type = other DNA
tcctcagagcccgcgtcctc

SEQ ID NO: 28455 - DNA, 20 bp, synthetic construct
  source 1..20: mol_type = other DNA
atataaacttacagttcata

SEQ ID NO: 28456 - DNA, 20 bp, synthetic construct
  source 1..20: mol_type = other DNA
caagtagggattggcatctt

SEQ ID NO: 28457 - DNA, 20 bp, synthetic construct
  source 1..20: mol_type = other DNA
tctcagtgaaagtgccaatc

SEQ ID NO: 28458 - DNA, 20 bp, synthetic construct
  source 1..20: mol_type = other DNA
agcccagtcaaattttctcc

SEQ ID NO: 28459 - DNA, 20 bp, synthetic construct
  source 1..20: mol_type = other DNA
ggagaagttcaagtagggat

SEQ ID NO: 28460 - DNA, 20 bp, synthetic construct
  source 1..20: mol_type = other DNA
tacctttttaagcagatctc

SEQ ID NO: 28461 - DNA, 20 bp, synthetic construct
  source 1..20: mol_type = other DNA
ttaatgtatgacatgctgac

SEQ ID NO: 28462 - DNA, 20 bp, synthetic construct
  source 1..20: mol_type = other DNA
gcgcagggcgatcttgatgg

SEQ ID NO: 28463 - DNA, 20 bp, synthetic construct
  source 1..20: mol_type = other DNA
cctccccgttgactgtgggc

SEQ ID NO: 28464 - DNA, 20 bp, synthetic construct
  source 1..20: mol_type = other DNA
catccagctggcagcctgcg

SEQ ID NO: 28465 - DNA, 20 bp, synthetic construct
  source 1..20: mol_type = other DNA
gctcctgccgagagggagaa

SEQ ID NO: 28466 - DNA, 20 bp, synthetic construct
  source 1..20: mol_type = other DNA
tccattgacgctgccaagag

SEQ ID NO: 28467 - DNA, 20 bp, synthetic construct
  source 1..20: mol_type = other DNA
cactggcgcagcaaggggtg

SEQ ID NO: 28468 - DNA, 20 bp, synthetic construct
  source 1..20: mol_type = other DNA
cacactcacgatgtggccgt

SEQ ID NO: 28469 - DNA, 20 bp, synthetic construct
  source 1..20: mol_type = other DNA
cttcagacaggacttgctgg

SEQ ID NO: 28470 - DNA, 20 bp, synthetic construct
  source 1..20: mol_type = other DNA
ggccctgcagttcatagaag

SEQ ID NO: 28471 - DNA, 20 bp, synthetic construct
  source 1..20: mol_type = other DNA
cagcgcagggcgatcttgat

SEQ ID NO: 28472 - DNA, 20 bp, synthetic construct
  source 1..20: mol_type = other DNA
gggtggccatctgcctcggc

SEQ ID NO: 28473 - DNA, 20 bp, synthetic construct
  source 1..20: mol_type = other DNA
ttcctcagatcctctgtcga

SEQ ID NO: 28474 - DNA, 20 bp, synthetic construct
  source 1..20: mol_type = other DNA
agagctggaggatgaaggat

SEQ ID NO: 28475 - DNA, 20 bp, synthetic construct
  source 1..20: mol_type = other DNA
gcagagccttgacccaactg

SEQ ID NO: 28476 - DNA, 20 bp, synthetic construct
  source 1..20: mol_type = other DNA
catgcagaaatgtgtcagtc

SEQ ID NO: 28477 - DNA, 20 bp, synthetic construct
  source 1..20: mol_type = other DNA
tgcgcagcggacctgcaagg

SEQ ID NO: 28478 - DNA, 20 bp, synthetic construct
  source 1..20: mol_type = other DNA
tcaccacagaggggacgccg

SEQ ID NO: 28479 - DNA, 20 bp, synthetic construct
  source 1..20: mol_type = other DNA
cgcaccaggctcactgccca

SEQ ID NO: 28480 - DNA, 20 bp, synthetic construct
  source 1..20: mol_type = other DNA
cttgcaggtccgctgcgcag

SEQ ID NO: 28481 - DNA, 20 bp, synthetic construct
  source 1..20: mol_type = other DNA
ccacccgcactgggtcagtg

SEQ ID NO: 28482 - DNA, 20 bp, synthetic construct
  source 1..20: mol_type = other DNA
catgcgatcaggtccgcctg

SEQ ID NO: 28483 - DNA, 20 bp, synthetic construct
  source 1..20: mol_type = other DNA
gcaggtgagtttcttcagac

SEQ ID NO: 28484 - DNA, 20 bp, synthetic construct
  source 1..20: mol_type = other DNA
tgacgcggctgtaggggagg

SEQ ID NO: 28485 - DNA, 20 bp, synthetic construct
  source 1..20: mol_type = other DNA
gtggaaggccaggcagctga

SEQ ID NO: 28486 - DNA, 20 bp, synthetic construct
  source 1..20: mol_type = other DNA
cagacaaggcctgggggcga

SEQ ID NO: 28487 - DNA, 20 bp, synthetic construct
  source 1..20: mol_type = other DNA
gatccagttcagttcaccca

SEQ ID NO: 28488 - DNA, 20 bp, synthetic construct
  source 1..20: mol_type = other DNA
gcccagcaagtcattcagaa

SEQ ID NO: 28489 - DNA, 20 bp, synthetic construct
  source 1..20: mol_type = other DNA
cccaggcggacctgatcgca

SEQ ID NO: 28490 - DNA, 20 bp, synthetic construct
  source 1..20: mol_type = other DNA
ttcacgcaccttccggacca

SEQ ID NO: 28491 - DNA, 20 bp, synthetic construct
  source 1..20: mol_type = other DNA
gagctggaggatgaaggatc

SEQ ID NO: 28492 - DNA, 20 bp, synthetic construct
  source 1..20: mol_type = other DNA
ccattgacgctgccaagaga

SEQ ID NO: 28493 - DNA, 20 bp, synthetic construct
  source 1..20: mol_type = other DNA
ggagcagcttcagcacgtag

SEQ ID NO: 28494 - DNA, 20 bp, synthetic construct
  source 1..20: mol_type = other DNA
tcctgagctcatgaggaggc

SEQ ID NO: 28495 - DNA, 20 bp, synthetic construct
  source 1..20: mol_type = other DNA
ccagctctgagctaaggatt

SEQ ID NO: 28496 - DNA, 20 bp, synthetic construct
  source 1..20: mol_type = other DNA
actgacccagtgcgggtgga

SEQ ID NO: 28497 - DNA, 20 bp, synthetic construct
  source 1..20: mol_type = other DNA
ctttcactacaatggccacg

SEQ ID NO: 28498 - DNA, 20 bp, synthetic construct
  source 1..20: mol_type = other DNA
ggaggtctgggtcttcaaca

SEQ ID NO: 28499 - DNA, 20 bp, synthetic construct
  source 1..20: mol_type = other DNA
tcagctgctcggcgaagaac

SEQ ID NO: 28500 - DNA, 20 bp, synthetic construct
  source 1..20: mol_type = other DNA
cttccaaaagctcttcagac

SEQ ID NO: 28501 - DNA, 20 bp, synthetic construct
  source 1..20: mol_type = other DNA
cagcattccaagcgtgcaca

SEQ ID NO: 28502 - DNA, 20 bp, synthetic construct
  source 1..20: mol_type = other DNA
tgccgacagacaaggcctgg

SEQ ID NO: 28503 - DNA, 20 bp, synthetic construct
  source 1..20: mol_type = other DNA
accgatgagggagttgaggg

SEQ ID NO: 28504 - DNA, 20 bp, synthetic construct
  source 1..20: mol_type = other DNA
tcagcagaagcgagcagtcc

SEQ ID NO: 28505 - DNA, 20 bp, synthetic construct
  source 1..20: mol_type = other DNA
tctttcactacaatggccac

SEQ ID NO: 28506 - DNA, 20 bp, synthetic construct
  source 1..20: mol_type = other DNA
ggccagccacgatgagtgag

SEQ ID NO: 28507 - DNA, 20 bp, synthetic construct
  source 1..20: mol_type = other DNA
gtgccaagcggacctcgtga

SEQ ID NO: 28508 - DNA, 20 bp, synthetic construct
  source 1..20: mol_type = other DNA
tacagaagcagtacgagaac

SEQ ID NO: 28509 - DNA, 20 bp, synthetic construct
  source 1..20: mol_type = other DNA
cacatggcgtgcatgtacgt

SEQ ID NO: 28510 - DNA, 20 bp, synthetic construct
  source 1..20: mol_type = other DNA
aagctggattatttccacaa

SEQ ID NO: 28511 - DNA, 20 bp, synthetic construct
  source 1..20: mol_type = other DNA
tggctctaggacatccctac

SEQ ID NO: 28512 - DNA, 20 bp, synthetic construct
  source 1..20: mol_type = other DNA
ctctttcactacaatggcca

SEQ ID NO: 28513 - DNA, 20 bp, synthetic construct
  source 1..20: mol_type = other DNA
atacctgtggttgctggaga

SEQ ID NO: 28514 - DNA, 20 bp, synthetic construct
  source 1..20: mol_type = other DNA
tttgacaggcattacgagat

SEQ ID NO: 28515 - DNA, 20 bp, synthetic construct
  source 1..20: mol_type = other DNA
gggcctgggggaggaagatg

SEQ ID NO: 28516 - DNA, 20 bp, synthetic construct
  source 1..20: mol_type = other DNA
ggcgagaatgaaagccgtca

SEQ ID NO: 28517 - DNA, 20 bp, synthetic construct
  source 1..20: mol_type = other DNA
ttccaggtgtggctcaccat

SEQ ID NO: 28518 - DNA, 20 bp, synthetic construct
  source 1..20: mol_type = other DNA
tgtggttgctggagaaggca

SEQ ID NO: 28519 - DNA, 20 bp, synthetic construct
  source 1..20: mol_type = other DNA
gatctggcagaacttcgact

SEQ ID NO: 28520 - DNA, 20 bp, synthetic construct
  source 1..20: mol_type = other DNA
agttctgccagatcctgccg

SEQ ID NO: 28521 - DNA, 20 bp, synthetic construct
  source 1..20: mol_type = other DNA
attccaggtgtggctcacca

SEQ ID NO: 28522 - DNA, 20 bp, synthetic construct
  source 1..20: mol_type = other DNA
agcggacctgcaaggcggcg

SEQ ID NO: 28523 - DNA, 20 bp, synthetic construct
  source 1..20: mol_type = other DNA
accaccagctcctgccgaga

SEQ ID NO: 28524 - DNA, 20 bp, synthetic construct
  source 1..20: mol_type = other DNA
ctcaccgatgagggagttga

SEQ ID NO: 28525 - DNA, 20 bp, synthetic construct
  source 1..20: mol_type = other DNA
cccgggcgcaccttcatgac

SEQ ID NO: 28526 - DNA, 20 bp, synthetic construct
  source 1..20: mol_type = other DNA
ccagcattccaagcgtgcac

SEQ ID NO: 28527 - DNA, 20 bp, synthetic construct
  source 1..20: mol_type = other DNA
tccaggagctgggatggtgg

SEQ ID NO: 28528 - DNA, 20 bp, synthetic construct
  source 1..20: mol_type = other DNA
gtcagctgctcggcgaagaa

SEQ ID NO: 28529 - DNA, 20 bp, synthetic construct
  source 1..20: mol_type = other DNA
tcacgcaccttccggaccat

SEQ ID NO: 28530 - DNA, 20 bp, synthetic construct
  source 1..20: mol_type = other DNA
tgacccctatccagaggtct

SEQ ID NO: 28531 - DNA, 20 bp, synthetic construct
  source 1..20: mol_type = other DNA
ggcgcaccttcatgacgggc

SEQ ID NO: 28532 - DNA, 20 bp, synthetic construct
  source 1..20: mol_type = other DNA
ccatgcgatcaggtccgcct

SEQ ID NO: 28533 - DNA, 20 bp, synthetic construct
  source 1..20: mol_type = other DNA
cgcggatggagccgtcaccg

SEQ ID NO: 28534 - DNA, 20 bp, synthetic construct
  source 1..20: mol_type = other DNA
ggccacccactggcgcagca

SEQ ID NO: 28535 - DNA, 20 bp, synthetic construct
  source 1..20: mol_type = other DNA
agcgcagggcgatcttgatg

SEQ ID NO: 28536 - DNA, 20 bp, synthetic construct
  source 1..20: mol_type = other DNA
gaagaacgggctgtgctgcg

SEQ ID NO: 28537 - DNA, 20 bp, synthetic construct
  source 1..20: mol_type = other DNA
ccacgcgatggtgtctgtga

SEQ ID NO: 28538 - DNA, 20 bp, synthetic construct
  source 1..20: mol_type = other DNA
cgaacatcttccgtgtccgg

SEQ ID NO: 28539 - DNA, 20 bp, synthetic construct
  source 1..20: mol_type = other DNA
tccaccaccatcccagctcc

SEQ ID NO: 28540 - DNA, 20 bp, synthetic construct
  source 1..20: mol_type = other DNA
acgcaccaggctcactgccc

SEQ ID NO: 28541 - DNA, 20 bp, synthetic construct
  source 1..20: mol_type = other DNA
cgaggcagatggccacccac

SEQ ID NO: 28542 - DNA, 20 bp, synthetic construct
  source 1..20: mol_type = other DNA
ctcacctcacactcacgatg

SEQ ID NO: 28543 - DNA, 20 bp, synthetic construct
  source 1..20: mol_type = other DNA
gcggacctgcaaggcggcgg

SEQ ID NO: 28544 - DNA, 20 bp, synthetic construct
  source 1..20: mol_type = other DNA
tccctgcagaagcgtcccga

SEQ ID NO: 28545 - DNA, 20 bp, synthetic construct
  source 1..20: mol_type = other DNA
aggtgaataggtcagccggg

SEQ ID NO: 28546 - DNA, 20 bp, synthetic construct
  source 1..20: mol_type = other DNA
ttggctctaggacatcccta

SEQ ID NO: 28547 - DNA, 20 bp, synthetic construct
  source 1..20: mol_type = other DNA
ccgcaggcaagcctgggacc

SEQ ID NO: 28548 - DNA, 20 bp, synthetic construct
  source 1..20: mol_type = other DNA
gaacgacaggaggacgcccc

SEQ ID NO: 28549 - DNA, 20 bp, synthetic construct
  source 1..20: mol_type = other DNA
ccatcaagatcgccctgcgc

SEQ ID NO: 28550 - DNA, 20 bp, synthetic construct
  source 1..20: mol_type = other DNA
tcagctgccgacgatcatcg

SEQ ID NO: 28551 - DNA, 20 bp, synthetic construct
  source 1..20: mol_type = other DNA
tactcacgctgtccactgcg

SEQ ID NO: 28552 - DNA, 20 bp, synthetic construct
  source 1..20: mol_type = other DNA
aaagcttaagggaagaagag

SEQ ID NO: 28553 - DNA, 20 bp, synthetic construct
  source 1..20: mol_type = other DNA
gcgacgggagccccatggtc

SEQ ID NO: 28554 - DNA, 20 bp, synthetic construct
  source 1..20: mol_type = other DNA
tgcaggtcatatatggacag

SEQ ID NO: 28555 - DNA, 20 bp, synthetic construct
  source 1..20: mol_type = other DNA
acagcgggagcaggagctgg

SEQ ID NO: 28556 - DNA, 20 bp, synthetic construct
  source 1..20: mol_type = other DNA
cggaggggagcccctgccat

SEQ ID NO: 28557 - DNA, 20 bp, synthetic construct
  source 1..20: mol_type = other DNA
ccaggtcccaggcttgcctg

SEQ ID NO: 28558 - DNA, 20 bp, synthetic construct
  source 1..20: mol_type = other DNA
acccttctgaatgacttgct

SEQ ID NO: 28559 - DNA, 20 bp, synthetic construct
  source 1..20: mol_type = other DNA
tcaagcagttcgcactacag

SEQ ID NO: 28560 - DNA, 20 bp, synthetic construct
  source 1..20: mol_type = other DNA
caggtgagtttcttcagacc

SEQ ID NO: 28561 - DNA, 20 bp, synthetic construct
  source 1..20: mol_type = other DNA
gatgtcctagagccaaacac

SEQ ID NO: 28562 - DNA, 20 bp, synthetic construct
  source 1..20: mol_type = other DNA
cacggccaggtgaggctgca

SEQ ID NO: 28563 - DNA, 20 bp, synthetic construct
  source 1..20: mol_type = other DNA
ttacctgcaccttcatctca

SEQ ID NO: 28564 - DNA, 20 bp, synthetic construct
  source 1..20: mol_type = other DNA
gcccagatgaaaacgagaag

SEQ ID NO: 28565 - DNA, 20 bp, synthetic construct
  source 1..20: mol_type = other DNA
ggtgagccacacctggaatg

SEQ ID NO: 28566 - DNA, 20 bp, synthetic construct
  source 1..20: mol_type = other DNA
cagaaagctctggaaaccat

SEQ ID NO: 28567 - DNA, 20 bp, synthetic construct
  source 1..20: mol_type = other DNA
caggaggtgaataggtcagc

SEQ ID NO: 28568 - DNA, 20 bp, synthetic construct
  source 1..20: mol_type = other DNA
catcctccagctctgagcta

SEQ ID NO: 28569 - DNA, 20 bp, synthetic construct
  source 1..20: mol_type = other DNA
tggtgaggcaggaggtgaat

SEQ ID NO: 28570 - DNA, 20 bp, synthetic construct
  source 1..20: mol_type = other DNA
gccacccactggcgcagcaa

SEQ ID NO: 28571 - DNA, 20 bp, synthetic construct
  source 1..20: mol_type = other DNA
gccccggcccacagtcaacg

SEQ ID NO: 28572 - DNA, 20 bp, synthetic construct
  source 1..20: mol_type = other DNA
ggcagacgcgggctgctgac

SEQ ID NO: 28573 - DNA, 20 bp, synthetic construct
  source 1..20: mol_type = other DNA
ccacccactggcgcagcaag

SEQ ID NO: 28574 - DNA, 20 bp, synthetic construct
  source 1..20: mol_type = other DNA
ttgcagcctcacctggccgt

SEQ ID NO: 28575 - DNA, 20 bp, synthetic construct
  source 1..20: mol_type = other DNA
gtacgagaactggcagccaa

SEQ ID NO: 28576 - DNA, 20 bp, synthetic construct
  source 1..20: mol_type = other DNA
cgatcaggtccgcctggggg

SEQ ID NO: 28577 - DNA, 20 bp, synthetic construct
  source 1..20: mol_type = other DNA
ccgggagcacacagcctggg

SEQ ID NO: 28578 - DNA, 20 bp, synthetic construct
  source 1..20: mol_type = other DNA
ccagatcctgccgaggcaga

SEQ ID NO: 28579 - DNA, 20 bp, synthetic construct
  source 1..20: mol_type = other DNA
actcaccgatgagggagttg

SEQ ID NO: 28580 - DNA, 20 bp, synthetic construct
  source 1..20: mol_type = other DNA
caagcagttcgcactacagc

SEQ ID NO: 28581 - DNA, 20 bp, synthetic construct
  source 1..20: mol_type = other DNA
cagaggatctgaggaagcaa

SEQ ID NO: 28582 - DNA, 20 bp, synthetic construct
  source 1..20: mol_type = other DNA
tgccacgcggtcaccatctc

SEQ ID NO: 28583 - DNA, 20 bp, synthetic construct
  source 1..20: mol_type = other DNA
ctggaagaacaagaagaaaa

SEQ ID NO: 28584 - DNA, 20 bp, synthetic construct
  source 1..20: mol_type = other DNA
ggggagcacgttccacgcga

SEQ ID NO: 28585 - DNA, 20 bp, synthetic construct
  source 1..20: mol_type = other DNA
gggcgaagaccgctgcgcag

SEQ ID NO: 28586 - DNA, 20 bp, synthetic construct
  source 1..20: mol_type = other DNA
cggctcctaccagttctcca

SEQ ID NO: 28587 - DNA, 20 bp, synthetic construct
  source 1..20: mol_type = other DNA
cggagatggagggcagcgcg

SEQ ID NO: 28588 - DNA, 20 bp, synthetic construct
  source 1..20: mol_type = other DNA
taccgcagccatgaagaacc

SEQ ID NO: 28589 - DNA, 20 bp, synthetic construct
  source 1..20: mol_type = other DNA
gcctggaggaggccgtgtgg

SEQ ID NO: 28590 - DNA, 20 bp, synthetic construct
  source 1..20: mol_type = other DNA
gagggttaaaggcagtggag

SEQ ID NO: 28591 - DNA, 20 bp, synthetic construct
  source 1..20: mol_type = other DNA
ttgttgcagcgccagtgcga

SEQ ID NO: 28592 - DNA, 20 bp, synthetic construct
  source 1..20: mol_type = other DNA
ctcctaccagttctccatgg

SEQ ID NO: 28593 - DNA, 20 bp, synthetic construct
  source 1..20: mol_type = other DNA
gctccgtgctgccctcgcac

SEQ ID NO: 28594 - DNA, 20 bp, synthetic construct
  source 1..20: mol_type = other DNA
gtcagggtgaaactcttccc

SEQ ID NO: 28595 - DNA, 20 bp, synthetic construct
  source 1..20: mol_type = other DNA
gcgccagtgcgagggcagca

SEQ ID NO: 28596 - DNA, 20 bp, synthetic construct
  source 1..20: mol_type = other DNA
gaagcgaaggtcgttgaacc

SEQ ID NO: 28597 - DNA, 20 bp, synthetic construct
  source 1..20: mol_type = other DNA
tccccctaccacctctacta

SEQ ID NO: 28598 - DNA, 20 bp, synthetic construct
  source 1..20: mol_type = other DNA
gcactcaccttgaaggcgac

SEQ ID NO: 28599 - DNA, 20 bp, synthetic construct
  source 1..20: mol_type = other DNA
ggtcgttgaacctggccacc

SEQ ID NO: 28600 - DNA, 20 bp, synthetic construct
  source 1..20: mol_type = other DNA
gccgcagtgggcgaggtaag

SEQ ID NO: 28601 - DNA, 20 bp, synthetic construct
  source 1..20: mol_type = other DNA
gtaccttggattggggtctg

SEQ ID NO: 28602 - DNA, 20 bp, synthetic construct
  source 1..20: mol_type = other DNA
cccccgggtagggtggcggg

SEQ ID NO: 28603 - DNA, 20 bp, synthetic construct
  source 1..20: mol_type = other DNA
gcacggagcagaggaagttg

SEQ ID NO: 28604 - DNA, 20 bp, synthetic construct
  source 1..20: mol_type = other DNA
tggctcctaccagttctcca

SEQ ID NO: 28605 - DNA, 20 bp, synthetic construct
  source 1..20: mol_type = other DNA
gggcccgctctggttctgcg

SEQ ID NO: 28606 - DNA, 20 bp, synthetic construct
  source 1..20: mol_type = other DNA
gcgcaggcggccgtggggcc

SEQ ID NO: 28607 - DNA, 20 bp, synthetic construct
  source 1..20: mol_type = other DNA
cggccagagtgatggcgtgg

SEQ ID NO: 28608 - DNA, 20 bp, synthetic construct
  source 1..20: mol_type = other DNA
acctgaagacacggggcggg

SEQ ID NO: 28609 - DNA, 20 bp, synthetic construct
  source 1..20: mol_type = other DNA
aatccaaggtacggcacgga

SEQ ID NO: 28610 - DNA, 20 bp, synthetic construct
  source 1..20: mol_type = other DNA
ccaaggtacggcacggaggg

SEQ ID NO: 28611 - DNA, 20 bp, synthetic construct
  source 1..20: mol_type = other DNA
accacctgaagacacggggc

SEQ ID NO: 28612 - DNA, 20 bp, synthetic construct
  source 1..20: mol_type = other DNA
gccatcaaggtgaccgtgga

SEQ ID NO: 28613 - DNA, 20 bp, synthetic construct
  source 1..20: mol_type = other DNA
tccacttacctcgcccactg

SEQ ID NO: 28614 - DNA, 20 bp, synthetic construct
  source 1..20: mol_type = other DNA
ttggcagcgtggggaaggag

SEQ ID NO: 28615 - DNA, 20 bp, synthetic construct
  source 1..20: mol_type = other DNA
agggcaccggcagaagctgg

SEQ ID NO: 28616 - DNA, 20 bp, synthetic construct
  source 1..20: mol_type = other DNA
ctggggagagtggggaatag

SEQ ID NO: 28617 - DNA, 20 bp, synthetic construct
  source 1..20: mol_type = other DNA
cgccgccgcaggggaaggcc

SEQ ID NO: 28618 - DNA, 20 bp, synthetic construct
  source 1..20: mol_type = other DNA
ccagaccccaatccaaggta

SEQ ID NO: 28619 - DNA, 20 bp, synthetic construct
  source 1..20: mol_type = other DNA
cacctgaagacacggggcgg

SEQ ID NO: 28620 - DNA, 20 bp, synthetic construct
  source 1..20: mol_type = other DNA
ccccctaccacctctactac

SEQ ID NO: 28621 - DNA, 20 bp, synthetic construct
  source 1..20: mol_type = other DNA
cgggtagggtggcgggaggt

SEQ ID NO: 28622 - DNA, 20 bp, synthetic construct
  source 1..20: mol_type = other DNA
ggccacctggttcttcatga

SEQ ID NO: 28623 - DNA, 20 bp, synthetic construct
  source 1..20: mol_type = other DNA
caatccaaggtacggcacgg

SEQ ID NO: 28624 - DNA, 20 bp, synthetic construct
  source 1..20: mol_type = other DNA
cccgtagtagaggtggtagg

SEQ ID NO: 28625 - DNA, 20 bp, synthetic construct
  source 1..20: mol_type = other DNA
gcagaggaagttggggctgt

SEQ ID NO: 28626 - DNA, 20 bp, synthetic construct
  source 1..20: mol_type = other DNA
gtaattaatgatcctatcca

SEQ ID NO: 28627 - DNA, 20 bp, synthetic construct
  source 1..20: mol_type = other DNA
cggaccccatgtcttgtagt

SEQ ID NO: 28628 - DNA, 20 bp, synthetic construct
  source 1..20: mol_type = other DNA
agatgatggcagtccctaga

SEQ ID NO: 28629 - DNA, 20 bp, synthetic construct
  source 1..20: mol_type = other DNA
agtctagggtaagaagggaa

SEQ ID NO: 28630 - DNA, 20 bp, synthetic construct
  source 1..20: mol_type = other DNA
agtgggccggggaggagggg

SEQ ID NO: 28631 - DNA, 20 bp, synthetic construct
  source 1..20: mol_type = other DNA
tggtcggttctggataggaa

SEQ ID NO: 28632 - DNA, 20 bp, synthetic construct
  source 1..20: mol_type = other DNA
agccccaggctcagaggccc

SEQ ID NO: 28633 - DNA, 20 bp, synthetic construct
  source 1..20: mol_type = other DNA
gggggtgatggagaggaagg

SEQ ID NO: 28634 - DNA, 20 bp, synthetic construct
  source 1..20: mol_type = other DNA
tctccagggctgtggttgtc

SEQ ID NO: 28635 - DNA, 20 bp, synthetic construct
  source 1..20: mol_type = other DNA
agccctggagatgcctgacc

SEQ ID NO: 28636 - DNA, 20 bp, synthetic construct
  source 1..20: mol_type = other DNA
tcccagtgaggaagggagaa

SEQ ID NO: 28637 - DNA, 20 bp, synthetic construct
  source 1..20: mol_type = other DNA
ggggcccacggcctgtgtcc

SEQ ID NO: 28638 - DNA, 20 bp, synthetic construct
  source 1..20: mol_type = other DNA
ggccgccgccggggaggctg

SEQ ID NO: 28639 - DNA, 20 bp, synthetic construct
  source 1..20: mol_type = other DNA
ggcgaggagggctgcagggc

SEQ ID NO: 28640 - DNA, 20 bp, synthetic construct
  source 1..20: mol_type = other DNA
tctcaagccgtgtgcaccac

SEQ ID NO: 28641 - DNA, 20 bp, synthetic construct
  source 1..20: mol_type = other DNA
tctcggagtgcacaggccga

SEQ ID NO: 28642 - DNA, 20 bp, synthetic construct
  source 1..20: mol_type = other DNA
tgtgctgccccttggggagc

SEQ ID NO: 28643 - DNA, 20 bp, synthetic construct
  source 1..20: mol_type = other DNA
ccagcgctacttctgccgcg

SEQ ID NO: 28644 - DNA, 20 bp, synthetic construct
  source 1..20: mol_type = other DNA
cgcaggtgctgtgggaggag

SEQ ID NO: 28645 - DNA, 20 bp, synthetic construct
  source 1..20: mol_type = other DNA
ggcccgcaggtggctccggg

SEQ ID NO: 28646 - DNA, 20 bp, synthetic construct
  source 1..20: mol_type = other DNA
ggtgactgggaagactggag

SEQ ID NO: 28647 - DNA, 20 bp, synthetic construct
  source 1..20: mol_type = other DNA
ccagtgtctgatgcctgcag

SEQ ID NO: 28648 - DNA, 20 bp, synthetic construct
  source 1..20: mol_type = other DNA
cttcgtgcggaggctgctct

SEQ ID NO: 28649 - DNA, 20 bp, synthetic construct
  source 1..20: mol_type = other DNA
ctgggggcccagcaggcagg

SEQ ID NO: 28650 - DNA, 20 bp, synthetic construct
  source 1..20: mol_type = other DNA
gccggggcgctggcggtgct

SEQ ID NO: 28651 - DNA, 20 bp, synthetic construct
  source 1..20: mol_type = other DNA
gatcacggggttgcccccac

SEQ ID NO: 28652 - DNA, 20 bp, synthetic construct
  source 1..20: mol_type = other DNA
caaggcctggccctcagggg

SEQ ID NO: 28653 - DNA, 20 bp, synthetic construct
  source 1..20: mol_type = other DNA
acatctgtggaggatctgcc

SEQ ID NO: 28654 - DNA, 20 bp, synthetic construct
  source 1..20: mol_type = other DNA
ctgtctcctatagaaataca

SEQ ID NO: 28655 - DNA, 20 bp, synthetic construct
  source 1..20: mol_type = other DNA
ggggctggaggaggaagaag

SEQ ID NO: 28656 - DNA, 20 bp, synthetic construct
  source 1..20: mol_type = other DNA
aaagttaagggagtgggctt

SEQ ID NO: 28657 - DNA, 20 bp, synthetic construct
  source 1..20: mol_type = other DNA
ccttaaacctgtcaagagtg

SEQ ID NO: 28658 - DNA, 20 bp, synthetic construct
  source 1..20: mol_type = other DNA
cccaagtgagtcaccagcca

SEQ ID NO: 28659 - DNA, 20 bp, synthetic construct
  source 1..20: mol_type = other DNA
gaccttggtcttagtttgat

SEQ ID NO: 28660 - DNA, 20 bp, synthetic construct
  source 1..20: mol_type = other DNA
gcaggtagaggaaggatggt

SEQ ID NO: 28661 - DNA, 20 bp, synthetic construct
  source 1..20: mol_type = other DNA
gtgtgtgtcagcggacccac

SEQ ID NO: 28662 - DNA, 20 bp, synthetic construct
  source 1..20: mol_type = other DNA
ggagacacttacagatgtga

SEQ ID NO: 28663 - DNA, 20 bp, synthetic construct
  source 1..20: mol_type = other DNA
gacgcacctgcaaccgaagc

SEQ ID NO: 28664 - DNA, 20 bp, synthetic construct
  source 1..20: mol_type = other DNA
gatgtgagggactgggacgg

SEQ ID NO: 28665 - DNA, 20 bp, synthetic construct
  source 1..20: mol_type = other DNA
ccttccagtggaggccatag

SEQ ID NO: 28666 - DNA, 20 bp, synthetic construct
  source 1..20: mol_type = other DNA
agctgaatgccacctggcac

SEQ ID NO: 28667 - DNA, 20 bp, synthetic construct
  source 1..20: mol_type = other DNA
acagatgtgagggactggga

SEQ ID NO: 28668 - DNA, 20 bp, synthetic construct
  source 1..20: mol_type = other DNA
ggagcctgcggccagcagcc

SEQ ID NO: 28669 - DNA, 20 bp, synthetic construct
  source 1..20: mol_type = other DNA
atcgacgtaggctggtggga

SEQ ID NO: 28670 - DNA, 20 bp, synthetic construct
  source 1..20: mol_type = other DNA
tgcaggtagaggaaggatgg

SEQ ID NO: 28671 - DNA, 20 bp, synthetic construct
  source 1..20: mol_type = other DNA
gttcatcgtcattctggggc

SEQ ID NO: 28672 - DNA, 20 bp, synthetic construct
  source 1..20: mol_type = other DNA
ggtaggagaggtaagcgacc

SEQ ID NO: 28673 - DNA, 20 bp, synthetic construct
  source 1..20: mol_type = other DNA
aacctgtcaagagtggggat

SEQ ID NO: 28674 - DNA, 20 bp, synthetic construct
  source 1..20: mol_type = other DNA
cacttacagatgtgagggac

SEQ ID NO: 28675 - DNA, 20 bp, synthetic construct
  source 1..20: mol_type = other DNA
ttctaggactgcatcgacgt

SEQ ID NO: 28676 - DNA, 20 bp, synthetic construct
  source 1..20: mol_type = other DNA
tccgccaggtggctgtatga

SEQ ID NO: 28677 - DNA, 20 bp, synthetic construct
  source 1..20: mol_type = other DNA
acctggcggagcgaaagaga

SEQ ID NO: 28678 - DNA, 20 bp, synthetic construct
  source 1..20: mol_type = other DNA
ccaggagaggtgagtaagct

SEQ ID NO: 28679 - DNA, 20 bp, synthetic construct
  source 1..20: mol_type = other DNA
cctggagtgaggggaaggtg

SEQ ID NO: 28680 - DNA, 20 bp, synthetic construct
  source 1..20: mol_type = other DNA
tccactgccttgacaatggc

SEQ ID NO: 28681 - DNA, 20 bp, synthetic construct
  source 1..20: mol_type = other DNA
ggatcctgtagtgtctgatc

SEQ ID NO: 28682 - DNA, 20 bp, synthetic construct
  source 1..20: mol_type = other DNA
gccagccattgtcaaggcag

SEQ ID NO: 28683 - DNA, 20 bp, synthetic construct
  source 1..20: mol_type = other DNA
agtgaggggaaggtgaggcg

SEQ ID NO: 28684 - DNA, 20 bp, synthetic construct
  source 1..20: mol_type = other DNA
cagggcctggagtgagggga

SEQ ID NO: 28685 - DNA, 20 bp, synthetic construct
  source 1..20: mol_type = other DNA
cttactcacctctcctggtc

SEQ ID NO: 28686 - DNA, 20 bp, synthetic construct
  source 1..20: mol_type = other DNA
acgtggccaaagtctcccat

SEQ ID NO: 28687 - DNA, 20 bp, synthetic construct
  source 1..20: mol_type = other DNA
tgtacagccagccattgtca

SEQ ID NO: 28688 - DNA, 20 bp, synthetic construct
  source 1..20: mol_type = other DNA
cccgagtctcagcgacagct

SEQ ID NO: 28689 - DNA, 20 bp, synthetic construct
  source 1..20: mol_type = other DNA
ctgaggcctacctgcttcca

SEQ ID NO: 28690 - DNA, 20 bp, synthetic construct
  source 1..20: mol_type = other DNA
cgggagagccagaccaggag

SEQ ID NO: 28691 - DNA, 20 bp, synthetic construct
  source 1..20: mol_type = other DNA
ctggctctcccggatgagga

SEQ ID NO: 28692 - DNA, 20 bp, synthetic construct
  source 1..20: mol_type = other DNA
actttggccacgtggacgct

SEQ ID NO: 28693 - DNA, 20 bp, synthetic construct
  source 1..20: mol_type = other DNA
ctacctgcttccatggtcac

SEQ ID NO: 28694 - DNA, 20 bp, synthetic construct
  source 1..20: mol_type = other DNA
tgacagagagtaagagcctg

SEQ ID NO: 28695 - DNA, 20 bp, synthetic construct
  source 1..20: mol_type = other DNA
tggttctgactcagagcccc

SEQ ID NO: 28696 - DNA, 20 bp, synthetic construct
  source 1..20: mol_type = other DNA
ctttggccacgtggacgctg

SEQ ID NO: 28697 - DNA, 20 bp, synthetic construct
  source 1..20: mol_type = other DNA
cccctcactccaggccctgg

SEQ ID NO: 28698 - DNA, 20 bp, synthetic construct
  source 1..20: mol_type = other DNA
taccagagtaatggtccacc

SEQ ID NO: 28699 - DNA, 20 bp, synthetic construct
  source 1..20: mol_type = other DNA
gccctcatacagccacctgg

SEQ ID NO: 28700 - DNA, 20 bp, synthetic construct
  source 1..20: mol_type = other DNA
ggctgtatgagggcctgagc

SEQ ID NO: 28701 - DNA, 20 bp, synthetic construct
  source 1..20: mol_type = other DNA
catgggagactttggccacg

SEQ ID NO: 28702 - DNA, 20 bp, synthetic construct
  source 1..20: mol_type = other DNA
cctgagcagggagaaagcag

SEQ ID NO: 28703 - DNA, 20 bp, synthetic construct
  source 1..20: mol_type = other DNA
tccaccagggcctggagtga

SEQ ID NO: 28704 - DNA, 20 bp, synthetic construct
  source 1..20: mol_type = other DNA
cacctggcggagcgaaagag

SEQ ID NO: 28705 - DNA, 20 bp, synthetic construct
  source 1..20: mol_type = other DNA
tccggtcccaggatgcaggg

SEQ ID NO: 28706 - DNA, 20 bp, synthetic construct
  source 1..20: mol_type = other DNA
gtccaccagggcctggagtg

SEQ ID NO: 28707 - DNA, 20 bp, synthetic construct
  source 1..20: mol_type = other DNA
ggatgaggaaggcccctcca

SEQ ID NO: 28708 - DNA, 20 bp, synthetic construct
  source 1..20: mol_type = other DNA
accagagtaatggtccacca

SEQ ID NO: 28709 - DNA, 20 bp, synthetic construct
  source 1..20: mol_type = other DNA
actgcccagggccacggctg

SEQ ID NO: 28710 - DNA, 20 bp, synthetic construct
  source 1..20: mol_type = other DNA
ccctggagagagaaaggagt

SEQ ID NO: 28711 - DNA, 20 bp, synthetic construct
  source 1..20: mol_type = other DNA
ccaccagggcctggagtgag

SEQ ID NO: 28712 - DNA, 20 bp, synthetic construct
  source 1..20: mol_type = other DNA
cttccatggtcacaggtccc

SEQ ID NO: 28713 - DNA, 20 bp, synthetic construct
  source 1..20: mol_type = other DNA
cggatgaggaaggcccctcc

SEQ ID NO: 28714 - DNA, 20 bp, synthetic construct
  source 1..20: mol_type = other DNA
aggccagggacctgtgacca

SEQ ID NO: 28715 - DNA, 20 bp, synthetic construct
  source 1..20: mol_type = other DNA
gccctgggcagtttcccggc

SEQ ID NO: 28716 - DNA, 20 bp, synthetic construct
  source 1..20: mol_type = other DNA
cacgtggccaaagtctccca

SEQ ID NO: 28717 - DNA, 20 bp, synthetic construct
  source 1..20: mol_type = other DNA
ctctcctggtctggctctcc

SEQ ID NO: 28718 - DNA, 20 bp, synthetic construct
  source 1..20: mol_type = other DNA
tgtagatattgtcagcatgc

SEQ ID NO: 28719 - DNA, 20 bp, synthetic construct
  source 1..20: mol_type = other DNA
tctgggaattgttgctgata

SEQ ID NO: 28720 - DNA, 20 bp, synthetic construct
  source 1..20: mol_type = other DNA
aggtgcaggtcccgttctcc

SEQ ID NO: 28721 - DNA, 20 bp, synthetic construct
  source 1..20: mol_type = other DNA
ggtgcaggtcccgttctcct

SEQ ID NO: 28722 - DNA, 20 bp, synthetic construct
  source 1..20: mol_type = other DNA
ggccgagggtgagggacagg

SEQ ID NO: 28723 - DNA, 20 bp, synthetic construct
  source 1..20: mol_type = other DNA
cgatctcctagataacgtgg

SEQ ID NO: 28724 - DNA, 20 bp, synthetic construct
  source 1..20: mol_type = other DNA
cgggccacgggctgaaggtc

SEQ ID NO: 28725 - DNA, 20 bp, synthetic construct
  source 1..20: mol_type = other DNA
tcatgcgcccacctgtggga

SEQ ID NO: 28726 - DNA, 20 bp, synthetic construct
  source 1..20: mol_type = other DNA
atactacagttgagaagaag

SEQ ID NO: 28727 - DNA, 20 bp, synthetic construct
  source 1..20: mol_type = other DNA
tttccactgttgtctggtaa

SEQ ID NO: 28728 - DNA, 20 bp, synthetic construct
  source 1..20: mol_type = other DNA
gcagcccagtatcaaggtgc

SEQ ID NO: 28729 - DNA, 20 bp, synthetic construct
  source 1..20: mol_type = other DNA
catccacattgtcgtcacaa

SEQ ID NO: 28730 - DNA, 20 bp, synthetic construct
  source 1..20: mol_type = other DNA
tatgcccaagtccagaaacc

SEQ ID NO: 28731 - DNA, 20 bp, synthetic construct
  source 1..20: mol_type = other DNA
ctgtcctgcatccgggccac

SEQ ID NO: 28732 - DNA, 20 bp, synthetic construct
  source 1..20: mol_type = other DNA
ctggtgaaaagaaaccataa

SEQ ID NO: 28733 - DNA, 20 bp, synthetic construct
  source 1..20: mol_type = other DNA
ttgggatccatcagccaatg

SEQ ID NO: 28734 - DNA, 20 bp, synthetic construct
  source 1..20: mol_type = other DNA
ggacaggaggtgggagctgt

SEQ ID NO: 28735 - DNA, 20 bp, synthetic construct
  source 1..20: mol_type = other DNA
tcctgctttcccgtatcccc

SEQ ID NO: 28736 - DNA, 20 bp, synthetic construct
  source 1..20: mol_type = other DNA
gtgtatgctgggctgttagg

SEQ ID NO: 28737 - DNA, 20 bp, synthetic construct
  source 1..20: mol_type = other DNA
cactccagctgtaagccaca

SEQ ID NO: 28738 - DNA, 20 bp, synthetic construct
  source 1..20: mol_type = other DNA
gaaccattaccagacaacag

SEQ ID NO: 28739 - DNA, 20 bp, synthetic construct
  source 1..20: mol_type = other DNA
gagaagaagaggtaggtgtc

SEQ ID NO: 28740 - DNA, 20 bp, synthetic construct
  source 1..20: mol_type = other DNA
gagaaacagcacgaaggtca

SEQ ID NO: 28741 - DNA, 20 bp, synthetic construct
  source 1..20: mol_type = other DNA
gcaggaaggaggatgaggga

SEQ ID NO: 28742 - DNA, 20 bp, synthetic construct
  source 1..20: mol_type = other DNA
taccataaagcctcaactgc

SEQ ID NO: 28743 - DNA, 20 bp, synthetic construct
  source 1..20: mol_type = other DNA
caacatatatggtggtgcaa

SEQ ID NO: 28744 - DNA, 20 bp, synthetic construct
  source 1..20: mol_type = other DNA
tccatcagccaatgaggaga

SEQ ID NO: 28745 - DNA, 20 bp, synthetic construct
  source 1..20: mol_type = other DNA
cctgctttcccgtatcccca

SEQ ID NO: 28746 - DNA, 20 bp, synthetic construct
  source 1..20: mol_type = other DNA
gagggtgagggacaggaggt

SEQ ID NO: 28747 - DNA, 20 bp, synthetic construct
  source 1..20: mol_type = other DNA
gggatggtaccttatgaccc

SEQ ID NO: 28748 - DNA, 20 bp, synthetic construct
  source 1..20: mol_type = other DNA
acctggacagactctgggac

SEQ ID NO: 28749 - DNA, 20 bp, synthetic construct
  source 1..20: mol_type = other DNA
tacagctggagtgaaaaggc

SEQ ID NO: 28750 - DNA, 20 bp, synthetic construct
  source 1..20: mol_type = other DNA
tacagttgagaagaagaggt

SEQ ID NO: 28751 - DNA, 20 bp, synthetic construct
  source 1..20: mol_type = other DNA
tggtaatggttcgttttacc

SEQ ID NO: 28752 - DNA, 20 bp, synthetic construct
  source 1..20: mol_type = other DNA
aggctttatggtaataatgg

SEQ ID NO: 28753 - DNA, 20 bp, synthetic construct
  source 1..20: mol_type = other DNA
atagatcagtgggatacaac

SEQ ID NO: 28754 - DNA, 20 bp, synthetic construct
  source 1..20: mol_type = other DNA
ttgaatcaaagtatggacac

SEQ ID NO: 28755 - DNA, 20 bp, synthetic construct
  source 1..20: mol_type = other DNA
agagacatcaagtatggtag

SEQ ID NO: 28756 - DNA, 20 bp, synthetic construct
  source 1..20: mol_type = other DNA
gctctactacatcggagggg

SEQ ID NO: 28757 - DNA, 20 bp, synthetic construct
  source 1..20: mol_type = other DNA
gtgcatcaccatccccaggt

SEQ ID NO: 28758 - DNA, 20 bp, synthetic construct
  source 1..20: mol_type = other DNA
cgcctgctgggctggaagaa

SEQ ID NO: 28759 - DNA, 20 bp, synthetic construct
  source 1..20: mol_type = other DNA
gacagttctacctcctgtgt

SEQ ID NO: 28760 - DNA, 20 bp, synthetic construct
  source 1..20: mol_type = other DNA
tgttaccatacagagaacat

SEQ ID NO: 28761 - DNA, 20 bp, synthetic construct
  source 1..20: mol_type = other DNA
aactctgtacaaagaccgcg

SEQ ID NO: 28762 - DNA, 20 bp, synthetic construct
  source 1..20: mol_type = other DNA
tacgaacgagttgtatcacc

SEQ ID NO: 28763 - DNA, 20 bp, synthetic construct
  source 1..20: mol_type = other DNA
cagttggaatgtaaaggtga

SEQ ID NO: 28764 - DNA, 20 bp, synthetic construct
  source 1..20: mol_type = other DNA
cccatccaatgttctctgta

SEQ ID NO: 28765 - DNA, 20 bp, synthetic construct
  source 1..20: mol_type = other DNA
caccagtgtgaccgatcccc

SEQ ID NO: 28766 - DNA, 20 bp, synthetic construct
  source 1..20: mol_type = other DNA
ctgggcccgggggcgcccgc

SEQ ID NO: 28767 - DNA, 20 bp, synthetic construct
  source 1..20: mol_type = other DNA
gtgcaaagtgttcaggtggc

SEQ ID NO: 28768 - DNA, 20 bp, synthetic construct
  source 1..20: mol_type = other DNA
ctgccacttcagtgcctatg

SEQ ID NO: 28769 - DNA, 20 bp, synthetic construct
  source 1..20: mol_type = other DNA
ccactcttacctgttcatag

SEQ ID NO: 28770 - DNA, 20 bp, synthetic construct
  source 1..20: mol_type = other DNA
cctctatgaacaggtaagag

SEQ ID NO: 28771 - DNA, 20 bp, synthetic construct
  source 1..20: mol_type = other DNA
ctatcaattccagaacaacc

SEQ ID NO: 28772 - DNA, 20 bp, synthetic construct
  source 1..20: mol_type = other DNA
gtcttactttgatcctcgtg

SEQ ID NO: 28773 - DNA, 20 bp, synthetic construct
  source 1..20: mol_type = other DNA
catcatgaacatgcaggggc

SEQ ID NO: 28774 - DNA, 20 bp, synthetic construct
  source 1..20: mol_type = other DNA
gttctggtaaaagagaaggt

SEQ ID NO: 28775 - DNA, 20 bp, synthetic construct
  source 1..20: mol_type = other DNA
ccttattatgcagtacttga

SEQ ID NO: 28776 - DNA, 20 bp, synthetic construct
  source 1..20: mol_type = other DNA
tcaagtactgcataataagg

SEQ ID NO: 28777 - DNA, 20 bp, synthetic construct
  source 1..20: mol_type = other DNA
cctggaacatgtaaagcaca

SEQ ID NO: 28778 - DNA, 20 bp, synthetic construct
  source 1..20: mol_type = other DNA
gtgcacgagaaggatgtgat

SEQ ID NO: 28779 - DNA, 20 bp, synthetic construct
  source 1..20: mol_type = other DNA
gaaggagaacagtttacatc

SEQ ID NO: 28780 - DNA, 20 bp, synthetic construct
  source 1..20: mol_type = other DNA
catagatttgtttcgaggca

SEQ ID NO: 28781 - DNA, 20 bp, synthetic construct
  source 1..20: mol_type = other DNA
agttctggtaaaagagaagg

SEQ ID NO: 28782 - DNA, 20 bp, synthetic construct
  source 1..20: mol_type = other DNA
aatcttcggagtgagtcctg

SEQ ID NO: 28783 - DNA, 20 bp, synthetic construct
  source 1..20: mol_type = other DNA
gggtatgcctgaaaaaggag

SEQ ID NO: 28784 - DNA, 20 bp, synthetic construct
  source 1..20: mol_type = other DNA
agaggcagtcgaagctctcg

SEQ ID NO: 28785 - DNA, 20 bp, synthetic construct
  source 1..20: mol_type = other DNA
gcagcggggcccccagcatg

SEQ ID NO: 28786 - DNA, 20 bp, synthetic construct
  source 1..20: mol_type = other DNA
agtgctccagcagctcgaag

SEQ ID NO: 28787 - DNA, 20 bp, synthetic construct
  source 1..20: mol_type = other DNA
gggcccccagtagaatccgc

SEQ ID NO: 28788 - DNA, 20 bp, synthetic construct
  source 1..20: mol_type = other DNA
ggcgccgcgccgcatgctgg

SEQ ID NO: 28789 - DNA, 20 bp, synthetic construct
  source 1..20: mol_type = other DNA
aaagtgcacgcggatgctcg

SEQ ID NO: 28790 - DNA, 20 bp, synthetic construct
  source 1..20: mol_type = other DNA
gtgtgctaccatcctacaga

SEQ ID NO: 28791 - DNA, 20 bp, synthetic construct
  source 1..20: mol_type = other DNA
ccagcgcatcgtggccaccg

SEQ ID NO: 28792 - DNA, 20 bp, synthetic construct
  source 1..20: mol_type = other DNA
gcggtcccggccccggcccc

SEQ ID NO: 28793 - DNA, 20 bp, synthetic construct
  source 1..20: mol_type = other DNA
cggtcaaatctggaagggga

SEQ ID NO: 28794 - DNA, 20 bp, synthetic construct
  source 1..20: mol_type = other DNA
ctgccggtcaaatctggaag

SEQ ID NO: 28795 - DNA, 20 bp, synthetic construct
  source 1..20: mol_type = other DNA
ggccggcctgaaagtgcacg

SEQ ID NO: 28796 - DNA, 20 bp, synthetic construct
  source 1..20: mol_type = other DNA
tggcggcacagctcctgcag

SEQ ID NO: 28797 - DNA, 20 bp, synthetic construct
  source 1..20: mol_type = other DNA
ggggcccccagcatgcggcg

SEQ ID NO: 28798 - DNA, 20 bp, synthetic construct
  source 1..20: mol_type = other DNA
gcgcaccaggaaggtgccca

SEQ ID NO: 28799 - DNA, 20 bp, synthetic construct
  source 1..20: mol_type = other DNA
cgtgcgccccgtgcacgctc

SEQ ID NO: 28800 - DNA, 20 bp, synthetic construct
  source 1..20: mol_type = other DNA
gctgctggagcactacgtgg

SEQ ID NO: 28801 - DNA, 20 bp, synthetic construct
  source 1..20: mol_type = other DNA
gctcctgcagcggccgcacg

SEQ ID NO: 28802 - DNA, 20 bp, synthetic construct
  source 1..20: mol_type = other DNA
gatggtagcacacaaccagg

SEQ ID NO: 28803 - DNA, 20 bp, synthetic construct
  source 1..20: mol_type = other DNA
cgcgggcgcgcgggggccgc

SEQ ID NO: 28804 - DNA, 20 bp, synthetic construct
  source 1..20: mol_type = other DNA
tgtgctaccatcctacagaa

SEQ ID NO: 28805 - DNA, 20 bp, synthetic construct
  source 1..20: mol_type = other DNA
aggagctcaggtagtcgcgg

SEQ ID NO: 28806 - DNA, 20 bp, synthetic construct
  source 1..20: mol_type = other DNA
tgtgcggaagtgcgtgtcgc

SEQ ID NO: 28807 - DNA, 20 bp, synthetic construct
  source 1..20: mol_type = other DNA
cgctgcgccagcgccgcgtg

SEQ ID NO: 28808 - DNA, 20 bp, synthetic construct
  source 1..20: mol_type = other DNA
gccatccaggtgaaagcggc

SEQ ID NO: 28809 - DNA, 20 bp, synthetic construct
  source 1..20: mol_type = other DNA
tcaggccggccgctttcacc

SEQ ID NO: 28810 - DNA, 20 bp, synthetic construct
  source 1..20: mol_type = other DNA
gggcgaaaaagcagttccgc

SEQ ID NO: 28811 - DNA, 20 bp, synthetic construct
  source 1..20: mol_type = other DNA
atcctacagaaggggccagc

SEQ ID NO: 28812 - DNA, 20 bp, synthetic construct
  source 1..20: mol_type = other DNA
gcggctgtcgcgcaccagga

SEQ ID NO: 28813 - DNA, 20 bp, synthetic construct
  source 1..20: mol_type = other DNA
tggtgcgcgacagccgccag

SEQ ID NO: 28814 - DNA, 20 bp, synthetic construct
  source 1..20: mol_type = other DNA
cgcaccaggaaggtgcccac

SEQ ID NO: 28815 - DNA, 20 bp, synthetic construct
  source 1..20: mol_type = other DNA
gcggaagtgcgtgtcgccgg

SEQ ID NO: 28816 - DNA, 20 bp, synthetic construct
  source 1..20: mol_type = other DNA
gtgctaccatcctacagaag

SEQ ID NO: 28817 - DNA, 20 bp, synthetic construct
  source 1..20: mol_type = other DNA
taggatggtagcacacaacc

SEQ ID NO: 28818 - DNA, 20 bp, synthetic construct
  source 1..20: mol_type = other DNA
gctgccggtcaaatctggaa

SEQ ID NO: 28819 - DNA, 20 bp, synthetic construct
  source 1..20: mol_type = other DNA
gccggccgctttcacctgga

SEQ ID NO: 28820 - DNA, 20 bp, synthetic construct
  source 1..20: mol_type = other DNA
tgcggaagtgcgtgtcgccg

SEQ ID NO: 28821 - DNA, 20 bp, synthetic construct
  source 1..20: mol_type = other DNA
gtgcggaagtgcgtgtcgcc

SEQ ID NO: 28822 - DNA, 20 bp, synthetic construct
  source 1..20: mol_type = other DNA
agtagaatccgcaggcgtcc

SEQ ID NO: 28823 - DNA, 20 bp, synthetic construct
  source 1..20: mol_type = other DNA
atccgcgtgcactttcaggc

SEQ ID NO: 28824 - DNA, 20 bp, synthetic construct
  source 1..20: mol_type = other DNA
gggccggggccgggaccgcg

SEQ ID NO: 28825 - DNA, 20 bp, synthetic construct
  source 1..20: mol_type = other DNA
caggaaggtgcccacgggct

SEQ ID NO: 28826 - DNA, 20 bp, synthetic construct
  source 1..20: mol_type = other DNA
gcagcggccgcacgcggcgc

SEQ ID NO: 28827 - DNA, 20 bp, synthetic construct
  source 1..20: mol_type = other DNA
gcaggcgtccaggagcgcgc

SEQ ID NO: 28828 - DNA, 20 bp, synthetic construct
  source 1..20: mol_type = other DNA
gtgcgccccgtgcacgctca

SEQ ID NO: 28829 - DNA, 20 bp, synthetic construct
  source 1..20: mol_type = other DNA
aagtgcacgcggatgctcgt

SEQ ID NO: 28830 - DNA, 20 bp, synthetic construct
  source 1..20: mol_type = other DNA
cagcgcatcgtggccaccgt

SEQ ID NO: 28831 - DNA, 20 bp, synthetic construct
  source 1..20: mol_type = other DNA
cgggctcggcactgagcagc

SEQ ID NO: 28832 - DNA, 20 bp, synthetic construct
  source 1..20: mol_type = other DNA
agaggggccggctcaacacc

SEQ ID NO: 28833 - DNA, 20 bp, synthetic construct
  source 1..20: mol_type = other DNA
agctgaaggtcttgaggcgc

SEQ ID NO: 28834 - DNA, 20 bp, synthetic construct
  source 1..20: mol_type = other DNA
tgaggcgcaggctggtgtcc

SEQ ID NO: 28835 - DNA, 20 bp, synthetic construct
  source 1..20: mol_type = other DNA
gagcgcagtgaccggcggcg

SEQ ID NO: 28836 - DNA, 20 bp, synthetic construct
  source 1..20: mol_type = other DNA
tgacgctgagcgtgaagaag

SEQ ID NO: 28837 - DNA, 20 bp, synthetic construct
  source 1..20: mol_type = other DNA
aacctgcgcatccagtgtga

SEQ ID NO: 28838 - DNA, 20 bp, synthetic construct
  source 1..20: mol_type = other DNA
agacggctgctcgggcacct

SEQ ID NO: 28839 - DNA, 20 bp, synthetic construct
  source 1..20: mol_type = other DNA
tcttggagctgaaggtcttg

SEQ ID NO: 28840 - DNA, 20 bp, synthetic construct
  source 1..20: mol_type = other DNA
agcctattacatctactccg

SEQ ID NO: 28841 - DNA, 20 bp, synthetic construct
  source 1..20: mol_type = other DNA
cggatcagaaaggtgccggc

SEQ ID NO: 28842 - DNA, 20 bp, synthetic construct
  source 1..20: mol_type = other DNA
agatgtaataggctcttctg

SEQ ID NO: 28843 - DNA, 20 bp, synthetic construct
  source 1..20: mol_type = other DNA
ccacgttggaggagaggggc

SEQ ID NO: 28844 - DNA, 20 bp, synthetic construct
  source 1..20: mol_type = other DNA
gatgtaataggctcttctgg

SEQ ID NO: 28845 - DNA, 20 bp, synthetic construct
  source 1..20: mol_type = other DNA
caggttcttggtcccagact

SEQ ID NO: 28846 - DNA, 20 bp, synthetic construct
  source 1..20: mol_type = other DNA
tagatgtaataggctcttct

SEQ ID NO: 28847 - DNA, 20 bp, synthetic construct
  source 1..20: mol_type = other DNA
gaaggtcttgaggcgcaggc

SEQ ID NO: 28848 - DNA, 20 bp, synthetic construct
  source 1..20: mol_type = other DNA
ctcagcgtcaagacccagtc

SEQ ID NO: 28849 - DNA, 20 bp, synthetic construct
  source 1..20: mol_type = other DNA
gcttgagcacgcagtcgaag

SEQ ID NO: 28850 - DNA, 20 bp, synthetic construct
  source 1..20: mol_type = other DNA
gtactcgctcttggagctga

SEQ ID NO: 28851 - DNA, 20 bp, synthetic construct
  source 1..20: mol_type = other DNA
gcctattacatctactccgg

SEQ ID NO: 28852 - DNA, 20 bp, synthetic construct
  source 1..20: mol_type = other DNA
gcactgcgttcaccaccagc

SEQ ID NO: 28853 - DNA, 20 bp, synthetic construct
  source 1..20: mol_type = other DNA
ccgacagagatgctgaagag

SEQ ID NO: 28854 - DNA, 20 bp, synthetic construct
  source 1..20: mol_type = other DNA
ttgagcacgcagtcgaagcg

SEQ ID NO: 28855 - DNA, 20 bp, synthetic construct
  source 1..20: mol_type = other DNA
tcagcgtcaagacccagtct

SEQ ID NO: 28856 - DNA, 20 bp, synthetic construct
  source 1..20: mol_type = other DNA
ctgctcagtgccgagcccgc

SEQ ID NO: 28857 - DNA, 20 bp, synthetic construct
  source 1..20: mol_type = other DNA
gaggggccggctcaacacca

SEQ ID NO: 28858 - DNA, 20 bp, synthetic construct
  source 1..20: mol_type = other DNA
caagagcgagtaccagctgg

SEQ ID NO: 28859 - DNA, 20 bp, synthetic construct
  source 1..20: mol_type = other DNA
agagcctattacatctactc

SEQ ID NO: 28860 - DNA, 20 bp, synthetic construct
  source 1..20: mol_type = other DNA
gaacctgcgcatccagtgtg

SEQ ID NO: 28861 - DNA, 20 bp, synthetic construct
  source 1..20: mol_type = other DNA
agatccccctggtgttgagc

SEQ ID NO: 28862 - DNA, 20 bp, synthetic construct
  source 1..20: mol_type = other DNA
ccactcttcagcatctctgt

SEQ ID NO: 28863 - DNA, 20 bp, synthetic construct
  source 1..20: mol_type = other DNA
ccgtctgcccagccactccc

SEQ ID NO: 28864 - DNA, 20 bp, synthetic construct
  source 1..20: mol_type = other DNA
acactggatgcgcaggttct

SEQ ID NO: 28865 - DNA, 20 bp, synthetic construct
  source 1..20: mol_type = other DNA
aggggccggctcaacaccag

SEQ ID NO: 28866 - DNA, 20 bp, synthetic construct
  source 1..20: mol_type = other DNA
cgagctgtcgcggatcagaa

SEQ ID NO: 28867 - DNA, 20 bp, synthetic construct
  source 1..20: mol_type = other DNA
gcaggttcttggtcccagac

SEQ ID NO: 28868 - DNA, 20 bp, synthetic construct
  source 1..20: mol_type = other DNA
acgcagtcgaagcggggcac

SEQ ID NO: 28869 - DNA, 20 bp, synthetic construct
  source 1..20: mol_type = other DNA
cggctgctcgggcacctcgg

SEQ ID NO: 28870 - DNA, 20 bp, synthetic construct
  source 1..20: mol_type = other DNA
cagcaggttcgcctcgccgc

SEQ ID NO: 28871 - DNA, 20 bp, synthetic construct
  source 1..20: mol_type = other DNA
ctccaagagcgagtaccagc

SEQ ID NO: 28872 - DNA, 20 bp, synthetic construct
  source 1..20: mol_type = other DNA
gagcctattacatctactcc

SEQ ID NO: 28873 - DNA, 20 bp, synthetic construct
  source 1..20: mol_type = other DNA
cctgcgcatccagtgtgagg

SEQ ID NO: 28874 - DNA, 20 bp, synthetic construct
  source 1..20: mol_type = other DNA
cagggggatcttctcgcccc

SEQ ID NO: 28875 - DNA, 20 bp, synthetic construct
  source 1..20: mol_type = other DNA
caccactacatgccgccccc

SEQ ID NO: 28876 - DNA, 20 bp, synthetic construct
  source 1..20: mol_type = other DNA
ctgcgcatccagtgtgaggg

SEQ ID NO: 28877 - DNA, 20 bp, synthetic construct
  source 1..20: mol_type = other DNA
gtggccacgttggaggagag

SEQ ID NO: 28878 - DNA, 20 bp, synthetic construct
  source 1..20: mol_type = other DNA
acctgcgcatccagtgtgag

SEQ ID NO: 28879 - DNA, 20 bp, synthetic construct
  source 1..20: mol_type = other DNA
agaagctgcccccctcacac

SEQ ID NO: 28880 - DNA, 20 bp, synthetic construct
  source 1..20: mol_type = other DNA
ccccctcacactggatgcgc

SEQ ID NO: 28881 - DNA, 20 bp, synthetic construct
  source 1..20: mol_type = other DNA
cttgagcacgcagtcgaagc

SEQ ID NO: 28882 - DNA, 20 bp, synthetic construct
  source 1..20: mol_type = other DNA
ccggcccctctcctccaacg

SEQ ID NO: 28883 - DNA, 20 bp, synthetic construct
  source 1..20: mol_type = other DNA
ctgtgggtgaccatggcgca

SEQ ID NO: 28884 - DNA, 20 bp, synthetic construct
  source 1..20: mol_type = other DNA
ttctactggagcgcagtgac

SEQ ID NO: 28885 - DNA, 20 bp, synthetic construct
  source 1..20: mol_type = other DNA
tgcaggagagcggcttctac

SEQ ID NO: 28886 - DNA, 20 bp, synthetic construct
  source 1..20: mol_type = other DNA
gtagatgtaataggctcttc

SEQ ID NO: 28887 - DNA, 20 bp, synthetic construct
  source 1..20: mol_type = other DNA
cacgcagtcgaagcggggca

SEQ ID NO: 28888 - DNA, 20 bp, synthetic construct
  source 1..20: mol_type = other DNA
gaacgcagtgcgcaagctgc

SEQ ID NO: 28889 - DNA, 20 bp, synthetic construct
  source 1..20: mol_type = other DNA
gcggatcagaaaggtgccgg

SEQ ID NO: 28890 - DNA, 20 bp, synthetic construct
  source 1..20: mol_type = other DNA
cttaaagcggggcatcgtac

SEQ ID NO: 28891 - DNA, 20 bp, synthetic construct
  source 1..20: mol_type = other DNA
gtgcgcaagctgcaggagag

SEQ ID NO: 28892 - DNA, 20 bp, synthetic construct
  source 1..20: mol_type = other DNA
cagaaaggtgccggcgggct

SEQ ID NO: 28893 - DNA, 20 bp, synthetic construct
  source 1..20: mol_type = other DNA
cgtctgcccagccactccct

SEQ ID NO: 28894 - DNA, 20 bp, synthetic construct
  source 1..20: mol_type = other DNA
caccagctggtactcgctct

SEQ ID NO: 28895 - DNA, 20 bp, synthetic construct
  source 1..20: mol_type = other DNA
ggggccggctcaacaccagg

SEQ ID NO: 28896 - DNA, 20 bp, synthetic construct
  source 1..20: mol_type = other DNA
tactggagcgcagtgaccgg

SEQ ID NO: 28897 - DNA, 20 bp, synthetic construct
  source 1..20: mol_type = other DNA
tgagcgtgaagaagtggcgc

SEQ ID NO: 28898 - DNA, 20 bp, synthetic construct
  source 1..20: mol_type = other DNA
gtcgcggatcagaaaggtgc

SEQ ID NO: 28899 - DNA, 20 bp, synthetic construct
  source 1..20: mol_type = other DNA
ctctgtcggaagaccgtcaa

SEQ ID NO: 28900 - DNA, 20 bp, synthetic construct
  source 1..20: mol_type = other DNA
tggacttagatcattcctgt

SEQ ID NO: 28901 - DNA, 20 bp, synthetic construct
  source 1..20: mol_type = other DNA
atctgcgtgtggtatttagg

SEQ ID NO: 28902 - DNA, 20 bp, synthetic construct
  source 1..20: mol_type = other DNA
gcagtttctgtttaagagat

SEQ ID NO: 28903 - DNA, 20 bp, synthetic construct
  source 1..20: mol_type = other DNA
aaaagggaaagtccgaatta

SEQ ID NO: 28904 - DNA, 20 bp, synthetic construct
  source 1..20: mol_type = other DNA
ataccaccaacctcactctg

SEQ ID NO: 28905 - DNA, 20 bp, synthetic construct
  source 1..20: mol_type = other DNA
caccagtagtccccgccact

SEQ ID NO: 28906 - DNA, 20 bp, synthetic construct
  source 1..20: mol_type = other DNA
acttctcaaaccacagagtg

SEQ ID NO: 28907 - DNA, 20 bp, synthetic construct
  source 1..20: mol_type = other DNA
gcccatttatcaattggatg

SEQ ID NO: 28908 - DNA, 20 bp, synthetic construct
  source 1..20: mol_type = other DNA
ctctttcaaaatcatagaag

SEQ ID NO: 28909 - DNA, 20 bp, synthetic construct
  source 1..20: mol_type = other DNA
tctcgtggtggtaataaggg

SEQ ID NO: 28910 - DNA, 20 bp, synthetic construct
  source 1..20: mol_type = other DNA
atggagacagtggtaaacag

SEQ ID NO: 28911 - DNA, 20 bp, synthetic construct
  source 1..20: mol_type = other DNA
tctcgagcatacgattcata

SEQ ID NO: 28912 - DNA, 20 bp, synthetic construct
  source 1..20: mol_type = other DNA
ttctccatgctatttcccat

SEQ ID NO: 28913 - DNA, 20 bp, synthetic construct
  source 1..20: mol_type = other DNA
cagcttcctactagtggatg

SEQ ID NO: 28914 - DNA, 20 bp, synthetic construct
  source 1..20: mol_type = other DNA
acacttccaactaattctga

SEQ ID NO: 28915 - DNA, 20 bp, synthetic construct
  source 1..20: mol_type = other DNA
agcagcttcctactagtgga

SEQ ID NO: 28916 - DNA, 20 bp, synthetic construct
  source 1..20: mol_type = other DNA
aaatatgtgtctctcatgtt

SEQ ID NO: 28917 - DNA, 20 bp, synthetic construct
  source 1..20: mol_type = other DNA
gagaacatgcagcccaaggc

SEQ ID NO: 28918 - DNA, 20 bp, synthetic construct
  source 1..20: mol_type = other DNA
gcagcttcctactagtggat

SEQ ID NO: 28919 - DNA, 20 bp, synthetic construct
  source 1..20: mol_type = other DNA
tgtaatgaatttataatgga

SEQ ID NO: 28920 - DNA, 20 bp, synthetic construct
  source 1..20: mol_type = other DNA
caaatcttgggagaggctta

SEQ ID NO: 28921 - DNA, 20 bp, synthetic construct
  source 1..20: mol_type = other DNA
cccatttatcaattggatga

SEQ ID NO: 28922 - DNA, 20 bp, synthetic construct
  source 1..20: mol_type = other DNA
gcatcctttccagtgtactc

SEQ ID NO: 28923 - DNA, 20 bp, synthetic construct
  source 1..20: mol_type = other DNA
ccaaagaaaggcacacatgg

SEQ ID NO: 28924 - DNA, 20 bp, synthetic construct
  source 1..20: mol_type = other DNA
tgagggcttgaattctgcct

SEQ ID NO: 28925 - DNA, 20 bp, synthetic construct
  source 1..20: mol_type = other DNA
aaggaaaaagttgatttcct

SEQ ID NO: 28926 - DNA, 20 bp, synthetic construct
  source 1..20: mol_type = other DNA
actttgagttactaaaggta

SEQ ID NO: 28927 - DNA, 20 bp, synthetic construct
  source 1..20: mol_type = other DNA
ggtggaacagggggagctgg

SEQ ID NO: 28928 - DNA, 20 bp, synthetic construct
  source 1..20: mol_type = other DNA
ggttctatccgtaaacagta

SEQ ID NO: 28929 - DNA, 20 bp, synthetic construct
  source 1..20: mol_type = other DNA
gaatggcatatcagcaaacc

SEQ ID NO: 28930 - DNA, 20 bp, synthetic construct
  source 1..20: mol_type = other DNA
ctgagcacatagcatcgacg

SEQ ID NO: 28931 - DNA, 20 bp, synthetic construct
  source 1..20: mol_type = other DNA
tttaattcaccagaagaact

SEQ ID NO: 28932 - DNA, 20 bp, synthetic construct
  source 1..20: mol_type = other DNA
tgtccttccacgtcttatgc

SEQ ID NO: 28933 - DNA, 20 bp, synthetic construct
  source 1..20: mol_type = other DNA
tccttcatttcaagtgtaag

SEQ ID NO: 28934 - DNA, 20 bp, synthetic construct
  source 1..20: mol_type = other DNA
tgcacgtcagctgacacttt

SEQ ID NO: 28935 - DNA, 20 bp, synthetic construct
  source 1..20: mol_type = other DNA
ggacagtttataaagtgttc

SEQ ID NO: 28936 - DNA, 20 bp, synthetic construct
  source 1..20: mol_type = other DNA
atcttcagccacctccactg

SEQ ID NO: 28937 - DNA, 20 bp, synthetic construct
  source 1..20: mol_type = other DNA
ggtggaggggtatcaggaag

SEQ ID NO: 28938 - DNA, 20 bp, synthetic construct
  source 1..20: mol_type = other DNA
gacgttggagatcaccacaa

SEQ ID NO: 28939 - DNA, 20 bp, synthetic construct
  source 1..20: mol_type = other DNA
gactccaccatgtgcacgat

SEQ ID NO: 28940 - DNA, 20 bp, synthetic construct
  source 1..20: mol_type = other DNA
gcggttcagtgagagctccc

SEQ ID NO: 28941 - DNA, 20 bp, synthetic construct
  source 1..20: mol_type = other DNA
tgtaaatgatcatagacatc

SEQ ID NO: 28942 - DNA, 20 bp, synthetic construct
  source 1..20: mol_type = other DNA
ctgtgaagttgaggtaacaa

SEQ ID NO: 28943 - DNA, 20 bp, synthetic construct
  source 1..20: mol_type = other DNA
tatttggatacagatacttc

SEQ ID NO: 28944 - DNA, 20 bp, synthetic construct
  source 1..20: mol_type = other DNA
tcagtgagagctcccgggaa

SEQ ID NO: 28945 - DNA, 20 bp, synthetic construct
  source 1..20: mol_type = other DNA
gatcatttacagctgtctga

SEQ ID NO: 28946 - DNA, 20 bp, synthetic construct
  source 1..20: mol_type = other DNA
ggccatcacattcacatggg

SEQ ID NO: 28947 - DNA, 20 bp, synthetic construct
  source 1..20: mol_type = other DNA
tgtgatagggtcatgttcgt

SEQ ID NO: 28948 - DNA, 20 bp, synthetic construct
  source 1..20: mol_type = other DNA
gtggagcggtcccagaacgg

SEQ ID NO: 28949 - DNA, 20 bp, synthetic construct
  source 1..20: mol_type = other DNA
caggaggtcatgaaaacgga

SEQ ID NO: 28950 - DNA, 20 bp, synthetic construct
  source 1..20: mol_type = other DNA
gtaccactgagacatcctat

SEQ ID NO: 28951 - DNA, 20 bp, synthetic construct
  source 1..20: mol_type = other DNA
ttcagtgagagctcccggga

SEQ ID NO: 28952 - DNA, 20 bp, synthetic construct
  source 1..20: mol_type = other DNA
tttgtaaggtgaggactgtc

SEQ ID NO: 28953 - DNA, 20 bp, synthetic construct
  source 1..20: mol_type = other DNA
acgttggagatcaccacaac

SEQ ID NO: 28954 - DNA, 20 bp, synthetic construct
  source 1..20: mol_type = other DNA
attcatcttgtaaatcttcc

SEQ ID NO: 28955 - DNA, 20 bp, synthetic construct
  source 1..20: mol_type = other DNA
aggcccaaccgctcgggagc

SEQ ID NO: 28956 - DNA, 20 bp, synthetic construct
  source 1..20: mol_type = other DNA
accttacaaaacctcgtcca

SEQ ID NO: 28957 - DNA, 20 bp, synthetic construct
  source 1..20: mol_type = other DNA
aaaaaacaaacaagtgttat

SEQ ID NO: 28958 - DNA, 20 bp, synthetic construct
  source 1..20: mol_type = other DNA
tcagccagctcccgagcggt

SEQ ID NO: 28959 - DNA, 20 bp, synthetic construct
  source 1..20: mol_type = other DNA
gactctcacctcattcgttc

SEQ ID NO: 28960 - DNA, 20 bp, synthetic construct
  source 1..20: mol_type = other DNA
gatcatccagctgtgacagg

SEQ ID NO: 28961 - DNA, 20 bp, synthetic construct
  source 1..20: mol_type = other DNA
aacgcaccctcagaggccgc

SEQ ID NO: 28962 - DNA, 20 bp, synthetic construct
  source 1..20: mol_type = other DNA
acccctgtcttcaagaccag

SEQ ID NO: 28963 - DNA, 20 bp, synthetic construct
  source 1..20: mol_type = other DNA
cctggagtaatactttccaa

SEQ ID NO: 28964 - DNA, 20 bp, synthetic construct
  source 1..20: mol_type = other DNA
ggatggaggcccaaccgctc

SEQ ID NO: 28965 - DNA, 20 bp, synthetic construct
  source 1..20: mol_type = other DNA
gcacctggatatcgaagaga

SEQ ID NO: 28966 - DNA, 20 bp, synthetic construct
  source 1..20: mol_type = other DNA
aggatggaggcccaaccgct

SEQ ID NO: 28967 - DNA, 20 bp, synthetic construct
  source 1..20: mol_type = other DNA
gtccaccaatggcagtctgg

SEQ ID NO: 28968 - DNA, 20 bp, synthetic construct
  source 1..20: mol_type = other DNA
taccactgagacatcctata

SEQ ID NO: 28969 - DNA, 20 bp, synthetic construct
  source 1..20: mol_type = other DNA
ggtggcaaatgaaacatcat

SEQ ID NO: 28970 - DNA, 20 bp, synthetic construct
  source 1..20: mol_type = other DNA
ttttccagcagctcattcag

SEQ ID NO: 28971 - DNA, 20 bp, synthetic construct
  source 1..20: mol_type = other DNA
acccttacctctgttctgca

SEQ ID NO: 28972 - DNA, 20 bp, synthetic construct
  source 1..20: mol_type = other DNA
caccaaaagaggtctcaatg

SEQ ID NO: 28973 - DNA, 20 bp, synthetic construct
  source 1..20: mol_type = other DNA
ccttacccatcattccagag

SEQ ID NO: 28974 - DNA, 20 bp, synthetic construct
  source 1..20: mol_type = other DNA
tgtaattgcgaatgatgtca

SEQ ID NO: 28975 - DNA, 20 bp, synthetic construct
  source 1..20: mol_type = other DNA
tgactcaaaattcctggagc

SEQ ID NO: 28976 - DNA, 20 bp, synthetic construct
  source 1..20: mol_type = other DNA
gatgaagcccatgatgcacc

SEQ ID NO: 28977 - DNA, 20 bp, synthetic construct
  source 1..20: mol_type = other DNA
tcgtgtagggttcaaccgca

SEQ ID NO: 28978 - DNA, 20 bp, synthetic construct
  source 1..20: mol_type = other DNA
gctggaaaagactgaaggtg

SEQ ID NO: 28979 - DNA, 20 bp, synthetic construct
  source 1..20: mol_type = other DNA
ctcactgaaccgcagcagga

SEQ ID NO: 28980 - DNA, 20 bp, synthetic construct
  source 1..20: mol_type = other DNA
gcacacaaaagtgatgaaca

SEQ ID NO: 28981 - DNA, 20 bp, synthetic construct
  source 1..20: mol_type = other DNA
tgagcccatcgtgcacatgg

SEQ ID NO: 28982 - DNA, 20 bp, synthetic construct
  source 1..20: mol_type = other DNA
tcacattcacatgggtggag

SEQ ID NO: 28983 - DNA, 20 bp, synthetic construct
  source 1..20: mol_type = other DNA
tgtgatacaggtccttggtc

SEQ ID NO: 28984 - DNA, 20 bp, synthetic construct
  source 1..20: mol_type = other DNA
tcggcctagcagtgctttgg

SEQ ID NO: 28985 - DNA, 20 bp, synthetic construct
  source 1..20: mol_type = other DNA
agagcagctgaccatcatcc

SEQ ID NO: 28986 - DNA, 20 bp, synthetic construct
  source 1..20: mol_type = other DNA
cgacccctcatcctcaagac

SEQ ID NO: 28987 - DNA, 20 bp, synthetic construct
  source 1..20: mol_type = other DNA
gatgatctttaacctccttc

SEQ ID NO: 28988 - DNA, 20 bp, synthetic construct
  source 1..20: mol_type = other DNA
tgtcacacctagtggcccct

SEQ ID NO: 28989 - DNA, 20 bp, synthetic construct
  source 1..20: mol_type = other DNA
aagtcagaatgttgaacttc

SEQ ID NO: 28990 - DNA, 20 bp, synthetic construct
  source 1..20: mol_type = other DNA
ctcagagggcccaattggtg

SEQ ID NO: 28991 - DNA, 20 bp, synthetic construct
  source 1..20: mol_type = other DNA
gctccttcagcagctgcctc

SEQ ID NO: 28992 - DNA, 20 bp, synthetic construct
  source 1..20: mol_type = other DNA
tgtccgtctggggagaagac

SEQ ID NO: 28993 - DNA, 20 bp, synthetic construct
  source 1..20: mol_type = other DNA
ggcaaatctggctctggcac

SEQ ID NO: 28994 - DNA, 20 bp, synthetic construct
  source 1..20: mol_type = other DNA
tcctggccctttggaacgaa

SEQ ID NO: 28995 - DNA, 20 bp, synthetic construct
  source 1..20: mol_type = other DNA
ggccatcctgctaaaatcag

SEQ ID NO: 28996 - DNA, 20 bp, synthetic construct
  source 1..20: mol_type = other DNA
ccaggttccaattgggggct

SEQ ID NO: 28997 - DNA, 20 bp, synthetic construct
  source 1..20: mol_type = other DNA
ctacagtgacagcttcccaa

SEQ ID NO: 28998 - DNA, 20 bp, synthetic construct
  source 1..20: mol_type = other DNA
ggacgccggtcttgatgacg

SEQ ID NO: 28999 - DNA, 20 bp, synthetic construct
  source 1..20: mol_type = other DNA
tctacagactgcagccactg

SEQ ID NO: 29000 - DNA, 20 bp, synthetic construct
  source 1..20: mol_type = other DNA
gaattcaaacacttggtatg

SEQ ID NO: 29001 - DNA, 20 bp, synthetic construct
  source 1..20: mol_type = other DNA
ttcagctgctgctttgtgta

SEQ ID NO: 29002 - DNA, 20 bp, synthetic construct
  source 1..20: mol_type = other DNA
cagctgctgcatcttctgcc

SEQ ID NO: 29003 - DNA, 20 bp, synthetic construct
  source 1..20: mol_type = other DNA
cggcccctcgtcatcaagac

SEQ ID NO: 29004 - DNA, 20 bp, synthetic construct
  source 1..20: mol_type = other DNA
aggtcgttctgtaggaaatg

SEQ ID NO: 29005 - DNA, 20 bp, synthetic construct
  source 1..20: mol_type = other DNA
tggcaagggcttctccttct

SEQ ID NO: 29006 - DNA, 20 bp, synthetic construct
  source 1..20: mol_type = other DNA
gtgattcttcccacaggcac

SEQ ID NO: 29007 - DNA, 20 bp, synthetic construct
  source 1..20: mol_type = other DNA
caccacaactggcaaggagt

SEQ ID NO: 29008 - DNA, 20 bp, synthetic construct
  source 1..20: mol_type = other DNA
cggtgtcacacagataaact

SEQ ID NO: 29009 - DNA, 20 bp, synthetic construct
  source 1..20: mol_type = other DNA
ttaagctgataattcaactc

SEQ ID NO: 29010 - DNA, 20 bp, synthetic construct
  source 1..20: mol_type = other DNA
gacgccggtcttgatgacga

SEQ ID NO: 29011 - DNA, 20 bp, synthetic construct
  source 1..20: mol_type = other DNA
tcactgcgctggaccagatg

SEQ ID NO: 29012 - DNA, 20 bp, synthetic construct
  source 1..20: mol_type = other DNA
accagttttctagccgatct

SEQ ID NO: 29013 - DNA, 20 bp, synthetic construct
  source 1..20: mol_type = other DNA
atgcccttactctccgcatc

SEQ ID NO: 29014 - DNA, 20 bp, synthetic construct
  source 1..20: mol_type = other DNA
agtgtttgaattctgcagag

SEQ ID NO: 29015 - DNA, 20 bp, synthetic construct
  source 1..20: mol_type = other DNA
aaaaccctcaagagtcaagg

SEQ ID NO: 29016 - DNA, 20 bp, synthetic construct
  source 1..20: mol_type = other DNA
tcaacaaattaagaaactgg

SEQ ID NO: 29017 - DNA, 20 bp, synthetic construct
  source 1..20: mol_type = other DNA
ttatcagtaaggagcgggag

SEQ ID NO: 29018 - DNA, 20 bp, synthetic construct
  source 1..20: mol_type = other DNA
tgatgtacctggagccaagg

SEQ ID NO: 29019 - DNA, 20 bp, synthetic construct
  source 1..20: mol_type = other DNA
tatctgtgtgacaccgtaag

SEQ ID NO: 29020 - DNA, 20 bp, synthetic construct
  source 1..20: mol_type = other DNA
ctgtaagaaaagaaaaaggc

SEQ ID NO: 29021 - DNA, 20 bp, synthetic construct
  source 1..20: mol_type = other DNA
ccccacagcagccgtggtga

SEQ ID NO: 29022 - DNA, 20 bp, synthetic construct
  source 1..20: mol_type = other DNA
cttagcaggaaggtgcctgg

SEQ ID NO: 29023 - DNA, 20 bp, synthetic construct
  source 1..20: mol_type = other DNA
ccttgtgaaaaagtacatcc

SEQ ID NO: 29024 - DNA, 20 bp, synthetic construct
  source 1..20: mol_type = other DNA
aatcttgactctcaatccaa

SEQ ID NO: 29025 - DNA, 20 bp, synthetic construct
  source 1..20: mol_type = other DNA
tgggctttatcagtaaggag

SEQ ID NO: 29026 - DNA, 20 bp, synthetic construct
  source 1..20: mol_type = other DNA
cggcaacagattgcctgcat

SEQ ID NO: 29027 - DNA, 20 bp, synthetic construct
  source 1..20: mol_type = other DNA
tttcctggagaaaagagtaa

SEQ ID NO: 29028 - DNA, 20 bp, synthetic construct
  source 1..20: mol_type = other DNA
ggggacgttgcagctctcag

SEQ ID NO: 29029 - DNA, 20 bp, synthetic construct
  source 1..20: mol_type = other DNA
tgatcccaggttccaattgg

SEQ ID NO: 29030 - DNA, 20 bp, synthetic construct
  source 1..20: mol_type = other DNA
ggcactaaccttgggattgt

SEQ ID NO: 29031 - DNA, 20 bp, synthetic construct
  source 1..20: mol_type = other DNA
gacccactccttgccagttg

SEQ ID NO: 29032 - DNA, 20 bp, synthetic construct
  source 1..20: mol_type = other DNA
tttccgggatctgaatcaca

SEQ ID NO: 29033 - DNA, 20 bp, synthetic construct
  source 1..20: mol_type = other DNA
tccagttcactactaaagtc

SEQ ID NO: 29034 - DNA, 20 bp, synthetic construct
  source 1..20: mol_type = other DNA
tggaggagaactgccagctc

SEQ ID NO: 29035 - DNA, 20 bp, synthetic construct
  source 1..20: mol_type = other DNA
taagacccagatccagtccg

SEQ ID NO: 29036 - DNA, 20 bp, synthetic construct
  source 1..20: mol_type = other DNA
aggatggacgcccaggcatt

SEQ ID NO: 29037 - DNA, 20 bp, synthetic construct
  source 1..20: mol_type = other DNA
gcatcacctgcactctcttc

SEQ ID NO: 29038 - DNA, 20 bp, synthetic construct
  source 1..20: mol_type = other DNA
acgccggtcttgatgacgag

SEQ ID NO: 29039 - DNA, 20 bp, synthetic construct
  source 1..20: mol_type = other DNA
aagatacctgctctataagt

SEQ ID NO: 29040 - DNA, 20 bp, synthetic construct
  source 1..20: mol_type = other DNA
ggaagcctacagtaacgaga

SEQ ID NO: 29041 - DNA, 20 bp, synthetic construct
  source 1..20: mol_type = other DNA
tcaccacaactggcaaggag

SEQ ID NO: 29042 - DNA, 20 bp, synthetic construct
  source 1..20: mol_type = other DNA
gctcagtcctcgcttggtgg

SEQ ID NO: 29043 - DNA, 20 bp, synthetic construct
  source 1..20: mol_type = other DNA
gtacgtgcagaaaactctca

SEQ ID NO: 29044 - DNA, 20 bp, synthetic construct
  source 1..20: mol_type = other DNA
ttccgggatctgaatcacag

SEQ ID NO: 29045 - DNA, 20 bp, synthetic construct
  source 1..20: mol_type = other DNA
tgggccatcctgctaaaatc

SEQ ID NO: 29046 - DNA, 20 bp, synthetic construct
  source 1..20: mol_type = other DNA
caggtcaatggtattgctgc

SEQ ID NO: 29047 - DNA, 20 bp, synthetic construct
  source 1..20: mol_type = other DNA
gcaaaaagtttcctacaaag

SEQ ID NO: 29048 - DNA, 20 bp, synthetic construct
  source 1..20: mol_type = other DNA
ccaaactgccctcctgctga

SEQ ID NO: 29049 - DNA, 20 bp, synthetic construct
  source 1..20: mol_type = other DNA
caggcaccgggccacaatcc

SEQ ID NO: 29050 - DNA, 20 bp, synthetic construct
  source 1..20: mol_type = other DNA
acctgactttagtagtgaac

SEQ ID NO: 29051 - DNA, 20 bp, synthetic construct
  source 1..20: mol_type = other DNA
tttggtgtttcataatctcc

SEQ ID NO: 29052 - DNA, 20 bp, synthetic construct
  source 1..20: mol_type = other DNA
tctctatcctgacattccca

SEQ ID NO: 29053 - DNA, 20 bp, synthetic construct
  source 1..20: mol_type = other DNA
aggcgtcactttcacttggg

SEQ ID NO: 29054 - DNA, 20 bp, synthetic construct
  source 1..20: mol_type = other DNA
agaagccaatggagattgcc

SEQ ID NO: 29055 - DNA, 20 bp, synthetic construct
  source 1..20: mol_type = other DNA
aacttacatcacaattggct

SEQ ID NO: 29056 - DNA, 20 bp, synthetic construct
  source 1..20: mol_type = other DNA
tgcggcagtttctggcccct

SEQ ID NO: 29057 - DNA, 20 bp, synthetic construct
  source 1..20: mol_type = other DNA
agcagcaccttcaggatgtc

SEQ ID NO: 29058 - DNA, 20 bp, synthetic construct
  source 1..20: mol_type = other DNA
ccatgatgtacctggagcca

SEQ ID NO: 29059 - DNA, 20 bp, synthetic construct
  source 1..20: mol_type = other DNA
ggatgtccggaagagagtgc

SEQ ID NO: 29060 - DNA, 20 bp, synthetic construct
  source 1..20: mol_type = other DNA
ttcagtgaaagcagcaaaga

SEQ ID NO: 29061 - DNA, 20 bp, synthetic construct
  source 1..20: mol_type = other DNA
gagaaggacatcagcggtaa

SEQ ID NO: 29062 - DNA, 20 bp, synthetic construct
  source 1..20: mol_type = other DNA
aatcttagcaggaaggtgcc

SEQ ID NO: 29063 - DNA, 20 bp, synthetic construct
  source 1..20: mol_type = other DNA
aacctacccttcgttccaaa

SEQ ID NO: 29064 - DNA, 20 bp, synthetic construct
  source 1..20: mol_type = other DNA
aacatggaagaatccaacaa

SEQ ID NO: 29065 - DNA, 20 bp, synthetic construct
  source 1..20: mol_type = other DNA
caatcttgactctcaatcca

SEQ ID NO: 29066 - DNA, 20 bp, synthetic construct
  source 1..20: mol_type = other DNA
attcagggtgtcagatcaca

SEQ ID NO: 29067 - DNA, 20 bp, synthetic construct
  source 1..20: mol_type = other DNA
caggcagaagatgcagcagc

SEQ ID NO: 29068 - DNA, 20 bp, synthetic construct
  source 1..20: mol_type = other DNA
atgttggagatcaccacaac

SEQ ID NO: 29069 - DNA, 20 bp, synthetic construct
  source 1..20: mol_type = other DNA
cagtttggaaataatggtga

SEQ ID NO: 29070 - DNA, 20 bp, synthetic construct
  source 1..20: mol_type = other DNA
gcatgcccatgcatcctgac

SEQ ID NO: 29071 - DNA, 20 bp, synthetic construct
  source 1..20: mol_type = other DNA
gctgctgtagctgattccat

SEQ ID NO: 29072 - DNA, 20 bp, synthetic construct
  source 1..20: mol_type = other DNA
tcctgacattcccaaggagg

SEQ ID NO: 29073 - DNA, 20 bp, synthetic construct
  source 1..20: mol_type = other DNA
gtcgttctgtaggaaatggg

SEQ ID NO: 29074 - DNA, 20 bp, synthetic construct
  source 1..20: mol_type = other DNA
tgggtggagaaggacatcag

SEQ ID NO: 29075 - DNA, 20 bp, synthetic construct
  source 1..20: mol_type = other DNA
ttcagggtgtcagatcacat

SEQ ID NO: 29076 - DNA, 20 bp, synthetic construct
  source 1..20: mol_type = other DNA
tccgtcaccacggctgctgt

SEQ ID NO: 29077 - DNA, 20 bp, synthetic construct
  source 1..20: mol_type = other DNA
cagcaaaaagtttcctacaa

SEQ ID NO: 29078 - DNA, 20 bp, synthetic construct
  source 1..20: mol_type = other DNA
tcaggtatgatgagaaactg

SEQ ID NO: 29079 - DNA, 20 bp, synthetic construct
  source 1..20: mol_type = other DNA
caagcccccaattggaacct

SEQ ID NO: 29080 - DNA, 20 bp, synthetic construct
  source 1..20: mol_type = other DNA
ccagctcactcacgatgctc

SEQ ID NO: 29081 - DNA, 20 bp, synthetic construct
  source 1..20: mol_type = other DNA
ttcctggagaaaagagtaat

SEQ ID NO: 29082 - DNA, 20 bp, synthetic construct
  source 1..20: mol_type = other DNA
gtaccacaggatggacgccc

SEQ ID NO: 29083 - DNA, 20 bp, synthetic construct
  source 1..20: mol_type = other DNA
agggcttctccttctgggtc

SEQ ID NO: 29084 - DNA, 20 bp, synthetic construct
  source 1..20: mol_type = other DNA
ggtcgttctgtaggaaatgg

SEQ ID NO: 29085 - DNA, 20 bp, synthetic construct
  source 1..20: mol_type = other DNA
gaaacaaccagtcagtgacc

SEQ ID NO: 29086 - DNA, 20 bp, synthetic construct
  source 1..20: mol_type = other DNA
ttgatgacgaggggccggtc

SEQ ID NO: 29087 - DNA, 20 bp, synthetic construct
  source 1..20: mol_type = other DNA
aggaggcgtcactttcactt

SEQ ID NO: 29088 - DNA, 20 bp, synthetic construct
  source 1..20: mol_type = other DNA
tcttacctgtcacaggacat

SEQ ID NO: 29089 - DNA, 20 bp, synthetic construct
  source 1..20: mol_type = other DNA
gcagcttgacacacggtacc

SEQ ID NO: 29090 - DNA, 20 bp, synthetic construct
  source 1..20: mol_type = other DNA
tctagaacagaaaatgaaag

SEQ ID NO: 29091 - DNA, 20 bp, synthetic construct
  source 1..20: mol_type = other DNA
ggagcagagatgtgggaatg

SEQ ID NO: 29092 - DNA, 20 bp, synthetic construct
  source 1..20: mol_type = other DNA
ctttgacatggagttgacct

SEQ ID NO: 29093 - DNA, 20 bp, synthetic construct
  source 1..20: mol_type = other DNA
gccgcatatgccctaggaaa

SEQ ID NO: 29094 - DNA, 20 bp, synthetic construct
  source 1..20: mol_type = other DNA
ctcactcacgatgctctggt

SEQ ID NO: 29095 - DNA, 20 bp, synthetic construct
  source 1..20: mol_type = other DNA
ttacctctaggtcaatcttg

SEQ ID NO: 29096 - DNA, 20 bp, synthetic construct
  source 1..20: mol_type = other DNA
tttcctcagtgcctttgtgg

SEQ ID NO: 29097 - DNA, 20 bp, synthetic construct
  source 1..20: mol_type = other DNA
tctgtcagatgccaaatgcc

SEQ ID NO: 29098 - DNA, 20 bp, synthetic construct
  source 1..20: mol_type = other DNA
aggcctcaagattgacctag

SEQ ID NO: 29099 - DNA, 20 bp, synthetic construct
  source 1..20: mol_type = other DNA
tgattcttcccacaggcacc

SEQ ID NO: 29100 - DNA, 20 bp, synthetic construct
  source 1..20: mol_type = other DNA
cgatctaggcagatgttggg

SEQ ID NO: 29101 - DNA, 20 bp, synthetic construct
  source 1..20: mol_type = other DNA
ggagatcaccacaactggca

SEQ ID NO: 29102 - DNA, 20 bp, synthetic construct
  source 1..20: mol_type = other DNA
acaggcaccgggccacaatc

SEQ ID NO: 29103 - DNA, 20 bp, synthetic construct
  source 1..20: mol_type = other DNA
gaactgccagctcaggacct

SEQ ID NO: 29104 - DNA, 20 bp, synthetic construct
  source 1..20: mol_type = other DNA
gtcttacctgtcacaggaca

SEQ ID NO: 29105 - DNA, 20 bp, synthetic construct
  source 1..20: mol_type = other DNA
atttccgggatctgaatcac

SEQ ID NO: 29106 - DNA, 20 bp, synthetic construct
  source 1..20: mol_type = other DNA
gacggagaagcagcagatgc

SEQ ID NO: 29107 - DNA, 20 bp, synthetic construct
  source 1..20: mol_type = other DNA
ggaacagatgctcactgcgc

SEQ ID NO: 29108 - DNA, 20 bp, synthetic construct
  source 1..20: mol_type = other DNA
gataaagcccatgatgtacc

SEQ ID NO: 29109 - DNA, 20 bp, synthetic construct
  source 1..20: mol_type = other DNA
tcaggtatggggcagcgcct

SEQ ID NO: 29110 - DNA, 20 bp, synthetic construct
  source 1..20: mol_type = other DNA
gcactgaggaaagagaagat

SEQ ID NO: 29111 - DNA, 20 bp, synthetic construct
  source 1..20: mol_type = other DNA
cacagataaacttggtcttc

SEQ ID NO: 29112 - DNA, 20 bp, synthetic construct
  source 1..20: mol_type = other DNA
ctttggaacgaagggtaggt

SEQ ID NO: 29113 - DNA, 20 bp, synthetic construct
  source 1..20: mol_type = other DNA
caacagattgcctgcattgg

SEQ ID NO: 29114 - DNA, 20 bp, synthetic construct
  source 1..20: mol_type = other DNA
gactgcagccactgcggccc

SEQ ID NO: 29115 - DNA, 20 bp, synthetic construct
  source 1..20: mol_type = other DNA
gcagaaaactctcacggacg

SEQ ID NO: 29116 - DNA, 20 bp, synthetic construct
  source 1..20: mol_type = other DNA
caccctgaataattcacacc

SEQ ID NO: 29117 - DNA, 20 bp, synthetic construct
  source 1..20: mol_type = other DNA
gcctagatcggctagaaaac

SEQ ID NO: 29118 - DNA, 20 bp, synthetic construct
  source 1..20: mol_type = other DNA
ggagaaggacatcagcggta

SEQ ID NO: 29119 - DNA, 20 bp, synthetic construct
  source 1..20: mol_type = other DNA
aatggagattgcccggattg

SEQ ID NO: 29120 - DNA, 20 bp, synthetic construct
  source 1..20: mol_type = other DNA
acagcaccggccgatgctgg

SEQ ID NO: 29121 - DNA, 20 bp, synthetic construct
  source 1..20: mol_type = other DNA
cagctcctcagtcacaatca

SEQ ID NO: 29122 - DNA, 20 bp, synthetic construct
  source 1..20: mol_type = other DNA
agggagcagagatgtgggaa

SEQ ID NO: 29123 - DNA, 20 bp, synthetic construct
  source 1..20: mol_type = other DNA
gatgcggagagtaagggcat

SEQ ID NO: 29124 - DNA, 20 bp, synthetic construct
  source 1..20: mol_type = other DNA
ccagagcatcgtgagtgagc

SEQ ID NO: 29125 - DNA, 20 bp, synthetic construct
  source 1..20: mol_type = other DNA
tgctttcactgaatcttagc

SEQ ID NO: 29126 - DNA, 20 bp, synthetic construct
  source 1..20: mol_type = other DNA
agctacagcagcttgacaca

SEQ ID NO: 29127 - DNA, 20 bp, synthetic construct
  source 1..20: mol_type = other DNA
ctatcctgacattcccaagg

SEQ ID NO: 29128 - DNA, 20 bp, synthetic construct
  source 1..20: mol_type = other DNA
taaacttggtcttcaggtat

SEQ ID NO: 29129 - DNA, 20 bp, synthetic construct
  source 1..20: mol_type = other DNA
ctgtcagatgccaaatgcct

SEQ ID NO: 29130 - DNA, 20 bp, synthetic construct
  source 1..20: mol_type = other DNA
tttctccaggaaaacatggc

SEQ ID NO: 29131 - DNA, 20 bp, synthetic construct
  source 1..20: mol_type = other DNA
caggtatcttgagaagccaa

SEQ ID NO: 29132 - DNA, 20 bp, synthetic construct
  source 1..20: mol_type = other DNA
ctccgtcaccacggctgctg

SEQ ID NO: 29133 - DNA, 20 bp, synthetic construct
  source 1..20: mol_type = other DNA
tggaccagatgcggagagta

SEQ ID NO: 29134 - DNA, 20 bp, synthetic construct
  source 1..20: mol_type = other DNA
ggccctttggaacgaagggt

SEQ ID NO: 29135 - DNA, 20 bp, synthetic construct
  source 1..20: mol_type = other DNA
ttgtgtatggttccacggac

SEQ ID NO: 29136 - DNA, 20 bp, synthetic construct
  source 1..20: mol_type = other DNA
gcagctcctcagtcacaatc

SEQ ID NO: 29137 - DNA, 20 bp, synthetic construct
  source 1..20: mol_type = other DNA
ttcactgaatcttagcagga

SEQ ID NO: 29138 - DNA, 20 bp, synthetic construct
  source 1..20: mol_type = other DNA
gatctaggcagatgttgggc

SEQ ID NO: 29139 - DNA, 20 bp, synthetic construct
  source 1..20: mol_type = other DNA
ggcactgaggaaagagaaga

SEQ ID NO: 29140 - DNA, 20 bp, synthetic construct
  source 1..20: mol_type = other DNA
agcaaaaagtttcctacaaa

SEQ ID NO: 29141 - DNA, 20 bp, synthetic construct
  source 1..20: mol_type = other DNA
tataaaaccctcaagagtca

SEQ ID NO: 29142 - DNA, 20 bp, synthetic construct
  source 1..20: mol_type = other DNA
ccctgagggagcagagatgt

SEQ ID NO: 29143 - DNA, 20 bp, synthetic construct
  source 1..20: mol_type = other DNA
agagctgatggagctgctcc

SEQ ID NO: 29144 - DNA, 20 bp, synthetic construct
  source 1..20: mol_type = other DNA
ggcaaggagtgggtctgcgg

SEQ ID NO: 29145 - DNA, 20 bp, synthetic construct
  source 1..20: mol_type = other DNA
tggttccacggactggatct

SEQ ID NO: 29146 - DNA, 20 bp, synthetic construct
  source 1..20: mol_type = other DNA
gggccatcctgctaaaatca

SEQ ID NO: 29147 - DNA, 20 bp, synthetic construct
  source 1..20: mol_type = other DNA
caacctacccttcgttccaa

SEQ ID NO: 29148 - DNA, 20 bp, synthetic construct
  source 1..20: mol_type = other DNA
ttgatcccaggttccaattg

SEQ ID NO: 29149 - DNA, 20 bp, synthetic construct
  source 1..20: mol_type = other DNA
agtggcatgtgattctttgc

SEQ ID NO: 29150 - DNA, 20 bp, synthetic construct
  source 1..20: mol_type = other DNA
atttggcatctgacagatgt

SEQ ID NO: 29151 - DNA, 20 bp, synthetic construct
  source 1..20: mol_type = other DNA
attgtccagccagacccaga

SEQ ID NO: 29152 - DNA, 20 bp, synthetic construct
  source 1..20: mol_type = other DNA
attcccaaggaggaggcatt

SEQ ID NO: 29153 - DNA, 20 bp, synthetic construct
  source 1..20: mol_type = other DNA
atgcctgggcgtccatcctg

SEQ ID NO: 29154 - DNA, 20 bp, synthetic construct
  source 1..20: mol_type = other DNA
acttgcctccttgactcttg

SEQ ID NO: 29155 - DNA, 20 bp, synthetic construct
  source 1..20: mol_type = other DNA
gcagacatgcaagatctgaa

SEQ ID NO: 29156 - DNA, 20 bp, synthetic construct
  source 1..20: mol_type = other DNA
caggaaaacatggctggcaa

SEQ ID NO: 29157 - DNA, 20 bp, synthetic construct
  source 1..20: mol_type = other DNA
cggagagtaagggcataggt

SEQ ID NO: 29158 - DNA, 20 bp, synthetic construct
  source 1..20: mol_type = other DNA
gagcagagatgtgggaatgg

SEQ ID NO: 29159 - DNA, 20 bp, synthetic construct
  source 1..20: mol_type = other DNA
gcatcaatgaatctaaagtg

SEQ ID NO: 29160 - DNA, 20 bp, synthetic construct
  source 1..20: mol_type = other DNA
tatcagtaaggagcgggagc

SEQ ID NO: 29161 - DNA, 20 bp, synthetic construct
  source 1..20: mol_type = other DNA
cttggattgagagtcaagat

SEQ ID NO: 29162 - DNA, 20 bp, synthetic construct
  source 1..20: mol_type = other DNA
ttctctcctccagcatcggc

SEQ ID NO: 29163 - DNA, 20 bp, synthetic construct
  source 1..20: mol_type = other DNA
gcaaggagtgggtctgcgga

SEQ ID NO: 29164 - DNA, 20 bp, synthetic construct
  source 1..20: mol_type = other DNA
atggttccacggactggatc

SEQ ID NO: 29165 - DNA, 20 bp, synthetic construct
  source 1..20: mol_type = other DNA
cactttcacttgggtggaga

SEQ ID NO: 29166 - DNA, 20 bp, synthetic construct
  source 1..20: mol_type = other DNA
ttcaggtatggggcagcgcc

SEQ ID NO: 29167 - DNA, 20 bp, synthetic construct
  source 1..20: mol_type = other DNA
caatatcctggtgtctccac

SEQ ID NO: 29168 - DNA, 20 bp, synthetic construct
  source 1..20: mol_type = other DNA
tcagtgcctttgtggtggag

SEQ ID NO: 29169 - DNA, 20 bp, synthetic construct
  source 1..20: mol_type = other DNA
gatgctcagtcctcgcttgg

SEQ ID NO: 29170 - DNA, 20 bp, synthetic construct
  source 1..20: mol_type = other DNA
ccaagcccccaattggaacc

SEQ ID NO: 29171 - DNA, 20 bp, synthetic construct
  source 1..20: mol_type = other DNA
ataaacttggtcttcaggta

SEQ ID NO: 29172 - DNA, 20 bp, synthetic construct
  source 1..20: mol_type = other DNA
agtgaaagcagcaaagaagg

SEQ ID NO: 29173 - DNA, 20 bp, synthetic construct
  source 1..20: mol_type = other DNA
ggaccagatgcggagagtaa

SEQ ID NO: 29174 - DNA, 20 bp, synthetic construct
  source 1..20: mol_type = other DNA
gggtctgtaagaaaagaaaa

SEQ ID NO: 29175 - DNA, 20 bp, synthetic construct
  source 1..20: mol_type = other DNA
cagtggagacaccaggatat

SEQ ID NO: 29176 - DNA, 20 bp, synthetic construct
  source 1..20: mol_type = other DNA
tgtacagcaccggccgatgc

SEQ ID NO: 29177 - DNA, 20 bp, synthetic construct
  source 1..20: mol_type = other DNA
gggaccccattgtacagcac

SEQ ID NO: 29178 - DNA, 20 bp, synthetic construct
  source 1..20: mol_type = other DNA
cttgcctccttgactcttga

SEQ ID NO: 29179 - DNA, 20 bp, synthetic construct
  source 1..20: mol_type = other DNA
cagtcctcgcttggtggtgg

SEQ ID NO: 29180 - DNA, 20 bp, synthetic construct
  source 1..20: mol_type = other DNA
tcaaacacttggtatgtggg

SEQ ID NO: 29181 - DNA, 20 bp, synthetic construct
  source 1..20: mol_type = other DNA
gggagcagagatgtgggaat

SEQ ID NO: 29182 - DNA, 20 bp, synthetic construct
  source 1..20: mol_type = other DNA
caactacctgggtcagcttc

SEQ ID NO: 29183 - DNA, 20 bp, synthetic construct
  source 1..20: mol_type = other DNA
gggacgttgcagctctcaga

SEQ ID NO: 29184 - DNA, 20 bp, synthetic construct
  source 1..20: mol_type = other DNA
aagtggccgaggtcctgagc

SEQ ID NO: 29185 - DNA, 20 bp, synthetic construct
  source 1..20: mol_type = other DNA
gatgctggagcagcaccttc

SEQ ID NO: 29186 - DNA, 20 bp, synthetic construct
  source 1..20: mol_type = other DNA
tacactggcagagaaactct

SEQ ID NO: 29187 - DNA, 20 bp, synthetic construct
  source 1..20: mol_type = other DNA
cggtcttgatgacgaggggc

SEQ ID NO: 29188 - DNA, 20 bp, synthetic construct
  source 1..20: mol_type = other DNA
catcgagcagctgactacac

SEQ ID NO: 29189 - DNA, 20 bp, synthetic construct
  source 1..20: mol_type = other DNA
atcttgactctcaatccaag

SEQ ID NO: 29190 - DNA, 20 bp, synthetic construct
  source 1..20: mol_type = other DNA
acagcttcccaatggagctg

SEQ ID NO: 29191 - DNA, 20 bp, synthetic construct
  source 1..20: mol_type = other DNA
ccgtcaacaaattaagaaac

SEQ ID NO: 29192 - DNA, 20 bp, synthetic construct
  source 1..20: mol_type = other DNA
accctgagggagcagagatg

SEQ ID NO: 29193 - DNA, 20 bp, synthetic construct
  source 1..20: mol_type = other DNA
caagagtaggtttttctctt

SEQ ID NO: 29194 - DNA, 20 bp, synthetic construct
  source 1..20: mol_type = other DNA
actttcagaatggtccaccc

SEQ ID NO: 29195 - DNA, 20 bp, synthetic construct
  source 1..20: mol_type = other DNA
aggaataactttcacctggg

SEQ ID NO: 29196 - DNA, 20 bp, synthetic construct
  source 1..20: mol_type = other DNA
ttcagtgaaagccatctcgg

SEQ ID NO: 29197 - DNA, 20 bp, synthetic construct
  source 1..20: mol_type = other DNA
atgagctggtctggtttggg

SEQ ID NO: 29198 - DNA, 20 bp, synthetic construct
  source 1..20: mol_type = other DNA
attactcacattgttgagat

SEQ ID NO: 29199 - DNA, 20 bp, synthetic construct
  source 1..20: mol_type = other DNA
cttctggcagtggtttgacg

SEQ ID NO: 29200 - DNA, 20 bp, synthetic construct
  source 1..20: mol_type = other DNA
tggagaagacctcatccttg

SEQ ID NO: 29201 - DNA, 20 bp, synthetic construct
  source 1..20: mol_type = other DNA
agtagtgccggacctcgatg

SEQ ID NO: 29202 - DNA, 20 bp, synthetic construct
  source 1..20: mol_type = other DNA
cctgaaaccattcaccacgc

SEQ ID NO: 29203 - DNA, 20 bp, synthetic construct
  source 1..20: mol_type = other DNA
ttccttacccatcattccag

SEQ ID NO: 29204 - DNA, 20 bp, synthetic construct
  source 1..20: mol_type = other DNA
cgtgcacatgaatccccccc

SEQ ID NO: 29205 - DNA, 20 bp, synthetic construct
  source 1..20: mol_type = other DNA
tcacagcggaacgcaacctg

SEQ ID NO: 29206 - DNA, 20 bp, synthetic construct
  source 1..20: mol_type = other DNA
gtcccacagcacagtagccg

SEQ ID NO: 29207 - DNA, 20 bp, synthetic construct
  source 1..20: mol_type = other DNA
ctaggatggccctgggtgca

SEQ ID NO: 29208 - DNA, 20 bp, synthetic construct
  source 1..20: mol_type = other DNA
aatgtgctgcatgggacaca

SEQ ID NO: 29209 - DNA, 20 bp, synthetic construct
  source 1..20: mol_type = other DNA
tcaacagctttagctgtcaa

SEQ ID NO: 29210 - DNA, 20 bp, synthetic construct
  source 1..20: mol_type = other DNA
aagaaggcggagcaccaggt

SEQ ID NO: 29211 - DNA, 20 bp, synthetic construct
  source 1..20: mol_type = other DNA
gctgagccggtgagtccccg

SEQ ID NO: 29212 - DNA, 20 bp, synthetic construct
  source 1..20: mol_type = other DNA
tagccgtggcattgtggtcc

SEQ ID NO: 29213 - DNA, 20 bp, synthetic construct
  source 1..20: mol_type = other DNA
ctgctcatcaacaagcccga

SEQ ID NO: 29214 - DNA, 20 bp, synthetic construct
  source 1..20: mol_type = other DNA
ggatcaagcgtgctgaccgg

SEQ ID NO: 29215 - DNA, 20 bp, synthetic construct
  source 1..20: mol_type = other DNA
tacgccacgcagctccaggt

SEQ ID NO: 29216 - DNA, 20 bp, synthetic construct
  source 1..20: mol_type = other DNA
tcacggactctgcaccccgc

SEQ ID NO: 29217 - DNA, 20 bp, synthetic construct
  source 1..20: mol_type = other DNA
gtcccccagccggtcagcca

SEQ ID NO: 29218 - DNA, 20 bp, synthetic construct
  source 1..20: mol_type = other DNA
ctccagtgcagctctccggc

SEQ ID NO: 29219 - DNA, 20 bp, synthetic construct
  source 1..20: mol_type = other DNA
gcagtggtttgacggggtga

SEQ ID NO: 29220 - DNA, 20 bp, synthetic construct
  source 1..20: mol_type = other DNA
gtcccagttcaacagggtga

SEQ ID NO: 29221 - DNA, 20 bp, synthetic construct
  source 1..20: mol_type = other DNA
ccttctggcagtggtttgac

SEQ ID NO: 29222 - DNA, 20 bp, synthetic construct
  source 1..20: mol_type = other DNA
ccgccatggccgttcaccta

SEQ ID NO: 29223 - DNA, 20 bp, synthetic construct
  source 1..20: mol_type = other DNA
gggactcaccggctcagcaa

SEQ ID NO: 29224 - DNA, 20 bp, synthetic construct
  source 1..20: mol_type = other DNA
ggccctcaggagaacttgcc

SEQ ID NO: 29225 - DNA, 20 bp, synthetic construct
  source 1..20: mol_type = other DNA
gatggagtaccaccaagcca

SEQ ID NO: 29226 - DNA, 20 bp, synthetic construct
  source 1..20: mol_type = other DNA
tttagtgactcagaaatcgg

SEQ ID NO: 29227 - DNA, 20 bp, synthetic construct
  source 1..20: mol_type = other DNA
caagtactacactcctgtgc

SEQ ID NO: 29228 - DNA, 20 bp, synthetic construct
  source 1..20: mol_type = other DNA
cttggagaagacctcatcct

SEQ ID NO: 29229 - DNA, 20 bp, synthetic construct
  source 1..20: mol_type = other DNA
cctcaccatgttcctgaagt

SEQ ID NO: 29230 - DNA, 20 bp, synthetic construct
  source 1..20: mol_type = other DNA
ttggagaagacctcatcctt

SEQ ID NO: 29231 - DNA, 20 bp, synthetic construct
  source 1..20: mol_type = other DNA
ggtccctggctgaccggctg

SEQ ID NO: 29232 - DNA, 20 bp, synthetic construct
  source 1..20: mol_type = other DNA
ggacgatgacaaccacaggt

SEQ ID NO: 29233 - DNA, 20 bp, synthetic construct
  source 1..20: mol_type = other DNA
ccgtggacgatgacaaccac

SEQ ID NO: 29234 - DNA, 20 bp, synthetic construct
  source 1..20: mol_type = other DNA
cctgatggagaaatcccgcg

SEQ ID NO: 29235 - DNA, 20 bp, synthetic construct
  source 1..20: mol_type = other DNA
ctccaggagctgggtggctt

SEQ ID NO: 29236 - DNA, 20 bp, synthetic construct
  source 1..20: mol_type = other DNA
tactacactcctgtgctggg

SEQ ID NO: 29237 - DNA, 20 bp, synthetic construct
  source 1..20: mol_type = other DNA
ctcttcagtgactgcagggt

SEQ ID NO: 29238 - DNA, 20 bp, synthetic construct
  source 1..20: mol_type = other DNA
gctttagtgactcagaaatc

SEQ ID NO: 29239 - DNA, 20 bp, synthetic construct
  source 1..20: mol_type = other DNA
gaatgcatctgcagatgctg

SEQ ID NO: 29240 - DNA, 20 bp, synthetic construct
  source 1..20: mol_type = other DNA
cagccaggaccacaatgcca

SEQ ID NO: 29241 - DNA, 20 bp, synthetic construct
  source 1..20: mol_type = other DNA
tccggcactacttggcccag

SEQ ID NO: 29242 - DNA, 20 bp, synthetic construct
  source 1..20: mol_type = other DNA
gttgaactgggaccaggaca

SEQ ID NO: 29243 - DNA, 20 bp, synthetic construct
  source 1..20: mol_type = other DNA
gaagtaggtggtgttctcat

SEQ ID NO: 29244 - DNA, 20 bp, synthetic construct
  source 1..20: mol_type = other DNA
gatagctcaggtcccccagc

SEQ ID NO: 29245 - DNA, 20 bp, synthetic construct
  source 1..20: mol_type = other DNA
actgggaccaggacacggac

SEQ ID NO: 29246 - DNA, 20 bp, synthetic construct
  source 1..20: mol_type = other DNA
gaaaccacagatcaagcaag

SEQ ID NO: 29247 - DNA, 20 bp, synthetic construct
  source 1..20: mol_type = other DNA
ggaccagctccagggggcag

SEQ ID NO: 29248 - DNA, 20 bp, synthetic construct
  source 1..20: mol_type = other DNA
tgtgtttcctgaccgcccca

SEQ ID NO: 29249 - DNA, 20 bp, synthetic construct
  source 1..20: mol_type = other DNA
gctgtggccgcagctgtgtg

SEQ ID NO: 29250 - DNA, 20 bp, synthetic construct
  source 1..20: mol_type = other DNA
gcagaagaaggcggagcacc

SEQ ID NO: 29251 - DNA, 20 bp, synthetic construct
  source 1..20: mol_type = other DNA
gaagaaggcggagcaccagg

SEQ ID NO: 29252 - DNA, 20 bp, synthetic construct
  source 1..20: mol_type = other DNA
ggacaatgcctttgctgagc

SEQ ID NO: 29253 - DNA, 20 bp, synthetic construct
  source 1..20: mol_type = other DNA
atcaagcgtgctgaccggcg

SEQ ID NO: 29254 - DNA, 20 bp, synthetic construct
  source 1..20: mol_type = other DNA
agcccggcaagttctcctga

SEQ ID NO: 29255 - DNA, 20 bp, synthetic construct
  source 1..20: mol_type = other DNA
cccgccatggccgttcacct

SEQ ID NO: 29256 - DNA, 20 bp, synthetic construct
  source 1..20: mol_type = other DNA
tcagatcaaccagacatttg

SEQ ID NO: 29257 - DNA, 20 bp, synthetic construct
  source 1..20: mol_type = other DNA
gaggtgaaaagaccggcagg

SEQ ID NO: 29258 - DNA, 20 bp, synthetic construct
  source 1..20: mol_type = other DNA
tcaggaacatggtgaggacg

SEQ ID NO: 29259 - DNA, 20 bp, synthetic construct
  source 1..20: mol_type = other DNA
agaagacctcatccttgggg

SEQ ID NO: 29260 - DNA, 20 bp, synthetic construct
  source 1..20: mol_type = other DNA
tgcattcacaaacctgcaga

SEQ ID NO: 29261 - DNA, 20 bp, synthetic construct
  source 1..20: mol_type = other DNA
tccaagtcaatggcatccct

SEQ ID NO: 29262 - DNA, 20 bp, synthetic construct
  source 1..20: mol_type = other DNA
cccacttcaggaacatggtg

SEQ ID NO: 29263 - DNA, 20 bp, synthetic construct
  source 1..20: mol_type = other DNA
cattgtggtcctggctgccg

SEQ ID NO: 29264 - DNA, 20 bp, synthetic construct
  source 1..20: mol_type = other DNA
tgaatggtttcaggttccac

SEQ ID NO: 29265 - DNA, 20 bp, synthetic construct
  source 1..20: mol_type = other DNA
cccaagggatgccattgact

SEQ ID NO: 29266 - DNA, 20 bp, synthetic construct
  source 1..20: mol_type = other DNA
agaagtaggtggtgttctca

SEQ ID NO: 29267 - DNA, 20 bp, synthetic construct
  source 1..20: mol_type = other DNA
ggagtcaaacttccaggcga

SEQ ID NO: 29268 - DNA, 20 bp, synthetic construct
  source 1..20: mol_type = other DNA
gtcactaaagcgcaacaaga

SEQ ID NO: 29269 - DNA, 20 bp, synthetic construct
  source 1..20: mol_type = other DNA
ccccactggaatgatgggta

SEQ ID NO: 29270 - DNA, 20 bp, synthetic construct
  source 1..20: mol_type = other DNA
tacacccacctggagctgcg

SEQ ID NO: 29271 - DNA, 20 bp, synthetic construct
  source 1..20: mol_type = other DNA
gcaagttctcctgagggccc

SEQ ID NO: 29272 - DNA, 20 bp, synthetic construct
  source 1..20: mol_type = other DNA
gtagactctgtccctacctg

SEQ ID NO: 29273 - DNA, 20 bp, synthetic construct
  source 1..20: mol_type = other DNA
cggccagcacttccccatcg

SEQ ID NO: 29274 - DNA, 20 bp, synthetic construct
  source 1..20: mol_type = other DNA
caagtcaatggcatcccttg

SEQ ID NO: 29275 - DNA, 20 bp, synthetic construct
  source 1..20: mol_type = other DNA
cctcttcagtgactgcaggg

SEQ ID NO: 29276 - DNA, 20 bp, synthetic construct
  source 1..20: mol_type = other DNA
gcaggagctgcagaagaagg

SEQ ID NO: 29277 - DNA, 20 bp, synthetic construct
  source 1..20: mol_type = other DNA
ctccaggtgggtgtaggctc

SEQ ID NO: 29278 - DNA, 20 bp, synthetic construct
  source 1..20: mol_type = other DNA
gtcgcagctcctcaaatgtc

SEQ ID NO: 29279 - DNA, 20 bp, synthetic construct
  source 1..20: mol_type = other DNA
cacaagccccactggaatga

SEQ ID NO: 29280 - DNA, 20 bp, synthetic construct
  source 1..20: mol_type = other DNA
atcaacagctttagctgtca

SEQ ID NO: 29281 - DNA, 20 bp, synthetic construct
  source 1..20: mol_type = other DNA
ccttacccatcattccagtg

SEQ ID NO: 29282 - DNA, 20 bp, synthetic construct
  source 1..20: mol_type = other DNA
agaaggcggagcaccaggtg

SEQ ID NO: 29283 - DNA, 20 bp, synthetic construct
  source 1..20: mol_type = other DNA
tccagtgcagctctccggct

SEQ ID NO: 29284 - DNA, 20 bp, synthetic construct
  source 1..20: mol_type = other DNA
tgcggccacagcactttgtc

SEQ ID NO: 29285 - DNA, 20 bp, synthetic construct
  source 1..20: mol_type = other DNA
tgccacggctactgtgctgt

SEQ ID NO: 29286 - DNA, 20 bp, synthetic construct
  source 1..20: mol_type = other DNA
ggccatggcgggctggatcc

SEQ ID NO: 29287 - DNA, 20 bp, synthetic construct
  source 1..20: mol_type = other DNA
tcaggatggagaattcgacc

SEQ ID NO: 29288 - DNA, 20 bp, synthetic construct
  source 1..20: mol_type = other DNA
tccactgggccaagtagtgc

SEQ ID NO: 29289 - DNA, 20 bp, synthetic construct
  source 1..20: mol_type = other DNA
atgccacggctactgtgctg

SEQ ID NO: 29290 - DNA, 20 bp, synthetic construct
  source 1..20: mol_type = other DNA
acacatagatgagatagctc

SEQ ID NO: 29291 - DNA, 20 bp, synthetic construct
  source 1..20: mol_type = other DNA
aagtactacactcctgtgct

SEQ ID NO: 29292 - DNA, 20 bp, synthetic construct
  source 1..20: mol_type = other DNA
gatcaagcgtgctgaccggc

SEQ ID NO: 29293 - DNA, 20 bp, synthetic construct
  source 1..20: mol_type = other DNA
gcgcaacaagaaggtcccgt

SEQ ID NO: 29294 - DNA, 20 bp, synthetic construct
  source 1..20: mol_type = other DNA
gttcctgaagtgggcactga

SEQ ID NO: 29295 - DNA, 20 bp, synthetic construct
  source 1..20: mol_type = other DNA
acgcagctccaggtgggtgt

SEQ ID NO: 29296 - DNA, 20 bp, synthetic construct
  source 1..20: mol_type = other DNA
gaatgtgctgcatgggacac

SEQ ID NO: 29297 - DNA, 20 bp, synthetic construct
  source 1..20: mol_type = other DNA
taagagttcctccacgtgcc

SEQ ID NO: 29298 - DNA, 20 bp, synthetic construct
  source 1..20: mol_type = other DNA
gagaaatcccgcgtggtgaa

SEQ ID NO: 29299 - DNA, 20 bp, synthetic construct
  source 1..20: mol_type = other DNA
tgcagcggaccagctccagg

SEQ ID NO: 29300 - DNA, 20 bp, synthetic construct
  source 1..20: mol_type = other DNA
ggcctggatccagcccgcca

SEQ ID NO: 29301 - DNA, 20 bp, synthetic construct
  source 1..20: mol_type = other DNA
tgctcatcaacaagcccgac

SEQ ID NO: 29302 - DNA, 20 bp, synthetic construct
  source 1..20: mol_type = other DNA
cctgtggttgtcatcgtcca

SEQ ID NO: 29303 - DNA, 20 bp, synthetic construct
  source 1..20: mol_type = other DNA
gacatttgaggagctgcgac

SEQ ID NO: 29304 - DNA, 20 bp, synthetic construct
  source 1..20: mol_type = other DNA
caagccacccagctcctgga

SEQ ID NO: 29305 - DNA, 20 bp, synthetic construct
  source 1..20: mol_type = other DNA
cgcaacaagaaggtcccgtc

SEQ ID NO: 29306 - DNA, 20 bp, synthetic construct
  source 1..20: mol_type = other DNA
gcccaccagcaggcgtacgg

SEQ ID NO: 29307 - DNA, 20 bp, synthetic construct
  source 1..20: mol_type = other DNA
gaaggcggagcaccaggtgg

SEQ ID NO: 29308 - DNA, 20 bp, synthetic construct
  source 1..20: mol_type = other DNA
gcccctcaccctgttgaact

SEQ ID NO: 29309 - DNA, 20 bp, synthetic construct
  source 1..20: mol_type = other DNA
ctacgccacgcagctccagg

SEQ ID NO: 29310 - DNA, 20 bp, synthetic construct
  source 1..20: mol_type = other DNA
tccaggtgggtgtaggctct

SEQ ID NO: 29311 - DNA, 20 bp, synthetic construct
  source 1..20: mol_type = other DNA
gacgatgacaaccacaggta

SEQ ID NO: 29312 - DNA, 20 bp, synthetic construct
  source 1..20: mol_type = other DNA
ggaactacaccttctggcag

SEQ ID NO: 29313 - DNA, 20 bp, synthetic construct
  source 1..20: mol_type = other DNA
agcacttccccatcgaggtc

SEQ ID NO: 29314 - DNA, 20 bp, synthetic construct
  source 1..20: mol_type = other DNA
ggcccctcaccctgttgaac

SEQ ID NO: 29315 - DNA, 20 bp, synthetic construct
  source 1..20: mol_type = other DNA
ggaatgatgggtaaggaacg

SEQ ID NO: 29316 - DNA, 20 bp, synthetic construct
  source 1..20: mol_type = other DNA
tcctcaccatgttcctgaag

SEQ ID NO: 29317 - DNA, 20 bp, synthetic construct
  source 1..20: mol_type = other DNA
actacactcctgtgctgggt

SEQ ID NO: 29318 - DNA, 20 bp, synthetic construct
  source 1..20: mol_type = other DNA
ggaccgaatggagaagtctc

SEQ ID NO: 29319 - DNA, 20 bp, synthetic construct
  source 1..20: mol_type = other DNA
gggatccactgactgtccat

SEQ ID NO: 29320 - DNA, 20 bp, synthetic construct
  source 1..20: mol_type = other DNA
ccagatcaaccagacgtttg

SEQ ID NO: 29321 - DNA, 20 bp, synthetic construct
  source 1..20: mol_type = other DNA
caggccctccaggagctggg

SEQ ID NO: 29322 - DNA, 20 bp, synthetic construct
  source 1..20: mol_type = other DNA
ggatccaaggtgaggcgcgg

SEQ ID NO: 29323 - DNA, 20 bp, synthetic construct
  source 1..20: mol_type = other DNA
tccaaggtgaggcgcggtgg

SEQ ID NO: 29324 - DNA, 20 bp, synthetic construct
  source 1..20: mol_type = other DNA
cttcaggaatatggtgaggg

SEQ ID NO: 29325 - DNA, 20 bp, synthetic construct
  source 1..20: mol_type = other DNA
tccaaccaggagaatttacc

SEQ ID NO: 29326 - DNA, 20 bp, synthetic construct
  source 1..20: mol_type = other DNA
gtggccttaatgttctcctg

SEQ ID NO: 29327 - DNA, 20 bp, synthetic construct
  source 1..20: mol_type = other DNA
gacgtttgaggagctgcgac

SEQ ID NO: 29328 - DNA, 20 bp, synthetic construct
  source 1..20: mol_type = other DNA
ggagctgcgactggtcacgc

SEQ ID NO: 29329 - DNA, 20 bp, synthetic construct
  source 1..20: mol_type = other DNA
cgtgatggtggcgttgacct

SEQ ID NO: 29330 - DNA, 20 bp, synthetic construct
  source 1..20: mol_type = other DNA
gccgaagtgcagagcaaccg

SEQ ID NO: 29331 - DNA, 20 bp, synthetic construct
  source 1..20: mol_type = other DNA
gcggcgtgtggaggagctcc

SEQ ID NO: 29332 - DNA, 20 bp, synthetic construct
  source 1..20: mol_type = other DNA
agcattgtcccagagaacag

SEQ ID NO: 29333 - DNA, 20 bp, synthetic construct
  source 1..20: mol_type = other DNA
gctcctcaccctgttgaact

SEQ ID NO: 29334 - DNA, 20 bp, synthetic construct
  source 1..20: mol_type = other DNA
tcccagggtagctctccagc

SEQ ID NO: 29335 - DNA, 20 bp, synthetic construct
  source 1..20: mol_type = other DNA
gcagaagcaggtgtctctgg

SEQ ID NO: 29336 - DNA, 20 bp, synthetic construct
  source 1..20: mol_type = other DNA
agcagtaccgcgtggtgagt

SEQ ID NO: 29337 - DNA, 20 bp, synthetic construct
  source 1..20: mol_type = other DNA
caccctgttgaactgggacc

SEQ ID NO: 29338 - DNA, 20 bp, synthetic construct
  source 1..20: mol_type = other DNA
cctcaaacgtctggttgatc

SEQ ID NO: 29339 - DNA, 20 bp, synthetic construct
  source 1..20: mol_type = other DNA
acaatatatggcggatgcag

SEQ ID NO: 29340 - DNA, 20 bp, synthetic construct
  source 1..20: mol_type = other DNA
ggtgatccagggccattttg

SEQ ID NO: 29341 - DNA, 20 bp, synthetic construct
  source 1..20: mol_type = other DNA
tactcattaacaagccagat

SEQ ID NO: 29342 - DNA, 20 bp, synthetic construct
  source 1..20: mol_type = other DNA
acagtcctggtaatggtgtg

SEQ ID NO: 29343 - DNA, 20 bp, synthetic construct
  source 1..20: mol_type = other DNA
ctcaatgatgaacgtgctgc

SEQ ID NO: 29344 - DNA, 20 bp, synthetic construct
  source 1..20: mol_type = other DNA
tgtcctggtcccagttcaac

SEQ ID NO: 29345 - DNA, 20 bp, synthetic construct
  source 1..20: mol_type = other DNA
tcctcaggctctcctggtac

SEQ ID NO: 29346 - DNA, 20 bp, synthetic construct
  source 1..20: mol_type = other DNA
ggctgagataatgtccgtga

SEQ ID NO: 29347 - DNA, 20 bp, synthetic construct
  source 1..20: mol_type = other DNA
gccactgtgcgcctgctggt

SEQ ID NO: 29348 - DNA, 20 bp, synthetic construct
  source 1..20: mol_type = other DNA
cagccctgcggatctgctgc

SEQ ID NO: 29349 - DNA, 20 bp, synthetic construct
  source 1..20: mol_type = other DNA
ccatgaacgatcaccaccac

SEQ ID NO: 29350 - DNA, 20 bp, synthetic construct
  source 1..20: mol_type = other DNA
atgcgacggccactgttctc

SEQ ID NO: 29351 - DNA, 20 bp, synthetic construct
  source 1..20: mol_type = other DNA
ggtcccagttcaacagggtg

SEQ ID NO: 29352 - DNA, 20 bp, synthetic construct
  source 1..20: mol_type = other DNA
gagcctgtgagtgtattcct

SEQ ID NO: 29353 - DNA, 20 bp, synthetic construct
  source 1..20: mol_type = other DNA
caagatctactgagtcccta

SEQ ID NO: 29354 - DNA, 20 bp, synthetic construct
  source 1..20: mol_type = other DNA
aggccgaagtgcagagcaac

SEQ ID NO: 29355 - DNA, 20 bp, synthetic construct
  source 1..20: mol_type = other DNA
cctcaccatattcctgaagt

SEQ ID NO: 29356 - DNA, 20 bp, synthetic construct
  source 1..20: mol_type = other DNA
tgcgttcacaaacctgcaga

SEQ ID NO: 29357 - DNA, 20 bp, synthetic construct
  source 1..20: mol_type = other DNA
gttcattgtacaatatatgg

SEQ ID NO: 29358 - DNA, 20 bp, synthetic construct
  source 1..20: mol_type = other DNA
cattgagaagcagcctcctc

SEQ ID NO: 29359 - DNA, 20 bp, synthetic construct
  source 1..20: mol_type = other DNA
agccactgtgcgcctgctgg

SEQ ID NO: 29360 - DNA, 20 bp, synthetic construct
  source 1..20: mol_type = other DNA
tgccagcagctgcccatccc

SEQ ID NO: 29361 - DNA, 20 bp, synthetic construct
  source 1..20: mol_type = other DNA
accaggactgtagcacgtcc

SEQ ID NO: 29362 - DNA, 20 bp, synthetic construct
  source 1..20: mol_type = other DNA
ggagcgtctgagccgggaga

SEQ ID NO: 29363 - DNA, 20 bp, synthetic construct
  source 1..20: mol_type = other DNA
gtacttcatcatccagtacc

SEQ ID NO: 29364 - DNA, 20 bp, synthetic construct
  source 1..20: mol_type = other DNA
acacctgcacgagagcccca

SEQ ID NO: 29365 - DNA, 20 bp, synthetic construct
  source 1..20: mol_type = other DNA
tctagctcagtttggcccgc

SEQ ID NO: 29366 - DNA, 20 bp, synthetic construct
  source 1..20: mol_type = other DNA
gacggccctccagcagaagc

SEQ ID NO: 29367 - DNA, 20 bp, synthetic construct
  source 1..20: mol_type = other DNA
tggtccctgagtaagtgtcc

SEQ ID NO: 29368 - DNA, 20 bp, synthetic construct
  source 1..20: mol_type = other DNA
ggttctccttggtcaggccc

SEQ ID NO: 29369 - DNA, 20 bp, synthetic construct
  source 1..20: mol_type = other DNA
gacactgcagcagtaccgcg

SEQ ID NO: 29370 - DNA, 20 bp, synthetic construct
  source 1..20: mol_type = other DNA
cagcagtcacctggtcacca

SEQ ID NO: 29371 - DNA, 20 bp, synthetic construct
  source 1..20: mol_type = other DNA
gtcctggtaatggtgtgggg

SEQ ID NO: 29372 - DNA, 20 bp, synthetic construct
  source 1..20: mol_type = other DNA
ggccactgtagtcctccagg

SEQ ID NO: 29373 - DNA, 20 bp, synthetic construct
  source 1..20: mol_type = other DNA
ggctcctcaccctgttgaac

SEQ ID NO: 29374 - DNA, 20 bp, synthetic construct
  source 1..20: mol_type = other DNA
gggaccacttgcttgatctg

SEQ ID NO: 29375 - DNA, 20 bp, synthetic construct
  source 1..20: mol_type = other DNA
ccagcagaagcaggtgtctc

SEQ ID NO: 29376 - DNA, 20 bp, synthetic construct
  source 1..20: mol_type = other DNA
gattgaaagccaagcatggt

SEQ ID NO: 29377 - DNA, 20 bp, synthetic construct
  source 1..20: mol_type = other DNA
ccagtggtggtgatcgttca

SEQ ID NO: 29378 - DNA, 20 bp, synthetic construct
  source 1..20: mol_type = other DNA
ttggagtatacttcatcttt

SEQ ID NO: 29379 - DNA, 20 bp, synthetic construct
  source 1..20: mol_type = other DNA
agcttgtatccacacagcca

SEQ ID NO: 29380 - DNA, 20 bp, synthetic construct
  source 1..20: mol_type = other DNA
gctcctgcaccaggccctcc

SEQ ID NO: 29381 - DNA, 20 bp, synthetic construct
  source 1..20: mol_type = other DNA
gccccggttgctctgcactt

SEQ ID NO: 29382 - DNA, 20 bp, synthetic construct
  source 1..20: mol_type = other DNA
ctgtgcgcctgctggtgggc

SEQ ID NO: 29383 - DNA, 20 bp, synthetic construct
  source 1..20: mol_type = other DNA
gaccctgtccctgccagtgg

SEQ ID NO: 29384 - DNA, 20 bp, synthetic construct
  source 1..20: mol_type = other DNA
cagcagtaccgcgtggtgag

SEQ ID NO: 29385 - DNA, 20 bp, synthetic construct
  source 1..20: mol_type = other DNA
tgatggtggccttcacctgg

SEQ ID NO: 29386 - DNA, 20 bp, synthetic construct
  source 1..20: mol_type = other DNA
cccggctcagacgctcctgg

SEQ ID NO: 29387 - DNA, 20 bp, synthetic construct
  source 1..20: mol_type = other DNA
ctccagatcgaagtccccat

SEQ ID NO: 29388 - DNA, 20 bp, synthetic construct
  source 1..20: mol_type = other DNA
ctcccggctcagacgctcct

SEQ ID NO: 29389 - DNA, 20 bp, synthetic construct
  source 1..20: mol_type = other DNA
cacggacattatctcagccc

SEQ ID NO: 29390 - DNA, 20 bp, synthetic construct
  source 1..20: mol_type = other DNA
gccaaactgagctagaggag

SEQ ID NO: 29391 - DNA, 20 bp, synthetic construct
  source 1..20: mol_type = other DNA
cggggtcacgattgtgcgtg

SEQ ID NO: 29392 - DNA, 20 bp, synthetic construct
  source 1..20: mol_type = other DNA
ctccaggtgggtgtgggctc

SEQ ID NO: 29393 - DNA, 20 bp, synthetic construct
  source 1..20: mol_type = other DNA
tgatgatggtggccttcacc

SEQ ID NO: 29394 - DNA, 20 bp, synthetic construct
  source 1..20: mol_type = other DNA
aaaatggccctggatcacca

SEQ ID NO: 29395 - DNA, 20 bp, synthetic construct
  source 1..20: mol_type = other DNA
gatggtggccttcacctggg

SEQ ID NO: 29396 - DNA, 20 bp, synthetic construct
  source 1..20: mol_type = other DNA
acaggccactgtagtcctcc

SEQ ID NO: 29397 - DNA, 20 bp, synthetic construct
  source 1..20: mol_type = other DNA
atctagaggaaagaatgttt

SEQ ID NO: 29398 - DNA, 20 bp, synthetic construct
  source 1..20: mol_type = other DNA
cagggtcttctggtgcttct

SEQ ID NO: 29399 - DNA, 20 bp, synthetic construct
  source 1..20: mol_type = other DNA
agctgatccagtggaagcgg

SEQ ID NO: 29400 - DNA, 20 bp, synthetic construct
  source 1..20: mol_type = other DNA
aaggccacccagctcctgga

SEQ ID NO: 29401 - DNA, 20 bp, synthetic construct
  source 1..20: mol_type = other DNA
tcaccgactctgccccacga

SEQ ID NO: 29402 - DNA, 20 bp, synthetic construct
  source 1..20: mol_type = other DNA
cagaaagtgtaattccgtcc

SEQ ID NO: 29403 - DNA, 20 bp, synthetic construct
  source 1..20: mol_type = other DNA
agtggattgaaagccaagca

SEQ ID NO: 29404 - DNA, 20 bp, synthetic construct
  source 1..20: mol_type = other DNA
ctacagtcctggtaatggtg

SEQ ID NO: 29405 - DNA, 20 bp, synthetic construct
  source 1..20: mol_type = other DNA
tcaatgatgaacgtgctgca

SEQ ID NO: 29406 - DNA, 20 bp, synthetic construct
  source 1..20: mol_type = other DNA
tggatgacgagctgatccag

SEQ ID NO: 29407 - DNA, 20 bp, synthetic construct
  source 1..20: mol_type = other DNA
ctcaagcctcattggaatga

SEQ ID NO: 29408 - DNA, 20 bp, synthetic construct
  source 1..20: mol_type = other DNA
tggccgtcgcattgttgtcc

SEQ ID NO: 29409 - DNA, 20 bp, synthetic construct
  source 1..20: mol_type = other DNA
ggacgtagcgcggcgtgtgg

SEQ ID NO: 29410 - DNA, 20 bp, synthetic construct
  source 1..20: mol_type = other DNA
ccagagacacctgcttctgc

SEQ ID NO: 29411 - DNA, 20 bp, synthetic construct
  source 1..20: mol_type = other DNA
gcttgttaatgagtaggtca

SEQ ID NO: 29412 - DNA, 20 bp, synthetic construct
  source 1..20: mol_type = other DNA
tgcagcggaccagctccatg

SEQ ID NO: 29413 - DNA, 20 bp, synthetic construct
  source 1..20: mol_type = other DNA
tgcttggctttcaatccact

SEQ ID NO: 29414 - DNA, 20 bp, synthetic construct
  source 1..20: mol_type = other DNA
gaagcagcagaccatcatcc

SEQ ID NO: 29415 - DNA, 20 bp, synthetic construct
  source 1..20: mol_type = other DNA
cgtgcacatgaacccccccc

SEQ ID NO: 29416 - DNA, 20 bp, synthetic construct
  source 1..20: mol_type = other DNA
caccatcatcagtgagcagc

SEQ ID NO: 29417 - DNA, 20 bp, synthetic construct
  source 1..20: mol_type = other DNA
ctcgtgcaggtgtgagaagt

SEQ ID NO: 29418 - DNA, 20 bp, synthetic construct
  source 1..20: mol_type = other DNA
cattaaggccacccagctcc

SEQ ID NO: 29419 - DNA, 20 bp, synthetic construct
  source 1..20: mol_type = other DNA
ggcgctcaacatgaaattca

SEQ ID NO: 29420 - DNA, 20 bp, synthetic construct
  source 1..20: mol_type = other DNA
ccaggtgggtgtgggctctg

SEQ ID NO: 29421 - DNA, 20 bp, synthetic construct
  source 1..20: mol_type = other DNA
taagaggtcagaccgtcgtg

SEQ ID NO: 29422 - DNA, 20 bp, synthetic construct
  source 1..20: mol_type = other DNA
tcttctgcagctcctgcacc

SEQ ID NO: 29423 - DNA, 20 bp, synthetic construct
  source 1..20: mol_type = other DNA
agattcagtgactcagaaat

SEQ ID NO: 29424 - DNA, 20 bp, synthetic construct
  source 1..20: mol_type = other DNA
ttaagaggtcagaccgtcgt

SEQ ID NO: 29425 - DNA, 20 bp, synthetic construct
  source 1..20: mol_type = other DNA
tcagcttcccgcccaccagc

SEQ ID NO: 29426 - DNA, 20 bp, synthetic construct
  source 1..20: mol_type = other DNA
cttggatcctcaggctctcc

SEQ ID NO: 29427 - DNA, 20 bp, synthetic construct
  source 1..20: mol_type = other DNA
gctgtggccacagctgtgtg

SEQ ID NO: 29428 - DNA, 20 bp, synthetic construct
  source 1..20: mol_type = other DNA
ccaagcatggtaggtgaaca

SEQ ID NO: 29429 - DNA, 20 bp, synthetic construct
  source 1..20: mol_type = other DNA
tggccagcattttcccattg

SEQ ID NO: 29430 - DNA, 20 bp, synthetic construct
  source 1..20: mol_type = other DNA
gagcaccaggtgggggaaga

SEQ ID NO: 29431 - DNA, 20 bp, synthetic construct
  source 1..20: mol_type = other DNA
tccagtaccaggagagcctg

SEQ ID NO: 29432 - DNA, 20 bp, synthetic construct
  source 1..20: mol_type = other DNA
aacgatcaccaccactggca

SEQ ID NO: 29433 - DNA, 20 bp, synthetic construct
  source 1..20: mol_type = other DNA
ggccgaagtgcagagcaacc

SEQ ID NO: 29434 - DNA, 20 bp, synthetic construct
  source 1..20: mol_type = other DNA
caggagagcctgaggatcca

SEQ ID NO: 29435 - DNA, 20 bp, synthetic construct
  source 1..20: mol_type = other DNA
atacaagctcagcagctcca

SEQ ID NO: 29436 - DNA, 20 bp, synthetic construct
  source 1..20: mol_type = other DNA
tgggtcttcaggacctgagg

SEQ ID NO: 29437 - DNA, 20 bp, synthetic construct
  source 1..20: mol_type = other DNA
ggcctgctgctcactgatga

SEQ ID NO: 29438 - DNA, 20 bp, synthetic construct
  source 1..20: mol_type = other DNA
caatgatgaacgtgctgcag

SEQ ID NO: 29439 - DNA, 20 bp, synthetic construct
  source 1..20: mol_type = other DNA
ccgaatggagaagtctctgg

SEQ ID NO: 29440 - DNA, 20 bp, synthetic construct
  source 1..20: mol_type = other DNA
gcagaagaaggcagagcacc

SEQ ID NO: 29441 - DNA, 20 bp, synthetic construct
  source 1..20: mol_type = other DNA
tgaggatccaaggtgaggcg

SEQ ID NO: 29442 - DNA, 20 bp, synthetic construct
  source 1..20: mol_type = other DNA
gcagcagtcacctggtcacc

SEQ ID NO: 29443 - DNA, 20 bp, synthetic construct
  source 1..20: mol_type = other DNA
gcggtcggctagggaccgaa

SEQ ID NO: 29444 - DNA, 20 bp, synthetic construct
  source 1..20: mol_type = other DNA
gctggcccagctgagccccc

SEQ ID NO: 29445 - DNA, 20 bp, synthetic construct
  source 1..20: mol_type = other DNA
gaaccggcagcagatccgca

SEQ ID NO: 29446 - DNA, 20 bp, synthetic construct
  source 1..20: mol_type = other DNA
gaagaaggcagagcaccagg

SEQ ID NO: 29447 - DNA, 20 bp, synthetic construct
  source 1..20: mol_type = other DNA
gtctcccaagcggtcggcta

SEQ ID NO: 29448 - DNA, 20 bp, synthetic construct
  source 1..20: mol_type = other DNA
ggtaattcaagtctcccaag

SEQ ID NO: 29449 - DNA, 20 bp, synthetic construct
  source 1..20: mol_type = other DNA
cacacccacctggagctgtg

SEQ ID NO: 29450 - DNA, 20 bp, synthetic construct
  source 1..20: mol_type = other DNA
cacgtatgaccgctgcccca

SEQ ID NO: 29451 - DNA, 20 bp, synthetic construct
  source 1..20: mol_type = other DNA
aagaaggcagagcaccaggt

SEQ ID NO: 29452 - DNA, 20 bp, synthetic construct
  source 1..20: mol_type = other DNA
cgggaacggcgggccccccg

SEQ ID NO: 29453 - DNA, 20 bp, synthetic construct
  source 1..20: mol_type = other DNA
caccaggccctccaggagct

SEQ ID NO: 29454 - DNA, 20 bp, synthetic construct
  source 1..20: mol_type = other DNA
gcagtaccgcgtggtgagtg

SEQ ID NO: 29455 - DNA, 20 bp, synthetic construct
  source 1..20: mol_type = other DNA
cggcagcagctggccgggaa

SEQ ID NO: 29456 - DNA, 20 bp, synthetic construct
  source 1..20: mol_type = other DNA
ggggtcacgattgtgcgtgc

SEQ ID NO: 29457 - DNA, 20 bp, synthetic construct
  source 1..20: mol_type = other DNA
taaggccacccagctcctgg

SEQ ID NO: 29458 - DNA, 20 bp, synthetic construct
  source 1..20: mol_type = other DNA
agcaccaggtgggggaagat

SEQ ID NO: 29459 - DNA, 20 bp, synthetic construct
  source 1..20: mol_type = other DNA
gatgatggtggccttcacct

SEQ ID NO: 29460 - DNA, 20 bp, synthetic construct
  source 1..20: mol_type = other DNA
tgtggccacagcactttgtc

SEQ ID NO: 29461 - DNA, 20 bp, synthetic construct
  source 1..20: mol_type = other DNA
acacagctccaggtgggtgt

SEQ ID NO: 29462 - DNA, 20 bp, synthetic construct
  source 1..20: mol_type = other DNA
gtagcagactcgcagggaac

SEQ ID NO: 29463 - DNA, 20 bp, synthetic construct
  source 1..20: mol_type = other DNA
caggaacacgaggttctcct

SEQ ID NO: 29464 - DNA, 20 bp, synthetic construct
  source 1..20: mol_type = other DNA
aaaaaagctgcagcagactc

SEQ ID NO: 29465 - DNA, 20 bp, synthetic construct
  source 1..20: mol_type = other DNA
ctcggccagctcctgaggga

SEQ ID NO: 29466 - DNA, 20 bp, synthetic construct
  source 1..20: mol_type = other DNA
cagctcgtcatccaggatga

SEQ ID NO: 29467 - DNA, 20 bp, synthetic construct
  source 1..20: mol_type = other DNA
tcaagatctactgagtccct

SEQ ID NO: 29468 - DNA, 20 bp, synthetic construct
  source 1..20: mol_type = other DNA
tgcagccactgtgcgcctgc

SEQ ID NO: 29469 - DNA, 20 bp, synthetic construct
  source 1..20: mol_type = other DNA
gtctaaaaagacacaagaga

SEQ ID NO: 29470 - DNA, 20 bp, synthetic construct
  source 1..20: mol_type = other DNA
ccacttcaggaatatggtga

SEQ ID NO: 29471 - DNA, 20 bp, synthetic construct
  source 1..20: mol_type = other DNA
gaacgatcaccaccactggc

SEQ ID NO: 29472 - DNA, 20 bp, synthetic construct
  source 1..20: mol_type = other DNA
gtcactgaatctcaggagga

SEQ ID NO: 29473 - DNA, 20 bp, synthetic construct
  source 1..20: mol_type = other DNA
agaatcaaacttccaagcaa

SEQ ID NO: 29474 - DNA, 20 bp, synthetic construct
  source 1..20: mol_type = other DNA
acacgaggttctccttggtc

SEQ ID NO: 29475 - DNA, 20 bp, synthetic construct
  source 1..20: mol_type = other DNA
ttagaccctgtccctgccag

SEQ ID NO: 29476 - DNA, 20 bp, synthetic construct
  source 1..20: mol_type = other DNA
ctgctgctcactgatgatgg

SEQ ID NO: 29477 - DNA, 20 bp, synthetic construct
  source 1..20: mol_type = other DNA
ttggcggcatcaccattgct

SEQ ID NO: 29478 - DNA, 20 bp, synthetic construct
  source 1..20: mol_type = other DNA
gaacgtgctgcaggggacac

SEQ ID NO: 29479 - DNA, 20 bp, synthetic construct
  source 1..20: mol_type = other DNA
ttgagcgcctcacacagctg

SEQ ID NO: 29480 - DNA, 20 bp, synthetic construct
  source 1..20: mol_type = other DNA
ttatctcagccctggtgacc

SEQ ID NO: 29481 - DNA, 20 bp, synthetic construct
  source 1..20: mol_type = other DNA
gagaagtctctggtggtaaa

SEQ ID NO: 29482 - DNA, 20 bp, synthetic construct
  source 1..20: mol_type = other DNA
ttatctacgtgtttcctgat

SEQ ID NO: 29483 - DNA, 20 bp, synthetic construct
  source 1..20: mol_type = other DNA
caccaccactggcagggaca

SEQ ID NO: 29484 - DNA, 20 bp, synthetic construct
  source 1..20: mol_type = other DNA
aaaacccatcttcccccacc

SEQ ID NO: 29485 - DNA, 20 bp, synthetic construct
  source 1..20: mol_type = other DNA
tacaaaccccaaaatggccc

SEQ ID NO: 29486 - DNA, 20 bp, synthetic construct
  source 1..20: mol_type = other DNA
gggccaaactgagctagagg

SEQ ID NO: 29487 - DNA, 20 bp, synthetic construct
  source 1..20: mol_type = other DNA
aagatctactgagtccctag

SEQ ID NO: 29488 - DNA, 20 bp, synthetic construct
  source 1..20: mol_type = other DNA
agtccctgaaacgaattaag

SEQ ID NO: 29489 - DNA, 20 bp, synthetic construct
  source 1..20: mol_type = other DNA
ggtgcaggagctgcagaaga

SEQ ID NO: 29490 - DNA, 20 bp, synthetic construct
  source 1..20: mol_type = other DNA
tccactgactgtccattggc

SEQ ID NO: 29491 - DNA, 20 bp, synthetic construct
  source 1..20: mol_type = other DNA
tagtgcccacttcaggaata

SEQ ID NO: 29492 - DNA, 20 bp, synthetic construct
  source 1..20: mol_type = other DNA
ggaattacactttctggcaa

SEQ ID NO: 29493 - DNA, 20 bp, synthetic construct
  source 1..20: mol_type = other DNA
tgcgacggccactgttctct

SEQ ID NO: 29494 - DNA, 20 bp, synthetic construct
  source 1..20: mol_type = other DNA
gttaccagtagcagactcgc

SEQ ID NO: 29495 - DNA, 20 bp, synthetic construct
  source 1..20: mol_type = other DNA
gaacgcatctgcagatgccg

SEQ ID NO: 29496 - DNA, 20 bp, synthetic construct
  source 1..20: mol_type = other DNA
atgatggtggccttcacctg

SEQ ID NO: 29497 - DNA, 20 bp, synthetic construct
  source 1..20: mol_type = other DNA
gtcgcagctcctcaaacgtc

SEQ ID NO: 29498 - DNA, 20 bp, synthetic construct
  source 1..20: mol_type = other DNA
ggaggcctggttgcagcgtg

SEQ ID NO: 29499 - DNA, 20 bp, synthetic construct
  source 1..20: mol_type = other DNA
attaagaggtcagaccgtcg

SEQ ID NO: 29500 - DNA, 20 bp, synthetic construct
  source 1..20: mol_type = other DNA
ggagctcctgggccggccaa

SEQ ID NO: 29501 - DNA, 20 bp, synthetic construct
  source 1..20: mol_type = other DNA
actttctggcaatggtttga

SEQ ID NO: 29502 - DNA, 20 bp, synthetic construct
  source 1..20: mol_type = other DNA
tcctccactgggccggggat

SEQ ID NO: 29503 - DNA, 20 bp, synthetic construct
  source 1..20: mol_type = other DNA
gcaatggtttgacggtgtga

SEQ ID NO: 29504 - DNA, 20 bp, synthetic construct
  source 1..20: mol_type = other DNA
actttgtcaggcacggcaaa

SEQ ID NO: 29505 - DNA, 20 bp, synthetic construct
  source 1..20: mol_type = other DNA
tttgaatcccagttcagtgt

SEQ ID NO: 29506 - DNA, 20 bp, synthetic construct
  source 1..20: mol_type = other DNA
taatccacaggagaacatta

SEQ ID NO: 29507 - DNA, 20 bp, synthetic construct
  source 1..20: mol_type = other DNA
tcaagcctcattggaatgat

SEQ ID NO: 29508 - DNA, 20 bp, synthetic construct
  source 1..20: mol_type = other DNA
agcattttcccattgaggtg

SEQ ID NO: 29509 - DNA, 20 bp, synthetic construct
  source 1..20: mol_type = other DNA
gtttctgcgccaggaacacg

SEQ ID NO: 29510 - DNA, 20 bp, synthetic construct
  source 1..20: mol_type = other DNA
catctggcttgttaatgagt

SEQ ID NO: 29511 - DNA, 20 bp, synthetic construct
  source 1..20: mol_type = other DNA
accaggagaatttaccagga

SEQ ID NO: 29512 - DNA, 20 bp, synthetic construct
  source 1..20: mol_type = other DNA
gcaccaggccctccaggagc

SEQ ID NO: 29513 - DNA, 20 bp, synthetic construct
  source 1..20: mol_type = other DNA
tcccggctcagacgctcctg

SEQ ID NO: 29514 - DNA, 20 bp, synthetic construct
  source 1..20: mol_type = other DNA
ggaccagctccatggggcag

SEQ ID NO: 29515 - DNA, 20 bp, synthetic construct
  source 1..20: mol_type = other DNA
gaagtaggtggcattcttgt

SEQ ID NO: 29516 - DNA, 20 bp, synthetic construct
  source 1..20: mol_type = other DNA
gtcctggtcccagttcaaca

SEQ ID NO: 29517 - DNA, 20 bp, synthetic construct
  source 1..20: mol_type = other DNA
acgagctgatccagtggaag

SEQ ID NO: 29518 - DNA, 20 bp, synthetic construct
  source 1..20: mol_type = other DNA
agtctcccaagcggtcggct

SEQ ID NO: 29519 - DNA, 20 bp, synthetic construct
  source 1..20: mol_type = other DNA
tccgtcctggtaaattctcc

SEQ ID NO: 29520 - DNA, 20 bp, synthetic construct
  source 1..20: mol_type = other DNA
acgtgctacagtcctggtaa

SEQ ID NO: 29521 - DNA, 20 bp, synthetic construct
  source 1..20: mol_type = other DNA
gccagctcctgagggaaggg

SEQ ID NO: 29522 - DNA, 20 bp, synthetic construct
  source 1..20: mol_type = other DNA
ctactcattaacaagccaga

SEQ ID NO: 29523 - DNA, 20 bp, synthetic construct
  source 1..20: mol_type = other DNA
caacaatgtgagtgtcccat

SEQ ID NO: 29524 - DNA, 20 bp, synthetic construct
  source 1..20: mol_type = other DNA
gctaccctgggaacatatgg

SEQ ID NO: 29525 - DNA, 20 bp, synthetic construct
  source 1..20: mol_type = other DNA
tcggccagctcctgagggaa

SEQ ID NO: 29526 - DNA, 20 bp, synthetic construct
  source 1..20: mol_type = other DNA
agaagaccctgcagctgctg

SEQ ID NO: 29527 - DNA, 20 bp, synthetic construct
  source 1..20: mol_type = other DNA
ccacagcactttgtcaggca

SEQ ID NO: 29528 - DNA, 20 bp, synthetic construct
  source 1..20: mol_type = other DNA
gcagcagctgcagggtcttc

SEQ ID NO: 29529 - DNA, 20 bp, synthetic construct
  source 1..20: mol_type = other DNA
ccctggatcaccaaggacaa

SEQ ID NO: 29530 - DNA, 20 bp, synthetic construct
  source 1..20: mol_type = other DNA
gtctgggtcttcaggacctg

SEQ ID NO: 29531 - DNA, 20 bp, synthetic construct
  source 1..20: mol_type = other DNA
actgggaccaggacacagac

SEQ ID NO: 29532 - DNA, 20 bp, synthetic construct
  source 1..20: mol_type = other DNA
cggcccagtggaggagatgc

SEQ ID NO: 29533 - DNA, 20 bp, synthetic construct
  source 1..20: mol_type = other DNA
gttccctgcgagtctgctac

SEQ ID NO: 29534 - DNA, 20 bp, synthetic construct
  source 1..20: mol_type = other DNA
ctatgccacacagctccagg

SEQ ID NO: 29535 - DNA, 20 bp, synthetic construct
  source 1..20: mol_type = other DNA
tgcggcattatttatcccag

SEQ ID NO: 29536 - DNA, 20 bp, synthetic construct
  source 1..20: mol_type = other DNA
gaagccacagatcaagcaag

SEQ ID NO: 29537 - DNA, 20 bp, synthetic construct
  source 1..20: mol_type = other DNA
ttcagtgactcagaaattgg

SEQ ID NO: 29538 - DNA, 20 bp, synthetic construct
  source 1..20: mol_type = other DNA
gagcctgaggatccaaggtg

SEQ ID NO: 29539 - DNA, 20 bp, synthetic construct
  source 1..20: mol_type = other DNA
ttggcagctaaagctgttga

SEQ ID NO: 29540 - DNA, 20 bp, synthetic construct
  source 1..20: mol_type = other DNA
aacgcatctgcagatgccgg

SEQ ID NO: 29541 - DNA, 20 bp, synthetic construct
  source 1..20: mol_type = other DNA
cacccagctcctggagggcc

SEQ ID NO: 29542 - DNA, 20 bp, synthetic construct
  source 1..20: mol_type = other DNA
tcaacagctttagctgccaa

SEQ ID NO: 29543 - DNA, 20 bp, synthetic construct
  source 1..20: mol_type = other DNA
agaaccggcagcagatccgc

SEQ ID NO: 29544 - DNA, 20 bp, synthetic construct
  source 1..20: mol_type = other DNA
gaaggcagagcaccaggtgg

SEQ ID NO: 29545 - DNA, 20 bp, synthetic construct
  source 1..20: mol_type = other DNA
gcccaccagcaggcgcacag

SEQ ID NO: 29546 - DNA, 20 bp, synthetic construct
  source 1..20: mol_type = other DNA
catgtacccacagaagtagg

SEQ ID NO: 29547 - DNA, 20 bp, synthetic construct
  source 1..20: mol_type = other DNA
ttaccagtagcagactcgca

SEQ ID NO: 29548 - DNA, 20 bp, synthetic construct
  source 1..20: mol_type = other DNA
tacagtcctggtaatggtgt

SEQ ID NO: 29549 - DNA, 20 bp, synthetic construct
  source 1..20: mol_type = other DNA
ccgtgcctgacaaagtgctg

SEQ ID NO: 29550 - DNA, 20 bp, synthetic construct
  source 1..20: mol_type = other DNA
tccctgagtaagtgtccagg

SEQ ID NO: 29551 - DNA, 20 bp, synthetic construct
  source 1..20: mol_type = other DNA
ccgagatcatctggcagaac

SEQ ID NO: 29552 - DNA, 20 bp, synthetic construct
  source 1..20: mol_type = other DNA
gcacctcaatgggaaaatgc

SEQ ID NO: 29553 - DNA, 20 bp, synthetic construct
  source 1..20: mol_type = other DNA
agaaggcagagcaccaggtg

SEQ ID NO: 29554 - DNA, 20 bp, synthetic construct
  source 1..20: mol_type = other DNA
atcaacagctttagctgcca

SEQ ID NO: 29555 - DNA, 20 bp, synthetic construct
  source 1..20: mol_type = other DNA
tatgccacacagctccaggt

SEQ ID NO: 29556 - DNA, 20 bp, synthetic construct
  source 1..20: mol_type = other DNA
attcaagtctcccaagcggt

SEQ ID NO: 29557 - DNA, 20 bp, synthetic construct
  source 1..20: mol_type = other DNA
cccacttcaggaatatggtg

SEQ ID NO: 29558 - DNA, 20 bp, synthetic construct
  source 1..20: mol_type = other DNA
tgacctcttaattcgtttca

SEQ ID NO: 29559 - DNA, 20 bp, synthetic construct
  source 1..20: mol_type = other DNA
ggccaaactgagctagagga

SEQ ID NO: 29560 - DNA, 20 bp, synthetic construct
  source 1..20: mol_type = other DNA
ctcaggaggaaggtcccatc

SEQ ID NO: 29561 - DNA, 20 bp, synthetic construct
  source 1..20: mol_type = other DNA
ccctcaccatattcctgaag

SEQ ID NO: 29562 - DNA, 20 bp, synthetic construct
  source 1..20: mol_type = other DNA
agaccgtcgtggggcagagt

SEQ ID NO: 29563 - DNA, 20 bp, synthetic construct
  source 1..20: mol_type = other DNA
caacaacagcagcagccacc

SEQ ID NO: 29564 - DNA, 20 bp, synthetic construct
  source 1..20: mol_type = other DNA
tcctggtaaattctcctggt

SEQ ID NO: 29565 - DNA, 20 bp, synthetic construct
  source 1..20: mol_type = other DNA
cagccaggacaacaatgcga

SEQ ID NO: 29566 - DNA, 20 bp, synthetic construct
  source 1..20: mol_type = other DNA
gaatcccagttcagtgttgg

SEQ ID NO: 29567 - DNA, 20 bp, synthetic construct
  source 1..20: mol_type = other DNA
aatggcaccctgccctgaga

SEQ ID NO: 29568 - DNA, 20 bp, synthetic construct
  source 1..20: mol_type = other DNA
tcaccaccactggcagggac

SEQ ID NO: 29569 - DNA, 20 bp, synthetic construct
  source 1..20: mol_type = other DNA
ctgagtcactgaatctcagg

SEQ ID NO: 29570 - DNA, 20 bp, synthetic construct
  source 1..20: mol_type = other DNA
cagcagctggccgggaacgg

SEQ ID NO: 29571 - DNA, 20 bp, synthetic construct
  source 1..20: mol_type = other DNA
agacatgatctgggacttgg

SEQ ID NO: 29572 - DNA, 20 bp, synthetic construct
  source 1..20: mol_type = other DNA
gaccagcggaggcttggctg

SEQ ID NO: 29573 - DNA, 20 bp, synthetic construct
  source 1..20: mol_type = other DNA
tccccctaggagatcctgct

SEQ ID NO: 29574 - DNA, 20 bp, synthetic construct
  source 1..20: mol_type = other DNA
caatctctgagtcgctgaag

SEQ ID NO: 29575 - DNA, 20 bp, synthetic construct
  source 1..20: mol_type = other DNA
cacacctggggccaggacag

SEQ ID NO: 29576 - DNA, 20 bp, synthetic construct
  source 1..20: mol_type = other DNA
aacagctgaacagatgggta

SEQ ID NO: 29577 - DNA, 20 bp, synthetic construct
  source 1..20: mol_type = other DNA
agcttctcaagaagatcaag

SEQ ID NO: 29578 - DNA, 20 bp, synthetic construct
  source 1..20: mol_type = other DNA
gcggaggagaaaggttccgt

SEQ ID NO: 29579 - DNA, 20 bp, synthetic construct
  source 1..20: mol_type = other DNA
cttcagcgactcagagattg

SEQ ID NO: 29580 - DNA, 20 bp, synthetic construct
  source 1..20: mol_type = other DNA
gcagtggtttgatggtgtcc

SEQ ID NO: 29581 - DNA, 20 bp, synthetic construct
  source 1..20: mol_type = other DNA
ccagcttacgctccagcccc

SEQ ID NO: 29582 - DNA, 20 bp, synthetic construct
  source 1..20: mol_type = other DNA
tggcctcaccatcctggccc

SEQ ID NO: 29583 - DNA, 20 bp, synthetic construct
  source 1..20: mol_type = other DNA
ctccggaaagcctcatcctt

SEQ ID NO: 29584 - DNA, 20 bp, synthetic construct
  source 1..20: mol_type = other DNA
ctctatctgtggagagccta

SEQ ID NO: 29585 - DNA, 20 bp, synthetic construct
  source 1..20: mol_type = other DNA
atgccaaagccactatcctg

SEQ ID NO: 29586 - DNA, 20 bp, synthetic construct
  source 1..20: mol_type = other DNA
ccatcaagatgaccgtggaa

SEQ ID NO: 29587 - DNA, 20 bp, synthetic construct
  source 1..20: mol_type = other DNA
ctcctgcagtagcatggcca

SEQ ID NO: 29588 - DNA, 20 bp, synthetic construct
  source 1..20: mol_type = other DNA
cggttcacctggagctggat

SEQ ID NO: 29589 - DNA, 20 bp, synthetic construct
  source 1..20: mol_type = other DNA
ggatctcctagggggagagg

SEQ ID NO: 29590 - DNA, 20 bp, synthetic construct
  source 1..20: mol_type = other DNA
gaccttgttgaactgcgacc

SEQ ID NO: 29591 - DNA, 20 bp, synthetic construct
  source 1..20: mol_type = other DNA
gagccagccctggtgagtcc

SEQ ID NO: 29592 - DNA, 20 bp, synthetic construct
  source 1..20: mol_type = other DNA
gcccaacctctcctggagtg

SEQ ID NO: 29593 - DNA, 20 bp, synthetic construct
  source 1..20: mol_type = other DNA
cggggaatacctggtgacga

SEQ ID NO: 29594 - DNA, 20 bp, synthetic construct
  source 1..20: mol_type = other DNA
cctgttcaagaacctggtga

SEQ ID NO: 29595 - DNA, 20 bp, synthetic construct
  source 1..20: mol_type = other DNA
tagcccaacctctcctggag

SEQ ID NO: 29596 - DNA, 20 bp, synthetic construct
  source 1..20: mol_type = other DNA
tcagtgggaggcagcagagg

SEQ ID NO: 29597 - DNA, 20 bp, synthetic construct
  source 1..20: mol_type = other DNA
gaccaccaggggcagagaca

SEQ ID NO: 29598 - DNA, 20 bp, synthetic construct
  source 1..20: mol_type = other DNA
gcgtaagctgggattggacc

SEQ ID NO: 29599 - DNA, 20 bp, synthetic construct
  source 1..20: mol_type = other DNA
gcaggatctcctagggggag

SEQ ID NO: 29600 - DNA, 20 bp, synthetic construct
  source 1..20: mol_type = other DNA
acggttcacctggagctgga

SEQ ID NO: 29601 - DNA, 20 bp, synthetic construct
  source 1..20: mol_type = other DNA
ttgaggtggggcaggagggg

SEQ ID NO: 29602 - DNA, 20 bp, synthetic construct
  source 1..20: mol_type = other DNA
ggacctcactaagcttctcc

SEQ ID NO: 29603 - DNA, 20 bp, synthetic construct
  source 1..20: mol_type = other DNA
gagaagctgtgggtggggtg

SEQ ID NO: 29604 - DNA, 20 bp, synthetic construct
  source 1..20: mol_type = other DNA
gccatggacgatgaccacca

SEQ ID NO: 29605 - DNA, 20 bp, synthetic construct
  source 1..20: mol_type = other DNA
cagctccttacaccatatct

SEQ ID NO: 29606 - DNA, 20 bp, synthetic construct
  source 1..20: mol_type = other DNA
tgaagttcatggctgaggtg

SEQ ID NO: 29607 - DNA, 20 bp, synthetic construct
  source 1..20: mol_type = other DNA
ccccaggtgtgaaagcctgg

SEQ ID NO: 29608 - DNA, 20 bp, synthetic construct
  source 1..20: mol_type = other DNA
cctttccacggtcatcttga

SEQ ID NO: 29609 - DNA, 20 bp, synthetic construct
  source 1..20: mol_type = other DNA
ccaggaagcaactgggagtg

SEQ ID NO: 29610 - DNA, 20 bp, synthetic construct
  source 1..20: mol_type = other DNA
cctgaagttcatggctgagg

SEQ ID NO: 29611 - DNA, 20 bp, synthetic construct
  source 1..20: mol_type = other DNA
acctcaccaaacgctgtctc

SEQ ID NO: 29612 - DNA, 20 bp, synthetic construct
  source 1..20: mol_type = other DNA
gacaggtctttggcagagaa

SEQ ID NO: 29613 - DNA, 20 bp, synthetic construct
  source 1..20: mol_type = other DNA
tttcctcaccatctcagaga

SEQ ID NO: 29614 - DNA, 20 bp, synthetic construct
  source 1..20: mol_type = other DNA
gatcaagcggtgtgagcgga

SEQ ID NO: 29615 - DNA, 20 bp, synthetic construct
  source 1..20: mol_type = other DNA
agggcagagcagcagttccc

SEQ ID NO: 29616 - DNA, 20 bp, synthetic construct
  source 1..20: mol_type = other DNA
ttagtgaggtcctgttcagt

SEQ ID NO: 29617 - DNA, 20 bp, synthetic construct
  source 1..20: mol_type = other DNA
gcccagcaggatctcctagg

SEQ ID NO: 29618 - DNA, 20 bp, synthetic construct
  source 1..20: mol_type = other DNA
gccagcttcacacttggccc

SEQ ID NO: 29619 - DNA, 20 bp, synthetic construct
  source 1..20: mol_type = other DNA
ctccaggagaggttgggcta

SEQ ID NO: 29620 - DNA, 20 bp, synthetic construct
  source 1..20: mol_type = other DNA
acatcagcacccttgaggtg

SEQ ID NO: 29621 - DNA, 20 bp, synthetic construct
  source 1..20: mol_type = other DNA
gtttcacacatcttctccca

SEQ ID NO: 29622 - DNA, 20 bp, synthetic construct
  source 1..20: mol_type = other DNA
gtcccacaggatagtggctt

SEQ ID NO: 29623 - DNA, 20 bp, synthetic construct
  source 1..20: mol_type = other DNA
cagagaaggcattgtcccac

SEQ ID NO: 29624 - DNA, 20 bp, synthetic construct
  source 1..20: mol_type = other DNA
agatcttctgggccaggaag

SEQ ID NO: 29625 - DNA, 20 bp, synthetic construct
  source 1..20: mol_type = other DNA
gctcacgcttgtagtggctc

SEQ ID NO: 29626 - DNA, 20 bp, synthetic construct
  source 1..20: mol_type = other DNA
agtgctttctctgccagggg

SEQ ID NO: 29627 - DNA, 20 bp, synthetic construct
  source 1..20: mol_type = other DNA
ggaagcaactgggagtgagg

SEQ ID NO: 29628 - DNA, 20 bp, synthetic construct
  source 1..20: mol_type = other DNA
ccagctacagcaggaggtag

SEQ ID NO: 29629 - DNA, 20 bp, synthetic construct
  source 1..20: mol_type = other DNA
ccaggaagaggaagtgctct

SEQ ID NO: 29630 - DNA, 20 bp, synthetic construct
  source 1..20: mol_type = other DNA
gaccccacagagacatgatc

SEQ ID NO: 29631 - DNA, 20 bp, synthetic construct
  source 1..20: mol_type = other DNA
acaggaatcgaactccagcc

SEQ ID NO: 29632 - DNA, 20 bp, synthetic construct
  source 1..20: mol_type = other DNA
cagcagcagctggcagggaa

SEQ ID NO: 29633 - DNA, 20 bp, synthetic construct
  source 1..20: mol_type = other DNA
tccgagaagccctgcagaag

SEQ ID NO: 29634 - DNA, 20 bp, synthetic construct
  source 1..20: mol_type = other DNA
agtcacccagaagatgccgc

SEQ ID NO: 29635 - DNA, 20 bp, synthetic construct
  source 1..20: mol_type = other DNA
tctgtagagcatatatcaga

SEQ ID NO: 29636 - DNA, 20 bp, synthetic construct
  source 1..20: mol_type = other DNA
tgccaaagccactatcctgt

SEQ ID NO: 29637 - DNA, 20 bp, synthetic construct
  source 1..20: mol_type = other DNA
cactcccagttgcttcctgg

SEQ ID NO: 29638 - DNA, 20 bp, synthetic construct
  source 1..20: mol_type = other DNA
tcttcttgagaagctgtggg

SEQ ID NO: 29639 - DNA, 20 bp, synthetic construct
  source 1..20: mol_type = other DNA
gaagactcagaccaagttcc

SEQ ID NO: 29640 - DNA, 20 bp, synthetic construct
  source 1..20: mol_type = other DNA
cagattcctcatctgtaaaa

SEQ ID NO: 29641 - DNA, 20 bp, synthetic construct
  source 1..20: mol_type = other DNA
agtggaaaggcattggcaag

SEQ ID NO: 29642 - DNA, 20 bp, synthetic construct
  source 1..20: mol_type = other DNA
ttctgtagagcatatatcag

SEQ ID NO: 29643 - DNA, 20 bp, synthetic construct
  source 1..20: mol_type = other DNA
gcctggccgggatgaaggag

SEQ ID NO: 29644 - DNA, 20 bp, synthetic construct
  source 1..20: mol_type = other DNA
catgtcatccggggccagga

SEQ ID NO: 29645 - DNA, 20 bp, synthetic construct
  source 1..20: mol_type = other DNA
gctctggggtaggaagtggt

SEQ ID NO: 29646 - DNA, 20 bp, synthetic construct
  source 1..20: mol_type = other DNA
gtcacatctgagcagagcag

SEQ ID NO: 29647 - DNA, 20 bp, synthetic construct
  source 1..20: mol_type = other DNA
gatcatgtctctgtggggtc

SEQ ID NO: 29648 - DNA, 20 bp, synthetic construct
  source 1..20: mol_type = other DNA
caggaggtaggggcggctgg

SEQ ID NO: 29649 - DNA, 20 bp, synthetic construct
  source 1..20: mol_type = other DNA
agcccaacctctcctggagt

SEQ ID NO: 29650 - DNA, 20 bp, synthetic construct
  source 1..20: mol_type = other DNA
cgcttcagcgactcagagat

SEQ ID NO: 29651 - DNA, 20 bp, synthetic construct
  source 1..20: mol_type = other DNA
accaggacacagaacggtgc

SEQ ID NO: 29652 - DNA, 20 bp, synthetic construct
  source 1..20: mol_type = other DNA
ggctgcctctagctctccag

SEQ ID NO: 29653 - DNA, 20 bp, synthetic construct
  source 1..20: mol_type = other DNA
actccaggagaggttgggct

SEQ ID NO: 29654 - DNA, 20 bp, synthetic construct
  source 1..20: mol_type = other DNA
gcttcagcgactcagagatt

SEQ ID NO: 29655 - DNA, 20 bp, synthetic construct
  source 1..20: mol_type = other DNA
tgggggtgaggctggtcaaa

SEQ ID NO: 29656 - DNA, 20 bp, synthetic construct
  source 1..20: mol_type = other DNA
cccccagtgagcgaatggac

SEQ ID NO: 29657 - DNA, 20 bp, synthetic construct
  source 1..20: mol_type = other DNA
gatgaagccaatgatcagcc

SEQ ID NO: 29658 - DNA, 20 bp, synthetic construct
  source 1..20: mol_type = other DNA
agagctccagatgcctacca

SEQ ID NO: 29659 - DNA, 20 bp, synthetic construct
  source 1..20: mol_type = other DNA
accggtcagaccagtagctc

SEQ ID NO: 29660 - DNA, 20 bp, synthetic construct
  source 1..20: mol_type = other DNA
gtagcatggccagggcctat

SEQ ID NO: 29661 - DNA, 20 bp, synthetic construct
  source 1..20: mol_type = other DNA
ccctcaccaggttcttgaac

SEQ ID NO: 29662 - DNA, 20 bp, synthetic construct
  source 1..20: mol_type = other DNA
gatcagcctggccgggatga

SEQ ID NO: 29663 - DNA, 20 bp, synthetic construct
  source 1..20: mol_type = other DNA
ctacaagcgtgagctggaac

SEQ ID NO: 29664 - DNA, 20 bp, synthetic construct
  source 1..20: mol_type = other DNA
cttcttctcaatgagcccga

SEQ ID NO: 29665 - DNA, 20 bp, synthetic construct
  source 1..20: mol_type = other DNA
agaagatcaagcggtgtgag

SEQ ID NO: 29666 - DNA, 20 bp, synthetic construct
  source 1..20: mol_type = other DNA
acccttgaggtggggcagga

SEQ ID NO: 29667 - DNA, 20 bp, synthetic construct
  source 1..20: mol_type = other DNA
atccagctccaggtgaaccg

SEQ ID NO: 29668 - DNA, 20 bp, synthetic construct
  source 1..20: mol_type = other DNA
gtcgctgaagcggaggagaa

SEQ ID NO: 29669 - DNA, 20 bp, synthetic construct
  source 1..20: mol_type = other DNA
ggctggatgttctctatctg

SEQ ID NO: 29670 - DNA, 20 bp, synthetic construct
  source 1..20: mol_type = other DNA
tccagtgctttctctgccag

SEQ ID NO: 29671 - DNA, 20 bp, synthetic construct
  source 1..20: mol_type = other DNA
ctgaccagcggaggcttggc

SEQ ID NO: 29672 - DNA, 20 bp, synthetic construct
  source 1..20: mol_type = other DNA
cacaaagggcacgcggtcct

SEQ ID NO: 29673 - DNA, 20 bp, synthetic construct
  source 1..20: mol_type = other DNA
gtccaccaggctttcacacc

SEQ ID NO: 29674 - DNA, 20 bp, synthetic construct
  source 1..20: mol_type = other DNA
ttcttgagaagctgtgggtg

SEQ ID NO: 29675 - DNA, 20 bp, synthetic construct
  source 1..20: mol_type = other DNA
tcctgcagggagttcctggt

SEQ ID NO: 29676 - DNA, 20 bp, synthetic construct
  source 1..20: mol_type = other DNA
agctaccatcaagatgaccg

SEQ ID NO: 29677 - DNA, 20 bp, synthetic construct
  source 1..20: mol_type = other DNA
aggaggtaggggcggctggt

SEQ ID NO: 29678 - DNA, 20 bp, synthetic construct
  source 1..20: mol_type = other DNA
gccagggcctatgggcagag

SEQ ID NO: 29679 - DNA, 20 bp, synthetic construct
  source 1..20: mol_type = other DNA
ggtgacagagaagcaggcgc

SEQ ID NO: 29680 - DNA, 20 bp, synthetic construct
  source 1..20: mol_type = other DNA
ccagatatggtgtaaggagc

SEQ ID NO: 29681 - DNA, 20 bp, synthetic construct
  source 1..20: mol_type = other DNA
ggttcacctggagctggatg

SEQ ID NO: 29682 - DNA, 20 bp, synthetic construct
  source 1..20: mol_type = other DNA
gctgggaataaatgtccacc

SEQ ID NO: 29683 - DNA, 20 bp, synthetic construct
  source 1..20: mol_type = other DNA
cctcaccaggttcttgaaca

SEQ ID NO: 29684 - DNA, 20 bp, synthetic construct
  source 1..20: mol_type = other DNA
ggccctgtctctgcccctgg

SEQ ID NO: 29685 - DNA, 20 bp, synthetic construct
  source 1..20: mol_type = other DNA
ccacaaagggcacgcggtcc

SEQ ID NO: 29686 - DNA, 20 bp, synthetic construct
  source 1..20: mol_type = other DNA
cggcccagcaggatctccta

SEQ ID NO: 29687 - DNA, 20 bp, synthetic construct
  source 1..20: mol_type = other DNA
ggccctgaccagcggaggct

SEQ ID NO: 29688 - DNA, 20 bp, synthetic construct
  source 1..20: mol_type = other DNA
tgagtcttcagtacctgggg

SEQ ID NO: 29689 - DNA, 20 bp, synthetic construct
  source 1..20: mol_type = other DNA
gacagggcctgaagagggtg

SEQ ID NO: 29690 - DNA, 20 bp, synthetic construct
  source 1..20: mol_type = other DNA
tccggagacagcgtttggtg

SEQ ID NO: 29691 - DNA, 20 bp, synthetic construct
  source 1..20: mol_type = other DNA
ccctgttcaagaacctggtg

SEQ ID NO: 29692 - DNA, 20 bp, synthetic construct
  source 1..20: mol_type = other DNA
gccaggaagaggaagtgctc

SEQ ID NO: 29693 - DNA, 20 bp, synthetic construct
  source 1..20: mol_type = other DNA
tggccccaggtgtgaaagcc

SEQ ID NO: 29694 - DNA, 20 bp, synthetic construct
  source 1..20: mol_type = other DNA
cccttgaggtggggcaggag

SEQ ID NO: 29695 - DNA, 20 bp, synthetic construct
  source 1..20: mol_type = other DNA
gtcctggtcgcagttcaaca

SEQ ID NO: 29696 - DNA, 20 bp, synthetic construct
  source 1..20: mol_type = other DNA
tcactcactgggggtgaggc

SEQ ID NO: 29697 - DNA, 20 bp, synthetic construct
  source 1..20: mol_type = other DNA
catgcagactctgctcagct

SEQ ID NO: 29698 - DNA, 20 bp, synthetic construct
  source 1..20: mol_type = other DNA
gtgtctatcgttattggtgt

SEQ ID NO: 29699 - DNA, 20 bp, synthetic construct
  source 1..20: mol_type = other DNA
tcttccctcaggaactgcaa

SEQ ID NO: 29700 - DNA, 20 bp, synthetic construct
  source 1..20: mol_type = other DNA
aaatgtggagagccaccagg

SEQ ID NO: 29701 - DNA, 20 bp, synthetic construct
  source 1..20: mol_type = other DNA
agcccctcagccccacctgg

SEQ ID NO: 29702 - DNA, 20 bp, synthetic construct
  source 1..20: mol_type = other DNA
ctgatggacgatgatgccaa

SEQ ID NO: 29703 - DNA, 20 bp, synthetic construct
  source 1..20: mol_type = other DNA
tccagctggggtctatgttg

SEQ ID NO: 29704 - DNA, 20 bp, synthetic construct
  source 1..20: mol_type = other DNA
ggatgtggaagaaagtgatg

SEQ ID NO: 29705 - DNA, 20 bp, synthetic construct
  source 1..20: mol_type = other DNA
cttcaggcaagcactgagcg

SEQ ID NO: 29706 - DNA, 20 bp, synthetic construct
  source 1..20: mol_type = other DNA
ggagtccccagaggagccac

SEQ ID NO: 29707 - DNA, 20 bp, synthetic construct
  source 1..20: mol_type = other DNA
gctgctggtggccaaggagg

SEQ ID NO: 29708 - DNA, 20 bp, synthetic construct
  source 1..20: mol_type = other DNA
cgtggcccacagctcttccc

SEQ ID NO: 29709 - DNA, 20 bp, synthetic construct
  source 1..20: mol_type = other DNA
cgaggtgacagcagcattgc

SEQ ID NO: 29710 - DNA, 20 bp, synthetic construct
  source 1..20: mol_type = other DNA
tgccaatggtgatgtggatg

SEQ ID NO: 29711 - DNA, 20 bp, synthetic construct
  source 1..20: mol_type = other DNA
tgaggataagctcatcagcg

SEQ ID NO: 29712 - DNA, 20 bp, synthetic construct
  source 1..20: mol_type = other DNA
ctgggccttgtgcagcctgg

SEQ ID NO: 29713 - DNA, 20 bp, synthetic construct
  source 1..20: mol_type = other DNA
ctagcctgcagagcagtgtt

SEQ ID NO: 29714 - DNA, 20 bp, synthetic construct
  source 1..20: mol_type = other DNA
atgacttccatgccttccac

SEQ ID NO: 29715 - DNA, 20 bp, synthetic construct
  source 1..20: mol_type = other DNA
tgatgagcttatcctcacca

SEQ ID NO: 29716 - DNA, 20 bp, synthetic construct
  source 1..20: mol_type = other DNA
catcatcgtccatcagtttg

SEQ ID NO: 29717 - DNA, 20 bp, synthetic construct
  source 1..20: mol_type = other DNA
cagcgtggaggacctgtgga

SEQ ID NO: 29718 - DNA, 20 bp, synthetic construct
  source 1..20: mol_type = other DNA
gtcttccctcaggaactgca

SEQ ID NO: 29719 - DNA, 20 bp, synthetic construct
  source 1..20: mol_type = other DNA
ctcatcctcactgtgacaca

SEQ ID NO: 29720 - DNA, 20 bp, synthetic construct
  source 1..20: mol_type = other DNA
cgatgatgccaatggtgatg

SEQ ID NO: 29721 - DNA, 20 bp, synthetic construct
  source 1..20: mol_type = other DNA
actgagctgcagcttccgga

SEQ ID NO: 29722 - DNA, 20 bp, synthetic construct
  source 1..20: mol_type = other DNA
ccagacacaccatctccagt

SEQ ID NO: 29723 - DNA, 20 bp, synthetic construct
  source 1..20: mol_type = other DNA
ccatcagtttgtggatgtta

SEQ ID NO: 29724 - DNA, 20 bp, synthetic construct
  source 1..20: mol_type = other DNA
gcagctgacacatgaggtgg

SEQ ID NO: 29725 - DNA, 20 bp, synthetic construct
  source 1..20: mol_type = other DNA
gggagggtactgagaatgag

SEQ ID NO: 29726 - DNA, 20 bp, synthetic construct
  source 1..20: mol_type = other DNA
ttccacatccacatcaccat

SEQ ID NO: 29727 - DNA, 20 bp, synthetic construct
  source 1..20: mol_type = other DNA
tcatcagcgtggaggacctg

SEQ ID NO: 29728 - DNA, 20 bp, synthetic construct
  source 1..20: mol_type = other DNA
acggctcatctgaggaggtt

SEQ ID NO: 29729 - DNA, 20 bp, synthetic construct
  source 1..20: mol_type = other DNA
ggtgaaggtggtggtggtgg

SEQ ID NO: 29730 - DNA, 20 bp, synthetic construct
  source 1..20: mol_type = other DNA
gaaaatgttctatagttttc

(The sequence listing continues in the following parts.)
